United States Patent Application Publication US 2007/0054278 A1 - sequence listing, part 147

SEQ ID NO: 543135 - DNA, 201 bp, Homo sapiens
aattatatgaagaaagttggttactgcatcagtgctgttcaaagatgtggcctctgacctgcccctcagcatcagcagagaccgttagagatgcagtttcycgggcccccttcaggcccaccaattgaatcagagtcttgggaaatggggccagcaatctgtgttttaacaagacatacaagcgatagttcaatatgccag

SEQ ID NO: 543136 - DNA, 201 bp, Homo sapiens
atcccactgtggtatcctcactctgaatgaaaaactgcattaaaagatgagtgaaaataacaagcagggccttgtccctctgccctgtctttgcatacatrccaaactttttgaatttacatgcccttgacaaagagataactacagcattccacttgaagcaaacgttttccggcagaggcatgttcagtgtcagggccc

SEQ ID NO: 543137 - DNA, 201 bp, Homo sapiens
tcaaagaatctccaagtcagattagagaagtgggaatctgggggactttgtcctccctgtttcctctgctcgaaagtgctttcccaggtaccaattggcarttggcttttggcctccttgctttgttactctgatcgcaaacacacacccccagccctgactcccatcacagaggtacccatcattacttgacactgtatt

SEQ ID NO: 543138 - DNA, 201 bp, Homo sapiens
aggtggctgtgctataactccagggcattgcacaggctgcattgtacttgcgactgtgtatggatatctccaagctctgtatacattgagttaagtgaaaygtctggcctgaaaaatgtatgcagttctcctaattataaagagctcctataaagagctcttcttctgcaagattgtaagaataactgacccccaattcag

SEQ ID NO: 543139 - DNA, 201 bp, Homo sapiens
tgcagtatggtctgggccttgaagggtgagtaggagttagaggaatattagagagggagaaaacattccaagcaggaacaggaatggcccatgtggagatragtcagaagccgattggctgtagcagaagatgagtggtgggattgcctaagtcaggtggggccagctgtgagatggaaggaggaatgttaaggatccaag

SEQ ID NO: 543140 - DNA, 201 bp, Homo sapiens
ggccttgaagggtgagtaggagttagaggaatattagagagggagaaaacattccaagcaggaacaggaatggcccatgtggagatgagtcagaagccgaytggctgtagcagaagatgagtggtgggattgcctaagtcaggtggggccagctgtgagatggaaggaggaatgttaaggatccaagagagtgttgttgag

SEQ ID NO: 543141 - DNA, 201 bp, Homo sapiens
agactcgcagggcaatgacattaaagtcactgctgagagcactggtgaacatgcctcctcactaccgctacctttgcatcagccacctcattggatggacrgccttcctgtccaacatgctgttcttcacagatttcatgggccaggtaatgaacgtgtctgtgcacacaatcactgttacacatcatttcctccattaac

SEQ ID NO: 543142 - DNA, 201 bp, Homo sapiens
agtgaagatcacacctctgtttcatgttttatttcagactcgcagggcaatgacattaaagtcactgctgagagcactggtgaacatgcctcctcactacygctacctttgcatcagccacctcattggatggacggccttcctgtccaacatgctgttcttcacagatttcatgggccaggtaatgaacgtgtctgtgca

SEQ ID NO: 543143 - DNA, 201 bp, Homo sapiens
tattagagagggagaaaacattccaagcaggaacaggaatggcccatgtggagatgagtcagaagccgattggctgtagcagaagatgagtggtgggattkcctaagtcaggtggggccagctgtgagatggaaggaggaatgttaaggatccaagagagtgttgttgagatctgatgcagcaagcattagatttctgata

SEQ ID NO: 543144 - DNA, 201 bp, Homo sapiens
catggctcactgcagcctcaaccttctgggctcaagcaagtcccagccctctgagtacccgggaccacaagcacatgccactgtgcctggcttattaattwaaaaaaaattttttttttagagatggggtctccctacattgcccaggctggtctcgatctcctgggctcaagtgatcctcctgtctcagcctcccacagt

SEQ ID NO: 543145 - DNA, 201 bp, Homo sapiens
gcctaatagtgtaggaaatcatcatttaagctcgcaggccctcagtttcctcatgaggcaaatggaaagaatgttatttaccttatagaaaagcaaacaarttagtggatgtgcttagcatagtgccccctagcacccgacaaagactcaaaatgtgatagctagtattataattgttaccatgggggtaatgataataac

SEQ ID NO: 543146 - DNA, 201 bp, Homo sapiens
catggactgcgccaccctcacatgcatggtgcagctggctcagatcctggtcggaggtggcctgggctttctggtcaacacagccgggaccgttgtcgtcstggtgatcacagcgtctgcggtggcactgataggctgttgctttgtcgctctctttgttagatatgtggattaggtcaataaagagacaatgaccctaac

SEQ ID NO: 543147 - DNA, 201 bp, Homo sapiens
cctaatagtgtaggaaatcatcatttaagctcgcaggccctcagtttcctcatgaggcaaatggaaagaatgttatttaccttatagaaaagcaaacaaawtagtggatgtgcttagcatagtgccccctagcacccgacaaagactcaaaatgtgatagctagtattataattgttaccatgggggtaatgataataaca

SEQ ID NO: 543148 - DNA, 201 bp, Homo sapiens
aaaaaaagagggtgagggtttttcttctgataattcagttgctcgttggaaggtggtttataacagcatcacatttggttgctttaacaattttcgaattraggttcagtgcttcagctttaaatgttgctgtccagaataccagcctgttcagtgaaattgaaaaaccagattctgaacacagccaattatataaagctc

SEQ ID NO: 543149 - DNA, 201 bp, Homo sapiens
gttacaagatgaggtctgtgtatgctcacttccccatcaacgttgttatccaggagaatgggtctcttgttgaaatccgaaatttcttgggtgaaaaatayatccgcagggttcggatgagaccaggtatgtgcataccctcagacagaattaagaaatttttccttcatatttttttcctccttttccactcccaacttc

SEQ ID NO: 543150 - DNA, 201 bp, Homo sapiens
tatgtcattattctttccaacccaccgtctctcccctcaagataaaaagttcatgctgaaatggttttctttgcattataccttctagaatgcacctgatratggcaccctgtacatctattataaatctgttaagattcccccatctacccttgctcttagccttaagttccttgaaggcagggggcctgcctttggctt

SEQ ID NO: 543151 - DNA, 201 bp, Homo sapiens
ggtggggaggggtgggaagaagggagattcttagtatcaaaataatggctgtccagaaatactctgatactagctatggtcagcaacatttaatgaaaacscttatgttaaaaataaacccctgcctcctggcttcaagcgattctcctgcctcagcctcctgagtagctgggagtataggcacgtaccaccacacccagc

SEQ ID NO: 543152 - DNA, 201 bp, Homo sapiens
tcggactatttgtagtcatgtacagaacatgatcaagggtgttacactggtaagcagatgtatcagacttccttgttttggaaagggaggtttctcaaacytgtgctttatacagcgtaagtgtctctttcagagaatgggtcatgtattttatttggtgtaatacgcaagaacttggcaaaaataggcatctgtgggtct

SEQ ID NO: 543153 - DNA, 201 bp, Homo sapiens
caaattcaggtttgtatgtttactatgtctaactatgcctacaagattttgtctaaatcttgtttaaaatacagtattttgctaatttttatttgattagytttttaaattgtgaaaataaaaaggtcacattctgaaattttaagtacagcacataatgaaatactttctttttaagatgggttaggctgatgtattaat

SEQ ID NO: 543154 - DNA, 201 bp, Homo sapiens
aaaataggcatctgtgggtctttaagcgatagagctgagagcaaagaccagatgggtacaacatgtttgtttttttctgttgttgggttttttttttttttaatcaaggctggggtctcgctattttgtccaggctgagctcaagtgatcctcccaccttggcctcccatagtactgggattgcaggcatgagccaccatg

SEQ ID NO: 543155 - DNA, 201 bp, Homo sapiens
tgacgcaatacgcaggccccttacgcgatacaagtacgtaatgacgacagacgttctttctttgctgcgtctactgcgaggtaaggatgtttctgtgctcstgggggtactgggaatctgaaaccatctgctctgggaaaggctgcggcgcggctcccactctcggaaccttgtcctgtttgtcccccagctcggcaagcg

SEQ ID NO: 543156 - DNA, 201 bp, Homo sapiens
aaggctgcggcgcggctcccactctcggaaccttgtcctgtttgtcccccagctcggcaagcgccatatgagcctggcggcgccagatgcgaatcctgttstgggctttttggcctattcccgcccctcagtcttgccgggatggcaccgcccgcataggacttccagggttgggctgagtgggagttcgactgctgggcc

SEQ ID NO: 543157 - DNA, 201 bp, Homo sapiens
acatccagctgatttttgattttttgtagagactgtttcgccacgttgcccaggctgatttcaaggaatgctatggtgcctggccccagctaatttttaarttttttgtagaggcagggtcttgctatgttgtccaggctggtcttgaacttgcaggctcaagcagttcttcccccttggcctcttaaaacatacctggct

SEQ ID NO: 543158 - DNA, 201 bp, Homo sapiens
ccagctcggcaagcgccatatgagcctggcggcgccagatgcgaatcctgttgtgggctttttggcctattcccgcccctcagtcttgccgggatggcacygcccgcataggacttccagggttgggctgagtgggagttcgactgctgggcctcgtaattctcgctttggggctgctccttccaggctgggacacactgg

SEQ ID NO: 543159 - DNA, 201 bp, Homo sapiens
atggtcagcaacatttaatgaaaacgcttatgttaaaaataaacccctgcctcctggcttcaagcgattctcctgcctcagcctcctgagtagctgggagwataggcacgtaccaccacacccagctaattttttgtatttttactagagatgggtttcacagtgttagccaggatggtttcgatctcctgacctcatgat

SEQ ID NO: 543160 - DNA, 201 bp, Homo sapiens
ttgggcatgtcatctctctgcagcttaaaattgcaaacatctttgattaaatgagttaaagttgaaaaacaacaatgcatgcgtaatacatagtaaacacrgtagctttaaaaaaaatttaaagcttagtgctttttatttgaggcagggtcttgctctgttgcccaggctggagtacggtggcgtgatctcagctcattg

SEQ ID NO: 543161 - DNA, 201 bp, Homo sapiens
tctctttcagagaatgggtcatgtattttatttggtgtaatacgcaagaacttggcaaaaataggcatctgtgggtctttaagcgatagagctgagagcaragaccagatgggtacaacatgtttgtttttttctgttgttgggttttttttttttttaatcaaggctggggtctcgctattttgtccaggctgagctcaa

SEQ ID NO: 543162 - DNA, 201 bp, Homo sapiens
ccactgtgcccggcctcaaaatcttaagaaaaggttcttttggtgcatggagttttacatggaataaattagtgcctctgcaatttaaatattttttacayagatttgatgctgtgcaaatgccctctccccttttaggtgttgcttgttcagtatctcaagcccagaaagatgaattaatccttgaaggaaatgacattg

SEQ ID NO: 543163 - DNA, 201 bp, Homo sapiens
ggggatttacagattttttttctttttttacagttacctggctacagaaagaagatgccagatgacacttaagacctacttgtgatatttaaatgatgcartaaaagacctattgatttggaccttcttcttaaaccggttatcctttttagctagtttttttccctcgtggaacaaggagctttaatctggttcttgaag

SEQ ID NO: 543164 - DNA, 201 bp, Homo sapiens
gaaattacgtcgctccatttatgacaagcagccaagctgctccacgattggctgctttagccttacgtgcgtcgcgcactcatgacgcaatacgcaggccycttacgcgatacaagtacgtaatgacgacagacgttctttctttgctgcgtctactgcgaggtaaggatgtttctgtgctcgtgggggtactgggaatct

SEQ ID NO: 543165 - DNA, 201 bp, Homo sapiens
ttacacttacaactgttggtgctacttaagggtttatatcattatgtcgattacaatttcagaaagttgatacattggagtagcttgcagtggtggttgtmtttaacttggcaaatgaaatcttttaaaaagactttaaatttacaaaaggtgtatataatggtgtgtatttatggagcacaatgtgatgtttcaacacat

SEQ ID NO: 543166 - DNA, 201 bp, Homo sapiens
gatgggtacaacttttaaaaagtaggctaatgatgaattttcataccttccgaattctttaagataggaaatctacagttgcagtactagttggtagtcamatctcaccatcaggaccccttgttgggatagaaaaagatgtagtttctgagttttctgtctgctgccataatgtatgtcattattctttccaacccaccg

SEQ ID NO: 543167 - DNA, 201 bp, Homo sapiens
aacttccatactttagttggctgttgttttgtgtttgtgctgagtaaaaccagatttgttttagaattatctcttgattacacttacaactgttggtgctrcttaagggtttatatcattatgtcgattacaatttcagaaagttgatacattggagtagcttgcagtggtggttgtatttaacttggcaaatgaaatctt

SEQ ID NO: 543168 - DNA, 201 bp, Homo sapiens
gttgttatccaggagaatgggtctcttgttgaaatccgaaatttcttgggtgaaaaatacatccgcagggttcggatgagaccaggtatgtgcataccctsagacagaattaagaaatttttccttcatatttttttcctccttttccactcccaacttccatactttagttggctgttgttttgtgtttgtgctgagtaa

SEQ ID NO: 543169 - DNA, 201 bp, Homo sapiens
tcggaaccttgtcctgtttgtcccccagctcggcaagcgccatatgagcctggcggcgccagatgcgaatcctgttgtgggctttttggcctattcccgcycctcagtcttgccgggatggcaccgcccgcataggacttccagggttgggctgagtgggagttcgactgctgggcctcgtaattctcgctttggggctgc

SEQ ID NO: 543170 - DNA, 201 bp, Homo sapiens
gaggtaaggatgtttctgtgctcgtgggggtactgggaatctgaaaccatctgctctgggaaaggctgcggcgcggctcccactctcggaaccttgtcctktttgtcccccagctcggcaagcgccatatgagcctggcggcgccagatgcgaatcctgttgtgggctttttggcctattcccgcccctcagtcttgccgg

SEQ ID NO: 543171 - DNA, 201 bp, Homo sapiens
tccttttccactcccaacttccatactttagttggctgttgttttgtgtttgtgctgagtaaaaccagatttgttttagaattatctcttgattacacttmcaactgttggtgctacttaagggtttatatcattatgtcgattacaatttcagaaagttgatacattggagtagcttgcagtggtggttgtatttaactt

SEQ ID NO: 543172 - DNA, 201 bp, Homo sapiens
gctggccttgaactcctgggctcaagcaatcctcctgcctcagcctcccaaaactctgggattacaggtgtgagtcaccatgcccagcttcaaatagacaytttaattctgacagtgttctgataaccaggattttctgctctcagaataccagatatcaatttgaaatggtgtcaaatagctttttaaaaagtgtacatg

SEQ ID NO: 543173 - DNA, 201 bp, Homo sapiens
cagagtatactgttaagtgaaaaaagcactgtggcctcaaatttatctatagattctatacaatccccatcaaaatctcagctggcttctttgcagaaatycacaagctgatcttaaaatgtgtatagaaatccaagggactcaaaattcaataaattcaaagactagccaaaacaatcttgaaaaagaagagcaaagttg

SEQ ID NO: 543174 - DNA, 201 bp, Homo sapiens
ttcaggtgattctatgtgtgcaaccatgattgagatacactgttatagaatctaggatgtgataaactagaagaacataactaaagttttgcatttttcgsgtgtctcagtttcctcatttatagatggagttggtatgtgtaccaagttcataggcttgttctgagtaaattagtgcatgtaaagtgctccacagaatgt

SEQ ID NO: 543175 - DNA, 201 bp, Homo sapiens
cttcaggtgattctatgtgtgcaaccatgattgagatacactgttatagaatctaggatgtgataaactagaagaacataactaaagttttgcatttttcsggtgtctcagtttcctcatttatagatggagttggtatgtgtaccaagttcataggcttgttctgagtaaattagtgcatgtaaagtgctccacagaatg

SEQ ID NO: 543176 - DNA, 201 bp, Homo sapiens
aaagtttacaaaacaatcagaaaaaataaaaaagattgaggatctcaggacaactactagcctagataatttataaagattagataactgactcatttttrttagtttctttcctaataaggcaatatgtattagatatatcagagtagaaggaaatatttttcttacatctatttggctttttaaatataaacatatata

SEQ ID NO: 543177 - DNA, 201 bp, Homo sapiens
ttccatggtttcctttaactctgagcatattcaagacggttgttttaaaatctcactctagaaagctcaatgtttgagcttcctcaggacaatttctatcygttgattttaagtctttgaatggcaatattttcctgtttctttgtgtgccttgtgattttttttctgttgctattgaaaactcgacatttaaatatgata

SEQ ID NO: 543178 - DNA, 201 bp, Homo sapiens
ttttgtagccattgaaatgcaaagaaaaaaagaatatagatctgtctcattttttaaaaatgctgtataatctgtagcacgaatttactataatttattcscatgctcccttatcgatgggcatgtaaattgtgttaattttatatgatataatgagtatccttatatgtatatcttggcacagtttttcgagtgtatcca

SEQ ID NO: 543179 - DNA, 201 bp, Homo sapiens
tatttttacttgagaagactgaaaaggtaaagaagtgatgctaaaatttagaactagaaaatctcaacttgctctagtaggaattttaatagagcacactaagtttcttttcattttctctctcctggtatgtgaataaacaaccttccatactgcaatttaccctgtagtgaattagatgttaccctattatattttgga

SEQ ID NO: 543180 - DNA, 201 bp, Homo sapiens
atttttacttgagaagactgaaaaggtaaagaagtgatgctaaaatttagaactagaaaatctcaacttgctctagtaggaattttaatagagcacactamgtttcttttcattttctctctcctggtatgtgaataaacaaccttccatactgcaatttaccctgtagtgaattagatgttaccctattatattttggag

SEQ ID NO: 543181 - DNA, 201 bp, Homo sapiens
tcctgacctcgtgatccgcccgcctcggcctcccaaagtgctgggattacaggcatgagccactgtgcctggccacaatggggtattgtttttatagactkttgaaatctgcctttggaaaccatgggtttgctgtgttgttatggtgaatgaattaggtgcacaatactagtttttaaaaaatgaacttcacactaggta

SEQ ID NO: 543182 - DNA, 201 bp, Homo sapiens
tacacagcagagaccaattctactctctgttctcatttcctcttctaattcctcatccctacactccttcctgtgtgaagcccatgtctgatcctgcctawttcagtgactgggggtcactgcagatgcgtgcacagggtcctgttatgggatccggattctgccgccttctccagacacaagtttcccctcatacctgtt

SEQ ID NO: 543183 - DNA, 201 bp, Homo sapiens
taaatatattaaaatgtagtcaagcttattagtaaacaagacaatgccaatttaaaccacagtgaaatactattacacactcaccagattggcaataaagsgtcagttattgccaagtgtgggtaaggatgttcaacaaaaggaaccctgatctaatactggtcatagtgtgaatttatacaacactttggtaaatagttt

SEQ ID NO: 543184 - DNA, 201 bp, Homo sapiens
atacaaataacataagaaaccataaagctatagagataatacagagaaaaggataatactttatagtaaagaaatttgtagtttcaatgatgattttatayatagtatctcatttgatctctgaaataacctgagataaatgatcagagcagatataattagactagaattacatatgaaaaaatcatggcttgtatacat

SEQ ID NO: 543185 - DNA, 201 bp, Homo sapiens
catgatccttcttccttttacttgaaggatagcacatgttcacagctggatagcattacggtcccagcctgtaaaatccaagaagtctgacagcctttctycataaattcaaactggcagcatctgctagtataatcccatctttatttctagcttctgttgtgataactacttgattgttcagctacactctagtgtgct

SEQ ID NO: 543186 - DNA, 201 bp, Homo sapiens
ttcaattcaaacattccctttaacattttactataagcagacagaaggaaccaagttactccttcaaagttttgcttagaaatctcctcggctggcctggygcagtggctcatgcctataatcccagcactttagaaggctgaggcgggcagatcacctgaggtcagtaattcgagtccaacctgatcaacatggagaaac

SEQ ID NO: 543187 - DNA, 201 bp, Homo sapiens
tgtggatgtgaggaggcaaaaggagacagggggtggttatataactacattatcaaccatatttttcccatttatagtctttaagctcacatcatctgtgyaattctagagttacacaagaaaatgatgcttaatactactaacattactttatggcaatgtaaatgctttatatgatccaatggaccaatatctacatgc

SEQ ID NO: 543188 - DNA, 201 bp, Homo sapiens
aaggaggatctcacaattgtatctgtttcattcactctgcagggtccattttacacccaaacattcattagttcattgtttgtactcctgcctttcctgargaagtcattgtagcactatttcttaagtatattcaaatttggataagttagtcaaattgatgtgaaaggaccacccttgtaagccaaatgtgtaagtcct

SEQ ID NO: 543189 - DNA, 201 bp, Homo sapiens
ttaatttttttctccccagccaatttactcaccttctgtggctgtgcttctgtgttagacccttgctagctgcttctggggttcagagcaattgtgctctkccctcatcttttatgacacacctagcaaaacagaagcagaggagcgagttgaaacagacaaacgactatctgttattcttcaaacatgcctaggattgta

SEQ ID NO: 543190 - DNA, 201 bp, Homo sapiens
ttctgttcagagatggggcttggaactgcttacatcagcatttttctctagattcttctaatcttgtaccccaggttcaaaaataaaaggtactttgcttyaaaacaaagaatagtctttcttccaagaagaatcagaaagattatgaactatttttctgattcttcactctattttctctcttttacattaaggctttta

SEQ ID NO: 543191 - DNA, 201 bp, Homo sapiens
catctctcttctgtgctttgtattgtttcctctcctgtcacctaaacaggcactctgaaagaaaactctccagtactggagaacttagcatattctaattmctaggttaaaaaaaaataataaatgactgaatgattttttttaaagaatattttccatcagaagaaatttggaagtattttgttgcagaattttaaaaca

SEQ ID NO: 543192 - DNA, 201 bp, Homo sapiens
tttagattaattgttgttttttaaatatgtattagcctcttatacaaatataaggagttacaaattattattacaataatcttggctttcgtgattgtccratgtatttacacgtaccgagagctttatttctccgtatagtttcaagttactgtctcgtgtcctttcatttcaccttgcaggactcctttgagcatttct

SEQ ID NO: 543193 - DNA, 201 bp, Homo sapiens
aacgaagaatatgaaaaacgatgctggcaataaataacgtaaaacttagagtgggaatcccagtgtattattcatggactgctccgttaagactaagtatyattttccgtattaggtctgctgtgtttttcagaatgatacagtaatctgaggattgagccaactgtcttccttgcagaaaggcaggctgaattgtgatcc

SEQ ID NO: 543194 - DNA, 201 bp, Homo sapiens
gggtgtaaatgggacttttaacagccaaagcacacagcaagtctagcctagcaagaggagctcaatggatggaagtcctcacttgtttccctgtgttaacrtagaagggggtctttttaaaattttgttttcacttcagcttttctgccagaaatgtctagtgtagtgatgttttaaaaaaaaccataagatctgtttccg

SEQ ID NO: 543195 - DNA, 201 bp, Homo sapiens
taaaatagggcctacctcactaggctaaaggagaaattttgtgcaacaacattttgaaaactgaatcatgcaagtgtaaacagcatttaaaaggaaaataytcaacattctttcaactgacgtgtaatgagtactcaccagagttgagatgttctgctaagccaggccctcttttaaaaatgtaatctcaaactttattag

SEQ ID NO: 543196 - DNA, 201 bp, Homo sapiens
cagaggcctgacagttattgaatgaatggagaaacaaatcacttagacaccttctaggaaaaaatgaccaactatgctacctgcaattacgtttcaaaatrtagcttatctgaagaaaaggaagtaacatttaattacaagcatcaatacaactcaagcacagaggaagtgtgctaaacaatttcctccatacgtacaaat

SEQ ID NO: 543197 - DNA, 201 bp, Homo sapiens
tatatatatatatattagagagatggggtttcaccatgttgcccagtctggtctccaacttttggcctcaagttgtcctcctgcctcagcctcccaaaatkctgggattacaggagtgagccactgtactcagcctataatttatcttgatgagtacagagcctatagatgaaggtgaagcatcagaatttatagattctc

SEQ ID NO: 543198 - DNA, 201 bp, Homo sapiens
tggcacatgcctgtaaatcccagctacttgggaagctgaggcatgagaatcccatgaatcctagaggtggaggttgcagtgtgccgagatcatggcgccamtgcactccaggttgggcgacagatccagacgctgtctcaaaaaaaaaaaaaaaaaaaaaaaaatctttgcctatgccaacgtggagctattctatcctgt

SEQ ID NO: 543199 - DNA, 201 bp, Homo sapiens
acacctggtgtttttttcaataactagaaatcctgttctcaagcactcatcttcccatactggttttctggtccctcatagctctttctgaagagagactsttcatacttgttagtctatggagtccctctcaaaactttcctgctcgttcattctcccaaaaattgccaaccacagcctatcttggttgtgacatcacag

SEQ ID NO: 543200 - DNA, 201 bp, Homo sapiens
aaggccgaggcaggcagatcacttgaggccaggagcttgagacaagcctggccaacatggtgaaacaccatctctattaaaaatacaaatattagccgggygtaatggcacatgcctgtaaatcccagctacttgggaagctgaggcatgagaatcccatgaatcctagaggtggaggttgcagtgtgccgagatcatggc

SEQ ID NO: 543201 - DNA, 201 bp, Homo sapiens
tgtgagaaagacaagtacttcagagaagatagtgtggagtcgcaaaataagtttcatgagagctcatacagaaaacagcctaaaactagaagctaaattgygtaagaaagacaagtacttcagagaagttggttgggagtaagaaagcaagtctcatgagagctctgagggtgtaaatgggacttttaacagccaaagcac

SEQ ID NO: 543202 - DNA, 201 bp, Homo sapiens
tacagatgagagaattgagacatgcacagggtaagtttgtcaccaaaggtcacaaagctagcaagtagtcaagctgggattctaatccaggtgtatttgcractgaagttctagcttttaaccactttttatggtctgtttttattgaaaggaagtcctagttccccaaatagtcattctcatgaatctgctggggttttt

SEQ ID NO: 543203 - DNA, 201 bp, Homo sapiens
cactggttttgcctgaggtcattgctagggcaggaatgaacagcaaccagcacagagcattgctaaattaattacagtaatctaattaattagtagctagkcttcttctgataggaaagtttcaaccagaaaccactagatgttctattatcatagcttttgtagattggatggaagaataagtaggaagaaagagtatta

SEQ ID NO: 543204 - DNA, 201 bp, Homo sapiens
ggcaaagaaggagaaggatatgaggaaatgcgattcttctcaggtaagcaggtccccaccaaactcagggtcatgggtatccccatgatggctgcaatatsttcgagagcttctactgggaggtcatttcagcttcctgcttttgctgcttagtgaaataggagaagtagatcagccgggtttctaaaagggcagaccaga

SEQ ID NO: 543205 - DNA, 201 bp, Homo sapiens
cagtatgtgaaaaaaatatgagccacatgaatgaatgattgaccagaagttcaggcttacaagtaggaaatattcaaatataggacattaaatccaaaggyctcagacctacttgtaccttggtctttacattaatcatgttatttatcatccaaaccaggatactctgagagctaaagaggatgctattaatattaatag

SEQ ID NO: 543206 - DNA, 201 bp, Homo sapiens
ccatctgcataaaactgaagatataaaatatgtgacttcctacttttagattaaaatctacattttgcctttggacatggtagaagattcaaaattacccrtaaacagtcagcactacgtggaagtaggagcagcagtaggctgctgtttgcttagggtttcctgggtaccaggctgcctgctaagcacttgtgagttatt

SEQ ID NO: 543207 - DNA, 201 bp, Homo sapiens
tggctattaagtagggaaagcatcatgtttaggaaatgcagagctcttcaccactctccagcctgcagatgctcagcatggctgcagctctgaggggagcrcgggacacctatgcatggccacctgcctcaggcacccacagacgaaagtggtacatgtggaacggacagacagagaacagcctaaaattggaagctaaat

SEQ ID NO: 543208 - DNA, 201 bp, Homo sapiens
tggatgtttaaaaatccatggacttgaacttttggtagtttcccaaatatgtagaatattcagctagttttcttcaatttcagaatctttcttttctatcrttgttaaagacacagggttgcataataaccattaagtttgaattgtgcaattagacaactttcttattagtcaagaagtcaaactttttgtgtgagtaca

SEQ ID NO: 543209 - DNA, 201 bp, Homo sapiens
gctgtaggacccatggtggctactttctttaaatttaacaaggagaagaataccgtagagtaagttggctagaaagaaaacagagtacacatacttgaatratgatatataacattgtaacataactcagtcacagaagtaagaccatcacatctgccatgtaatgtcggttagaaacaaaccatggaaccagcccatgct

SEQ ID NO: 543210 - DNA, 201 bp, Homo sapiens
ccgtagagtaagttggctagaaagaaaacagagtacacatacttgaatgatgatatataacattgtaacataactcagtcacagaagtaagaccatcacayctgccatgtaatgtcggttagaaacaaaccatggaaccagcccatgctgaggggctggaaattatgcaagggtgtgaacaccaaaagctgggaatcctgg

SEQ ID NO: 543211 - DNA, 201 bp, Homo sapiens
atctttgtcttcttataagtctactaatcccatcacgagggacctacccccataaactaacctaacccttattccctctcagaggctccatttccaaataycatcaaattgagggttaaggcttcaacatctgaattttgagtgggacacaaacattcagtccatgacattctatccttgacccctccaatattcatgtcc

SEQ ID NO: 543212 - DNA, 201 bp, Homo sapiens
taatgtcggttagaaacaaaccatggaaccagcccatgctgaggggctggaaattatgcaagggtgtgaacaccaaaagctgggaatcctgggggtcaccrtacacagtctgttcacatttcctctaaagaagttgcactgcatcacagttccataccaatttctgctatgaccttaaatatagccctgaacttccctgtc

SEQ ID NO: 543213 - DNA, 201 bp, Homo sapiens
taatcccaacactttaagaggtaggaggcaggaggattccttgagcccaggagtgtgagaccagcctgggccacatgggagaccctgtgtctacaacaccttttttttttaattagccaggcatggtggggcaagccagtggtcccaactactcaggtggttgaggtgggagaatcacttgagcccaggaggtagaggctg

SEQ ID NO: 543214 - DNA, 201 bp, Homo sapiens
cactgcatcacagttccataccaatttctgctatgaccttaaatatagccctgaacttccctgtcaaggaagaagtgaggaggtttcaacaagtgatcagwaatgattcttttatgtctaagattctaggatgatttcctctctgccctggtaggctgctcttcaaagtatgacctcctcattgtttctctgctctaccac

SEQ ID NO: 543215 - DNA, 201 bp, Homo sapiens
tagtgacattagacagattctgccagtgcaatcgctgtctaggaggggagacagattcctggtgcttcctgttttgccagcttcccggaatcttcttcacmtagcatccattttgaagatactacttacttctcaatttggggctattcattgaatagactgtcaccaggttattggctgtttgaagattctcatttgtct

SEQ ID NO: 543216 - DNA, 201 bp, Homo sapiens
gagaatctgccttctttgtgttgtatgcatcaagcagtttcaaaagggctttgcaattgtgtttctcacacaaagccacccatttgtgaaaacccatgtgwaaaggcaaagagaactgtctgtgtacaggttaacatttaactagactggcagagcttttaataatttctataaggttaatggcttcgttaatatgcaacc

SEQ ID NO: 543217 - DNA, 201 bp, Homo sapiens
tctacattgtttatgggattagggataggggacactgtctattttccttcagtcctacagttgaaagcatttagagggaatttgtatgatttttttttgtscttctatcctttcttatggccttgatgtttgcattttattggcagctactcgaacctaatccagaccaacgattttctcagttatctgatgtccagaact

SEQ ID NO: 543218 - DNA, 201 bp, Homo sapiens
gcttttccataaagaggttacactggggcaaccaagtatgtgtagaaagccagagctaaacttcagcttggcattcacagttttctcttcactgagctaayaggcccagagtttcgggcagagctgtgaaatagtgcttctctaatagcaaccatattattgttacataattaaaagccagctcttttgttgtttgtttga

SEQ ID NO: 543219 - DNA, 201 bp, Homo sapiens
cttctttgtgttgtatgcatcaagcagtttcaaaagggctttgcaattgtgtttctcacacaaagccacccatttgtgaaaacccatgtgtaaaggcaaaragaactgtctgtgtacaggttaacatttaactagactggcagagcttttaataatttctataaggttaatggcttcgttaatatgcaacctgtgatttgg

SEQ ID NO: 543220 - DNA, 201 bp, Homo sapiens
tgagcaggttttgaagtccaagagcatcccagctataaggctcttgcactgtgacagagctgcccacctccagtacaccctcagtgacctcgagtagatgygtagggcagtcaaacccggcaacttatgccacaaccctaattccaggaagtcgtctgctaatggctaacccactgccatggtggcactggttttgcctga

SEQ ID NO: 543221 - DNA, 201 bp, Homo sapiens
ggtaaaagtgttgctccaaagagcttttatcagattatgtttatcctgtagctgcctgtcccctgtgaccgatactggaaaccctcaggattacaaatgcytccgtttgcaagtaagagtgaaatacagcagaactgtgtcttctcctttgtcttgttccccatctctcttctgtgctttgtattgtttcctctcctgtca

SEQ ID NO: 543222 - DNA, 201 bp, Homo sapiens
ctggaggattgcctgagcccaggagttcaaggctgcagtgaactatgatggcaccactgtggtccagccagggttaaatagcaagaccctgtttctggcgaaaaaaaaaaaaaaaaaaaaaaggaagacttaaacatacctttcctatatgaactgtgcctcggagtaactaaataattgattaaagcaagtttctctgta

SEQ ID NO: 543223 - DNA, 201 bp, Homo sapiens
acacataccattgagtaagaaaagtaagacaccaaagaatacaaggaatacgatttgatttaataggatttaatttaatggaatttaatagaatacaaggmatagatttttttttgctttgttagtgtttcctttattataaagcactgaaataaataaataggtagctagccaatttatccacagtttctgggagctata

SEQ ID NO: 543224 - DNA, 201 bp, Homo sapiens
ctaccttttttttagatgagtgctacctttactttactgaaatatcatgacataaacaaagccaaaacactttctgcacaaaataaaatcctggtgataarggcagtgggatttatgcttagcagcaggctggatactatcagggagcagacaaagaagtttgatacagggcttgtggactgtgggccctggaagaatctg

SEQ ID NO: 543225 - DNA, 201 bp, Homo sapiens
gcttcactgttttagctttcacatttagatctacagtctaggatcaagttttattttgtcttcatataaataagtaattgacccttagccatttgttgatragcttatactttccttacgtcaccacagaaccacatttgttattaatcaagtcaccatctatgtatgggtttcctgactctgttccattgattcatttgt

SEQ ID NO: 543226 - DNA, 201 bp, Homo sapiens
caaatgctgtgctaagtctcctgtaatcattctttcatttaatatttctaataacctcttgagaagactatgattatctttccaactttacagagaggatragtgacgttttcaaggtaacacagctagttagtggtagaacctagacttgaagccaagcagtctgactccaagaaacaggctcttcaccacagtctccag

SEQ ID NO: 543227 - DNA, 201 bp, Homo sapiens
agtctaggatcaagttttattttgtcttcatataaataagtaattgacccttagccatttgttgataagcttatactttccttacgtcaccacagaaccayatttgttattaatcaagtcaccatctatgtatgggtttcctgactctgttccattgattcatttgtatactcttgcatatttatcactctgttttaatta

SEQ ID NO: 543228 - DNA, 201 bp, Homo sapiens
tttttatattttttatattattattcatacattatttatgtatgttatttattatttataaatatgtattctatttatatatattcctacatatattttargatgtacatagacaagtttgaatggtaacaagaatgagccaactgagaggaagaaattggtaatgtagtaaagagcggggatgattgccaagtcaggtcc

SEQ ID NO: 543229 - DNA, 201 bp, Homo sapiens
acattttattcttggtggagctggggctctgttgcctacagaatacaagccatcattccagtgtgccagagagagagtctcagtctgcccctattacctgktgtcttatttacaatgactgctttcattctcaaggctttttaaaatttggtcagtgaattaagaagaggcttttctgtattatattcctaccctgaactc

SEQ ID NO: 543230 - DNA, 201 bp, Homo sapiens
tgattgccaagtcaggtcctgcaggtggtgagatgaatgtgactcagggcacaggtgaatgagctgaccttaggtggaagtggggacccttccttcatgtrctaggagagaaagcagagtttgaagtctgtatgtgtgtgagctgctgggcttctcagagggcagatgaaatagttcttatgccattgcctgtgttttccc

SEQ ID NO: 543231 - DNA, 201 bp, Homo sapiens
gcaaaaggagacagggggtggttatataactacattatcaaccatatttttcccatttatagtctttaagctcacatcatctgtgcaattctagagttacrcaagaaaatgatgcttaatactactaacattactttatggcaatgtaaatgctttatatgatccaatggaccaatatctacatgcttagatacaacatgc

SEQ ID NO: 543232 - DNA, 201 bp, Homo sapiens
tttatttgctcaaatcttgttacacagttttccactgtgatattcacatgctgacagagaggctatttgcatggtgtttgtcaccagcaatgaacagcagyatttgagttatgtagtggctctgccagttaccagtggggcaacttgggcaagacactaagcacctctgaacctcatttgttttatcagtaaaatgaagat

SEQ ID NO: 543233 - DNA, 201 bp, Homo sapiens
aagaatcagcccgattcatgttgtacttgaattcaagataacaaaacaccttttagttacttagaaagattagattgtaaaatatgtgctgagttcctagraattaaaagtgagaatgaaaaaaagaatcaatgaaagtacagtagatctcccggacaaggagagaccatctgcataaaactgaagatataaaatatgtga

SEQ ID NO: 543234 - DNA, 201 bp, Homo sapiens
gcaagagactgatttaattgttcctcattatcatctgagcatgccgtcttggcttgcccttttatatggagagcaaaatgttgttattcccctttgcctgwttactggctgtattattctctgaggtggccatctcaagagattctgtagaaaataataatagcaaaatttctcccttgagaagcttcataaattaaatct

SEQ ID NO: 543235 - DNA, 201 bp, Homo sapiens
catgtagaggtctagcgtatttgtctttagactgatgactaggtatttgataagattacaagtggtattatttatcaaaattgtatttcttgctagtttgrtgcttatatactaaaatacaattgattattaatattgactttgtgttcagtgacctggctaaattctcttattaattatactagttgtcccataggtttt

SEQ ID NO: 543236 - DNA, 201 bp, Homo sapiens
ccacacataaaatacactaacactaacgatagctgatgagctaaagaaaaatcaccctcaaaaaaatctcctaatgttttaagaaagtttacaaatttgtkttgggccacattcaaagccatcctgaggcacatgtggcccatgggctgtgggttggacaagcttgctataggctctgttcattattcttcaatctttttt

SEQ ID NO: 543237 - DNA, 201 bp, Homo sapiens
tgtttattacaaattcagtgtgtctgactgatattaaacactgatattaaaatttcaaacttcacttatctgtgctgttgtgaacaggcagctgatctggyagccctcgaatgggaaacaagtgcttctgttgagctgtagcatatataatataaatgtgcctatgtgtattaaaatgtcttctgtaaacaatgagccact

SEQ ID NO: 543238 - DNA, 201 bp, Homo sapiens
ctcctaaacaagtccagaacatatcaaagcaaattctattatatcttaaaactcgagaataatcttctttgagttgttggtttgccctctagatctacacrggcatgggagcaatcactctcatggctggggatggggagaggggacttgcttaagtggctctctacaaaggcactacccacatggctctctgtgaaggct

SEQ ID NO: 543239 - DNA, 201 bp, Homo sapiens
ctctgcctggatttcagaggatgtatggaaatgcctagatgtcccgacagagttgtgctacatgggcagagcccttatggagaacctctgctagggcagcrtggaagggaaatatggggtgggaacccacacacagagttcccactagggcaccacctagtggagctgtgagaagaaggtcaccatcttccagacaccaga

SEQ ID NO: 543240 - DNA, 201 bp, Homo sapiens
ttttcagacatgcataaccttagaaagttcttctcttgatttacaattagcctcatagttctgttgctgcctattggagttttactacgtgtacagtcagrcagggcttccattcagtcaccacccattagtactgttgtactagtaatttatggatggcgtccattcttactggtccatgtcccattctgatttgtgttt

SEQ ID NO: 543241 - DNA, 201 bp, Homo sapiens
aggtgttatattttacaggctgtcatacccttttgtacctctcctgaggagttgtgacatttggtgtataattaattcatttgtctcctttataaaattgwgaactctgcatgttttgcttttcattgtataaccagtatgtgaaaaaaatatgagccacatgaatgaatgattgaccagaagttcaggcttacaagtagg

SEQ ID NO: 543242 - DNA, 201 bp, Homo sapiens
ttctggaagttagttgaataattactgtgcaccagatactacacagtagtcccccttgatgcatgagggatacattcaagacccccagtggatacctgaawacgcagatatttccaaacccatatatactatgttttttcccttttgtacatacctatggtaaagtttgattcatagagtaagagattaacaataactaat

SEQ ID NO: 543243 - DNA, 201 bp, Homo sapiens
gaaaagaagtcctttcacttagaacttacgtcctagtgggggttgggggttgggggttgagagaatgaagcattcttacaaagaatgttaaaagcgaactmtgggcaggaattgaggatatgagttttgatgtataaagaaaaagtgacaaggtcaataattggtggtcttagtgtgatagatatgccagtttggaaattg

SEQ ID NO: 543244 - DNA, 201 bp, Homo sapiens
aatgagtgattttattttccaagtagaggaggagaggtacaaaatgagttttgagattcatgttgtgacaggtagcaatagtgtcttgccatttctgtatygtattccattgtataaatactccatggttcatttacgttttttaccattgataggcatttggatcgtttgcaatttgagactttcgcagagtactactat

SEQ ID NO: 543245 - DNA, 201 bp, Homo sapiens
tgattcctgctgtgctttagcaaagagactggtgacatttttcccctgccatagagatctgtgtaactttgaacttgagagagataatttagggtatctgrtggaagaaatttctaaacagcaaagcattcaagaggtgacgtgggtgctcttaaaaacattaagttttattcattcacaaagatatggtttggaattaga

SEQ ID NO: 543246 - DNA, 201 bp, Homo sapiens
gcaagttctattttagaatgaaagaatgtattgtttgctaagatccaagcagttcacttgaaagctgaaatcagctatgccatgtgatgttgataacaccmcttgagatttctgcataggttaattcatttgtcccgcatatgggaccaaccatgtcaattaccattaaattacacagttaaaagtaaaggaataatatgg

SEQ ID NO: 543247 - DNA, 201 bp, Homo sapiens
agactccgtcttaaaaaacaaaacaaaataacaacaacaacaaacaaagatagatgcatagagtttttcactgttgcactatttatattagccaaaaaccrggaaacaacctgaatattcatcaagtggggacaggttgagtaatcatgtgacatacataaattgcagcactgcacacttgagaaaagaagtgagaaatgt

SEQ ID NO: 543248 - DNA, 201 bp, Homo sapiens
atccactttctcttatacatttttcttaaatttttctcatattctttctctgaatttgtggtaaaaatacccctttcccattctatgtcatggttctttaygaagctttctcatcctctccatcccgagggaactatgtctcatttatctttaggttttctgtatcttactacagtgacttaccagagtaggtaaatatct

SEQ ID NO: 543249 - DNA, 201 bp, Homo sapiens
tacccggtgtgccagattcacacattgtctcattagataatcacaccagtgttgttaagagagccccaattcccattttacagatgagagaattgagacaygcacagggtaagtttgtcaccaaaggtcacaaagctagcaagtagtcaagctgggattctaatccaggtgtatttgcgactgaagttctagcttttaacc

SEQ ID NO: 543250 - DNA, 201 bp, Homo sapiens
tgaggtgggaggatcatttgaacctgggatgtcaaggctacagtgagctatgactgtgccactgcactgcagcctggatgacacagtgagaccctgtctcaaaaaaaaaaaaaaaaattacaggccaaatccatatgcttttaaaggatatttttgaattgttctcaaaaagaggcttcaccaaattaccatccagggtat

SEQ ID NO: 543251 - DNA, 201 bp, Homo sapiens
gtagaggctgtagtgagccaagatcatgccactgcactccagcctgagctacagagtgagaccccatcattaaacaaaacaaaacaaaaaacaaacaaacaaaaaacaagcaagttatgtgcttccaaaatacaatgataccatagctgtgggatagagaatcccattccaacatttcaaaagagaaatgggaaagaagga

SEQ ID NO: 543252 - DNA, 201 bp, Homo sapiens
tgaatttcaagaactactgattacaccctctagaataagcttttgcccgtgatgattaaatgtgtacgatttcttcctaatatttatttttgtgtatattkggatttattagaatatcagggaagatctgcagggcacaaaaactgtatgttataaatgttaacagtgtcaataagatctttgttatgtctttagaaggct

SEQ ID NO: 543253 - DNA, 201 bp, Homo sapiens
atcaaacagatgaagaacagttatagcgggaggtcaaaagtgtatattgagtgatgatacaaaacaagaatgaggggcccaagaggaatgggcttggccttttttttttttttttttttttttttttttgaggagaaaattgcaccagttgtggctggtaatggaaaatagctttagtggctaaggagtcatcatttgtgt

SEQ ID NO: 543254 - DNA, 201 bp, Homo sapiens
aagttggttttgacagtatctgcttgtttttttgatgtttctgttcagagatggggcttggaactgcttacatcagcatttttctctagattcttctaatyttgtaccccaggttcaaaaataaaaggtactttgcttcaaaacaaagaatagtctttcttccaagaagaatcagaaagattatgaactatttttctgatt

SEQ ID NO: 543255 - DNA, 201 bp, Homo sapiens
tggttccagtaaacctttgagtgctttccggagttttgacaaagttggttttgacagtatctgcttgtttttttgatgtttctgttcagagatggggcttsgaactgcttacatcagcatttttctctagattcttctaatcttgtaccccaggttcaaaaataaaaggtactttgcttcaaaacaaagaatagtctttct

SEQ ID NO: 543256 - DNA, 201 bp, Homo sapiens
ggcacgtgcacatcacagatttcaacattgctgcgatgctgcccagggagacacagattaccaccatggctggcaccaagccttacatgggtatgggtttyatgagtgtcttttttttttctttcctgtaaataccatttattacaggtggaatcatctgtggggatttgcagctagaactggtaagttcctctctgactt

SEQ ID NO: 543257 - DNA, 201 bp, Homo sapiens
ccctggactacctgcagaaccagcgcatcattcacaggtcagtcaagtccaaggagatggccatgaacgtaacgcaaggagagaatccacaactggctacyttcaataaattcttattgaacatgacatttaatccccgtttaattcttgaaacagtaccctgaggtaggttgattgtcttcattttgcagattttgtaaa

SEQ ID NO: 543258 - DNA, 201 bp, Homo sapiens
tgagctaagactagaaaagtgaaaagaatataaccaggtactggacagcatcatgagtgcaggcacaggtgacatcgtatcacaagcttctaaggctgaagggggcgtgaattgctagctggagagtggaaggaaaagatcttcaagataaagctggaaaaataaacagggccaggcctcataggtttctgtagaccatgg

SEQ ID NO: 543259 - DNA, 201 bp, Homo sapiens
tccctatgttgcctaggctggccttgaactcctgggctcaagcaatcctcctgcctcagcctcccaaaactctgggattacaggtgtgagtcaccatgccyagcttcaaatagacattttaattctgacagtgttctgataaccaggattttctgctctcagaataccagatatcaatttgaaatggtgtcaaatagcttt

SEQ ID NO: 543260 - DNA, 201 bp, Homo sapiens
tttcagttaaaagcatgattgtgccactgggttgaatgggacttaactttctgtgtggttcttctctctctgcagggcacgtgcacatcacagatttcaayattgctgcgatgctgcccagggagacacagattaccaccatggctggcaccaagccttacatgggtatgggtttcatgagtgtcttttttttttctttcc

SEQ ID NO: 543261 - DNA, 201 bp, Homo sapiens
atcgtatatatgcaatgtcactttttaagacaactaatatttttaagaatttactacttttgaggtgctgtactaatatattacatgtataatttcatatrtcttcaactactagttcctgtaaataagtatgctgatgatgacacgttccatttctttcgatagccacaaaaacaggaagtgatgacaaagctggattct

SEQ ID NO: 543262 - DNA, 201 bp, Homo sapiens
atatatgcaatgtcactttttaagacaactaatatttttaagaatttactacttttgaggtgctgtactaatatattacatgtataatttcatatatcttyaactactagttcctgtaaataagtatgctgatgatgacacgttccatttctttcgatagccacaaaaacaggaagtgatgacaaagctggattctaactc

SEQ ID NO: 543263 - DNA, 201 bp, Homo sapiens
cagtcactttctaattttccctacacatgcagttgtttttgaatgtcccagcctttcacgtgtggctcccaaaaggaggaaaggagaaaaatgaagagggygaaaaggtgctggccctttaattctcccagaagtcacttcagcctgagggagagtggctggcaacattgtgggggaggtgcaacaacaatggccatcaag

SEQ ID NO: 543264 - DNA, 201 bp, Homo sapiens
tcaggacttgctgccctgcatcccagctgtttctaaaggggccaacatacagttcagaccattgcttcagagggtgtaagcagcaagccttggtggcttaygcatggtgttgggcctgtggatgcacagaagtcaagaattgaggtttgggaacctctgcctggatttcagaggatgtatggaaatgcctagatgtcccga

SEQ ID NO: 543265 - DNA, 201 bp, Homo sapiens
atttcatatatcttcaactactagttcctgtaaataagtatgctgatgatgacacgttccatttctttcgatagccacaaaaacaggaagtgatgacaaarctggattctaactcccgactcccaaattctctaagaccctcagcattaacatatattttattttaatgttattatatatgtatcattacttttacaactc

SEQ ID NO: 543266 - DNA, 201 bp, Homo sapiens
ccttgttattttttgtattggacacttgaatctaataatgtgataaatctaggaaaatcagatttctcccatccccagggtttgctgttttttgttattgwttttatttttattttttattattgttgtaagctgtctccatgccaaggatcagctgaggtgtaaacataagatcttcttaggtcttttctgagcctgcac

SEQ ID NO: 543267 - DNA, 201 bp, Homo sapiens
agggcttgtggactgtgggccctggaagaatctgatgacatgccctccaattacagctgtatctcatcaaaaccacagacacatgtaaatggaaatgccarcacttcaagattctctgaaagcagttgactgtcatgccaacagctaacataataggcttgtttgcctgagcttttggcacggcccttttgttccctttag

SEQ ID NO: 543268 - DNA, 201 bp, Homo sapiens
actactagttcctgtaaataagtatgctgatgatgacacgttccatttctttcgatagccacaaaaacaggaagtgatgacaaagctggattctaactccygactcccaaattctctaagaccctcagcattaacatatattttattttaatgttattatatatgtatcattacttttacaactcttaaaccaaacatttt

SEQ ID NO: 543269 - DNA, 201 bp, Homo sapiens
aacatggtgtagcttggtcaataaggaaataaattgcctttctggctggagaggcaaagggtagacaatacattgtgccagctgaacttcctgtctctccrctctggagaagagccagtcacaatgtatgactcagcacgccgggcacctctcccacgccagccaggcctgcccagccacttgctgaatcacaagtggcca

SEQ ID NO: 543270 - DNA, 201 bp, Homo sapiens
cccatcttttttactgtgcaaactgtagatttttgtttattttatttgaggctatagtttatgtcttgaatcacacacatatgagtattactttctgtgargttttcatgacccctgcaatcaaacttgggtccttctgttagtttctatcacagtatccttcacttttctttcacaattcttgccatattctataactac

SEQ ID NO: 543271 - DNA, 201 bp, Homo sapiens
tttctgtgaagttttcatgacccctgcaatcaaacttgggtccttctgttagtttctatcacagtatccttcacttttctttcacaattcttgccatattstataactacatatttgtttgttaaatatttgtttatcttttatagatgattggcttcaggaagagggaaaccatgtccttttgttcagtcctttattctc

SEQ ID NO: 543272 - DNA, 201 bp, Homo sapiens
aagcgtgagtcatctgcaccaggcctgaagcattctgtaatggagaaatacctgggtgctatggaagggcagagggggaaacacagaggagtaacatctartttacgtttgtcaaggagaggccaggaaagactaactacaggggagataaactccaaccaagagtctttaagtcttccaagacttacgtacaagtttctt

SEQ ID NO: 543273 - DNA, 201 bp, Homo sapiens
aacaacaaacaaagatagatgcatagagtttttcactgttgcactatttatattagccaaaaaccgggaaacaacctgaatattcatcaagtggggacagrttgagtaatcatgtgacatacataaattgcagcactgcacacttgagaaaagaagtgagaaatgtctctatttcctagtgtggtttgctctccagagtat

SEQ ID NO: 543274 - DNA, 201 bp, Homo sapiens
tcctagatcttaaaggctccttattcaatttttacaaaaaggatttgcaagtggaactgaaactccaagtaccatctattgctcattatttatttacctakttttgagcctgattttcctgatcccacctgtgctcagggggctaagaaacactggtaatgacctctaatttcaaagctcactgtcattacttatttatgg

SEQ ID NO: 543275 - DNA, 201 bp, Homo sapiens
acttgagaaaagaagtgagaaatgtctctatttcctagtgtggtttgctctccagagtatactgttaagtgaaaaaagcactgtggcctcaaatttatctrtagattctatacaatccccatcaaaatctcagctggcttctttgcagaaattcacaagctgatcttaaaatgtgtatagaaatccaagggactcaaaatt

SEQ ID NO: 543276 - DNA, 201 bp, Homo sapiens
acccttgtgaaagattaattgtgtaacagtgtggttaagaatgtgacttctggagccagattgccttcattcaaaacacacttcactcatttcctagcccygagagctttgacaagttgcctaaactttgtcttagtttttccagggatcaaaagaatacttacttagaaaaaaaatcttacttacaaaagaaatcttaca

SEQ ID NO: 543277 - DNA, 201 bp, Homo sapiens
tatgcaacacgattcagtaacaggcagaaacttttattcttactgactcatattctttatattcatctgaaaagattgacatttaaaggagccaattgtamaatgggaaatccactgtgtgaatatttcttgtacatcagaatttgccttaaaaatgtttttaacttagagcacatctgtactgttctccccaaatgtccc

SEQ ID NO: 543278 - DNA, 201 bp, Homo sapiens
agagcaagatgacattaggtcttgggtgactcctgacccactatcctaatgtatattttcatttcctaccaatgtaagtaccccatccaattctatcaatwccatagtgtctaaaattcttgtatttttcttattcaggaaatgctacaaccagaggaacagtaatgtctgcctgacatatcagagaaaatgacaattatg

SEQ ID NO: 543279 - DNA, 201 bp, Homo sapiens
caagttcccaggtgatgctgatgctgctgatctgggcactacattgtaggaatcaattggctctaaaaccttctctaccttccacttctacatgagcatasataatcttgtagctgagtcagcttggaaatctatgcagactaaagtagacagttgcatgtctggctgctcatctgaatcacctgtggaatttgttgtttt

SEQ ID NO: 543280 - DNA, 201 bp, Homo sapiens
gtaaaagactgaacacatagagcttaatttgccaaaggtcacagtaaacaacaagatcacaatcaatgaattttggtactattttataactaagcttagayaaaaaggagaaaaggtgacatatagaaacctaataaatattaagtaaataattaaatggaggtagcacatggagggaaagaaatagaatgaaaagaaaga

SEQ ID NO: 543281 - DNA, 201 bp, Homo sapiens
tttaaatatgataatgtggtaactctggaaatcaggttcctcctttcttcatggtttgctattttttgattgttgaaggctgtagttatccattgtttagygacttctccaaacaatgtttgcagagattgtctgctttgttgtgtcatcactgaagtttctgttactttagcctgtgctcagctaatgttttgactgaga

SEQ ID NO: 543282 - DNA, 201 bp, Homo sapiens
gcttagcagcaggctggatactatcagggagcagacaaagaagtttgatacagggcttgtggactgtgggccctggaagaatctgatgacatgccctccarttacagctgtatctcatcaaaaccacagacacatgtaaatggaaatgccaacacttcaagattctctgaaagcagttgactgtcatgccaacagctaaca

SEQ ID NO: 543283 - DNA, 201 bp, Homo sapiens
atagaccacctactcccaaagtctgagctcttagctcaagaacactctgctctgatctgtagggtctcatttgtctctgagactctttaatgtgtaaatayatttgataagttttctcttctaatgtaattccaggtattccttccaagatgaggaagacatgttcatggtggtggacctcctgctgggtggagacctgcg

SEQ ID NO: 543284 - DNA, 201 bp, Homo sapiens
attactatataccatcagtagaatatatcctaataacaagaaagaacagcaaaaatatcttaaagtgttttcagtaatggcattgttgggggtaatgttgmtactgttattttgaaagtgttgagtgtatacagtgggatagaaccaacaagtatttataatgatatcattgagaaccaagattttcattgagggagaaga

SEQ ID NO: 543285 - DNA, 201 bp, Homo sapiens
caagatagaactgggaaattggaacctaggaaaaattctgtgcaccttccacttttacccttgtaattaacaatgactaatatttcttgaaatctttcccyggaccagacaaggtgttaaatgttttacattcatttatttgtttatttttctcagcagccccatggggtggactatacttatcactactttataatgaga

SEQ ID NO: 543286 - DNA, 201 bp, Homo sapiens
tcctaacaaagccaaataactcccattcagtgcgcattacccggtgtgccagattcacacattgtctcattagataatcacaccagtgttgttaagagagycccaattcccattttacagatgagagaattgagacatgcacagggtaagtttgtcaccaaaggtcacaaagctagcaagtagtcaagctgggattctaat

SEQ ID NO: 543287 - DNA, 201 bp, Homo sapiens
acacagccagtgattggcagagcatgaaattaaacccaagtctagaaacatgccgtgcctgagacatggacgatgatgtgacaatgatgaaggtagaatgkctgacattgctaagctcttcctaaatgttaagcactgttgtaactgcatgcattgtcatttaaactaaaaacagttctgtgaggccactactatcgttac

SEQ ID NO: 543288 - DNA, 201 bp, Homo sapiens
gaaggtagaatgtctgacattgctaagctcttcctaaatgttaagcactgttgtaactgcatgcattgtcatttaaactaaaaacagttctgtgaggccastactatcgttacagttttattattgcataatatattaacatataattaatgtagtatattgtatatatagtactattgttatagtatatattgttctcac

SEQ ID NO: 543289 - DNA, 201 bp, Homo sapiens
ttctcattttgaaatacagatagagcatcccaaatccaaaatgctccaaaatccaaaacattttgaacaccaacatgacactcaaaggaaatgctcattgragtattttggattgatttggggatttgggatggccaaccagtatagtgcaaatatttcaaaatctgaaaaaaaaaattgaaatgcagaacacttctggtc

SEQ ID NO: 543290 - DNA, 201 bp, Homo sapiens
gtttatgggattagggataggggacactgtctattttccttcagtcctacagttgaaagcatttagagggaatttgtatgatttttttttgtccttctatyctttcttatggccttgatgtttgcattttattggcagctactcgaacctaatccagaccaacgattttctcagttatctgatgtccagaacttcccgtat

SEQ ID NO: 543291 - DNA, 201 bp, Homo sapiens
taaataagcgaagagtttatccatgaaggcctatgcatgcctgtgtgtgttgactgatgaatgaggctactgagagagattagaaaattagaaatgtttgyctgctgtgagcaatctagcaacggatgataaacatccataaaagtgtttatatttttgatcctggtaattctcctttggaggaacatgttgagaaaatat

SEQ ID NO: 543292 - DNA, 201 bp, Homo sapiens
tatattgggtacatggagtctatagattaattcagggataactaacatctttttaaaatatcaaatttccaattcatacattttatatatatatatatatrtgtgtgtacatgcatatacatatatatgcgtatacatttccttatttatgtagatattccttaatttctctctttggttttagtttttcatgtagaggtc

SEQ ID NO: 543293 - DNA, 201 bp, Homo sapiens
gctaaggtaggaaggctgcttgaggccagcctgggcaacatagtgagacctcatctctacaaaaaaaaaaaaaaaaaaaaaattagccagtcatggtggtacatgcctgtagtctcagctactcaggaggctgagatggaaggacaggttgagccttggaagtggaggctgcggggaactatgaatatgccacagcactcc

SEQ ID NO: 543294 - DNA, 201 bp, Homo sapiens
tgatcaacatggtgaaaccctgtctctactaaaaatataaaaattagctgggtgtggtgtcaggtacctgtatccccagctacttgggaggctgaggcagsagaatcacttgaacctgggaggtagaggttgcagggcgtggagattgtgccattgcactccagcctgggcaacaagagcgaaactccatatcaaaaaaaa

SEQ ID NO: 543295 - DNA, 201 bp, Homo sapiens
agattttaagtacaattatgtctcaattagtaaaaagttggctagataaaatatttgaccaccaccagttgacattgacctgtaatttattttttaaacctttatatatatatatatatattagagagatggggtttcaccatgttgcccagtctggtctccaacttttggcctcaagttgtcctcctgcctcagcctccc

SEQ ID NO: 543296 - DNA, 201 bp, Homo sapiens
ttttaagtacaattatgtctcaattagtaaaaagttggctagataaaatatttgaccaccaccagttgacattgacctgtaatttattttttaaacctttatatatatatatatatattagagagatggggtttcaccatgttgcccagtctggtctccaacttttggcctcaagttgtcctcctgcctcagcctcccaaa

SEQ ID NO: 543297 - DNA, 201 bp, Homo sapiens
caggtaccttccgagcatgcgtggggaagtagcacgcaggcgcggcacgccccgcgcatgcctggtgcacagagtctgcaggtcgggcggtagcgacaggycagagctgcggcctgagcagccagcgtccggcatgaaggtctggggtctggctgctgcctgcttcttgctccagcaccatggaatgcctgcgcagtttac

SEQ ID NO: 543298 - DNA, 201 bp, Homo sapiens
ttacccttcttggtagggtaggggagcaaagttattactgatatcattcaaaaacattttctttatatgaaatcacattatgtacacacctcaaaaggaartggtcttgacatttttagttgtggattttgttttacctgatagtggtattggctttgcactaattcatctgcattcacatatctggattttcctgtaact

SEQ ID NO: 543299 - DNA, 201 bp, Homo sapiens
aaaattagccaggcgtggtggtgcacgcctgtagtcccagctactcaggaggctgaggcaggagaatcgcttgaacctgggaggtggaggttgcagtgagscaagattgcaccactgcactccagcctgggcaacagagcaagactctgtctcaaaaaaagaatacaaagtcaaacgtgaaatactgaaagttagttcttt

SEQ ID NO: 543300 - DNA, 201 bp, Homo sapiens
gtctataggagaaagacttttttttttaaatttttttagtatttattgatcattcttgggtgtttctcggagagggggatttggcagggtcataggacaayagtggagggaaggtcagcagataaacatgtgaacaagggtctctggttttcctaggaagaggaccctgccgccttccgcagtgtttgtgtccctgggtac

SEQ ID NO: 543301 - DNA, 201 bp, Homo sapiens
tcaaattttctgcagtgggtttatgtatttgtgaaatataaggctgaaagctagactattacacaaatataaagctttctttgatataaattttcctttartgttctatggaacttatatattcatattaattttatttttgctgatgagaagcaagataaaatatatatattgtgagtttttattgtgtgattaacacag

SEQ ID NO: 543302 - DNA, 201 bp, Homo sapiens
cgagcatgctgccttcaagcatctgtttaacaaagcacatcttgcaccgcccttaatccatttaaccctgagtggacacagcacatgtttcagagagcacrgggttgggggtaaggttatagattaacagcatcccaaggcagaagaatttttcttagtacagaacaaaatggagtctcctatgtctacttctttctacac

SEQ ID NO: 543303 - DNA, 201 bp, Homo sapiens
agtttcttttcttttgaaaaaaaaaaccttgatttttttgaaaaacaaaaatgaacactgatttggtttagtcttaatccacaattagtaaagtattaaaycaaattttatgaatgttcttttttcctacagctctacaatttgcatatatatatgtatgtatacatatatatgtatatacatgcatgtgtgtatatacac

SEQ ID NO: 543304 - DNA, 201 bp, Homo sapiens
ggttatagattaacagcatcccaaggcagaagaatttttcttagtacagaacaaaatggagtctcctatgtctacttctttctacacagacacagtaacartctgatctctctttcttttctccacatttcccccttttctattcgacaaaaccgccatcgtcatcgtggcccgttctcaatgagctgttgggtacacctc

SEQ ID NO: 543305 - DNA, 201 bp, Homo sapiens
tttgtcactaagtatatgatacacatgttgggagtatgttaattattttctcttttaattgaagtgaaaagagcagtgctgggattgaccatgcagaagaratggagttgctgttggaaaactactaccgattggctgacgatctctccaatgcagctcgtgagcttagggtgctgattgatgattcacaaagtattattt

SEQ ID NO: 543306 - DNA, 201 bp, Homo sapiens
aaatcattccctgccaaacctaagatagtcactaacagatgttaaaattaagaagagtatttcttcttttcttataggaaaaatatttaaaaataataaartagtctgaaggcctccacatactttgagagttgtattttagctctatgtgaaaaccaatcatgtgaccacaggaattctcttaatttattcttcaggtga

SEQ ID NO: 543307 - DNA, 201 bp, Homo sapiens
agctcgtgagcttagggtgctgattgatgattcacaaagtattattttcattaatctggacaggtaagaaagcattatataaaactaagtttttttaatamaataattataagaaagtttttaaggaaatattttgtgaggaattacgccatcattatcatctatactacattattatttttttttttgttgtgtaggttt

SEQ ID NO: 543308 - DNA, 201 bp, Homo sapiens
acagcttgaacctgggaggcagaggttgcagtgagccgagatcgcgccactacactccagcctgggagcagagtgaaactccatctcaaaaaaaaaaaagacaagacaagacaaaggctagcttttccactggtagctgaatgctatatactaatttaggaagtttttgtcactaagtatatgatacacatgttgggagta

SEQ ID NO: 543309 - DNA, 201 bp, Homo sapiens
tgaaagctgtgataactccagagtgtcttctgatattagattatcgtaatttaaacttagagcaatggctgttccgggaactcccttcacagttgtctggwgagggtcaactcgttacataccctttaccttttgagtttagagctatagaagcactcctgcaatattgggtaagtctgtttttatttagcttcttgggtt

SEQ ID NO: 543310 - DNA, 201 bp, Homo sapiens
cagcttgaacctgggaggcagaggttgcagtgagccgagatcgcgccactacactccagcctgggagcagagtgaaactccatctcaaaaaaaaaaaagacaagacaagacaaaggctagcttttccactggtagctgaatgctatatactaatttaggaagtttttgtcactaagtatatgatacacatgttgggagtat

SEQ ID NO: 543311 - DNA, 201 bp, Homo sapiens
aaaggattttaaaaaaacccttaactcataactggatttaatctaaagaaggtcagtaatggtttatatttgcatttcaacattttggggatattacttamaataccataaattcttaactaaattagcaataccataagtagcattctaatttgaaagaaaatcataatttgttttattctctattttcagacaaaattt

SEQ ID NO: 543312 - DNA, 201 bp, Homo sapiens
ttaactaaattagcaataccataagtagcattctaatttgaaagaaaatcataatttgttttattctctattttcagacaaaatttgacaaacagggaaaygttacttcttttggtgagtgattagcattctaaatcattttttaaacatttaatgagtgaatctgatagaaatcaagaaattgtagtattttgagtaaaa

SEQ ID NO: 543313 - DNA, 201 bp, Homo sapiens
agcttgaacctgggaggcagaggttgcagtgagccgagatcgcgccactacactccagcctgggagcagagtgaaactccatctcaaaaaaaaaaaagacaagacaagacaaaggctagcttttccactggtagctgaatgctatatactaatttaggaagtttttgtcactaagtatatgatacacatgttgggagtatg

SEQ ID NO: 543314 - DNA, 201 bp, Homo sapiens
aacctggatgtgcatctggcacagtgtgatgctggattctgtgtcctcattagtctaacgagtctactctgttgcccacatcacctcccattaggaccacyatgcccttttaaaaagtggtctttataagatgtaagtattatgacacccttctgcatacaactattcaatggcttttgattagccttaggataaaaatcc

SEQ ID NO: 543315 - DNA, 201 bp, Homo sapiens
cttgaacctgggaggcagaggttgcagtgagccgagatcgcgccactacactccagcctgggagcagagtgaaactccatctcaaaaaaaaaaaagacaagacaagacaaaggctagcttttccactggtagctgaatgctatatactaatttaggaagtttttgtcactaagtatatgatacacatgttgggagtatgtt

SEQ ID NO: 543316 - DNA, 201 bp, Homo sapiens
tgacacccttctgcatacaactattcaatggcttttgattagccttaggataaaaatcccgtcctgccgcaccgacttgtccatcttgtgggtagccactygttactacctctctcagtgtccttcccagacatgctgcttccactcctctcccctcagatccccgttttgcttagttacttcctcctcatctttcaggtc

SEQ ID NO: 543317 - DNA, 201 bp, Homo sapiens
ttcagcatgtaatgagtatcacagtcagaaacaataggattatcatgagaatggaggtaaaatattttattttcatctatgtttctccaatacaatcttayaaaagttaccttctaactatcttgattagtatctaggttaaaagtaattttggaatagaaatagctacctgaaacataggatgttttatagcttaatatg

SEQ ID NO: 543318 - DNA, 201 bp, Homo sapiens
tgaacctgggaggcagaggttgcagtgagccgagatcgcgccactacactccagcctgggagcagagtgaaactccatctcaaaaaaaaaaaagacaagacaagacaaaggctagcttttccactggtagctgaatgctatatactaatttaggaagtttttgtcactaagtatatgatacacatgttgggagtatgttaa

SEQ ID NO: 543319 - DNA, 201 bp, Homo sapiens
tgatcagttgtgtaacaggctatctttgaggaagtgagctctcaatcattggagccaatgataacagcatagctataaatgggattccttccttgtgagasattaaatttaaattctgtgattctgtacattaactaaaaacagtgtgctgcaaaatattaccactctgaaaatgacggtgaggaagaatgtttttctaag

SEQ ID NO: 543320 - DNA, 201 bp, Homo sapiens
tgggattaagttgtcacaggcactatggcccttgcgagttgctttctcaaacttccttcagtttccctatctgtcagttaagtcggtattacctgcttcayagggttatgggaagaattaaacaatatgtgtaaagcacttactagcacactgcctaacacaataagttagaaatataatttgtgtagaactctgacaaca

SEQ ID NO: 543321 - DNA, 201 bp, Homo sapiens
taatttgtgtagaactctgacaacatacatttaaacagatgttagtaattctggtataaggtttgtcataaccaaatggaaatgtaggaaacatttataaygttcttaaaagatagaaaattcacctccattttctttgtacttgaagatggcaccactggaataaatacttaagacactgatactgcttatagtcctttc

SEQ ID NO: 543322 - DNA, 201 bp, Homo sapiens
tttctggtagtaaccaaaaattgtcttgatggtggtgggaggactgctctgatggaaaaatctaagccatttaatgtatttggtttagccctctctgtttrtttcttttatagaaaggaagaaaactgaattataccaagagttaggtcttcaagccagagatttgagatttcagcatgtaatgagtatcacagtcagaaa

SEQ ID NO: 543323 - DNA, 201 bp, Homo sapiens
aaaaagctagcattctatgtattaaccttacaacagactctgtaagtttgagctttaaaaaccaaactttgacataaccttatttcttgtatttgcccccttttttttataaaaggtgaataaaaagaaataatttaatatcaccattgtatggattcctaatcaagatttcacgttctcagcccctgagactagttttct

SEQ ID NO: 543324 - DNA, 201 bp, Homo sapiens
accttctaactatcttgattagtatctaggttaaaagtaattttggaatagaaatagctacctgaaacataggatgttttatagcttaatatgctattatragtagaactcattttatatggattatatgcacatgttcaataggcataacactgctgtgttttaagttggaaaagctctgactgtggtgttcattctcac

SEQ ID NO: 543325 - DNA, 201 bp, Homo sapiens
ggtttttttttttttaacagtatttgaaagctgtgataactccagagtgtcttctgatattagattatcgtaatttaaacttagagcaatggctgttccgkgaactcccttcacagttgtctggagagggtcaactcgttacataccctttaccttttgagtttagagctatagaagcactcctgcaatattgggtaagtc

SEQ ID NO: 543326 - DNA, 201 bp, Homo sapiens
ttcaaaaacattttctttatatgaaatcacattatgtacacacctcaaaaggaaatggtcttgacatttttagttgtggattttgttttacctgatagtgrtattggctttgcactaattcatctgcattcacatatctggattttcctgtaactggcagcatgtatctgcataaaaatctcttggattggggccatgtaa

SEQ ID NO: 543327 - DNA, 201 bp, Homo sapiens
atttcttcttttcttataggaaaaatatttaaaaataataaaatagtctgaaggcctccacatactttgagagttgtattttagctctatgtgaaaaccartcatgtgaccacaggaattctcttaatttattcttcaggtgaagtgcaccggtttagaacctctgacgtctctcaagccactttagccagtgtagcccca

SEQ ID NO: 543328 - DNA, 201 bp, Homo sapiens
taaaactaagtttttttaataaaataattataagaaagtttttaaggaaatattttgtgaggaattacgccatcattatcatctatactacattattattwttttttttgttgtgtaggtttcatccatgtggtctgtatagatttgatgaatgtgctgtatatagttagtgggcccttctaatctgaataggtgttctcc

SEQ ID NO: 543329 - DNA, 201 bp, Homo sapiens
aaatcgtacagaaagtgcttcccatacataagttaactcgttggactgttggccaagatactacttattttgagctttataatcatcatagctacatgtcktggctgttgtgcctggccagtgacctaagtgcctgctagatttgcttaacaatgatcttgaacctttgctaatgactgcagctccccttttaatactaga

SEQ ID NO: 543330 - DNA, 201 bp, Homo sapiens
aagactcttctggcagatagaagcatggaattgaaaaatagcctcagactggatggacttggatcaggaaggagcatcctaacaaaccgttaggaacagcsccgtggatactgaagttttttttatggtagttacaggaaacttctgatactctttttattattttcttgtatagagtcagacacttgaaaaaaactaatg

SEQ ID NO: 543331 - DNA, 201 bp, Homo sapiens
gtctcctatgtctacttctttctacacagacacagtaacaatctgatctctctttcttttctccacatttcccccttttctattcgacaaaaccgccatcrtcatcgtggcccgttctcaatgagctgttgggtacacctcccagacggggtggcggctgggcagaggggctcatcacttcccagacggggcggccgggca

SEQ ID NO: 543332 - DNA, 201 bp, Homo sapiens
ctgtgggtattcaagtctctgatataaaatgacccagtacagtcaaccttgcatatctgcagatacagaacccactgactgtgttttcacagaatagcttrttgtaagttttctagaactgaacctggatgtgcatctggcacagtgtgatgctggattctgtgtcctcattagtctaacgagtctactctgttgcccaca

SEQ ID NO: 543333 - DNA, 201 bp, Homo sapiens
acttgcccacaggcatagagctggaaaaataacagaattaggacatgaccccaaagacttgcactttctactgctctgttgcctttctgtattaagataayacttaactcccagagtttttcatttcactgtggttttgtacagtcatccctcagtatccaagaagaattggttacaggatccccacagataccaaagtct

SEQ ID NO: 543334 - DNA, 201 bp, Homo sapiens
ttgcttagttacttcctcctcatctttcaggtctcaaagtagttgtcccttcactgaatgcaccgacaacctggcccagtaaagttactttgtcgtctgcrcccaaataatcctacccttccatctgctacattccttaaatctgcaatcccttgttcaaagcctgcaaaagagcatgagctccttgaagcaaagacagta

SEQ ID NO: 543335 - DNA, 201 bp, Homo sapiens
catgggccctaaagtcagagcgcctgggattaagttgtcacaggcactatggcccttgcgagttgctttctcaaacttccttcagtttccctatctgtcarttaagtcggtattacctgcttcatagggttatgggaagaattaaacaatatgtgtaaagcacttactagcacactgcctaacacaataagttagaaatat

SEQ ID NO: 543336 - DNA, 201 bp, Homo sapiens
cacactgcctaacacaataagttagaaatataatttgtgtagaactctgacaacatacatttaaacagatgttagtaattctggtataaggtttgtcatarccaaatggaaatgtaggaaacatttataacgttcttaaaagatagaaaattcacctccattttctttgtacttgaagatggcaccactggaataaatact

SEQ ID NO: 543337 - DNA, 201 bp, Homo sapiens
tggtataaggtttgtcataaccaaatggaaatgtaggaaacatttataacgttcttaaaagatagaaaattcacctccattttctttgtacttgaagatgrcaccactggaataaatacttaagacactgatactgcttatagtcctttcttcactgagtagttacataatacatcattttactagtggcttttcttttaa

SEQ ID NO: 543338 - DNA, 201 bp, Homo sapiens
gattctcaggtgactaaaaagctagcattctatgtattaaccttacaacagactctgtaagtttgagctttaaaaaccaaactttgacataaccttatttyttgtatttgcccccttttttttataaaaggtgaataaaaagaaataatttaatatcaccattgtatggattcctaatcaagatttcacgttctcagcccc

SEQ ID NO: 543339 - DNA, 201 bp, Homo sapiens
atcatacatagttctttgaacccagaggatctagtttttgaatcatctggaataggcattctagaattatctatgttctgaaatgttaccagcatttcaarctactacagatttctgtatttaatcagaggattcactgatcctgaatattctaaaaagattgttttaattcttatgaaaggtcatgttgttatctagatc

SEQ ID NO: 543340 - DNA, 201 bp, Homo sapiens
tcaaccaaatctgtgcctaaagataacatcatacatagttctttgaacccagaggatctagtttttgaatcatctggaataggcattctagaattatctaygttctgaaatgttaccagcatttcaagctactacagatttctgtatttaatcagaggattcactgatcctgaatattctaaaaagattgttttaattctt

SEQ ID NO: 543341 - DNA, 201 bp, Homo sapiens
aggtgcccctcacctcccggacggggcggctggccgggcgggaggagaaagactcttacgagagttagctccttgtcaaccaaatctgtgcctaaagatarcatcatacatagttctttgaacccagaggatctagtttttgaatcatctggaataggcattctagaattatctatgttctgaaatgttaccagcatttca

SEQ ID NO: 543342 - DNA, 201 bp, Homo sapiens
aacttagcattttgcagccactgatccttgagaccttggatgctttggtggaccccaaacattcttctgtagacagaagcaaactgcacattttactacaraatggcaaaaggtaaatatggatgatgtatcacattgggagttggagacaaatatcttaaaatcaattattaacattttgtttcataactttttttaaag

SEQ ID NO: 543343 - DNA, 201 bp, Homo sapiens
ggccctgtagtgggtatgagactttcttcaaagagtctttgatggcagatttttgttcatttttctagaactaatcaaaataataaaaaatgggccagtaktggtagcatgtgcctttagtcccagctactcaggaggctgaagtgggagggtcaccagagaccaggagtttgtgaccagcctaagcaacatagcaagatc

SEQ ID NO: 543344 - DNA, 201 bp, Homo sapiens
gtgcatgaagagtcttttaaattatgcgaaaaggaagaccagacattttcttaaatctcagaacacgatgttgcacatttgttcatccaactctgagataycagtaataattagaaaggtaaaagggtgattggaatccatcagttattttaatgcctcacctaagccattagttttaaaaatcattccctgccaaaccta

SEQ ID NO: 543345 - DNA, 201 bp, Homo sapiens
ctgcagctccccttttaatactagaacaggtcaatcacaattcagagccataaagaggcttgaacctatgttctgcaagataatacgcaggcagaagcatyttgaaggcagcagagagtagtatttaaaaatgcatgctttgaaaggtcatgatctctaacttttctctgaaatggttcgggggtggggatgaggggggaa

SEQ ID NO: 543346 - DNA, 201 bp, Homo sapiens
taaaagttaccactgttattcattgttctggaagagttggccaatttagttaagaatacaaaatcagggccaggcacggtggctcacgcctgtaatcccarcactttgggaggctgaggtgggcatatcatttgaggtcaggagttttagaccagcctgaccaacatggtgaaaccccgtctctactaaaaaacaaaaaaa

SEQ ID NO: 543347 - DNA, 201 bp, Homo sapiens
tcagtcattaaatgtacttgattatacttcaccgctcacttcgactcagtctaatcacgttttaaatagacaattttaaaataaagatttgtcatttcagytcagtgggggtatttcataagtattcactataaaggatatctgtagaaaagaagtaaaatcataggtttcataatttatgagccagtcaactggaatgct

SEQ ID NO: 543348 - DNA, 201 bp, Homo sapiens
ggctcactgcaacctccacctcccaggttcaagcaattctcctgcctcagccttctgagtagctgggattacaggcataagccaccaaacccagctaattwtgtatttttagtagacatggggtttctccatgttggtcaggctgctctgaaactcccgacctcaggtgatccacctgcctctgcctcccaaagtgctggg

SEQ ID NO: 543349 - DNA, 201 bp, Homo sapiens
gctgtggacttaacaggctcgcccacaggtaccttccgagcatgcgtggggaagtagcacgcaggcgcggcacgccccgcgcatgcctggtgcacagagtstgcaggtcgggcggtagcgacaggtcagagctgcggcctgagcagccagcgtccggcatgaaggtctggggtctggctgctgcctgcttcttgctccagc

SEQ ID NO: 543350 - DNA, 201 bp, Homo sapiens
ggaatgcctgcgcagtttaccctgcctcctgccccgcgcgatgagacttccccggcggacgctgtgtgccctggccttggacgtgacctctgtgggtcctyccgttgctgcctgcggccgccgagccaacctgattggaaggagccgagcggcgcagctttgcgggcccgaccggctccgcgtggcaggtactgcccttcc

SEQ ID NO: 543351 - DNA, 201 bp, Homo sapiens
catgtaaggctcttttccgtatgtgatctcatctcatcacccattcaatagttgatattgtcttcattttgaagatgagaaaattgaggtttgagtaactygcctaaatttatatggctagtaaatggcagatctaaatccaaattcaaagtccatgttgttctttttctttaaaatcataatgcattccagaatttaata

SEQ ID NO: 543352 - DNA, 201 bp, Homo sapiens
ggacgtgacctctgtgggtcctcccgttgctgcctgcggccgccgagccaacctgattggaaggagccgagcggcgcagctttgcgggcccgaccggctcygcgtggcaggtactgcccttccccggcaacagccttgggacgctggtcttgcagtgaccttagactgctgccccagccgtccggcgcggcgcgcctgttg

SEQ ID NO: 543353 - DNA, 201 bp, Homo sapiens
agattttcacaaatgtgagtgcaaatatttgaggaataaaaggtattgaaatgaatgactttattaagaacatagcagtgtcctcaaatatgttttctcarttgtgctctcaaaagcctcccaaagtaactcctcgtcagcacctcattctccacttattggagaggctaagttgggttacatgctctgcaccctcaattg

SEQ ID NO: 543354 - DNA, 201 bp, Homo sapiens
ttttggctgattacaggaattatgttcatgggaagtggcctcatctggaggcgcctgctttcattccttggacgacagctagaagctccattgcctcctayggtatgaaggatatggttcacggcggtattgtggaagggttatgatcatgggccctaaagtcagagcgcctgggattaagttgtcacaggcactatggcc

SEQ ID NO: 543355 - DNA, 201 bp, Homo sapiens
atagcagtgtcctcaaatatgttttctcaattgtgctctcaaaagcctcccaaagtaactcctcgtcagcacctcattctccacttattggagaggctaakttgggttacatgctctgcaccctcaattgataatgcttgggaatccagtttcagcaagttggaggaaacttttaggacaagcattgacgttcacaatctc

SEQ ID NO: 543356 - DNA, 201 bp, Homo sapiens
acggcggtattgtggaagggttatgatcatgggccctaaagtcagagcgcctgggattaagttgtcacaggcactatggcccttgcgagttgctttctcaracttccttcagtttccctatctgtcagttaagtcggtattacctgcttcatagggttatgggaagaattaaacaatatgtgtaaagcacttactagcaca

SEQ ID NO: 543357 - DNA, 201 bp, Homo sapiens
cttcactgagtagttacataatacatcattttactagtggcttttcttttaaaaaagatactaaaattaatacttctgctttatttagatggcttctttayctaaaaagactcttctggcagatagaagcatggaattgaaaaatagcctcagactggatggacttggatcaggaaggagcatcctaacaaaccgttagga

SEQ ID NO: 543358 - DNA, 201 bp, Homo sapiens
cggctccgcgtggcaggtactgcccttccccggcaacagccttgggacgctggtcttgcagtgaccttagactgctgccccagccgtccggcgcggcgcgmctgttgctccgcgccctccgcaggcctcggcctcccgcgtgtcctgtgagcttgcacaggcccgcgggccgagctgcgtcccactcgctcagaatgcgac

SEQ ID NO: 543359 - DNA, 201 bp, Homo sapiens
tggcaggtactgcccttccccggcaacagccttgggacgctggtcttgcagtgaccttagactgctgccccagccgtccggcgcggcgcgcctgttgctcygcgccctccgcaggcctcggcctcccgcgtgtcctgtgagcttgcacaggcccgcgggccgagctgcgtcccactcgctcagaatgcgaccttgctatgt

SEQ ID NO: 543360 - DNA, 201 bp, Homo sapiens
caagcaatcctcctgccttggcctcctaaagtgctaggattacaggcgtgacaccatgcctggccaaattgattcttaatttgcctggtaaatactcaactttttttttttttttaaataagtcattgtttagcatgaatgtataagataatatatttgataagatactctaaaaacactattatgaaatgttcttataag

SEQ ID NO: 543361 - DNA, 201 bp, Homo sapiens
ctgaagcaggagaacagcttgaacctgggaggcagaggttgcagtgagccgagatcgcgccactacactccagcctgggagcagagtgaaactccatctcaaaaaaaaaaaagacaagacaagacaaaggctagcttttccactggtagctgaatgctatatactaatttaggaagtttttgtcactaagtatatgataca

SEQ ID NO: 543362 - DNA, 201 bp, Homo sapiens
ttaggaaacttactttttaaatattttgtccaaacctaagcaaataaatttgaaaacctagatgaaaaccctttctaggaaaatgtaaataattatcactrtattatagaacttggaaaattatttaagagacatagacagacacatcatagaataaatttaggaagatagtagttaaccacccaaaactgccaggtgttt

SEQ ID NO: 543363 - DNA, 201 bp, Homo sapiens
ggtgtagaatcagagtcattctgatcctctacatttgatactccttctgagctagtatcttgtctttcatcctagagggagaaaggtgtgagaaaatgtartttaacattaaaagataaacaagagatatacataaaagcatgagataaagaactactttaacttatacttttatactttcaaggacttgaccaaagcaag

SEQ ID NO: 543364 - DNA, 201 bp, Homo sapiens
aagcaaatgtggcaaaattttgctgattgttaaatctaggccatggggtttattacactagtctctcttaagtgtatgcctgaaattttttacactaaggttttttttttttaattcaagcctttggaacatcatctattaagccagatatattctagtacaagtaaatatggaattacctactctactatataacgaaca

SEQ ID NO: 543365 - DNA, 201 bp, Homo sapiens
acaatgaaactctatctctacaaaaaagttcaaaagttagctgggcatggtggtgcgtgcctgtggtcccagctaacttgggaggctgaagtggggggatygattgagcccaggaggtcgaggctgcagtaagccatgattgtaccagcgcactcaagcctgcgcgacagagcaagaccatgtctcaataaataaataaat

SEQ ID NO: 543366 - DNA, 201 bp, Homo sapiens
ctggccatgccatcggcaacctgctcgtcttgtccgtgaggccttcccagctggccgggctcaccctgcagctcctgcacctgtgcctgcccggggaattktgggccgtttcccactcctcttcaaccgtcagcgacatcttgggccttcttttccagtcaggtgggacggcgcccctatgaggctgtgtcttatccctcg

SEQ ID NO: 543367 - DNA, 201 bp, Homo sapiens
cagctcctgcacctgtgcctgcccggggaattgtgggccgtttcccactcctcttcaaccgtcagcgacatcttgggccttcttttccagtcaggtgggayggcgcccctatgaggctgtgtcttatccctcggaacacgggcaccccacagagggtcctgcgtcctgtggtctggagccccccctcaaggaagaaacccg

SEQ ID NO: 543368 - DNA, 201 bp, Homo sapiens
tatgcaatgactgacatacagcaggttgttggtaagaatatactgaatgaataaatgtgatttgctattctatctgttaaatttatttaataatgatctcmctataaatagtagctcagtatttttagtaataactattgcacataaagttttacatatttataattgtcaatatgatgattttacgagatgtgacataaa

SEQ ID NO: 543369 - DNA, 201 bp, Homo sapiens
gtgggccgtttcccactcctcttcaaccgtcagcgacatcttgggccttcttttccagtcaggtgggacggcgcccctatgaggctgtgtcttatccctcrgaacacgggcaccccacagagggtcctgcgtcctgtggtctggagccccccctcaaggaagaaacccgtgctgtctcctcacaactccataatgtttgga

SEQ ID NO: 543370 - DNA, 201 bp, Homo sapiens
agaaaagaatcagactgacaaggcccaggtgcatgcagtgagtttctactccaagggccatggagtcgccagttcacacagccctgctggaggcatccttycctttgggaagcctgacccacttccaacagtgctccctgccccagttccgggctgctccctgtggccagagaaggcggccttgaaggtgctgggtgaaga

SEQ ID NO: 543371 - DNA, 201 bp, Homo sapiens
aaaagaatcagactgacaaggcccaggtgcatgcagtgagtttctactccaagggccatggagtcgccagttcacacagccctgctggaggcatccttccytttgggaagcctgacccacttccaacagtgctccctgccccagttccgggctgctccctgtggccagagaaggcggccttgaaggtgctgggtgaagacc

SEQ ID NO: 543372 - DNA, 201 bp, Homo sapiens
tctttgtagaggactggagcccagagcatgccatggtcaactcgtatgttgaagtgaagacctccttcgaggtgtgcatgtgcttattacagatatgccayggtgctaagtaccccaggactacatgaaaaaataagaatagatgctgtatccatgatcatgaggcacacaggccagagcgccagctgtggaatcgcacag

SEQ ID NO: 543373 - DNA, 201 bp, Homo sapiens
tcatgtaagtttcaatcaatcaaccaataggaaaatcctaaagagtcaccttccaaatctgatattcattaataagtggtgtaaacaagatgacctgcacwatatatatatatatatacacatcatatatgtccaaaattacttatgtgttttatgtataaatcaggaagtcaaattatcttttaaaactaagttctccct

SEQ ID NO: 543374 - DNA, 201 bp, Homo sapiens
tttcatcacaggctattaggaattaacaaactactcattttttgttattcttagtttaggaagctaattatagacatgtcaattcatgaaaccttaaattwttactatttgtgttcaactgataaccaagtatcttaaactagttcaagaaaacctttattcatctggtgagtgctgttgagatttattttaccaaagtct

SEQ ID NO: 543375 - DNA, 201 bp, Homo sapiens
cagcgacatcttgggccttcttttccagtcaggtgggacggcgcccctatgaggctgtgtcttatccctcggaacacgggcaccccacagagggtcctgcstcctgtggtctggagccccccctcaaggaagaaacccgtgctgtctcctcacaactccataatgtttggacacctcagccccgtaaggatcccttgtctc

SEQ ID NO: 543376 - DNA, 201 bp, Homo sapiens
tagttgacctttctaataattctccctgttgctttggtagtgaaagatcaagaggttctacttgtggctcttcttgtgcaccctcagctgtgtacaagtarccctgtgtatttctggatgaggaaaggtttagaggtgatggggatggtgtactacttctggaaccattggtggttgatcccactggtaaaactggggagt

SEQ ID NO: 543377 - DNA, 201 bp, Homo sapiens
cagctgtgtacaagtaaccctgtgtatttctggatgaggaaaggtttagaggtgatggggatggtgtactacttctggaaccattggtggttgatcccacyggtaaaactggggagttagtcatcttcaaaggactttgtagatttactgtgctgtcctggggttcatttgcatttgcagattgaggctgatcattgttct

SEQ ID NO: 543378 - DNA, 201 bp, Homo sapiens
acaagtaaccctgtgtatttctggatgaggaaaggtttagaggtgatggggatggtgtactacttctggaaccattggtggttgatcccactggtaaaackggggagttagtcatcttcaaaggactttgtagatttactgtgctgtcctggggttcatttgcatttgcagattgaggctgatcattgttcttggcaggga

SEQ ID NO: 543379 - DNA, 201 bp, Homo sapiens
ctatctcctttctgtctttcaattatctcccttctattcccatcccatgggcaactactttaactcaaaaacccttaacactgcctgattattacagccgyctcgttgaagacactacctcagcctccctccctctaaaattctttttccatattacaccagacttatttataaattattttaatgatgttcttctcatag

SEQ ID NO: 543380 - DNA, 201 bp, Homo sapiens
ttatatgtgtaaaaaagagaggaaaataagatattttgtaaaagtaggacatactttcactaaatctgcaaagaaataagtaatgttgtaaatatttctcygcatcctttttacaattgtgctcctgaaaaaatgttttagtctatatcaggtggtttaaacataatgaattctggttgagatcgtgaaatggaattacaa

SEQ ID NO: 543381 - DNA, 201 bp, Homo sapiens
ctgactaggagacaaattgccatctccagtagctgatgaaacagaggactcaggcttctcagcttctgctgcagggagtggaggaggctgagtaggctgcyttaggtcatagtgctttaattctggaagtgcattaatatctcctggacaatcatcacacagaagacaagtgctatcattcacccccccttcaaagctttt

SEQ ID NO: 543382 - DNA, 201 bp, Homo sapiens
tctatctcctttctgtctttcaattatctcccttctattcccatcccatgggcaactactttaactcaaaaacccttaacactgcctgattattacagccktctcgttgaagacactacctcagcctccctccctctaaaattctttttccatattacaccagacttatttataaattattttaatgatgttcttctcata

SEQ ID NO: 543383 - DNA, 201 bp, Homo sapiens
caccttgttgtatgggtgaagcattgattgtttcttgttctttggatgcaagattggcttgattattctccaacacttgccttattacattaccatctacygccactttaagtacattctgaatatcacttaaattgatacttatgggagacaccaaaccaactgttggcagaacaacagcttgcaccatgccctgaggag

SEQ ID NO: 543384 - DNA, 201 bp, Homo sapiens
aacacctgacaatcaatttcatgaggacaaatttataaaactgtaatccagtgtatacatacaaaccaaaaattttggcaaacaccacaatgcatttaatktttttcattaaattactacctattcagtagagttattattaccagttgagaagatagaaaaaacaagtaacatgtacaattaaagctcaactattatgtg

SEQ ID NO: 543385 - DNA, 201 bp, Homo sapiens
taatttaaacaagtccaataagatttttttttaaattataatttttttaaaagtatagaagaatcttttacttgagaaaaattagaaaacgaacatggtcraaaagactttaaaatatatgtgattccaccacccatagataatggcttctcccaaaaccttaccaccacacacacaggatcaaagagatatttttctata

SEQ ID NO: 543386 - DNA, 201 bp, Homo sapiens
gagttaggccttccctgaattcagagaggcaaagcagtaaactctctctattctgccacttgtgaaaaggtgaagagccatattgtgaactgcctgtggasagaagcaaccttcctacaagcacaagggaacaaattctgtcaagaacctgaatgatcttggaagaggaccctgagctagatatgagaatgtagcctggct

SEQ ID NO: 543387 - DNA, 201 bp, Homo sapiens
gtagaggagacaggcatgtaaataaattataataaaatatggtagttttaattgacagaaacaacttcaatccaggtagagaacaaagagaaaagaaggaytgactttctcaaggatggacactggagataggtttctagaaatggaaaggctttagcagggaggcaatgtctaagctttttttttcctaagctgggtttt

SEQ ID NO: 543388 - DNA, 201 bp, Homo sapiens
gacatactttttaaacaaaagcttttagttaattgtggtaaattaaatatcttctgacaaggtgagtataatagaaaatggttgaccatagagaaaaccgkgagactaatttgcccacattccagaagagctgcatgaagatttctgaaatgtaggcattgtatccatatgaagcacttctaattttacactcctatgcca

SEQ ID NO: 543389 - DNA, 201 bp, Homo sapiens
ccctgaagttttctggatgaacaaacttgctatatagccagcttttctcattttttcctacaactagccgcttatagataactcaagagataatacattaygtttgggaagaggtaaattagaggttttgactaattgcttaaacactgatcctcatgcatttgcattatatagtaacacaaccttttgggagtataccta

SEQ ID NO: 543390 - DNA, 201 bp, Homo sapiens
gcacaatgcgtcatatgcttcatttaaactttcccaattcttagactgtcatgtccaatttacatgcagagaaactcaagcataaaaagactaagtaaccyggccagggtgataggtagtaagttacaggatcaacccaaactcttaactgctatacttgttcctcttaagaaagggtgtattcaaaaggtgaactcctga

SEQ ID NO: 543391 - DNA, 201 bp, Homo sapiens
taaatggtgttgggaaaactggctagccatatgcagaaaactgaaactggaacccttccttacacctcatacaaaaattaactcaagatagattaaacacktaaacataagacctaaaaccataaaaaactctagaagaaaaactaggcaataccattcaggacacagacatgagcaaacacttcatgaacaaaacaccaa

SEQ ID NO: 543392 - DNA, 201 bp, Homo sapiens
aattattagatcatttaacatatattctggaattagaagcaaaaaaagtgagaacatagctgagctccataaacatgcaaattatatttttattcaacaartatctgttgtcccaacttatgccaggcaccctgttaggcagtgaggaatgtgagagtgactatgacaaatgtggttcctgttcctagtggggaaggaata

SEQ ID NO: 543393 - DNA, 201 bp, Homo sapiens
aacaaattggcacaaaatgttaaacattgttcccaacactgtttatagaagttaatcctaatttggcttactaaggaaatgagagttgtatggttaggctratttcttaataaaactgcagagcatcatgctattagtcacacagtgaatttcaaaatttaagttttatattaaaaactgggtaaaggtaaaatgacttga

SEQ ID NO: 543394 - DNA, 201 bp, Homo sapiens
ggatgctgatatttgactttcacataattttcatcagtcataaatattcttttcatcttttccaatcatttaaaaatgtaaaaacaaaatcaaaaactacyattcttacctcatagaaaaacatgcgtatgctcacatttggcctgtgagctatagtttgccatccctgagtcaacctaaggaggcatattttgtggcaga

SEQ ID NO: 543395 - DNA, 201 bp, Homo sapiens
ctcaagctgcttccctagactctgtggggtaaaaggcatttattctccttggctgttagggatactttggtagaaaattttgaaagcaccgagctaaatgkaatattttcctacaaacctaatgtttcctttgagttttaagttatagttcactaatttataatttaaaggttacagactataagcttcagtaaggcagga

SEQ ID NO: 543396 - DNA, 201 bp, Homo sapiens
aacaaatttacaagaaaaaaacaactccatcaaaaagtgggcaaaggatattaacagacacttctcaaaagaagacatttatgcggccaaaaaatatatgaaaaaaaaaaaactcatcatcactggtcattagagaaatgcaaatcaaagccacaatgagatatcatcatgctagttagaatggcgatcattaaaaagtca

SEQ ID NO: 543397 - DNA, 201 bp, Homo sapiens
tgtgaaaagaaagttatggaggtttcctaaaagatattcagctcttccattattagataccctaggaagagcttttcaaactatttgtggtgaatgaccarttggctttgtttggttcttttttaagtttccaatctactgtggaccaatattttataaaatatagtaaaatgtcacaaagtcttggtataataaatgcta

SEQ ID NO: 543398 - DNA, 201 bp, Homo sapiens
tcttttaggtgatgtttgtatttgaaagcttttccacactcagtgcatttgaatttacgattacacccagactgcgtcacatgtctctgtaagaaaagaaytggtattttatttgaaaagcaaaagatctttagactaaagaacatccaatctactaagagtgacatttttgtgagcctgatggttgttttgttttgtttc

SEQ ID NO: 543399 - DNA, 201 bp, Homo sapiens
cagttttttatgacaagtctatgcctcagtcatttagcgagccatggttttctgcacacatattgctcctctttatcttttggctttggtttacataattycttactccttcactgtgttttcccataattttgactactaagattctacccagcctttaacggcttaactcaactactgcttcatgctcttccagctgga

SEQ ID NO: 543400 - DNA, 201 bp, Homo sapiens
ggctttcttatgtttcactgtttcctctgactggaatgcccttctccaatattccatgactggctccttcactgtattcagatatcccattctcagagaartctcccttctctgtgaaacctagcagctttcatcactttctatcctcttatcctgctgtatttttcttcacagtatgtattattttatttctgttttata

SEQ ID NO: 543401 - DNA, 201 bp, Homo sapiens
tattaggtacatccatagggcagagttcaggtatgtagatatacatcattctttgatgtaagaaactggaaatgtggcctaaccccaacatgtaccctcayaaaccctgtgtggctgaaaatttatttaatttttaaagttagaattaaggcaatattaatttcattgttgatggctgataactatgaggaccttgtaaaa

SEQ ID NO: 543402 - DNA, 201 bp, Homo sapiens
actgaaagcttcagcaatagattaggtcaagcagaagaagaattttagaacttgaagacaggtcttttaaaataacctagtaagagaaaaaagaataaaaraacaatgaacaaagcctgtgtgacatataagaaactataaagtaaccaaatattcgaatttttgatgtgttataaggcaaagaggaaacaaaagggatag

SEQ ID NO: 543403 - DNA, 201 bp, Homo sapiens
ttttctagcaactgattttttttttttttttttttttttttttttacttacagacaccctgggtcttggttactgattgtcattttcttcctaaaccttaragcttaatttgtggtccacttccagcatatgtatggcatttcacagcattcattttgtccccccaacaatttactccatgttagtgtttcttaatttttc

SEQ ID NO: 543404 - DNA, 201 bp, Homo sapiens
tttgggccttacaaaatcatccctccatgcaaaaagactgtatactgtaagttgaatcataggattttatttcttcaatgaaagtaagtaaaaataactgytatttaaatgaagtaatttttgtaaattgtaaactttatattacactagcttctaaagcctctgttttcaattttgtcttgctatgtaagttcattctaa

SEQ ID NO: 543405 - DNA, 201 bp, Homo sapiens
tgtcctgtagtgatatatctgccctctattactcctcatacaatagagatttatagtataatgaatgattgcttcttggccttttggctaagatcaagtgyatagtataatgaatgctgcttcttatttccagtttagtttaaggcaatgctccctggcaggcaaggccacatttataggaaggaaaataacaggagaggt

SEQ ID NO: 543406 - DNA, 201 bp, Homo sapiens
cttgagtgaattagtagcacctaggttcagaggattttattttctgtatggcctttgtagggtttctaactttttgaagtgtgatttaataacccttataycccactaaaagtaggatgcggagtttaaaaaagcttattaaaactaaaatttaaaataaattttgtttatgcttctgagatttttacatactaggatccc

SEQ ID NO: 543407 - DNA, 201 bp, Homo sapiens
cacttctttggcatttgcactgatgatacaaagacaatggtaggtcaaactgttggcatcttagcacttaccaaggcagcagcagcaaactatatccttgyagccctcactgccactcatttccagttaaaaaatttgccagtttcacttaagtacatccttgatgaagtagtaaaaattactttaataagttttgaccct

SEQ ID NO: 543408 - DNA, 201 bp, Homo sapiens
gatgttttgttttacctaagttacctgagtagcagtgtgaattaaaatcatctgtggacataacttattccagaaaataaataatatccaataaagcagamgatcatgcaaactaactacccattttcttatataaactttttggagaataagtgggctttgtgatgaaagaagtggacattcttggaaaacacaaacaaa

SEQ ID NO: 543409 - DNA, 201 bp, Homo sapiens
cacacagtcaattatttaaatagtttcaaccacaggagttggcatgattttcagcttttctcatcttatgaaaaaattttaagaaatattttgacatttastaatcccagaaggtaattctcctttgattggctttgaggcttatcgattagtagcagaactggttgtgaaaaataagatgaaggaagaggacaagaatta

SEQ ID NO: 543410 - DNA, 201 bp, Homo sapiens
tgctgtgttactttggcaatatttatcaaaatttaaaatgccgacctgttgatctaacaatttcttggcaccgtgcaaattaacacatgtatgcaaatatrcatacatatgtttatctgaaaacttgtttttaattacaaaaaaaccttaatagtcatctaagatatattgtttggtactgatatagaaagtcttccaaaa

SEQ ID NO: 543411 - DNA, 201 bp, Homo sapiens
tattttgaaaatgcaaatttgtttcagtgcagttggtttattagagaactacatgagcataaagagaatgtcacctttgcttatgcatgattttatctgcragaaacactaagtgaacacagaaaattgctgccagcttaactaagtcacataagaataaacaaaaagcacacctgcacacatctcaagttaccagccact

SEQ ID NO: 543412 - DNA, 201 bp, Homo sapiens
gcactccctattctccctcaatttatttcttttaaaaatacttgtcactataatatcttattgattgattatctactacactacaatgcaagttccattcrgacaggaattttttctgtttcgatcaccactgttcccctcatctagaacactggctgtagatactaatccctagataaatgatgtttagtaaatcggcaa

SEQ ID NO: 543413 - DNA, 201 bp, Homo sapiens
taaggttttctaatctgctgcatgttacaaacttgttcctaactttgaaaactgcatgaaaaattactaggtctgaggttcaggcacacccggatttattttgtgtgtgtgtgtgtgtgtgtgtgtgtgtgtgtgtgtgtgttttgtattttgtatttttttagtttttactttacacagtagtgaacaggaatcacagca

SEQ ID NO: 543414 - DNA, 201 bp, Homo sapiens
cttgtctaaggagcaagatggaaaaacaatgcaggagggtctatctttttaacagaaataattgctaatcaaaatgaacctttagaaactccaggcagtcwcatggagataattttgggcagcacgttcttatgtaagccaaataaccctgcagggagcctgttgtggaactgggtcccctaagatcttcctaccttatct

SEQ ID NO: 543415 - DNA, 201 bp, Homo sapiens
gtcttatttagaaacttctttaaagataaacattgtatttggtgaagtatcagtataccagcaaaatactacttcataaaaatttccagttgacagaagtytggattacagtccgttgccttattttaaatttctgttatacaactgtaaaagtcttgttataccatgaaatatgctgaatacatgcagacttaaaggaat

SEQ ID NO: 543416 - DNA, 201 bp, Homo sapiens
tggggaaaagtgcggaaagaagcaacagccgctccacccgggaccagaaaagtggccagtgcgtcccggccgcccgccctgcgccggggatgcggcggcgycggcgccggctaacggtccagggaggcggcaggggcggcgggagccgctaggcggagagagaccaggtaagagacataacggttcagggagagcgagcgg

SEQ ID NO: 543417 - DNA, 201 bp, Homo sapiens
aaggttttctaatctgctgcatgttacaaacttgttcctaactttgaaaactgcatgaaaaattactaggtctgaggttcaggcacacccggatttattttgtgtgtgtgtgtgtgtgtgtgtgtgtgtgtgtgtgtgtgttttgtattttgtatttttttagtttttactttacacagtagtgaacaggaatcacagcat

SEQ ID NO: 543418 - DNA, 201 bp, Homo sapiens
cataccaataccaagtcatcaagtaccaaattgtaaagttacataaaactgaagatcagaagctggatgatttgtttttcttttctgaatgttaagtgctrctactaaaatgctatcaatgggtcttaaagattagctgctactccattcaacaaaaaacagatttctatattgctagagtttaccctctaaatgatttca

SEQ ID NO: 543419 - DNA, 201 bp, Homo sapiens
aggttttctaatctgctgcatgttacaaacttgttcctaactttgaaaactgcatgaaaaattactaggtctgaggttcaggcacacccggatttattttgtgtgtgtgtgtgtgtgtgtgtgtgtgtgtgtgtgtgtgttttgtattttgtatttttttagtttttactttacacagtagtgaacaggaatcacagcata

SEQ ID NO: 543420 - DNA, 201 bp, Homo sapiens
ggttttctaatctgctgcatgttacaaacttgttcctaactttgaaaactgcatgaaaaattactaggtctgaggttcaggcacacccggatttattttgtgtgtgtgtgtgtgtgtgtgtgtgtgtgtgtgtgtgtgttttgtattttgtatttttttagtttttactttacacagtagtgaacaggaatcacagcatac

SEQ ID NO: 543421 - DNA, 201 bp, Homo sapiens
agatcattattccatctaagaattgaatatgttgacactctaaatatttttaaaataattctttagttttgtcagatgttttaatctgccagaaaactgartattagagaacccatcattacatacatgcacacgagattctgattacaagaggagaatgtaggttaagtgtttaatacaggtaagaatttgaaaaagttt

SEQ ID NO: 543422 - DNA, 201 bp, Homo sapiens
gttttctaatctgctgcatgttacaaacttgttcctaactttgaaaactgcatgaaaaattactaggtctgaggttcaggcacacccggatttattttgtgtgtgtgtgtgtgtgtgtgtgtgtgtgtgtgtgtgtgttttgtattttgtatttttttagtttttactttacacagtagtgaacaggaatcacagcataca

SEQ ID NO: 543423 - DNA, 201 bp, Homo sapiens
tttctaatctgctgcatgttacaaacttgttcctaactttgaaaactgcatgaaaaattactaggtctgaggttcaggcacacccggatttattttgtgtgtgtgtgtgtgtgtgtgtgtgtgtgtgtgtgtgtgttttgtattttgtatttttttagtttttactttacacagtagtgaacaggaatcacagcatacagg

SEQ ID NO: 543424 - DNA, 201 bp, Homo sapiens
agaatccaaagggcagtaaaggtatagttctcacttctactgcctgctaccatgtaagtaaatggaatttgatgtccagacactgttctaagcatttcacrtgcagtggcattactaccacaatacatgagcagctaataatttattactgcatggtcatcatagtgttccattaataaaacagattactctctataggca

SEQ ID NO: 543425 - DNA, 201 bp, Homo sapiens
ccagcaggctgaagtttggccaaattaaaatggggatgtatgggcatctgtttgttcgatggttattaaaacaatcttgctacatctcctgcactgtagcrgtaaccaaactcatcagggtgactgctgtttaaaacctgagaaccaatgacagtaacaaatggtgatcctaatttttttccccacttttcaatagctatc

SEQ ID NO: 543426 - DNA, 201 bp, Homo sapiens
gtagttaccaaattgggattattggatccagaggtaagcgaagacttttaaaatgtaagctggactgttgggtttaaaggaatcaactcccggatcctcarcttccatgtaaactctttcctagcatccttgaaaattcttctccctgctctcctttatacagtataccttgttctcactttcttaaaagaaaaaaagaga

SEQ ID NO: 543427 - DNA, 201 bp, Homo sapiens
ctatacctttcctgaagttgctccctctgcctagaaagccgttacccagtccaaatgagtaacttccacagatttttaaaaggccaattcacatctctctyattctgtaagtcatcgctgagccagctttctgctattcctaccctattccctgctaagggaaaactatcaaaaaagcgaatgccaacagattcctaaatt

SEQ ID NO: 543428 - DNA, 201 bp, Homo sapiens
ataccgaaagctatatttgagacctttcaggtgactgttttgggggaggggcaatattttcaaattctgaaatttcttatttagaaataattattggatcwcacacacacacacacacacacacacacacacacacacacacacacaaacttacctgtggttcttgttctctgaaggaaatgcagtaattgaaaacatccc

SEQ ID NO: 543429 - DNA, 201 bp, Homo sapiens
tctaataaaaatccagaagacttactatcatttgcaggataacatagtttaagctgaaggactgattatttagcatatgtgttaaattcaaaaacttgtattttttgaaattcacacccatgtgtttctaaccatttcaaatatgttcatgggaatatcttactgcaacctctaagaaggcacagtaaatgcctaactgaa

SEQ ID NO: 543430 - DNA, 201 bp, Homo sapiens
tggatcctgattctcaacatcttttcaaaagtcatgtgaaaagaaagttatggaggtttcctaaaagatattcagctcttccattattagataccctaggmagagcttttcaaactatttgtggtgaatgaccaattggctttgtttggttcttttttaagtttccaatctactgtggaccaatattttataaaatatagt

SEQ ID NO: 543431 - DNA, 201 bp, Homo sapiens
ataatatgtatgtgaatatttggggtgtaactgtatagcaaagttaaaacaaatgcaactcacaacctccatgaacacccattaacttagataatgattamaaatatatacctgaggtcagatccagttaatatggagaatccacaaactgtttatgtctgctactgaatctagataataaaacttgagaatgaaggaaac

SEQ ID NO: 543432 - DNA, 201 bp, Homo sapiens
taagcaaaaaatatcaaaattctcgataggatttaaataagacgaagtattagtcttatttaacttattaatctcacaacataatacttgaaatatccagratataatctcaaattacttggcatgtgaagaatcagaaaaagtctcaagtcacataggaaaagatgatcaaaaaatggcaacattgggaaaaaaagatgt

SEQ ID NO: 543433 - DNA, 201 bp, Homo sapiens
gtaatatcagacaaagtagacttcagtgataagaaaattatcagagatcaagaaaaacattgcataatgataagagggtcaatttgccaagaaaacagagmgatcttaaatgtgtatgcctttaacaacagagctttaaaataagcaaagcaaaaatgaacagaacaaaaagtagagacaaatctacaatattcttgcagg

SEQ ID NO: 543434 - DNA, 201 bp, Homo sapiens
ctttcccactagactataagcaggctgagagaatagactgtcttttcatgattgtagtccagaaatccagcaaaatgcctggaacatagtagatgttcaatttttttttttactgaatcaagcactttatgaaaccctattatgttcaaagtaccatattgggtgttcagaatgaggaacagagatactgcctggttaaaa

SEQ ID NO: 543435 - DNA, 201 bp, Homo sapiens
aaatacttaaacattcatacagtatatttagtgcaaatggaagtgttcccttataagtagagctaaaaaataaaacaacactcaggggtcatctggcccaytgctttcattttacatatgtacaagtggaactcaagagatggtacagcgaagactagaagccatgtgctcaatcttttctaaatcatacaccacctctgg

SEQ ID NO: 543436 - DNA, 201 bp, Homo sapiens
accccaatgacgaaattcacattcttttcaaatgtacacaaaatattcatgtagacacaccacttccaagatcataaaacaaaacaaattttaaaggattkaaattctataaagtatgttctatgatcataatgaccagatgtcaataggaaaaagataagaaaatctccaaaacactggaaattaataaactgatttaga

SEQ ID NO: 543437 - DNA, 201 bp, Homo sapiens
cagaatcgtttgcttattggcagctagcgctcttaagcatggaacactgttctggtcagcaatggccacgattgtgggtaactgggcagtgactgtaggtrtagcgatatttatggggttggcacttggtgggattacatttacaactggttctgagtctgtaacacaactgtccttttgtggctccttttttgcgcaaga

SEQ ID NO: 543438 - DNA, 201 bp, Homo sapiens
tttcccactagactataagcaggctgagagaatagactgtcttttcatgattgtagtccagaaatccagcaaaatgcctggaacatagtagatgttcaatttttttttttactgaatcaagcactttatgaaaccctattatgttcaaagtaccatattgggtgttcagaatgaggaacagagatactgcctggttaaaaa

SEQ ID NO: 543439 - DNA, 201 bp, Homo sapiens
atctgagtgacttatgatagtacggaagttaatggcatagtttacagactcagaccgcctggttgaaattacagataataattactatcagtgactctggyaaattacctaatgtcttttgtacttattttttctcatccataaaatagggctaagtaacctgcttcattacagtattgcaaggattagattaatatataa

SEQ ID NO: 543440 - DNA, 201 bp, Homo sapiens
ttcccactagactataagcaggctgagagaatagactgtcttttcatgattgtagtccagaaatccagcaaaatgcctggaacatagtagatgttcaatttttttttttactgaatcaagcactttatgaaaccctattatgttcaaagtaccatattgggtgttcagaatgaggaacagagatactgcctggttaaaaat

SEQ ID NO: 543441 - DNA, 201 bp, Homo sapiens
tcttttgtacttattttttctcatccataaaatagggctaagtaacctgcttcattacagtattgcaaggattagattaatatataaaacacaatttagamcattacttgacacaaactgctcagtatagttatgattattaatattagccagtggtttatgaacttgtgtgattttttttacattgtggtctgcagaata

SEQ ID NO: 543442 - DNA, 201 bp, Homo sapiens
aaatgaatcttccccatgaacttacagaaaggaatacaacacttagattttagcccagtgagacctgggatggactcacaacccacagagccaaaagaaartaaatttgtgttgtttaaatcgtaagtgtgttgtcatttgttatggcagcaacagaaaaccaatacaggtggttaaatatttatagaacagagagaagaa

SEQ ID NO: 543443 - DNA, 201 bp, Homo sapiens
ctaaggagcaagatggaaaaacaatgcaggagggtctatctttttaacagaaataattgctaatcaaaatgaacctttagaaactccaggcagtctcatgragataattttgggcagcacgttcttatgtaagccaaataaccctgcagggagcctgttgtggaactgggtcccctaagatcttcctaccttatctagagt

SEQ ID NO: 543444 - DNA, 201 bp, Homo sapiens
ataacaaacatgtcctagtttaatatttacaataaaatactcctttttccatatgattcttttaagaacttaatcctaatttggagtttcattcacagatratagctttttaaaggtacttactacatacttaacaatttcaatagcatattatatttcccaatataatttagatctttgacattatgttacagatctgtg

SEQ ID NO: 543445 - DNA, 201 bp, Homo sapiens
ttataatagctttctgtctggtttatcaaattcccattttcacatatttcaaatgtattcttcatacttagattaatcttacaaaagcactgcttgaattscattctatcaactcctcctcataaacttctgaaggatccccattaacccctcaataaagattccaagtctacagattccaagattatagtccctgagttt

SEQ ID NO: 543446 - DNA, 201 bp, Homo sapiens
ggctttccattgttccatcattcctgcaaggctccacatttttgggcctgcaccttttccactattctattcattctcgctaaatgacctgtttttgttcttgtaaatggcaagccttctctactccatgcccctacacttgcctttcccttggcctgagattctgtttccaactccacacagctgggtctttcttttcca

SEQ ID NO: 543447 - DNA, 201 bp, Homo sapiens
attctgtaggttgtctgcttactctgttatttcttttgctgtgaacaggctttttggtttaattaagtcccacctgtgtacttttgttcttgttttatttkcttttggggtcttagtcataaattctttgcctaagccaatgtccagaatagtttttcctaggttttctttcaggattttaagtttcacatcttacattta

SEQ ID NO: 543448 - DNA, 201 bp, Homo sapiens
aggaagatatctaccataatgaaaacacatgaaaatataaaatccactggtagaacaagtacaaataagaaagagaaagaactcaaatgttaccactataraaaactatcaaaccacaataataatcagtaagaaagaaaggaacaaatgatacacaaaacaaccagaaatcaaaatgacagaaataggctctaacatatc

SEQ ID NO: 543449 - DNA, 201 bp, Homo sapiens
ttattatctgatgaccaagacggctaccaatggtaactaatgggcaggtagcatatacagtgtggatatgctggacaaagggaggatccacatcctgggcrtacaatttaaaacatatgaatttttatttcttgaattttccatttaatattttcggactgtgattgagcataggtaaccacctacagatggataaggggg

SEQ ID NO: 543450 - DNA, 201 bp, Homo sapiens
caataatagttagggacttcaacacccctatcagcattagacagatcatgtagaaagacacttaacaaagaaacactgaatttaaactgcattttataccraatggatgtgagacacttacagaacattttaaccaactactaaaggatacatattcttgtcatcaacacacagaacatactctaggatagactgtatgtt

SEQ ID NO: 543451 - DNA, 201 bp, Homo sapiens
tccccattcaatatgatgttggctgtgactttgtcatatatgattcttactatttttaggtacgttccttcaatgcctagtttttgagggtttttaacatraagtgacattgaattttaccaacagcctcttctgcatctattgattgacatgatcatatcgtttttctttttaattctgcatatatggtgaatcacattt

SEQ ID NO: 543452 - DNA, 201 bp, Homo sapiens
actgggaaacaaatctttttgcaaattagatggctttaaatttttgttttcaacaaaattgaagaaatactgacaggacattaaaatattttcattgacamataacttttgacattatagctgaagatgcataaaaactgagcaactcagttataacataaaattttatttcatctttttatttgagaataaaggtacctc

SEQ ID NO: 543453 - DNA, 201 bp, Homo sapiens
ttgggtccaaggtaggaaggatagagtgaatgggagctgaaattgggaatagtgaccaaaagtataatccaaatgagaggatgcctctaaataatactaaygctctgcatctgaaatattttaagtgatataactacatcaactactaaatttgacagatgtatgcatatgtattagaacttgcctttgagatgatgaagc

SEQ ID NO: 543454 - DNA, 201 bp, Homo sapiens
gacaggagggggctgacatacatgcaggagaaaactaaacaccatctttttttctacctgcacaagttgccatttgctgcagcgatcaagaacctctcttycctgttgatttcaagtatctttcaggatcgcttttccccccttaagtcatctgttgatatgccttacgagtgtaatattcatatcacaggatctcaagga

SEQ ID NO: 543455 - DNA, 201 bp, Homo sapiens
ctatataaacaaaaaaagggacgctcagaaggaacaaaggatgttttcaatgaattttttactctgattactgagttcagactatagttccttaacttcaygagctgcagaaggaagtctgctataaaaaagatctgacaacattctgaactaatgatggcgactgctgtacaatgcttttgctcattttgtcagcatatt

SEQ ID NO: 543456 - DNA, 201 bp, Homo sapiens
ataaagatgcttagtttcatcattagttaacaatgatttacaagaataaaccaatttttaaaaagaataaaagagaaagtataaatattagaaaggagaarcaaaattatttgcagaataacatttatagaaaattcaggaaaaatcaataaaaaaactattagcagtaaggacatttggtaaatggttaattacaaattt

SEQ ID NO: 543457 - DNA, 201 bp, Homo sapiens
acaccaacaacagacaaacagaaagccaaatcatgagtgaactcccattcacaattgcttcaaagagaataaaatacctaggaatccaacttacaagggaygtgaaggacctcttcaaggagaactacaaaccactggtcaaggaaataaaagaggatacaaacaaatggaagaacattccatgctcatggataggaagaa

SEQ ID NO: 543458 - DNA, 201 bp, Homo sapiens
aaatttagaccaaaagagcttatggcttgttctttttagtcataagatgaaattcctagtaaataaaaacaaggatggaaaatgtgattcattctaataamaatccagaagacttactatcatttgcaggataacatagtttaagctgaaggactgattatttagcatatgtgttaaattcaaaaacttgtattttttgaa

SEQ ID NO: 543459 - DNA, 201 bp, Homo sapiens
gagttgtatggttaggctgatttcttaataaaactgcagagcatcatgctattagtcacacagtgaatttcaaaatttaagttttatattaaaaactgggyaaaggtaaaatgacttgattgtagttgtaaaactaatacattcccatttaagttctgttctacagtccaaggcaagtataaatgttaacataacactgtt

SEQ ID NO: 543460 - DNA, 201 bp, Homo sapiens
aaagtatggagaagacagaaagtccacctacacttagcctgcaccttttcctcagaaagaaatgtcaccccttccccaagaaacctctataatagaaaaaraaaaacgtggggattatgccaaattgaccccaagctttagtctcctcctcaaggcgcattcagtaaaaacatcgaaacacacatctgatttgacaggcat

SEQ ID NO: 543461 - DNA, 201 bp, Homo sapiens
tagaccacaaagtaatacaactatagattttaataataagaggaactttggaaactctacacacacatgaaaattaaacaacatgcttttgaataaccackgggtcaaggaagaaataaggaggaaaatttaaaatttctttaaatgaaattaaaattaaaatttctttaaatgaaaatcaaaacagaacatatcaaaacc

SEQ ID NO: 543462 - DNA, 201 bp, Homo sapiens
cctggacacagcctaccaagattaaattagaaagaaatagaaaacctgaacagaccaataatgagtaatgagattgaatccataatgaatatttcaagtcygggactgaaagggttcactgctgaattctaccaaactgtcaaagaagagctaacactagttctcctcaaactattccaaaaaactgaagaggagggaatt

SEQ ID NO: 543463 - DNA, 201 bp, Homo sapiens
aactattccaaaaaactgaagaggagggaattctccctacttcattctataagtccatcactatcttgataccaaaaccagagaaagatgaaacaaaaaamggaaaactatccaggtcaatatccctgatgacaacagatacaaaatcctcaaaaaaatattcacaaactaaatctaacagcacgtcaaaaagataatgca

SEQ ID NO: 543464 - DNA, 201 bp, Homo sapiens
ttcaggagtgtgttgcttaatttccacatatttgtgaattttccaattttcctcctgttacggatttatggtttcatgccactgttgacagaaaacatacytgatataattttaattttaaatttgttaaaacttatcttgtggcctaacaaataatctgtcctggagaatgttacatgtttgagtgagaaaaatgtgcat

SEQ ID NO: 543465 - DNA, 201 bp, Homo sapiens
attaagtcccacctgtgtacttttgttcttgttttattttcttttggggtcttagtcataaattctttgcctaagccaatgtccagaatagtttttcctargttttctttcaggattttaagtttcacatcttacatttatgggtctttaatccatcttgagttaattttttaatatgatgagacacagaggtccagtttc

SEQ ID NO: 543466 - DNA, 201 bp, Homo sapiens
ttaagtatattaaatgcattttcgatttcacagtattttcaacttacgatgaatttatcaggacataacaccatcataattcataagtcaaggggcatctrtatacataaagctttcttatttccctctggatagctacacagcattctatcatacagatatacttcaacctatgatctattgataatttttttgcctgtg

SEQ ID NO: 543467 - DNA, 201 bp, Homo sapiens
ctgtgtacttttgttcttgttttattttcttttggggtcttagtcataaattctttgcctaagccaatgtccagaatagtttttcctaggttttctttcargattttaagtttcacatcttacatttatgggtctttaatccatcttgagttaattttttaatatgatgagacacagaggtccagtttcatttttctgcat

SEQ ID NO: 543468 - DNA, 201 bp, Homo sapiens
agattagtaggggtgaaactttagagtaaaagggaagacttatgaagtagatactgttaaactgccttccagaatggttttatgtttccataaatattatytgaggaggtctattcagtatatcaatacaataaagaaaaaagtcactttaatatagtaatgagaaaatacgtgtcaagatggaaaaacagccacactatg

SEQ ID NO: 543469 - DNA, 201 bp, Homo sapiens
ttttgttcttgcgatagtttactgagaatgatgatttccaatttcatccatgtccctacaaaggacatgaactcatccttttttatggctgcatagtattycatggtgtatatgtgccaccttttcttaatccagtctatcattgttggacatttgggttggttccaagtctttgctattgtgaatagtgcctcaataaac

SEQ ID NO: 543470 - DNA, 201 bp, Homo sapiens
gttttatgtttccataaatattatctgaggaggtctattcagtatatcaatacaataaagaaaaaagtcactttaatatagtaatgagaaaatacgtgtcragatggaaaaacagccacactatgagcagccacactacaagcagagtgaagtccgtgtgtgggtaaggggaatgatttttaaaaggctgtttcacagctg

SEQ ID NO: 543471 - DNA, 201 bp, Homo sapiens
tgttttttggctgcataaatgtcttctttcgagaagtgtctgttcatgtcctttgcccactttttgatggggctgtttgtttttttcttgtaaatttgttkgagttcattgtagattctggatattagccctttgtcagatgagtaggttgcaaaaattttctcccattttgtaggttgcctgttcactctgatggtagtt

SEQ ID NO: 543472 - DNA, 201 bp, Homo sapiens
taatgttgtacagtatttttcaggtgctctctgaatttcttgtatcttgatgtctacatctctagaagattgggtgattttcctaaattatcccctcaaakatttttccaagctttctactttttcctcttctccatcaagaatgcctgtaagtcacagttttggtagctttacataatcctgtatttcttgaagactttg

SEQ ID NO: 543473 - DNA, 201 bp, Homo sapiens
gttcattgtagattctggatattagccctttgtcagatgagtaggttgcaaaaattttctcccattttgtaggttgcctgttcactctgatggtagtttcytttgctgtacagaagctctttagtttaattagatcccatttgtcaattttggcttttgttgccattgcttttggtgttttagacatgaagtccttgcccg

SEQ ID NO: 543474 - DNA, 201 bp, Homo sapiens
ttaatgcagtacctcccaatgatctttgaattattttaattgtaacctaatctttacaagaaaagaataggagatataaaatgcatacaaagatgaacttyctagaaaactataaagtgattactatgtcaaaataagtagtgtttaaaatacaactaaatatgtatttttttcagtaaaggtgaaaacaaattccttcaa

SEQ ID NO: 543475 - DNA, 201 bp, Homo sapiens
tctctctttttttattagtcttgctagtggtctatctattttcttgaccctttcaaaaaaccagctctgggattaattaattttttgaagggttttttgtstctctatttccttcagttctgctctgattttagttatttcttgccttctgctagcttttgaatgtgtttgctcttgcttttctagttcttttaattgtga

SEQ ID NO: 543476 - DNA, 201 bp, Homo sapiens
aagaaaagaataggagatataaaatgcatacaaagatgaacttcctagaaaactataaagtgattactatgtcaaaataagtagtgtttaaaatacaactraatatgtatttttttcagtaaaggtgaaaacaaattccttcaagtagaaggtatgcattttgcttctaaccagagtattcaagtcagttaacatattttt

SEQ ID NO: 543477 - DNA, 201 bp, Homo sapiens
tgaactcccattcacaattgcttcaaagagaataaaatacctaggaatccaacttacaagggacgtgaaggacctcttcaaggagaactacaaaccactgstcaaggaaataaaagaggatacaaacaaatggaagaacattccatgctcatggataggaagaatcaatatcgcgaaaatggccatactgcccaaggtaat

SEQ ID NO: 543478 - DNA, 201 bp, Homo sapiens
aacaattctgaaacttagtattactatttccattttacacagaaagaaataaaatcatcctccaaaataaagcttttcatttctgtttacctaaggttacrcagctagtagagtaataaaactaatatttgaattcaagctaattccaaagcctgcaccttttctatggtaagcctctcctagattatatttactatatac

SEQ ID NO: 543479 - DNA, 201 bp, Homo sapiens
aaaaaataaatgaaaaaagtaggtaaaatatatgggatggtagatggtaacaggtcttcaagaaaagaaacataaagcaggaaggagaattggggtgaagyaggggaaatctgcaattttagatcaagtggctaaagaaagcttcattaaattgacatttaagtacaaatctcaagtaatgagagattgatccctgtagat

SEQ ID NO: 543480 - DNA, 201 bp, Homo sapiens
tgctttaaacagttgtgcaaaagattaaatatgatccaggtaagtcaaatttcaggactgaagctggacacattgaaaattctttgtattctgcagaaagyagacatatgcctgtccaaaaataggaaggaatttctacttgaaatagcatattcagaaacattctgtatctaaaaaggcaattgagctgtccttttactg

SEQ ID NO: 543481 - DNA, 201 bp, Homo sapiens
cttcttgcataaagttagcactagtttagatgaagtatattctataaataaaaagaaaaaaaagcatgagatgcaacaaaaccactcctaacacatttagkaaaagagtatctcgtgagattcagaggtgaagaacagtgagactagacaagatttgcagttttccatatgtagaactatttgttagcacactgttgttaa

SEQ ID NO: 543482 - DNA, 201 bp, Homo sapiens
ctatactaatgttgtatgttttaggcatctggtgaacagatattatatttacttcatttttacagttaatatcttgtaataatgtcatgcaaatgaggtgyagaactaatgcttctaatgctgattttccatataacctaagtatataatcaatcttgtgattttggattaagataaatgaaaatcattttgtccatcgat

SEQ ID NO: 543483 - DNA, 201 bp, Homo sapiens
ttcttgcataaagttagcactagtttagatgaagtatattctataaataaaaagaaaaaaaagcatgagatgcaacaaaaccactcctaacacatttaggwaaagagtatctcgtgagattcagaggtgaagaacagtgagactagacaagatttgcagttttccatatgtagaactatttgttagcacactgttgttaat

SEQ ID NO: 543484 - DNA, 201 bp, Homo sapiens
gtgtgtgtattaaagctcaaataaatgaatatcaagtcaattttatagtatgttaattaaaaaaatatttcctgaggtcttaacactcagaaaaaaaaaakaaacttacttttctagttctaggtgctaattctgtaagtagaaatccagaagaataggagtgtttacagatttttaaaactattttaatgttttggtctc

SEQ ID NO: 543485 - DNA, 201 bp, Homo sapiens
gccaagaatgtccgttatcacctctcttgatgtcttgcaataagtcaataaaagaattacaggcatacacattagaaaggaagaaataaaaatgtccctayttgcagaaaacaagactgtctacataggcaatgaactggaaaccaaattaaaagaaaaaaacttcaagccattcacagttcttatctccaaagaagaaat

SEQ ID NO: 543486 - DNA, 201 bp, Homo sapiens
gcactgcttgaattgcattctatcaactcctcctcataaacttctgaaggatccccattaacccctcaataaagattccaagtctacagattccaagattrtagtccctgagtttccaagatgattcttcaccagttttttatgacaagtctatgcctcagtcatttagcgagccatggttttctgcacacatattgctcc

SEQ ID NO: 543487 - DNA, 201 bp, Homo sapiens
agttttttatgacaagtctatgcctcagtcatttagcgagccatggttttctgcacacatattgctcctctttatcttttggctttggtttacataattcyttactccttcactgtgttttcccataattttgactactaagattctacccagcctttaacggcttaactcaactactgcttcatgctcttccagctggaa

SEQ ID NO: 543488 - DNA, 201 bp, Homo sapiens
gttattcaggtttgagtatttggcagatattttctcaaaaataagccaaataagcctgtcatttaaaggaagacaaattggccaaatttgttgccaataamatttgagctttcagatgtaaatgagaattttggaaaacatgttaactgcagctgagttgaattttgcaatttcctaattttgaagacccttctgaagaga

SEQ ID NO: 543489 - DNA, 201 bp, Homo sapiens
atcatagtgttccattaataaaacagattactctctataggcacctgtaataaagtttggtcttcaagaatgttccctatagtagagcaggttcccatagyagaatggtagaaacaagaatcctttaaagagggaaagaaacacaactgttaagatccatttaccattttcatcatgaccactggcttctggtgtgccctg

SEQ ID NO: 543490 - DNA, 201 bp, Homo sapiens
ggggcagttctcaggcagctggaacaacactctagggaggggtgcaggcacctcttctgtgccacaagagctggttcagggtaagagggctagccctgggwtttcattccagcagatggccatgaggcccactcagcttctacacccctgactggtgggtctccctccagtgtccaccctggcagccggcccaattagtta

SEQ ID NO: 543491 - DNA, 201 bp, Homo sapiens
cattttctttatccagtctattattgatggacatttgggttggttccaagtctttgctattgtaaatagtgctgcaataaacatacgtgtgcatgtgtctytatagcagcatgatttataatcctttgggtatataccgagtaatgggatggctgggtcaaatggtatttgtagttctagatccttgaggaatcgccacat

SEQ ID NO: 543492 - DNA, 201 bp, Homo sapiens
gccacaagagctggttcagggtaagagggctagccctgggatttcattccagcagatggccatgaggcccactcagcttctacacccctgactggtgggtytccctccagtgtccaccctggcagccggcccaattagttatgcaaatcccaaaccacctgtgcccagactgccatgccatcccaggcattccagaatgca

SEQ ID NO: 543493 - DNA, 201 bp, Homo sapiens
acaaaatagaccctaaacaaataggagtcttgcaaattagtggggggaaaatgcattatttaataaaaatcatttggaaaaaaatcagatccccaccccawgactttcaccaaaatgaaacccacacgaaatcaaagactttaacttagaaaaaaaactgaaaccataaaagtattagaagaaaatataggcagagaggag

SEQ ID NO: 543494 - DNA, 201 bp, Homo sapiens
gggctagccctgggatttcattccagcagatggccatgaggcccactcagcttctacacccctgactggtgggtctccctccagtgtccaccctggcagcyggcccaattagttatgcaaatcccaaaccacctgtgcccagactgccatgccatcccaggcattccagaatgcaagactccctgcagcagaaagcaaggc

SEQ ID NO: 543495 - DNA, 201 bp, Homo sapiens
gtccaccctggcagccggcccaattagttatgcaaatcccaaaccacctgtgcccagactgccatgccatcccaggcattccagaatgcaagactccctgsagcagaaagcaaggctatgaggctatacccttcctagtctattctcatgaagggaggggtgcccagcttctgtatcacctgaaaaacccacaccacactc

SEQ ID NO: 543496 - DNA, 201 bp, Homo sapiens
tctacacactgctttgaatgtgtcccagagattctggtatgttgtgtctttgttctcgttggtttcaaagaacatctttatttctgccttcatttcgttakgtacccagtagtcattcaggagcaggttgttcagtttccatgtagttgagtggttttgagtgagattcttaatcctgagttctagtttgattgcactgtg

SEQ ID NO: 543497 - DNA, 201 bp, Homo sapiens
ccaaacaccgcatgttctcactcataggtaggaattgaacaatgagaacacttggacacaggaaggggaacatcacacaccagggcctgtcatggggtagrgggagtggggagggatagcatcaggagatatacctaatgtaaatgatgagttaatgggtgcagcacaccaacatggccatttatacatatgtaacaaacc

SEQ ID NO: 543498 - DNA, 201 bp, Homo sapiens
atcagagactaggattgcaacccctgccttttttaattttccatttgcttggtagatcttcctccatccttttattttgagcctatgtgtgtctctgcacrtgagatgggtttcctgaatacagcacactgatgggtcttgactctttatccaatttgccagtctgtgtcttttaattggagaatttagtccatttacatt

SEQ ID NO: 543499 - DNA, 201 bp, Homo sapiens
acatcatctgagggtaagaaataaattagtattttattctgctttgcattaaagtagtaagccataaaaaatgaaaatgcttaacattcaattatatcaatagcttagaagtctacagcacacaaaaaattaggaactcacttataaatatatttagaactaaatcgtctttcctaaagtatgaagtattaaatcataatc

SEQ ID NO: 543500 - DNA, 201 bp, Homo sapiens
tatacaccatggaatactatgcagccataaaaaaggatgaattgacgtcctctgtagggacatggatgaagctggacaccatcattctcagcaaactatcrcaaggacagaaaaccaaacaccgcatgttctcactcataggtaggaattgaacaatgagaacacttggacacaggaaggggaacatcacacaccagggcc

SEQ ID NO: 543501 - DNA, 201 bp, Homo sapiens
actacattgaattttactaaacataatgttttgtcttatttagaaacttctttaaagataaacattgtatttggtgaagtatcagtataccagcaaaataytacttcataaaaatttccagttgacagaagtctggattacagtccgttgccttattttaaatttctgttatacaactgtaaaagtcttgttataccatga

SEQ ID NO: 543502 - DNA, 201 bp, Homo sapiens
attatgatgttagcaggtgattttgctcgttagttcatgcagtttcttcctagtctcgatggtctttacattttggcatgattttgcagcggctggtaccrgttgttcctttccatgtttagtgcttccttcaggagctcttttagggcaggcctgctggtgacaaaatctctcagcatttgcttgtgtgtaaaggatttt

SEQ ID NO: 543503 - DNA, 201 bp, Homo sapiens
aagacaacaaatatcccaaatacagattttgctttcaaatgaagttttccctttatatatatttagaacaatcctttcgaactgtatttataaaactgatraaggtatgttaaagcagagcaaatgataaaagtctatgtatgccagaaaccaattacataactgaaaaatatctgataatttaaacaagtccaataagat

SEQ ID NO: 543504 - DNA, 201 bp, Homo sapiens
ttccaggtgccgtctgtcacccctttctttgactaggaaagggaactccctgaccccttgcgcttcccgagtgaggcaatgcctcaccctgcttcggctcrcgcatggtgcgcgcacccactgacctgtgcccactctctggcactccctagtgagatgaacccggtacctcagatggaaatgcagaaatcacccgtcttc

SEQ ID NO: 543505 - DNA, 201 bp, Homo sapiens
ctacacagggcaaaactgtaactgagaaaataatttcaaatgtttcaaccatttttataccagcaaagataagaagactaataagatattagtatttacawctaagattattagaaataattccagtctcaattaacaattagatatcccatgttctaacgctctcttaaatttttggatgtcaacctggacagctcttaa

SEQ ID NO: 543506 - DNA, 201 bp, Homo sapiens
gcaggagaatcgcttgaaccccggaggaggaggtcacagtgagctgagatcatgccattgcactcactccagcttgggagacagagcaaaactccatatcaaaaaaaaaaaaaaaaagactaaaggacttctgatcattagcaaatggatgatcatataaagccatggtactatatgaagtcactaagggagtgaacatgc

SEQ ID NO: 543507 - DNA, 201 bp, Homo sapiens
gaaagggaactccctgaccccttgcgcttcccgagtgaggcaatgcctcaccctgcttcggctcacgcatggtgcgcgcacccactgacctgtgcccactstctggcactccctagtgagatgaacccggtacctcagatggaaatgcagaaatcacccgtcttctgcgtcgctcacgctgggagctgtagaccggagctg

SEQ ID NO: 543508 - DNA, 201 bp, Homo sapiens
agaaatccagcaaaatgcctggaacatagtagatgttcaatttttttttttactgaatcaagcactttatgaaaccctattatgttcaaagtaccatattrggtgttcagaatgaggaacagagatactgcctggttaaaaatatgaaatgcaaaatatttaaaatagcttaaaataaacaaaacatcaggaaatatggaa

SEQ ID NO: 543509 - DNA, 201 bp, Homo sapiens
tcatttcagaaagagaaaagagaactgctccctccatgcaaattccaccaagctatccttaaattagcagcagacgcctgacagccttaagtttgcaagayactgaattttgctagatagcagatggttgaattcaggtgtaaaggctacacttaaattgtaagaatgtatttgttttatcaatataacttgaaaccactg

SEQ ID NO: 543510 - DNA, 201 bp, Homo sapiens
aatggttcttaaatgtatttgaaagttctattttaaacaatatctatggtaataaaactctgaaacaaaatcataaagttttagtcattgtctacacacaratgttgaattgtttttaatgtcacgaaaaccaggaacctagcactgttttaatgaattgagtgaggtcaactaattgcttcagtttcttttaatgagaag

SEQ ID NO: 543511 - DNA, 201 bp, Homo sapiens
tagtcacctctgttctgttttccataagacatactttttaaacaaaagcttttagttaattgtggtaaattaaatatcttctgacaaggtgagtataatakaaaatggttgaccatagagaaaaccgggagactaatttgcccacattccagaagagctgcatgaagatttctgaaatgtaggcattgtatccatatgaag

SEQ ID NO: 543512 - DNA, 201 bp, Homo sapiens
tgttcttgtgatagtttgctgagaatgatggtttctggcttcatccatgtccctgcaaaggagaggaactcatcctgttttagggctgcatagtatttcakggtgcatatgtgccacattttctttatccagtctattattgatggacatttgggttggttccaagtctttgctattgtaaatagtgctgcaataaacata

SEQ ID NO: 543513 - DNA, 201 bp, Homo sapiens
aaatgaaggggaacttttaggatgctgatattgttgtttttcttcatctaggtgttcatcacataggtgtgctaagtctgtgaaaattcacgaagcagtakgctaatgcttctatatgtattaggcattaataaaaaactttagaaaaaaaaatctgagcgtcaatgtcttcccactgttctcaagctaaagcccaaaggc

SEQ ID NO: 543514 - DNA, 201 bp, Homo sapiens
tttgatttgcatttctctaatgaccagtgatgatgagcattttttcatatgtctgctggctgcataaatgtcttcttttgagaagtgtctgttcatatccttgcccactttttgatggggttgtttttttcttgtaaatttgttgaagttctttgtagattctggatattagccctttgtcagatggatagattgcaaaaa

SEQ ID NO: 543515 - DNA, 201 bp, Homo sapiens
tgcaattatatacaaagaacataaaaaacagaatgtcagaatcttatatcaatccttccctcaagtaaaagttctgcctatggctgggcgtggtggctcaygcctgtaatctcagcactttgggaggccaaggcgggtggatcacctgacgtcaggagttcgagaccagcctgtccaacatggtgaaaccctgtctctgct

SEQ ID NO: 543516 - DNA, 201 bp, Homo sapiens
ccccatttctactaaaattacaaaaattagccaggtgtgctggcacacgcctgtaatccccgctacatgggaggctgaggcaggagaatcgcttgaacccmggaggaggaggtcacagtgagctgagatcatgccattgcactcactccagcttgggagacagagcaaaactccatatcaaaaaaaaaaaaaaaaagacta

SEQ ID NO: 543517 - DNA, 201 bp, Homo sapiens
actttaatggtccataagaagttcacattttgtagaactaaagtcttcaggatcactttaagagctttaagaaaagataaatgaaagggacaaatttaatktcttcaccagtactttaagtctcattgttaatactacagaatactgggaattacaatctaaaatgttttactagacatttagtctcttgttattcaaagt

SEQ ID NO: 543518 - DNA, 201 bp, Homo sapiens
gaggtggaggttacagtgagccgagattatgccattgcactccagcctgggggacaagagtgagacttcgtctcaaaaaaaaaaaaaaaaaaaaaaaaaargttctgcctgtaagtattcacaacagattcactggcttttttttttttttaacttttaaattcaggggtacaagtgcaggtttgttacatagttaaactt

SEQ ID NO: 543519 - DNA, 201 bp, Homo sapiens
taatggtccataagaagttcacattttgtagaactaaagtcttcaggatcactttaagagctttaagaaaagataaatgaaagggacaaatttaatttctycaccagtactttaagtctcattgttaatactacagaatactgggaattacaatctaaaatgttttactagacatttagtctcttgttattcaaagtattc

SEQ ID NO: 543520 - DNA, 201 bp, Homo sapiens
tgttgtgcagattatttcatcacacaggtattaggcccagtacccattagttatttcttctgatcctctccttccaccctccaccactggtaagccccagygtctgttgttcccctctgtgtgcccatgtgttctcatcatttagttcctacttaacatgtgagaacatgcagtatgcctgtgttagtttgctaaggataa

SEQ ID NO: 543521 - DNA, 201 bp, Homo sapiens
ttatttgttcagtattcctcttaagaaaacaactgtattaattcagtaaagtatgagtagaagaaaagaatgaacatagatagcatgttccactcaaaaawtaagaaaatcatttgctggtctatcacctattcaggatttcttaactcacaaaatgttaaatgtttgaaactagtaaaggggctggtttcacatatgtat

SEQ ID NO: 543522 - DNA, 201 bp, Homo sapiens
gcctcccaaagtgctgggattacaagcgtgagccactgggcctggccagaaaatgtatacttaaatctccaacagacagagaagtctcttctggtatctgrgtaacacacctattcttacatcatcatcactgttttagacattcttgctttaaaaccttttgatatttagtaggacgagacttctcattacagaatcact

SEQ ID NO: 543523 - DNA, 201 bp, Homo sapiens
gaacaatgagaacacttggacacaggaaggggaacatcacacaccagggcctgtcatggggtagagggagtggggagggatagcatcaggagatatacctratgtaaatgatgagttaatgggtgcagcacaccaacatggccatttatacatatgtaacaaacctgcatgttgtgcacacgtagcctagaacttaaagta

SEQ ID NO: 543524 - DNA, 201 bp, Homo sapiens
tggccagaaaatgtatacttaaatctccaacagacagagaagtctcttctggtatctgggtaacacacctattcttacatcatcatcactgttttagacaytcttgctttaaaaccttttgatatttagtaggacgagacttctcattacagaatcactataaaataaatcactagaaattttggaagttagaggttaaac

SEQ ID NO: 543525 - DNA, 201 bp, Homo sapiens
ctatcaaaaaagcgaatgccaacagattcctaaattcagacctgaatgtgttcaaactttagagatgaaatgtttcactgtatacttttccagatagtttmattttcctgctcctgtatcttccaatttataatatgtatgtgaatatttggggtgtaactgtatagcaaagttaaaacaaatgcaactcacaacctccat

SEQ ID NO: 543526 - DNA, 201 bp, Homo sapiens
aatgtatttgaccaaataaaactggcaaaaggtctccaactcctataggaccaacactgtatatatgttgactacataaaattatcctgatactgacaacrttcattaaaataagaaatatctttattctgtgaaagtcctcagagtcacatgtaaaataggtactcaaggtgctatgtggtccttgcagtatctcaagtt

SEQ ID NO: 543527 - DNA, 201 bp, Homo sapiens
atgtctcttgactctcaccggccatgaagtcgggcttcaagggaaatttactttgttttttttttttttttttttttttttttgagacagtctcactgtcrcccagtctggagtgcagtggcacaatctcatctcactgcaacccctgccacctggggtcaagtgactcttctgccttagcctcccgagtagctgagacta

SEQ ID NO: 543528 - DNA, 201 bp, Homo sapiens
ttttataatagcagaaaagcatgagtgataactaccttaagtgaaaatgtccgaaggaataaaaacaaaaccaaaactataatgtttcagaagtcaatacyattttctataatgagctttatactataaattttagaatctttaagcacaatttaatttaaataaaaaatataaatagtacagctgggcatggtggctcat

SEQ ID NO: 543529 - DNA, 201 bp, Homo sapiens
tccatatctataaacaataacttttatttaaatttttctcattcgaacttccaattcatttcttctaacaccactgtaattcgcaactcatttcttctgasagtagaaactgccaaattcaaaacaaaagccattacactccaacatacacagccaatcagacactgattatttcctatattgagaagttatataattaaa

SEQ ID NO: 543530 - DNA, 201 bp, Homo sapiens
tagtgttcctaatacaaacgaaagacaaatgtttaaagttttggatatcccaattactctgatctgatcattacacattgtatacatgtatcaaaatatcrcatgtactccccaaatatatacagctattatatatcaataaaagattaaaaaaacaaatccagttgtcacaaacattttaacttcccgaaatctgaaaag

SEQ ID NO: 543531 - DNA, 201 bp, Homo sapiens
agtaaaaagggttagttcaaataatcgaacccaacatattctcagaagcagaacctgttcactgattttttcaccttcctttctcccttcatctaccttaytcttattgcccccttttttccccagacagatcatttccttcttgattacctattaagactctggatcaactacgtaattcaggccacagataagaaatac

SEQ ID NO: 543532 - DNA, 201 bp, Homo sapiens
taacattaatcttaagctaagcttaaaaattttacattgtattagcagtggtagaaattatttttattaaagtaaattcaaagttcatagttcaaataggwttacattttaacatggcaaaattaggaaatttagataaaggccatattactaagtaactattaaactgaaaaaagacaatatttaataagttctagtcat

SEQ ID NO: 543533 - DNA, 201 bp, Homo sapiens
acaaccaatgctcctcgtatacttctgcaccctgcttcaaccctgatccacaaagtgcttattacatattcagtgctttatatgcactgaatccattaatmcttacagaagccacttgaagaatttttattatccttattttatagacaatgaaactaagacttagattacataacttgccaaaggttgaccagttagtac

SEQ ID NO: 543534 - DNA, 201 bp, Homo sapiens
gcatgccatggtcaactcgtatgttgaagtgaagacctccttcgaggtgtgcatgtgcttattacagatatgccacggtgctaagtaccccaggactacakgaaaaaataagaatagatgctgtatccatgatcatgaggcacacaggccagagcgccagctgtggaatcgcacagcctgggttcaaagcctggctgggcc

SEQ ID NO: 543535 - DNA, 201 bp, Homo sapiens
aaatttaggcatgaatgctgagtgatgcaaagatcggtggaaacactgaccaagtgtttccatccattattctttaacatcaattgggactacaataacayctctctctctctctctctctctctctctctctcacacacacacacacacacacacacacacacacacacacacacacattttatcctaaatacagtcact

SEQ ID NO: 543536 - DNA, 201 bp, Homo sapiens
tgcatcccattatagcatgtatttcttttaagtgccttggattatcacgtggatttattcagcagattttctttactcattaactttcatactagtacatraagatgatcatataggaaaaacagttaaaatatgcacaaacctctttagatcaatgtaaaaaacactgttttaagtagatgatgagattaacttctgctg

SEQ ID NO: 543537 - DNA, 201 bp, Homo sapiens
cctacatttgtttgtaatgactatgtgacccagatactaaaatatttggctaacattcagaaatctagcaactgaaagaaataagatatatggttggctgrttaaatattttagccaaaataacagattcttaaaatcatgcattattatagtattttctacacagaaaatttttaaactttaaaaataagtatttctttt

SEQ ID NO: 543538 - DNA, 201 bp, Homo sapiens
atcggtggaaacactgaccaagtgtttccatccattattctttaacatcaattgggactacaataacatctctctctctctctctctctctctctctctcwcacacacacacacacacacacacacacacacacacacacacacacattttatcctaaatacagtcactggcatactgccttctacatagtaggtatagaa

SEQ ID NO: 543539 - DNA, 201 bp, Homo sapiens
ggaaaaaaaggaagtccacataaatacctaatacagtcttcataattcttagaaaataaagaattctaaaatagcaagtaaagaattttgaaaattctatgcttatcagactgatgctgaaaagttatttagtctagtaaaaaagcatttctgaaaaaactagaaaaaataaatgatttactcaattttaaaacttaattt

SEQ ID NO: 543540 - DNA, 201 bp, Homo sapiens
tttttcttttctcagtgaagaaacaagtcaatatacttaagtgttagcaacaattcaggaaaatgaaaacaaaactgcagtcataaccagaccaggcaaayaggtacacaaaatggaatggagaggtcatgtggtaattcataggatcagagaaaacttctgcatataatattactccaggaaagaggagcttgtctataa

SEQ ID NO: 543541 - DNA, 201 bp, Homo sapiens
tgtaatagagcacagactttaagagttaaaaaaaaaacggctgcagaaaagggtacacagcaatcagagaagcaaggattatactgatatataatcttcartcataaatttgttgcttcaagtacattgttcctgctcttaaaaagaatgtgttttactattttttaaatttccaaaaggataacatactgaatctttata

SEQ ID NO: 543542 - DNA, 201 bp, Homo sapiens
cagaagacgggtgatttctgcatttccatctgaggtaccaggttcatctcactagggagtgccagacagtaggcgcaggccagtgggtgcgcgcactgtgygcaagccgaagcagggcgaggcattgcctcacctgggaagcgcaaggggtcagggagttccctttccgagtcaaagaaaggggtgacagacgcacctgga

SEQ ID NO: 543543 - DNA, 201 bp, Homo sapiens
aactggctggcataaaagtctatttaatgttccagtaggtctcaggcatttgtttcattcagtgctagaattattagttatcttcacataaaattttccasaagtataactagtcccaggcagcatcgaaaagaggtgaagtccctcctttacagctcctacgtcactcttttggcataatcttcctttaaaatcaggtgc

SEQ ID NO: 543544 - DNA, 201 bp, Homo sapiens
tttccgagtcaaagaaaggggtgacagacgcacctggaaaatcgggtcactcccacccgaatattgcgcttttcagactggcttaaaaaatggcgcaccaygagactatatcccacacctggctcagagggtcctacgcccacggagtctcgctggttgctagcacagcagtctgagatcaaactgcaaggcggcagcgag

SEQ ID NO: 543545 - DNA, 201 bp, Homo sapiens
tagagccagcggaaattctgtcctccctttgtatttccaagataatggcatatgctatttcctaacaacagaaaagtagccctttgaattctgttaaatgycacagaataatctactataattaataaattaatttagtatgaatcaacagtagaatcaatctactagaatgtaaaactccatgaggaaaggaattttggt

SEQ ID NO: 543546 - DNA, 201 bp, Homo sapiens
tttaaaaacaattttcctattttcaacatgctgtaagcctttgaactaactttggggggaaggggtgaaaacagttacaaagtactaagtgcagataataygacaaaaagagctaaaaaggggtaaagaccaacccaaagttggaaatcttactgaaaggaaaagactactaagctggttgagtctcccaggccaacaagg

SEQ ID NO: 543547 - DNA, 201 bp, Homo sapiens
agcaaaatactttaaaacagaaaaagcttcagttttaaaagtccagtaacacctttacttcctcctctaaaatacacacaacttatccccaaacccagtgrttgctttccaatgaccctactactcaagagtagataggatacagaaataagtaagaggtcccgggctcaacaaagagttgaagaagcttatatacttcat

SEQ ID NO: 543548 - DNA, 201 bp, Homo sapiens
ttttttttttttttttttgagacggagtctcgctctgtcgcccaggccggactgcggactgcagtggcgcaatctcggctcactgcaagctccgcttcccrggttcacgccattctcctgcatcagcctcccgagtagctgggactacaggcgcccgccaccgcgcccggctaatttttttgtatttttagtagagacggg

SEQ ID NO: 543549 - DNA, 201 bp, Homo sapiens
gcaagctccgcttcccaggttcacgccattctcctgcatcagcctcccgagtagctgggactacaggcgcccgccaccgcgcccggctaatttttttgtakttttagtagagacggggtttcaccttgttagccaggatggtctcgatctcctgacctcatgatccactcgcctcggcctcccaaagtgctgggattacag

SEQ ID NO: 543550 - DNA, 201 bp, Homo sapiens
gtgttaagagggagatttatagcaccaaatgcccacatcgaaaagatagatctcgagttaacaacctgacatcacaactaaaataactagataatcaagarcacacaaatcccaaagctagcaaaagacaagaaataaccaaaatcagagctgaactgaaggagacagagacaagaaaaaacattcaaaagatcaacgaat

SEQ ID NO: 543551 - DNA, 201 bp, Homo sapiens
ggagtgcagtggcgcaatctcggctcactgcaagctccacctcctgggttcatgccattctcctgcctcagcctctcgagtagctgggactacaggcgccygccaccacgcccggctaattttttttgtttgtatttttagtagagatggggtttcaccatgttagccaggatggtctggatctcctgacctcgtgatcca

SEQ ID NO: 543552 - DNA, 201 bp, Homo sapiens
tgattttagaataagtgcatcacaattaaaagaactagagaagcaagagcaaacaaattcaaaagctagcagacgacaagaaataactaagatcagagcasaactgaaaaagatagagacacgaaaaaccctttaaaataatcaatgaatccagaagctggttttttgaaaagattaacaaaatagatagactgctagcca

SEQ ID NO: 543553 - DNA, 201 bp, Homo sapiens
taataatatctttgaatatagatggtttcaattctccaataacaagatgtagagtggccaaatggtttttcatacatgtttccctagtccagacacccaaragtatgtccctctcttgggcataagaaaacctagagttatatttagggcatcatgtgtggtgaatagttgaccaagctggcatgctcacaatgaccaaat

SEQ ID NO: 543554 - DNA, 201 bp, Homo sapiens
tttttaacttcttgccttttaataatatctttgaatatagatggtttcaattctccaataacaagatgtagagtggccaaatggtttttcatacatgtttycctagtccagacacccaagagtatgtccctctcttgggcataagaaaacctagagttatatttagggcatcatgtgtggtgaatagttgaccaagctggc

SEQ ID NO: 543555 - DNA, 201 bp, Homo sapiens
tcagtcctaaataaaatatgcaatggtcctaaataaaatattaaattaaaagaatgaagcaaacattacttaatattagaaaatatatgtgcttttactayattaacataaaggacaaacgacatctatagatacagaaaggcatttgaaaaaaattcaccattcccttgctgatacttttgcatgaaaagaaaactgaag

SEQ ID NO: 543556 - DNA, 201 bp, Homo sapiens
atattagaaaatatatgtgcttttactatattaacataaaggacaaacgacatctatagatacagaaaggcatttgaaaaaaattcaccattcccttgctsatacttttgcatgaaaagaaaactgaagttagtatcataataaatgattatgaatgacaggcatttgtaagataaagatgcttagtttcatcattagtta

SEQ ID NO: 543557 - DNA, 201 bp, Homo sapiens
ccacaaaatggtgaatgagtgcccactatgtggcggatatgagaatatgactcctgtaactgatgtccccatactcactcattctacctgttctcttagcmaatctccacacattagccatagtataattaatattttaataaaacaagtcatcttatattattccactattcaaaaccttttgatgattttttcattaca

SEQ ID NO: 543558 - DNA, 201 bp, Homo sapiens
attgccacatggcactttctctctaaaactgctcacataattggaagtaaaaccctcctcagcaactgtaaaagaactgaaatcttaacagtctcttggamcacagtgcaatcaaattcaaaatcaagactaagaaattcactcactcatacaattacatggaaactgaataacctactcctgaatgacttttgggtaaat

SEQ ID NO: 543559 - DNA, 201 bp, Homo sapiens
tctaggtaaaagtaaatagtgtactcttatgtttattaacactactgtattactactaacaaatgtccagcttaaatattttacatattctatagcttagyatggcaaatatttgataacaagcatatctgaatacattattcatgcaagttacacagaacgaagttaggggcaaaacataaaatcgcaggctatacgcac

SEQ ID NO: 543560 - DNA, 201 bp, Homo sapiens
actctggaaggaaatacctataaaaatatattcaagatctgaccacccactaccaattccctgccactaactacctgatggtaccatcatctctcacttcsagtactgtcactggttcctatctggtctccgtgctgccacctttgtcttcctgtagtcagttctcaacacagcagacaaaaccttctaaagcatcagtgg

SEQ ID NO: 543561 - DNA, 201 bp, Homo sapiens
atttattttccttctagaaaaacgattaggcttcatttgtcttttcttcagacacttgctcactactctcgcctactttttgtcctaagctgcttgcttgrctttcagccctgtcatccttcatcagaccttcagtttttgcttcttctccctcattctctgcctcttctacctcttcttcttccacttcttcctcctcct

SEQ ID NO: 543562 - DNA, 201 bp, Homo sapiens
agcatgacagataaaatactgtaaacctgtgagcatctttttggatagcattttacctagaagggcaagttgtcttctgtaattctggtaatataagtctycaaagtttaacgattctaggtaaaagtaaatagtgtactcttatgtttattaacactactgtattactactaacaaatgtccagcttaaatattttacat

SEQ ID NO: 543563 - DNA, 201 bp, Homo sapiens
gcattccagaatgcaagactccctgcagcagaaagcaaggctatgaggctatacccttcctagtctattctcatgaagggaggggtgcccagcttctgtaycacctgaaaaacccacaccacactcttccctgtgttctgacagtgggggttcctcccctgcttgagatcaggccacagatctcatccccatattcctggg

SEQ ID NO: 543564 - DNA, 201 bp, Homo sapiens
ttgcttgactttcagccctgtcatccttcatcagaccttcagtttttgcttcttctccctcattctctgcctcttctacctcttcttcttccacttcttcytcctcctcctcctcttcctcatccccttgtggtttttcacattctttttcttcctgcaattcttccatctctttatcctcctcctcttcctctttttcac

SEQ ID NO: 543565 - DNA, 201 bp, Homo sapiens
cagcatgacagataaaatactgtaaacctgtgagcatctttttggatagcattttacctagaagggcaagttgtcttctgtaattctggtaatataagtcwccaaagtttaacgattctaggtaaaagtaaatagtgtactcttatgtttattaacactactgtattactactaacaaatgtccagcttaaatattttaca

SEQ ID NO: 543566 - DNA, 201 bp, Homo sapiens
ccctgtcatccttcatcagaccttcagtttttgcttcttctccctcattctctgcctcttctacctcttcttcttccacttcttcctcctcctcctcctcytcctcatccccttgtggtttttcacattctttttcttcctgcaattcttccatctctttatcctcctcctcttcctctttttcactgtcttcatcctctt

SEQ ID NO: 543567 - DNA, 201 bp, Homo sapiens
aaatacctaatgtagatgacgggttgatgggtgcaacaaaccaccatgacacatgtatacctatgtaacaaactgcagatgtatcccagaacttaaatttwaaaaaaaaaaagagcctaggtgtaatagaaacacgttccactttaaacaggtgcgtattagatagctatcaaataaaactagtaaactgacaggactgtg

SEQ ID NO: 543568 - DNA, 201 bp, Homo sapiens
tgtaaatttttgttaatctgacttttgaccgaactgataatgttagcttactgtctatatatattttactgtataatgaaggatataatgtaatatacaamtgtaatgttatataataatgaacaatgtgtatattatctaattttaatttaaataatctaaaaataggtatcataatggttttagagtaccccaagtacc

SEQ ID NO: 543569 - DNA, 201 bp, Homo sapiens
ctgagccagcagtgttgcttcctacttcttcaatcatgtctgtcatggcctatatattaaatttcagtgttttctctcaaaagatctgttgaaagtgtgarggtttactcaatattttggttcctctctgtagaagaggtgcatcccagatccagctagttggccatctttaatccctctcctcatttttcatttattatt

SEQ ID NO: 543570 - DNA, 201 bp, Homo sapiens
gtatatacccaaaggattataaatcattctacttataaagacacacgcatatgtatgtttactgcagcactgttcacaatagcaaaaacttggaaccaatycaaatgtccatcaatgatagactggataaagaaaatgtggcacatatacaccatggaatactatgcagccataaaaaggatgagttcatgtcctttgcag

SEQ ID NO: 543571 - DNA, 201 bp, Homo sapiens
tttcagtgttttctctcaaaagatctgttgaaagtgtgagggtttactcaatattttggttcctctctgtagaagaggtgcatcccagatccagctagttsgccatctttaatccctctcctcatttttcatttattattctatttggatattccctccttttttaaattctagctaaatgtttgttgattttatcttctc

SEQ ID NO: 543572 - DNA, 201 bp, Homo sapiens
actgtatgtggaatgctaaaggggactgaactataagacattaaactttcctggaatcgcactgggaaaataacctcccactttcttccaaggatcactgragtcttgctccagctcaagcagtatacgctgggaactcagagaagagattttagttagggtcgataggaaggcttcatagaagaaaaagatctttgctag

SEQ ID NO: 543573 - DNA, 201 bp, Homo sapiens
cacagcattctatcatacagatatacttcaacctatgatctattgataatttttttgcctgtgttaagcactagcaacaatgccataatttttcttgtaartatgtataattttggccattccttatatatacttatcagattagtaggggtgaaactttagagtaaaagggaagacttatgaagtagatactgttaaact

SEQ ID NO: 543574 - DNA, 201 bp, Homo sapiens
aaaatgtttgagcttagtattaacattaacaggttcatagctctacaattaaccagctgccataagtgagcaagtcaacttctctgagtctcactttctaraaacctgggactgtatctaaaaacagccctttccaattcttatatattctatctcctttctgtctttcaattatctcccttctattcccatcccatgggc

SEQ ID NO: 543575 - DNA, 201 bp, Homo sapiens
atatacaaacccattttgcagttgtgaacttgcttaaggtctcacagctattaaattatcctgttttaattcccatcatgtttgtctagctccaagtctamgctcatccttcttacaataactacctggaacactgccaagtaccatgttaaaaaagagactatggcataaaggggcaggagcaggggcacagggcaggac

SEQ ID NO: 543576 - DNA, 201 bp, Homo sapiens
tttacaagcactaaaaatacctccatgatttatatgtgtttgggatttttgcatattgaattataatttcactatatctatatgatatttattggtttctmagtagagtattcattcggggttacaataaaaaattaaaggtaggttcaattatatcaacaatatttggaaagcttgatcctggttaataaattctactaa

SEQ ID NO: 543577 - DNA, 201 bp, Homo sapiens
ttttaattcccatcatgtttgtctagctccaagtctaagctcatccttcttacaataactacctggaacactgccaagtaccatgttaaaaaagagactakggcataaaggggcaggagcaggggcacagggcaggacttagtgaagtaaaagcaaacattgtaaagtccaagtactttactcattgaagtgctcttcaaa

SEQ ID NO: 543578 - DNA, 201 bp, Homo sapiens
gagtattttgtttctttgttatttaaaatatattgttgggaagttaaataaatttgaactgtagtaccaaaaaatcctgatgttttgttttacctaagttmcctgagtagcagtgtgaattaaaatcatctgtggacataacttattccagaaaataaataatatccaataaagcagaagatcatgcaaactaactaccca

SEQ ID NO: 543579 - DNA, 201 bp, Homo sapiens
aagactgcctatcactttctgggactctagcagaactccttcctgtcccctgtataagctgccattgtaagatagattatgtcataaatccaaaacacagmgattgtatatattttataactatcttgtgaattttcccagagcatgtttgatatgtgtcataaaatgggaaaaatccaaaaaatcaatgtattttatctg

SEQ ID NO: 543580 - DNA, 201 bp, Homo sapiens
agagaagtgttttctgctactactattagcttggtaaatctttacagcagctcctaagaagtaggtattattatatatccctctgacagacaaagaaaaayagagtacctaagtagcctgtctgaggttatgtagctactaagttgaagagtgaaagccaggttggctagattccacagcctacatacttcattatgtgca

SEQ ID NO: 543581 - DNA, 201 bp, Homo sapiens
aggcatctttggaagaaggaaaagaatttctttctttttacagtaaaagaaaatattttcacctttttctgacaatctgcacagaaaagttttctaggctytctcctagcattttcaatacccccttgggatctagggaagctgatttcccttttaacaagatgatctctataaatgaatgaggctgtttctgctaatggc

SEQ ID NO: 543582 - DNA, 201 bp, Homo sapiens
tttataactattgagtgaccctcactctctcggacaggttttctgcctcaaagtcaactttacatgatatatatagccatacaacatttctattggttagyagtgtcaggaatatctttttaaatcctttttactttcaagcgagaatatgctttttaaggtattgcttgtaaacagcatataaatatattttgttatttt

SEQ ID NO: 543583 - DNA, 201 bp, Homo sapiens
atgtggaacaaccagaactctcatacatggctggtggaaatgtaaaaatgtttgttacaagcagtttgcaattttgcagcttcttaccaagttaaacatayacttactatatgtacttagaagtacagttacctgtactataactgtactcttaagtattgactcaagaaaaatgtaagatatatatgcatataaatttta

SEQ ID NO: 543584 - DNA, 201 bp, Homo sapiens
aataaagggaaagtatttaacgtgttttaatttccccattttaatttactgcattaaaaaaaccccaagatgttgtgcacatgtaccctagaacttaaagtataataataataataataataataataataataataataataaaaaacccaagatgaagcttctcgggaggctgaggcagaattgcttgaacccgggagg

SEQ ID NO: 543585 - DNA, 201 bp, Homo sapiens
agtgaccaaaagcagatcattgctagggggcaataggtggggaagattggctgagattaagtacacaagaactctttaggatgatggaaataatgttctaytacatcttgactgtggtagcagttacacatgtatgcaagtatgtcaaaactctatcaaaatgtacatgcatagtggtatatcttattgtatataaattat

SEQ ID NO: 543586 - DNA, 201 bp, Homo sapiens
ataaagggaaagtatttaacgtgttttaatttccccattttaatttactgcattaaaaaaaccccaagatgttgtgcacatgtaccctagaacttaaagtataataataataataataataataataataataataataataaaaaacccaagatgaagcttctcgggaggctgaggcagaattgcttgaacccgggaggt

SEQ ID NO: 543587 - DNA, 201 bp, Homo sapiens
ccaaataaagcaaaagccaagtgtatcaaaagagattcagaaaagtgatgtagcaataggagcaaatagcaacttaactttagggtagaaaggagaaaacrttaaagagatacagtgattttgacagccttttcaagtattcaaggcagagcaaggttaccctgagcccaggttcagaaaatctactccttgaaggatttc

SEQ ID NO: 543588 - DNA, 201 bp, Homo sapiens
taaagggaaagtatttaacgtgttttaatttccccattttaatttactgcattaaaaaaaccccaagatgttgtgcacatgtaccctagaacttaaagtawaataataataataataataataataataataataataataaaaaacccaagatgaagcttctcgggaggctgaggcagaattgcttgaacccgggaggtg

SEQ ID NO: 543589 - DNA, 201 bp, Homo sapiens
aaagggaaagtatttaacgtgttttaatttccccattttaatttactgcattaaaaaaaccccaagatgttgtgcacatgtaccctagaacttaaagtataataataataataataataataataataataataataataaaaaacccaagatgaagcttctcgggaggctgaggcagaattgcttgaacccgggaggtgg

SEQ ID NO: 543590 - DNA, 201 bp, Homo sapiens
gcagatgacatgattgcatatttagaaaacctcattgtctcagccccaaatctccttaagctgataagcaacttcagcaaagtctcaggatacaaaatcartgtgcaaaaatcacaagcattcctatacactaataataaacaaacagagccaaatcatgagtgaactcccatttacaactgctacaaagagaataaagta

SEQ ID NO: 543591 - DNA, 201 bp, Homo sapiens
cagacatgcaatttatttttttattttttaacttcttgccttttaataatatctttgaatatagatggtttcaattctccaataacaagatgtagagtggycaaatggtttttcatacatgtttccctagtccagacacccaagagtatgtccctctcttgggcataagaaaacctagagttatatttagggcatcatgtg

SEQ ID NO: 543592 - DNA, 201 bp, Homo sapiens
ccatgagcatggaatgttcttccatttgtttgtatcctcttttatttccttgaccagtggtttgtagttctccttgaagaggtccttcacatcccttgtawgttggattcctaggtattttattctctttgaagcaattgtgaatgggagttcactcatgatttggctctctgtttgtctgttgttggcatataagaatgc

SEQ ID NO: 543593 - DNA, 201 bp, Homo sapiens
gttggcatataagaatgcttgtgatttttgtacattgattttgtatcctgagactttgctgaagttgcttatcagcttaaggagattttgggctgagacartggggttttctagatatacaatcatgtcatctgcaaacagggacaatttgacttcctcttttcctaattgaataccctttatttccttctcctgcctaat

SEQ ID NO: 543594 - DNA, 201 bp, Homo sapiens
cgcaggtcctggccatgccatcggcaacctgctcgtcttgtccgtgaggccttcccagctggccgggctcaccctgcagctcctgcacctgtgcctgcccsgggaattgtgggccgtttcccactcctcttcaaccgtcagcgacatcttgggccttcttttccagtcaggtgggacggcgcccctatgaggctgtgtctt

SEQ ID NO: 543595 - DNA, 201 bp, Homo sapiens
acctgtgcctgcccggggaattgtgggccgtttcccactcctcttcaaccgtcagcgacatcttgggccttcttttccagtcaggtgggacggcgcccctrtgaggctgtgtcttatccctcggaacacgggcaccccacagagggtcctgcgtcctgtggtctggagccccccctcaaggaagaaacccgtgctgtctcc

SEQ ID NO: 543596 - DNA, 201 bp, Homo sapiens
tattcacgatagcaaagacttggagccaacccaaatgtccaacaatgatagactggattaagaaaaggtggcacatatacaccatggaatactatgcagcsataaaaaatgatgagttcatgtcctttgtaaggacatggatgaaattggaaatcatcattctcagtaaactatcgcaagaacaaaaaaccaaacaccgca

SEQ ID NO: 543597 - DNA, 201 bp, Homo sapiens
acatttccaggtcccaaactctttgtaatataatattgcaatttggtttgttctttacattaaaaaacgtagtgctctacactctgctgtgcagatgattrggtcaatgggagctacatgacattgaaatgccaaaaatacaagcatcatgacagcgaggtggaaaatgggccaagtgcagctgggaggagatgtctggta

SEQ ID NO: 543598 - DNA, 201 bp, Homo sapiens
atgatgtttgtgtttaaatgcctttttacagattccacactcatgaggtcttttacctgcaaaataagaattctgttaaataaaatggtggtattcagcarataaaatccttatacggtttttggggtacttcatgttgtagaaaggggagggttattagtttcatttttaaaacatttccaggtcccaaactctttgtaa

SEQ ID NO: 543599 - DNA, 201 bp, Homo sapiens
tatacttattttggggtactgaaattccatacttaacaatttaccactgcagatattttctaatgactaaacaattttaaccattagaatctcataatatktgaacagtgtattacagcataatatcatccttatagtcaaatctttttattattatactttaagttctggggtacatcgcagaacgtgcaggttacatag

SEQ ID NO: 543600 - DNA, 201 bp, Homo sapiens
tgacatacctgtgtgttcatatttatgtctcaataatgaactactcttttggaatatcttgtcacacaaatcacaagcatacattccattttctgtcttcygcattttctttttgggcggtgtagaatcagagtcattctgatcctctacatttgatactccttctgagctagtatcttgtctttcatcctagagggagaa

SEQ ID NO: 543601 - DNA, 201 bp, Homo sapiens
tcagataagcatattgtcataatttaagaaataactagaaaaatacatacactttgagttgtgttctacagagccaacagactgtactcatattaagtatwagaatattttacacattagcacaattctgagaacaccacaaatttaggcatgaatgctgagtgatgcaaagatcggtggaaacactgaccaagtgtttcc

SEQ ID NO: 543602 - DNA, 201 bp, Homo sapiens
gtactgaaattccatacttaacaatttaccactgcagatattttctaatgactaaacaattttaaccattagaatctcataatatttgaacagtgtattayagcataatatcatccttatagtcaaatctttttattattatactttaagttctggggtacatcgcagaacgtgcaggttacataggtatacacatgcctt

SEQ ID NO: 543603 - DNA, 201 bp, Homo sapiens
ataaaagtcaatcattctaaattttacccctgcaaaaggggtggtggtttttaatatcttcagatacatgctattaatagaatgaaaactgataggcaaaygcagggaaagggttgtcattgctcacagaatgctagttcttattttctcctgtctctcattacatgaaagttactaaggattcgtaggatttctttgtta

SEQ ID NO: 543604 - DNA, 201 bp, Homo sapiens
gtgggcctgtgcgtctaatggagaggtcactgcagaaaggaagctcagggttctcccaggcagcggcagggtgtggaagtctttctttgcctttttgaccrttttgtagagggaagctgctctgctgtccagccctgcggaggggggcagggtctgtgtccccgagatgacagagggttgggggcagttcattccagtgac

SEQ ID NO: 543605 - DNA, 201 bp, Homo sapiens
gaaaggaagctcagggttctcccaggcagcggcagggtgtggaagtctttctttgcctttttgaccgttttgtagagggaagctgctctgctgtccagccytgcggaggggggcagggtctgtgtccccgagatgacagagggttgggggcagttcattccagtgaccagtggttggccgaagagtgctttggagttcagc

SEQ ID NO: 543606 - DNA, 201 bp, Homo sapiens
gttcaagcgattcttctgcctcagcctcccgagtagctgggattacaggtgtgcaccaccacgcttggctaattttctttttttgtatttttagtagagayggggtttcgccatattggccaggctggtctcgaactcctgaccttgtgattcgcccgcctcggcctcccaaagtgctgggattacaggcatgagccactg

SEQ ID NO: 543607 - DNA, 201 bp, Homo sapiens
cggcagggtgtggaagtctttctttgcctttttgaccgttttgtagagggaagctgctctgctgtccagccctgcggaggggggcagggtctgtgtccccragatgacagagggttgggggcagttcattccagtgaccagtggttggccgaagagtgctttggagttcagcccacctgggtttgaatttacatcctcccc

SEQ ID NO: 543608 - DNA, 201 bp, Homo sapiens
tctttgcctttttgaccgttttgtagagggaagctgctctgctgtccagccctgcggaggggggcagggtctgtgtccccgagatgacagagggttggggrcagttcattccagtgaccagtggttggccgaagagtgctttggagttcagcccacctgggtttgaatttacatcctccccgcatggagctaagcctgacc

SEQ ID NO: 543609 - DNA, 201 bp, Homo sapiens
atgtgacatgtgacttctggcaagtcccacccctctctgagcctggtgtgagggcccagcaccctctgtccattttccatcatgatggtgtacctcccccscatcctcaccccactgaaactgaaaatctatactcgggggaaccccagagaggacctgtggtcccaggtcagggagagtggaaggcggaggggagaccgg

SEQ ID NO: 543610 - DNA, 201 bp, Homo sapiens
tgtgacatgtgacttctggcaagtcccacccctctctgagcctggtgtgagggcccagcaccctctgtccattttccatcatgatggtgtacctccccccyatcctcaccccactgaaactgaaaatctatactcgggggaaccccagagaggacctgtggtcccaggtcagggagagtggaaggcggaggggagaccggc

SEQ ID NO: 543611 - DNA, 201 bp, Homo sapiens
ccctctctgagcctggtgtgagggcccagcaccctctgtccattttccatcatgatggtgtacctcccccccatcctcaccccactgaaactgaaaatctrtactcgggggaaccccagagaggacctgtggtcccaggtcagggagagtggaaggcggaggggagaccggccatgtctgtgttccaggcttggtgggcta

SEQ ID NO: 543612 - DNA, 201 bp, Homo sapiens
cgtccacagccctgcagagcacggcaggagcacacctcggccgagagcctgatggagtgcatcctggagagcttcgccttcctcaatgccgacttcgcccyggatgagctgtccctgtttgggggctcccagggtctccggtgagtgcacctccttccagcagtgacccagtggccaccactcccaccgggtgacccgagc

SEQ ID NO: 543613 - DNA, 201 bp, Homo sapiens
gggcggaggcctttctggaggccctgagacttctgctgaggggcacgggaattggccagaatcccaggggtctgagcccagccctggcttttgcatccatrtgacatgtgacttctggcaagtcccacccctctctgagcctggtgtgagggcccagcaccctctgtccattttccatcatgatggtgtacctccccccca

SEQ ID NO: 543614 - DNA, 201 bp, Homo sapiens
gggacgaagaggagaaggccttcatccccacgctgcatgagaacctggacatcaaggtggggatggggcccgggggcagggctggggtgcctgggtgttckgctcagacaccaccctccagcccccacccccaggtgacggagttgcggggcctgggctcgctggctgtgggtgcagtgacgtgtgacatcgccgacttct

SEQ ID NO: 543615 - DNA, 201 bp, Homo sapiens
agtgcaatttcctagatttgctgccttgtcgtaggaggctcctgggggcatgagagaagagggttaatatgtcagaggtggagagagctgggggcagggaractggcatatgcctcaactaggttttgttccaattttattttgcctttgcagaaaatctgtttcgaatcactctgggcccgtgcagtgtttttggatgaa

SEQ ID NO: 543616 - DNA, 201 bp, Homo sapiens
ccccacacagttccctgtttgcctcatccacgcaccccgcactgaaccttctccacagggctcataccccggggctgttctcagttcacaggagggcttakgtggcaggtggctttcagaggtgctgacctaggcaaattattacattctcctctcgtgtttacacaaatttgaatgtacatcaaaaaaatgtataccact

SEQ ID NO: 543617 - DNA, 201 bp, Homo sapiens
tggggtcagagtgcctggaacagtctccctctccaataggcaccaggatgaaaaagaaactgcatatttcactgtcaaaagaaaaaccagaacagcaggcmggcttgatgtgtctcttgtaaattgtttacctctggaggaccagatggctcatctcttgttgaacccttgaccacttcccgtgctgttaacagcctccac

SEQ ID NO: 543618 - DNA, 201 bp, Homo sapiens
gcttgggaccgggacattgcccaagtctgccgtgaggcccctggccagtgtcccagtcgggtgggtggggcccggtgttgccctcaggtctggccacttcrtccacagccctgcagagcacggcaggagcacacctcggccgagagcctgatggagtgcatcctggagagcttcgccttcctcaatgccgacttcgccccg

SEQ ID NO: 543619 - DNA, 201 bp, Homo sapiens
gaggtgcagtagtagatgctgggcagatgtggctcgatacaggaagtttttccaggcagagacccccaagtgagcagaggtgtagtggggtggacttggcycctgggggaaagagatgttggaacatgggggtctcatcgtgcaggaagatgaggtggactggagctttttcgtaggttttgtctgggcaatggggtccct

SEQ ID NO: 543620 - DNA, 201 bp, Homo sapiens
atgggcaccgttagcagccctggcacagagccgacctccaccctttgtagcatcctgccaaggcaggcctcctccatggctggggtggcagggagtgttcsctgtcttcttagacctttgggatagaagccagaggcaaggcagggttcccattcagcggaacatcctagaggtaaagacaaggcccccaggccatgtgag

SEQ ID NO: 543621 - DNA, 201 bp, Homo sapiens
ctccagcatggactctgtatcgtaactgttcggcagtaggtgggcctccctgctgggctggagcccttgaggatggggggacttggcctgccttgcagagytcacctgtgttaggtgctcagggagggctggaggaggggagaggagaagctcggggggtgagagggctgtgttcaggaggtgctgtccccttgctctggg

SEQ ID NO: 543622 - DNA, 201 bp, Homo sapiens
ttttatcataaatcatgtcttatgatcatgtttgtgcataaagctttaaaaaaacatggagttctgaattatttccttaggctagacccaattctaggacyggagaatatgagcatttttgagactcttgatacaacccacacatagatcccatggatgtgaggggatgcccgctttccctcaacctcacctgcatttgga

SEQ ID NO: 543623 - DNA, 201 bp, Homo sapiens
tgacctgtgagctgggcacagtaccagcccccacaacactctggggccattgtgaggtctgtaggtgttggtggaaggtggctggcctgcggacggcactygctggatggtgatgccaggctgactctcctgtcctctccttgcaggtgaccaccatgtcggtgaggttgcggttcctgtcccctggggacacaggggccg

SEQ ID NO: 543624 - DNA, 201 bp, Homo sapiens
cctgccctcgtgccatcagaaaccctttttttttttgagatggggtttcactcatggttgcccagactggaatgcagtggcgcaatcttggctcactacarcctccacctcccgggttcaagcgattctcctgcctcagcctccagagttgctgggaaacaggcaggcaccaccacacccagctaattttgtatttttagt

SEQ ID NO: 543625 - DNA, 201 bp, Homo sapiens
cgggtgggtggggcccggtgttgccctcaggtctggccacttcgtccacagccctgcagagcacggcaggagcacacctcggccgagagcctgatggagtscatcctggagagcttcgccttcctcaatgccgacttcgccccggatgagctgtccctgtttgggggctcccagggtctccggtgagtgcacctccttcca

SEQ ID NO: 543626 - DNA, 201 bp, Homo sapiens
cactgcactccaacctggccaatggagtgagactccgtctcaaagaaaaaaaaaaaaagaaaaagtaagtaggattgaatgattcataattccataatgamatactgaaagggcacctgaacagccccacctacccttccatctaacaatctctttatagctatttataaaatgataaacgcctgtgaacccatggcccca

SEQ ID NO: 543627 - DNA, 201 bp, Homo sapiens
ccgtctcaaagaaaaaaaaaaaaagaaaaagtaagtaggattgaatgattcataattccataatgaaatactgaaagggcacctgaacagccccacctacmcttccatctaacaatctctttatagctatttataaaatgataaacgcctgtgaacccatggccccacctgcgtgctggaactcagacaaccattttatat

SEQ ID NO: 543628 - DNA, 201 bp, Homo sapiens
tgattcataattccataatgaaatactgaaagggcacctgaacagccccacctacccttccatctaacaatctctttatagctatttataaaatgataaaygcctgtgaacccatggccccacctgcgtgctggaactcagacaaccattttatatcaacttccgaactcttttcccatcttgcctccctccctctctcac

SEQ ID NO: 543629 - DNA, 201 bp, Homo sapiens
ctttgcctttttgaccgttttgtagagggaagctgctctgctgtccagccctgcggaggggggcagggtctgtgtccccgagatgacagagggttgggggsagttcattccagtgaccagtggttggccgaagagtgctttggagttcagcccacctgggtttgaatttacatcctccccgcatggagctaagcctgacca

SEQ ID NO: 543630 - DNA, 201 bp, Homo sapiens
tttttgaccgttttgtagagggaagctgctctgctgtccagccctgcggaggggggcagggtctgtgtccccgagatgacagagggttgggggcagttcaytccagtgaccagtggttggccgaagagtgctttggagttcagcccacctgggtttgaatttacatcctccccgcatggagctaagcctgaccagtgcgtg

SEQ ID NO: 543631 - DNA, 201 bp, Homo sapiens
gtctgtgtccccgagatgacagagggttgggggcagttcattccagtgaccagtggttggccgaagagtgctttggagttcagcccacctgggtttgaatytacatcctccccgcatggagctaagcctgaccagtgcgtgtgttcaccaagctcaggcgtcttttgtttgtgtgtttttggatggaaaggggaagcagcc

SEQ ID NO: 543632 - DNA, 201 bp, Homo sapiens
gggttgggggcagttcattccagtgaccagtggttggccgaagagtgctttggagttcagcccacctgggtttgaatttacatcctccccgcatggagctragcctgaccagtgcgtgtgttcaccaagctcaggcgtcttttgtttgtgtgtttttggatggaaaggggaagcagcccttcacccggtctctcctccctt

SEQ ID NO: 543633 - DNA, 201 bp, Homo sapiens
cccgcatggagctaagcctgaccagtgcgtgtgttcaccaagctcaggcgtcttttgtttgtgtgtttttggatggaaaggggaagcagcccttcacccgstctctcctcccttgcagccgtgccacagggccagggttgcaatgaaggcaggtctcaggcaggtctcggctctgctctggcaaacgggccccagaggtct

SEQ ID NO: 543634 - DNA, 201 bp, Homo sapiens
cttcacctagcttggagcagattccttggttgaaccagtcatggtggccaaaagaacgtggaggtgtgactgtctgtgttctactccatgtaactacgtgmactgaaaagtggtgtgggatcattcgccataagaaacccacccggcaggcacagtggctcatgcctgtagtcccagcactttgggaggccaaggcgggtg

SEQ ID NO: 543635 - DNA, 201 bp, Homo sapiens
cccgagcaatactgtagccaaccaaataccatagtgtcttcaatactactcatttcgcccatggaaaattatgcctaagccaccatacgggttaatgaacsctccagcccaggtccgaagagatgcctttagcacagggacgtgtggcagtgtctggagatgtgccaggctgtcacaggctgtgctcctggtgtggggaca

SEQ ID NO: 543636 - DNA, 201 bp, Homo sapiens
tcctgttaaaatgaaattagatccagttccttctctgttcaggacacctcctatctccagccctggtcccaccttgcccagagcacaggcaaagtcctcaycatggcccacaaggcctgcagggcccaggcctctctaaccttatctctcctccttcccactccccacaattgctgttcttgaggtcgggcacagtcctgc

SEQ ID NO: 543637 - DNA, 201 bp, Homo sapiens
agagtgagggcttctgattggagagccccactctgcgtgtcccttagtcactcctgggacctaggtcaggcgtacacacacctgcaccacactgcctatayacaagcactttacctgtattgtatttatttatttttggctcatggtgttgcccaagctggcctcaaacttcctgggctcaagtgctcctcctgcctcagc

SEQ ID NO: 543638 - DNA, 201 bp, Homo sapiens
ttagtcactcctgggacctaggtcaggcgtacacacacctgcaccacactgcctatacacaagcactttacctgtattgtatttatttatttttggctcayggtgttgcccaagctggcctcaaacttcctgggctcaagtgctcctcctgcctcagcctcccaggtagctgggactacaggtgagtgccactgcacctgg

SEQ ID NO: 543639 - DNA, 201 bp, Homo sapiens
tggggccgcccctccgcgtgggcagcgccaccagcccgtgtgcccaccacaggtggatgagctgtacgaggactactgcatccagtgccgcctgcgcgacrgcgcctccagcatgcagcgggccttcgcccggtgccccccgagccgcgcagcccgagagagcctgcaggagctgggccgcagcctgcacgagtgcgccga

SEQ ID NO: 543640 - DNA, 201 bp, Homo sapiens
caccatgggctgggctagcggggtgcttagctcagggagggcctctcccagagaggagaagtcgacaggcaggtgtggggccgcccctccgcgtgggcagsgccaccagcccgtgtgcccaccacaggtggatgagctgtacgaggactactgcatccagtgccgcctgcgcgacggcgcctccagcatgcagcgggcctt

SEQ ID NO: 543641 - DNA, 201 bp, Homo sapiens
ggctggagtgcagtggcgcgatctcggctcactgcaagctctgccttctgggttcacaccattctcctgcctcagcctccccagcaactgggactacaggygcccaccaccacgcccggctaatttttttgtatttttagtagagatggggttttacctgtgttagccaggatggtctcgatctcctgacctcgtgatctg

SEQ ID NO: 543642 - DNA, 201 bp, Homo sapiens
tggtctcgatctcctgacctcgtgatctgcccgcctcggcctcccaaagtgctgggattacaggcatgagccaccgcgcccggcctagaattctttatttrtggtgttttttttctttttttttttttttttttcacttgagaattctttatgaaggggctatcaagtgtataccttaatttaacctactcagctgctttc

SEQ ID NO: 543643 - DNA, 201 bp, Homo sapiens
tgttctgggccccaaggaggcgtctctctgcctgtggcctctgtctggctgcagggatggttagaggccctcgtggcctagccccaggcagccagctgagycacctccggggctttgcaggacatgtggctcatcgagggggccctggaggttcacctgggcgagttccacatcaggatgaaaggtaacagggctgagagg

SEQ ID NO: 543644 - DNA, 201 bp, Homo sapiens
ggtctcgatctcctgacctcgtgatctgcccgcctcggcctcccaaagtgctgggattacaggcatgagccaccgcgcccggcctagaattctttatttgkggtgttttttttctttttttttttttttttttcacttgagaattctttatgaaggggctatcaagtgtataccttaatttaacctactcagctgctttca

SEQ ID NO: 543645 - DNA, 201 bp, Homo sapiens
cgtttgcagagcagcctggctggaggaacttaggaggggagagccccagcctgccacagggctccctgttccacagcggcacagcctcgagtagccagaayggccacgaggaaggggcaaccggggacagagaggacgggcctggcgtggccctcgaggggcctctgcaggaggtcctggagttgctgaggcccacggact

SEQ ID NO: 543646 - DNA, 201 bp, Homo sapiens
ctcgatctcctgacctcgtgatctgcccgcctcggcctcccaaagtgctgggattacaggcatgagccaccgcgcccggcctagaattctttatttgtggkgttttttttctttttttttttttttttttcacttgagaattctttatgaaggggctatcaagtgtataccttaatttaacctactcagctgctttcatag

SEQ ID NO: 543647 - DNA, 201 bp, Homo sapiens
tccccctcaagattctgctcctaccttgtcacaggccattcaggagggactttggggggtgacacgcccagtgccacgccttgggccagcggctgggcttstgctgggggacggtgtgtgggattggggcttgggaccgggacattgcccaagtctgccgtgaggcccctggccagtgtcccagtcgggtgggtggggccc

SEQ ID NO: 543648 - DNA, 201 bp, Homo sapiens
ggccgtgggggtcgtgggccggagcgcctccttcgcaggcttcagcagtgcacagagccggaggatcgcgtaagttccccccgtgtcctgtttcggggtgyaggggtggggcttgttaatgggctggggaagggcagggtcatcctcctcctgctgccagagacccgaaggcccactctcaggccggcttgcagcccgaga

SEQ ID NO: 543649 - DNA, 201 bp, Homo sapiens
gcctcagcctcccgaagcgttgggattacaggcgtgagccatcgtgcctgtaccttttttgtactttttaacagcctttttttgtagactaatttgagtcrgcatgcacatttgtcacatacttgtattttgaaaaattacacccaatttacataaaaatgttaatgccgcaataatgtaatcattttaaacgtctttaag

SEQ ID NO: 543650 - DNA, 201 bp, Homo sapiens
gtcctgtttcggggtgcaggggtggggcttgttaatgggctggggaagggcagggtcatcctcctcctgctgccagagacccgaaggcccactctcaggcyggcttgcagcccgagagagacagagagagagagagagagagagagagagattgagattgagagagagacagagagacagagtttcttagtgttgggataa

SEQ ID NO: 543651 - DNA, 201 bp, Homo sapiens
cccagctggaagcaccttaggaatccctgttcacgcagcagatattcacggagcacctactctggccctgtcctgggctctggggacagacccaggccctrctgtcctgggagctgatggcagcaaacaataagccagtgataattgagacagatccagctggtggcagtgctgtgagggaactgaactgggggtggggga

SEQ ID NO: 543652 - DNA, 201 bp, Homo sapiens
cctggaatagggccggcaacctcagaatacttaatgacagctgctgctgtttctatggtgtgtttgtcaggcccttcattcattcattcacttcattcatycaaaactaggctgggtgcagtggctcatgcctgtaatcccagtactttgagaggccgaggcgggtggatcacctgaggtcaggagtttgagaccagcctg

SEQ ID NO: 543653 - DNA, 201 bp, Homo sapiens
acctgggcatcacagcaagaccctgtctcaaaaacaagcaacagtttagagcagagctcctcacacaccatccatgctattgtattgtaagatgaagaccrtctacctgcataacctaagagccctgtgggccgtctgggcctgaaatggcctctgggtgccgatggcatcctgaccttctgttctctcctccagcccgtt

SEQ ID NO: 543654 - DNA, 201 bp, Homo sapiens
ttcctgcaccagcctctgccaagggtgtccctgccctcacgggtcctcatctgtccctcactcccacccctcagtcaggtcgaggcctagaacttctctgyagcccctgcctgcctttctggttttgcttcccttcttgcttctgaacccctgactattaaagccacagggaaggttggggggacactttccggggcctcc

SEQ ID NO: 543655 - DNA, 201 bp, Homo sapiens
gtttaaaaaaatgtttcttgaccacacttgttcatgtacatattgtctgtggctgctttcccactatgatggcagagttgcttagttaggacaaaactttkaccctgatgaatttaaccccacaggcaggtacagcacttcccatgtcttaggtccacttcacactctttcttggttctagaagtaactctaaggtaggca

SEQ ID NO: 543656 - DNA, 201 bp, Homo sapiens
tgctcacgtgtcacatgggaatgcagggaagggacctcgcatcaagccacaccgtcccctcctccctaccccctcaggtcctagtggagggaaacctttcrggtccttgtcatgtgctctccccgagtcaccattcaggtttctgaactggggctttcagtcatcccacaggcctcgcggacgaaggggtgcctgaagctg

SEQ ID NO: 543657 - DNA, 201 bp, Homo sapiens
gcagcacactcttcagtcagctgtgtgactctaggcaaatgattcacatctctgagcctctgcttccctatctgcataggaggagggcactgcacggggtwcagtgaggtaaccccaggccacattcaaggtgcagaatgtgccgtcaaacagtagctgtgatcccagctgtgcctctgccccgtgggacctcccctcaga

SEQ ID NO: 543658 - DNA, 201 bp, Homo sapiens
aggtaagggagacaagtcctggagttgcagcacactcttcagtcagctgtgtgactctaggcaaatgattcacatctctgagcctctgcttccctatctgyataggaggagggcactgcacggggttcagtgaggtaaccccaggccacattcaaggtgcagaatgtgccgtcaaacagtagctgtgatcccagctgtgcc

SEQ ID NO: 543659 - DNA, 201 bp, Homo sapiens
aaaggctgtattgagtctccagggccttcagggtggccacagctggcctcatttcagccctgtcttcacctctgtgtcttcatgccatcggacggaggagstttctcagcttcagtgcgagtcaccgccctttcaccgggcgagaaggggcctccacgtggggccttctgagcagtctgtggagccctgaagctgcgtgca

SEQ ID NO: 543660 - DNA, 201 bp, Homo sapiens
atgttcagcagcacaaagggaagaagccaccacatcagcccaggagccctgagcagcacaggcagtagggccactcactttggccatccgcacccaaatgcaatcaatcaacccagcttcggaagctaccctaggatctcgtcaataaactgctaagaagccatcaactggcctaaagaaagagttcactgaagaacgcaa

SEQ ID NO: 543661 - DNA, 201 bp, Homo sapiens
tgttcagcagcacaaagggaagaagccaccacatcagcccaggagccctgagcagcacaggcagtagggccactcactttggccatccgcacccaaatgcaatcaatcaacccagcttcggaagctaccctaggatctcgtcaataaactgctaagaagccatcaactggcctaaagaaagagttcactgaagaacgcaat

SEQ ID NO: 543662 - DNA, 201 bp, Homo sapiens
gttcagcagcacaaagggaagaagccaccacatcagcccaggagccctgagcagcacaggcagtagggccactcactttggccatccgcacccaaatgcaatcaatcaacccagcttcggaagctaccctaggatctcgtcaataaactgctaagaagccatcaactggcctaaagaaagagttcactgaagaacgcaatt

SEQ ID NO: 543663 - DNA, 201 bp, Homo sapiens
ttcagcagcacaaagggaagaagccaccacatcagcccaggagccctgagcagcacaggcagtagggccactcactttggccatccgcacccaaatgcaatcaatcaacccagcttcggaagctaccctaggatctcgtcaataaactgctaagaagccatcaactggcctaaagaaagagttcactgaagaacgcaattg

SEQ ID NO: 543664 - DNA, 201 bp, Homo sapiens
aagctcggggagcctcttctgccttcctaatagccagagttaatcggggcccagagtggaggctgtggctgggctgggctcagagatacacactctttgtsgggaggtaagggagacaagtcctggagttgcagcacactcttcagtcagctgtgtgactctaggcaaatgattcacatctctgagcctctgcttccctat

SEQ ID NO: 543665 - DNA, 201 bp, Homo sapiens
agagcaagacactgtctcaaaaaaataaaaatacataaacaaataattagaaattttttagaaaggaaaatattaactggtatttctgaagaattacactscttcatcaattgtaaccataggttgattacagattttgctgggggcaaaaatcaacaaaactgctacctgtgagtgaaatgattatattacatttataaa

SEQ ID NO: 543666 - DNA, 201 bp, Homo sapiens
tgaggcaggagaatcacttgaacccaggaggtggaggttgcagtgagccaagatcgtgccattgcactccagcctgggtaacagagcgagactccctctcaaaaaaaaaaaaaaaaaaaaaaaagtagtttaaagaacttaaagcagaaacccgattttgaaatgttcaaggacaaggccagggaggctcgtttggggatg

SEQ ID NO: 543667 - DNA, 201 bp, Homo sapiens
ctattttgccatttcctttcatgcgaaaccaaaggagctattttggaaactcctataaacaaactaagccctagctggcatttgagtggataaaaaggagycctaagtgagggactcaggcataaaagccacccagccccaaaagcccataacgttaaatttagatgttttacctctaaatgaggtgaaattgcaggttcc

SEQ ID NO: 543668 - DNA, 201 bp, Homo sapiens
gctgcatcagccagcctcatggataagttatgggatcctgagaagaggcttagatgccagggaaaccagctctgtgctgtgatgagggtgccctggcctcrtactcctataatcagtcttgagatgctgctacatctctaaaggttgagggacccagccatcaccactgaaaggcagtttttaggatcatccagtccacac

SEQ ID NO: 543669 - DNA, 201 bp, Homo sapiens
aaggaaaggacagcctggccaacatggtgaaaccccgtctctactaaaaatacaaaaattagccgggcatggtgatgcgggcctgtagtcccagctgctcrggaggctgaggcaggagaatcgcttgaacccaggaggtggaggttgcagtgagccaagatcgcatgctactgcactccagcctgggcaacagtgagactc

SEQ ID NO: 543670 - DNA, 201 bp, Homo sapiens
actgtatacgctatactgttttatgaaaaagaagataaaaaattgtatatatttctcctataaaataggtaccatttgcatttattgttgctgaaccttcwctaagctctatatatactttctcttgtttactcctcccaacaatcaaagaggcaggcactattattacaccatttgacagatgaggaaacagaggttcca

SEQ ID NO: 543671 - DNA, 201 bp, Homo sapiens
cttgagtctaatcaatcctcccacctcagcctcctgagtagtaggcatataccaccacacctggctaatttttaaaaagttttattttgtagagataggayctcactctgttgtccaggctggtctcaaactcctgggctcgagcgatcctcccaccgtggtctcccaaagtgctgggattacaggtgtgagccacctcgc

SEQ ID NO: 543672 - DNA, 201 bp, Homo sapiens
cagccattctcaaattgtgagagaggtgaggtgttttccttctggggatggggatcagggttgtcttggatggggggacaaatggctggcaccaatctagrgaagccagaaagtagagagtaaatactgatgtggccattattctgccagctcagtcttgcccaatgaaggggagaaaataggtggcagagaaccagccgc

SEQ ID NO: 543673 - DNA, 201 bp, Homo sapiens
ggcaagcagtccccgcacctgtggacatcaaggatctgtcttcacatccccttctgctcacatggctccagcccaggaggagatgggaggacaggtgtgcrcctctatgggcagccaaacctggggtggtgggtggggaaggtgtcaagtctgatgcatgtctgttagggttctgggcactgtgacgtgcatgcaggtgga

SEQ ID NO: 543674 - DNA, 201 bp, Homo sapiens
tttcctcaactgcaaaatgtgaataaagatagcacagtgtggtcggtgaggactgagcaaggaagtggctctagcacttggcatacacagttggtccttaraagtgggctttagaccagatagaccaaattcaaatctagatccagctatgagtcccttaacttctctgagtcttgatcactctctctgtaacatggtata

SEQ ID NO: 543675 - DNA, 201 bp, Homo sapiens
tgtcacatgcagtttctcaggttataattcagaaccactacatccatccccgccaactgttcttttgggaaccccgatttaatgagattctgcgttcagcygatgggggctgatattagctccaagggaagtcagctttaaaaagcacggaacagaggtcagagctgggtaggagggtgatcttggctggccagagtccct

SEQ ID NO: 543676 - DNA, 201 bp, Homo sapiens
aattctcacaggagcacgaaccctattgtgaactacgcatgcgagggatctcggctgcatgctccttatgagaatctaatgcctgatgatctgtcactgtytccatcacccccagatgggaccatctagttgcaggaaaacaagctcagggctcccactgattccacattatggaatgtgagttgtataattatttcatta

SEQ ID NO: 543677 - DNA, 201 bp, Homo sapiens
tatgtcacggtgtgactctttctcagaactagaggtttatggaatagcctcttcacgttgcactgagttaacttcactttggcacgtacagcagttcacaygttttaggcccatgtcacactgtctctcggttctagaagtaatgctaaggtgggcagtgtatggaggtgcatttcttttaggtggtcctattttatagac

SEQ ID NO: 543678 - DNA, 201 bp, Homo sapiens
atgtacggcacgctgcggaaggggtcggtctgtgcagacccgaagccccagcaggtgaagaagatcttcgaagcattgaaaagaggcctcaagtaaggctrggctgtgtgctgcctttaagaagtgcattcctctatctcgcctcctctctgtctcttcctggggaagcgtggatgggtcttgtctacaagaggtgacagg

SEQ ID NO: 543679 - DNA, 201 bp, Homo sapiens
ggatgctgggcaggtaaagccaacagatgctgccccaagggtaaagcacaggactctgacttggcctcccacacggcattgcctgcacaggcagagcatgstgatcagagagcattggcatttgggctacttgactgtatttcttcctgtaagttcatttctgataccagatttttattactgttcttttttttttttgtc

SEQ ID NO: 543680 - DNA, 201 bp, Homo sapiens
gtgccccagaggaaaattgaggtgctactactagagggaggggatggatgctgggcaggtaaagccaacagatgctgccccaagggtaaagcacaggactmtgacttggcctcccacacggcattgcctgcacaggcagagcatgctgatcagagagcattggcatttgggctacttgactgtatttcttcctgtaagttc

SEQ ID NO: 543681 - DNA, 201 bp, Homo sapiens
aagaggcttagatgccagggaaaccagctctgtgctgtgatgagggtgccctggcctcgtactcctataatcagtcttgagatgctgctacatctctaaakgttgagggacccagccatcaccactgaaaggcagtttttaggatcatccagtccacactcccaactccagctggcttaagctaaaaaagagagccagttg

SEQ ID NO: 543682 - DNA, 201 bp, Homo sapiens
atcgcttgaacctgggaggcggaggttgcagtgagcagagatcgtgccactgcactccagcctgtcgacagagcgaaatttcatctcaaaataataataakaataatacctgtctcctagggtggttgtgaaagtcgagatatttctataaagcccttagcgagctcctggcggcagcaggtgcccccagttacttaggct

SEQ ID NO: 543683 - DNA, 201 bp, Homo sapiens
caaggtgaagccctgtctctactaaaaaaaacaaaaattactggacgtggtagcagatgcctgtaatcccagctactgggtaggctgaggcaggagaatcrcttgaacctgggaggcggaggttgcagtgagcagagatcgtgccactgcactccagcctgtcgacagagcgaaatttcatctcaaaataataataataat

SEQ ID NO: 543684 - DNA, 201 bp, Homo sapiens
gccccttctcttcccatcaccaccttgacccctactctggcaccttgaaacccctttcactatagacagggatttttactccacagtcagatggctcactyggggaagtaacctggtggggaaattttatactaaggtgtgaatgattgacataataaggccatttcccaagagctggacctggggggtgggaggatagag

SEQ ID NO: 543685 - DNA, 201 bp, Homo sapiens
tggcacatgcctgtaatcccagctacttggaaagctgaggtgggaggattatttgaacccaggaggtggaggttgcagtgtaccgagatcacaccactgcactccagcctgggtgacagagcaagatgccatctcaaaaaaacccacaaaaacaccaaaaaagaaaaaccaaaaaaccagaggctcagataggtggagcca

SEQ ID NO: 543686 - DNA, 201 bp, Homo sapiens
ctcccttttgtcatataaggtaaccatggcagtcagatcataatattcacaggttctgcccacaatcaaaggggtggaacctgtgagtattacgggttagmgaagtcgagcgtctttgggatcatcttaatattccactcactgagactggggaaggtcttgggtgctgataataacaatagcaatagtgatattggtact

SEQ ID NO: 543687 - DNA, 201 bp, Homo sapiens
attcacaggttctgcccacaatcaaaggggtggaacctgtgagtattacgggttagagaagtcgagcgtctttgggatcatcttaatattccactcactgrgactggggaaggtcttgggtgctgataataacaatagcaatagtgatattggtacttcttttcctttgcttagaactttgtggattacagactgattata

SEQ ID NO: 543688 - DNA, 201 bp, Homo sapiens
attttttaatagagatggggtcttgctatgttgcccaggccggtcttgaactcctggcctcaagtgatcctcctgtctcagcctcccaaagttctaggatyacagatgtaagccactgcacctggcttttagtttcttttttagagactggatgggtttcagtatgttgtccaggctggtcttgaacttctgggctcaagc

SEQ ID NO: 543689 - DNA, 201 bp, Homo sapiens
gcctctgggtatggggcagctgcaggaggctaaggatgagcaggggcctcgggccagttgaaggacagcaggggctcagccctgaggtgggagtcaggggsctcagccctgaggtgggactccctgaggactgtgtgggctctttcttcagtttatgcagaaagacctcatgctcagtcttagatggctgggaaggttgag

SEQ ID NO: 543690 - DNA, 201 bp, Homo sapiens
cccaggaatgatttctgggattgtctgaggatatttaaggggccagagggctccctgcaccatcgatgctggccctggatctcctgccccatctgccattsgacttgccctgaatgcgtgaacaaatgaatgagcagacatttgctggacagctgctgccctccaggcactggtgtgctggtgttccacagcccgggggcc

SEQ ID NO: 543691 - DNA, 201 bp, Homo sapiens
caaggtcgcatagcagatctgtaagctttagagtctgcaaacggtttcatgatcttgctttactccccacactgcccagtgggtggcaggttatcacaaastcatctcccatttcattgttgaaaaaccaggcagaggaggtgaagggacagattcccttgtccctttcactcatttttgctgtgcacactgtgtgccagt

SEQ ID NO: 543692 - DNA, 201 bp, Homo sapiens
acattctgtgtctctgggtggacatgaattttgggggaacactgttcaactcacaacaccacctaatcaatagtagctattactaatactcctcttactayggaatttgctcagtgcatactatgtcctgggcacttctccaaactccttttattcctcttcccatttaatcctctccatgactgtgaaataggtcccagg

SEQ ID NO: 543693 - DNA, 201 bp, Homo sapiens
gctgagccaaactaggtggccacctacaaaagggccaaggccaggcaagttgaggccctaaataaaaggctccaaggcaagtgtgtagaactccaggcctygctgccggtcagctgctcggcacttctgcgtcaagaggcactggggatgcagcaggctggcaggtggctggccctgctaatgcaagactgctcaggccat

SEQ ID NO: 543694 - DNA, 201 bp, Homo sapiens
cggcgggaggcagctgcgagtgcagatgtcctgggtgggaatgagctttaagggacagaaagcaggtgtgcggctggcatgcgtgacagcagtcagggagrgaggaggaccctgcggagcctcatgggctgcagtgaggccttgagacacattctcagtggaggggagcctgggaagggtttaagttgatgccccaagacg

SEQ ID NO: 543695 - DNA, 201 bp, Homo sapiens
tagcagatctgtaagctttagagtctgcaaacggtttcatgatcttgctttactccccacactgcccagtgggtggcaggttatcacaaagtcatctcccrtttcattgttgaaaaaccaggcagaggaggtgaagggacagattcccttgtccctttcactcatttttgctgtgcacactgtgtgccagtcgctgccagg

SEQ ID NO: 543696 - DNA, 201 bp, Homo sapiens
agacccaggaatgatttctgggattgtctgaggatatttaaggggccagagggctccctgcaccatcgatgctggccctggatctcctgccccatctgccrttggacttgccctgaatgcgtgaacaaatgaatgagcagacatttgctggacagctgctgccctccaggcactggtgtgctggtgttccacagcccgggg

SEQ ID NO: 543697 - DNA, 201 bp, Homo sapiens
gggaaaaaacacttctcccttctgtgaattctgaactcctggctggctactggccaggcttgatccccatacttcttggcccaggggagcagaatatgttractaacgcaggcctggaatgtggatttgccaaacaatcccgtgtgcatgtgtgcatgtgcaaatgtgtgtgtgcatgttgattagtcaggctacctttcc

SEQ ID NO: 543698 - DNA, 201 bp, Homo sapiens
ataaggtagacccaggaatgatttctgggattgtctgaggatatttaaggggccagagggctccctgcaccatcgatgctggccctggatctcctgccccrtctgccattggacttgccctgaatgcgtgaacaaatgaatgagcagacatttgctggacagctgctgccctccaggcactggtgtgctggtgttccacag

SEQ ID NO: 543699 - DNA, 201 bp, Homo sapiens
ggtgaaaacccatttttactaaaaatacaaaaattagccaggtgtggtggtgtgtgtctgtcatcccagctactcaggaggctgaggcagaagaatcgctygaacccgggaggtggaggttgcattgagccgagattgcgccactgcacccaggcctgggcaacaagagcagaactcggtctaaaaaaaaaaaaaaaaaaa

SEQ ID NO: 543700 - DNA, 201 bp, Homo sapiens
cacatggaaaagaaatagactcgaggtcagagcaaagccaacagtgcgactgctgacccagctctcaggagtggcgcacagcatggagagcagacaggcgsgagggctcacagcctagcagccacgctgtttgtccaccacagagatctcactgggcttcacggtgtcctaccttaaatattaggttggtgcaaaagtaat

SEQ ID NO: 543701 - DNA, 201 bp, Homo sapiens
gagtgcagtggcgcgatctcggctcactgcaacctctgcctcccaggttcaagtgattctcctgcctcagcctcccgagtagctaggactacaggtgagcrccaccacgcccggctaattttttttttttttttttttgtatttttagtagagacagggtttcaccatgtttgccagaatggtctcgatctcctgaccttg

SEQ ID NO: 543702 - DNA, 201 bp, Homo sapiens
ggccagcggagggtgggggtgctgacgcttgtctgcatgcttctcttccttcccgggttccagggagctcctggcagagggacccaggacaaaacagagaygctgggaggagaggaccaagcatggatctggccctgctgcttgcaccaaattccaggtctactgtttgtttgtctgtttgttttgagacaggatcttact

SEQ ID NO: 543703 - DNA, 201 bp, Homo sapiens
tcgttgatataattgcatatcacttgttcattcacttttctctgctgtgtactattccatggcataccagcatttatttttcctgtctatgaccatgtggkttgtttccatttgtcagttttgtttgctacatacacggttctgctttgagggttcttgtactgtcctattgcacacatacaggagtgtgtctcaagtttg

SEQ ID NO: 543704 - DNA, 201 bp, Homo sapiens
tggaacaagtcagaggaacggctaagccaaacctataggaaaagttcagatagcttgctatttttagaaactctaggagccaggtgggccccttccagttytaagggcctaagccagcaagcacgagaggaaaatatttctcattctcaagttccgctctcttatagtccaggccaaggacaaggcccaggtgggacatta

SEQ ID NO: 543705 - DNA, 201 bp, Homo sapiens
atggcatcttggaacaagtcagaggaacggctaagccaaacctataggaaaagttcagatagcttgctatttttagaaactctaggagccaggtgggcccyttccagttctaagggcctaagccagcaagcacgagaggaaaatatttctcattctcaagttccgctctcttatagtccaggccaaggacaaggcccaggt

SEQ ID NO: 543706 - DNA, 201 bp, Homo sapiens
aaatatatgtactcgcccatgcacacttgtgcaccacacactcactttcccttggagagctggttgctaaacctttgccagcataccactggttccacagmatctatggttgtgtctggattgtcaaaaatcgtctcctgaacagtcctcagtcctcttccaaaggaattcagaccccaggcatgggccttggatgcaaat

SEQ ID NO: 543707 - DNA, 201 bp, Homo sapiens
atgaaatactgaaagggcacctgaacagccccacctacccttccatctaacaatctctttatagctatttataaaatgataaacgcctgtgaacccatggycccacctgcgtgctggaactcagacaaccattttatatcaacttccgaactcttttcccatcttgcctccctccctctctcactgtggtagtagctgcta

SEQ ID NO: 543708 - DNA, 201 bp, Homo sapiens
caatgggaattgtgggtgcaccctgctcacggggctgtcgggaaggaaccacgagggaggcagggccagcagccggtgcagctggtgctgtggggggttaycggatgagggagcaggcttggcacagatgggcctggggggcagcattgaccctgtggctgagttccctgggggtgctggccgggccaggccctgcctgct

SEQ ID NO: 543709 - DNA, 201 bp, Homo sapiens
ctgatgtgggaggatggcttgagcccagcaggtggaggttgcagtgagctgagatcgtgtcactgcacgccagcctgggcaatagagtcagaacctgtctaaaaaaaaaaaaaaaaaaaagaaaagaaagaaagaaggaaaaggaaataaagaaagaaatatgtgtgtccctgagtcgcctctcacctctcagagcctttc

SEQ ID NO: 543710 - DNA, 201 bp, Homo sapiens
ctacaggctttgtgcacatcctaggctggtgacagcatgtgtgtgtgtcacggctggagtggcagaggccctgtgggagccgcagacccagggccgctccrtaggtgtcaggctgtgtggtctgccagagtcccacacctgttcgtgtgaggggaaggtgcccgagcaatactgtagccaaccaaataccatagtgtcttc

SEQ ID NO: 543711 - DNA, 201 bp, Homo sapiens
gggctgggcacggtggctcatgcctgtaatcctagcactttgggagtccaaggcgggcggatcacttgaggtcagaagttggagaccaccctggccaacayggtgaagccctgtctctactaaaaatgcaaaaattagttggatgtggtggcacatgcctgtaatcccagctacttggaaagctgaggtgggaggattatt

SEQ ID NO: 543712 - DNA, 201 bp, Homo sapiens
gacctatattcccaagggatagggtggcattttctcaatctagagatggtttggaaaaaagagaagacggccagggctcggggttggccccattgcagggygggtcggagactgggcaatggatcggggtggaagcagcccttgacaccagcagtctggcttcatgtgaattggacttttccaccccctgctgaaagccct

SEQ ID NO: 543713 - DNA, 201 bp, Homo sapiens
actcagcagtcctgggctccggatgcttgaggaaatgcaagacaggaaggatctaggttaggcaaatggtcaggtgtggcagggatggacagcagctggarggagcggggatgggcttgaactgcgcatgcccacagggttcccagtgcccttaggctatggccctagcgcctcacccttctaacgtagggtccttctaac

SEQ ID NO: 543714 - DNA, 201 bp, Homo sapiens
ggacatgctttccttggtccttccagcagtctccgtgggaggttctttctgaattccccttttactcttgtgatcactgaggcccagagcctgagtggcasagttgggatttgagcccaggtccaccttctttgttgccaagctttcctatgtacggcacatgtggggctgtggggtgggggatatatgggaggaggaggc

SEQ ID NO: 543715 - DNA, 201 bp, Homo sapiens
tcgccctggctacgtgttgggtggagtgggagaggccgcatctccctgctgccttacagacctgggagaatccgcagacacaggatggattgcgaacaggstctgtcctatgacatgagctggctgtgatttatttttgagggataggaacgggacacaacggtgctcctgccttcctgggcaggggtagcgagcttttgg

SEQ ID NO: 543716 - DNA, 201 bp, Homo sapiens
ctcacctgcagagctggggtcttagccaattgcacagagacagccagctcttccgacatgtctcttgcacactgtgggctctcgggacatgctttccttgrtccttccagcagtctccgtgggaggttctttctgaattccccttttactcttgtgatcactgaggcccagagcctgagtggcacagttgggatttgagcc

SEQ ID NO: 543717 - DNA, 201 bp, Homo sapiens
catcctcgggttctaaacccagtgctcaggtgccctgctggggctcctgggctagtctcatcacctctctgagcctcagtttcctcatctatggaattagrtcatcaaaagctcctgctcttaagagggttgtatggatttcataatttacataaagcatttagtgcagggccagcttagtaatgagcacttgatgaatga

SEQ ID NO: 543718 - DNA, 201 bp, Homo sapiens
tgttaaaatgaaattagatccagttccttctctgttcaggacacctcctatctccagccctggtcccaccttgcccagagcacaggcaaagtcctcaccayggcccacaaggcctgcagggcccaggcctctctaaccttatctctcctccttcccactccccacaattgctgttcttgaggtcgggcacagtcctgcccc

SEQ ID NO: 543719 - DNA, 201 bp, Homo sapiens
ctctgaccttgaagtggagtgactggggtgaagctccaggaacggcccagaaggcttctgatgggaaggtgcagagggaggggccggggaagccccttccrgctccagtgcccaggctggctccggagtacgtctcaactactcacctttgggaatccctccctactccgtccttattctcttgcctggcttggctggggg

SEQ ID NO: 543720 - DNA, 201 bp, Homo sapiens
ggaatgtcacccttggtcgcaggtgacaaactggacttgtcaggagctgtccgctgaaggctcctgagattgtgggtctcagcctggccatcccatccccmatcatccagggggaggtctgtttcttttaccacaagaaacactgcttggctggactccaagtcaacgtcatggatcagccccaccaggcccagccgggag

SEQ ID NO: 543721 - DNA, 201 bp, Homo sapiens
tctcagagcctttctttcctcatatgaaaaatggggccattgaacctcacagtgctatgagtgatgaatccgctgtcaggttctgcaggtctgctccgagmcttagtttccctccttcgtcgtcctctctctcacactgagcaggaggacctggggcttgttttgagctttgcatcgggaggaactgcttagcaattgtcc

SEQ ID NO: 543722 - DNA, 201 bp, Homo sapiens
gatatttctataaagcccttagcgagctcctggcggcagcaggtgcccccagttacttaggctcacgtgttctcaccaggctcctgaggcccttgggcttktgtcagctgttcagcagcccactagccctggcctgagcttagtttctctgctctacagagacattacttgtcattgtaaaggtgttggaagctggacttt

SEQ ID NO: 543723 - DNA, 201 bp, Homo sapiens
aagcgggggaaaaggaatcttgtctttataatggccaacatggagttctgctcctgccttggaacgctcgtgtccggctctcccgtggattgaaagcagcrtgactcctgtgcatggcagagcttgccaggggtgtatatttcatgcctgacatctggtaacattttgggagtcttgacttggggctacaaatggaaaaat

SEQ ID NO: 543724 - DNA, 201 bp, Homo sapiens
agatgaggagggtttagccaggaagccaatccatgtggccatggcacgtggaagaaggaagagccagacttcagtttgaaaaatgagtgtcctggtcaggygcggtggctcacggctataatcctagcactttgggaagctgaggtgggtggatcgcttgagctcaggagttcgagaacagcctggacaacatggcgaaac

SEQ ID NO: 543725 - DNA, 201 bp, Homo sapiens
gtgaaaggctgatgtgggaggatggcttgagcccagcaggtggaggttgcagtgagctgagatcgtgtcactgcacgccagcctgggcaatagagtcagamcctgtctaaaaaaaaaaaaaaaaaaaagaaaagaaagaaagaaggaaaaggaaataaagaaagaaatatgtgtgtccctgagtcgcctctcacctctcag

SEQ ID NO: 543726 - DNA, 201 bp, Homo sapiens
ctaacctcaagtgatccacctacctcagcctcccaaagtgttgggattacaggcacgagccactgcgcccagcctacgtcaatacaatttataataaaccraagtatatgtgtgtgtggatatgcaaatatatgtactcgcccatgcacacttgtgcaccacacactcactttcccttggagagctggttgctaaaccttt

SEQ ID NO: 543727 - DNA, 201 bp, Homo sapiens
cagattttcaggaattaggtgaacgggttgctaaacacaccattgttaaaaattaaattatatgaacttacaattcaataaattctatgaaaaacaaaggyagtcaaggctgagtgtggtgactcatgcatgtaattccagcattttgggaggctgagacaggaggatcatttgagcccaagagtttgagaccagcctggg

SEQ ID NO: 543728 - DNA, 201 bp, Homo sapiens
ctcagtgctccccccagggtcccccagttcatcctggggagctccaaaggggtatttcgagtgcctttgtgaaccagtctctagttttattcatccttccygcttcctctttcctctgaggccatttggagacgcttccctgcccagcacagcagcgtccatggtgccatctctgtaaactcccaaagcttcccgctgttt

SEQ ID NO: 543729 - DNA, 201 bp, Homo sapiens
gttgctgaggttttccccatcagaacctcagtgctccccccagggtcccccagttcatcctggggagctccaaaggggtatttcgagtgcctttgtgaacyagtctctagttttattcatccttcctgcttcctctttcctctgaggccatttggagacgcttccctgcccagcacagcagcgtccatggtgccatctctg

SEQ ID NO: 543730 - DNA, 201 bp, Homo sapiens
gaacgagacttcgtctcaaaaaaaaaaaaaaaaaaaaagaagtttggagaggagtaaatctccccaccacttccctagagaagtccaggatggtactggasgaggcgggaatgaaggtggacttggggaaaaggactgatggcctgtggtaccacctgcatgggtgtcggttgtaacaaccctatggccctgcagcttctg

SEQ ID NO: 543731 - DNA, 201 bp, Homo sapiens
aagatgtctgagagtaagatcaagtttggagtgaggctgggcgcggtggctcacgcctgtaatctcagcactttgagaggccaaggcaggcggatcacctraagtcaggtgtttgagactagcctggccaacatggtgaaacctcatctctattaaaaatacaaaaattagctggccgtggtggtgcgtgcctatagtccc

SEQ ID NO: 543732 - DNA, 201 bp, Homo sapiens
aactgagaacttaagcgtctgagagtaagatgtctgagagtaagatcaagtttggagtgaggctgggcgcggtggctcacgcctgtaatctcagcactttsagaggccaaggcaggcggatcacctgaagtcaggtgtttgagactagcctggccaacatggtgaaacctcatctctattaaaaatacaaaaattagctgg

SEQ ID NO: 543733 - DNA, 201 bp, Homo sapiens
aatatgtcagaggtggagagagctgggggcagggaaactggcatatgcctcaactaggttttgttccaattttattttgcctttgcagaaaatctgtttcraatcactctgggcccgtgcagtgtttttggatgaaacagaattgtgaaacgcatacagcgctttccacatgcctcccctggggggaatcacatattaata

SEQ ID NO: 543734 - DNA, 201 bp, Homo sapiens
gtacctggggttacaggcacgtaccatcatgcccggctaatttttgtatttttagtagagacagggtttcactatgttggctaggctggtcttgaactcckgacatcaggtgatccacctgcctcggcctcccagagtgctgggattacaggtgtgagccaccacacccagccaacaatagctattaaataaggtgtcttt

SEQ ID NO: 543735 - DNA, 201 bp, Homo sapiens
caggagaggcaggagaggcaggtgagacagggttggcaggggtggcaggagaggcaggagaggcaggtgagacagggttggcaggggtggcaggtgaggcmggggtggcaggtgaggccggggtggcaggtgaggcaggggtggcaggtgaggcaggggtggcaggtgaggcaggggtggcaggggaggcaggggaggcag

SEQ ID NO: 543736 - DNA, 201 bp, Homo sapiens
gtgagacagggttggcaggggtggcaggtgaggccggggtggcaggtgaggccggggtggcaggtgaggcaggggtggcaggtgaggcaggggtggcaggkgaggcaggggtggcaggggaggcaggggaggcaggggtggcaggtgaggcaggggtggcaggtgaggcaggggtggcaggtgaggcaggggtggtagggg

SEQ ID NO: 543737 - DNA, 201 bp, Homo sapiens
gcaggggtggcaggtgaggccggggtggcaggtgaggccggggtggcaggtgaggcaggggtggcaggtgaggcaggggtggcaggtgaggcaggggtggyaggggaggcaggggaggcaggggtggcaggtgaggcaggggtggcaggtgaggcaggggtggcaggtgaggcaggggtggtaggggtggcaggtgaggca

SEQ ID NO: 543738 - DNA, 201 bp, Homo sapiens
aagctgtcaagcacacagactctggagccagaggcgagtgatgcaagttcagtttcctggacggtaccagggggcctgacctcaaagactgtgtcaggagraatgagtccatacatgtaaagcaccaagagcaggccaggcgggcgtggtggctcacgcctgcaatcccagcactttgggaggccaaggcaggcggatcac

SEQ ID NO: 543739 - DNA, 201 bp, Homo sapiens
gtggcaggtgaggccggggtggcaggtgaggccggggtggcaggtgaggcaggggtggcaggtgaggcaggggtggcaggtgaggcaggggtggcaggggwggcaggggaggcaggggtggcaggtgaggcaggggtggcaggtgaggcaggggtggcaggtgaggcaggggtggtaggggtggcaggtgaggcagtggtg

SEQ ID NO: 543740 - DNA, 201 bp, Homo sapiens
ctgcacttgcaacagccgagtaccaaggcctctgccaaccacaccaggcagaaggactgctgtagcaacctcacgtgagggctggggccggcaggttgcaygtgcccgtctggaagcttgtctggcatgccaggggctgtttaatatttactgagtcctcccagacctggtgaaacatccggccccagaggctcttcctgc

SEQ ID NO: 543741 - DNA, 201 bp, Homo sapiens
ctatggggacctacctactccgagtgcaaggctggacacaggccaggctgagcatcacgggccaggctgagcatcacttgcctcggtgctcccatgcgctygcctggattcccacccttccctgtgcatgttccacatgggggttcttctgtaagcgcaccccttttacagacaaggggtctgaaccgagtgtcccctgct

SEQ ID NO: 543742 - DNA, 201 bp, Homo sapiens
gtgaggccggggtggcaggtgaggccggggtggcaggtgaggcaggggtggcaggtgaggcaggggtggcaggtgaggcaggggtggcaggggaggcaggkgaggcaggggtggcaggtgaggcaggggtggcaggtgaggcaggggtggcaggtgaggcaggggtggtaggggtggcaggtgaggcagtggtggcaggtg

SEQ ID NO: 543743 - DNA, 201 bp, Homo sapiens
caggtgggagccacagccgtaacagctgacctcggtgggcatgttccatgctaatctggagcatctgggctgcttcccagaaactggcctcccctaatttrtcaaggctggtccaggaatgcctcctggaagaagtggcacagcaaaagcacgttctggagacactttctgtccttgactttgagaaggtcggcaaggcaa

SEQ ID NO: 543744 - DNA, 201 bp, Homo sapiens
caaaaaggttggggaccgctgctttagagggagcatggccctgccgacaccttgatttggacttctaacctccagaactgcaagacaataagtttcccttstttgaagccacccagtttgtagtatttttttttttttttacagcagccccaggaaaccatagagtaccctggatttttttctttcttttttttagagatg

SEQ ID NO: 543745 - DNA, 201 bp, Homo sapiens
cttgacaatgagttgtccaagtccctggcattttgaacaaagacttgaacaaaatgcagaaaaggagcaggggaatgaaacgcaggaatgaagcagcaggrctttattaaagcaagaaagcaggttgggcgcggtggctcacacctataatcccagcactttgagaggcgtaggtgggcagatcacccgaggtcaggagtt

SEQ ID NO: 543746 - DNA, 201 bp, Homo sapiens
atgcagctacaagaccagaaatgccaaggattggtagccatcaccagaagctaggaagaggcaaggaaggattctttcctagatcctttagagcaagggtycccaacccctgggccatggacttgtacttgtccatggtctgttaggaactgggccacatagcaggaggttagcagcaggcaggtaagcgaagcttcatct

SEQ ID NO: 543747 - DNA, 201 bp, Homo sapiens
aaataattagaaattttttagaaaggaaaatattaactggtatttctgaagaattacactccttcatcaattgtaaccataggttgattacagattttgctgggggcaaaaatcaacaaaactgctacctgtgagtgaaatgattatattacatttataaaagaaaaggtattgtaagttttatttttatttgtaaattgt

SEQ ID NO: 543748 - DNA, 201 bp, Homo sapiens
aataattagaaattttttagaaaggaaaatattaactggtatttctgaagaattacactccttcatcaattgtaaccataggttgattacagattttgctgggggcaaaaatcaacaaaactgctacctgtgagtgaaatgattatattacatttataaaagaaaaggtattgtaagttttatttttatttgtaaattgtg

SEQ ID NO: 543749 - DNA, 201 bp, Homo sapiens
ataattagaaattttttagaaaggaaaatattaactggtatttctgaagaattacactccttcatcaattgtaaccataggttgattacagattttgctgggggcaaaaatcaacaaaactgctacctgtgagtgaaatgattatattacatttataaaagaaaaggtattgtaagttttatttttatttgtaaattgtgt

SEQ ID NO: 543750 - DNA, 201 bp, Homo sapiens
taattagaaattttttagaaaggaaaatattaactggtatttctgaagaattacactccttcatcaattgtaaccataggttgattacagattttgctgggggcaaaaatcaacaaaactgctacctgtgagtgaaatgattatattacatttataaaagaaaaggtattgtaagttttatttttatttgtaaattgtgtg

SEQ ID NO: 543751 - DNA, 201 bp, Homo sapiens
tcattgtaccctgaggaaacagcagctgggcgaagtgaagtgacttgctgaggtcacacagccggtcagtggcagaaacgaaaaaagacctaggtttttcygacttgctttggctaaactctcctgtacacccccagtattctgtattctgtgctccatggttctgcaattatcccaagcagcaggggtgaaggagaagga

SEQ ID NO: 543752 - DNA, 201 bp, Homo sapiens
atgggctggggaagggcagggtcatcctcctcctgctgccagagacccgaaggcccactctcaggccggcttgcagcccgagagagacagagagagagagrgagagagagagagagattgagattgagagagagacagagagacagagtttcttagtgttgggataaacctatcatttccttgaaacctgaacagttatca

SEQ ID NO: 543753 - DNA, 201 bp, Homo sapiens
tgggctgggcctggctggatgagaatgactgtgcctcattgcatcttcctggctgcctgatgggcagaaaacctgggtctcctccccattttaggaatggraaggctgagtctctgcgatgagccttcctcagggatggtgagggcctagccccattctctgagttaggacctgtaggagggtggcaggggcaagcggggc

SEQ ID NO: 543754 - DNA, 201 bp, Homo sapiens
aaagcagaaacccgattttgaaatgttcaaggacaaggccagggaggctcgtttggggatggggtggaggtttcagtccatttaagtgggctggaggggawttttaactttgccggctgatggttaatgttcccttcccaaggtattcatgatttatgctgatgctttaaaaagaaaatttagccaagctaggttcagagt

SEQ ID NO: 543755 - DNA, 201 bp, Homo sapiens
tgagtgaccttcctgggatgactcagcaaatccagcaagatgggactccctgccttggcccccaaatctagacgccccccaccttctttgttttggaatgragtctcgctctgttgcccaggtggggtgcagtggtgcaatctcggctcactgcaacctctgcctcccaggttcaagcaattctcctgcttcagcctcccg

SEQ ID NO: 543756 - DNA, 201 bp, Homo sapiens
aaatcacaatattttaaaaaatcctggctgatgagcacaaatctcacatcgttttttttgctgctgcccagcctggacatagcctgcactctgggtaatgrtgctgtgcactcctccaggagtgtgagctgcccagagctctacctgagactccggccattgacccagccccagggcatgggctggtcttttgtacagagg

SEQ ID NO: 543757 - DNA, 201 bp, Homo sapiens
ccatctcaaaaaaaaaaaaaaaaagagaactgatgccaaagttagatctaagagtcatttccaccatgtctcttttgtgagaatgttgtcattaagtgatrcctggtgccagggcgcctggctgatggctttagagggctaagagcagaattcaacacatctgttggtgagcaaaggctgcatcagccagcctcatggata

SEQ ID NO: 543758 - DNA, 201 bp, Homo sapiens
cagcagtcctgggctccggatgcttgaggaaatgcaagacaggaaggatctaggttaggcaaatggtcaggtgtggcagggatggacagcagctggagggrgcggggatgggcttgaactgcgcatgcccacagggttcccagtgcccttaggctatggccctagcgcctcacccttctaacgtagggtccttctaacgta

SEQ ID NO: 543759 - DNA, 201 bp, Homo sapiens
taatgagcacttgatgaatgatgcctcaacttccccatctgtacacagcactgctgggcatgggttcatagctgttcatggattcgtagccactcatgggrcaccaggcttgccacacagcgagtggtcagcaaatgcttgccaccttcctccatccgggctagaagccgctcacttctcacttggctctccctgggtcac

SEQ ID NO: 543760 - DNA, 201 bp, Homo sapiens
cgtaggtgtcaggctgtgtggtctgccagagtcccacacctgttcgtgtgaggggaaggtgcccgagcaatactgtagccaaccaaataccatagtgtctycaatactactcatttcgcccatggaaaattatgcctaagccaccatacgggttaatgaacgctccagcccaggtccgaagagatgcctttagcacaggga

SEQ ID NO: 543761 - DNA, 201 bp, Homo sapiens
ggctaatctcccttttgtcatataaggtaaccatggcagtcagatcataatattcacaggttctgcccacaatcaaaggggtggaacctgtgagtattacrggttagagaagtcgagcgtctttgggatcatcttaatattccactcactgagactggggaaggtcttgggtgctgataataacaatagcaatagtgatat

SEQ ID NO: 543762 - DNA, 201 bp, Homo sapiens
atctgcttccagccagcctagccctcagggagcgcttccctgtaaactcaccccattgggtcatccaaatggcttttacaggaattgccactgggctgagsgaacctcacctcattaagcaggaaaagcaataaagcctgagggctgcagaatcagaatagttcctgggcaggaagggcccagtccctgtgggtgggggtg

SEQ ID NO: 543763 - DNA, 201 bp, Homo sapiens
tttaaatcactgtggtaatcatgtggggcagagggtgagagggaggcagagattggtcctggcgagcaggggtggaggcaggaaggaggggacaaattcasggtatttctgaggagcagtggaatctcttgactaaggcctcatggggggaggggggagatggagacataccctgggggactttgcagcctggctgggaag

SEQ ID NO: 543764 - DNA, 201 bp, Homo sapiens
ctcggctcactgcaacctccgcctcctgagttcaagcaattctcctgtctcagcctcctgagtagctgggattacaggtgtgcctcaccatgccagttaatttttttttttttttgtatttttagtagagacagggtttcaccatattggtcaggctggtctcgaactcctgacctcaggtgatccacctgcctcggcctc

SEQ ID NO: 543765 - DNA, 201 bp, Homo sapiens
atcccaacactttgggaggccgaggcaggcggattacctgaggtcaggagttcaagaccagcctggccaacatgatgaaaccccgtctctactaaaaatayaaaaattagctgggcatggtggcaagagcctgtaatctcagctactcaggaggctgaggcaggagaatcactcggacccgggaggcggaggttgcagtga

SEQ ID NO: 543766 - DNA, 201 bp, Homo sapiens
cacatccaagggctctgcagggggccccacccttaccccccagaccatttctaggagtaggggctgaacaggacccagtggaggctaccgccctgcattgsgagggttaagtaagaggctgaaggtcaagtgagaggtcctgccgggcacttccagcggctctgtctcagccaggccagtggccatgcggaactgggagca

SEQ ID NO: 543767 - DNA, 201 bp, Homo sapiens
tcttcattgtattagccctggcatctgtttttagggataaattaaacaccacagtatagatcttgtgactgtgtacacagggcccaaagatggaccgatcrtgtcctgaacgttgtttagagaaagatgggcacagcgtgccttactgtcggcacctggtggctgatggacccggaaccatggactccacttctgcttacc

SEQ ID NO: 543768 - DNA, 201 bp, Homo sapiens
ttaccccccagaccatttctaggagtaggggctgaacaggacccagtggaggctaccgccctgcattgggagggttaagtaagaggctgaaggtcaagtgmgaggtcctgccgggcacttccagcggctctgtctcagccaggccagtggccatgcggaactgggagcaaggagagtgggagataaaaccctcagtttcag

SEQ ID NO: 543769 - DNA, 201 bp, Homo sapiens
gtttcagaatgcacttccggaatattattagacaaaaatagctttcttcattgtattagccctggcatctgtttttagggataaattaaacaccacagtayagatcttgtgactgtgtacacagggcccaaagatggaccgatcgtgtcctgaacgttgtttagagaaagatgggcacagcgtgccttactgtcggcacct

SEQ ID NO: 543770 - DNA, 201 bp, Homo sapiens
gcaaggtcagctggctcgtggatgttgcagggtggggtggggcagtgccagcttgctgggcctcagctaggttagcaggagctggggaggtgccctcgaarcagggatcagggcctctgggtatggggcagctgcaggaggctaaggatgagcaggggcctcgggccagttgaaggacagcaggggctcagccctgaggtg

SEQ ID NO: 543771 - DNA, 201 bp, Homo sapiens
agagccagacctagaactgcctcatcccacgtgcatgtgtttaatcagtgctgtccttggcgtggacagcagtctgccgttggcagaggaaggagtgggtrggggtggctgtagacatggctttctgtcctctgactctgagctcaggcgccgccagcatagagcctcataggccttggaggaacatgtgggactctgaca

SEQ ID NO: 543772 - DNA, 201 bp, Homo sapiens
ggtcagggcggtgggtgtttgagtgaaggacagacttgctcagagaccaactgatgagctgggccgaggcctgcacaagaaggatgagtcactccacaaattttttttttttttttttttgagatggagtctcgctctgttgcccaggctcaagtgcagtggcacaatctcagctcactgcaacctctgcctcttgggttc

SEQ ID NO: 543773 - DNA, 201 bp, Homo sapiens
actgtgcctcattgcatcttcctggctgcctgatgggcagaaaacctgggtctcctccccattttaggaatgggaaggctgagtctctgcgatgagccttmctcagggatggtgagggcctagccccattctctgagttaggacctgtaggagggtggcaggggcaagcggggcaggtgggtggcccaggcaactttgcaa

SEQ ID NO: 543774 - DNA, 201 bp, Homo sapiens
acatcagcaaggtcagctggctcgtggatgttgcagggtggggtggggcagtgccagcttgctgggcctcagctaggttagcaggagctggggaggtgccytcgaaacagggatcagggcctctgggtatggggcagctgcaggaggctaaggatgagcaggggcctcgggccagttgaaggacagcaggggctcagccct

SEQ ID NO: 543775 - DNA, 201 bp, Homo sapiens
gcggggcaggtgggtggcccaggcaactttgcaaacatcttccctttttccgggagaagcaaacgcgctgtgtggaaaggcacattcggaagatggagttycacatcagcaaggtcagctggctcgtggatgttgcagggtggggtggggcagtgccagcttgctgggcctcagctaggttagcaggagctggggaggtgc

SEQ ID NO: 543776 - DNA, 201 bp, Homo sapiens
atgggaaggctgagtctctgcgatgagccttcctcagggatggtgagggcctagccccattctctgagttaggacctgtaggagggtggcaggggcaagcrgggcaggtgggtggcccaggcaactttgcaaacatcttccctttttccgggagaagcaaacgcgctgtgtggaaaggcacattcggaagatggagtttca

SEQ ID NO: 543777 - DNA, 201 bp, Homo sapiens
cgtttccccattagtggctgatagaaaagcctgcttgtggttagggttaaggttagttaacttcaaaatgattccactggggctgggcgtgatggctcackcctgtaatctcagcactttgggaggccaaggcaggcagatcacctgaggtcaggagtttgaaaccagcctggccaacatggcgaaactccatctctacta

SEQ ID NO: 543778 - DNA, 201 bp, Homo sapiens
atctctgcaactagccttgttattcccttcgtcctcaagattttctctttggctccgcagttaggatcctggtttggttttatggcttctgcttgggctgygccttggctgcagtttgtgttggacacaaggcctgggtggggtgtgctgggaacgggggcaggaaccagccccagagccagccacgagttggggacaaga

SEQ ID NO: 543779 - DNA, 201 bp, Homo sapiens
cactagcaaacagacccggctccaccggctcacgtggctgtgcgggagtcccaaggccggctggcctgtggggagttgtgggcattccagagggttgactsagcagtcctgggctccggatgcttgaggaaatgcaagacaggaaggatctaggttaggcaaatggtcaggtgtggcagggatggacagcagctggaggga

SEQ ID NO: 543780 - DNA, 201 bp, Homo sapiens
tgaactcctgacctcaggtgatccaccagactcagcctcccaaagtgctgggattacaggcgtgagcccataattataggagtgtgcctggccccaaaaayttttttttaaaaagacagaaaaaccccctgctccctggagcgaagattcttgagaagcatacttgattaactgatgaataagacaatcagaaccatgagt

SEQ ID NO: 543781 - DNA, 201 bp, Homo sapiens
gggaaaaccccaatggagtgagctgggacccagggctgcagactgatagacagagggaagcggcctccctggatcccggtcctcactcccgtgcctgctgktgactattctgcggtcaggaggcgtccctttgcctgcagtcctgggacagtggagcgcaggggacactggggcttcccaaggagctgcttgttcttctct

SEQ ID NO: 543782 - DNA, 201 bp, Homo sapiens
gggcccggtgttgccctcaggtctggccacttcgtccacagccctgcagagcacggcaggagcacacctcggccgagagcctgatggagtgcatcctggaragcttcgccttcctcaatgccgacttcgccccggatgagctgtccctgtttgggggctcccagggtctccggtgagtgcacctccttccagcagtgaccc

SEQ ID NO: 543783 - DNA, 201 bp, Homo sapiens
gccaggaggtgcagtagtagatgctgggcagatgtggctcgatacaggaagtttttccaggcagagacccccaagtgagcagaggtgtagtggggtggacktggcccctgggggaaagagatgttggaacatgggggtctcatcgtgcaggaagatgaggtggactggagctttttcgtaggttttgtctgggcaatgggg

SEQ ID NO: 543784 - DNA, 201 bp, Homo sapiens
gtgggtttcaggtgaagcttgatccagccacttagctctatcactgggatccagaatcccacagcacctgctcctctttctatatggacgtactccccagratgaccaccccacatccaggtatccatcaccttttagctcaagtatctggaccaacaggaacatcctgtgtctcttgattcacgtttctgagggagggaa

SEQ ID NO: 543785 - DNA, 201 bp, Homo sapiens
catcagctaatgactgatgagtagataaagaaaatgtggtagacccatataatggagtattattcagctgtaagaaggaatggagtattgattcatggtayaacacggatgaatcttgaaaacatcatgtgaagtgaaagaagtcagacaaggctacacattgtatgagcccatttatataaattctccagaatatgcaaa

SEQ ID NO: 543786 - DNA, 201 bp, Homo sapiens
gtgcctgtagtctcagctactcaggaggctgagatgagaggatcatttgagcccaggagtccaacctgggcaacataagaagaccctcaccactttaattaaaaaaaaaaaaaaaaaaaaaaaaggaaaggggattggttaacatctgtttacttcgggtaacttatgaaggtaaaagcagagaggcttttcttattactc

SEQ ID NO: 543787 - DNA, 201 bp, Homo sapiens
tcttctctgccaaactggctggctttaccatattgatgacttgcctatttgttcatttccccaccataatgtaggctccatgagggcattagtggtgtgtktgcattagtggtgtgtttttttgaacatccttgtaccctagagttaagtgcattgtagaaacttatcttcttaaaggaatcgagattattgctgggtggt

SEQ ID NO: 543788 - DNA, 201 bp, Homo sapiens
ttagtcattatggactaatcagaaccactgtgagaaatcacttcatacccattaagatgactgtaataaaaaagacagacgataacagttattggtgagcytgtggagaaattgaaacccctatacattgctggtgggaatgtaaaatggtgctgccactgtggaaaacagtctggcaattctttaaaaagtttaaaattt

SEQ ID NO: 543789 - DNA, 201 bp, Homo sapiens
ttcctgttttacaaatgaggatgttgaggatcatagaggataaacatctttccataggttacatggttaataaatggtgtttgagggactcttaggctggytccagccactctgaaagccattgttcttcttactaaccagtgatgttcaccaccaagcctatttgaatatgtgggtgtgatctcactaaggaagacagtg

SEQ ID NO: 543790 - DNA, 201 bp, Homo sapiens
gccaaactggctggctttaccatattgatgacttgcctatttgttcatttccccaccataatgtaggctccatgagggcattagtggtgtgtttgcattartggtgtgtttttttgaacatccttgtaccctagagttaagtgcattgtagaaacttatcttcttaaaggaatcgagattattgctgggtggtcaaattaa

SEQ ID NO: 543791 - DNA, 201 bp, Homo sapiens
cagtctggcaattctttaaaaagtttaaaattttggggcttcgaaggcattatcaagaaagtgaaaagacaactcagagaatggggggatatatttacaartcgtatgtctaataagggacttttacatccagtatataaagaatgcttccagctcaacaataaaagggcaatcctttgttgttgttgttgttgagacagt

SEQ ID NO: 543792 - DNA, 201 bp, Homo sapiens
attaacatggaaaaagataaacacagtcatttctacaaccaaaaaagtgacttcagaattgagcatagtatgctagaagaattggaaaataaattgattcwcagcaggaaaacagaaagtaagttgagtttgtgatgaactaaaaactgttgagcgatataaagttgtagttttaccctgtgctttgtctttgtgcattga

SEQ ID NO: 543793 - DNA, 201 bp, Homo sapiens
atatcaagaaaaattgacacatgggctttgggtaattcagaaacagagaaagctttcagagcaatctcaagcaaagttcctgtagacaaagtaacaccaartactcttccagaagaggtactagattttgaaaaattccttcagcaaacaggagggcgacaaggtgcctgggatgattatgatcaccagaactttgtaaag

SEQ ID NO: 543794 - DNA, 201 bp, Homo sapiens
acagttgagagctttatcaaaacgttgctttgaacctacatagtatcaatttgccaaaggacatgagaaaaggagcctattataaggaatggtctctgggwcagaattggtggcaggtctctatttagaaattctaccaatgaaaaagtgtactgttagaattttgaaaagctataccatatcgtagcttttggagactaa

SEQ ID NO: 543795 - DNA, 201 bp, Homo sapiens
aacgttgctttgaacctacatagtatcaatttgccaaaggacatgagaaaaggagcctattataaggaatggtctctgggtcagaattggtggcaggtctmtatttagaaattctaccaatgaaaaagtgtactgttagaattttgaaaagctataccatatcgtagcttttggagactaaattctccttgcatttacata

SEQ ID NO: 543796 - DNA, 201 bp, Homo sapiens
ggaatggtctctgggtcagaattggtggcaggtctctatttagaaattctaccaatgaaaaagtgtactgttagaattttgaaaagctataccatatcgtwgcttttggagactaaattctccttgcatttacataatacttttgtcttttcccccacttttattgaggtataactgacaaataaaaattatatatattta

SEQ ID NO: 543797 - DNA, 201 bp, Homo sapiens
ataaatggtagcataccgtccacattgctctgcatttttttttaaagtgtatgtcttagataacaaggaattgtagattttgctaggcacaataatggcaytatagttaggtaagtcaaatatcagtactctctagaggcacacacaaaagtttgttggggtgaaattgcataatgtgatggatttacttgaaaatactta

SEQ ID NO: 543798 - DNA, 201 bp, Homo sapiens
aaatactgggtcagagataaatgaatttacaaatgtgataaatattgctaaattgccctccgtagacaacagttccaccaacaatgtatgagaagacatgytttcctcacagttttgtcaacaaaatatattaaatttgtgatttttttgccaatatgataggtgtgcagtgttactgtgatatagttttaatttgcattt

SEQ ID NO: 543799 - DNA, 201 bp, Homo sapiens
agtttttcttgttctcaatgcagagtgatggctgttttagtacttcaggtggaattcgtccttttcatcttcagaactggaagcagaaagttaatcagacwaagaaagcagaatttgtacgcacagcagaaaaatttaaaaatcagtaagtataagaatataatcttcaaataacattactagccattttataatggacaa

SEQ ID NO: 543800 - DNA, 201 bp, Homo sapiens
acaaactgtcaatagaagagaactttctcaacctgatagaggcatcattaagtaacgtattacttaatgatcaaatatggaaagctgtttccgtatgatcrggaacaaggcaaaattgtccactcttaccactttactcactgaaagttctaactagggcaattaggcaagaagagcaaataaaaagcattcgtattggaa

SEQ ID NO: 543801 - DNA, 201 bp, Homo sapiens
gaattaatccaaatataaaatacggattattgagtgtcttcatattttaaactattaaaaatatatttagatcatatttatactatttgtttcttttcctraagagtaattaacatggaaaaagataaacacagtcatttctacaaccaaaaaagtgacttcagaattgagcatagtatgctagaagaattggaaaataaa

SEQ ID NO: 543802 - DNA, 201 bp, Homo sapiens
atttttaaaaaacagaagtagaaaaaaattgcaatggttaaaacaaagctgaaaaacctaagcatccagcattctgcaatcaatattctttctagaaagayggaattgatgtattttaaaatacttttggctattaaaaaacttttttctcttgctttctttttttaaaaaaatcatttagtcaattcagatttggaaaac

SEQ ID NO: 543803 - DNA, 201 bp, Homo sapiens
tttagtcatactaactggattgttttctgttgtatattttttccaatataacaagaaagagaggatttgggggatttttttggttgacacaccaccaaatkctattaaaatttcttaaaagcagagtgatttctgggctgtctgatgttagctcattaccctggcattgttgactgagccctggactcagtaagcatcaac

SEQ ID NO: 543804 - DNA, 201 bp, Homo sapiens
gtaataaatattttgtatttgtttgaagcatgctttgttttatatagagaatatttattttaaaaatatgtctctcatataccctattaattgtattattratataatctttttggtttccttcagcaattccaaattttccttcagcctttctggatttcacagatttataaaatctttgtgtctttcacatcttcctgg

SEQ ID NO: 543805 - DNA, 201 bp, Homo sapiens
tgttactacactttatgtttttcctgtctaggagagtaaagaatgcttgccttagtgtagagaagttttcccttcatatattacagctgagcagtagaaayacctattccttacctccaatagcatacctcaattttagtctgcatttatgtcatattgtacttaaatgatttgtctatctatccaaatgaataaataaaa

SEQ ID NO: 543806 - DNA, 201 bp, Homo sapiens
attcctgagaatcaaagcaacaaattaaaggtctcagggtgtatggacttaggaatcagacaggtgttgggtcaaacctttgatctttcacttgttggctrtgtaattttaggcaagttacttgatatatctgagctttcatttcctcagctctaaaatggagataattatgatatgagtatatagggaaaatgtctgtaa

SEQ ID NO: 543807 - DNA, 201 bp, Homo sapiens
ctattgaaagcagtcatcagcagtgatggccattttcaggctccagtgagattgagttggaatcaatagtcaaaagcttatgcattttcaaagcaaatgtmtatccacattttcttaaattatcattttatgatttacatagcagttcaaattatagttgtgtttgattgaaattaactcttctagctattattttgacta

SEQ ID NO: 543808 - DNA, 201 bp, Homo sapiens
ttgaacattttaaattacttccattcccatgttattttttagtagaattgtttccttataaaaaccactctttgatcatggctttccctgtcagaattgtrtgcactctgtgacatctttggttatggtagtcctatattttcctaataacattgttagtgtgttgtgaaagactgaaaattagagtttgtagtgtatatg

SEQ ID NO: 543809 - DNA, 201 bp, Homo sapiens
aggccaaggcaggcggatcacctgaggtcaggagttcgagaccagcctggccagcatggcaaaaccctgtgtctactaaaaatacaaaaattagctgggcrtggtggtgggtgcctgtaatcccagctactcgggaggctgaggcaggagaattgcttgaactcgggaggcagaggttgcagcgagccaatatggtaccaa

SEQ ID NO: 543810 - DNA, 201 bp, Homo sapiens
ttcattccaaaaagtattaagacaaggaaggggactttaaaatgaaaaagggtgcaaatgagatataatttatgaattgttatgtgcatcaaaatatatarcagcaatgtttgtaaagcaaaaaactaagggaggtacaaagaaaaataacggacaaaaacacagacaaagcacattaatactgaaaattttagttcattt

SEQ ID NO: 543811 - DNA, 201 bp, Homo sapiens
agcagcaatgtttgtaaagcaaaaaactaagggaggtacaaagaaaaataacggacaaaaacacagacaaagcacattaatactgaaaattttagttcatktcttttagttcatatataaaaatcttcctaagtaacaaaagttcccattcctcctcatacaccccaaaaataagcaggacacataataaaagaaaaaaat

SEQ ID NO: 543812 - DNA, 201 bp, Homo sapiens
cagctttttgggaggctgaggcgggagaatcacttgaacctgggaggcagaggttgcagtgagctgagatcgtgccactgcactccagcctgggcaacaaragcgaaactccgtctcaaaaaaaaaaaaaaaaaaagaagcagtaaagaggagaaggatcattcatgagttgtagtccttttgaacttgattaagagagaa

SEQ ID NO: 543813 - DNA, 201 bp, Homo sapiens
gtatattatttgttcataacccctcttagctattgcctttcaaaactgaagaccgcaaatctctatcctcctctccaatgtcatttccttcttgttaccakctgttctcttgatcattgtagttgctgaattatgacttttttgaagtatctttaacagtatcacattagtgtgatgctggttttgtaccagcataaggct

SEQ ID NO: 543814 - DNA, 201 bp, Homo sapiens
acagaaagtaagttgagtttgtgatgaactaaaaactgttgagtgatataaagttgtagcatatcctgtgtccatggcagacgtttctttttatcatagtrattttccccatctgcaaccagagcctagatgaacttcccagtcctcaacacaggactcagtccattagagttgccaggtgggactgaaatctatttgata

SEQ ID NO: 543815 - DNA, 201 bp, Homo sapiens
cacgcacctgtggtcccagctacttgggaagctgaggtgggaggattgcttgagcctagaaggttgaggctacagtgatctgtgattgcaccactgcactstagcctgagcgagacctagtctcaagaaaaaataaaaataaaaaaaggaagttaagtaattttacccaattaatagaacaacatttggacttcctcatag

SEQ ID NO: 543816 - DNA, 201 bp, Homo sapiens
cttctataacaaaatgctacagacttggtggctaaaacaacaaaagtttattttctcacagttctagaagctagaagttcaagatcaagttgcccttaggrttggtttctggtgaggcctcttttcctggcctgtaggcagccaccttctcactgtgtcctcacatagtcttttctctgttacaagaggagagaaagagat

SEQ ID NO: 543817 - DNA, 201 bp, Homo sapiens
gcagatcacttgagctcaggagttcaagaccagcctgggcaacatggcaaaaccctatatctatcaaaaaaaaaaattagctgggcatggtggttgtgtgyccctgtagtcccagctactcaggagactgaggttggaggattgcttgagccagggaggtcaaggctgcagtgagctgagatggcaccatggcactccagc

SEQ ID NO: 543818 - DNA, 201 bp, Homo sapiens
gataccgttaggcatactaccatgtgcataatgagagtcccagaaagaaaggaaaggagaaaaaaggaggaaaaccgatatttgaagaataatagaagacktcccaaatttgatgaaaaacattaacctacatatggatggagctcaatgaactctaagtagaataaactcacagaaattcatatctagacacatcgtaat

SEQ ID NO: 543819 - DNA, 201 bp, Homo sapiens
tctgcagaaaacaaagaaactaaaaccaaagagggtcctgcctttgatgaaggctgagggaaagaagccaagtctgtctggcaataaaatgaatttggttaaaaaaaaaaaaaaggaagccaatctgattaatatcatctactgtgtcttagtagtccctgtctccctccttgtacaatccagaggaatatttttatcaac

SEQ ID NO: 543820 - DNA, 201 bp, Homo sapiens
attcaattatgggaggctttgactgtcttgggtgtcagcatagcattccatagatgggggttagttcttatatcttctaatactaagtgtactaaatggcratatggagtcacggtcctgcatttaatgtcttgaacattttaaattacttccattcccatgttattttttagtagaattgtttccttataaaaaccactc

SEQ ID NO: 543821 - DNA, 201 bp, Homo sapiens
aggcagaaaaaaggaaaaatgctgctgatgaaatttccagatttcaagaaagagtgagtaaatctatttcctaaataatttttaaatgctacacatggagktattacttccaaattcagttaagcaaaaattgagtatttgtatattggacctgtgtatagcattagtataccaaaatgagtaagccgtgctccctaactt

SEQ ID NO: 543822 - DNA, 201 bp, Homo sapiens
ctctgaggagactcttttaaggcttaaatttataaatgttaataatgttaagtggagaagatgatataaagagtcaggtatcttaaatttgatggaaaatkaagggttaatatggattgtcttcttattcaaactttatttttaaaattttagatatgaagagctaattaaagaagagaagacaactaataatgagttgag

SEQ ID NO: 543823 - DNA, 201 bp, Homo sapiens
gacaactgagctaaccaatcagagatttcactgccacacctgaccaagactacagattttacagaattagtttaaagtgaccaaacaaacagcaacaaaamaaaccctgctaaggggagagaatctcatttttggagttgtccattatattattttatatgtccagtctttaacaaagttatgagacacggcaagaaagta

SEQ ID NO: 543824 - DNA, 201 bp, Homo sapiens
attagctgggcgtggtggtgggtgcctgtaatcccagctactcgggaggctgaggcaggagaattgcttgaactcgggaggcagaggttgcagcgagccartatggtaccaatgtactccagcctggatgacaagagcaaaactccgtctcggggggaaaaaaaaaggcattttagatttttggtacctgtgttaaaaatt

SEQ ID NO: 543825 - DNA, 201 bp, Homo sapiens
atgtatccttccccagatattttatgtgtttataaagaaatatatattcagatttttccttttttgtataaatggtagcataccgtccacattgctctgcrtttttttttaaagtgtatgtcttagataacaaggaattgtagattttgctaggcacaataatggcattatagttaggtaagtcaaatatcagtactctct

SEQ ID NO: 543826 - DNA, 201 bp, Homo sapiens
gacatgtttattctttcgggtcactatttagtcatactaactggattgttttctgttgtatattttttccaatataacaagaaagagaggatttgggggatttttttggttgacacaccaccaaatgctattaaaatttcttaaaagcagagtgatttctgggctgtctgatgttagctcattaccctggcattgttgact

SEQ ID NO: 543827 - DNA, 201 bp, Homo sapiens
taataaacaagaggataatcaaaagcaaaaagaggaacaaagaaagaaacagaaattggcagttgaagcttggaagaaacagaaaagtatagaaatgtcartgaaatgtgcttcccagttaaaagaagaagaagagaaagagaaaaaacatcagaaagaacgccagcgccagtttaagttaaaattactactagaaagtta

SEQ ID NO: 543828 - DNA, 201 bp, Homo sapiens
ttaaaaatcagtaagtataagaatataatcttcaaataacattactagccattttataatggacaataaaaaattaattctactctaccctacctaggctsacattaagttataaaattgtaatcactagcctgtcaaatataacaagagaaagatgggaggtatgaaataataggctgttcaatataaagttaattgtaa

SEQ ID NO: 543829 - DNA, 201 bp, Homo sapiens
attccttagccttattaaccaaagtaattatttttattccatagatgaattaatccaaatataaaatacggattattgagtgtcttcatattttaaactaytaaaaatatatttagatcatatttatactatttgtttcttttcctaaagagtaattaacatggaaaaagataaacacagtcatttctacaaccaaaaaag

SEQ ID NO: 543830 - DNA, 201 bp, Homo sapiens
atagatagattgtacatgactatgttcttttgtttgttatgaatattaatcattgtcaatagtgtactgaatgttacccttaaagaatttgagaatatttstttcattgtagcgttagattctgtatgttgtaaaatctttataataaaaaagctgcttagcatttcttaaaggaaaaataatggttatcaaataactaag

SEQ ID NO: 543831 - DNA, 201 bp, Homo sapiens
atgaagagctaattaaagaagagaagacaactaataatgagttgagtgccatatcaagaaaaattgacacatgggctttgggtaattcagaaacagagaargctttcagagcaatctcaagcaaagttcctgtagacaaagtaacaccaagtactcttccagaagaggtactagattttgaaaaattccttcagcaaacag

SEQ ID NO: 543832 - DNA, 201 bp, Homo sapiens
atcttgcatcgtaaaagggactttgcaggtgtgattaagataaattaaataccttaattatctgagtggacctggtgtaatcacaaaggtccttataagasagtcgcaggaagatcagagtcagaagtaggagatgtgatgatggaaggaagaggatggagtgatgtgaggaaggggccattagccaaggaattaaggtgg

SEQ ID NO: 543833 - DNA, 201 bp, Homo sapiens
agaaccgagagctgctctggcggcaggcgaggggctgcaggccctggctgaacaggtgccctctgcagcgccggcgggaggcgcggcgttcgcctcccctsctcggggcctggcacgcgctgggcgttgctctttgttggcttgtgcgtttaacagcttttgcagagccgcctccatgtggtttcggagtcgaggaagacc

SEQ ID NO: 543834 - DNA, 201 bp, Homo sapiens
ctgccgaggagctccgcctcccgagagacatttaatccggggggatttgcaggaaacttctaaattaagggtagcggctgctgcagctgagggggggcacrccggtccctgcgcccgggcagctgccgtgagctcacgccccgaaatagccccaggggccccagccgcagctgccactgggtccggctgtcactcagagga

SEQ ID NO: 543835 - DNA, 201 bp, Homo sapiens
gcttagagaggctaaataagttgcccacagttacacaggtgttgagtggctgagccgtggctcaaagacaatctgactcagagccgatgctcttaacacgwggctgccctgctcctctcattttcctttactggcgctcgccttgctctgccctttttctcagtgtttgaccagtttttatggattttttccaaaacctcc

SEQ ID NO: 543836 - DNA, 201 bp, Homo sapiens
tttgccctttctggctccagcaccctccctctcccctctaagcaagcactcctgcttgtcgagagcattgtacacacagctccctggagaggcaggagctsccatgggtagagccaatttggggtacagagaaggacagaaaagagatggggtagagatggggagaaggagttcctgacagctgtccagcctgttccctgg

SEQ ID NO: 543837 - DNA, 201 bp, Homo sapiens
tccggcgctggtttggcggcctgggtgggagaaggcacctcgccccggaccccctatgccccgcagctcagtgactcttcccctcgccctccgccttcccygccgcagcccggctccgcctcccaatggggaaacatcccaaaaaagggcagaaaagaaatttcagcataaagttggcccactgggaaagagaggagcgtc

SEQ ID NO: 543838 - DNA, 201 bp, Homo sapiens
ggccgcaccccccggccgggccgtgcttctgcccctacaaggtttgggccgaggtgggggagggtcctggttgccggccccgcccggtccctccccgcctwttaggcgcccgcgtggccgggacgtcccagtcccgctccgtcctcctcgcctgccaccggtgcacccagtccgctcacccagcccagtccgtccggtcct

SEQ ID NO: 543839 - DNA, 201 bp, Homo sapiens
gccttacagctgatgacagatgacatcactgaacttgatactttttttttttttttttttttgagatgggatcttgctatgtttcccaggcagggctcctrgggtcaagctgaactcccgccttagccttcagagtagctgggatgacaggcatgcaccaccatgcccagtatcactgagcttgattctgtgacgggctat

SEQ ID NO: 543840 - DNA, 201 bp, Homo sapiens
ggcatccacgtccgtcctgttcccctcatcctagtcagtccatctgtttgtccctgccatggggccctgaggtccgtgaatgcatgtgtcttccttgaccsactccatgtctatatgtcaccttcccctggccctgcctccccacgtctcccccttgtgtctcccttctccctcacctgctgcttcccctcacagagacct

SEQ ID NO: 543841 - DNA, 201 bp, Homo sapiens
gccgcaccccccggccgggccgtgcttctgcccctacaaggtttgggccgaggtgggggagggtcctggttgccggccccgcccggtccctccccgccttwtaggcgcccgcgtggccgggacgtcccagtcccgctccgtcctcctcgcctgccaccggtgcacccagtccgctcacccagcccagtccgtccggtcctc

SEQ ID NO: 543842 - DNA, 201 bp, Homo sapiens
ctggttggcctgattctcctcccatccccttacctgggccaggctttgctgtgtaggaatcagagctgcatcagacctggccccagcacttgaagtgctcycacagggaacaggaggacttgtgtgcaggtgacctttgggagactaactgtgcacagtgcaggagaggccctgcagcaggggagcggagcttgtcaagca

SEQ ID NO: 543843 - DNA, 201 bp, Homo sapiens
aaagagattgctgactttgggctggaggatttacatttctagctagttctctggtactgccaatgctgctggtcctcatgccacactctgagtggcacccwtatagacaattccgtccccgagtgtaacgcagtagagttctagtgcagagactggcttattaactagagagctgttggactgaacatctaggtctgcatg

SEQ ID NO: 543844 - DNA, 201 bp, Homo sapiens
tccctccactccctttcccacactcccacctggtcccctccctggaccccccccagatgaagtctatgcccagaagatgaagtacaaggccattagcgagraactggacaacgcactcaatgacatcacctccctctgagccccacgccagcgtggccacctcagctctcttctctcctctcctttccattctctctatgg

SEQ ID NO: 543845 - DNA, 201 bp, Homo sapiens
tgtgacgggctattcttagcagcagtgatgtctggttggcctgattctcctcccatccccttacctgggccaggctttgctgtgtaggaatcagagctgcmtcagacctggccccagcacttgaagtgctcccacagggaacaggaggacttgtgtgcaggtgacctttgggagactaactgtgcacagtgcaggagaggc

SEQ ID NO: 543846 - DNA, 201 bp, Homo sapiens
ccctccccaccccacctctatgaccccaaggccttgagtgaggcatccacgtccgtcctgttcccctcatcctagtcagtccatctgtttgtccctgccawggggccctgaggtccgtgaatgcatgtgtcttccttgaccgactccatgtctatatgtcaccttcccctggccctgcctccccacgtctcccccttgtgt

SEQ ID NO: 543847 - DNA, 201 bp, Homo sapiens
gcccaggagcgcctggctacagccctgcagaagctggaggaggccgagaaggcggctgatgagagcgagaggtggtcaggggcctcggggaggatggtcckggagggagaagggagcctgtctctgctggtcctgaccctacgctcaccctctccctgcctttcagaggaatgaaggtcatcgaaaaccgggccatgaagg

SEQ ID NO: 543848 - DNA, 201 bp, Homo sapiens
agcccccagcccaagggtcccctccccttcgcatcgccggggtttttccagccgaccgtcggccactttttcctccgacggctggcagggaagagggggaygggggcgggaccccaagggaggcggtccccagtgggtgggcgaagggggcggccgcaccccccggccgggccgtgcttctgcccctacaaggtttgggcc

SEQ ID NO: 543849 - DNA, 201 bp, Homo sapiens
gcaggagatgcagctgaaggaggccaagcacatcgctgaggattcagaccgcaaatatgaagaggtgacagccttgcccctctgcctgctcgctgcccagyctgcaacatgcccagtccttctccactgatctaccctctctttctcactccccacaggtggccaggaagctggtgatcctggaaggagagctggagcgct

SEQ ID NO: 543850 - DNA, 201 bp, Homo sapiens
atgaagaggagatcaaactgttggaggagaagctgaaggaggtgagagtcctcttccagttcccagtctcccctcaagccaccctaatccttgccagagayggcctgtggcaggacacttgagggttgggatggacaagaagcttgacttaggcagtagtctgtgggagggcctaattctttgccatttctcccatcctgc

SEQ ID NO: 543851 - DNA, 201 bp, Homo sapiens
agagagccgcccccgtaactgggaagagcttgagaggcaggaaatggcacatatcagtcccatgatgaggaccccaggacttcccaaactttccagagtcttttgtcaccccaccatcatgcagagtttttcttttacagtctcacctctctctagggtagtactccaatgtcccccacagtgattcttcccaacccccaa

SEQ ID NO: 543852 - DNA, 201 bp, Homo sapiens
tgttgattaactgagtattaaaagcagtggattatctcagaacagccttaagaaggaggaactgttattgttaactccaacttgtgaaggaggaaactgargcttagagaggctaaataagttgcccacagttacacaggtgttgagtggctgagccgtggctcaaagacaatctgactcagagccgatgctcttaacacg

SEQ ID NO: 543853 - DNA, 201 bp, Homo sapiens
cgggacgcgtccgggtgggagcgggggcggggaacgcgcggtgaccagcctggccgcagccgcgtggaaaatatgcggggcacgtggggggcggggcgggragctgggtcctgagccgccgggtgctcgcaggaagggcctggctccaggggcaggggctgggaggggaggcgaggggatgagaggtcaggccggtcctgg

SEQ ID NO: 543854 - DNA, 201 bp, Homo sapiens
aacttgatactttttttttttttttttttttgagatgggatcttgctatgtttcccaggcagggctcctggggtcaagctgaactcccgccttagccttcrgagtagctgggatgacaggcatgcaccaccatgcccagtatcactgagcttgattctgtgacgggctattcttagcagcagtgatgtctggttggcctga

SEQ ID NO: 543855 - DNA, 201 bp, Homo sapiens
aacagagtgactggaaaggaagtagggtggtgaggtgcaggacaggggcaagaaggttgcaaaaggtctggaatggagcttggaaaaatgttggatatcascaacatggggctttcactgcagcagcaggtctgttttctacctcaagtctgtctgtctggcccttcctttcctggcgcagtctttgtcttaccttctgtc

SEQ ID NO: 543856 - DNA, 201 bp, Homo sapiens
ctctcttctctcctctcctttccattctctctatggggaggggagcaggcaggaggagcagaaattgccaacattgcacagccaggctgggagcagcctarggagagcccccatcatgcccaccacccactctggcactggcttcatcctttacctatccccttccaccctcctttgctgcttaataaattctgaacttgg

SEQ ID NO: 543857 - DNA, 201 bp, Homo sapiens
ccgcaccccccggccgggccgtgcttctgcccctacaaggtttgggccgaggtgggggagggtcctggttgccggccccgcccggtccctccccgcctttwaggcgcccgcgtggccgggacgtcccagtcccgctccgtcctcctcgcctgccaccggtgcacccagtccgctcacccagcccagtccgtccggtcctca

SEQ ID NO: 543858 - DNA, 201 bp, Homo sapiens
ggttggtcctgctccttggggcctgaagttttctctgtaccctcaacgggtcccaccagtacccttgactgtactgtcccttttatgttattccgcttccrtcccagtagcctccaaatcttagtagcgcccctacacacaccgcgtctccattctgggcctgggccccctcccagcctggctgaccaagtcccctctgtc

SEQ ID NO: 543859 - DNA, 201 bp, Homo sapiens
cacactgtcatccggccctgtgcccatgatgggctcttgtcactctaggtggccaagctccaggtgccttcagcacctggaagacaagctaccatctactstctatatatggtgctgtttctcctgccctacagtccgaccaaggacctgcttcctatgctgtgtccaagtgctgcccccagcccctccccccacctcctt

SEQ ID NO: 543860 - DNA, 201 bp, Homo sapiens
agcagcagtgatgtctggttggcctgattctcctcccatccccttacctgggccaggctttgctgtgtaggaatcagagctgcatcagacctggccccagyacttgaagtgctcccacagggaacaggaggacttgtgtgcaggtgacctttgggagactaactgtgcacagtgcaggagaggccctgcagcaggggagcg

SEQ ID NO: 543861 - DNA, 201 bp, Homo sapiens
aagggcctggctccaggggcaggggctgggaggggaggcgaggggatgagaggtcaggccggtcctgggggcagcaagcccggccacactccccaccgcgwccggggctctgggctcgcttcctgcttcagtttccccaagctcccgatgagactccgctactaccaccacgtcgataacgcaaacctagagggactcagg

SEQ ID NO: 543862 - DNA, 201 bp, Homo sapiens
aagcatgatcttttctttttgcttctcctattgcagacaagggactatcaggaaaacgcaccaaaactgagaactcaggtgaggcattagctaaagtggawgactccaaccctcagaagacttcagccactaaaaactgtttgaagaatctaagcagccactggctgatgaagtcagagccagagagccgcctagagaaag

SEQ ID NO: 543863 - DNA, 201 bp, Homo sapiens
agatggaaatggcgcagataacggagggaaggatttgagggctcaaacgtaggcgtctgtgtttcgcaaaagttggagacgttctaggctgcctctcgttscctccatctcgctctgcgcgggttttggaggacattagcattctttcttgtatctccgttgattccagaatcgtccgcactaaagtcccctgcagcgtga

SEQ ID NO: 543864 - DNA, 201 bp, Homo sapiens
ttgccatttgtttttagagcatgtttttaagacttttgtaaaaacagagttgatttcctagtctatatattagactatatattgtttccaaatatctgagsccccattggctgtacagcaaggcagatgggttaagaatgtgcagggaagaaatgaaagttggatatggattaaaagattggctgtggagctgactgcagg

SEQ ID NO: 543865 - DNA, 201 bp, Homo sapiens
gctcgccttagtaccatgtaagatgtacctgtgcctggcacaactttcctgttcaagaggggacattaaaaactaatccttcctttttcccttttttttttgtagaagagtttgattttgttttgagcctggaggaaaaggaaccaagttaactgagatactgctgctggaatgggcgagacattgctgcaaagaagtcaa

SEQ ID NO: 543866 - DNA, 201 bp, Homo sapiens
gattaaacttgggcatggtacttcacctttctcagtcagcatcctcacctgtaacacccatgagggagggaatgtggccagagttacctgttactattacmcagtactctatagtgcttggcacctggtaaatagttttgaacgaatgactgctcgccttagtaccatgtaagatgtacctgtgcctggcacaactttcct

SEQ ID NO: 543867 - DNA, 201 bp, Homo sapiens
aagaatgggagactttccacgggcaaagtttagtactaagaaaacgtgatgtcgtttttataatcacaaagatggatggcattctaagtggatggaggagraggaacattggaaggtacagaaagtacctcttttgggaatgacaggggttccagatatactacagcacattgcagttatttatcaatatgtggtgtttgc

SEQ ID NO: 543868 - DNA, 201 bp, Homo sapiens
tgcctagttcagcattgaggatctcaaagcacagcccaaacagacaacatgctgggatggtgttcgtaactaccaggtaagagggtaaggaggaggtcgcstgagacccaggtgggatgaatgcctgcctcctcctcatgacgtactcagtagcagaacctcttggccaaggttgctttttctcagaagcaaacctgataa

SEQ ID NO: 543869 - DNA, 201 bp, Homo sapiens
gaggcttacccagaccacacacagtttgagaaaaacaatccccattatgacccatctagcaaagaggacaaccctaagtggtccatggtaaagactatgckttctatttcatgacaggggaaggatgaaccaggggaagaagacggttggggtgactgtaggtcaaggtacacggcccagcacttactcagatgaggtgat

SEQ ID NO: 543870 - DNA, 201 bp, Homo sapiens
ttgcagacaagaatcacccatctattaaaagcagacttgatttctgctaaaagctagtactttccagctggtgggaggatagttactctttcttctcccgrgacaggctcggaacttccttagagccatgaagctgggagaagaagccttcttctaccatagcaactgcaaagagccaggcatcgcaggactcatgaaggt

SEQ ID NO: 543871 - DNA, 201 bp, Homo sapiens
caaagaagtcaagcttttttcagacaaaaggtgtgagggggcttgcttggtatgcttacctgggcttgtgtacctcagtggtttttgtgtacttttttcamtaaaatatcaaagttgaagaacttttcttctaaaaccacactgagtgcagtgggatactccccactgcagacctcttacctccaggcgggctcctttggc

SEQ ID NO: 543872 - DNA, 201 bp, Homo sapiens
ggtaacacaaggcttacttacattcacccagcaaaagtgtctctgtggagccacttcccggtgaactacatacttcctctatagccagtggcccctctcaytttaggggaaggaactgtctgcttccatatgtgcttactaactggccaaggattgtttaatgattgaatttatttcctcttgcctagttcagcattgagg

SEQ ID NO: 543873 - DNA, 201 bp, Homo sapiens
atctcggcttctcatctgtaaaacgaggagcttggaccagatcagtgggtttcaaacacacagaaagtgtgaggtggcagcggagctgagatccttagacyctctggccttccgcttttcttccatccacaagcaacgtttttgttgggtttttgttttttgttttttaactctccccgcttacacctagagcagcttttg

SEQ ID NO: 543874 - DNA, 201 bp, Homo sapiens
tctgttttctctttcttactctacccacattcttgccttctctatccaactgtgaaagtgaggggaggctcctgtccccctctcttaaggtccccaaaccygggagtgcataggtactaaatcaagcagtgcaacttgtaattaagcagctgcagtgtttacatgtttcttaatgtgtcatcttttcaatggctgtattaa

SEQ ID NO: 543875 - DNA, 201 bp, Homo sapiens
ctcggtgcattgctgctcgggcgccgcagcccgcagccgccagcctcccccggccgtgcccctcccccgtggagccggctgtccgtcggcgcccactgccyggcggcagcggcggagccaggcagccccgcggcggccgagcgcgctcgcgcatcgggccctctggccttctttacctagggcagcccgcgccccggtgcg

SEQ ID NO: 543876 - DNA, 201 bp, Homo sapiens
ggttccctgaagaaccaatcccaggaaggggccttgatccctccgccttgctgagagtgaaccctcgtctctcctcaccctccatttcatttctgggaatyggggcttagtttcgaacctttggcaaggctgttcttactaatgcccaagcccctttacccctctccctataggttacacaggggagaccagggcctcggc

SEQ ID NO: 543877 - DNA, 201 bp, Homo sapiens
gcacggagaagccctggggtcagtgtcgtgcacggatggcggcagtgttgaacccaggaggctgaacccggcccaccacggaagatgagtgcatggcaacygcctgccttcacgtcgctccacttggtaaccccaaggtctgggctgttctaggtattgcttcacgtgccccagcaagcccttaacaagagggcctggttc

SEQ ID NO: 543878 - DNA, 201 bp, Homo sapiens
agaacaggaggctctctttcctatggaaggtcagactccatttttgccaagaggtgggaacattaggtcgcccacaattgcacaacaagaatgaggattcycacctggccttagagtctgcttcctcgggccttctcctgcaaccacctgcccttttggcccacaccagggacagggaggtgctggcagctgctgcctttg

SEQ ID NO: 543879 - DNA, 201 bp, Homo sapiens
agatacttcagccaacaccaccaggtacccagatagccctggaatttgctggaagcatcctctcccagccccagggagctaacattacatctgggttagtrgagctggaagccctttgtcatttggggaccgtgattatctggaagaagcaatcatttacattcttcattggctctttagccatccctcaggaatggcgaa

SEQ ID NO: 543880 - DNA, 201 bp, Homo sapiens
caaactcctgacctcgtgatccacccgccttggcctcccaaagtgctgggattacaggcatgaaccactacgcctggcctttggaggtctttttatgcttkgctgacttaggtttcttccaaaactgcacgaggcctagactaaacatggccttagccaagcagcaaagctcagggcggctgtcatgggtgacctgtgatg

SEQ ID NO: 543881 - DNA, 201 bp, Homo sapiens
tgcacgaggcctagactaaacatggccttagccaagcagcaaagctcagggcggctgtcatgggtgacctgtgatgcaaagctggctcagtttccttccaraatggcaaattcacttctcaactgttggtggcaagtttcaccatgaaaacatcctgagtacaaaagttatttcctcctgttggactgagaaggaaaccaa

SEQ ID NO: 543882 - DNA, 201 bp, Homo sapiens
actctccccgcttacacctagagcagcttttgcttctgtataacatttagaatacaggaatgtgtgatttgtaggagtttgaaaacatctcgaatccatgrtctctaagcatcccctgtaagatggcgcaggtggtctcctgctgcttttgcaaatttgctgaggctgtttgctcaggtgtctgcagtcttcctgtagcct

SEQ ID NO: 543883 - DNA, 201 bp, Homo sapiens
ggtcctgcccagaaaggagccatccagagtgcctacccactactgtcctgaccatctggtgaaggcagaggccagcagctgtgccacccgtaggagctcaragcagccactggtcatcagtgcatgccagaccaaagctagtgtggaaaaggtgctctagagaggcagggacgggacactttcagaccacacctctccttg

SEQ ID NO: 543884 - DNA, 201 bp, Homo sapiens
tatttaaaagaaaatacaatttattatattacattagattatattaaaataatgttttatggagaaggaaatacaattaaagagctcctcctcattgagtrttagcacagtgctaagtgccggggatgacagtgctgcactggcgggccacagagggcagcttgttaaacccttcagggctgtgtctctgtcttctctctc

SEQ ID NO: 543885 - DNA, 201 bp, Homo sapiens
caggccccatcccagactcctgaatcagaaacactagggtggagtccagccatctgtgtgttaaccagctctctcagtgactctggtgcacactaaagttygacaccccctgatttcagtggagggaataacatgaaaatgtccatgttcgattggccacatgccttccttttggagtaataacagcagctactaacgatg

SEQ ID NO: 543886 - DNA, 201 bp, Homo sapiens
atgttgtgaagtatttgtgtcatacacctgtgtcagtcattgtaaactgagcttggggcaccagagcgaggctagtgagtgagtttgctgaagctgcggtygtgtggttttctccttcattgcattctttgactatgtgtgagatgggtggaacttcagtctgttctgaggtctggctgacggggtggcatatggcagtaa

SEQ ID NO: 543887 - DNA, 201 bp, Homo sapiens
gcagaatgtgaagctacggtaagtgatgtctgctggttccccactgtaccctagaacctgccccatgtggacaaggacctgaggccgtccccactttgagratcttcacagggatcccgagaaggaagagtgtcgcgagctgtggcgtgctggtaaaccattaaccgtgggccttctaggaggaaagtggccctaggttgt

SEQ ID NO: 543888 - DNA, 201 bp, Homo sapiens
tgaacacagaatccttgaggggtggtggcttgaactgtaatgtggccatgcatagccacagtcagtattaagagcttacctcggccgggcacggtggctcrcgcctgtaatcccagcactttgggaggccaaggcggttagatcacgaggtcaggagatcgagaccatcctggctaacatggtgaaaccccatctctacta

SEQ ID NO: 543889 - DNA, 201 bp, Homo sapiens
cgagctgtggcgtgctggtaaaccattaaccgtgggccttctaggaggaaagtggccctaggttgtagcatgtgtcaatttctgtagtgtacatagccccrccatggccaatttcaagctacctaatgttcctaaatgtagaggtgggagagatgtgctattaccatcatatggagacacattccctcaagagcagagagc

SEQ ID NO: 543890 - DNA, 201 bp, Homo sapiens
ccacaggccacctccttctggccactcactgctgggacccaggcacctcccttctccatcctctctggattgtcagtaatgtcctggaacagaagcctgtrggatggccttgggcacggagaagccctggggtcagtgtcgtgcacggatggcggcagtgttgaacccaggaggctgaacccggcccaccacggaagatga

SEQ ID NO: 543891 - DNA, 201 bp, Homo sapiens
cacctccctgggtgaggtgcggacccccagccagctgtctgacaacaactgcaggcagtaggcccccagggccgagaagatgctgggcacccacccagcayccccatctaccaacaccagcggctgggggcgggggcggaccttgtgaggctcagttgacccgttacttgcaacctgaaaacaaatcatgtttttgactta

SEQ ID NO: 543892 - DNA, 201 bp, Homo sapiens
tctctgtgcgctattacctcaacctggtgctgatagacgaggaggagcggcgctacttcaagcagcaggtgagggccaggctcctccaggccccgatgccsttgggacagaacaggaggctctctttcctatggaaggtcagactccatttttgccaagaggtgggaacattaggtcgcccacaattgcacaacaagaatg

SEQ ID NO: 543893 - DNA, 201 bp, Homo sapiens
acattgtgctacgtgaaagaagcctgtcacaaaaggacaaatactgtctgattccatatatatgaggtacccagagcagtcaaattcatagagacagaaartagaatggtagaggcccagggctgagggaaggaggaaatgggggttggtgtttaatgagtagagtttcagtggcggaaggtggaaaagttctggagactg

SEQ ID NO: 543894 - DNA, 201 bp, Homo sapiens
gtgctcgtgtgctgcactccagtggcatctctgcagtggtcagagtgacctggtataagggagagggcatcaccttgccccctgtgctgactcctgccctycccctacaggagagtccatcccgatccggctcttcctggccgggtatgagctcacgcccaccatgcgggacatcaacaagaagttctctgtgcgctatta

SEQ ID NO: 543895 - DNA, 201 bp, Homo sapiens; identical to SEQ ID NO: 364759

SEQ ID NO: 543896 - DNA, 201 bp, Homo sapiens
aattgcttgaacccaggaggcggaggttgcagtgagtcgagatcacactactgcactccagcctgggcgacagagcgagactctgtctcaaaaaacaaacaaaaaaaagctcacttgtgcagggccaggttctaggaagcaccagggagctggggatgtgggccttatctttaaagggcctgcagtccacagtgggagcgg

SEQ ID NO: 543897 - DNA, 201 bp, Homo sapiens
gcagaggtggtggttcacgcctgtgatcctggcaccttggccaggaattcgacaccagcctgggcaacatattgagaccctatctctacgaaaaaaaaaawtttttttaatttttttaaaagaaaaaaaacaaatctttgcagagaggtctaagactgacattacacccagtaaagacagtgtctcataatcgcacccaga

SEQ ID NO: 543898 - DNA, 201 bp, Homo sapiens
caggccgctaccaaggccccgcaacgccaccatgatcccagggcaccggctcgccgccgccgtgctcaactttcaaagctcgctcccgcgcgcgcgccgastcgttcctgtggaccaatcacaacgtacagaatttcccactggccaaccaccgcgccgagccgtttccattcgctcaaccaatcaccggcgtcgtccgcc

SEQ ID NO: 543899 - DNA, 201 bp, Homo sapiens
aagaagcagccagtgccacacagaggatagtagccgaaatgtgtagttggtatggctagcatatctttatgtatttatttatttatttttatttgattttwttttttagacggagtctcgctctgttgcccaggctggagtgcagtggcttgatctcggctcaccgcaagctccgcctcctgggttcacgccattctcctg

SEQ ID NO: 543900 - DNA, 201 bp, Homo sapiens
atagtagccgaaatgtgtagttggtatggctagcatatctttatgtatttatttatttatttttatttgattttattttttagacggagtctcgctctgtygcccaggctggagtgcagtggcttgatctcggctcaccgcaagctccgcctcctgggttcacgccattctcctgcctcagcctcccgagtagctgggact

SEQ ID NO: 543901 - DNA, 201 bp, Homo sapiens
tgtgtgtgtgtgtgtgtgtgtgtagccaaggtttcataatgttgcccaggctggtcttgaactactgagctcgtgatctgcctgccttggcttcccacagygctgggactacaggcatgagccaccatgcccagccctgatgtattttttataaaagtcttaaaatgactttattttaactggcaagttgggaagatgtat

SEQ ID NO: 543902 - DNA, 201 bp, Homo sapiens
gtatctcggcttctcatctgtaaaacgaggagcttggaccagatcagtgggtttcaaacacacagaaagtgtgaggtggcagcggagctgagatccttagaccctctggccttccgcttttcttccatccacaagcaacgtttttgttgggtttttgttttttgttttttaactctccccgcttacacctagagcagcttt

SEQ ID NO: 543903 - DNA, 201 bp, Homo sapiens
tatatctaggtagcatctggagactgggagtgtttattcatgacagttccgtctcctacagctatttccttcgtgctaccatcagccgccgcctcaatgaygttgtcaaagagatggacattgtagttcacacactcagcacatacccagagctgaactcttccatcaagatggaggttgggattgaggactgtctgcaca

SEQ ID NO: 543904 - DNA, 201 bp, Homo sapiens
ttgtccatcaaggccactgacaactcggtgactctccagctggtgtgcccccactggggctgcgtcctcactgggggaactgggataaggaagtattaaarctgatgtcagtttacctgcctttacatctttctttcctcacactcttctgtgccaagttgaaactgatatccccttgtgtgtaagaacgtaagagttgtc

SEQ ID NO: 543905 - DNA, 201 bp, Homo sapiens
gcagcctcaaccccctgggctcaagcaatcctcccatctctgcctcccaagtagctgagactacaggtgcatgccaccatacccagctaattttttaaatkttatgtagagacagggtctgtctttattgcccaggctggtctggaactcaagcgatcctcctgccttggcctcccagagtgctgggattacatacatgag

SEQ ID NO: 543906 - DNA, 201 bp, Homo sapiens
gaagaagagaccgttgttgagctggaatcctttggggaacaccagtgaagtttagaaagcagacctgggccgccttggagactaatgggttaaataaaccmaacgtaattagaaggtcagacatgcggaggagggcagacaggaacatccctgcactccaaagccaacagacattatctggatttttttttttttttaggt

SEQ ID NO: 543907 - DNA, 201 bp, Homo sapiens
agcccattaataccaatcaagcccatacttttaaaaactccaggggctttctgtattttaattcattagcccttgaaacactaagtaaaaggcacattaaratgaggtggattgattctggcctacttaacaagctgctggtgggactggagcagagctgcgcctggtgaggcgtgggccgctcagaggtgccagtgcttc

SEQ ID NO: 543908 - DNA, 201 bp, Homo sapiens
ggtgaggtgctctggccatagcctgcaggtgggtttgttagggggagaccgctctgccaatactggctttcccatcgcccggccatctgcaactgccagaygcaaagtgaggctcgtccaccgagccccacttcccagagcccgcaccaacccgtttttctctttagatgtggtgtgagagagctaaccagttctctctta

SEQ ID NO: 543909 - DNA, 201 bp, Homo sapiens
gatcaaggttggggcttaagtggataagggaggcaagttctgggttccttgccttttcagagcatgaggtcaggctctgtatccctccttttcctagctgrtattctaactagaagcatttgtcaattcctttgcctcccaactgacaacacacgttcattttccaaccttcctaacatcttaaacctttcttctgggaga

SEQ ID NO: 543910 - DNA, 201 bp, Homo sapiens
gtgagggcatctcttgggtcaggcccatgggacagaaaggtctaagacctagtcatcctactggcccacgtctttaggaagatgcagtagtctgtaaggakcactgcaaggaaaaactgtaactgtgagaagaagagaccgttgttgagctggaatcctttggggaacaccagtgaagtttagaaagcagacctgggccgc

SEQ ID NO: 543911 - DNA, 201 bp, Homo sapiens
ccaagcaggccccactggccaagaggtacggtatttggcagtctgagttctcagtaatttggaaagttaaggagttggttcctgtgtcacctttcagttastgtgggaaaggaagacttctgttttcctgagatcagtgcagtctcaggcctttggcagggctcatggatcagagctgagactggagggagaggcatttcg

SEQ ID NO: 543912 - DNA, 201 bp, Homo sapiens
tcggcctagagcggacagaactgtgtgctttgagccatccaggtccagttctctaaagacattgtgtggagatcagaggaagggagagactggtccctgcrcttgtgggactagcctctcatacattaggatatctttcaaaaacacaaatataaaaggtactaaagcagctgcatgctggggagatagagcagatgaaca

SEQ ID NO: 543913 - DNA, 201 bp, Homo sapiens
agagcagaggtcaagaaaacaaggctagaaggggtctgttctgcagggaggtccttccagaaagcagtccctccagcctacagcctccagccccctactcsgcccggtgtagctcagggtctgataaaggagggcgtcgcatcgctgtctctcaccagaactctactacgatcgcgggaaccaccatgagtttgtgtccct

SEQ ID NO: 543914 - DNA, 201 bp, Homo sapiens
cagggaggtccttccagaaagcagtccctccagcctacagcctccagccccctactcggcccggtgtagctcagggtctgataaaggagggcgtcgcatcrctgtctctcaccagaactctactacgatcgcgggaaccaccatgagtttgtgtccctggtgaaggacctggcccggcctggagagatcacccagtcgcag

SEQ ID NO: 543915 - DNA, 201 bp, Homo sapiens
gcctggggttcagctacaagtcccgcccgtgggcgactccccctgcgttactgtcctccctgccaaaagtgacagcgcgctgccagggagatggggacggygagggcgggaggaagcgccctgctgtgcctcgtgggatgggcaccttgcctatgggttctccccattgtctccggcatgcactcggctttgcttcttgtc

SEQ ID NO: 543916 - DNA, 201 bp, Homo sapiens
agtgtgggaaaggaagacttctgttttcctgagatcagtgcagtctcaggcctttggcagggctcatggatcagagctgagactggagggagaggcatttygggtagcctaggagggcgactggcggcagcagaaccgaggaaggcaaggttgtttcccccacgctgtgtcctgtgttcaggtgcgacacacaatcctcat

SEQ ID NO: 543917 - DNA, 201 bp, Homo sapiens
aggaggtccttgcccgagattccccacgtcaaagttgggagcctctaggaaacctgtccccatgcctccctctaaggtgtcacattgcccccctttcaatyctgcaggaagtggtgttgtggcggaagggtgacatcgtacggaagagcatgtcccaccaggcggccatcgcctcacagcgctttgagggcaccacctccc

SEQ ID NO: 543918 - DNA, 201 bp, Homo sapiens
aacattgatgttgggtcaatcatgttctcaatgtatttaaccatgtgtttttaaattttttaatttagttatcaaattgagaatctgatggtatggcattwatcaccttgaggaagaacctttatcgtttatctgattttcagatgcatagagctctggctgctttaaaaaataaacctctaaatcatgttcacaaggtag

SEQ ID NO: 543919 - DNA, 201 bp, Homo sapiens
ggggtgctcgccccgcgggtccctttcattcctaggaaaacgcgccgcggggcctcccgtctgtctgtcttgcacacacgtgttgccaaatccccccgcascgtctttagatctggactggccgccccaccttctcccttcattgatctatgttttgctttttcttttcctaccttgtttccattgacaaagtagaccctt

SEQ ID NO: 543920 - DNA, 201 bp, Homo sapiens
tgttattgttcaatgtcagccactcttctaactctaggatgcagagactttgcccctctggtgtttatatgttaaccatccttttttttttttttttttttccagatactcgtttgtagtttcataaacattgatgttgggtcaatcatgttctcaatgtatttaaccatgtgtttttaaattttttaatttagttatcaa

SEQ ID NO: 543921 - DNA, 201 bp, Homo sapiens
gtggctttatttccccatgggtgcagtttccttttaagttcctttacttctgatctgtctcaataacctgaaaaagcagaatttcatttacttggagtcakttgccaccagataggcttttctttgataaatggaccccatttttgtgttcttgttcttgaaggaacaatttcctgctgtttaagatttcttaggaggttt

SEQ ID NO: 543922 - DNA, 201 bp, Homo sapiens
tggattgaaggatctctgccacctatcataaggggaaagagaaagcatgcatggttcttgtcataccccagataacttcagaacccattctgtggtttagygttattgagctttcttaatttaaggctgacttgattgatcataaagccaattgaattaaaattctcaccattgtttggttgtggtcattactttgcagcc

SEQ ID NO: 543923 - DNA, 201 bp, Homo sapiens
cagagactttgcccctctggtgtttatatgttaaccatccttttttttttttttttttttccagatactcgtttgtagtttcataaacattgatgttgggycaatcatgttctcaatgtatttaaccatgtgtttttaaattttttaatttagttatcaaattgagaatctgatggtatggcattaatcaccttgaggaag

SEQ ID NO: 543924 - DNA, 201 bp, Homo sapiens
ttgccaaacagaaaaattttcacctcgtcagatttctgcgttaatggaaccatttgggaaactcaattatttgccaccaaatgcctctgctttatttagamagctggaaaacgtgctattcactcatttcaattattttccacccaaatcattattgaaacttcttcattcatgttcacttaatgaatgccatccagtcaa

SEQ ID NO: 543925 - DNA, 201 bp, Homo sapiens
gctgctttaaaaaataaacctctaaatcatgttcacaaggtagtcaaggagcgtctgtgcccttggttgtgttcacgacaacctgagcctttcggggtcarattccatcatgcccattgtaaaaagtttcattcgaaaaatggaaatgaccttcatccactcggtggaccagtgttctctcaagtatctgactgcgacagg

SEQ ID NO: 543926 - DNA, 201 bp, Homo sapiens
actgcagtagagaactgattctttcaaaacccatcctcaatgcagtggcagaaacttttgtttgccaaacagaaaaattttcacctcgtcagatttctgcsttaatggaaccatttgggaaactcaattatttgccaccaaatgcctctgctttatttagaaagctggaaaacgtgctattcactcatttcaattattttc

SEQ ID NO: 543927 - DNA, 201 bp, Homo sapiens
aatagaatacttctgtctggagtgtgtaaattgatgttgaatgttcatgatgttctctcatacatacctcaattcagacgtaactatgactgggatgcttwctgtttcaggtaaagaatctcatttggacacattgagtcgggcacaactgacccaacttttcttagcctcagtcctggaatgccctttctataaggtaaa

SEQ ID NO: 543928 - DNA, 201 bp, Homo sapiens
gactttgcccctctggtgtttatatgttaaccatccttttttttttttttttttttccagatactcgtttgtagtttcataaacattgatgttgggtcaaycatgttctcaatgtatttaaccatgtgtttttaaattttttaatttagttatcaaattgagaatctgatggtatggcattaatcaccttgaggaagaacc

SEQ ID NO: 543929 - DNA, 201 bp, Homo sapiens
tttccaacctgagtcctaaattgattagccaaatgctcactgccctggtggttcttgatcaaagtcaagcatttcctctgattataaaattgggcaaataygtcgtgaggcatgtcccacatttcactaacgaggagcttaggagagtcttggaggcgttcatatattttgggcaccatgacacattttttacaaaagccc

SEQ ID NO: 543930 - DNA, 201 bp, Homo sapiens
aactcaaacaatggaagaacttgcatttttatggaactcagtattaaaagaaaaatataatgtgaattagccactttgcagaatatgttctagactggtgrtctgaaagcatctgtagttttccttatactatgtatacatttattgtggtaaaatttaaaattaattttaatttaatactagtgtcatagatactttttg

SEQ ID NO: 543931 - DNA, 201 bp, Homo sapiens
tgaactattctgtggaaagttcctagttatataattattagtttgtgagatgcttctgattggttgagcttaagttctgtttttctgtagtagaagcttckacaagaaatagcccaagttaaattttgcttaacatttgcactttaagcaaagttaaggttattttcaaggcccaactggcttggtctgctcagggatttt

SEQ ID NO: 543932 - DNA, 201 bp, Homo sapiens
tatttttaagccaagccagaaatttcacttttatctaatagagtttagtttatctagagttcgctcttcccataaagacctataaagatttatcctattayctatcacattccttatgtagaatcagaaatagcacaccagactatgacattctctctctgcttctctctacttgactctgaatcatagtttagagtatct

SEQ ID NO: 543933 - DNA, 201 bp, Homo sapiens
atactagagcctttttggtttttttcatatataaactagattcccaaaaatgtgattagtggattaatttttgatggatactggcagattttttttccctwatagttacagatgtcacatttccccagcaatgaatgaaggtggccatgtctcctccacttctattgcagtgtgttagtagtctctttaatttgtgttact

SEQ ID NO: 543934 - DNA, 201 bp, Homo sapiens
aatttctccttgatttaataaataaaaatgaacaagataatccattaaaataaggagcttcaccaacacttaatatttaagaccttttaaatatttcactrtagataatgtaagaaggtcttatgtgagggctcagcagtgcgtgagaatgagagctgccctaattctctaagctgtcagtactaggcagcactgtggttt

SEQ ID NO: 543935 - DNA, 201 bp, Homo sapiens
tatagatatgtgaagattgggctgactaaccttttaggagcaagattatattttgctccaaaagtgttgacaccctattgttatacaataggtaagtagtrtaaggagttttgttgttttaaacctaagcatcctgttcgattttggagatatatgggacttagaagcaatagaagttctctggaaatgcaaaatggaatg

SEQ ID NO: 543936 - DNA, 201 bp, Homo sapiens
ggagcttcaccaacacttaatatttaagaccttttaaatatttcactgtagataatgtaagaaggtcttatgtgagggctcagcagtgcgtgagaatgagmgctgccctaattctctaagctgtcagtactaggcagcactgtggtttcatatctgctgacttttttctccatcttgcacatccccagctgaatattccta

SEQ ID NO: 543937 - DNA, 201 bp, Homo sapiens
ggtttaagtctcaaatattagccacgtagtagcagaatatcctgggcagaatatttaacctttttctgcttgcttcttcctctgtaaaatgatagtaataytgacctcaaagacttacttaaggtctaaataaaatagtacctggaacgtaggaaatgctcactaattgttagctactactataacctaggcttgtactgt

SEQ ID NO: 543938 - DNA, 201 bp, Homo sapiens
atcaagacgtgaattggtggaatatttacaaagaaaactgttttctcaaaacactgttcattggttgcaagaatgaatactgacttcagaactcaaacaayggaagaacttgcatttttatggaactcagtattaaaagaaaaatataatgtgaattagccactttgcagaatatgttctagactggtgatctgaaagcat

SEQ ID NO: 543939 - DNA, 201 bp, Homo sapiens
gtaagtgctcagtagccacatgtggctcatggctgccaaattggacagcaccattataaagatttccacatcacagaaatttctcctggacagcactgacragagactccaagtcctccgtccttacagttcttctaacttgatgagcagaagaaagccttctcgtaaaggacagcagttcataggcttcagatggtcact

SEQ ID NO: 543940 - DNA, 201 bp, Homo sapiens
tctgctttatttagaaagctggaaaacgtgctattcactcatttcaattattttccacccaaatcattattgaaacttcttcattcatgttcacttaatgratgccatccagtcaactttctggcaaaaatattcaagcctcttttccttcaacggctgcaaggtgagttggttataaattctgacagttggaaaaaagta

SEQ ID NO: 543941 - DNA, 201 bp, Homo sapiens
gatttgtattgccatccacagctaatgaagatatccataaaaggtacaggaaaatgttgtgtttttcacattacaagactcgttgaggctaataagcagcrgtatctttttctcaagaaggtgaaaaaaatagatatgattctggaaattaaaatactacatttcagaataccatgttgggaaattccttgtaatatttta

SEQ ID NO: 543942 - DNA, 201 bp, Homo sapiens
gatttctatccaaatgcaatttcttccttcaaccaacatttaagggccacccttaagagctacattgcctgagtttgaaccctagctctgccacttaaccmcctgcataaactgggcaaagtaactttgtgcttcaacttcttcctcgtgtaaaatgatagtaaaagtactgaatctgtgtaagttaatagaatacctaca

SEQ ID NO: 543943 - DNA, 201 bp, Homo sapiens
agctaatgaagatatccataaaaggtacaggaaaatgttgtgtttttcacattacaagactcgttgaggctaataagcagcagtatctttttctcaagaargtgaaaaaaatagatatgattctggaaattaaaatactacatttcagaataccatgttgggaaattccttgtaatattttataaacattaatattaataa

SEQ ID NO: 543944 - DNA, 201 bp, Homo sapiens
ataccatgttgggaaattccttgtaatattttataaacattaatattaataagatcaaattcatgattcatttgaaaataatattggcacatagtaatagmcaaatcccaaataaactttggcaactaaaatatataataaatattttggattatttaaaaaattaagtatttttctccttttttatttttcaggatagca

SEQ ID NO: 543945 - DNA, 201 bp, Homo sapiens
caggatgaagaagctggttgggatatttgccttccaggagcttacattccgctgtggggaagcgtgtaagaaacaaacaaagtaaccaatagccagaggamcctcagattttgaaggatcttgaccagttttacttttctacctttacagatcccctatcatgagattgggatgctaaaatcaagacgtgaattggtggaa

SEQ ID NO: 543946 - DNA, 201 bp, Homo sapiens
acaccactgggagggttgtgtaggtgccaggggaccatcgtggttctctagggcgctgtggaaattgggtcttgggctgggtggcatctggcagtcatggrtaacacttgcttttccagttaatgtggccatgtgattccaagtgtcatgttgctttgtggcaagattgttgtgtgacttgtttttttgtttttgtttttg

SEQ ID NO: 543947 - DNA, 201 bp, Homo sapiens
cagactggaaacagatgtatttgtagaacaataactgagaaattgaggtagatttcttagaattgtagaatgctagaggtagacaggatcttagaaattayctagtacaagttgacagatgagtaaactgaagcccatacaggggaagggtcttgcccagggtcacacaactaaacaggtattcaaactcaggtttgacaa

SEQ ID NO: 543948 - DNA, 201 bp, Homo sapiens
taacgctctattccagggctgtgtgggctagagaggatggtcgtgagggccgttggaccattggtgctaatggctgcctcatcatattacctggtgaagaygagcctagggagatgaaaggtggttcccatatagagcaaatgttctttacattgtggggtcgcaggcccctttgctatctgtttgaaagcagtggacctt

SEQ ID NO: 543949 - DNA, 201 bp, Homo sapiens
acacttgtaatcccagcactttgggaggctgaggcgggcggatcacctgaggttcgagaccagcctggccaacctggtaaaaccccgtctctactaaaaawacaaaaattagctgggcctggtggtgcgtgcctgtaatcccagctactagggagggtgaggcaggagaattgcttgaacctgggaggcggaggttgcagc

SEQ ID NO: 543950 - DNA, 201 bp, Homo sapiens
tgaagcatgagaatcacttgaaccgcggaggtgcaggttgcagtgagccaagattgcaccactgcattccagcctgggcaacagagtgagactctgtctcaaaaaaaaaaaaaaaaattcatctgaaaaattgattaaaggacttccagagatttaagatatattatagttgagtattagaaacatgaatttgaaagcaaa

SEQ ID NO: 543951 - DNA, 201 bp, Homo sapiens
ggcttggtcagtttttggcagagattcagtgcaagccacagacttgttaacttgcaagcaattggcagatctgaatgaactcctagggtggttttaggaamgatgtgtctcccattagtttaggttaacactaaatgtgctttagaatccctgctgggttatgcagcatttctcattcctgttccttgagggcaggagcag

SEQ ID NO: 543952 - DNA, 201 bp, Homo sapiens
atctacatatatacgcatatatatatacacatatatgtgtatatatacatatatacgcatatatatatacacatatatgtgtatatatacatatatacgcwtatatacacatatatatgcgtatatatacgtgtgtgtgtgtgtgtgtgtattttttgtttttttaagacggcgttctgctctgttgcctaggcttgagtg

SEQ ID NO: 543953 - DNA, 201 bp, Homo sapiens
gatctttgcagctttctggagttaaaaagtatcaaaattgggagatattagatgatgacatctaagtattaaaataaggagatattaaatgatgactcctmgaaatgaacctgaataaggactaccgcaatgtgtgtggtgtgggaaaggacagttcttttaatggctggctgacccagcctcaattttcttgcagcttcg

SEQ ID NO: 543954 - DNA, 201 bp, Homo sapiens
tgtgtggtgtgggaaaggacagttcttttaatggctggctgacccagcctcaattttcttgcagcttcgccgacacgaggtgaccatctgcaattacgaakcatctgccaacccagcagaccatagggtccatcaggttaccccacagacacactttatttcctaagggctggccaaggctcccatagaggcgctgtgtca

SEQ ID NO: 543955 - DNA, 201 bp, Homo sapiens
atatatgtgtatatatacatatatacgcatatatatatacacatatatgtgtatatatacatatatacgcatatatacacatatatatgcgtatatatacktgtgtgtgtgtgtgtgtgtattttttgtttttttaagacggcgttctgctctgttgcctaggcttgagtgcagtggcccaatcttggctcactgcaacct

SEQ ID NO: 543956 - DNA, 201 bp, Homo sapiens
aatgatctttgcagctttctggagttaaaaagtatcaaaattgggagatattagatgatgacatctaagtattaaaataaggagatattaaatgatgactyctagaaatgaacctgaataaggactaccgcaatgtgtgtggtgtgggaaaggacagttcttttaatggctggctgacccagcctcaattttcttgcagct

SEQ ID NO: 543957 - DNA, 201 bp, Homo sapiens
ttttaaaggaaactatttgtgggctataggaaactttctgatgcctccggattgtgttagtagtagccatcaggagggtctccaactaaaacacttgttcytgcttgctcctttcccctctcattgttcagcattcttgtcaagttgcccagcttggagttgtctgtcacgcacatgtgtcctgtggttatagctagaagg

SEQ ID NO: 543958 - DNA, 201 bp, Homo sapiens
gtttatccctactgccttggacaggatctggcaggtgctcagtaaatggtcattgaattaattgcctgtccaaaggagaaggaagaactcaggagctctgmctttgcctggcttttacaagctggagctgaattgttgtttcacatggtggtgagatactcattgaactataattcataccttctttccctattcctgtca

SEQ ID NO: 543959 - DNA, 201 bp, Homo sapiens
tcttttaatggctggctgacccagcctcaattttcttgcagcttcgccgacacgaggtgaccatctgcaattacgaagcatctgccaacccagcagaccayagggtccatcaggttaccccacagacacactttatttcctaagggctggccaaggctcccatagaggcgctgtgtcagtgaagatgtacgactacctgtt

SEQ ID NO: 543960 - DNA, 201 bp, Homo sapiens
ataacacttgcttttccagttaatgtggccatgtgattccaagtgtcatgttgctttgtggcaagattgttgtgtgacttgtttttttgtttttgtttttktttttttaaaggaaactatttgtgggctataggaaactttctgatgcctccggattgtgttagtagtagccatcaggagggtctccaactaaaacacttg

SEQ ID NO: 543961 - DNA, 201 bp, Homo sapiens
gtgcagtggctcaatctctgctcactgcaacctctgcctccagggttcaagcgattctcctgcctcagcctcccaagtagctgagattataggcgcccacyaccatgcccgactagtttttctatttttggtagagacagcgtttcaccatgttggccaggctggttttgaacccctgacctcaagtggttggtccacctt

SEQ ID NO: 543962 - DNA, 201 bp, Homo sapiens
attaaaaaccatatccaaacatatgcccctagaactgtacccaacttttacggggaaagtatcaagtcagattttcaaaagcagccaagttaaattctttytgttcctcaagactaggctgctctgagaatcagaatgctaattgcatatgcttgcccttaaacctgcttcacgttgaagaatgaagaattaattttcttt

SEQ ID NO: 543963 - DNA, 201 bp, Homo sapiens
aaacggattgttatgaaagctttgaactttcctggagttcgagagtacactggtcctctaagtgcggtctccaaatcacgatgatcagcgtcacttgttgraacttgttgggaatgcaaattatcaagccccaccccagacctttgtgatctaaaagccctccaggtgattctgatccacactgaagcacgagaaccactg

SEQ ID NO: 543964 - DNA, 201 bp, Homo sapiens
aaaatgaaacaacgaagagcttggcacagacttactgctctcaaaacctgtagaattaaagcttactgactcatgagaacgagaactgtctcatagttaaygttagagaagcagcctggagtggttgttgttagtaatactgtctgtggagcacagtagcgtcgcagtagaagttagaccaatcccacctaagtagtcaga

SEQ ID NO: 543965 - DNA, 201 bp, Homo sapiens
ttgtgtaagagaaacggattgttatgaaagctttgaactttcctggagttcgagagtacactggtcctctaagtgcggtctccaaatcacgatgatcagcrtcacttgttggaacttgttgggaatgcaaattatcaagccccaccccagacctttgtgatctaaaagccctccaggtgattctgatccacactgaagcac

SEQ ID NO: 543966 - DNA, 201 bp, Homo sapiens
actttcacaaaaagttcagtataaaaatgaaaatagcttttcgtgttttccttcattaaaaatgaaacaacgaagagcttggcacagacttactgctctcwaaacctgtagaattaaagcttactgactcatgagaacgagaactgtctcatagttaatgttagagaagcagcctggagtggttgttgttagtaatactgt

SEQ ID NO: 543967 - DNA, 201 bp, Homo sapiens
aatgtggatgcttctgggaatttagcaaaggaagcaggtaatgatgactttataaaattttcataaaatattaagtgattgctgagtttttagaaattaargttttgtagatggttatttgtttttatatatcatgaaaaaccattctaaattccatgaaagagtaatgtcatgtaaacatttaatagatttgtcttcttt

SEQ ID NO: 543968 - DNA, 201 bp, Homo sapiens
tttttttggtgtccataaatctggtcccttggagtgattgaattccgtacttcagagtttagacaataagaggcagatacgtttagagtaacttaaactgwtattagatctactttcccccatataataaaaattgagaaaaagtagacttcaggcaaagtattatcaactctttattgtgccttgagtgaactagatagc

SEQ ID NO: 543969 - DNA, 201 bp, Homo sapiens
taaacctctatgttcctaggtcctccagaccgtgctgagtgcatgttacatacgtttacatttatatgtatgcatttgtatgtgtacgtgtgcatataaarcttaatctactttcacaaaaagttcagtataaaaatgaaaatagcttttcgtgttttccttcattaaaaatgaaacaacgaagagcttggcacagactta

SEQ ID NO: 543970 - DNA, 201 bp, Homo sapiens
ctcagctcactgcaacctccgcctcctgggttcaagcaattctcctccctcagccactcgagtagctgggattacaggcacccgccaccacgcccagctgmgttttgtatttttagtagaaatgaggttttgtcatgttggctaggctggtctcaaactcctgccctcaagcagtccaccctcctcggcctcccaaagtgc

SEQ ID NO: 543971 - DNA, 201 bp, Homo sapiens
tcccactaattaagtaaaattggagcctttttttgattttaaaaattcttaaggtttaaattctagaaattgctcttttaagtgttttgctaagagtattrgtaggaatttgattttagatatcttgtggagacctttccagaaaaagagggttgccttttagttcctggaccttattttaagtaagctttttggtcaaac

SEQ ID NO: 543972 - DNA, 201 bp, Homo sapiens
tttcggagtaatgcatattcagaggaaaagttaccttatttaagtaaacgaaactattcggactcctcgtggtagggataatatggaaaatgttagaaatrtagaactttaaagctgaaagagccttagtcattttgtctaaatgccttccccatttaccaatgaggaattagatcaatagagatagaataacttctaaac

SEQ ID NO: 543973 - DNA, 201 bp, Homo sapiens
tgctgcctcagggagataaacaccaaatatggttaagtgtggaagcatttttatatattttcaaaaaatgtatgcatgttgtttcacaacctgttttttttccctcaacatctttgcattttagtacacatggaacctactctgggatatcttactcctatcagtggctgcgtagtacttaatttaatggtcccctgcact

SEQ ID NO: 543974 - DNA, 201 bp, Homo sapiens
ctaatgtgaacactcatatacccttcacatagattcacaaattgttgatgttttgtcacatttgttttatatgtttgcttttgccagacccattgataatyagttgaatttcatctccaaatactttacctttcttttatcttctaacaagaagaatgttcttcacataattacagtgcagttatcatacatttggaaact

SEQ ID NO: 543975 - DNA, 201 bp, Homo sapiens
caaaagctttttcttaagtgatacagttttttatatggtttgattaatcattgttctaactttatttattacatttttaagttgtgttttctgctttttttattttaaaaatttatttttataaatacaaagtatatttttactgtttttttgtattgagatgggtctcattatgttacccaggctggtctcaagttcctg

SEQ ID NO: 543976 - DNA, 201 bp, Homo sapiens
gagatggggtttcaccatgttggccaggctggtcttgaactcctgacctcaggtgatctgcccagctcggcctcccaaagtgctgcgattacaggcatgarccactgcacctggccaattttaactcttctatgtaggtaaattttgggttaactaaggaacatttaccaatttggttaaacttagaaagcatttaagtgt

SEQ ID NO: 543977 - DNA, 201 bp, Homo sapiens
ctcgtgatcctcccaccccagcctcccaagtagctaggactacaggcatgcaccacctgtagctcagctaatttttgctttttttttttttttttttttttggaaggacggggtttcaccatgttgcctaggctggtctcgaactcctgggctcaagtgatccacctgccttggcctcgcaaagtgctgggattaaaggca

SEQ ID NO: 543978 - DNA, 201 bp, Homo sapiens
gctcgtgatcctcccaccccagcctcccaagtagctaggactacaggcatgcaccacctgtagctcagctaatttttgctttttttttttttttttttttttggaaggacggggtttcaccatgttgcctaggctggtctcgaactcctgggctcaagtgatccacctgccttggcctcgcaaagtgctgggattaaaggc

SEQ ID NO: 543979 - DNA, 201 bp, Homo sapiens
ctaaagtagaaatcactgtcccagagtactgtgttggaccatttggaaggagccatgtatctcccattacctatacaatttggtatcattcgattagatasgataataagaatatttatttatatgtacttaatttttcaagaaatgtttttttggtgtccataaatctggtcccttggagtgattgaattccgtacttca

SEQ ID NO: 543980 - DNA, 201 bp, Homo sapiens
gtgacgattcataagattttttttaaattcatttaacagatgttaaaatgaaactgtacttcacagagtcagtgaagtacacagatcttaattcattgttyagtaacttttgtggattgtataatgctttggcttctatttcaagttttcttttttaagggggaaagatactgttgtcattttgagaaaggtagatggcac

SEQ ID NO: 543981 - DNA, 201 bp, Homo sapiens
gctcccccggccctcttcccgccctcttctttgttgtcccctgattatgcttgtttagcgctggggcagtcctcaaggattccctaaataaagccaaactratgaacagtaatagcctgtgtttaaaaaaaaaaaaatcggaacataagaaacctcaggctgtcttcgattactgttctagagaaactttatgtttacacg

SEQ ID NO: 543982 - DNA, 201 bp, Homo sapiens
aaagtgctgggattacagatttgagccaccgcgcccagcctagaaacatggttgttttattttcagacagggtctcactctgtagcccagggtgaagtacrgtagatcgatcacagcccactgtagccttgaattccttggctcaagtgatccttctgcctcggcctccacaacagttagaactacaggctcatgccacca

SEQ ID NO: 543983 - DNA, 201 bp, Homo sapiens
acactttgttcccgggagctgtcggctggtggaggtgagggagtcggcctgggcgtctccggtgggagcgggggcgccgagggggacgagccaccggggckcgggcggctttgcaggcgtattccgcccgggtcagagcctccggccgggagtggtctcaccgccaccctcccagccccggatccgaggggggcgccaccg

SEQ ID NO: 543984 - DNA, 201 bp, Homo sapiens
acctggccaattttaactcttctatgtaggtaaattttgggttaactaaggaacatttaccaatttggttaaacttagaaagcatttaagtgttgtaaggmccaagttttttttcctcctcgtatattcctttgaaatgttgattaattctctaccttgggtccatcaaaatatgataaattattgagacttgaaagaaca

SEQ ID NO: 543985 - DNA, 201 bp, Homo sapiens
gatacaggtttgtgtgactgtcttgggctttgaaccactacggagtttccctgaaggaagattatggtgatgattggaagatccatctctggtgcccccckcgcccccgtcccatcctgctccattccacttaagggcctccagcattaatctgtccacagaacatatccaaccctggggataagaacactactaatgccc

SEQ ID NO: 543986 - DNA, 201 bp, Homo sapiens
gaagagcttggcacagacttactgctctcaaaacctgtagaattaaagcttactgactcatgagaacgagaactgtctcatagttaatgttagagaagcakcctggagtggttgttgttagtaatactgtctgtggagcacagtagcgtcgcagtagaagttagaccaatcccacctaagtagtcagagaatcttaaaaag

SEQ ID NO: 543987 - DNA, 201 bp, Homo sapiens
taagggtctgtttctggggaattaaaaaattaaacatggaactgtgccaagttttaaagtttccaaaaacgacaaggtatttaccactgaaatttaggaaraccacatactaatagtattccattctttacttttctagaacatttttagtagacattaatgcaggtgtgctaaagtagaaatcactgtcccagagtactg

SEQ ID NO: 543988 - DNA, 201 bp, Homo sapiens
tcaggaaagagcatggtgagcatcacgctgtccttcccatcctagtttatgatgttgggagcagttatcaatataggtggttgttttttcaaatttagtayattaaatggtttttggtgtgttctgaaacatctgtcacctagtcatcacataaaatctaacgtttgggtcagaaggaagcttggaaatgattgctccaat

SEQ ID NO: 543989 - DNA, 201 bp, Homo sapiens
tttatgatgttgggagcagttatcaatataggtggttgttttttcaaatttagtacattaaatggtttttggtgtgttctgaaacatctgtcacctagtcwtcacataaaatctaacgtttgggtcagaaggaagcttggaaatgattgctccaattatctgatatcatagggggtgaaacaaagtttggtgatattatat

SEQ ID NO: 543990 - DNA, 201 bp, Homo sapiens
taaaacatttcactagtgattgaattctacttttgccatctgaattgacttgaatgtcttaaaacaggtaaatactgtaaagtgtgtattcttgatgtttwttggctcatgtggacagaaatgtacagggagaattacattattttaacacacagaagtgcaactttctgctttattttctgaatttcacattacttttac

SEQ ID NO: 543991 - DNA, 201 bp, Homo sapiens
ccgcggagccagcagagagggacctggcggcctaggagctccttgccccgcccggccagtgcccggagccgccctgcccgtctcggtgggcgaagcgctcygccctggcgcaccccggctcacaccccatctcctcatacccgcgaccccggccccgcatcgccactgtagggggaaaactgcagtccaacaacctcactt

SEQ ID NO: 543992 - DNA, 201 bp, Homo sapiens
ctctttggagaaatacctgatttcagggctgagactaggaaagtggaacgtgagcctagagcatcttatactagaaactaaggaagtgctcaaaaactgayggggatacgttagaagtactcaagatccagcttgcggggcctgccagttagggaaaacttgagtcatcaaaaggaataagggtaatagatcttcatacat

SEQ ID NO: 543993 - DNA, 201 bp, Homo sapiens
tcttaggagtttgggttgttactgttagaaatcaagttaggaattagaaggaagttcggaattccttgactttctaggtgggaaagggtaaatgaagtagmgaatgctgtgaccaaaagcgtatgtaattttctgaagagtgattttaaatcagattgtatttcttgagtacaagagtagtttgaaatcagattgtatttc

SEQ ID NO: 543994 - DNA, 201 bp, Homo sapiens
aggaataagggtaatagatcttcatacattgcatttgttaaaaagaaatttatgtatctatattgacttttaaaatagtgagagctggccaggtgcggtgkctcacgcctgtaatcccagaactttgggaggccaaggcgggtggatcacaaagtcaggagttcaagatcagcttggccaacatagtgaaaccccatctct

SEQ ID NO: 543995 - DNA, 201 bp, Homo sapiens
ccaacaacctcacttgctcccgctaccgggtcgcagacaccacgagggagcagtcgggaactcggaactcagacctgccccaggcttgcttttccctgcgycccttgcagcgcagcctctcggtgtttttcctccgctgccctccacctcgtccgggaatcccagatacttcaacctgatgtatggctcttttcgtttctt

SEQ ID NO: 543996 - DNA, 201 bp, Homo sapiens
gggagagtactatgaaggcaacttagtggattgaagagggctggagacagaagttagggagagtccgcagtggacagacaggtaagggcccaagccaggcktggggtcagcgggagggggaaagcgcaaggggaggagatgttgggaaggaaaaatgaccagatttggtgattaattagaaatcagtgctaggaagaagca

SEQ ID NO: 543997 - DNA, 201 bp, Homo sapiens
ggaagaaggttttcgttttttgtttttttttgagacgcagttttgctctgtcacccaggctggagtgcagtggcgcaatctcagctcactgcaacctctgyctcccaggttcaagcgattctcctgcttcagcctcctgagtagctgggactacaggtgtgtgccaccacacacctgtattttttttttttttttagtaga

SEQ ID NO: 543998 - DNA, 201 bp, Homo sapiens
tcaattgttttgtagagatggggtcttgctaagtttcccaggctgatcttgaactcctggcctccctccttggcctcccaaaagattgggattacaggcaygagccacagctcccagcttctcatttccttgttttaaaacaattggttctagttctcgaacctatcccatgacctctctttgtctctcttcctttctgaa

SEQ ID NO: 543999 - DNA, 201 bp, Homo sapiens
gtaaaacttaataattttaattaataactagcgttaattgaattcttcctctgtgcaaggccacgttctaagtgccttcctcacagcaatgctgtgaagtrcttatcctccttgttcttctgaggaaacaaggctgacaggcctgagatcacagagccagtaaatggtagagtcaggaattgaacctgagaattctgactc

SEQ ID NO: 544000 - DNA, 201 bp, Homo sapiens
agctgtacaacctgccatagtgaatttccatctcggaataaactttttgaccatctaaaggccacaggtcatgcaagagcaccttcatcatcgtctttaarcagcgcaacaagtagtcaaagcaagaaagagaaacgtaaaaacagatagagattctgcctgtgcttttgtttgactgtctctagattttgaaaccaaaaa

SEQ ID NO: 544001 - DNA, 201 bp, Homo sapiens
aagcagcatatgatgtgttgagtgaccctcaggaaagagcatggtgagcatcacgctgtccttcccatcctagtttatgatgttgggagcagttatcaatwtaggtggttgttttttcaaatttagtacattaaatggtttttggtgtgttctgaaacatctgtcacctagtcatcacataaaatctaacgtttgggtcag

SEQ ID NO: 544002 - DNA, 201 bp, Homo sapiens
gcctgaaatttctgcttagattgttgcttttaacaaatcctgattattgactgttacgtggagtctttctgcttggccctggttgtttcttgttttgtgcmcgtctcatctgtttgtggcatttctgatggaaaatgtcttatttagattctgtcctgtacgtttttgattgacttaaatttctgtgactttaacagataa

SEQ ID NO: 544003 - DNA, 201 bp, Homo sapiens
acaaagtttggtgatattatatagttttaattttgatactttaggtgacttctcattaaataccctttggtgtatgatagatttactgatatcagacaggwagaaggttttcgttttttgtttttttttgagacgcagttttgctctgtcacccaggctggagtgcagtggcgcaatctcagctcactgcaacctctgcct

SEQ ID NO: 544004 - DNA, 201 bp, Homo sapiens
gcagtggtatgatcatatctcacagcagcctcaaactcctgggcttaagcaatcctcctacctcagcctcctgagtagctgggaacacaagtgtgcgccaygacatctagctaatttgtcaattgttttgtagagatggggtcttgctaagtttcccaggctgatcttgaactcctggcctccctccttggcctcccaaaa

SEQ ID NO: 544005 - DNA, 201 bp, Homo sapiens
ccggctaattttttgtatttttagtagagacggggtttcaccttgttagccaggatggtctcgatctcctgacctcgtgatccacccgcctcgacctcccraagtgctgggattacaggcgtgagccaccgcgcccggccaagtgtgactattaaagaaaattcaactaagtgataggtcaagttttaatagtaactattt

SEQ ID NO: 544006 - DNA, 201 bp, Homo sapiens
ggccacgagcttccagtatgctcactgccaaggaatcctgacacgttctgtttctctgtataaaatcatgaacaaataaaaaaaaagaaaaaaataaatasaatcagaaacgttttgcttagtgggaaaaaagctaattttatcttggttgcagttatccagcaacattatctggacacgtgaactaattttagcgcagct

SEQ ID NO: 544007 - DNA, 201 bp, Homo sapiens
tgtggactatactgatagtaattattcagttgtaataaagccaaaagcttattaaaaaaaagtttataatgttaaactttacatgtaatatgttaacttayggcctatccgtcttacagtgatggaatgttataaacttataaactaagtttattaagtatttaagagtaagtcacagttgtaaatgtgtttggaccaaat

SEQ ID NO: 544008 - DNA, 201 bp, Homo sapiens
agttgagacagagtttcaccatgttggctaggctggtcttgaactcctgatctcaggtaattcacctgcctcagcctcccagagtgctggggttacaggtrtgagccactgcgcccggccttaaaggctgttttatcccaaggaagttattctaactagaaaagattgtctccatattttctagttaatggaactttatag

SEQ ID NO: 544009 - DNA, 201 bp, Homo sapiens
gagggaggaaacaacacgggagaaaatgggagtagaatcagcaagggaaaaaaagcaaaatgggcaatcagagagaaaggaggccaaaggatgagaatggygctgtgagagtcataaatggtattaccatatgacctcagggagaaatgacagagtactaggggaagtggaaagaggcagaaaaattagaaacaagcaaga

SEQ ID NO: 544010 - DNA, 201 bp, Homo sapiens
actttattttccttttaatgctttaagatattaaatatttttaatcttttacttctgttttactactttatcactagtgtttcaacttttttttttttccrcttactcttcacagagtcaagtatttgacatttcgatttatatttgctcttaggctttctaaaaaacagaagaaaaagaaacagaaaccagcacaggtat

SEQ ID NO: 544011 - DNA, 201 bp, Homo sapiens
ggggatacgttagaagtactcaagatccagcttgcggggcctgccagttagggaaaacttgagtcatcaaaaggaataagggtaatagatcttcatacatkgcatttgttaaaaagaaatttatgtatctatattgacttttaaaatagtgagagctggccaggtgcggtggctcacgcctgtaatcccagaactttggga

SEQ ID NO: 544012 - DNA, 201 bp, Homo sapiens
ttagaagtacactgttttcacttttttcatagaattcttctcattttgtctttgtgcatttcctcatgattagattcaggttatgcagccccaggagggaygccgcacaagcatgttgtgctctcagggattcatagctggagacacgtaaagtccttctacccctcatttgtcgtgataattttcatcacccaatcaagg

SEQ ID NO: 544013 - DNA, 201 bp, Homo sapiens
cttatttcttgaggaaagatctgatagtgaggagcttcaagtttctgtcattacagaaccctgaaaagaattaaagtgagagagcaaagtgggagcatgamgtgaaaatgctaacactggagcaacagtgatggggtggggagtgtgtgtacttcggagtttaaggcacttagtagtaggaaggaggaaacagatgtgggt

SEQ ID NO: 544014 - DNA, 201 bp, Homo sapiens
gaactttatagtgttgaagtggatacagacgtcaactataatatttatagaacatattatcactatattaaaagcagtttttatacctggcagttgataarctaattactatccattgaactacagccttgtgttattctctaaaatgacaatgtgaatactttattttccttttaatgctttaagatattaaatattttt

SEQ ID NO: 544015 - DNA, 201 bp, Homo sapiens
gtgttgaagtggatacagacgtcaactataatatttatagaacatattatcactatattaaaagcagtttttatacctggcagttgataagctaattactrtccattgaactacagccttgtgttattctctaaaatgacaatgtgaatactttattttccttttaatgctttaagatattaaatatttttaatcttttac

SEQ ID NO: 544016 - DNA, 201 bp, Homo sapiens
atttaacctccaagaacatctgcctttgttgaacgtgtttattacctgtccactctgttaaaacatctttattttacaattgtttgatgcttaatcttgayattaaaacctaaaacactactttcaagtgataacgcttacttttatttatgattttttgcccttctcagagtgttcttatcagctgtacaacctgccata

SEQ ID NO: 544017 - DNA, 201 bp, Homo sapiens
tcactatattaaaagcagtttttatacctggcagttgataagctaattactatccattgaactacagccttgtgttattctctaaaatgacaatgtgaatrctttattttccttttaatgctttaagatattaaatatttttaatcttttacttctgttttactactttatcactagtgtttcaacttttttttttttcca

SEQ ID NO: 544018 - DNA, 201 bp, Homo sapiens
agcatcacgctgtccttcccatcctagtttatgatgttgggagcagttatcaatataggtggttgttttttcaaatttagtacattaaatggtttttggtrtgttctgaaacatctgtcacctagtcatcacataaaatctaacgtttgggtcagaaggaagcttggaaatgattgctccaattatctgatatcatagggg

SEQ ID NO: 544019 - DNA, 201 bp, Homo sapiens
ttcgatttatatttgctcttaggctttctaaaaaacagaagaaaaagaaacagaaaccagcacaggtatgttagaaaggttttgttaacattaaatgccawcgataaagttgcagtgctcttatttattcagtgtagtctgtgttaaggagagaaacttatactccataattttatgttgattgtaagattgattaaaaag

SEQ ID NO: 544020 - DNA, 201 bp, Homo sapiens
tatatgacacatgagttaatcacttaaaattgtaatttggaactttttgcttcagttataaaaccgcatagcaaatatgtgttctttttataaattgacayctaccatcatccatccaaacaccttataattattagtttggaacactttctctttcctttgtgtatgtcagtaccattacagtaaggacaaaataaatgg

SEQ ID NO: 544021 - DNA, 201 bp, Homo sapiens
caatttcaatgtaaatggacctggagaaggagtaaaggttgatccagaagatactaacttaaatcaagacagtgccaaagaattggaagatagtccccagraaaatgtcagtgtcacagagatcattaaaccatgtgatgatccaaaaagtgaagctaaaaggtaagtcaaagttgcatattatttgtaaattactgaata

SEQ ID NO: 544022 - DNA, 201 bp, Homo sapiens
ttttagagatggagtcttgctggagcacagtggtgcaatctaggctcactacaacctctgcttcttgggttcaagtgattctcccacttcagcctcccgartagttgggactacaggcatgcgccaccacactgggctaatcttttgtatttttagcagaaacggggtttcaccatgttgaccaccaggctggtctcaaac

SEQ ID NO: 544023 - DNA, 201 bp, Homo sapiens
gttataattaacagttctgtgaaagattatgaactcttttcatgttaatatttcattaaaaatttttggttatggattggacatatcaacaaccaaaaatrtacaataataatattcaaaaggagcaagaaatccttttgaattcttacttattcagccttcacaatgatgctaatttttgtttttcaggtatgataatca

SEQ ID NO: 544024 - DNA, 201 bp, Homo sapiens
gaggccgaggcgggcggatcacgaggtcaggagatcgagaccatcccggctaaaacggtgaaaccccgtctctactaaaaatacaaaaaattagccgggcrtagtggcgggcgcctgtagtcccagctacttgggaggctgaggcaggagaatggcgtgaacccgggaggcggagcttgcagtgagccgagatcccgccac

SEQ ID NO: 544025 - DNA, 201 bp, Homo sapiens
tactaatcaccatggtcccatctagtgattagtaaggctatttttattttctcattaagtttattttgaagagtgattttttctggaaagccttaaaagtmctgtcttctccagagattattagaagtgttatatacatgaaaaaagaaaggtaaaagatgtttcgcatcagtaatatttactgcttttctaaaaaaaaat

SEQ ID NO: 544026 - DNA, 201 bp, Homo sapiens
gcttgggcaaccactgatatagttcagctctctaatttcactgatgtgaggaaaggattcagagaattcaagtgacttcttcacagctgcagaatggcagrgctaagatagatacattatacccagcaccctccccacaccactctgctgtcccctggatccagggcctttatgctggcagctcctctgttgcttctctgg

SEQ ID NO: 544027 - DNA, 201 bp, Homo sapiens
attataaccattgttactgatctgtgtgctcgtcttttgtccctccccttgttatcattcatttattgtttataacatatatacatatatatatatatacrcacacactacatgcaaggcattttattgggaatacagtgcactcaaaataaattgaaagccactagagggaatgagagaacaataaaagaatttgggtat

SEQ ID NO: 544028 - DNA, 201 bp, Homo sapiens
aaggacaaaaaaagtaattgttttgaaagaggtcctatgttttagctattaagtcactgataatccttttcatgagttcattttgatataaaaaccactgygtagaatttttaatgtagattaaattagtagattcatagattacttctgatctaagaaattacttaatttccacatatagatggaaatgtatcaaatact

SEQ ID NO: 544029 - DNA, 201 bp, Homo sapiens
ctttaagaacctgccttctctgaatcttgctggcaatctgaagtgttccttctccatccttccattgtactttgcacttatatctgtaactgctctttacygtattaaattataatagttttattttccatccctctcccaaattgtaaactcctaaagggctggggactttgtgtttttatgtttcctcaaggtctggca

SEQ ID NO: 544030 - DNA, 201 bp, Homo sapiens
acatatagatggaaatgtatcaaatactacagtacagatagtatagtcctggatgaattcagggtccatgcagctggcttgtcaaatactcatctcacatrtctgtgacaacaaccaagttcaccttcgttacaactctcatgtccccatctgggtccctgcctgtcgccataactcttgcactattaaaatcttcaactc

SEQ ID NO: 544031 - DNA, 201 bp, Homo sapiens
tctccttttctattctctttgttgggaaattgtgtcactgcctacttagttgctgccagtagcatttggtatagttgaccactccctctttctcgaactaytctttccgaggtttatataactttatagcttacaggcttttctcttttatccaaccattttatttcactatacaatgttaggtatcctcagggcttgatt

SEQ ID NO: 544032 - DNA, 201 bp, Homo sapiens
tggcttgtcaaatactcatctcacatgtctgtgacaacaaccaagttcaccttcgttacaactctcatgtccccatctgggtccctgcctgtcgccataaytcttgcactattaaaatcttcaactcaacatctctgtctctgtgatctgtgatctcaactttttttctttccaactctgattcttcattctgactccctg

SEQ ID NO: 544033 - DNA, 201 bp, Homo sapiens
catccattcctcaattcctaccgtcacttaaatctgtagacttcctgccccactattctcagtaagtactcttaaaaaggtcatgaacatttactatcatrttatactgtatcgagcattccttcctggaaactcccttgacctttgtaacatcactctttcttggccctgatgctacctctctgagctcttcttcataga

SEQ ID NO: 544034 - DNA, 201 bp, Homo sapiens
agataaatttgataaatgctgtattaaaagagaggctatactatgggacctctcagagtcctatagtataactttaatactaatgtacattgaaactctgyagagatgcagtatgcaacattgcccacacttatttgaccagggatctctatccatagagcctgtggtaagaagaatgcttagattccacttcagtaaatc

SEQ ID NO: 544035 - DNA, 201 bp, Homo sapiens
aaattgacatcacttaatgatataattgacatgtaaaaaaactgacctcctggggggccgaggcaggcagatcacaaggtcaggagatcgagaccatcctrgctaacacagtgaaaccccatctctattaaaaatacaaaaaatgagccgggcatggtggcgggcgcctatagtcccagctactcgggaggcagaggcagg

SEQ ID NO: 544036 - DNA, 201 bp, Homo sapiens
aaatacaaaaaatgagccgggcatggtggcgggcgcctatagtcccagctactcgggaggcagaggcaggagaatggcgtgaacccaggaggcagagcttkcagtgagccgagatcgcgccactgcactccagcctgggccacagagcgagactccatctcaaaaaaaaaaaaaaaaagacataatgatataacctcattt

SEQ ID NO: 544037 - DNA, 201 bp, Homo sapiens
gggcatggtggcgggcgcctatagtcccagctactcgggaggcagaggcaggagaatggcgtgaacccaggaggcagagctttcagtgagccgagatcgcrccactgcactccagcctgggccacagagcgagactccatctcaaaaaaaaaaaaaaaaagacataatgatataacctcattttcttctatgttttcctgc

SEQ ID NO: 544038 - DNA, 201 bp, Homo sapiens
agtcccagctactcgggaggcagaggcaggagaatggcgtgaacccaggaggcagagctttcagtgagccgagatcgcgccactgcactccagcctgggcmacagagcgagactccatctcaaaaaaaaaaaaaaaaagacataatgatataacctcattttcttctatgttttcctgctttcctaccaatatctgtaaaa

SEQ ID NO: 544039 - DNA, 201 bp, Homo sapiens
ttttattttaaagtagaaatctgtccgcttttcacttacggaggccttacagtgtgtgttctgtgttacttgagtttatacgcactgcagaatttgtttaycctgctcttttggaaacgtattccggaagcgaaaccctgagtaatcggaagtggttaggagtgagagagctgctggatatgcggagggactgggcgggtc

SEQ ID NO: 544040 - DNA, 201 bp, Homo sapiens
gctactcgggaggcagaggcaggagaatggcgtgaacccaggaggcagagctttcagtgagccgagatcgcgccactgcactccagcctgggccacagaghgagactccatctcaaaaaaaaaaaaaaaaagacataatgatataacctcattttcttctatgttttcctgctttcctaccaatatctgtaaaacattaac

SEQ ID NO: 544041 - DNA, 201 bp, Homo sapiens
gagtaatcggaagtggttaggagtgagagagctgctggatatgcggagggactgggcgggtcggcttccgaatggaagaggtctgtgagaagttaacctgktgataccgatccgaagagcctatcaagtgaagccccctgaaatacggagaataagaatcttagaggtaaatccgaggacaagcaggtataactaaggatg

SEQ ID NO: 544042 - DNA, 201 bp, Homo sapiens
gtctctacaaaaaaaaaaaaaaatacaaaaaaaatacaaaaaattatttggtcatggtggcacatgcctgtagtcccatctacttgggaggctgaggtggraggatcacctgagcccaggaagtcaaggctgcagtaagctgtttttaaatgattcagtggaagttctccttgtcagtgctaccatgctttgttttaacta

SEQ ID NO: 544043 - DNA, 201 bp, Homo sapiens
tatcacttcctatttacataatgtatacacccaaagatattttatgtactagactccagattaccctttcttaataaatatctcagggtaaggaaagaaaraaactgtatagatatatttaaaatagagaatactttccaagcaatacatgatacttttcctaaaagactctaaaagaaaaagattctgtaactctctttt

SEQ ID NO: 544044 - DNA, 201 bp, Homo sapiens
ataatatcacttcctatttacataatgtatacacccaaagatattttatgtactagactccagattaccctttcttaataaatatctcagggtaaggaaaraaagaaactgtatagatatatttaaaatagagaatactttccaagcaatacatgatacttttcctaaaagactctaaaagaaaaagattctgtaactctc

SEQ ID NO: 544045 - DNA, 201 bp, Homo sapiens
tatatggtctggctggacagtgatgaattcactgaagaccaatcagtagttcatgattgtccttaatgtttctatagacataaaatttctattgaaatatytttataccacttacctgcacacttattatatattatcctgtaatacattttatctttttatatgtatgttctgtcccctaaattaggtagtaaatttctt

SEQ ID NO: 544046 - DNA, 201 bp, Homo sapiens
agtgtaagtgtagaaaagtttgtgactgttaagaaagttagtcgtcgggttcactaattgaactgagttgtatctagtactgagaacgatctttttttgtrgtgaaaccagttgtcatctagtgtacagtttgtcatatttatatcattgcagtagcatcaccttcttatatgttctctggtaaatctgagtctgtactgt

SEQ ID NO: 544047 - DNA, 201 bp, Homo sapiens
tgtcgcttcccggcctatcgctttcatacctgctcactccccctacttacttcttcaccccctccgcttcatttggcatttgccagcaggcactcgctgtrcctgtacgtttcgcagagcagctatcaagggcagtttcagggatcgttactcttacgaagggttttttggatacctcttttcggagcagtagagtgtaag

SEQ ID NO: 544048 - DNA, 201 bp, Homo sapiens
atagtcctatagtctagcaatataactttaagatttacataacagaatgaaagtcagaattgtattttatggcattaaataaattaactttatttctgtcyatatcaacatccaaagtttattaggaatttatttaaagaataataaaagcaataggacctaacatttaatgagtgcttactgtgtcaaataccattctaa

SEQ ID NO: 544049 - DNA, 201 bp, Homo sapiens
gaataaggattggtgtttttcttgacttaagcgttactcataattatggagctgttaccataggtccttgtcttcccaattgagagaaggtaattattcgkaaatgtgtcctggattgtgcctactgcatatgtaataaaggtttctaggtatgtcacaaggaaaaatcgaattacgaaagttaccaggtgagaaaatgtt

SEQ ID NO: 544050 - DNA, 201 bp, Homo sapiens
ttaaacatgtatcttttgttgacacatgattgttttgaaaattactttttctctgattttttttttgcattctttttagtgccagtaattttgaatatagrgtatagcatgtattagcattttcttggcatttcttcttggtaagtagtttctgttttgtttcctttttgttagtcaccgttacttcatccccaatccgag

SEQ ID NO: 544051 - DNA, 201 bp, Homo sapiens
ggaggtgtgaggtgctttggacaagaccaccaataagttgtaaaagtaggttacaattataaactgccagaccaaagattgaccaagtcaggcatagtaattgaccagcagtccttgttttaaggatccgtaaattccaagtagttttgcttgtgtatacgggatacttggaataaagagaatggcgatataacttactgt

SEQ ID NO: 544052 - DNA, 201 bp, Homo sapiens
gactcttatttagcaaatgcaacagacaagaatatccaacttgatatttataaaaggtagactttttccaaaagtgtataagctcaaagaaaaaatgcaamctgtcaattaatatatactatgtaatatatattattgtgtatttatgattagccatcataaatgcccattgcttggcctttaagaataatcacaaaatat

SEQ ID NO: 544053 - DNA, 201 bp, Homo sapiens
aactttttattaccaaaaaagtataaattatgttatcttgagtaatattttttgtcgtttgttaaacatctaaacagaagctcctttttgatatgtgtgtrtgtgtatacaaattgtgtcggtatgtctcctaagaaagtaattactttaaaattcctcttgtcatatggatgacaaaaccaccacagtaacttcattccc

SEQ ID NO: 544054 - DNA, 201 bp, Homo sapiens
gcttgtgacttttccatctcagacttttttctgagtctgagagatttatatccagccaggtatttccatctacttgttccacagatggctaaaaatataayctcttttctccttgcttttgcatttgtacaaccccccacccctaaaaatctcctccttttcctgtattccctatcttgatgaattatacctactctatag

SEQ ID NO: 544055 - DNA, 201 bp, Homo sapiens
gagactccatctcaaaaaaaaaaaaaaaaagacataatgatataacctcattttcttctatgttttcctgctttcctaccaatatctgtaaaacattaacrtcattatttaaaaaaatatgtaacctagataatatagtaatcagacatcattgttaaatttacagcttaaggaagtaagttgtcttttcaatcagattag

SEQ ID NO: 544056 - DNA, 201 bp, Homo sapiens
tcaagtgaagccccctgaaatacggagaataagaatcttagaggtaaatccgaggacaagcaggtataactaaggatgttggaaagggacggaggtctggytggagctcggtggccagtagctttggatttagggaaagattgttccgggaagactttttcagacagggatgaaacttaggtttcgacttccccggacagc

SEQ ID NO: 544057 - DNA, 201 bp, Homo sapiens
aacagtttcgtcaagaaatgatagctacccagaagtatggcacttgtttacattctgaactcttctgctttctcctgcaaattaagttattgtagttttgktttttttgtttgtttgtttttgttttgggtgtgtctacatttgataacttactgagcatatacttttagtagcattttaaaatagatgctctgggaggga

SEQ ID NO: 544058 - DNA, 201 bp, Homo sapiens
accctgtctctacaaaaaaaaaaaaaaatacaaaaaaaatacaaaaaattatttggtcatggtggcacatgcctgtagtcccatctacttgggaggctgargtgggaggatcacctgagcccaggaagtcaaggctgcagtaagctgtttttaaatgattcagtggaagttctccttgtcagtgctaccatgctttgtttt

SEQ ID NO: 544059 - DNA, 201 bp, Homo sapiens
aagtggctgtaatcataaaatactgcatataaattagaaaaagagaaatgaaaagccattgatactacagataaaaagttatcaaggattttgaaatatcrtttccatagaagaataaaaacaaaatcctgattctgagcagttgaatgaaagattgaagaggggaagtagtaagtccattttggttaaggaaaagaaatt

SEQ ID NO: 544060 - DNA, 201 bp, Homo sapiens
ctgtctctacaaaaaaaaaaaaaaatacaaaaaaaatacaaaaaattatttggtcatggtggcacatgcctgtagtcccatctacttgggaggctgaggtrggaggatcacctgagcccaggaagtcaaggctgcagtaagctgtttttaaatgattcagtggaagttctccttgtcagtgctaccatgctttgttttaac

SEQ ID NO: 544061 - DNA, 201 bp, Homo sapiens
tagaaacttcaagtcacggaggtccaaaattacacagaaacacagtctctttttgttaattttgttacattaaagttagtgatattactttgagcttgttrtattgattacgttctcttctaggtaaatcgtgagttaaaaaagttactggtggcttctgttggggatgatcttcagtatcactttgaacgtctagcccgt

SEQ ID NO: 544062 - DNA, 201 bp, Homo sapiens
attccctttgcttggctaaaattcaggacatacttctgacaatttagagtgtattggtgaggatggtgaaacggagtatttagaagtaaaccacccctaatttttttttttgagacttttagtagacataacaatgccttctgtgagaatgggatataagggacatttctctttctaaatgcatgcgtactaaatacagaa

SEQ ID NO: 544063 - DNA, 201 bp, Homo sapiens
ccagctgagaaaatggctgaaacggtaaaatattttcttttgtgatctatggaacttctaacactgtccttttactgaaaggtgacatatcatggaaagcrtttggcattaggaattaggaaatgtgggatctaaaccactcatgctattgagtgtgttatcttggagaaaattatttcctcttctgcgctttaatatttt

SEQ ID NO: 544064 - DNA, 201 bp, Homo sapiens
aagaaggttactacaggacaaagaaggtctttcaaaccagctccgtgtacagacagaggtaagaagagccttaatcgataaaatgagtactactctttacrtctggaccttttaaacgtgcatgttagaaaactacatttctttatgggaatgtcattcatcctagcttgtcagttctctaaaatgcttcctcttaaattt

SEQ ID NO: 544065 - DNA, 201 bp, Homo sapiens
ttgctgtaacaaagtaccacaaactgcatggcttgaacaacaaaatgtattctctcagttctggaggctagaagtccaagatgaaaatgtcaacaaggctrtgctccttcggaaggcattagagacactctcctagcttccagtggcttgctggcagtctttggtgctccttgtcttgtagacgtaccacccttatctccg

SEQ ID NO: 544066 - DNA, 201 bp, Homo sapiens
atattatactgtatcgagcattccttcctggaaactcccttgacctttgtaacatcactctttcttggccctgatgctacctctctgagctcttcttcatagacttttttcctcctttagatgttcatgtttcataggaatctgtgttccccttttcaaaatctcttcgttcctaaacaccatactcttgaaacgattcac

SEQ ID NO: 544067 - DNA, 201 bp, Homo sapiens
aagttactggtggcttctgttggggatgatcttcagtatcactttgaacgtctagcccgtgagaaaaatcagcttattttagaaaatgaagccctaggtcraaacacagctcagctttctgaacagttagaacgtatgtcaatacagtgtgatgtatggcgaagtaaattccttgcaagcaggtattttctacagcaaata

SEQ ID NO: 544068 - DNA, 201 bp, Homo sapiens
tattatactgtatcgagcattccttcctggaaactcccttgacctttgtaacatcactctttcttggccctgatgctacctctctgagctcttcttcatagacttttttcctcctttagatgttcatgtttcataggaatctgtgttccccttttcaaaatctcttcgttcctaaacaccatactcttgaaacgattcact

SEQ ID NO: 544069 - DNA, 201 bp, Homo sapiens
tcctgtttccaaatgaagtctcattctgaggtagtggggggttagtacttcaacaaataaagatttgggggacacaattcaacccctaaattgctaaatayagtagtcactttttagtcctagctgatttgtcctctctaatatttaatactgttgaccattccctgccttttgagatacgttcttttgatgacttccatg

SEQ ID NO: 544070 - DNA, 201 bp, Homo sapiens
aatctcgatgttactcttaagtccattgtatgtaacttattttactaatttaataataactaaactttattaggtgatatgggtgacatttaaaaagactmttgatttaaaattaccacatgacaatccctaatttgtttaactgtatcatagctgaatttgtatatgttctggaaagtctttcagactataaccaagtta

SEQ ID NO: 544071 - DNA, 201 bp, Homo sapiens
attccatgagcagataaatttgataaatgctgtattaaaagagaggctatactatgggacctctcagagtcctatagtataactttaatactaatgtacaytgaaactctgtagagatgcagtatgcaacattgcccacacttatttgaccagggatctctatccatagagcctgtggtaagaagaatgcttagattccac

SEQ ID NO: 544072 - DNA, 201 bp, Homo sapiens
aaaaatgaaacactctaggtagtgtattaacagactaatgagcttcagtaagcatttattcattttctctgtgacaaggaccattttattagttcatgacrcaaagattaggaggcggtccataccctgaagagctcccaacagtctagtctacaagagaaacaaattatttttaaaatatatactaccatgtttgcatta

SEQ ID NO: 544073 - DNA, 201 bp, Homo sapiens
ctggatatggctttatcaccttcctttcacatccaagaatcttggacaagttgtccagacatgtttgtacttaaacaccatccattcctcaattcctaccrtcacttaaatctgtagacttcctgccccactattctcagtaagtactcttaaaaaggtcatgaacatttactatcatattatactgtatcgagcattcct

SEQ ID NO: 544074 - DNA, 201 bp, Homo sapiens
ttgtagttttggtttttttgtttgtttgtttttgttttgggtgtgtctacatttgataacttactgagcatatacttttagtagcattttaaaatagatgytctgggagggaagaggactgaaaaaatagaaggcatgcttttcacattcttaattggggaaataattagttatatctgtagtagaaggattctctggatt

SEQ ID NO: 544075 - DNA, 201 bp, Homo sapiens
agtgtttatatttcagtactttagatgtacaagtgaaatttaacatcattagttagaatttattaggtgactactcttaaacatttaatgttaatgcaaartttttaacagctatattccctatacactagaagattacgatttaaataagaatacacattttaaagatttaagtagatagacaaagcaactagggtgtat

SEQ ID NO: 544076 - DNA, 201 bp, Homo sapiens
tttttgttagtcaccgttacttcatccccaatccgaggagcaggagatggaatggaaactgaggaaccacctaaatctgttgaagttacctccggagtccratctagaaagcatcatagtcttcagagtccatggaagaaagcagttccatcagagagcccaggagttcttcagctagggaaaatgctcactgaaaaagca

SEQ ID NO: 544077 - DNA, 201 bp, Homo sapiens
ctgagcccatcttctgtactgctacaagttcctttggcaatgaccactttgctgtaaacattcttagaaaagtaggaattaggcttggcgcggtggctcaygcatgtaatcccagcactttgggaggccgaggctggtggatcacgaggtcaggagatcgagaccatcctggctaacacggtgaaaccctgtatctactaa

SEQ ID NO: 544078 - DNA, 201 bp, Homo sapiens
gtgggctcccgggtgaccctgcactgctccttctggtccagtgagtgggtctcagatgacatctccttcacctggcgctaccagcccgaagggggcagagwtgccatttcggtgagtgcctgggggaatcctggggttggataacagaaagtgcttcaaagaacaacaaaaaagataacttgggctaaggagggggaaatc

SEQ ID NO: 544079 - DNA, 201 bp, Homo sapiens
aggtaaatgacagtctttgtcaccctgactacattgtcctcccttctccagcactaccctttccagcccaagatcccttaccctgaggctggagcgaagcttttttttttttttttttttttttgcttttttctttctgtaacaaattatggagctaagctttgacagctgtgttctcattagggtcctctcacatgcttc

SEQ ID NO: 544080 - DNA, 201 bp, Homo sapiens
gtccccggcccaggccatcgtggtttacaccgacagggaggtccatggtgctgtgggctcccgggtgaccctgcactgctccttctggtccagtgagtggktctcagatgacatctccttcacctggcgctaccagcccgaagggggcagagatgccatttcggtgagtgcctgggggaatcctggggttggataacagaa

SEQ ID NO: 544081 - DNA, 201 bp, Homo sapiens
ggctcccgggtgaccctgcactgctccttctggtccagtgagtgggtctcagatgacatctccttcacctggcgctaccagcccgaagggggcagagatgycatttcggtgagtgcctgggggaatcctggggttggataacagaaagtgcttcaaagaacaacaaaaaagataacttgggctaaggagggggaaatcctt

SEQ ID NO: 544082 - DNA, 201 bp, Homo sapiens
ggtaaatgacagtctttgtcaccctgactacattgtcctcccttctccagcactaccctttccagcccaagatcccttaccctgaggctggagcgaagcttttttttttttttttttttttttgcttttttctttctgtaacaaattatggagctaagctttgacagctgtgttctcattagggtcctctcacatgcttcc

SEQ ID NO: 544083 - DNA, 201 bp, Homo sapiens
ggtaggggaccctcgctggaaggatggctccattgtcatacacaacctagactacagtgacaatggcacgttcacttgtgacgtcaaaaaccctccagacmtagtgggcaagacctctcaggtcacgctgtatgtctttgaaaaaggtgtgagaagggatggggacaagggtatgggaagcagtttgggaggggatcaggg

SEQ ID NO: 544084 - DNA, 201 bp, Homo sapiens
cgggtgaccctgcactgctccttctggtccagtgagtgggtctcagatgacatctccttcacctggcgctaccagcccgaagggggcagagatgccatttyggtgagtgcctgggggaatcctggggttggataacagaaagtgcttcaaagaacaacaaaaaagataacttgggctaaggagggggaaatcctttttgag

SEQ ID NO: 544085 - DNA, 201 bp, Homo sapiens
gtaaatgacagtctttgtcaccctgactacattgtcctcccttctccagcactaccctttccagcccaagatcccttaccctgaggctggagcgaagcttttttttttttttttttttttttgcttttttctttctgtaacaaattatggagctaagctttgacagctgtgttctcattagggtcctctcacatgcttccc

SEQ ID NO: 544086 - DNA, 201 bp, Homo sapiens
attagggtcctctcacatgcttcccctcattcctcatagatcttccactatgccaagggacaaccctacattgacgaggtggggaccttcaaagagcgcayccagtgggtaggggaccctcgctggaaggatggctccattgtcatacacaacctagactacagtgacaatggcacgttcacttgtgacgtcaaaaaccct

SEQ ID NO: 544087 - DNA, 201 bp, Homo sapiens
tcctctcacatgcttcccctcattcctcatagatcttccactatgccaagggacaaccctacattgacgaggtggggaccttcaaagagcgcatccagtgsgtaggggaccctcgctggaaggatggctccattgtcatacacaacctagactacagtgacaatggcacgttcacttgtgacgtcaaaaaccctccagaca

SEQ ID NO: 544088 - DNA, 201 bp, Homo sapiens
ggctccattgtcatacacaacctagactacagtgacaatggcacgttcacttgtgacgtcaaaaaccctccagacatagtgggcaagacctctcaggtcaygctgtatgtctttgaaaaaggtgtgagaagggatggggacaagggtatgggaagcagtttgggaggggatcagggaggactgacaggttgggggaagagg

SEQ ID NO: 544089 - DNA, 201 bp, Homo sapiens
cttccactatgccaagggacaaccctacattgacgaggtggggaccttcaaagagcgcatccagtgggtaggggaccctcgctggaaggatggctccattktcatacacaacctagactacagtgacaatggcacgttcacttgtgacgtcaaaaaccctccagacatagtgggcaagacctctcaggtcacgctgtatgt

SEQ ID NO: 544090 - DNA, 201 bp, Homo sapiens
accttcaaagagcgcatccagtgggtaggggaccctcgctggaaggatggctccattgtcatacacaacctagactacagtgacaatggcacgttcacttrtgacgtcaaaaaccctccagacatagtgggcaagacctctcaggtcacgctgtatgtctttgaaaaaggtgtgagaagggatggggacaagggtatggga

SEQ ID NO: 544091 - DNA, 201 bp, Homo sapiens
tcaaagagcgcatccagtgggtaggggaccctcgctggaaggatggctccattgtcatacacaacctagactacagtgacaatggcacgttcacttgtgasgtcaaaaaccctccagacatagtgggcaagacctctcaggtcacgctgtatgtctttgaaaaaggtgtgagaagggatggggacaagggtatgggaagca

SEQ ID NO: 544092 - DNA, 201 bp, Homo sapiens
ctgtgttctcattagggtcctctcacatgcttcccctcattcctcatagatcttccactatgccaagggacaaccctacattgacgaggtggggaccttcraagagcgcatccagtgggtaggggaccctcgctggaaggatggctccattgtcatacacaacctagactacagtgacaatggcacgttcacttgtgacgt

SEQ ID NO: 544093 - DNA, 201 bp, Homo sapiens
gcatccagtgggtaggggaccctcgctggaaggatggctccattgtcatacacaacctagactacagtgacaatggcacgttcacttgtgacgtcaaaaamcctccagacatagtgggcaagacctctcaggtcacgctgtatgtctttgaaaaaggtgtgagaagggatggggacaagggtatgggaagcagtttgggag

SEQ ID NO: 544094 - DNA, 201 bp, Homo sapiens
gtaggggaccctcgctggaaggatggctccattgtcatacacaacctagactacagtgacaatggcacgttcacttgtgacgtcaaaaaccctccagacayagtgggcaagacctctcaggtcacgctgtatgtctttgaaaaaggtgtgagaagggatggggacaagggtatgggaagcagtttgggaggggatcaggga

SEQ ID NO: 544095 - DNA, 201 bp, Homo sapiens
gagcgcatccagtgggtaggggaccctcgctggaaggatggctccattgtcatacacaacctagactacagtgacaatggcacgttcacttgtgacgtcaraaaccctccagacatagtgggcaagacctctcaggtcacgctgtatgtctttgaaaaaggtgtgagaagggatggggacaagggtatgggaagcagtttg

SEQ ID NO: 544096 - DNA, 201 bp, Homo sapiens
atcttccactatgccaagggacaaccctacattgacgaggtggggaccttcaaagagcgcatccagtgggtaggggaccctcgctggaaggatggctccaytgtcatacacaacctagactacagtgacaatggcacgttcacttgtgacgtcaaaaaccctccagacatagtgggcaagacctctcaggtcacgctgtat

SEQ ID NO: 544097 - DNA, 201 bp, Homo sapiens
gaggtggggaccttcaaagagcgcatccagtgggtaggggaccctcgctggaaggatggctccattgtcatacacaacctagactacagtgacaatggcaygttcacttgtgacgtcaaaaaccctccagacatagtgggcaagacctctcaggtcacgctgtatgtctttgaaaaaggtgtgagaagggatggggacaag

SEQ ID NO: 544098 - DNA, 201 bp, Homo sapiens
ggagccgccgggcagcagtgaggggtgggatgggaacagtcaagccccagtcgctcggtgactgatgtgtgcgcccctcccccagacgccagtgctgtatrcaatgctggaccacagcagaagcaccaaagctgtcagtgagaagaaggccaaggggctgggggagtctcgcaaggataagaaatagcggttagcgggccg

SEQ ID NO: 544099 - DNA, 201 bp, Homo sapiens
atccagtgggtaggggaccctcgctggaaggatggctccattgtcatacacaacctagactacagtgacaatggcacgttcacttgtgacgtcaaaaaccytccagacatagtgggcaagacctctcaggtcacgctgtatgtctttgaaaaaggtgtgagaagggatggggacaagggtatgggaagcagtttgggaggg

SEQ ID NO: 544100 - DNA, 201 bp, Homo sapiens
cactttgtgcttgcagtgctgtccccggcccaggccatcgtggtttacaccgacagggaggtccatggtgctgtgggctcccgggtgaccctgcactgctycttctggtccagtgagtgggtctcagatgacatctccttcacctggcgctaccagcccgaagggggcagagatgccatttcggtgagtgcctgggggaat

SEQ ID NO: 544101 - DNA, 201 bp, Homo sapiens
gggtaggggaccctcgctggaaggatggctccattgtcatacacaacctagactacagtgacaatggcacgttcacttgtgacgtcaaaaaccctccagamatagtgggcaagacctctcaggtcacgctgtatgtctttgaaaaaggtgtgagaagggatggggacaagggtatgggaagcagtttgggaggggatcagg

SEQ ID NO: 544102 - DNA, 201 bp, Homo sapiens
caaccctacattgacgaggtggggaccttcaaagagcgcatccagtgggtaggggaccctcgctggaaggatggctccattgtcatacacaacctagactrcagtgacaatggcacgttcacttgtgacgtcaaaaaccctccagacatagtgggcaagacctctcaggtcacgctgtatgtctttgaaaaaggtgtgaga

SEQ ID NO: 544103 - DNA, 201 bp, Homo sapiens
gctggaccacagcagaagcaccaaagctgtcagtgagaagaaggccaaggggctgggggagtctcgcaaggataagaaatagcggttagcgggccgggcgrgggatcgggggttaggggtggagtccgccaaaggcccaaaggtgatggtcatcgagatggagctacgaaaggatgagcagagcccggagctccggcctgc

SEQ ID NO: 544104 - DNA, 201 bp, Homo sapiens
tgggtaggggaccctcgctggaaggatggctccattgtcatacacaacctagactacagtgacaatggcacgttcacttgtgacgtcaaaaaccctccagrcatagtgggcaagacctctcaggtcacgctgtatgtctttgaaaaaggtgtgagaagggatggggacaagggtatgggaagcagtttgggaggggatcag

SEQ ID NO: 544105 - DNA, 201 bp, Homo sapiens
tgtcatacacaacctagactacagtgacaatggcacgttcacttgtgacgtcaaaaaccctccagacatagtgggcaagacctctcaggtcacgctgtatktctttgaaaaaggtgtgagaagggatggggacaagggtatgggaagcagtttgggaggggatcagggaggactgacaggttgggggaagaggcaaaaagc

SEQ ID NO: 544106 - DNA, 201 bp, Homo sapiens
atcctcaatgcagggcatacactcggactaggaaccacagatacagggccctgctcattctcccacttcttttcccacccctcctagtgccaactaggtamggggtcgttctgggagctgtgatcgggggtgtcctcggggtggtgctgttgctgctgctgcttttctacgtggttcggtactgctggctacgcaggcagg

SEQ ID NO: 544107 - DNA, 201 bp, Homo sapiens
gttccggcgaggccaaacgtacagcagtctctcttcttgcagtgctatggagaaggggaaattgcacaagccaggaaaggacgcgtcgaagcgcgggcggyaggttagcgggacttggggcctagacaagatgggaaggagaaccctgggagccgccgggcagcagtgaggggtgggatgggaacagtcaagccccagtcg

SEQ ID NO: 544108 - DNA, 201 bp, Homo sapiens
tgggaggccaaggtgggataattatttgagccccaggagttggagaccagcctggacaacataaccagactccatctgtaaaattcaaaaaaaaaaaaaawatatatatatatatatgaaaagaaaaaaatatgcatttagagggaggaagtagaggttttattttaaaagaaagggtaaaagagagtgtagcaagcttcc

SEQ ID NO: 544109 - DNA, 201 bp, Homo sapiens
tatatgaaaagaaaaaaatatgcatttagagggaggaagtagaggttttattttaaaagaaagggtaaaagagagtgtagcaagcttccctgagtggtggscatggctggacccaggttggaaatagtagcatgcccccagagccatgctaacagcctggtgggaagcagtgttagattacataaagaaataggctcaaac

SEQ ID NO: 544110 - DNA, 201 bp, Homo sapiens
agatacgtaagttcttaagcaaaaagacactagaatacaatgcaatatgtatgtggaaaaaaaaactccacaaaactatttgttgtaagtatgtgtatatyttgagtttattgagtttatactgagtttgattcatattaaatggataacttgttacatcttggaagggaatacaggaaaggaatttgttgggctaagtgt

SEQ ID NO: 544111 - DNA, 201 bp, Homo sapiens
ccaggccatcgtggtttacaccgacagggaggtccatggtgctgtgggctcccgggtgaccctgcactgctccttctggtccagtgagtgggtctcagatracatctccttcacctggcgctaccagcccgaagggggcagagatgccatttcggtgagtgcctgggggaatcctggggttggataacagaaagtgcttca

SEQ ID NO: 544112 - DNA, 201 bp, Homo sapiens
ccataggtgcatctgattccccactttgtgcttgcagtgctgtccccggcccaggccatcgtggtttacaccgacagggaggtccatggtgctgtgggctbccgggtgaccctgcactgctccttctggtccagtgagtgggtctcagatgacatctccttcacctggcgctaccagcccgaagggggcagagatgccatt

SEQ ID NO: 544113 - DNA, 201 bp, Homo sapiens
gtgggtaggggaccctcgctggaaggatggctccattgtcatacacaacctagactacagtgacaatggcacgttcacttgtgacgtcaaaaaccctccaracatagtgggcaagacctctcaggtcacgctgtatgtctttgaaaaaggtgtgagaagggatggggacaagggtatgggaagcagtttgggaggggatca

SEQ ID NO: 544114 - DNA, 201 bp, Homo sapiens
gttctcattagggtcctctcacatgcttcccctcattcctcatagatcttccactatgccaagggacaaccctacattgacgaggtggggaccttcaaagwgcgcatccagtgggtaggggaccctcgctggaaggatggctccattgtcatacacaacctagactacagtgacaatggcacgttcacttgtgacgtcaaa

SEQ ID NO: 544115 - DNA, 201 bp, Homo sapiens
ttcctcatagatcttccactatgccaagggacaaccctacattgacgaggtggggaccttcaaagagcgcatccagtgggtaggggaccctcgctggaagratggctccattgtcatacacaacctagactacagtgacaatggcacgttcacttgtgacgtcaaaaaccctccagacatagtgggcaagacctctcaggt

SEQ ID NO: 544116 - DNA, 201 bp, Homo sapiens
tcctagtgccaactaggtacggggtcgttctgggagctgtgatcgggggtgtcctcggggtggtgctgttgctgctgctgcttttctacgtggttcggtastgctggctacgcaggcaggcggccctgcagaggaggctcaggtaaggggcggagcctagctcccctccccctctccccactatcccccatctgggcggag

SEQ ID NO: 544117 - DNA, 201 bp, Homo sapiens
caggccatcgtggtttacaccgacagggaggtccatggtgctgtgggctcccgggtgaccctgcactgctccttctggtccagtgagtgggtctcagatgrcatctccttcacctggcgctaccagcccgaagggggcagagatgccatttcggtgagtgcctgggggaatcctggggttggataacagaaagtgcttcaa

SEQ ID NO: 544118 - DNA, 201 bp, Homo sapiens
ctcattagggtcctctcacatgcttcccctcattcctcatagatcttccactatgccaagggacaaccctacattgacgaggtggggaccttcaaagagcvcatccagtgggtaggggaccctcgctggaaggatggctccattgtcatacacaacctagactacagtgacaatggcacgttcacttgtgacgtcaaaaac

SEQ ID NO: 544119 - DNA, 201 bp, Homo sapiens
attgacgaggtggggaccttcaaagagcgcatccagtgggtaggggaccctcgctggaaggatggctccattgtcatacacaacctagactacagtgacartggcacgttcacttgtgacgtcaaaaaccctccagacatagtgggcaagacctctcaggtcacgctgtatgtctttgaaaaaggtgtgagaagggatggg

SEQ ID NO: 544120 - DNA, 201 bp, Homo sapiens
tttgacagctgtgttctcattagggtcctctcacatgcttcccctcattcctcatagatcttccactatgccaagggacaaccctacattgacgaggtggrgaccttcaaagagcgcatccagtgggtaggggaccctcgctggaaggatggctccattgtcatacacaacctagactacagtgacaatggcacgttcact

SEQ ID NO: 544121 - DNA, 201 bp, Homo sapiens
atcgtggtttacaccgacagggaggtccatggtgctgtgggctcccgggtgaccctgcactgctccttctggtccagtgagtgggtctcagatgacatctbcttcacctggcgctaccagcccgaagggggcagagatgccatttcggtgagtgcctgggggaatcctggggttggataacagaaagtgcttcaaagaaca

SEQ ID NO: 544122 - DNA, 201 bp, Homo sapiens
cagatacagggccctgctcattctcccacttcttttcccacccctcctagtgccaactaggtacggggtcgttctgggagctgtgatcgggggtgtcctcvgggtggtgctgttgctgctgctgcttttctacgtggttcggtactgctggctacgcaggcaggcggccctgcagaggaggctcaggtaaggggcggagcc

SEQ ID NO: 544123 - DNA, 201 bp, Homo sapiens
tcatagatcttccactatgccaagggacaaccctacattgacgaggtggggaccttcaaagagcgcatccagtgggtaggggaccctcgctggaaggatgrctccattgtcatacacaacctagactacagtgacaatggcacgttcacttgtgacgtcaaaaaccctccagacatagtgggcaagacctctcaggtcacg

SEQ ID NO: 544124 - DNA, 201 bp, Homo sapiens
gccctgctcattctcccacttcttttcccacccctcctagtgccaactaggtacggggtcgttctgggagctgtgatcgggggtgtcctcggggtggtgckgttgctgctgctgcttttctacgtggttcggtactgctggctacgcaggcaggcggccctgcagaggaggctcaggtaaggggcggagcctagctcccct

SEQ ID NO: 544125 - DNA, 201 bp, Homo sapiens
ttagcgggacttggggcctagacaagatgggaaggagaaccctgggagccgccgggcagcagtgaggggtgggatgggaacagtcaagccccagtcgctcsgtgactgatgtgtgcgcccctcccccagacgccagtgctgtatgcaatgctggaccacagcagaagcaccaaagctgtcagtgagaagaaggccaagggg

SEQ ID NO: 544126 - DNA, 201 bp, Homo sapiens
ggtgggatgggaacagtcaagccccagtcgctcggtgactgatgtgtgcgcccctcccccagacgccagtgctgtatgcaatgctggaccacagcagaagyaccaaagctgtcagtgagaagaaggccaaggggctgggggagtctcgcaaggataagaaatagcggttagcgggccgggcgggggatcgggggttagggg

SEQ ID NO: 544127 - DNA, 201 bp, Homo sapiens
tcacatgcttcccctcattcctcatagatcttccactatgccaagggacaaccctacattgacgaggtggggaccttcaaagagcgcatccagtgggtagrggaccctcgctggaaggatggctccattgtcatacacaacctagactacagtgacaatggcacgttcacttgtgacgtcaaaaaccctccagacatagtg

SEQ ID NO: 544128 - DNA, 201 bp, Homo sapiens
tgacgaggtggggaccttcaaagagcgcatccagtgggtaggggaccctcgctggaaggatggctccattgtcatacacaacctagactacagtgacaatkgcacgttcacttgtgacgtcaaaaaccctccagacatagtgggcaagacctctcaggtcacgctgtatgtctttgaaaaaggtgtgagaagggatgggga

SEQ ID NO: 544129 - DNA, 201 bp, Homo sapiens
tctcattagggtcctctcacatgcttcccctcattcctcatagatcttccactatgccaagggacaaccctacattgacgaggtggggaccttcaaagaghgcatccagtgggtaggggaccctcgctggaaggatggctccattgtcatacacaacctagactacagtgacaatggcacgttcacttgtgacgtcaaaaa

SEQ ID NO: 544130 - DNA, 201 bp, Homo sapiens
cttgcagtgctgtccccggcccaggccatcgtggtttacaccgacagggaggtccatggtgctgtgggctcccgggtgaccctgcactgctccttctggtscagtgagtgggtctcagatgacatctccttcacctggcgctaccagcccgaagggggcagagatgccatttcggtgagtgcctgggggaatcctggggtt

SEQ ID NO: 544131 - DNA, 201 bp, Homo sapiens
gcttgcagtgctgtccccggcccaggccatcgtggtttacaccgacagggaggtccatggtgctgtgggctcccgggtgaccctgcactgctccttctggyccagtgagtgggtctcagatgacatctccttcacctggcgctaccagcccgaagggggcagagatgccatttcggtgagtgcctgggggaatcctggggt

SEQ ID NO: 544132 - DNA, 201 bp, Homo sapiens
ggccatcgtggtttacaccgacagggaggtccatggtgctgtgggctcccgggtgaccctgcactgctccttctggtccagtgagtgggtctcagatgacwtctccttcacctggcgctaccagcccgaagggggcagagatgccatttcggtgagtgcctgggggaatcctggggttggataacagaaagtgcttcaaag

SEQ ID NO: 544133 - DNA, 201 bp, Homo sapiens
gaactctgggcagggcctaatctagctgaggtccagaaatacaaacctggaacttcatatggaccaagtggccacacactgaaaaacccgtatagcgactsagtgaaataaacaagagcccccagtcagaactgtgaaacagggaaattttggggtgggagtaaaagcaaatttggaaaataaacttttttttgttgaatc

SEQ ID NO: 544134 - DNA, 201 bp, Homo sapiens
gcctaaatgagggagggggataaggaagggtgggaagattatgctttcagtcttgtttcataaccatgcattcctaaaggtaaagaaaggaaataatacaraggtctaagtcagttactgggagtgagaagccctactgaggaatcccttttcatttttaggcaaatccttggggttccttcatgggcacctggcaaatgc

SEQ ID NO: 544135 - DNA, 201 bp, Homo sapiens
aaacttgatctactgcccatggtatggggagaaagggagttagaatcctgaggtgcattaggaatgatccgggcctgaccagagacatgactatctctccsactcttatcactgacagccccatgatccagacagtcagaagaaactcagaaagaagtctatcacaaagactgtacaacaagcacgaagtccaaccataat

SEQ ID NO: 544136 - DNA, 201 bp, Homo sapiens
taggattctgatctttgaacagatagctgagagtggagtgagataatattttacctcctcagggatagagagagcccaggggcgatccaaaggtatctctkggttaaatttgtagggtgtaaaccagaagttggcaattttttttctgtaaaagggcggagtgtaaaaattttaggctttgcaggccaagtggcaaagtca

SEQ ID NO: 544137 - DNA, 201 bp, Homo sapiens
ttggactgtcccctctcataggattctgatctttgaacagatagctgagagtggagtgagataatattttacctcctcagggatagagagagcccaggggygatccaaaggtatctcttggttaaatttgtagggtgtaaaccagaagttggcaattttttttctgtaaaagggcggagtgtaaaaattttaggctttgca

SEQ ID NO: 544138 - DNA, 201 bp, Homo sapiens
gtgccccgttccaaggtgagatactatcttcactcctatcaagaaagtcaaataattaaggcacagaactgggagatgtgcagtctctcacagccattatygggaaaattaaagtttaatctaattcatgttgtaatgtgagagcccctgaacttccggccagcttacccagcaggatagagttgtgtttagcacccttca

SEQ ID NO: 544139 - DNA, 201 bp, Homo sapiens
tctcaggccatccccaaacaggcagcaatatggatatggcccataggccatagtttaccaactcctgatctagaccagtgctgcccaacaaaaagagtgcracccacaaatgtaattttaaattttctagtagctacatgaaaaaattaaaacataaaatttaaatatattgaatttaacccaataaatccaaatattatt

SEQ ID NO: 544140 - DNA, 201 bp, Homo sapiens
tcaggccatccccaaacaggcagcaatatggatatggcccataggccatagtttaccaactcctgatctagaccagtgctgcccaacaaaaagagtgcgasccacaaatgtaattttaaattttctagtagctacatgaaaaaattaaaacataaaatttaaatatattgaatttaacccaataaatccaaatattatttc

SEQ ID NO: 544141 - DNA, 201 bp, Homo sapiens
aggcagcaatatggatatggcccataggccatagtttaccaactcctgatctagaccagtgctgcccaacaaaaagagtgcgacccacaaatgtaattttraattttctagtagctacatgaaaaaattaaaacataaaatttaaatatattgaatttaacccaataaatccaaatattatttcaacatttaatcagtatt

SEQ ID NO: 544142 - DNA, 201 bp, Homo sapiens
atgaaggctacactcaaattattgccaacgatcgtggtcatctactgccttctgtgccccgttccaaggtgagatactatcttcactcctatcaagaaagkcaaataattaaggcacagaactgggagatgtgcagtctctcacagccattatcgggaaaattaaagtttaatctaattcatgttgtaatgtgagagcccc

SEQ ID NO: 544143 - DNA, 201 bp, Homo sapiens
cggccttctgcagttgccaagcaacgagtgtaaacagcacaagatcatggccactaactacagtgccaaccaggtaagttcccattctccatttctttaaygtttacttttgtttttcagattctatctttggactgtcccctctcataggattctgatctttgaacagatagctgagagtggagtgagataatattttac

SEQ ID NO: 544144 - DNA, 201 bp, Homo sapiens
ctcaattccccagatgaactccaaagctcacacccctctgcaggtcatactccaggtccccaaagaccagccaaatcctaagagcccacctggaagtccaygtatgctagaactctgggcagggcctaatctagctgaggtccagaaatacaaacctggaacttcatatggaccaagtggccacacactgaaaaacccgta

SEQ ID NO: 544145 - DNA, 201 bp, Homo sapiens
tttaacgtttacttttgtttttcagattctatctttggactgtcccctctcataggattctgatctttgaacagatagctgagagtggagtgagataataytttacctcctcagggatagagagagcccaggggcgatccaaaggtatctcttggttaaatttgtagggtgtaaaccagaagttggcaattttttttctgt

SEQ ID NO: 544146 - DNA, 201 bp, Homo sapiens
ctaagagcccacctggaagtccacgtatgctagaactctgggcagggcctaatctagctgaggtccagaaatacaaacctggaacttcatatggaccaagkggccacacactgaaaaacccgtatagcgactcagtgaaataaacaagagcccccagtcagaactgtgaaacagggaaattttggggtgggagtaaaagca

SEQ ID NO: 544147 - DNA, 201 bp, Homo sapiens
gacccagagagtgtggggttttgtgttattccttttggagtttgttgtatgtgtttgtttttaaattatctttgctggataaaactgtgatatttgctaawtaagtacttttgtttctccttagacttgtaagccactagaaagatcattactaatggcgggagccgttgcttcttcaactttcttaggagtaggtatttt

SEQ ID NO: 544148 - DNA, 201 bp, Homo sapiens
actaggggcagggagggggcgggccgggccgcgtggagtcgggctgacccgggtgaccttggccaggccacgtgggcgccccctgtctccgtttcctcctmtcggagttgtgccgggaacgcgcaccaccggccttcaccccttagggcgcgggaggggacgcaggggaaatcgaagctgccagatgcccacgaccacaac

SEQ ID NO: 544149 - DNA, 201 bp, Homo sapiens
cccagaggtgtctgtgctgacaaggcgacttcagattccatactgagatcgttcccaggctggcgtctctggggtttttaaggctggctggagaagacagsgggagggtgccccgtctgacacccctggggttgctgagggaacggttggagtggggatcggcctgcgaaaggatactgtgaaatcactaattaactaata

SEQ ID NO: 544150 - DNA, 201 bp, Homo sapiens
aatattaacatttcaacatgtaatcagtaaaaaacattgctgagatattttactcgcttttttggtacagagtgttccaaatccggcgtctgttaccttcrcagcacatctgggttcagccgcatgtggcgaattggagagcagggctttagggggttctctttgaggcctctcctaaagtggggtccagccctgtttttt

SEQ ID NO: 544151 - DNA, 201 bp, Homo sapiens
tggcgaattggagagcagggctttagggggttctctttgaggcctctcctaaagtggggtccagccctgttttttttttaggtggggaaattgagaagggrcggtgagctcaggttgctccagcagagccaaggcttaaagccagaaccactacaaagtttagagtttgctggagcaaacctctttttccccagtgtgacc

SEQ ID NO: 544152 - DNA, 201 bp, Homo sapiens
tgaccttggccaggccacgtgggcgccccctgtctccgtttcctcctctcggagttgtgccgggaacgcgcaccaccggccttcaccccttagggcgcggsaggggacgcaggggaaatcgaagctgccagatgcccacgaccacaacgtcaccctccagattgccctctcggaggggcccagtccgcgcaggtggctgct

SEQ ID NO: 544153 - DNA, 201 bp, Homo sapiens
gtgccactataccccagccctgggtgacagagcaagaccttgtctcttaaaaaaaatttaaaatgaaacaaagctattcttttttctcctttaagatacargaagcttggaagcggagtcttgtaagtttcagccccttcctaatttttagtgtcctataataacaaaaccagacatccagctaaccttgcatctctcctt

SEQ ID NO: 544154 - DNA, 201 bp, Homo sapiens
taatggtgaaagatggggagatgttggcatcagacaagcctgggccctcatcctggctcaaacctttaatggctctgtgactctcaacagcttccataccyctctctaagcccctgttgactccttagatgaacagggagaggacctccacgttgcaggaatttgaaaaatacctgaagagcactggcagtggtctgactt

SEQ ID NO: 544155 - DNA, 201 bp, Homo sapiens
ggcgtgagttttaggtgaatttatgtggttcctgcttgaaaaccttcccctctccaggttcggtttagagaactttgccacaggtcttctggggaccccaraggtgtctgtgctgacaaggcgacttcagattccatactgagatcgttcccaggctggcgtctctggggtttttaaggctggctggagaagacagtggga

SEQ ID NO: 544156 - DNA, 201 bp, Homo sapiens
agcctatgcagtagacagggcccagtacatggagtctggaacccacatatgcccactgctaccacccagcgcagtccaacagcatcccctgctggcactgmctggcccatctcctgcctactccctccggtccacgttccagcctgctcttctaaaccacacctgctgaacaactgtttttttttcttttgagacggagtc

SEQ ID NO: 544157 - DNA, 201 bp, Homo sapiens
tctcttcctgccagcgttcctgcctttcatggcacccacggtgagcaagcagacatttgccgttaggagactaggggcttgggaagatggccactctcctyctaacctcagctgtgtccctccagctccggacccctgtcacatgactgcctgatagatggttgtggatccccactgataacccatggctgctgttcatac

SEQ ID NO: 544158 - DNA, 201 bp, Homo sapiens
gctaatttttgtattttttggtagagacagggtttcaccatgttggccaggctggtctcaaactactgacctcaagcgatctacccgcctcggcctcccaragtgcagggattacaggcgtgagccaccgtgcccaacctaagctgttttcttttcatttttgctaggctgttagagaaacgctagcatccagaatagtgc

SEQ ID NO: 544159 - DNA, 201 bp, Homo sapiens
cagagaaagaggcttgcagggggcagacacccaaagagatgttcctttgctggaacaagactcacccccgtcttgggtgttctttacttctttacatctayagtgcaagccagtggaatgaatgtctacatgtcccgaagtcttgaatccattaaggggattgcggtcatggacaaggaaggcaatgtcctgggtcattcc

SEQ ID NO: 544160 - DNA, 201 bp, Homo sapiens
cccccgtcttgggtgttctttacttctttacatctacagtgcaagccagtggaatgaatgtctacatgtcccgaagtcttgaatccattaaggggattgcrgtcatggacaaggaaggcaatgtcctgggtcattccagaattgctgggacaaaggtaagagacaggatgaagctatagctgcttgccttttgggcaacga

SEQ ID NO: 544161 - DNA, 201 bp, Homo sapiens
cacaccctcccagtcaggcatccgggcctctggaaggcccacagcttggcaaggtcatcccttttctgaacaccaagtatgcgcagagcacggtagaagcrgccagtgagttaggatgagctccctgcacaaacccctggccaccaagtcctcctctgacacagcccctcacctgggacctggcattgtccctgtgaggct

SEQ ID NO: 544162 - DNA, 201 bp, Homo sapiens
gatcaagtccgtgattttacctcaggtagccattcttcctgtttcacgattactaaattctgttatgcttgaaacgaaaatgcgatccatttgcccctctyggcaggttttcctctgtgcctacatggcagcgttcaacagcatcaatggaaacagaagttacgtgagtattatgagacccagagagtgtggggttttgtg

SEQ ID NO: 544163 - DNA, 201 bp, Homo sapiens
gagccactgttctattggctattaatgctgtcattgttatatactgcccagaggaccagctttgcaaaactgggttagttttttaaatgtagttagaattmtgtcccataaaccagacagcaagtttcctcctacacagtggatatttgtggggattccctgcagctgattcctggagcccagtggcaaaccccagaattc

SEQ ID NO: 544164 - DNA, 201 bp, Homo sapiens
gaggcaggagaattgcttgaacttgaacccgggagccggaggttgcagtgagctgagatcatgccattgcgctccagcctgggcaacaagagtgaaactcygtgtccaaaaaaaaaaaaaaaaagaaaagaaaactctgcctgccttgctttaattatttctcccccagcaggatttctttctttttttttttttttgaaa

SEQ ID NO: 544165 - DNA, 201 bp, Homo sapiens
gctgggattgcaggcatgcgccaccatgcccggctaattttgtatttttagtagagacgggggtttctccatgttggtcaggctggtcttgaactcccgamctcaggccctgcccacgtgtcccttttaaaagcagttgaaataacagaatctacatatattattgtgtttattccttctaaatgagcttgtcagattgga

SEQ ID NO: 544166 - DNA, 201 bp, Homo sapiens
cagcccctgtacccaccaccatcctctcctgccccagctccttgggggctcaattctccctctcccctggaaagttctttgctactgcaagttctccttcyacagcaacacttgtaactctgttccactgtcttcttaaaaggtatttttgtcaatgacgccactgaaagggatcaagtccgtgattttacctcaggtagc

SEQ ID NO: 544167 - DNA, 201 bp, Homo sapiens
atcgtcttgctcctgtactaagtttcttttttgagacagagtttcactccgtcgcccaatctggagtgcagtggcgtgatcttggctcactgcaaaatccrcctctcaggttcaagtgattctcatttctcagtctcctaagtagctggtactacaggtgcataacaccacaccgggctaatttttgtattttttggtaga

SEQ ID NO: 544168 - DNA, 201 bp, Homo sapiens
ggggtttcaccatgttggccaggctggtcaactcctggcctcaagtgatcctcccacctcagcctcccaaagtgctgggattataggagtgagccactgcrcccagctaacaaatgtgtacatcttagctaccctgctggactaaggccctggagacacggcctgctgttcgaccctggatgtccttagagctgctagttt

SEQ ID NO: 544169 - DNA, 201 bp, Homo sapiens
aaattgttatatgaattgtgtgttataaatatgttatataatttgtgtattgctttggatgtcaagacactgtaatggtgaaagatggggagatgttggcrtcagacaagcctgggccctcatcctggctcaaacctttaatggctctgtgactctcaacagcttccatacccctctctaagcccctgttgactccttaga

SEQ ID NO: 544170 - DNA, 201 bp, Homo sapiens
tcctgcttgaaaaccttcccctctccaggttcggtttagagaactttgccacaggtcttctggggaccccagaggtgtctgtgctgacaaggcgacttcarattccatactgagatcgttcccaggctggcgtctctggggtttttaaggctggctggagaagacagtgggagggtgccccgtctgacacccctggggttg

SEQ ID NO: 544171 - DNA, 201 bp, Homo sapiens
ccctggggttgctgagggaacggttggagtggggatcggcctgcgaaaggatactgtgaaatcactaattaactaataaacctgtctcaagttgaggattygaagaaagaacacagagtccaccgtgcccaggacacaggtgttaaatggataggccgtctcaagcggaacacgtacccctggggcgctgtttacgccctc

SEQ ID NO: 544172 - DNA, 201 bp, Homo sapiens
ttcaggtgggtagtccccttctggccccctctgcctgggcaactgtgatcactgacacctcctctcttctcttcctgccagcgttcctgcctttcatggcrcccacggtgagcaagcagacatttgccgttaggagactaggggcttgggaagatggccactctcctcctaacctcagctgtgtccctccagctccggacc

SEQ ID NO: 544173 - DNA, 201 bp, Homo sapiens
aacctcagctgtgtccctccagctccggacccctgtcacatgactgcctgatagatggttgtggatccccactgataacccatggctgctgttcatacgtmcttgtccccactccctccccctccccacaccctcccagtcaggcatccgggcctctggaaggcccacagcttggcaaggtcatcccttttctgaacacca

SEQ ID NO: 544174 - DNA, 201 bp, Homo sapiens; identical to SEQ ID NO: 370775

SEQ ID NO: 544175 - DNA, 201 bp, Homo sapiens
accctgtaattccaatggtttgggaggatgacttgatgccaagactgcaagaccagcctgggccgtatagcaagaccccatctctactaaaaattaaacamctagttgggaatggtggcgtgagcctgtagtttcagctattcaggagggtgaggtgggaggatcgtttgaacccagtagttcgaggctgttctgcagtga

SEQ ID NO: 544176 - DNA, 201 bp, Homo sapiens
cacttgaactcgggaggtggaggttacagtgagccgagatcactctactgcactccagcctgggcaacagagcgagactccatcttaaaaaaaaaaaattwcagacgcaaagaaactttatatgatattataaaagacagtcctttccattttggtttatttcagtattttagttgcaacctgggattaaattggagtttc

SEQ ID NO: 544177 - DNA, 201 bp, Homo sapiens
aattggtctaacaaagcttctgacccagaatgccctcctgaaaataaatgccagttccttcctttcagttctttgatcgtctaaagctctttgggatgccygcaaagcaccagccagatttcatctacctgcggcatgtgccgctgcgcaaagtgcacctcttcaccctcatccagttgacctgtctcgtcctgctctggg

SEQ ID NO: 544178 - DNA, 201 bp, Homo sapiens
ggagccattgctgggcctcttccctgctgttcctcaagaaaaggaaactgccagtgtgatgcgcactccagagcattttccttttagaacagagaaggagyggggaatgcatctgactaggtacccagtcttgtttttgtttttcagagttattctggatatttttgcttgcccattaattaaaaaaaccctgttcataat

SEQ ID NO: 544179 - DNA, 201 bp, Homo sapiens
gggagagttttggacagggtaatgatcaatcagattttgcatattagaaagataatgatggcagcaatatggagggtgagttgatgggagaaatgcattargctattgcagtagttcaggtgagatcacctgcactgtgggcagtgtcagtaagggatggataatttttcttctgataactttaagtgataagagagacag

SEQ ID NO: 544180 - DNA, 201 bp, Homo sapiens
aagaccagtgctcccagtatttggaggtgctgctcaggggcgacagcgcaggagcatggtgttcacctctttctgcttggtgacccgaggctgcccaggaktatggctgaggggaactggggctctgctggagccacacagagtgatgttgcatctggagggaagggtggagtggagtccctgtcaagggagccattgctg

SEQ ID NO: 544181 - DNA, 201 bp, Homo sapiens
agacctccctatgttgccaaggctggtctgaaactcctgggctcaagtaatctgcccaccttggcctcccaaagagctggaatcataggtgtgagccaccrtgcccggcttcaacatagatttcaatataattttgaagagacacattcaaaccatagcggggtgtgtctctaaagcataggctccttgctctccaggaag

SEQ ID NO: 544182 - DNA, 201 bp, Homo sapiens
gctccaggccccacgtgcagcaatatcaggtctgtggccctctgaggcttcaccctctcccccagatccttgaggttactagtgttgaggggaacttggckctggctggcagggctcattgcagcaggggactgcagctaatgaggaggagccaggctaggccaggcagttctccctgcagaagccgggcaacgtttgagg

SEQ ID NO: 544183 - DNA, 201 bp, Homo sapiens
acagtagcaagtgtggtggtagccacagtggcagaggcagcggtagcagcagctgtagttgcatttacttctgcgtaagtggggttaggaccagagagggmaaagagctagtctttcactctcaggaactttttgtctaatgagggagatcaccaactgcaaataaaattatcccgagggagagattttggcctggtataa

SEQ ID NO: 544184 - DNA, 201 bp, Homo sapiens
tcccaaagcagctgaaagcagtgcacaggatagaaatgaaacaagggtacatttaggtgggtggctgctgcttcccatggcctcttgtgtcaactcccaargaagcacccctcagagtctgccgatgttaccattcagtgggggagaaagatgtttgccagactggagcagcagataacggcaggttcactgcctttatac

SEQ ID NO: 544185 - DNA, 201 bp, Homo sapiens
cagttctgtagtcatgggtaagttgtttagcctgttttcatttttttttaaaggacaattatatagagtctgttgtgaaatttagattaggtaataggtayaaactgctcagaacagtgctcagaacataataaatgctctatgttcaacaagaacaacagcaacaaactcagaagcactcctcgctaccgccggggagac

SEQ ID NO: 544186 - DNA, 201 bp, Homo sapiens
cgggtgtcttctgggggtgcttgtcacttatcctgttcttcacagcgttatcccatggccagatgctatgggagaggcatgtctcagtatgggactggggrtccctgatagaatcccccccagtgaaaggagagactctgagaatgactgcatgaagtcccccagttagctggcagttctgtagtcatgggtaagttgttt

SEQ ID NO: 544187 - DNA, 201 bp, Homo sapiens
gtaatgatcaatcagattttgcatattagaaagataatgatggcagcaatatggagggtgagttgatgggagaaatgcattaggctattgcagtagttcargtgagatcacctgcactgtgggcagtgtcagtaagggatggataatttttcttctgataactttaagtgataagagagacaggaggtgatagatagaggg

SEQ ID NO: 544188 - DNA, 201 bp, Homo sapiens
agactctgtctcaaaaaaaagtaaataaaaaatttaaaaacgatatttaaggtggtggttcccaagttgtcagatgtttcttttggactttcaggtagacyttcatttcatgaaaaaaattcctactggggccgaggcctccaatgtcctggttggagaggtggatattttggaccgtcccattgttgcctttgtgaggct

SEQ ID NO: 544189 - DNA, 201 bp, Homo sapiens
acaaagtatagagaaagaaataaggggacccggggaaccagcgttcagcatatggaggagcccgccagcctctgagttcccttagtatttattgatcatcygtgggtgtttctcaaagagggggatgtgtcagggtcacaagacaattgtggggagagggtcagcagacaaacacgtgaacaaaggtctttgcatcataga

SEQ ID NO: 544190 - DNA, 201 bp, Homo sapiens
atctgtgggtgtttctcaaagagggggatgtgtcagggtcacaagacaattgtggggagagggtcagcagacaaacacgtgaacaaaggtctttgcatcayagacaatgtaaaggattaagtgctgtgcttttagatatgcatacacataaacatctcaatgctttacaaagcagttttgctgcccgcaggtcccacctcc

SEQ ID NO: 544191 - DNA, 201 bp, Homo sapiens
acgtgaacaaaggtctttgcatcatagacaatgtaaaggattaagtgctgtgcttttagatatgcatacacataaacatctcaatgctttacaaagcagtwttgctgcccgcaggtcccacctccagccctaaggcggtttttccctatctcagtagatggagcatacaatcgggttttataccgagacattccattgccc

SEQ ID NO: 544192 - DNA, 201 bp, Homo sapiens
aggtctttgcatcatagacaatgtaaaggattaagtgctgtgcttttagatatgcatacacataaacatctcaatgctttacaaagcagttttgctgcccrcaggtcccacctccagccctaaggcggtttttccctatctcagtagatggagcatacaatcgggttttataccgagacattccattgcccagggacaggc

SEQ ID NO: 544193 - DNA, 201 bp, Homo sapiens
agggacaggcaggagacagatgccttcctcttgtctcaactgcaagaggcattccttcctcttttactaatcctcctcagcacagaccctttacgggtgtygggctgggggacggtcaggtctttcccttcccacgaggccatatttcagactatcacatggggagaaaccttggacaatacctggctttcctaggcagag

SEQ ID NO: 544194 - DNA, 201 bp, Homo sapiens
gggacaggcaggagacagatgccttcctcttgtctcaactgcaagaggcattccttcctcttttactaatcctcctcagcacagaccctttacgggtgtcrggctgggggacggtcaggtctttcccttcccacgaggccatatttcagactatcacatggggagaaaccttggacaatacctggctttcctaggcagagg

SEQ ID NO: 544195 - DNA, 201 bp, Homo sapiens
tcagtgatggaaaatggatatattgatgccatttcaaaataagatttaaaatgactctgtatgtgagcttgtagtgtgaatggtatcactgtgctttctgyatattttcaaatactgaattgagtcactgaagaataggagttagttaaggaatcatgtgtcaatggagctgggcacctgaattattaaagtagtatctgt

SEQ ID NO: 544196 - DNA, 201 bp, Homo sapiens
gtctcggttcttgtgtcacttcctttggaaagccttctaggactctctctggatgaggttaggtgttcctgctatgtaatatcacagtattgagctctgaccctcccttccccacattacagcctttatcatacttcattattattggttgatctattgtcttttctgctaggctgtttattccaaaagggcagaggctct

SEQ ID NO: 544197 - DNA, 201 bp, Homo sapiens
gaatatcaaaacaataataaaaatgaatctgggctgggtgtggtggctcacacctgtaatctcagcactttgggacgccgaggcaggtagatcacctgagrtcaggagtttgagaccagcctggccaacatggtgaaaccccatctctactaaaaatacaaaaattagctgggcgtggtggtgggtgcctataatcccagc

SEQ ID NO: 544198 - DNA, 201 bp, Homo sapiens
ggaacttaggtcatatctaatgccaaagccccatttttctctttctaggcaaggcttagttaggagtcaggtactatggaacaggaagagaaattatggggtgtgtgtgtgtgtgtgtgtgtgtgtgtgtgtgtgtgtgtttcggtaaagtcaataaactgcatcaagtcagtaagtgtatttgaaagctacaaacacggg

SEQ ID NO: 544199 - DNA, 201 bp, Homo sapiens
tccccaagagaagcacaaccagttcttgagaaaattgtttcctagtcttgccacttaggctattttagacatgtatttggatatagggagaaaaacagccrtgttggcaggagagtacagagacttccagggtggtctggcttgatgtcatggctccagttattcattaattattcaacagacaatttttttttggcatgt

SEQ ID NO: 544200 - DNA, 201 bp, Homo sapiens
agaggttacctggaggaaaggcatgttaggtagaggcatgaacaagtacaaataccccgaggtgggagtgagcttggcatgtttaaggaaacagcaacgcrgtctgtgtgtttggagcagagtgggcaagcaggagagcaataagagctggggtgggagatgtgatgatgccaattgtgtggccctcataggccaagaagg

SEQ ID NO: 544201 - DNA, 201 bp, Homo sapiens
ctaatcagttgtgctttgtgttataggaaagctgttgatttttgcataatattcttttgcctagtcactcgcttctctgaattttcttactatttgcagtygttttcagttgattctgttaggttttctaggtttacaataatataatttaatctctttctttttgatatttttaaagagatggggtcttgctgtgtttcc

SEQ ID NO: 544202 - DNA, 201 bp, Homo sapiens
tggtcagggtagttgactcctaggcatttatttgtccctttgcaattaatctaagcaccatatggtgattccactctccttgccagtgatgggcaaagacrggtgtcttctgggggtgcttgtcacttatcctgttcttcacagcgttatcccatggccagatgctatgggagaggcatgtctcagtatgggactgggggt

SEQ ID NO: 544203 - DNA, 201 bp, Homo sapiens
tggggccgaggcctccaatgtcctggttggagaggtggatattttggaccgtcccattgttgcctttgtgaggctgtctccagctgttcttctctcaggcytaacagaagtgccaatcccaacaaggtaaaggcaaagataaaactcatgcattctatccaaaattcaaatttatgtagtgctggtagaagaaaccactta

SEQ ID NO: 544204 - DNA, 201 bp, Homo sapiens
aataatctgtacctttggcattttgccagcttaggactagagctgtcctaattagtacccactggcctggggaatttgcctgtttgatggaggtcttttgkttttttttttttttttttttgagaatttgtgtttttgaaaatgtctctatttcactttcattctctcccaccttttctggccctttatttcccaactttt

SEQ ID NO: 544205 - DNA, 201 bp, Homo sapiens
gaggatcacttgcatccaggagtttgaggcaagatcttatcaacttggacgacagagtgagaccccctgtctcaaaaaaaaaaagagaaagaattgtcttytacataaccacattaccatcatcacacatgaaaattaaccatggtgtaagtcttttcatttttttatatttgagacagggtctccctttgtcacccagtg

SEQ ID NO: 544206 - DNA, 201 bp, Homo sapiens
tttcatttttttatatttgagacagggtctccctttgtcacccagtgcagtggcacgatcacagctcgctgcagcctcgacctcccttgctcaagtgaccytcctgcctcagccttctgagtagctgagactacaagtgtgcaacaccacggctggctagtttttgaattttttttttttttgagatggagtcttgctctg

SEQ ID NO: 544207 - DNA, 201 bp, Homo sapiens
ataatgaataaaaccattttttaaggcctttttgacttagcttctccagccttgtctattggcattcacccttcacactgtattatccactcatatctctyagcaccttgatccaccaagcactctcacctctaagtgtcacccatgttggcccctctgcctcatctgcttaactcccagtccctgcctgaagtcatggct

SEQ ID NO: 544208 - DNA, 201 bp, Homo sapiens
tcagagagcttgttcttgactcgtctcctcaggtgaatctttccccacctcctcagagaagctctccctatcccatgccagttactcttgatcacataacyctttatttacttaacagtagtgattataactagcggttatcttgtttgatgacttgtttactttctcccacttgattgtaaggcttatgaggccaaggac

SEQ ID NO: 544209 - DNA, 201 bp, Homo sapiens
gcatgttcatgcatttctttcacgttagaatcaaatataacagaaccttttctcagccttcatgctgcttatggggttgattggccaggtggagaactccrgatgtcctgatgagccacactggcattctctcctagtgtctggcagcctctttcatagatctgtggttgggaatgaagggttaatacttaaaaccttttt

SEQ ID NO: 544210 - DNA, 201 bp, Homo sapiens
ggctgactccataaagtgttcagaaattattttattaatttatagttataccatccatatgagcctcagatctttccccgccttttaataactgctagacwgacagatgtcttccctttctatggcttcttagaaatccatttcacataaatcttttgtctgttgctcacagacactcctgtcctcctgtgtctaggggct

SEQ ID NO: 544211 - DNA, 201 bp, Homo sapiens
gtatttgaaggcagggtgaagtagactctaagaagatgggaaaggagacaaaattgaaatggtactctgagttctgtatgatctgaccctccaagccaggkttaagacagatcttaaacctccctgatattgactaaggcagggatgccataagtaacaaagaaggaaatatgactagagtgttcctaggccggaagctcc

SEQ ID NO: 544212 - DNA, 201 bp, Homo sapiens
ttgtgtttcttggagatgcaaaactgctttatgcttgtcatgttgcacaaccttggagcaagacttggataacatcttacggaatgttatccttgttggakggagaagtatttgaaggcagggtgaagtagactctaagaagatgggaaaggagacaaaattgaaatggtactctgagttctgtatgatctgaccctccaa

SEQ ID NO: 544213 - DNA, 201 bp, Homo sapiens
ggctttgtgagaggtggtcacttataatcaattccacctgagggtttgggagaccattatattggatctcaacagttataagatcttggtaatggtgtctratgtccccaagaaaatcccatattgccaggatcatcatattcttattcacaaaccgcaagtatcttaactcacaaattcaaatggagtttgaaggagttc

SEQ ID NO: 544214 - DNA, 201 bp, Homo sapiens
gaacttaggtcatatctaatgccaaagccccatttttctctttctaggcaaggcttagttaggagtcaggtactatggaacaggaagagaaattatggggtgtgtgtgtgtgtgtgtgtgtgtgtgtgtgtgtgtgtgtttcggtaaagtcaataaactgcatcaagtcagtaagtgtatttgaaagctacaaacacgggc

SEQ ID NO: 544215 - DNA, 201 bp, Homo sapiens
aacttaggtcatatctaatgccaaagccccatttttctctttctaggcaaggcttagttaggagtcaggtactatggaacaggaagagaaattatggggtgtgtgtgtgtgtgtgtgtgtgtgtgtgtgtgtgtgtgtttcggtaaagtcaataaactgcatcaagtcagtaagtgtatttgaaagctacaaacacgggca

SEQ ID NO: 544216 - DNA, 201 bp, Homo sapiens
acttaggtcatatctaatgccaaagccccatttttctctttctaggcaaggcttagttaggagtcaggtactatggaacaggaagagaaattatggggtgtgtgtgtgtgtgtgtgtgtgtgtgtgtgtgtgtgtgtttcggtaaagtcaataaactgcatcaagtcagtaagtgtatttgaaagctacaaacacgggcat

SEQ ID NO: 544217 - DNA, 201 bp, Homo sapiens
ctggcctgtttctaaagccctccagggaagggctccttaagtcaatgctccagagcctagtgaccctctacgcgggtaagtcctctcttgcatcaaacttwaactcatatccctgtgtgcctcctgccccagaaaacttgaatgtgaagggcagtgttgaaagggaaaggaaatcccaagtacagaaagaagcatccatgc

SEQ ID NO: 544218 - DNA, 201 bp, Homo sapiens
tctttctgtttgcttgtgccctcttcaatttctttcatcagtgttttgtagttttcttgcagagatctcttacctccttggttaaatttattcctgggtcttttttttttttgtagctattgtaagtgggattgctttctttgcttttttttcccagctagttcattattggcatatagaaatgctgttgatttttatagg

SEQ ID NO: 544219 - DNA, 201 bp, Homo sapiens
catgcttccttgagaagtctatgaacacatccttacaattatatgcaaaattttgggctttgtttacttatctgaaaaagagaatccacagattttataaygtctccagggagttcaagacccaccgctttccccaaagtttaagaaccactggtattatagaagagaaagaataggtctaaaacaaaatctggaaggatg

SEQ ID NO: 544220 - DNA, 201 bp, Homo sapiens
gaaagtcctcaggcattcatagttatctcttcatgctacctctgggtcccctgtgccaagggggtttcagcaagttgtttcttttcttatctaccatcctrcaaacccaagaatttctgttagtcattggtgtctttaactctttgggaaatggtttcagaacaaggtcatagatttcctaaggagttgctgtatttcatg

SEQ ID NO: 544221 - DNA, 201 bp, Homo sapiens
gacaactgcctggaaatacaaataaatacaaaacttaaagagaaaataaaatacaaatagttttaaaaactcattttggctacaaaaccctatttttaccycatttccaatatttactgtttctattctatttatacccatttctgcctggtggtttcatctaaacaagagggaaaacaggaacacacctgtgacatactc

SEQ ID NO: 544222 - DNA, 201 bp, Homo sapiens
aggcaggagaatcgcttgaactggataggcggaggttgcagtgatccaagaacacgccattgcactccagcctgggcaacaagagtgaaacttcgtctccaaaaaaaaaaaaaaaacaaaaaaaaaaacaaaaaaaaaaacaaaaaaaacccaaaaggtacctttctttttcttgaggagagagggttgcttcgattttag

SEQ ID NO: 544223 - DNA, 201 bp, Homo sapiens
ctgtttttttttgttttgttttgtttttttgctattgatagtggggcacaagagtgctctggtttccctaattttcctatacaatcttttcttttttcctyttatatttcaagtagcagctcatgggactatggccagcccctttttttcttaactgcaagaataagatcataattacattaggtagtaatggcaggaatg

SEQ ID NO: 544224 - DNA, 201 bp, Homo sapiens
gaatgtatatgagacaatttctttttttagttttcgtatccttgcgcatatcctgtgaggcaaatctgtatcataactgtgccagagcactatttagaagsaaaatacaatcagaattagggataaactgggttccagtgctcgtttagatgaaatgaattaaccacatttctgactccttgtctcttaatgccatccatc

SEQ ID NO: 544225 - DNA, 201 bp, Homo sapiens
aggctgaggtaggagaattgtttgagcccaggagttcaaggctgcagtgagctatgattgtatcactgcaatatagcctgggtgacccattctctctctgtttttttttttttttaaaagacctaggctcagtcctagctccgccttttatgacatttgtgaccctgggccatcattacttaatgttctctgagtgtcagt

SEQ ID NO: 544226 - DNA, 201 bp, Homo sapiens
agagaaatttcacaactgcaatgaataaaacatccaaatgcttgtaagattttgctgtgagagctttttctgctcaaaattatgatttcttatttaatatmtctctttaaaagaagaaacatatgcacatttaaccttctgaaatcttaattggatttcaatctgacagttgttttgcccaaagagaggtaataaaagggg

SEQ ID NO: 544227 - DNA, 201 bp, Homo sapiens
cttggggttgtcaaactgtaactatggactttctacttaaatcacacaagatcatctccttaaaagcaatcaagtgcccaagatctgtcctttcacagtasagaaatttcacaactgcaatgaataaaacatccaaatgcttgtaagattttgctgtgagagctttttctgctcaaaattatgatttcttatttaatatct

SEQ ID NO: 544228 - DNA, 201 bp, Homo sapiens
tcatctcacccactctcctctaccctgagggaaacaacggagtctcccactccctccctacctctttgtttcttatctgtgaagtgcagttaatgataccyggggttgttaatgaagctcaagtgagataacacatgaaagtgtgagagttgggtcttctaaattacatctgctgctctactttcctgcatattcacattt

SEQ ID NO: 544229 - DNA, 201 bp, Homo sapiens
tgtcatcacatttttctctgactctagtcttctgtctctctctttcacgttaaggatccttgttattacactgagattacataatggttttcataatttargatgatctccttattgtaagatcagctgattagcaaccttacctccgtctccaaccttaattcctctttgccattataagggaacatattcacaaactct

SEQ ID NO: 544230 - DNA, 201 bp, Homo sapiens
tggggcagagtgagggagacctgcccttcagggggaggtgctggctccacttagctaggggagtgtgcaagggatgccgtgaacttgccaaggaggttagwagggaggccagctggtcaacctccctctgtcctatcactacctctcatctcacccactctcctctaccctgagggaaacaacggagtctcccactccctc

SEQ ID NO: 544231 - DNA, 201 bp, Homo sapiens
tttgcagatgagccaccacagaatagtgactgcaatttctgcctccgctggtacaggcaactttcgaaaaatggttttttaggctgggagtggtggctcaygcctgtaatcccagcactttgggaggctgaggtgggagatcacttgaagccgggactttgagttcagcctgatacagcgagaccctgtctctacaaaaaa

SEQ ID NO: 544232 - DNA, 201 bp, Homo sapiens
gagctcaagtgatccacccacctcagcctcccaaagtgctaggattaaatccgtgagccactgcgttctgctcgagtatccttatttttacaagtgagaaktttataagcacagcagttccctgtaactgcagtctgagcccttagccactactttttgcaagtctgtctctccatttattcaagtttctagtttatgatc

SEQ ID NO: 544233 - DNA, 201 bp, Homo sapiens
gctttttactttaatatagtcccatttgtctatttttgtttttgttgcctatgcttttgaagtcttagccatgaaatattttgcctagatccatgtcctgmagcatttcctgtatgttttcttctagtagtatttatagttcctggtcttacatttaagcctttaattcatgttgagttaatttttgtatatggtaaaaga

SEQ ID NO: 544234 - DNA, 201 bp, Homo sapiens
ggcgtggtggtgggtgcctataatcccagctacttgggaggctgaggcaggagaatcgcttgaacccgggaggcggaggatgtagtaagctgagatggtgycactgcattccagcttgggtgacagagcgagactccacctcaaaaaaaaaaaaaaaaagaatttgcatagcataaattggctcaggtgtgatggggtcag

SEQ ID NO: 544235 - DNA, 201 bp, Homo sapiens
aggcggcagagggaggtgtggcctgttttttatcagctttctttgattgagaggcttaattcaggaaggaccttcattagtaattccatccagtgtttccracctttaagatcaagaaaatttccctctcaacgtgggaaagctgattaaaattttttttttcatatatcttgcctttccttccatcctttgtggagataa

SEQ ID NO: 544236 - DNA, 201 bp, Homo sapiens
ttcagaaacatttctcttggaggaagcttgggggaatgggattgaaatcagaatacctgattttaaaatccgaacctataccttaaaagctctgtggtccygggcaagtcaacttcacctctctgggtttcagatacttcattttttttttttctttaagtgggacgaatacaatctgtcatatcctccttctggggtttt

SEQ ID NO: 544237 - DNA, 201 bp, Homo sapiens
gactttccctagctaattcaaacttctccatttccattgtgagtcaatttttaatttggcctaatatcctccccctgctgtttttttttgttttgttttgtttttttgctattgatagtggggcacaagagtgctctggtttccctaattttcctatacaatcttttcttttttccttttatatttcaagtagcagctcat

SEQ ID NO: 544238 - DNA, 201 bp, Homo sapiens
catagtcctgtggatttaagcaaggtgagcagagtggtgggaagttggcttcaaggcctaaggttccttttagtggaatccagagtttaattgctggaatytgggtaaggtttagtgtttcaagactctttccctaagactagagccctttctgcataaaagggggcccatctctgcatgtcttttcccttctccttcagc

SEQ ID NO: 544239 - DNA, 201 bp, Homo sapiens
cttaataccatgtgagccagggacgcagtgtccaaggcccatggcctggagacctggatgctggctgtggaccttgggcaagtccctcatcttccctgtgcctcacctcatctgcacaatgatgtgatgacacctgccatctctttccaattatgcttcaaggatgcagtgagatttgatatgatgacccaagagtagaag

SEQ ID NO: 544240 - DNA, 201 bp, Homo sapiens
tactaggaatatatctctattttcccatcaagtatgatgctggctttgattcttctggttagagtcatcctgaatgcatctggtgttgaaattaatctctytttttttttttgagatggagttttcactcttgttgcccaggctggagtgcagtggcgcgatcttcgctcactgcaatctctgcctccctggttcaagcaa

SEQ ID NO: 544241 - DNA, 201 bp, Homo sapiens
ttaataccatgtgagccagggacgcagtgtccaaggcccatggcctggagacctggatgctggctgtggaccttgggcaagtccctcatcttccctgtgcctcacctcatctgcacaatgatgtgatgacacctgccatctctttccaattatgcttcaaggatgcagtgagatttgatatgatgacccaagagtagaagg

SEQ ID NO: 544242 - DNA, 201 bp, Homo sapiens
ggtggttcatgcctgtaatcccagtactttgggaggccgaggcgggcggatcacaaggttaggaattcgagaccagcctggccaacatggtgaaaccccgyctctactaaaaatacaagaaattagctgggcgtagtggcgggcgtctgtaatcccagctactcgggaggctgaggccggagaatcgcttgaactcgggag

SEQ ID NO: 544243 - DNA, 201 bp, Homo sapiens
taataccatgtgagccagggacgcagtgtccaaggcccatggcctggagacctggatgctggctgtggaccttgggcaagtccctcatcttccctgtgcctcacctcatctgcacaatgatgtgatgacacctgccatctctttccaattatgcttcaaggatgcagtgagatttgatatgatgacccaagagtagaaggt

SEQ ID NO: 544244 - DNA, 201 bp, Homo sapiens
aataccatgtgagccagggacgcagtgtccaaggcccatggcctggagacctggatgctggctgtggaccttgggcaagtccctcatcttccctgtgcctcacctcatctgcacaatgatgtgatgacacctgccatctctttccaattatgcttcaaggatgcagtgagatttgatatgatgacccaagagtagaaggtg

SEQ ID NO: 544245 - DNA, 201 bp, Homo sapiens
ataccatgtgagccagggacgcagtgtccaaggcccatggcctggagacctggatgctggctgtggaccttgggcaagtccctcatcttccctgtgcctcacctcatctgcacaatgatgtgatgacacctgccatctctttccaattatgcttcaaggatgcagtgagatttgatatgatgacccaagagtagaaggtgg

SEQ ID NO: 544246 - DNA, 201 bp, Homo sapiens
ctccatcctaccccttaccctagacacgctagcattttaccttatttggttcatagtaataatcaatatttaaatgatatatttttgttttcatttctgaccccccccaagcagaatatgtgtcctgaagactttgttctgttcactattgtatccccagcccttgggacaggatctggcacaattacttgactctagtct

SEQ ID NO: 544247 - DNA, 201 bp, Homo sapiens
cacagttctgaccccctaaaatcaatactataataggtaaaaccccttgctagagaattagccaatctttttgatcaaattcatcagttttccagtttctygtgggttttcttcaagtggtcttcattcataaatttttcctcccatgaaactacttctacagagtagctttttctctgagaataaagaaatctttttctt

SEQ ID NO: 544248 - DNA, 201 bp, Homo sapiens
ggatgagatctgtatgaaagagggagaagatgctgagtggaaggaaacagccaggtgaggccctaaaatggcctgcatcaagatctgcttgggtaggcaartgtgtacccttcagcaagtgacaggcctgcctgccttatttcttcttgggagaagctgtgactgacatggggactgacattccagtgtctcctgtggaga

SEQ ID NO: 544249 - DNA, 201 bp, Homo sapiens
ttttcctttggctaaaatggccctcatggaaagaaagtggagcagcagttgagatgccctggacatacctttatcggggaaatcagctgtcagattttagrcgagtcactttctctctctgggcctcagtttcctcatttataaagcgagtgtcaggccaggccagagggcaaagacaaaaaccactagagacaaatgatg

SEQ ID NO: 544250 - DNA, 201 bp, Homo sapiens
atttagttttcagctctgagactttccttgccttgattctataggcccaatttccctacctcagagtcaatctgaagattacctaggttgatagacatgaygtgatcagaaagtcatgttcaaatactgtgtggatgttcaagtgcagtataataatgtcggtgtttccccccagaccattacctctttgataagatacgt

SEQ ID NO: 544251 - DNA, 201 bp, Homo sapiens
ttaatttttcttatagatttctcttctaaatagccctttggagttctacagttatagttcttcttgacaattacagcaatgttaaaatcttggaggaaggraatgtaggggaaatttggcagatgacagaacaaagcaggtaataatgtgagctttcaaattatacagtcctcaatttgaatcccagctgtgcaaactgct

SEQ ID NO: 544252 - DNA, 201 bp, Homo sapiens
tctgtctctctgggatcataggaggacccaggggaggggtaagcactgatgggacattgggcccccctctttttcagggaggtaccccagaagtatcactytgactgcctgggaaaaatgaaattctcatgttcatcattggagtcacattttgctaacttttgactatttgtctgaaatcccatgaatgttccttaaaag

SEQ ID NO: 544253 - DNA, 201 bp, Homo sapiens
actgaatgtataattggtattaaaagaagaaaagattaaaaaggagattgagtactgagcatgaaggtcctgaattcatatgggtgagccatgatcagagmtgtaactaggaggatttgtttgcagggttaatttaatgtgagaggcaggaaggggcccctgctttgttaaagtgggagttttgatggccctaatctatag

SEQ ID NO: 544254 - DNA, 201 bp, Homo sapiens
aattacttgactctagtctgctgctaatgccacctgggttggtctcagtagtgtgctacagggatttcattaacatactataatggaacataatgagttarcaaattgtattttattaagatggtattcaatttagtattttcacgctatatgctttttatagtttatactgataatgtcagggtctggaatcccacatct

SEQ ID NO: 544255 - DNA, 201 bp, Homo sapiens
agtgtctgtttgtcatcttttctgccaatttttctcagaaaatccaaatccttgctttagaactcccagactagaaactgatgcctgattttctgacagcygcttggtccttcttagctctgaccccctgccgaacttgatttcatttctgcctgtctctctgatattttcaaaagacaggcattgcgattggctaatgtt

SEQ ID NO: 544256 - DNA, 201 bp, Homo sapiens
cctgcttcacatgattcattgccagttcactaaagattgctctctgcatgtgtatatgtacttattttttaaactatagactaaaattacatctttcccayaatttttactaaattagaatactttatttgcacacagatagttccaaaagactaggtttgaccttttttggaaaaaagaatgacgagttagatgggaaaa

SEQ ID NO: 544257 - DNA, 201 bp, Homo sapiens
cttcttgggagaagctgtgactgacatggggactgacattccagtgtctcctgtggagaattttggtgttggcatctttatgatgtctttggtgttacctrtgccagttgacctggagcatgggattggtgaaataacatgggatattcaggggggcccctctcatttgtttggggctcagagtaagtttatgggctatct

SEQ ID NO: 544258 - DNA, 201 bp, Homo sapiens
atgtttcttttggactttcaggtagaccttcatttcatgaaaaaaattcctactggggccgaggcctccaatgtcctggttggagaggtggatattttggmccgtcccattgttgcctttgtgaggctgtctccagctgttcttctctcaggcctaacagaagtgccaatcccaacaaggtaaaggcaaagataaaactca

SEQ ID NO: 544259 - DNA, 201 bp, Homo sapiens
gatgtggtttctagaccagctctggagaagagaagagagagttgggatttgctatagggttggctgtgctgtgggttccactcagactcactccgaagggyagccctaggactcaatgaggctgtactcagggtagtgttatctcttgaaggcatagaataaaacgagtaccattttgatggaacacagaagcaaattgtg

SEQ ID NO: 544260 - DNA, 201 bp, Homo sapiens
gaatgagggcacttcctgtggaagattgtgggatgctgcccctcatgtctctcttcttggggctgaacactccctgtacaggtcggacctaccgtctttgytctgtccttcctccacctctgccctttgaccctcaggggttgtgtgatcctgacgtgagtcttgcaccttagtcaggacccaacctaacctgaggtgaat

SEQ ID NO: 544261 - DNA, 201 bp, Homo sapiens
taaggtgggacgagagatttggaaaagaaaaagacacagagacaaagtatagagaaagaaataaggggacccggggaaccagcgttcagcatatggaggakcccgccagcctctgagttcccttagtatttattgatcatctgtgggtgtttctcaaagagggggatgtgtcagggtcacaagacaattgtggggagaggg

SEQ ID NO: 544262 - DNA, 201 bp, Homo sapiens
taagccaaattttgaaggaataatgtgaaatagaagagagaagggagaacatttcttgtgactacattgtatacaagtcatcaaatgaaaaaagcaagttrtatagagagagcagatagaatgtctgatatttttctgacatattagagatgggaaaggaactcctactgtgtattagacagcagccaggtgctttatata

SEQ ID NO: 544263 - DNA, 201 bp, Homo sapiens
gcactgggcggtaagtcctgggacgtttcacagcgatgctgcttattgggtagaagttatgcaaaggaatgaggcatcttctttctttcagcctacttctytgtggtgggaatttattggctgaagaatgacttttcaaatggaaccactgactagaagtattatgaatatatcaaatatcgtattcattcattcaagttt

SEQ ID NO: 544264 - DNA, 201 bp, Homo sapiens
tctctcaggcctaacagaagtgccaatcccaacaaggtaaaggcaaagataaaactcatgcattctatccaaaattcaaatttatgtagtgctggtagaaraaaccacttaatactgaaatttagaattaattaattttaggaatggtgtttacaattcagcagaaaagccagatgtgctggtgtgtgcctctaattccag

SEQ ID NO: 544265 - DNA, 201 bp, Homo sapiens
tgcgcatatcctgtgaggcaaatctgtatcataactgtgccagagcactatttagaaggaaaatacaatcagaattagggataaactgggttccagtgctygtttagatgaaatgaattaaccacatttctgactccttgtctcttaatgccatccatccatgcgttctgatgaactttggtcttgtttcagagactatgc

SEQ ID NO: 544266 - DNA, 201 bp, Homo sapiens
aaaaagagcacagtcatttgatgccttctgatatagaactgagaagaaattcatattagtgatgatacactattgtagatagttttaataaatgtttaagkagaagataatataaaaaagggtgttcattttgctggcgagagatctaccatcagtacatcaaaaatggggatgtgctcccagtcctctattgggggatag

SEQ ID NO: 544267 - DNA, 201 bp, Homo sapiens
tcactctactgcactccagcctgggcaacagagcgagactccatcttaaaaaaaaaaaatttcagacgcaaagaaactttatatgatattataaaagacartcctttccattttggtttatttcagtattttagttgcaacctgggattaaattggagtttcaaatgtgatgaaaagtagaatgataacattctgtaattt

SEQ ID NO: 544268 - DNA, 201 bp, Homo sapiens
tgtgctctgggagggagcattggtggaaagaaggagtccttgcaatggaagggccactgaaaaggggaagcagccttccctttttaaaaaacattttcttyaaagttgggagagatctgaattgggtggggaggcctggtattgagaggcagttcaagggaagcatatgtcctcagaaggggttccaggattgagactgtc

SEQ ID NO: 544269 - DNA, 201 bp, Homo sapiens
ccctccaccctctcctcacacatactaggtattctttccatgtgagagaattggggaacctgtgggcattctttttatctggttttcccagatctgctagrgagcttcagtaggagagatgtgggcagacttgtcaagcagagacttgagcagagaattggggacaattcagactgcaaatttacttccttcaaaatctgt

SEQ ID NO: 544270 - DNA, 201 bp, Homo sapiens
ggagctgcttccccctactccatgccctttaccccactccacctgatgttggccttcttgggttcattaaccctcaatctgagtgttcatgtgagtgcctrctttccagacctgatcctggatcagcaagaactgtccagtgacctgaatgacagcatgagggttaaagtgcgggaagcccttctcaaaaagcatcatcat

SEQ ID NO: 544271 - DNA, 201 bp, Homo sapiens
caggcctgatgtggtttctagaccagctctggagaagagaagagagagttgggatttgctatagggttggctgtgctgtgggttccactcagactcactcygaagggcagccctaggactcaatgaggctgtactcagggtagtgttatctcttgaaggcatagaataaaacgagtaccattttgatggaacacagaagca

SEQ ID NO: 544272 - DNA, 201 bp, Homo sapiens
cactggacctttgccctcagcaaggaggtaaccatttatgaacactcttgtctacttgggagtagaataagaaacctgagcaagctctcttgaatcttaayaactggttccgtccacggagatcagctgagtaactggcggtgggagcagcttctccagatgacatcatctgttctttatgcatgttctactttgctaaaa

SEQ ID NO: 544273 - DNA, 201 bp, Homo sapiens
gcccaaatgctgcaaagaggccaaggagaccaatctacaccaaatgggacaacttgcttcacagcacttgcaaaatgccaaaatgttatacagaggtataratggagtggggaggtggaaaaggcatgagatttacagccacaagacctgggctcatgacacgtcctagtaatcccagctgctctggaggctgaggtagga

SEQ ID NO: 544274 - DNA, 201 bp, Homo sapiens
agcatatctatcatttaaaacatttattatttctttgtgttgagattactcaatatcttccttctagctgtttgaaactctatattatagtcatcctactrtagtatagaacactagaacttattcttcctatatagttgtaattttttatcctttagcaaatctctccctacacttctcccccttgccttcctagcctct

SEQ ID NO: 544275 - DNA, 201 bp, Homo sapiens
tttttgcttgcccattaattaaaaaaaccctgttcataattttattgtaatgtcctgaaatttaaagatgagtgaaaggagaattagcatatatatatactttttttttttgagacaggatctcactctgttgcccaggctgagtgcagtggcacaatcatgactgactgcagctttgccctccccaactcaagcaatcct

SEQ ID NO: 544276 - DNA, 201 bp, Homo sapiens
gataggtgccattatattcattcttttaaaacgtttaatttttattttgaaattgacaagtaatatttaagtaatattgtacatattcattggggtgcatrgtgatgtttcaatacatgtaatgtatagtgatcagatcagagtaattagcatatctatcatttaaaacatttattatttctttgtgttgagattactcaa

SEQ ID NO: 544277 - DNA, 201 bp, Homo sapiens
tcaggaaggatgacacgtcttggaaacaagtgccatgttgacctcagggatggtttccccgaggaggcagggaaaatatcctgagtttgcaacaaaatgartatcagacactgactctctcctcttcttcctggttaatagtttgctacaattaatagaagatacatccttctttccttgctctgtctgaaaagaacaata

SEQ ID NO: 544278 - DNA, 201 bp, Homo sapiens
ttgccagggaaatcagctaagagtttttttgaaataattcagggtcttgtgattcagggtattgataggataggtgccattatattcattcttttaaaacrtttaatttttattttgaaattgacaagtaatatttaagtaatattgtacatattcattggggtgcatagtgatgtttcaatacatgtaatgtatagtgat

SEQ ID NO: 544279 - DNA, 201 bp, Homo sapiens
ctgcttggagaagccactgagggacgcatagtaaggacttttaaccacttctaatgatcccaaacaagacctaaaatattgtggcggcagccaggtccacygtgggggaaattacttggtctaggactgaagagattggatttttcctctgaattaccatggtcttctgacatcacaccaaagagcaacacagtcctctct

SEQ ID NO: 544280 - DNA, 201 bp, Homo sapiens
ttccctcagcacttggcatcttgtcatctacacaatggaccctcaataaatggcctatatgtgcaaagaaagaatgtgtagcaaatgaaaataccagaccmagaaatgagtgagctgggaagtgtttccaaatacagttagtgcctaaaatagtgtcctttgaaaaaacttttaaaagacttttttttaggccaggcataa

SEQ ID NO: 544281 - DNA, 201 bp, Homo sapiens
aactacaaaatagtaactttggaacagtaagctggaaacttgagcaggatctagaaggaaggtgatatcgtttggctatttgtccccaccaaatatgttgraatgtaatccccaatgttggagatggggtctggtgggagatgtttgggtcatggaggcagatgcctcatgaatgtcttggtgccatcctcacagtaatga

SEQ ID NO: 544282 - DNA, 201 bp, Homo sapiens
ttggcaccatgcaaagataacttgcataggactttctgtcttttttcatttccctcagcacttggcatcttgtcatctacacaatggaccctcaataaatkgcctatatgtgcaaagaaagaatgtgtagcaaatgaaaataccagaccaagaaatgagtgagctgggaagtgtttccaaatacagttagtgcctaaaata

SEQ ID NO: 544283 - DNA, 201 bp, Homo sapiens
ttaatctggccattagctcaaggaaaaacaattaattttagaaggccctctcccctcatccgcaattacctcctcctgcaatcgcgaaggatgtttgcccrgaatttaaacatcatctcccaaggaatgaaatcagaataggcaaaaccgacactttcccagttttcaagggtcaggtgcagctgcaaatagaagcagaga

SEQ ID NO: 544284 - DNA, 201 bp, Homo sapiens
ggtcagtagttctgttgctaaataatagtttgccttagatcatttcctggaaaagttcgaagcctttttgtggaattgcttcaacagtcatccttagctcraccctgtccgtgtgttttgcttctgacttgagactcaagaagaagacctaagtcatagtgagactgtgagggagcctgacactgcctgccttcttcaatt

SEQ ID NO: 544285 - DNA, 201 bp, Homo sapiens
atttagttcttttaatgcatctcatttccacgcttgttttttaaatccttttatccttgcacttctctaagtgctaaagttttctgcatctcagatccccrtgacagagataaaaatcaacaggttgtattcatttttcaccatatccattggtgattgtttcatgtaaagttacttttaactttcctgagggttttctct

SEQ ID NO: 544286 - DNA, 201 bp, Homo sapiens
ttttaactttcctgagggttttctcttctctgtagatttttcatgacgtagcatataaggcaaaagagcgagatgatctcctggcggggattgatgagttyctagaccaggtgacggtgctccctccaggagagtgggatccctccattagaattgagccacccaaaaatgtcccttcccaggtaatgtatgcacatcagc

SEQ ID NO: 544287 - DNA, 201 bp, Homo sapiens
aataaaaatgaatctgggctgggtgtggtggctcacacctgtaatctcagcactttgggacgccgaggcaggtagatcacctgaggtcaggagtttgagamcagcctggccaacatggtgaaaccccatctctactaaaaatacaaaaattagctgggcgtggtggtgggtgcctataatcccagctacttgggaggctga

SEQ ID NO: 544288 - DNA, 201 bp, Homo sapiens
ggccaggcataatgggttatccctgtaattccagggcttttgggagttgaagctggaggattacttgaggccagaagtttgagactagcctaggcaatatratgagaccctgtctctacaaaaaaaaaaagaaaagaaaagaaaaaaaatcaaaataattagctggatgtggtggcacatacctgtagtcagctacttggg

SEQ ID NO: 544289 - DNA, 201 bp, Homo sapiens
tgtcctgcagcatttcctgtatgttttcttctagtagtatttatagttcctggtcttacatttaagcctttaattcatgttgagttaatttttgtatatgrtaaaagatagggtccagtttcattcttctgcgtatggatagccagttttcccagcaccatttattgaagagggtgtcctttccccagtgcatgttcttca

SEQ ID NO: 544290 - DNA, 201 bp, Homo sapiens
agaatgtttgtaatatatctaattgcaaatggtgctgtggttggcaccatgcaaagataacttgcataggactttctgtcttttttcatttccctcagcayttggcatcttgtcatctacacaatggaccctcaataaatggcctatatgtgcaaagaaagaatgtgtagcaaatgaaaataccagaccaagaaatgagtg

SEQ ID NO: 544291 - DNA, 201 bp, Homo sapiens
cttgaggagagagggttgcttcgattttagccagcctctcttttcttataaatccaaatcaaatttaatgcattattcatgatattctaaccttgtgttargtcagtagttctgttgctaaataatagtttgccttagatcatttcctggaaaagttcgaagcctttttgtggaattgcttcaacagtcatccttagctca

SEQ ID NO: 544292 - DNA, 201 bp, Homo sapiens
gcatggagatgcaagtatccctttgatatactgatttcctttcctttggataaatacccagtgatcagattgctggatcacatggtagttctatttttagttttttaaggaacctccatactgttttccataatgtctgtactaatacacattgttactatcagtttataagagttcccttttccctgcatcctcaccaac

SEQ ID NO: 544293 - DNA, 201 bp, Homo sapiens
gacaggcattagcagagccgcgggcggcgggtgcatggaaccggaatgtgctgcgcgccagcctggagcgctcggagcccggaggcctgccccggaggggraaacgcggcggggcggccatgggccccggggtcctgccccaggtttgcttctcatttgtgctccatccaacaagagctcgtattccgtgtgccatgaact

SEQ ID NO: 544294 - DNA, 201 bp, Homo sapiens
ctttaggggctgagaattatttgcaacaattcttcccctgaccccaatttggacctacctgaagtctggtatgatagtgcatataaaacaaaaggccccayggccgggtgccatggctcacgcctgtaatcccagcaccttgggtggctgaggcgggcagatcacctgaggtcaggagttccagaccagcctggccaacat

SEQ ID NO: 544295 - DNA, 201 bp, Homo sapiens
ctcttgatcacataaccctttatttacttaacagtagtgattataactagcggttatcttgtttgatgacttgtttactttctcccacttgattgtaaggyttatgaggccaaggacactgtcttaattgctgttttcccaacacctaacatagggcacgatacataggttctcagcaaaagtgttttgaattaatagatg

SEQ ID NO: 544296 - DNA, 201 bp, Homo sapiens
cacatccttacaattatatgcaaaattttgggctttgtttacttatctgaaaaagagaatccacagattttataacgtctccagggagttcaagacccacygctttccccaaagtttaagaaccactggtattatagaagagaaagaataggtctaaaacaaaatctggaaggatggccacgtcaggaagccacaaagaaa

SEQ ID NO: 544297 - DNA, 201 bp, Homo sapiens
atgatgacgaatagtggggagcgattttcacagccaggagcttggctctcagcttttgtggcgcctcagactcttccctgggatgtgtagtgttccatgckggcagcatgctgtgaacaatgaaaattgtattctgtagtctctttcaatatgctgtgacttggcaagggctgaaagcaaatcatgcacctgcataacctt

SEQ ID NO: 544298 - DNA, 201 bp, Homo sapiens
tggataaggaagctggtagcagggacagataaaaacgcatggcttctgtatagcttggaggcagacccaaaggtctcaattgttgactggatgtggaatgrggtgaggaaaatagaaaaatcgaagaaacctgttaggtttctgacttgaccatctggtggagtgtgatggcatttattaagatggaaaagattgtatgat

SEQ ID NO: 544299 - DNA, 201 bp, Homo sapiens
gcttggataaggaagctggtagcagggacagataaaaacgcatggcttctgtatagcttggaggcagacccaaaggtctcaattgttgactggatgtggartggggtgaggaaaatagaaaaatcgaagaaacctgttaggtttctgacttgaccatctggtggagtgtgatggcatttattaagatggaaaagattgtat

SEQ ID NO: 544300 - DNA, 201 bp, Homo sapiens
atcatgaggttcggagatcgagaccatcctggctaacacagtgaaacctcgtctctactaaaaatacaaaaacaaaattagccgggtgtggtggcaggtgsctgtagtcccagctactcaggcaggaggctgaggcgggagaatggcgtgaacccaggaggcggagcttgcagtgagccgagatcatgccactgcactcca

SEQ ID NO: 544301 - DNA, 201 bp, Homo sapiens
caagagattccatgcagatggctccactttgcctttatttatgctgtagacacacattatgtggctctggagagaagtcgtaggagaatagtctaagttayttatatttgtctttagaagtcattaaatttttttgacaacagatacagttgttaattatattttacttgggttaatgttgagatacacttgttttctctc

SEQ ID NO: 544302 - DNA, 201 bp, Homo sapiens
cagcacatagattcttcatgacctgcccctgcctgtttttctgtccttgtacatctcctttccttcccttttctaccctgccctggccctactggccatcyttttgccccagaaccagctctgcacattcccaccttaggacctgtgcacttgatcttcccccttcttggaatactcttctcccaggtcttctcatggcct

SEQ ID NO: 544303 - DNA, 201 bp, Homo sapiens
gtactggagcgactaccgagatgcactcagcttacagtgtttggcttcctttctgttcctgtactgtgcctgcatgtcacctgtcatcacctttgggggaytgcttggagaagccactgagggacgcatagtaaggacttttaaccacttctaatgatcccaaacaagacctaaaatattgtggcggcagccaggtccacc

SEQ ID NO: 544304 - DNA, 201 bp, Homo sapiens
acctcgtgatctgcctgcctcggcctcccaaaatgctgggattacaagcatgagcctggccaagtgctattctttatttcagattgagagttgggaaaaaytggagcaaataatggatttctttcttgcttaaaatgtatttatatgtatgtcttattatatacaaggcagatttccctggaataaaagtctagaatgtac

SEQ ID NO: 544305 - DNA, 201 bp, Homo sapiens
ggagcaaataatggatttctttcttgcttaaaatgtatttatatgtatgtcttattatatacaaggcagatttccctggaataaaagtctagaatgtactkcttaattttacacatgtgtgcaggcaatattatctgtgagtgaaaagtggaataatacgtggattgggtcaactgattatcagcttgttaggagtcctct

SEQ ID NO: 544306 - DNA, 201 bp, Homo sapiens
atctgattgttcttcctgatgtgattgagtgttaagttattatgtttggggcctgaatggagaaacacctggatgcatgggggagttttctcttgaattgrttctgtttggctggacaggttaagaaatatttctccaaatctttctctatttcaagtatccaagtcattctgtctctctgggatcataggaggacccagg

SEQ ID NO: 544307 - DNA, 201 bp, Homo sapiens
taaaaaatcctaggttatgaaacaaggttctgggccaagcacagtggctcaggcctgtaatcccagcactttgggaagttgaggcgggcagatcgcttgarcccaggaatttgagaccagcctgggcaacatggcaaaaccctatctctacaaagtatatataaaaaaaaaaaattagccaggcgtggtggtgtgtgatag

SEQ ID NO: 544308 - DNA, 201 bp, Homo sapiens
atctctgaaggtgtttatggaatttttatttatttttgagacagggtctcactctgttgcccaggctggagtgcagtggtgtgatctcagctcactgcagygtcgacctcctgggctcaagtgatccttccacttcagcctccctagtagctggaactacagacatgaaccactatgtccagctatttttttttattttaa

SEQ ID NO: 544309 - DNA, 201 bp, Homo sapiens
atctgtgcgtactcagtgacttaagaagaattatgaaggaggaaagtgggagaagttggtgaggagaaggccgacaggaataaaggcagtccctgacttgyaaatgctcccttcagttgtccctttcctttctcttttttctctctacccatgaagtaggcctgttgaaataccttcttccatattgtctgaaaattttta

SEQ ID NO: 544310 - DNA, 201 bp, Homo sapiens
cgagatgatctcctggcggggattgatgagttcctagaccaggtgacggtgctccctccaggagagtgggatccctccattagaattgagccacccaaaartgtcccttcccaggtaatgtatgcacatcagccaatgtggctattgtcacttactgactgcccaccatggacaaagcaaagaccatgtgggtatatgcta

SEQ ID NO: 544311 - DNA, 201 bp, Homo sapiens
ggtgaggggatacccacctctggtggggcagagtgagggagacctgcccttcagggggaggtgctggctccacttagctaggggagtgtgcaagggatgcygtgaacttgccaaggaggttagaagggaggccagctggtcaacctccctctgtcctatcactacctctcatctcacccactctcctctaccctgagggaa

SEQ ID NO: 544312 - DNA, 201 bp, Homo sapiens
ttgatgctgttgtttggggaggagtggtactaagaaaaaaaaccatggttagtgaggaaaaaacaaaaaacacaaaacacactctcagttgcccatagagwtatatcagtttgatgggataccctagaacacctcaggggtctgtgaatcctttaaccactcaatggaaaaggtgactggggtatagattgtctagtttgt

SEQ ID NO: 544313 - DNA, 201 bp, Homo sapiens
tgtttggggaggagtggtactaagaaaaaaaaccatggttagtgaggaaaaaacaaaaaacacaaaacacactctcagttgcccatagagttatatcagtktgatgggataccctagaacacctcaggggtctgtgaatcctttaaccactcaatggaaaaggtgactggggtatagattgtctagtttgtttatatgaca

SEQ ID NO: 544314 - DNA, 201 bp, Homo sapiens
gagaggcttaattcaggaaggaccttcattagtaattccatccagtgtttccaacctttaagatcaagaaaatttccctctcaacgtgggaaagctgattaaaattttttttttcatatatcttgcctttccttccatcctttgtggagataacataattgtacaactttagactcatgtcttatctcttcttatactagc

SEQ ID NO: 544315 - DNA, 201 bp, Homo sapiens
ttcccatccatgagcaggagatgtctttctgtttgcttgtgccctcttcaatttctttcatcagtgttttgtagttttcttgcagagatctcttacctccytggttaaatttattcctgggtcttttttttttttgtagctattgtaagtgggattgctttctttgcttttttttcccagctagttcattattggcatata

SEQ ID NO: 544316 - DNA, 201 bp, Homo sapiens
ctgaggcaggggaatcgcttgaacctgggaggtggaggttgcagtgagctgagattgcgtgactgcactccagtctggtgacagagcaacacttcgtctcaaaaaaaaaaaaaaaaaaaaccatgttggcactgtccaaaggtagcacagaggtacgaagtggtccctcctcctgggtgtggtgggtggagtgggcagagg

SEQ ID NO: 544317 - DNA, 201 bp, Homo sapiens
ggactgacattccagtgtctcctgtggagaattttggtgttggcatctttatgatgtctttggtgttacctatgccagttgacctggagcatgggattggygaaataacatgggatattcaggggggcccctctcatttgtttggggctcagagtaagtttatgggctatcttggtattattataggtctgacttagaaga

SEQ ID NO: 544318 - DNA, 201 bp, Homo sapiens
aggggatttcttaaaaaactttcttgtcccccttcccacactccatggtttggatttcctatctcttcgaacaatctttcttttcttttcttttcttttcttttttttttttttttgagacaggctctcactttgtcgcccaggctggaatgcagtggcaggatcataactcactgtaacctcaaactcctgggctcaagc

SEQ ID NO: 544319 - DNA, 201 bp, Homo sapiens
gcctgtggttccagctactcgggaggctgaggtgggaggatcgcttaagcccaggacttccacactgcagtgagctgtgatggtgccactatactccagcytgagtgacagggtgagatcctgtctcaaaaaaagaaaaattgttactgatttcaagttttattatcttatgacaacagcatgcctttcactctatcaaaa

SEQ ID NO: 544320 - DNA, 201 bp, Homo sapiens
tgctttctttgcttttttttcccagctagttcattattggcatatagaaatgctgttgatttttataggtttaccttgtatactgcaattttactgacttygttggtcagttctaagagttttttggtggagtccttaggtttttctatatataagttcatgtcatctgcaaagagcgaaagtttgacatcctctttaatc

SEQ ID NO: 544321 - DNA, 201 bp, Homo sapiens
gtgaatgagcacaatcagctttctctctaatacctagctgagatcagtgctgcaggaggaatggattttgtctaaaaataggtaatatgggaacattaagyggtccttggaaaggttccaaagggataggcctaagatagtcagaaggcactgaatttctgggacatctgtgaagaacgcctctgggaggtaggacagggg

SEQ ID NO: 544322 - DNA, 201 bp, Homo sapiens
agcactgactaagtagacaaagaagatagaaaagctgagctcagttctatagagccccatagggtgaggggagagaaaatctgtgcgtactcagtgacttwagaagaattatgaaggaggaaagtgggagaagttggtgaggagaaggccgacaggaataaaggcagtccctgacttgcaaatgctcccttcagttgtccc

SEQ ID NO: 544323 - DNA, 201 bp, Homo sapiens
aaggcagccactgttactgatttcttttgattctttctagaaacatagttcagaggagtcaccctgattttggcaagtaccttaaatagcagcttcttaattttttttttattacattgcccataatggttaaagttattttaaaagtagtcctcttactgagctctctttgtggctctgatagatttccagaggattctc

SEQ ID NO: 544324 - DNA, 201 bp, Homo sapiens
ctcatcaggagtctagggcccctgccggagtaatcatgacatctctttcgaaatcatctcaatctgatttcattgtttgtataactctctctaatatatgrtatttttcaagaaactatacaaaaagtcaaacaaatgatcaatacatggggactccaaatagatttcagtttgggagcactgactaagtagacaaagaag

SEQ ID NO: 544325 - DNA, 201 bp, Homo sapiens
ctgactgaaagttcccataagcgcttctgcaggacatgtctagattctgttaactgcaaagacccaggatgaccccttctcaggaagtcctatgaatttcttttttttttttctcacgatcttatttttatttcttggctgttttagattcgggttttgggtgttctgagtttcacttttcacatgagtgtgcatcaaggg

SEQ ID NO: 544326 - DNA, 201 bp, Homo sapiens
gcgtgactgcactccagtctggtgacagagcaacacttcgtctcaaaaaaaaaaaaaaaaaaaaccatgttggcactgtccaaaggtagcacagaggtacraagtggtccctcctcctgggtgtggtgggtggagtgggcagaggccatgcagacccaagcactgccccttggccctctcctgggtttgttccacctggac

SEQ ID NO: 544327 - DNA, 201 bp, Homo sapiens
tttttctttttttcttttttctttttttttttaagtcagtagtggtttattaaatggttgtatcacatctggaaaacattattcaaaacatttattcagcrtacttcctgttcatattttagaagatgtaaagcaatgaaatttgctctaaataaatggcattttttttgccattatttggcatcttgccaggttactttt

SEQ ID NO: 544328 - DNA, 201 bp, Homo sapiens
cgtttatagaatattttaaaatcttaattcagctagagttatgatccccaaacaagtgctgacgaagctatcacagaaatgatgtctttttcaccttgtargtatcattgttgctaaatcacatcagtacaggccttctgtggggagacagcagggggcaggggcaggactaggggatgggagtagataaaactgtgattc

SEQ ID NO: 544329 - DNA, 201 bp, Homo sapiens
gaatgtgcctgctgtttctctgtcgctcactttgggcttgcaggaagtacaacgggaatagcctgagcttcttgctccctgtataatttattcactttacytgaactgccttacctgcagttcatagtgagaacacctgggcttgtaacttgcctccacttttaagtgtgatagggccaagttgctttacctctctgggcg

SEQ ID NO: 544330 - DNA, 201 bp, Homo sapiens
tgatggtgaggtggtttttaaaaaataaattcttattatcattgttattttttagtggtaaaatattataactttaaaatttaccatttttaagtgtacakttgagtggcattaagtacattcacattgctgtggagctattaccaccctccagctctggaactttttacatcttgcaaagctgaaactctgcacctatta

SEQ ID NO: 544331 - DNA, 201 bp, Homo sapiens
tgttcttaatttttgggtttgacaaccacttattttttcctttgtttacaatctactcaccaggctcatacctacaatgtgaacatacagtatgcccttaytagcagattcaatggctcacattctttcaaaaggtctaatttgacaaatacataagacccattatttcctagaatgtttgtaatatatctaattgcaaat

SEQ ID NO: 544332 - DNA, 201 bp, Homo sapiens
acccccaaagatgttctcagctaagaatggattagggattcttgcttctgtctgttcttaatttttgggtttgacaaccacttattttttcctttgtttayaatctactcaccaggctcatacctacaatgtgaacatacagtatgcccttattagcagattcaatggctcacattctttcaaaaggtctaatttgacaaa

SEQ ID NO: 544333 - DNA, 201 bp, Homo sapiens
tttgatctcaaggatttctaaccacccagagatcaggaggaaagactgcaaaggaagccctaaagtagaataaccttttctttctccatgaatggaatgtragttatgtttgctgagggcagattaaaatagattttattgtttgaaatcaggaatttacagaaactctttgaagagctactatcatcgaagacctttaaa

SEQ ID NO: 544334 - DNA, 201 bp, Homo sapiens
gtgttaagtttccatttgtctgtttattcagcaaatgttttattttgtatctgctatatacttgataatgtgctaggcatggggttatgaataaagttccytcgggtgcagtggctcacacctgtaatcccagcacttcgggatgccaaggtgggtggataacttgagctcaggagttccaggccagcctggtcaacatgg

SEQ ID NO: 544335 - DNA, 201 bp, Homo sapiens
aaacaagtaagaaatttggttttgataataagcaaaaagatgtaattggtttattttgttttcaacaccccctgagaaagagctctcttaggagacacagygtgggataagagaaagaagtttgaacctagaattagaaaagatggattcaaattttgactttgccacttaataaccttggccaaattgcctggtctttta

SEQ ID NO: 544336 - DNA, 201 bp, Homo sapiens
atgacccactctgtccagtttaccttatttcagctcttcctttctctgcacctcacccccagctccccacataaccgttatgtggtgtcctgctttccttyttcccctggggactagttggtgtgttaggagttggacccacacctggccatggttttctaattagtgttgatgctcagtttcattagaggaaggctcatg

SEQ ID NO: 544337 - DNA, 201 bp, Homo sapiens
ttttttttaggccaggcataatgggttatccctgtaattccagggcttttgggagttgaagctggaggattacttgaggccagaagtttgagactagcctrggcaatataatgagaccctgtctctacaaaaaaaaaaagaaaagaaaagaaaaaaaatcaaaataattagctggatgtggtggcacatacctgtagtcag

SEQ ID NO: 544338 - DNA, 201 bp, Homo sapiens
ctgtctgtctgtctatctatctgtctatctatctatctatctatctatctatctatctatctagagatagggtctcattctgtcacccaggctggagtgcrgtggtaatgatcatagctcataagctcatgcagctttgaactcctgggctcaggcaatcctaccacttcagccttccaaatagctaggactataggtgca

SEQ ID NO: 544339 - DNA, 201 bp, Homo sapiens
gcattcatagttatctcttcatgctacctctgggtcccctgtgccaagggggtttcagcaagttgtttcttttcttatctaccatcctgcaaacccaagaatttctgttagtcattggtgtctttaactctttgggaaatggtttcagaacaaggtcatagatttcctaaggagttgctgtatttcatgcctttttttttt

SEQ ID NO: 544340 - DNA, 201 bp, Homo sapiens
aagaaatgagtgagctgggaagtgtttccaaatacagttagtgcctaaaatagtgtcctttgaaaaaacttttaaaagacttttttttaggccaggcatartgggttatccctgtaattccagggcttttgggagttgaagctggaggattacttgaggccagaagtttgagactagcctaggcaatataatgagaccctg

SEQ ID NO: 544341 - DNA, 201 bp, Homo sapiens
attttttttttttttgagacgaagtctcacactgtcgcccaggctggtgtgcagtggggcgatctcggctcgctgcagcctccacctcccgggttcaagcrattctcctgcctcagcctcccgagtggctgggactacaggcatgcgccaccacacccagctaatttttgtatttttagtagagacggggtttcactatgt

SEQ ID NO: 544342 - DNA, 201 bp, Homo sapiens
aaatagagatatgtgccatggaggaaaataaagcagtaaagaagtacaggaagtgctggggtggagggaggtggccaattttaagtggtatcatcagagamgagctcaaagagaaggtgatatttgagttgaacctaaaagacgtgagggagctgcccaagaggttacctggaggaaaggcatgttaggtagaggcatgaa

SEQ ID NO: 544343 - DNA, 201 bp, Homo sapiens
taggcggaggttgcagtgatccaagaacacgccattgcactccagcctgggcaacaagagtgaaacttcgtctccaaaaaaaaaaaaaaaacaaaaaaaamaacaaaaaaaaaaacaaaaaaaacccaaaaggtacctttctttttcttgaggagagagggttgcttcgattttagccagcctctcttttcttataaatcc

SEQ ID NO: 544344 - DNA, 201 bp, Homo sapiens
agtgatccaagaacacgccattgcactccagcctgggcaacaagagtgaaacttcgtctccaaaaaaaaaaaaaaaacaaaaaaaaaaacaaaaaaaaaamcaaaaaaaacccaaaaggtacctttctttttcttgaggagagagggttgcttcgattttagccagcctctcttttcttataaatccaaatcaaatttaat

SEQ ID NO: 544345 - DNA, 201 bp, Homo sapiens
gctaatttcttttctttctttctttcttcttttttttttttttttttttttgagatggagtttcactcttgttacccaggctggagtgcaatggcatgatstcggctcactgtgacctccacctcccaggttcaagcgattctcctgcctcagcctccctaatagctgggattacaggtgcctgccaccacacccagctaa

SEQ ID NO: 544346 - DNA, 201 bp, Homo sapiens
ttttttttttcttttctttttttttttttttgagatggagtcttgctctgtcgcccaggctggagtgcagtggtgcgatctccactcactacaagctccgyctcccaggttcacgccattctcctgcctcggtctccggagtagctgcgactacaggcgccttccaccacgcccggctaattttttgtatttttagtagag

SEQ ID NO: 544347 - DNA, 201 bp, Homo sapiens
cggagcttgcagtgagccgagatcatgccactgcactccagccagggcaacagagcgagactccatctcaaaaaaaaaaaaaaaaaaaaaagatgaggtggagccatgccatggatggtgggacatggcatggaaggaggggagaaaagcagtctagtcaggcccttaggtgggaaagagtgatatgtgttctacgaaata

SEQ ID NO: 544348 - DNA, 201 bp, Homo sapiens
cgagtagctgggattacaggcgcctgccaccacccctagctaatttttttgtatttttagtagagatggggtttcaccatgttggccaggctggtctcaawctcctgacttcaggtgatccacctgcctcggcctcccaaagtgctgggattacaggcatgagctactctgccaggcatagagaggttaagtaattctaag

SEQ ID NO: 544349 - DNA, 201 bp, Homo sapiens
tggttctgtttgtagttttttgaggaacctccactgttctccacagtggctgtactagtttatattcccaccaacagtgtataagggttctttcttcttcrtatccttgccagcatttgttatattttgtctttttgataatagccatcctaactggagtgagatgatacctcattttggttttgatttgcatttccctga

SEQ ID NO: 544350 - DNA, 201 bp, Homo sapiens
aataagtacatgagaacagcactaaccaagggtgctgggaatctgcctgcctgcctgtctgtctgtctgtctatctatctgtctatctatctatctatctrtctatctatctatctatctagagatagggtctcattctgtcacccaggctggagtgcagtggtaatgatcatagctcataagctcatgcagctttgaact

SEQ ID NO: 544351 - DNA, 201 bp, Homo sapiens
tgtttacatgcttttagggaagacggactgtgttagaagcctgtctgttgtgtttccacaggctatttgggggcttggtgctggacatcaagcggaaggcsccctggtactggagcgactaccgagatgcactcagcttacagtgtttggcttcctttctgttcctgtactgtgcctgcatgtcacctgtcatcacctttg

SEQ ID NO: 544352 - DNA, 201 bp, Homo sapiens
aaccaatgttgctattttggtatgatatagtctgctctttttctatgcatatatgatttatatgtacatataaatttcatcaattctaaggtgcatttttaaaaatctttaacatatctgaaattggtatgtatcttaaattgatggtgttataacttagcagtgttggataatgcctgtaatcctagcactttgggaggc

SEQ ID NO: 544353 - DNA, 201 bp, Homo sapiens
aaatgttttattttgtatctgctatatacttgataatgtgctaggcatggggttatgaataaagttccctcgggtgcagtggctcacacctgtaatcccarcacttcgggatgccaaggtgggtggataacttgagctcaggagttccaggccagcctggtcaacatggtgaaaccctgtctctacaaaaaatacaaaaat

SEQ ID NO: 544354 - DNA, 201 bp, Homo sapiens
tttggttgaaaggatttttccagaaactgtaggaaaatgaagcagaatcaactgggtgaaatatagtacaaacattggattaggatgtggtgaattgtgarcaatcaggattctggttgtgactggggcccctgtctcataggagcttaataccatgtgagccagggacgcagtgtccaaggcccatggcctggagacctg

SEQ ID NO: 544355 - DNA, 201 bp, Homo sapiens
caggatttattgctgtctgcttaacatatatttgtttggttgaaaggatttttccagaaactgtaggaaaatgaagcagaatcaactgggtgaaatatagyacaaacattggattaggatgtggtgaattgtgaacaatcaggattctggttgtgactggggcccctgtctcataggagcttaataccatgtgagccaggg

SEQ ID NO: 544356 - DNA, 201 bp, Homo sapiens
ggagtttcaaatgtgatgaaaagtagaatgataacattctgtaattttcctactgctctgcaccaaattccagagtctctggagtttgtatttcaaattaytcagtcgaatgaaacaggatttattgctgtctgcttaacatatatttgtttggttgaaaggatttttccagaaactgtaggaaaatgaagcagaatcaac

SEQ ID NO: 544357 - DNA, 201 bp, Homo sapiens
tgttttgagtacaataatctaaagaaaacatcgtttcctaaatagcagttagggtggagtacaggtagttccactttaaagtaattacccttgactgggcrtggtggctcatgcctataatcccagcactttgggaggctgaggtgggaggatcacttaaactcaggagttagagattagcctcagcaacatagggagacc

SEQ ID NO: 544358 - DNA, 201 bp, Homo sapiens
ctccattgcttggtgaatggcaagtattctgtccatggagtgaccagctttgtgtccagccggggctgtaatgtctccaggaagcctacagtcttcacccrggtctctgcttacatctcctggataaataatgtgagtcctctcaaatgatgggttgaaatggggtcacctggagacctacgcactggctgggttggggaa

SEQ ID NO: 544359 - DNA, 201 bp, Homo sapiens
caatagctatgtccagctgggtgttctgccccaggagggagccatcctggctaacaacagtccctgctacatcacaggctggggcaagaccaagagtaagwtgcctacattggcacaatccaccacggggatcttgattaggtagctgagcttctaagacacctttttctgtggtcctaggtgcttatggccagagaccag

SEQ ID NO: 544360 - DNA, 201 bp, Homo sapiens
cagttggcaagaagacagtcagctttgctgctaagaggagtataaagagggcttggtccaagcaagaaggcagtggtctactccatcggcaacatgctggkcctttatggtaagtggatatggtccagcaaccctggtcctttatggtaagtggatcatgtggcctgaggtctatagggagggggacttgggcaggaaggt

SEQ ID NO: 544361 - DNA, 201 bp, Homo sapiens
taaatttcctaaagtgaatcttacacgggaaaattgcaagttgagttgtaaacttctggaaaataaataattaaaacggtggtcaattctatagcatgtgsaggtgggggtgggttcaaggaattgggatattctactgagcttgtagagccactcagccttttacatttttcttgtttgagaactctgccaccaagatca

SEQ ID NO: 544362 - DNA, 201 bp, Homo sapiens
ccagttggcaagaagacagtcagctttgctgctaagaggagtataaagagggcttggtccaagcaagaaggcagtggtctactccatcggcaacatgctgstcctttatggtaagtggatatggtccagcaaccctggtcctttatggtaagtggatcatgtggcctgaggtctatagggagggggacttgggcaggaagg

SEQ ID NO: 544363 - DNA, 201 bp, Homo sapiens
ggatctatttgcattcgttgtgagggatacttaatgggtgggttttcccggaaactccagacctttgatccagaaaatgttgtttatttgttgatttcctsccactctattttcacttttctctttctagaatttctgttattcacatgtttgcctcctaagctggtcctcttgttttctctatatcttgtttgttctatc

SEQ ID NO: 544364 - DNA, 201 bp, Homo sapiens
tgaaataagtgcagcaaaagagaagaagtattgtggttgtttagaaaggaagaagagattcattttgattgtggggacatgaaggaggtggagatttgcaytggagctttaaaaccgtacagaatttcacaaccagagacgggggcggggggagtgcaagcaaaagcccgaagatctggagttttaggattctgtttctcc

SEQ ID NO: 544365 - DNA, 201 bp, Homo sapiens
ggcttggtctcttttcgggtcaattagcacaagacaatagtattatatacaattcatttatctatcattcctctagcccctgaaatactctcaaatccctratagaattttggtggaagagattgttttgttttgagtacaataatctaaagaaaacatcgtttcctaaatagcagttagggtggagtacaggtagttcca

SEQ ID NO: 544366 - DNA, 201 bp, Homo sapiens
caccttaaataatgcttgagagttaggtgaggctctgcctacactgacctggtggaaaggccacacaacacatttcactgtgccctccacccttcaaacayattctggagccttgtgtattaatcttggctcacggccatttcaaggtctgtctttgccactgtattctgggtatgtacctataacactgagctgtcctat

SEQ ID NO: 544367 - DNA, 201 bp, Homo sapiens
gcagtgcagtgacgctatctcagctcactgtaacctccacctcctgggttcaagcaattctcctgcctcagcctcctgagtagctgggactacaggtgcakgccaccacgcccgactaatttttgcatttttagtagagatggggtttcaccatgttggccaggatggtcttgatctcctgacctggtgatccacccgcct

SEQ ID NO: 544368 - DNA, 201 bp, Homo sapiens
cctcaggtgatccacccgccttggcctcccaaagtgctgggactacaggcgtgagccaccatgcccagccaaatttgttacctagattttttaatggcagygatgcagctgagcctggacaggtggttgtgatgctgtataagcagtaccctgctccctcttacctatcagtcctacttctcttgcagttcctctaccacc

SEQ ID NO: 544369 - DNA, 201 bp, Homo sapiens
cccaggctggagcccagtggcgccatcttggctcactgcaagctctgcctcccgggttcacgccattctcctgcctcagcctcccgagtagctgggactayaggcgcccaccaccacgcccggctaattttttgtatttttagtagagatggggtttcaccgtgttagccaggatggtctcgatctcctgacctcgtgatc

SEQ ID NO: 544370 - DNA, 201 bp, Homo sapiens
ccttctttctttcctccccatctagatttccctccagtaccggtctggaggttcccggtatcacacctgtggagggacccttatcagacagaactgggtgrtgacagctgctcactgcgtggattagtaagaaaaacaaagacaagctttcctgggcccctggaaggggaaggggctgaccttctgaaagaggatataatt

SEQ ID NO: 544371 - DNA, 201 bp, Homo sapiens
tatccacgagtgaaaagaagcaggagtagggttggtggcttggagcctaggtacagtaagcaaggctgcctccctgagggaagggtcctgtgcggccatakaaagagagaagacagaggatccaccacatgcaacagggagagagaaggagtttgccctgagctcagctttcacgagagtttgggaaggtgtggcaggggt

SEQ ID NO: 544372 - DNA, 201 bp, Homo sapiens
tgaacctgggaggcggaggttgtggtgagccgagattgctccattgcactccagcctgggcaacaagagtgaaactccatctcaaaaaaaaaaaaaaaaaagaaagaaagaaatggaaacaagcatgcacaatcccatttctgctccatggagcttgcaggagcaaacagaacagacagataaatcatccacaaataaggc

SEQ ID NO: 544373 - DNA, 201 bp, Homo sapiens
gtctggaggttcccggtatcacacctgtggagggacccttatcagacagaactgggtgatgacagctgctcactgcgtggattagtaagaaaaacaaagamaagctttcctgggcccctggaaggggaaggggctgaccttctgaaagaggatataattttgccctctctggacagcacttcagggactgggcagtggctc

SEQ ID NO: 544374 - DNA, 201 bp, Homo sapiens
tgtctttttcatttgcttaatatagtcagtttttcattaattcaaccccacacactccactaatttgttaagtgacctatatcatcttctcttgacctagyggtctatgtggatctatttgcattcgttgtgagggatacttaatgggtgggttttcccggaaactccagacctttgatccagaaaatgttgtttatttgt

SEQ ID NO: 544375 - DNA, 201 bp, Homo sapiens
caccttggcctcccaaagtgctgggattacaggcatgtgccactgcagccagccagcccttcattttatacatgaggaaaccaaggtccagagaaattaargatccttagctgagtgtggtggcatgagtctgtagtcccaggtactcaggaggctgaggaaggaggatcgcttaagcctgaccaacatggagaaacccca

SEQ ID NO: 544376 - DNA, 201 bp, Homo sapiens
ggcatttactatgattatataaaatgctatttacaacaaaatcatgtaatatattctaggtttacttttcatttgctgcataactttttttttttttttttaaagagacaggatcttactctgtcacccaggctggagtgcagtagcacaatcacagctcactgcagccttgaatttctgggctcaagaaatcctcccacc

SEQ ID NO: 544377 - DNA, 201 bp, Homo sapiens
ttccttcccagccccagacttccacccaaataagagctcagtgcatgacataaggtatcatgtgtatttgtgcatgtccctatcaacaagcagctctccarttgtctaggttctcgattttaaagatggatgggatcaggcttaggtggttttctaaatgcaaaaggcttggaggaggggatttatacaccaaccacagtc

SEQ ID NO: 544378 - DNA, 201 bp, Homo sapiens
caagtgatcctcccacctcagcctcctgagtagctgagactataggcatgtaccaccacactcagctaatttttaaatttttttgtagagatgggatctcrctatattgcctaggctggcctcgaactcctgagcttaagaaatcctcccaccttggcctcccaaagtgctgggattacaggcatgtgccactgcagccag

SEQ ID NO: 544379 - DNA, 201 bp, Homo sapiens
gcttgaacctaggaggcggaagtggcagtgagctgagatcatgccattacactccagcctgggcaacaagagcgaaactcagtctcaaaaaaaaaaaaaaattaacggggagtggggctacacatctatactcccagctactcaggcggctgaggcaggagaatcacctgaacctgggaggtggtggttgcagtgagccga

SEQ ID NO: 544380 - DNA, 201 bp, Homo sapiens
ctgctaagaggagtataaagagggcttggtccaagcaagaaggcagtggtctactccatcggcaacatgctggtcctttatggtaagtggatatggtccakcaaccctggtcctttatggtaagtggatcatgtggcctgaggtctatagggagggggacttgggcaggaaggtcagcaaattttccctaagtccaggcca

SEQ ID NO: 544381 - DNA, 201 bp, Homo sapiens
cagctactagggaagctgcggtgggaggatcacttgagcctgggagtttgaagccagcctgggcaacacagcaaaaccccatctctaaaaaaaaaaaaaaatttcctaaataataatgattaaaaaaaaagatggtttttcaacttttctctaagtggggtagagaaggtttgagtcccctggatgactcagggattcctt

SEQ ID NO: 544382 - DNA, 201 bp, Homo sapiens; identical to SEQ ID NO: 371243

SEQ ID NO: 544383 - DNA, 201 bp, Homo sapiens
ctttaaggacagcaagtcatggagggagtggatcttctaagagaagaaaattggccgggcgcggtggctcccgcctgtaatatcagtgctttgggaggctrtggcgggcagatcacaaggtcaggagttcgagaccagcctggccagcatggtgaaacaccatctactaaaaatacaaaaaagtagccaggcatggtggcg

SEQ ID NO: 544384 - DNA, 201 bp, Homo sapiens; identical to SEQ ID NO: 371244

SEQ ID NO: 544385 - DNA, 201 bp, Homo sapiens
ggggtttcaccatgttggccaggctggtctcaaactcctgacctcaggtgatccacccgcctcagcctcccaaagtgctgggattacaggcatgagccacmgcgcctggcctcccattggtatttctaagtagtccctgaagtggggagacaggagatgtcttgaaaacactaaaggtacagctctggagacctaagcctg

SEQ ID NO: 544386 - DNA, 201 bp, Homo sapiens
cagctttgctgctaagaggagtataaagagggcttggtccaagcaagaaggcagtggtctactccatcggcaacatgctggtcctttatggtaagtggatatggtccagcaaccctggtcctttatggtaagtggatcatgtggcctgaggtctatagggagggggacttgggcaggaaggtcagcaaattttccctaagt

SEQ ID NO: 544387 - DNA, 201 bp, Homo sapiens
ctcctgagtagctgggattacaggcgcctgtcaccatgcccagctaatttttgtatttttagtagagacggggtttcaccatgttggccaggctggtctcraactcctgacctcaggtgatccacccgcctcagcctcccaaagtgctgggattacaggcatgagccaccgcgcctggcctcccattggtatttctaagta

SEQ ID NO: 544388 - DNA, 201 bp, Homo sapiens
tactgactgtggacataactgtctttccttcaggtcatcgcctccaactgaacattttcctgagtccaacgaccttcccaaaatggttcttagatctgcartaggacttgcgatcaaaaagtaaaacacattctgaaagactattgagccattgatagaaaagcaaataaaactagatatacattatcatactgtgtctat

SEQ ID NO: 544389 - DNA, 201 bp, Homo sapiens; identical to SEQ ID NO: 371245

SEQ ID NO: 544390 - DNA, 201 bp, Homo sapiens
ctttgctgctaagaggagtataaagagggcttggtccaagcaagaaggcagtggtctactccatcggcaacatgctggtcctttatggtaagtggatatggtccagcaaccctggtcctttatggtaagtggatcatgtggcctgaggtctatagggagggggacttgggcaggaaggtcagcaaattttccctaagtcca

SEQ ID NO: 544391 - DNA, 201 bp, Homo sapiens
gatagaaaaggtcagggccactggctattcaggcccctctgggtggcaggtccctgggccacaaagcagagagaagccccatctggtagtggggtgggtcyctgggcttccccaccacccccattgacaggaggacttcctcagcaggtgcctggctggggtgtgcactgcaggccctgaaccctggagaatcttgccaaa

SEQ ID NO: 544392 - DNA, 201 bp, Homo sapiens
tgggaggatcacttgagcctgggagtttgaagccagcctgggcaacacagcaaaaccccatctctaaaaaaaaaaaaaaatttcctaaataataatgattwaaaaaaaagatggtttttcaacttttctctaagtggggtagagaaggtttgagtcccctggatgactcagggattccttctctcacgccagccagaagac

SEQ ID NO: 544393 - DNA, 201 bp, Homo sapiens
  misc_feature (1)...(201): n = A,T,C or G
gctgctaagaggagtataaagagggcttggtccaagcaagaaggcagtggtctactccatcggcaacatgctggtcctttatggtaagtggatatggtccngcaaccctggtcctttatggtaagtggatcatgtggcctgaggtctatagggagggggacttgggcaggaaggtcagcaaattttccctaagtccaggcc

SEQ ID NO: 544394 - DNA, 201 bp, Homo sapiens
accacgctttaagaacaactagcctaaaagtctatgcttccttcaaaatcttggtggctgagagccattatttcatttatgcgcactacacctctcccagkttacaagatattcagcctatgatgttaaaccgagaaaatcaaagtgatggtagtttttttcacttccacaagttagtcaattagggaatgaaagagcttg

SEQ ID NO: 544395 - DNA, 201 bp, Homo sapiens
tgcagtttaacaactattcattatatatctactatatgccaggcattgtgctaagtgctaaggttacaaagatggatcaaacagtgtcaagtaaagaaacyagaggcacagacatacaatagaacattgtaatacaatgtggttaagtgttaataatcaggatgtgcacaggtgatatggaagcccaagggtaggtaccta

SEQ ID NO: 544396 - DNA, 201 bp, Homo sapiens
ctgccttggcctcctggagtgctgggattataggcgtgaggcaccatgcccagcctatggctgcttttgtagtacaacacaaagtagttgcaatcaagackgtatggcctgcaaagcctgaaatatgtactgtttggcccttaacagaagaggtttgctgacccgtgggctagaatagaagctaccaccatactaggaaat

SEQ ID NO: 544397 - DNA, 201 bp, Homo sapiens
ttttgtagtacaacacaaagtagttgcaatcaagacggtatggcctgcaaagcctgaaatatgtactgtttggcccttaacagaagaggtttgctgacccstgggctagaatagaagctaccaccatactaggaaatgtcaggaggtaagactagagaggcaagcaagagctgtacaactcagggcttcaaatgccaggct

SEQ ID NO: 544398 - DNA, 201 bp, Homo sapiens
aactctgcctcctgggttcaagcagttctcctgcgtcagcctcctgagtagctgggattacaggcgcctgtcaccatgcccagctaatttttgtatttttrgtagagacggggtttcaccatgttggccaggctggtctcaaactcctgacctcaggtgatccacccgcctcagcctcccaaagtgctgggattacaggca

SEQ ID NO: 544399 - DNA, 201 bp, Homo sapiens
tcctgcctcagcctcccaaagtgctgggattacagtcataaaccaccaaggtcagcccttgctgcacaactttttcaattttttcaatgtctgttaaaaaytgtctttttcatttgcttaatatagtcagtttttcattaattcaaccccacacactccactaatttgttaagtgacctatatcatcttctcttgacctag

SEQ ID NO: 544400 - DNA, 201 bp, Homo sapiens
tttttttttttttgagatggagttttgctctcattgcccaggctagagtgcaatggcatgatctcggctcactgcaaactctgcctcctgggttcaagcarttctcctgcgtcagcctcctgagtagctgggattacaggcgcctgtcaccatgcccagctaatttttgtatttttagtagagacggggtttcaccatgtt

SEQ ID NO: 544401 - DNA, 201 bp, Homo sapiens
tgctgctaagaggagtataaagagggcttggtccaagcaagaaggcagtggtctactccatcggcaacatgctggtcctttatggtaagtggatatggtccagcaaccctggtcctttatggtaagtggatcatgtggcctgaggtctatagggagggggacttgggcaggaaggtcagcaaattttccctaagtccaggc

SEQ ID NO: 544402 - DNA, 201 bp, Homo sapiens
ctgattggtagctctgagccttagatggggttcatcaatagtggattctctgtcaggtgatctggctaggccattttagtggaggacctccaatgtcagtrtctttaggtctttcctcttggactgttcagtttttccagagaagtatcttcccattttatgtgtggcattatggacctggcattctagaagctgagtaag

SEQ ID NO: 544403 - DNA, 201 bp, Homo sapiens
tttgctgctaagaggagtataaagagggcttggtccaagcaagaaggcagtggtctactccatcggcaacatgctggtcctttatggtaagtggatatggtccagcaaccctggtcctttatggtaagtggatcatgtggcctgaggtctatagggagggggacttgggcaggaaggtcagcaaattttccctaagtccag

SEQ ID NO: 544404 - DNA, 201 bp, Homo sapiens
gccgaatctagctcactgcttgttttatatggcccatgagcttagaacagttattacattttgatttctatatatatatatatatgtatgcgtatgtgtatgtgtgtgtgtgtgtgtgtgtgtgtgtgtgtgtatgttttttttttttcctgagatggagtctcactctgtcgcccagactggagtgcagtggcgcaatct

SEQ ID NO: 544405 - DNA, 201 bp, Homo sapiens
gctttgctgctaagaggagtataaagagggcttggtccaagcaagaaggcagtggtctactccatcggcaacatgctggtcctttatggtaagtggatatggtccagcaaccctggtcctttatggtaagtggatcatgtggcctgaggtctatagggagggggacttgggcaggaaggtcagcaaattttccctaagtcc

SEQ ID NO: 544406 - DNA, 201 bp, Homo sapiens
agccgaatctagctcactgcttgttttatatggcccatgagcttagaacagttattacattttgatttctatatatatatatatatgtatgcgtatgtgtatgtgtgtgtgtgtgtgtgtgtgtgtgtgtgtgtatgttttttttttttcctgagatggagtctcactctgtcgcccagactggagtgcagtggcgcaatc

SEQ ID NO: 544407 - DNA, 201 bp, Homo sapiens
agctttgctgctaagaggagtataaagagggcttggtccaagcaagaaggcagtggtctactccatcggcaacatgctggtcctttatggtaagtggatatggtccagcaaccctggtcctttatggtaagtggatcatgtggcctgaggtctatagggagggggacttgggcaggaaggtcagcaaattttccctaagtc

SEQ ID NO: 544408 - DNA, 201 bp, Homo sapiens; identical to SEQ ID NO: 371258

SEQ ID NO: 544409 - DNA, 201 bp, Homo sapiens; identical to SEQ ID NO: 371260

SEQ ID NO: 544410 - DNA, 201 bp, Homo sapiens
cactgcaagctctgcctcccgggttcacgccattctcctgcctcagcctcccgagtagctgggactacaggcgcccaccaccacgcccggctaattttttrtatttttagtagagatggggtttcaccgtgttagccaggatggtctcgatctcctgacctcgtgatccgcccgcctcagcctcccaaagtgctgggatta

SEQ ID NO: 544411 - DNA, 201 bp, Homo sapiens
gcaggtgggacgctctgcctgcagagcgtcctttactctcctggaggccaagatagaaaaggtcagggccactggctattcaggcccctctgggtggcagktccctgggccacaaagcagagagaagccccatctggtagtggggtgggtccctgggcttccccaccacccccattgacaggaggacttcctcagcaggtg

SEQ ID NO: 544412 - DNA, 201 bp, Homo sapiens
gcaagaagacagtcagctttgctgctaagaggagtataaagagggcttggtccaagcaagaaggcagtggtctactccatcggcaacatgctggtcctttmtggtaagtggatatggtccagcaaccctggtcctttatggtaagtggatcatgtggcctgaggtctatagggagggggacttgggcaggaaggtcagcaa

SEQ ID NO: 544413 - DNA, 201 bp, Homo sapiens
ggcaagaagacagtcagctttgctgctaagaggagtataaagagggcttggtccaagcaagaaggcagtggtctactccatcggcaacatgctggtccttyatggtaagtggatatggtccagcaaccctggtcctttatggtaagtggatcatgtggcctgaggtctatagggagggggacttgggcaggaaggtcagca

SEQ ID NO: 544414 - DNA, 201 bp, Homo sapiens
ttgaccacctgcttcttcagtttgctgttcaggtatggaagcatctacatttcctgattctgagggtcatgttagatttcagcaaaaatccaagaaattcmaaaattacccaggtaacagtttctctgcagtcctctcctctcctctcctctcttttcttttctttcttagatagagtctcgctctgtcacccatgctgga

SEQ ID NO: 544415 - DNA, 201 bp, Homo sapiens
ttttttttttttttttgagacagcgtctcactctgtcatccaggttggagtgcagtggctcagttttggctcactgcaacctccatctcttaggttcaagkgattctcctgcctcagcctcccaagtagctgggattacaggcatgcaccaccatgcccagctagtttttgtagttttagtacagacagggtttcaccatg

SEQ ID NO: 544416 - DNA, 201 bp, Homo sapiens
atggagatggcaaactcatatggccactctctgccaggtgctcctggaagtggctatggtaagcatttgttaagccaggatcatatcctgggaaaaaactraaatcactggatttaggggtgcaatcattaaggagacttggcaataggagaattggtgtatccttccaatctcagagacccttttttttacatacaaaag

SEQ ID NO: 544417 - DNA, 201 bp, Homo sapiens
ggaggctgaggctggagaatcacttgaacccgggaggcagaggttgcagtgagccgagattgcgtcactgcactccagcctgtgtgacagagcaagtctcaaaaaaaaaaaaaaaaaaagagtggactagagtaaggctatgttagagtgcagtttatatagtcaaacaaagtattattttgtaaaacttgcttttcagtt

SEQ ID NO: 544418 - DNA, 201 bp, Homo sapiens
gagcaagagggtttctttgggaagtgggtgtgattggatcaggcaagacttgatgttttcaggcccagagcccagaagggacaccctgattctagaataaycatccctgagtcttgtgctagagatgttcttccatctttgttttaccagattgaagccttcagctgactgtggcccttttcgaggtctgcctctcttcat

SEQ ID NO: 544419 - DNA, 201 bp, Homo sapiens
cctgggttcatgccattctcctgcctcagcctcccgagtagttgggactacaggcacccaccaccacgcccagctaattttttgcatttttaatagagacrgggtttcactgtgttagccaggatgatctcgatctcctgacctcaagtgatccgcccgccttggcctcccaaagtgctgggattccaggcatgagccacc

SEQ ID NO: 544420 - DNA, 201 bp, Homo sapiens
acccctgggacacgagcttgcctccatgtaaaaagcgcgtcagagaactacagaccaagctcttgggatcatggaagggcccttcactctctgtcttaagwatttctgtggtttttacttaaaaagtaatattcatggccaggtgcagtggctcacgcctgtaatcccagcactttgggaggcctacgcgggtggatcaag

SEQ ID NO: 544421 - DNA, 201 bp, Homo sapiens
atcctgggaaaaaactaaaatcactggatttaggggtgcaatcattaaggagacttggcaataggagaattggtgtatccttccaatctcagagacccttktttttacatacaaaagttgagaattcagtgtttagagaagccaagttaattgtcatcaattataaaaaaaatgctaggtaagagttgtggaaaatgggga

SEQ ID NO: 544422 - DNA, 201 bp, Homo sapiens
aaagtgttcactccttaaggagaacctgtattcatctatgtaccctccaaggctctaggtgctcttcctagtgtcacagtgcctggcccacagtaggtgcytgaaaaatattaactgagttaataacaacaacaacaacaacaactataagagttgtatcagctagctattgccacaggaatgctgcataacaaacaactc

SEQ ID NO: 544423 - DNA, 201 bp, Homo sapiens
aaggtaaataagcaaaaagagtgaaggcattcttagccattggcacttctggctctgttgaagaaaccgattacccttggctgagaaatgggatccagagrggatagggcagggaagaaaagttttacggggagagatcatgaacagggaaagtttgggtatgtgtggaaggcaagctttaatgggggaaagaaggaaacc

SEQ ID NO: 544424 - DNA, 201 bp, Homo sapiens
ccactttggcctcccaaagtgccgaaattacaggcatacaccaccacacctagcctgttatccctattttagagactaagatattgaagctcagagatgcdaagacacacacccagggggcgcacaactaggaagtaacagggctgggagttgattcccaggcaagaagctccagaaggtcttgcaatgtaattttgcata

SEQ ID NO: 544425 - DNA, 201 bp, Homo sapiens
cctggatctcagtgcaaccattatttacacacacacgcacacacacacacacacacacacttttttactgggctccatgactcaagcctgtaatcccaacmctttgagaggccaaggctggcagattgtttgagccgcccagaagttcgagaccagcctggataacatggtgaaaccccctctctacaaaaaatacaaaat

SEQ ID NO: 544426 - DNA, 201 bp, Homo sapiens
cactaatttatttctggtgaaatatcctaagacaagtgtaagaattgctcatgtgtccattactttttcagttgcaaattggatccaaactggcttaaacraaattccaagaataattcttgctttaggccttgcctaacgcaggaactcacagtgtcaccagaacccggtttctttcagttccgttcttacccatgttag

SEQ ID NO: 544427 - DNA, 201 bp, Homo sapiens
cgcccgccactacacccggctaatttttttgtatttttttagtagggacggggttagccaggatggtctcgatctcctgacctcgtgatccacctgtctcrgcctcccaaagtgctgggattacaggcgtgagccactgtgcccggccacatatacatatatttttagagacagggtctcattatgttgcccaggatggtc

SEQ ID NO: 544428 - DNA, 201 bp, Homo sapiens
aagaccaggtctcagtcttattagccgttacgaaccactattagcacatcataactattgcatgccaggaatgtctagtgtggtgagactaatcggcaatrtctccttcctcttccctccagtgaaccctgcttatgtaggtgaaagtggtcctgtccatgcttatggaaacccaccattgtctgaatgtgattggcacaa

SEQ ID NO: 544429 - DNA, 201 bp, Homo sapiens
accccagctcacttgttctggaaaggagagaggtggaggtgagtctggaggctgccttggggacccctgggacacgagcttgcctccatgtaaaaagcgcrtcagagaactacagaccaagctcttgggatcatggaagggcccttcactctctgtcttaagtatttctgtggtttttacttaaaaagtaatattcatggc

SEQ ID NO: 544430 - DNA, 201 bp, Homo sapiens
agggagttcccttgaaatctgatggtttaaaagtgacagcttcccctgcacccactctctctcctgcccccatgtaagatgtgcccttctttcccctatgycttccaccacgtttgtaagtttcctgagaaatgccccccagccatgaggaactgtaagacaattaaacctcttttgtctataaattatgcagtctcaggc

SEQ ID NO: 544431 - DNA, 201 bp, Homo sapiens
aggatatggagaagaaagcaaaccccagctcacttgttctggaaaggagagaggtggaggtgagtctggaggctgccttggggacccctgggacacgagcytgcctccatgtaaaaagcgcgtcagagaactacagaccaagctcttgggatcatggaagggcccttcactctctgtcttaagtatttctgtggtttttac

SEQ ID NO: 544432 - DNA, 201 bp, Homo sapiens
tacgtgctctgacttcagcaccacatttcagtgttacgattctgttaaagaaaaaagaaattaaattccattaatttctttcataggacagaagttaatcrcatcccttatacccatgacatccagagacagaattaaagccatcaggaaccagccaaggaccatggaagagaaaaggaaccttaggtatggactaaaggc

SEQ ID NO: 544433 - DNA, 201 bp, Homo sapiens
gatggcagtcttggtgagtaattaaactgggacagaataagacactaatttatttctggtgaaatatcctaagacaagtgtaagaattgctcatgtgtccrttactttttcagttgcaaattggatccaaactggcttaaacaaaattccaagaataattcttgctttaggccttgcctaacgcaggaactcacagtgtca

SEQ ID NO: 544434 - DNA, 201 bp, Homo sapiens
gtggcatgtaagttgcttccagcagccgacttctggaggctactttctcaagcctgttaggggaattgctttagaggagaatattacagtgcaggaaggcyctgggggataatttggttttactgtgaaatgtttcttttctttcaccaaaagatggcagtaacctccatccaacttctaggatcctagctgcctgaaaac

SEQ ID NO: 544435 - DNA, 201 bp, Homo sapiens
ggctgaggtgggaggggaggactgcttgaggccaggagtttaagaccaacatagcgagaccccatcccttaaaaaattttaataattaggcacggtggcaygcaactgtagcctcagctactcaggaagctgaggtgagaggactgctcaaacccaggagtttgaggctacagtgagctatgatcccatcaccgcactcca

SEQ ID NO: 544436 - DNA, 201 bp, Homo sapiens
ttccagcacctagtacagtgcctggcacgtagtaggtattttagggatatttgttagattaatttgttgaatgagtacagaaatcaggacctcagtctgasgtcagggaactcaatgtcacctggactctggtttcccatccatttctcatctttgtaaaacttgcttttcagttctgtatgtataggtatgtcctggatc

SEQ ID NO: 544437 - DNA, 201 bp, Homo sapiens
agatgaccagggggtaagttcagatatatatcccttcactgggagtggatgctgagtgctgaatcattaagtcaatggaatttggttggtgtggtttagaytagggatatatatgacggtttctatgacctgaagttgtggtgaaatgcgcatacctatctgtagaccttacctgggccatggactctcagtttgaggctt

SEQ ID NO: 544438 - DNA, 201 bp, Homo sapiens
actccagacatggtggctgtttctgttattatggcacctgctcagtcgatatttgttgagtcaacagcaagccacacctgctttgaatcctgattccaggmttatcggagatccaagaacagcctgtcggaaattctgaattccatcagcctgtggcagaagacgctgaagatcattggaggcaagtttggaaccagcgtc

SEQ ID NO: 544439 - DNA, 201 bp, Homo sapiens
gtgagccctctgcttagccacctcattaggaagtcttgcttcctccctgggtccatctctaatgcgggggaaggactctggccagtctaactggagcacaygcctacacttgagccaatcatttttaccacaagggacaagactgggtcacctgtctattctgtggctaatgcctgtgttggtggggacaagatgcattga

SEQ ID NO: 544440 - DNA, 201 bp, Homo sapiens
ggggtttcggcattttggccaggctggtctcaaactcctgacctcaactgatctgcccacctcggcttcccaaagtgctgggattacaggcatgagccacygcacccagccccagaacttctgaccaaccagcttcaagttggggttcccacgacctcctcctttggtttggttaatttgctggagcagctcacagaactt

SEQ ID NO: 544441 - DNA, 201 bp, Homo sapiens
gtagctcatgcttgtaatcccagcactttgggaggcctaggcgggtggatcacttgaggtcaggagtttgagaccagcctgcccaacatggtgaaactccrtctctgctaaaaatacaaaagttagctgggcatggtggtacatgcctgtgatcccagctactcaggaggctcaggctggagaatcacttgaacccgggag

SEQ ID NO: 544442 - DNA, 201 bp, Homo sapiens
gctactcaggaggctgaggcaggagaattgcctgaacccaggaggcaaaggctgcagtgagccaagatcatgccactgtactccagcctgggcaacagagmgagactctgtctctaaataaataaataaataaaaatttttaaaaagcaaaaaaacaagaagcatggagggaggaagtgcaaagtttgtacagcagctcca

SEQ ID NO: 544443 - DNA, 201 bp, Homo sapiens
agaagtaggggagtaggaaaaaaggcttcctcgttgtccacagcatattttactttttagatatcaagtggggccaggcgtggtggctcacacctataatmctacggctttgggaggccaagataagaggaacacttgagcccaggtgttcgagactagcctgggcaacaaagggagacctcattgctacaaaaaaattta

SEQ ID NO: 544444 - DNA, 201 bp, Homo sapiens
ttggtgagtaattaaactgggacagaataagacactaatttatttctggtgaaatatcctaagacaagtgtaagaattgctcatgtgtccattactttttsagttgcaaattggatccaaactggcttaaacaaaattccaagaataattcttgctttaggccttgcctaacgcaggaactcacagtgtcaccagaacccg

SEQ ID NO: 544445 - DNA, 201 bp, Homo sapiens
gcaatagactctgcctaataagtgcaagacagctttatcaacttcttatatcttctcagagtcagtctggtgggaaagactgagggacccaggattctcayggtgtttcataggatctgactgggtgatgtccccgtctatgaaccaattgttgtgggtgcaaaaatgtggcagttcccttgatcacatgatttcatctgt

SEQ ID NO: 544446 - DNA, 201 bp, Homo sapiens
ccccatgtgtcgggggagagacctggtgggaggtgattggatcatgggggtggtttcccccatgctgttctcatgatattgagggagttcccttgaaatcygatggtttaaaagtgacagcttcccctgcacccactctctctcctgcccccatgtaagatgtgcccttctttcccctatgccttccaccacgtttgtaag

SEQ ID NO: 544447 - DNA, 201 bp, Homo sapiens
gtgattcccacaaaggcatcatacgtgctagaagtgatcccagagttttgatacacaaagcctggaactgcccaaattttgtccctctagtttcttccctkactcgttcctggttatggtggggtttataagtacaggtctgtaggccgggcatggtggctcatgcctgtaatcccagcactttgggaggccaaggcaggt

SEQ ID NO: 544448 - DNA, 201 bp, Homo sapiens
gagttatggtttgggtactaaactcagtatgttttcacagaatcattgggatgcaactgatcacaagtcttggccttcaggagtttgacattgccaggaaygttctagaactgatctatgcacaaactctggtgtggtaagttttgtgactcagcaaaatgcccagtggttcccacatgactgtggagctggtgttttggt

SEQ ID NO: 544449 - DNA, 201 bp, Homo sapiens
gaaggcttgcaggaggcaggagatgctgtccgatgaccacgtgaatgaaatcatcatacaggttgagaatgtttcctctggggtccaaagccacccatccycaaatcagatttttcaagaaaaggtgctgctagactcaagcatcaacatggttttgtcaatatctgacattgatgtgatagactctcagacagtcagcaa

SEQ ID NO: 544450 - DNA, 201 bp, Homo sapiens
atatagtcaaacaaagtattattttgtaaaacttgcttttcagttctatatgtataggtgtgtcctggatctcagtgcaaccattatttacacacacacgcacacacacacacacacacacacttttttactgggctccatgactcaagcctgtaatcccaaccctttgagaggccaaggctggcagattgtttgagccgc

SEQ ID NO: 544451 - DNA, 201 bp, Homo sapiens
agagtgttttttctgttctcttactcaacaaccatcaacacagaaggcttctgtgaacaaatgggtgggggtttctccccacacaccaagaaagcgatcarttttacagcagacatcgctgggtatcctccaattcaattctgacactatctacctggagatagtgtcagatcccataggacaaaggcgcagtccccaaga

SEQ ID NO: 544452 - DNA, 201 bp, Homo sapiens
tatagtcaaacaaagtattattttgtaaaacttgcttttcagttctatatgtataggtgtgtcctggatctcagtgcaaccattatttacacacacacgcacacacacacacacacacacacttttttactgggctccatgactcaagcctgtaatcccaaccctttgagaggccaaggctggcagattgtttgagccgcc

SEQ ID NO: 544453 - DNA, 201 bp, Homo sapiens
acagagtgagaacctgtcttaaaatatatattaatatatatatttaatgtaattttttatattatatattatattaaaatatatatttatagataatatawatattttaatatattatatttatttttatattatataacatataaaatatagattacatgtaacatataaaaataaatatattagaaatacaaaaaatat

SEQ ID NO: 544454 - DNA, 201 bp, Homo sapiens
gcccaggtgttcgagactagcctgggcaacaaagggagacctcattgctacaaaaaaatttaaaaaataataaccaggcatgatggtgcacacctgtggtmccagctactcaggaggctaaggtgggaagatcacttgagcctaggagttggaggctgcagcaagctctgatggcaccactgcaacccagcctgggtgaca

SEQ ID NO: 544455 - DNA, 201 bp, Homo sapiens
cccaggtgttcgagactagcctgggcaacaaagggagacctcattgctacaaaaaaatttaaaaaataataaccaggcatgatggtgcacacctgtggtcmcagctactcaggaggctaaggtgggaagatcacttgagcctaggagttggaggctgcagcaagctctgatggcaccactgcaacccagcctgggtgacag

SEQ ID NO: 544456 - DNA, 201 bp, Homo sapiens
tgcctgcgttaacttctctttcctgtgtcaaacctagacttgcgatctagaagatcagttcaagaaggtaatccaagggcctgatgactcttttggtaacsagacaccaatcaaataaggggaggagacgaaaatggaatgatttcttccatgccacctgtgcctttaggaactgcccagaagaaaatccaaggctttagc

SEQ ID NO: 544457 - DNA, 201 bp, Homo sapiens
ttaatcgcatcccttatacccatgacatccagagacagaattaaagccatcaggaaccagccaaggaccatggaagagaaaaggaaccttaggtatggacyaaaggcttttcttctttctcagatttcatgcgaacctcaatcctctacttttgccccatctcaaaaagataagaaataaataagcacaatagaagagaca

SEQ ID NO: 544458 - DNA, 201 bp, Homo sapiens
cagaattaaagccatcaggaaccagccaaggaccatggaagagaaaaggaaccttaggtatggactaaaggcttttcttctttctcagatttcatgcgaamctcaatcctctacttttgccccatctcaaaaagataagaaataaataagcacaatagaagagacaaatattcctgacagaaaaatttcaaatgccctctg

SEQ ID NO: 544459 - DNA, 201 bp, Homo sapiens
caagtttactgtaaatctcaaactatgataaataaaatctttacttaaaaaataaagatcagactagtgcagtggctcatgcctgtaatcccagcactttsggaggcttaggcgggcagatcatgaggtcaggagtttgagaccagcctggccaacatggtgaaaccttgtctctactaaaaatacaaaacttagccgggt

SEQ ID NO: 544460 - DNA, 201 bp, Homo sapiens
ttggttggatagtgatccatcattttggattttagggtgctcagcagaacatcttcaatccagccctcatttcgtcacaggagtgatgaccccgtgggcaktctttggggagagaatgattaccctgaaggcattgaaatggcatccatggagatggcaaactcatatggccactctctgccaggtgctcctggaagtggc

SEQ ID NO: 544461 - DNA, 201 bp, Homo sapiens
gaatagatttgtcaacaagtaaattacaaatggcagaaagtaaatcaggccaagtcaaaatagagattgcaatgggaggaccagaaaggtctgccctcccygactttgctggggaaaaatggagagagggggcatttgagctgggccttgaaagacaattgaccatgacattgggatgggccttcgaggtggaccaaagaa

SEQ ID NO: 544462 - DNA, 201 bp, Homo sapiens
ggaacccgagaggcggaggttgcagtgagccgagatcatgccattccactccagtctaggagataaagcaagactctgtcaaaaaaaaaaaaaaaaaaaaaaagagtatctgtggaatgaatgaatggaatcactctccctaaaaaacaaaacatgttcaatatttctatggcggagacttggccttaatctctcatccct

SEQ ID NO: 544463 - DNA, 201 bp, Homo sapiens
tgaggcaggagaatcacttgaacccgggaggtggaggttgcagtgagccaagattgcaccattgcgctccagcctgggtgacagagtgagactctgtctcwataaataaataaataaataaataaataaataaataaataaataaataaataatgtaggtatggtgaagcccaacaggtcaggaatgaccatcactaaaaa

SEQ ID NO: 544464 - DNA, 201 bp, Homo sapiens
gaacccgagaggcggaggttgcagtgagccgagatcatgccattccactccagtctaggagataaagcaagactctgtcaaaaaaaaaaaaaaaaaaaaaaagagtatctgtggaatgaatgaatggaatcactctccctaaaaaacaaaacatgttcaatatttctatggcggagacttggccttaatctctcatccctt

SEQ ID NO: 544465 - DNA, 201 bp, Homo sapiens
aacccgagaggcggaggttgcagtgagccgagatcatgccattccactccagtctaggagataaagcaagactctgtcaaaaaaaaaaaaaaaaaaaaaaagagtatctgtggaatgaatgaatggaatcactctccctaaaaaacaaaacatgttcaatatttctatggcggagacttggccttaatctctcatccctta

SEQ ID NO: 544466 - DNA, 201 bp, Homo sapiens
tttcccaagttttagtctattgtacactagcctgcctattttttggtatagtgacgtttcacctgtaccattatctacttaattttttttattatttgccttttttttttttttttactcaaataagtttttttttaatgccatggtagatgataactgcttttcatcagcctcccaaagtgctgggataacaggagtgag

SEQ ID NO: 544467 - DNA, 201 bp, Homo sapiens
tgtaacatataaaaataaatatattagaaatacaaaaaatatataaaatatatagtataaaatatatatttatttttatatcatgtagtttatatgtattwttttcttttttttttttttttgagtcagagtctcgctctgttgcccaagctggtgtgcagtggcgcgatctcggctcactgcaagctccacctcctgggt

SEQ ID NO: 544468 - DNA, 201 bp, Homo sapiens
ggaggcctacgcgggtggatcaagaggtcaggagtttgagaccagcctggccaatatggtgaaaccctgtctctactaaaaatacaaaagttagctgggtrtggtggcacgcacctgtagccccagctacttgggaggctgaggcagaagaattgcttgaacccaggaggtggaggttgcggtgagccaaaatcatgccac

SEQ ID NO: 544469 - DNA, 201 bp, Homo sapiens
cctggagatagtgtcagatcccataggacaaaggcgcagtccccaagactatatacctccttcagaccccagccacatgtccaggccgccggaactttttytttttattattattattatttttaaggatctcactccgttattcaggctggagtgcagtggcaccatctcagctcactgcaacatccgcctcccaggttc

SEQ ID NO: 544470 - DNA, 201 bp, Homo sapiens
caaacctagacttgcgatctagaagatcagttcaagaaggtaatccaagggcctgatgactcttttggtaaccagacaccaatcaaataaggggaggagaygaaaatggaatgatttcttccatgccacctgtgcctttaggaactgcccagaagaaaatccaaggctttagccaggagcggaaactgactaccatgtaat

SEQ ID NO: 544471 - DNA, 201 bp, Homo sapiens
atacttggggttttccaataaagattgttgtaatattgaaatgagcctacaaaaacctaggaagagataactagggaataatgtatattatcttcaagaartgtgtgcaggaatgattggttcttagaaatctctcctgccagacttcccagacctggcaaaggtttagaaactgttgctaagaaaagtggtccatcctga

SEQ ID NO: 544472 - DNA, 201 bp, Homo sapiens
gatagtgtcagatcccataggacaaaggcgcagtccccaagactatatacctccttcagaccccagccacatgtccaggccgccggaactttttctttttwttattattattatttttaaggatctcactccgttattcaggctggagtgcagtggcaccatctcagctcactgcaacatccgcctcccaggttcaagcga

SEQ ID NO: 544473 - DNA, 201 bp, Homo sapiens
ggaatacaaccagaggtctcatctctgaactttcttgcgtactgattacatgagtctttggagtcggggatggaggaggttctgcccctgtgaggtgttayacatgaccatcaaagtcctacgtcaagctagctttgcacagtggcagtaccgtagccaatgagatttatccgagacgcgattattgctaattggaaattt

SEQ ID NO: 544474 - DNA, 201 bp, Homo sapiens
tcaacaaccatcaacacagaaggcttctgtgaacaaatgggtgggggtttctccccacacaccaagaaagcgatcaattttacagcagacatcgctgggtrtcctccaattcaattctgacactatctacctggagatagtgtcagatcccataggacaaaggcgcagtccccaagactatatacctccttcagaccccag

SEQ ID NO: 544475 - DNA, 201 bp, Homo sapiens
agattctgttttctgaggcttaaaattctaacattataacaagggctatggtagttatgagccaggaaccacgggtgggaaaaaattatatatatatattwtatatatatatatcacaggaaccctggtagaagaggagtccccaaaaggcagagagtagtaaagaaatagaggaccaaaagatgaacctggctgtcttca

SEQ ID NO: 544476 - DNA, 201 bp, Homo sapiens
atatttttgtttctttctggttttgttttccttcttggtaggagggcaaagataaaatgttcctgatagaaaaattgatcaagctgcaggatatggagaaraaagcaaaccccagctcacttgttctggaaaggagagaggtggaggtgagtctggaggctgccttggggacccctgggacacgagcttgcctccatgtaa

SEQ ID NO: 544477 - DNA, 201 bp, Homo sapiens
ggcttctgtgaacaaatgggtgggggtttctccccacacaccaagaaagcgatcaattttacagcagacatcgctgggtatcctccaattcaattctgacrctatctacctggagatagtgtcagatcccataggacaaaggcgcagtccccaagactatatacctccttcagaccccagccacatgtccaggccgccgga

SEQ ID NO: 544478 - DNA, 201 bp, Homo sapiens
gataatttttgtattttcagtagacagagtttcaccatgttggccaggctggtcttgaactcctggcctcaagtgatccacccaccttggcctcccaaagtgctgtgattagaggcataaaccaccacacctggcaagaatgaatgaatgatataccagcctcttgttacaggaaggggccagagtgaaatgactaagagt

SEQ ID NO: 544479 - DNA, 201 bp, Homo sapiens
agaaagcgatcaattttacagcagacatcgctgggtatcctccaattcaattctgacactatctacctggagatagtgtcagatcccataggacaaaggcrcagtccccaagactatatacctccttcagaccccagccacatgtccaggccgccggaactttttctttttattattattattatttttaaggatctcact

SEQ ID NO: 544480 - DNA, 201 bp, Homo sapiens
ataatttttgtattttcagtagacagagtttcaccatgttggccaggctggtcttgaactcctggcctcaagtgatccacccaccttggcctcccaaagtkctgtgattagaggcataaaccaccacacctggcaagaatgaatgaatgatataccagcctcttgttacaggaaggggccagagtgaaatgactaagagtt

SEQ ID NO: 544481 - DNA, 201 bp, Homo sapiens
ggagaatggcgtgaacctgggaggtggaggttacagtgagctgagatcgcgccactgcactccagcctgggtgacatagcgagactccatctcaaaaaaawaaatatatatatacacacatttagaatatatatatgtatatttagaacatatatatgtatatttagaacatatatatatgtatatatataagttctaggc

SEQ ID NO: 544482 - DNA, 201 bp, Homo sapiens
ttttgtatttttagtagagatggggtttctccatgttggtcaggctggtctcaaacttccgacctcaggtgatccgcccgcctcggcctcccaaagtgctragattacaggtgtgagccatcgcccccagctgagataaagacttttaaaaataactacaatatcatcatcacacttaaaaaacttaacaataatttatta

SEQ ID NO: 544483 - DNA, 201 bp, Homo sapiens
agaatggcgtgaacctgggaggtggaggttacagtgagctgagatcgcgccactgcactccagcctgggtgacatagcgagactccatctcaaaaaaaaawatatatatatacacacatttagaatatatatatgtatatttagaacatatatatgtatatttagaacatatatatatgtatatatataagttctaggcca

SEQ ID NO: 544484 - DNA, 201 bp, Homo sapiens
tgaggtgggaggatcgcttaagtccaggagatcagtgttgcagtgggctgtgattgtgccactgcactctagcctgggtgacacagcaagatcctgtctcaaaaaaaaaaaaaaaaaaaaatagaagaggtagggtgaccaaacacgcaggatcttattgactttgctaaatgttttttgttacaggaaagagaaaaacac

SEQ ID NO: 544485 - DNA, 201 bp, Homo sapiens
tcacagagggaaggaagattatgataaggctgctccatgagcagatcattaatgtaagtccccttggatccctctgatgtccgccctcaccctttttaaaygctgtataaacatcctccaaaataaagagaatactacaatgaactctcatatccctgctctcagccctaacaaccatcaatgtttttatattcttatttc

SEQ ID NO: 544486 - DNA, 201 bp, Homo sapiens
tattttccatatcctacatatatcttttttttttgttttgacatggagtcttgctctggggcacgtgcctatgggggatactggaaaccatttttcctggstattgagacgtggcatgtaagttgcttccagcagccgacttctggaggctactttctcaagcctgttaggggaattgctttagaggagaatattacagtg

SEQ ID NO: 544487 - DNA, 201 bp, Homo sapiens
gcttccagcagccgacttctggaggctactttctcaagcctgttaggggaattgctttagaggagaatattacagtgcaggaaggctctgggggataattyggttttactgtgaaatgtttcttttctttcaccaaaagatggcagtaacctccatccaacttctaggatcctagctgcctgaaaaccgacgttcttccca

SEQ ID NO: 544488 - DNA, 201 bp, Homo sapiens
acacctctcattttgcctgggggtcaactgatggggaaagtggatgtttgaaatgttttcctggctgagtgtggtgactcatgcctgtaatcccagcaagytgggaggccaaagcagtggagaccagcctgggcaacatggcaaaaccccgtctctacaaaaatgcaaaaattagcagggcatggtggcacacacctgtaa

SEQ ID NO: 544489 - DNA, 201 bp, Homo sapiens
tccccagcccagccccttttttcttgacattggcttattgcagaaattgggcctactgctatgtagattccaacatcctaccttctggaattgtctgatgrtttcctagtggtttctagaatttgtttctctggcttcttatttcctgtgcactgaaatgtaggcctataggcttgattcgtttcctattaagcatgttta

SEQ ID NO: 544490 - DNA, 201 bp, Homo sapiens
tcgaggctgcagtgagctgagatcagtctactacactccagcctgagcaactggagatcctgtttcaaaaaaaaaagagagagaaagaaagaaaagcaacwtgcaatctctgtattagtttgctagggctgcctagcaaagtacagcagaccattggtttaaacaacagaaatttattttctcatggttctggaggcctga

SEQ ID NO: 544491 - DNA, 201 bp, Homo sapiens
cctctctccttggcttgtagacggccactgtctcctgcctgtgtcttcacatggttatccctctgtgtcttaatctcccttttttataaagatgccatttstactgaattgggacacaatttaatgaccccattttaaaaaaatgtaattaccactttaattaattaattaatttattttgagatggagtctcactctgtt

SEQ ID NO: 544492 - DNA, 201 bp, Homo sapiens
tttttgtatttttagtagagatggggttttaccatgttggccaaccttgtctcgaactcctggcctcaggtgatctgcccaccttgacttcccaaagtgcwgggatggattacgggtgtaagccaccacatccagcctcaagcctgcatccttaatcgctacactgtctcactttgggctaattcctcctcaccctggtca

SEQ ID NO: 544493 - DNA, 201 bp, Homo sapiens
tggcttgtagacggccactgtctcctgcctgtgtcttcacatggttatccctctgtgtcttaatctcccttttttataaagatgccatttgtactgaattrggacacaatttaatgaccccattttaaaaaaatgtaattaccactttaattaattaattaatttattttgagatggagtctcactctgttgcccaggctg

SEQ ID NO: 544494 - DNA, 201 bp, Homo sapiens
gagtctcgctctgtcacccatgctggagtacagtggcgcaatctgggctcactgcaacctccacctcccaggttcaagtgattctccttcctcagcctccygagtagctaggattacaggcacctgccaccacgccccgctaatgtttgtatttttaatagagatggggtttgaccatgttggccaggctggtctcaaact

SEQ ID NO: 544495 - DNA, 201 bp, Homo sapiens
taatctcccttttttataaagatgccatttgtactgaattgggacacaatttaatgaccccattttaaaaaaatgtaattaccactttaattaattaattwatttattttgagatggagtctcactctgttgcccaggctggagtgcagtggtgtgatctcagctcactgcaacctctgtcccccaggttcaagggattct

SEQ ID NO: 544496 - DNA, 201 bp, Homo sapiens
ctgctcttgaggctgaggcaggagaatcacttgaacccgggaggtggaggttgcagtgagccaagattgcaccattgcgctccagcctgggtgacagagtragactctgtctcaataaataaataaataaataaataaataaataaataaataaataaataaataatgtaggtatggtgaagcccaacaggtcaggaatga

SEQ ID NO: 544497 - DNA, 201 bp, Homo sapiens
aagtaggaaatgattttattattattattattattaatattttgagacagagtcttgctctgtcacccaggctggagtgcagtggtgtgatcttggctcaytgcaacctccgcttctcgggttcaagtgattctcctgtctcagcctcctgagtagctgggattacaggctcatgccaacacacccagctaatttttctat

SEQ ID NO: 544498 - DNA, 201 bp, Homo sapiens
tgtgccaccacgcccagctaatttttgtatttttagtagagacggggtttcaccatgttgactaggctggtctcaaactcctgacctcaagtgatccaccygccttggcctcccaaagtgctgggattacaggcgtgagccactgcgcccagccaatatgcctaactttcttttactctataaccatttaccacttcccct

SEQ ID NO: 544499 - DNA, 201 bp, Homo sapiens
taatattttgagacagagtcttgctctgtcacccaggctggagtgcagtggtgtgatcttggctcactgcaacctccgcttctcgggttcaagtgattctyctgtctcagcctcctgagtagctgggattacaggctcatgccaacacacccagctaatttttctatttttagtagagacagggtttcaccatgttggcca

SEQ ID NO: 544500 - DNA, 201 bp, Homo sapiens
gcatctgcaaacatacctgtatctaccaacactttaatttacttgtttattacaaaagtgaggctatattatacaaatagtatcataacttccctcccccrcagcccaccactaaatactatatcttgaacgatgtttaattctgtacatatttggatatttgggttgtttctatgtttttaaatacttaaaacagtaggt

SEQ ID NO: 544501 - DNA, 201 bp, Homo sapiens
gtgcctgtagttccagctactttggaggctgtggcgtgaggatggcttgagcccaggaggtggaggctgcagtgagctatgactacaccactgcactctakcctgggccacacagcaagacctcatccctaaacaaacagaaaacacaaaaacaagaaaagacattttctgacttctgatctctagaagggtaaaagaaca

SEQ ID NO: 544502 - DNA, 201 bp, Homo sapiens
cagcaacagggaactgggtggattacttgaggtcaggagttcaagaccagcctagccaacatggtgaaaccctgcctctactaaaaatacaaaaattggcygggcgtggtgatgggcacctgtaatccctgttacttgggagactgaggcaggagaatcgcttgaaccttggaggtggaggttgcagtgagcagagatcac

SEQ ID NO: 544503 - DNA, 201 bp, Homo sapiens
ctctactaaaaatacaaaaattagccaagtgtggtggtgcatgcctgtaatcccagctgctcttgaggctgaggcaggagaatcacttgaacccgggaggyggaggttgcagtgagccaagattgcaccattgcgctccagcctgggtgacagagtgagactctgtctcaataaataaataaataaataaataaataaata

SEQ ID NO: 544504 - DNA, 201 bp, Homo sapiens
tgaccaaaagggtaaccaggtgctgcggttttcaacatctttgaatgagtcgatgtctcagacccttcatagcctagaatgcatgggcatagacactcctsgttcttcacatgaaactgttcaaggtagtgaaatgctggggaagagaagtaggggagtaggaaaaaaggcttcctcgttgtccacagcatattttacttt

SEQ ID NO: 544505 - DNA, 201 bp, Homo sapiens
ctcccaaagtgctaagattacaggtgtgagccatcgcccccagctgagataaagacttttaaaaataactacaatatcatcatcacacttaaaaaacttamcaataatttattattatcatcttatatccaatgtttacatttccccaactgtccccttaagtgtctttttatactagaactgcacaaatcaggatctgaa

SEQ ID NO: 544506 - DNA, 201 bp, Homo sapiens
aagcccttctttctttcttttcttttcctttccttttgtctttctttctttctttctttctttctttctttctttctttctttctttctttcttttccttycttccttccttccttccttccttccttccttccttccttccttcctccctccctccctccctcccttcctggaccccaaaatgtctttcataacttgctt

SEQ ID NO: 544507 - DNA, 201 bp, Homo sapiens
cagaagaatcttagcactgagataagggtaaggcgagctcactttactcatttgccatcggctggtctccttcccttctccagtatacctgtaacttttcttttttttttttttgaattggagtctcactctgtcgcccaggctggagtgcagtggcgcaatcccggctcactgcaggctccgcctcccgggttcacgcca

SEQ ID NO: 544508 - DNA, 201 bp, Homo sapiens
agaagaatcttagcactgagataagggtaaggcgagctcactttactcatttgccatcggctggtctccttcccttctccagtatacctgtaacttttcttttttttttttttgaattggagtctcactctgtcgcccaggctggagtgcagtggcgcaatcccggctcactgcaggctccgcctcccgggttcacgccat

SEQ ID NO: 544509 - DNA, 201 bp, Homo sapiens
aatatttctatggcggagacttggccttaatctctcatcccttaacttctataaaatggtgaggggctcacaaattgtgccaaatatgtgacaagacccaraatctgcattcttcctccgtgacgtggctgcttgtttttttctttttcagcaacaaggctttttgcatttgggggaacatgatggcagtcttggtgagta

SEQ ID NO: 544510 - DNA, 201 bp, Homo sapiens
gcactgagataagggtaaggcgagctcactttactcatttgccatcggctggtctccttcccttctccagtatacctgtaacttttctttttttttttttkgaattggagtctcactctgtcgcccaggctggagtgcagtggcgcaatcccggctcactgcaggctccgcctcccgggttcacgccattctcctgcctca

SEQ ID NO: 544511 - DNA, 201 bp, Homo sapiens
taaggcaggagaatcacttgaacctcggaggcagaggttgcagtgagccgagatcgtgccactgcactccagcctgggcaacagagcgagactccggctcaaaaaaaaaaaaaaaaaaaaaaaaaaaaaaaaaaaaccagcagcacgggctagcagagacacgccaaccccctaattcagaactcagagagaggtgaagcc

SEQ ID NO: 544512 - DNA, 201 bp, Homo sapiens
gcactccagcctgggcaacagagcgagactccggctcaaaaaaaaaaaaaaaaaaaaaaaaaaaaaaaaaaaaccagcagcacgggctagcagagacacgycaaccccctaattcagaactcagagagaggtgaagcctggtgaaaatgaacaaggccacttatgctaaacaggagggagcacatcctcattgccctgggc

SEQ ID NO: 544513 - DNA, 201 bp, Homo sapiens
cgaggcgggtggatcacgaggtcaggagatcgagaccatcctggctaacatggtgaaatcccgtctctactaaaaatacaaaaaaaattagccaggtgtgrtggcgggcgcctgtagtcccagctactcgggaagctgaggcaggagaatggcgtgaacctgggaggcggatcttgcagtgagctgagatcgcgccactgc

SEQ ID NO: 544514 - DNA, 201 bp, Homo sapiens
acggtggtgtgcacctgtagttctggctacagtggtggtcattcattggtgactacagtttcacatgaatggagctcagctgtgtcgtttcacagccctgrggccaggccttgccttgtttgatctcagttaattcttgcaacatctctatgagtcatgtgatcatctctccattgtacagatggagaaaaggggctcaga

SEQ ID NO: 544515 - DNA, 201 bp, Homo sapiens
caccagcctctatttccacagagagaagtgggatggcagctagaaaggattatgctttagtatcaaagttttttctccagagaggaagaatttcaaaagtaaggtgtggctgggcgtggtggctcatgtcagtaatcccagcactttgggaggttgagtggggaggatcacttgagaccaggagttcgagaacagcctggg

SEQ ID NO: 544516 - DNA, 201 bp, Homo sapiens
tacagtgagctatgatcccatcaccgcactccagcttgggagacagaacaagaccctctctctaaaaaaaattaccctgggcacagtggctccctcctgtratccccagcactttgggaggccgaggcgggcttatcacttgaggtcaggggttcgagaccagcccagcaaacatggtgaaacccatctctagtaaaaata

SEQ ID NO: 544517 - DNA, 201 bp, Homo sapiens
gaagtgggatggcagctagaaaggattatgctttagtatcaaagttttttctccagagaggaagaatttcaaaagtaaggtgtggctgggcgtggtggctyatgtcagtaatcccagcactttgggaggttgagtggggaggatcacttgagaccaggagttcgagaacagcctgggcaacatagccggatgctggctcta

SEQ ID NO: 544518 - DNA, 201 bp, Homo sapiens
cccagccatgaggaactgtaagacaattaaacctcttttgtctataaattatgcagtctcaggcagtatttttatagcagtgtgaaaacagactaatacartaagacttaaaggacagtgaccaaaaagtcaaccctggagaaggaacatgtccaagacaatccacccattgccatttcctttgacctccagtgtggttac

SEQ ID NO: 544519 - DNA, 201 bp, Homo sapiens
aggccaaggcaggtggatcacctgaggtcaggagtttgaaaccagcctggccaacatggtgaaaccccgtctttactaaaaatacaaaaattagctgggcktggtgacgcatgtctgtaatcccagctacttgagaggctgaggcgggagaatttcttgaacctgggaggcggaggttgcagcgaaccgagatcctgccac

SEQ ID NO: 544520 - DNA, 201 bp, Homo sapiens
ggccgaggcaggaggatcacctgaaacccaggagttcgagaccagcctgggcaacatggagacttcatcgctaaaaaaattttaaaaattagcctgtcacrgtggtgtgcacctgtagttctggctacagtggtggtcattcattggtgactacagtttcacatgaatggagctcagctgtgtcgtttcacagccctgggg

SEQ ID NO: 544521 - DNA, 201 bp, Homo sapiens
tacaaaaattagctgggcttggtgacgcatgtctgtaatcccagctacttgagaggctgaggcgggagaatttcttgaacctgggaggcggaggttgcagygaaccgagatcctgccactgcactccagcctgggtgacagagagagactccatctcagaaaaaaaaaaaaagtgtaggtctgtacaatgcagactgagtt

SEQ ID NO: 544522 - DNA, 201 bp, Homo sapiens
aaaaaaagtgtaggtctgtacaatgcagactgagtttctttgctgatcagttccagagcccttgccttaccacggtctgtgagatccggctcccggccagygctccagcctcattttctccccatccttcctgctcactgcctgtccccgtcacagacctcctaagcgttcacaaatatgccaaaccatattcccacctct

SEQ ID NO: 544523 - DNA, 201 bp, Homo sapiens
tgcagactgagtttctttgctgatcagttccagagcccttgccttaccacggtctgtgagatccggctcccggccagcgctccagcctcattttctccccrtccttcctgctcactgcctgtccccgtcacagacctcctaagcgttcacaaatatgccaaaccatattcccacctctggacctttgcatgggcctggaat

SEQ ID NO: 544524 - DNA, 201 bp, Homo sapiens
cattagctgggtgtggtggctcacgcctgtaatcccagcactttgggaggccgaggcgggtggatcacgaggtcaggagatcgagaccatcctggctaacrtggtgaaatcccgtctctactaaaaatacaaaaaaaattagccaggtgtggtggcgggcgcctgtagtcccagctactcgggaagctgaggcaggagaat

SEQ ID NO: 544525 - DNA, 201 bp, Homo sapiens
ctgccgctgctccggctgcagatgggaggtggctgcctctctctcttcagatcagcctgatgatgaatttccagcctccgagcaaagcctggcgggcctcrcagatgatgactttcttcatcttcttgctctttttcccatccttcaccggggtcttgtgcaccctggccatcaccatctggaggtaggagaaggtggcct

SEQ ID NO: 544526 - DNA, 201 bp, Homo sapiens
cagtatttttatagcagtgtgaaaacagactaatacagtaagacttaaaggacagtgaccaaaaagtcaaccctggagaaggaacatgtccaagacaatcyacccattgccatttcctttgacctccagtgtggttactgatgcagaacctgcttaacatatcataatggagttttcttttagatgtatagtttgttgtct

SEQ ID NO: 544527 - DNA, 201 bp, Homo sapiens
cgtactgattacatgagtctttggagtcggggatggaggaggttctgcccctgtgaggtgttatacatgaccatcaaagtcctacgtcaagctagctttgcacagtggcagtaccgtagccaatgagatttatccgagacgcgattattgctaattggaaattttcccaataccccaccgtgatgacttgaaatataatca

SEQ ID NO: 544528 - DNA, 201 bp, Homo sapiens
gtactgattacatgagtctttggagtcggggatggaggaggttctgcccctgtgaggtgttatacatgaccatcaaagtcctacgtcaagctagctttgcacagtggcagtaccgtagccaatgagatttatccgagacgcgattattgctaattggaaattttcccaataccccaccgtgatgacttgaaatataatcag

SEQ ID NO: 544529 - DNA, 201 bp, Homo sapiens
acacacaagaattgcttgaacctgggaggcagaggttgcagtgagccaagatcatgccatggtactccagcctgggcagcgagagtgaaactctgtctcaaaaagaaaagaaaagaaaagaaaaggccaggcacggtggctcacgcctgtaatcccagcactttaggaggccggatcacctgaggccaggagttcgaggcc

SEQ ID NO: 544530 - DNA, 201 bp, Homo sapiens
taatcagcgctggcaatttttgacagtctctacggagactgaataagaaaaaagaaaagaaaagaaattagctgggtgcgatggcttatgcctgtaatccyggcactttgggaggctgaggcaagcggatcacttaatgtcaggagttcaagaccagcctggccaacatggtgaaaccccgtctctactaaaaataaaaaa

SEQ ID NO: 544531 - DNA, 201 bp, Homo sapiens
cacacaagaattgcttgaacctgggaggcagaggttgcagtgagccaagatcatgccatggtactccagcctgggcagcgagagtgaaactctgtctcaaaaagaaaagaaaagaaaagaaaaggccaggcacggtggctcacgcctgtaatcccagcactttaggaggccggatcacctgaggccaggagttcgaggcca

SEQ ID NO: 544532 - DNA, 201 bp, Homo sapiens
acacaagaattgcttgaacctgggaggcagaggttgcagtgagccaagatcatgccatggtactccagcctgggcagcgagagtgaaactctgtctcaaaaagaaaagaaaagaaaagaaaaggccaggcacggtggctcacgcctgtaatcccagcactttaggaggccggatcacctgaggccaggagttcgaggccaa

SEQ ID NO: 544533 - DNA, 201 bp, Homo sapiens
cacaagaattgcttgaacctgggaggcagaggttgcagtgagccaagatcatgccatggtactccagcctgggcagcgagagtgaaactctgtctcaaaaagaaaagaaaagaaaagaaaaggccaggcacggtggctcacgcctgtaatcccagcactttaggaggccggatcacctgaggccaggagttcgaggccaac

SEQ ID NO: 544534 - DNA, 201 bp, Homo sapiens
acaagaattgcttgaacctgggaggcagaggttgcagtgagccaagatcatgccatggtactccagcctgggcagcgagagtgaaactctgtctcaaaaagaaaagaaaagaaaagaaaaggccaggcacggtggctcacgcctgtaatcccagcactttaggaggccggatcacctgaggccaggagttcgaggccaacc

SEQ ID NO: 544535 - DNA, 201 bp, Homo sapiens
tcacgtgattgtcccacctcagcctcccgagtagctgggactataggcacacatcaccatgcctggctaattatttttttattttttatttttttgagacrgagtctcactctgtcatccaggctggagtgcagtggcgcaatctcggctcactgcaagctccgcctcccaggttcacgcccttctcctgcctcagcctcc

SEQ ID NO: 544536 - DNA, 201 bp, Homo sapiens
gactataggcacacatcaccatgcctggctaattatttttttattttttatttttttgagacggagtctcactctgtcatccaggctggagtgcagtggcrcaatctcggctcactgcaagctccgcctcccaggttcacgcccttctcctgcctcagcctcctgagtagctgggactacaggcgcccgccaccacgccca

SEQ ID NO: 544537 - DNA, 201 bp, Homo sapiens
tgactcagcaaaatgcccagtggttcccacatgactgtggagctggtgttttggtggcaaagtcccagaatctgttgtttttaaagctgcaggggtgatamcccatccagccagtctgagaaccatgaatttagcatttagactatcattttcctttatgagagcttaaggacttcagacaagaatcagcatagagcaggg

SEQ ID NO: 544538 - DNA, 201 bp, Homo sapiens
aggatggtcttgatctcctgaccttgtgatccacccgcctcggcctcccaaagtgctgggattacaggcatgagccaccgcgcctggcatgcctggctaattttttttttttttttttttttagaaatgggtgtcttgctatgttgcctaggctggtctcgaactcttggcctcaagagatccttctgccttggcctctca

SEQ ID NO: 544539 - DNA, 201 bp, Homo sapiens
aaccatcaatgtttttatattcttatttcatctacactttctcttcccagcaaatcccttatttttattcttagtatttatttattttaattatgatgatkattattattattttgagatagagttttgctcttgttgcccaggctggagtgcagtggtgcaatctcggctcacggcaacttctgcctccagggttcaagc

SEQ ID NO: 544540 - DNA, 201 bp, Homo sapiens
catcaatgtttttatattcttatttcatctacactttctcttcccagcaaatcccttatttttattcttagtatttatttattttaattatgatgatgatkattattattttgagatagagttttgctcttgttgcccaggctggagtgcagtggtgcaatctcggctcacggcaacttctgcctccagggttcaagcgat

SEQ ID NO: 544541 - DNA, 201 bp, Homo sapiens
actgagccatttgaaatcttatccagccgagggcagtggctcacgcctgtaatcccaacactttgggagaccgaggcaggaggatcacttgaggccaggartttgagactagcctgggcaaaataggaagactctgtctctatccaaaaaaaaaaaaaaagaagaagaagaagaaaaaggcaaagaaagaaaagaagaaaa

SEQ ID NO: 544542 - DNA, 201 bp, Homo sapiens
cctgtaatcccaacactttgggagaccgaggcaggaggatcacttgaggccaggagtttgagactagcctgggcaaaataggaagactctgtctctatccaaaaaaaaaaaaaaagaagaagaagaagaaaaaggcaaagaaagaaaagaagaaaaaaagaaatcttatccactgtagataatttcaatattctagtatat

SEQ ID NO: 544543 - DNA, 201 bp, Homo sapiens
catacctgtaatcccaacactttgggaggccaaggcgggtgaatcacctgaggtcaggagttcaagagcagcctggccaacgtggtgaaaccctgtctctmctaaaaatacaaaaattagccgagcatggtggtgtgtgcctataatcccaactacttgggaggctgaggcaggagaatcgcttgaacccgggagatggag

SEQ ID NO: 544544 - DNA, 201 bp, Homo sapiens
taaccgcagaggagctacttctcgggttttctatcatgggagacttttgagtgaagcagaaaggggtacagtgtacaagtcagccctccgttctctccccmatcccctgcagttcctgaagacacacagtaaccctggggcggtgctgttactgcctttcgttgtgtcctgcattaatctggccgtgccatgcatctactc

SEQ ID NO: 544545 - DNA, 201 bp, Homo sapiens
aggcgggtgaatcacctgaggtcaggagttcaagagcagcctggccaacgtggtgaaaccctgtctctactaaaaatacaaaaattagccgagcatggtgrtgtgtgcctataatcccaactacttgggaggctgaggcaggagaatcgcttgaacccgggagatggaggttgcagtgagccgagagggcgacattgccct

SEQ ID NO: 544546 - DNA, 201 bp, Homo sapiens
tgaggcaggagaatcgcttgaacccgggagatggaggttgcagtgagccgagagggcgacattgccctccaccctgggtgacacagcgagactccatctcaaaaaaaaaaaaaaaaaaaaagtgaaaagatttttttttgacagatctttttttttaaattggcaactcatctttatgaataaattaatatgaaatcaagt

SEQ ID NO: 544547 - DNA, 201 bp, Homo sapiens
cagttctaacctttgcgggttttaggagaatattgcctttgatgatgagttttacaagaagataatataatgacagaaaaggatatatgttagggacagtrgtagagatgaagtgaggaacatgtttcccaagttttagtctattgtacactagcctgcctattttttggtatagtgacgtttcacctgtaccattatcta

SEQ ID NO: 544548 - DNA, 201 bp, Homo sapiens
acaaaatgcccgctctttagtgcaggctggagtgcagtggtgcaatctcagctcactgcagcctttacctcctgagtggctgggactacaggcacactacyaccatgcccagccaatttttttattttttgtagagacagggttatgccatgttgcccaagctggtctcaaactcctgtgctcaagcgactgtcccacttt

SEQ ID NO: 544549 - DNA, 201 bp, Homo sapiens
ttatttttattcttagtatttatttattttaattatgatgatgattattattattttgagatagagttttgctcttgttgcccaggctggagtgcagtggygcaatctcggctcacggcaacttctgcctccagggttcaagcgattctcctgccccaacctcccaagtagctggaattacaggtgcctgccaccatgccc

SEQ ID NO: 544550 - DNA, 201 bp, Homo sapiens
tccccaactgtccccttaagtgtctttttatactagaactgcacaaatcaggatctgaaaagggggtacatgttgcatttggttaatgtctctctctctctctctctctcttttttttttttttgagacagaatctcactgtgtctcccaggctggaacgcagtggcatgattttggctcactgcaacttctgcctcctgg

SEQ ID NO: 544551 - DNA, 201 bp, Homo sapiens
tccccttaagtgtctttttatactagaactgcacaaatcaggatctgaaaagggggtacatgttgcatttggttaatgtctctctctctctctctctctcttttttttttttttgagacagaatctcactgtgtctcccaggctggaacgcagtggcatgattttggctcactgcaacttctgcctcctgggttcaagtga

SEQ ID NO: 544552 - DNA, 201 bp, Homo sapiens
ctataaccatttaccacttcccctccccacttcctcttttctttttattgttaaagaatgcaggtcatctgtttcatattttccatatcctacatatatcttttttttttgttttgacatggagtcttgctctggggcacgtgcctatgggggatactggaaaccatttttcctgggtattgagacgtggcatgtaagttg

SEQ ID NO: 544553 - DNA, 201 bp, Homo sapiens
tcagagaactacagaccaagctcttgggatcatggaagggcccttcactctctgtcttaagtatttctgtggtttttacttaaaaagtaatattcatggcyaggtgcagtggctcacgcctgtaatcccagcactttgggaggcctacgcgggtggatcaagaggtcaggagtttgagaccagcctggccaatatggtgaa

SEQ ID NO: 544554 - DNA, 201 bp, Homo sapiens
ttctggacaccgacagcattagtctgggttacttagttctaccaaatctaatttttcctgggttaagatttttcatgttcacgttgccaacaaaatgtaattttttttttttttttttgagacagcgtctcactctgtcatccaggttggagtgcagtggctcagttttggctcactgcaacctccatctcttaggttcaa

SEQ ID NO: 544555 - DNA, 201 bp, Homo sapiens
gttgccaacaaaatgtaattttttttttttttttttgagacagcgtctcactctgtcatccaggttggagtgcagtggctcagttttggctcactgcaacytccatctcttaggttcaagtgattctcctgcctcagcctcccaagtagctgggattacaggcatgcaccaccatgcccagctagtttttgtagttttagt

SEQ ID NO: 544556 - DNA, 201 bp, Homo sapiens
tataaaatctcttttccagagctgggaagaaggcagctgaggatactgggtatggtgggaatctgcctaatttgctgggatggaagcaggccccctctgtrttcgtttgctggggctgccataacaaagtctcacacactgagtgccttaaacaacatcaatttcatatcttacagttctggaggccagaaggccaagatc

SEQ ID NO: 544557 - DNA, 201 bp, Homo sapiens
catatcttacagttctggaggccagaaggccaagatcaaggtgcgggtggggttggtttcttctgagggtcataagggagggatctgtctcaagcctctcyccctggtttatagacggccatcttctccccatgtctttacatggtcttcatttctgtgtgtgtctatgtcctaatctcttctttttttgttgttgagatg

SEQ ID NO: 544558 - DNA, 201 bp, Homo sapiens
aatgggatccagaggggatagggcagggaagaaaagttttacggggagagatcatgaacagggaaagtttgggtatgtgtggaaggcaagctttaatgggrgaaagaaggaaacccaaaagagaacaacatccctgggaacaaactcagctgcattttttcagagtgggtctacttttttgagtacacaaggacttggtca

SEQ ID NO: 544559 - DNA, 201 bp, Homo sapiens
gccatcatgcctggctaatttttgtattttttgtagagatggggtttcaccatgttgcccaggctggtcttgaactcctgacctcaggtgattcacccccycttggcctcccaaagttctgggattacaggcataagccaccgttcctggcctcctaatctcttcttttagggacaccggttgtactggattagggcctcc

SEQ ID NO: 544560 - DNA, 201 bp, Homo sapiens
aatctcttcttttagggacaccggttgtactggattagggcctcctacagtgatctcattctaccttaatcacctctcaaaggccctgtctccaaatacastcacattctgagatattcggggttaaggcctcaatatatggattttggggacacacaatccaggccacaatatcttctttctcttccccccaaccatccc

SEQ ID NO: 544561 - DNA, 201 bp, Homo sapiens
gcaagagggtgaaaacagggagggaggagagtgaggatgaaaggggactcagggggaagatgaaccaaaaatcagagcaatttcattgcccagagccaacrgttagtacaggtgtggaaaagcgaggtgggcatggggaagaactaagaggttgctgagttcattggccaacttggccattgtgagtggcaccttcaacag

SEQ ID NO: 544562 - DNA, 201 bp, Homo sapiens
ggccttgggggaggttttagagactgggtggatgggtgtgtgttttaaaacgtaggttttattataattcaggtgtggtgaggccgggtgcagtggctcasgcctgtgatcccggcactatgggaggccaaggcgggtggatcacttgaggccaggagttcaggaccagcctggccaacatggtgaaaccctgtctctact

SEQ ID NO: 544563 - DNA, 201 bp, Homo sapiens
gcctctcaaagtgctggaattgcaggcgagccaccatacttgtctttaatttcatttctttttttttttcagacagggtcttgctctgttgcccaggctgmagtacagtggtgtgatcacagctcactatagcctcaacctcctgggctcaagtgatcctcccacctcagcctcctatgtagccaggaccacaggcatgtg

SEQ ID NO: 544564 - DNA, 201 bp, Homo sapiens
agtctgactgcccccattcatatcattgagccaagttactgcagaagtcactgcttggcctttggattggctgctgttgggtcagctctgatctgagagcmggtccttagagtacaggtcaccccagcaaggctgagagcaagagggtttctttgggaagtgggtgtgattggatcaggcaagacttgatgttttcaggcc

SEQ ID NO: 544565 - DNA, 201 bp, Homo sapiens
catacgccatcatgcctggctaatttttgtattttttgtagagatggggtttcaccatgttgcccaggctggtcttgaactcctgacctcaggtgattcaccccctcttggcctcccaaagttctgggattacaggcataagccaccgttcctggcctcctaatctcttcttttagggacaccggttgtactggattaggg

SEQ ID NO: 544566 - DNA, 201 bp, Homo sapiens; identical to SEQ ID NO: 371989

SEQ ID NO: 544567 - DNA, 201 bp, Homo sapiens
taggaggggcccccagaccatggattcttttcttttcttttcttttcttttcttttcttttcttttcttttcttttcttttctttctctttctttctgtcyctctctttctttctttctttctcttccttcctttctttctttcccttctttctttcctttttctttctttccttcctttcttcctttccttctctttctt

SEQ ID NO: 544568 - DNA, 201 bp, Homo sapiens
ccatagccctagaccttccctgcctggtcccacttttgcccttgaggcaactcaaagcagctctgcccctcttctatgtatcagacctccagtactgagaraaggccatcatatccccttcttctcccttctggatctaccacccctaacaaaaatcagtgagcactaggtactgagtaaagatggggagcaccccctttg

SEQ ID NO: 544569 - DNA, 201 bp, Homo sapiens
tgaatgacagagcgacatactgtctcaaaaaaaaaaaaaagaaaaaagtgtttctgaagcaaaaatgacgaatgtcagtgtatgttaattctggttgattrgatacattaatatcgctttattctacttactttttcttttttttaaaactggcttcctaacttgtgtttatattctacttactttttcatgtgtacgttt

SEQ ID NO: 544570 - DNA, 201 bp, Homo sapiens; identical to SEQ ID NO: 372030

SEQ ID NO: 544571 - DNA, 201 bp, Homo sapiens
cccgtctctactaaaaatacaaaaaaattagccaggtgtggtggcacatgcctgtaatcccagctacttgggaggctgaggcaggagaatcgtctgaaccyaggaagcggaggttgcagtgagccgagatcgcactattgcactccagcctcggcaacaagcgcgaaactctgtctcacaaaaaaagagaaaaaaagagtt

SEQ ID NO: 544572 - DNA, 201 bp, Homo sapiens
ggcaacagagtgagactccatctcaaaaaaacaaaacaaaacaaacacacaaaaaagaaagaattttcagattcaagcctctcaaaaatcttctttccacwcatgcataattcagtattctttgtgtacctatagggtaaataaacatcatcctgtatgttctgtaatagagatttaaaaggaaaatatgtactttagcat

SEQ ID NO: 544573 - DNA, 201 bp, Homo sapiens
tccctgtcccaaatgccatatatttctcaagaggaaatgcatagagcacaatgaccagcatccttggaagagtaaaacataccaaggctgggatttcgaakttcagcaaagcagcctgtgtgaatggttcctgcctgtaccaggcacgaggtttgccgactacaggtgagactatgtgcatctctcacttgtagggtgaga

SEQ ID NO: 544574 - DNA, 201 bp, Homo sapiens
ctttagaattctcggcctgaggggactgtacaatcttgttggacaccaggagatggtaggaggggcccccagaccatggattcttttcttttcttttcttttcttttcttttcttttcttttcttttcttttcttttctttctctttctttctgtctctctctttctttctttctttctcttccttcctttctttctttcc

SEQ ID NO: 544575 - DNA, 201 bp, Homo sapiens
tttagaattctcggcctgaggggactgtacaatcttgttggacaccaggagatggtaggaggggcccccagaccatggattcttttcttttcttttcttttcttttcttttcttttcttttcttttcttttcttttctttctctttctttctgtctctctctttctttctttctttctcttccttcctttctttctttccc

SEQ ID NO: 544576 - DNA, 201 bp, Homo sapiens
aggtactgagtaaagatggggagcaccccctttggtaccaggtgacgtgcgatttggagaaaaggtgatatgctccctttggccatgcagagagaagacakcaagagcctgttgccatacattgtagacagcttgcgtgaaaccgatgagaagatcgttctgtcagccatccagatactcctgcaacttgttagaacaatg

SEQ ID NO: 544577 - DNA, 201 bp, Homo sapiens
ttagaattctcggcctgaggggactgtacaatcttgttggacaccaggagatggtaggaggggcccccagaccatggattcttttcttttcttttcttttcttttcttttcttttcttttcttttcttttcttttctttctctttctttctgtctctctctttctttctttctttctcttccttcctttctttctttccct

SEQ ID NO: 544578 - DNA, 201 bp, Homo sapiens
agaattctcggcctgaggggactgtacaatcttgttggacaccaggagatggtaggaggggcccccagaccatggattcttttcttttcttttcttttcttttcttttcttttcttttcttttcttttcttttctttctctttctttctgtctctctctttctttctttctttctcttccttcctttctttctttcccttc

SEQ ID NO: 544579 - DNA, 201 bp, Homo sapiens
gtcccaaatgccatatatttctcaagaggaaatgcatagagcacaatgaccagcatccttggaagagtaaaacataccaaggctgggatttcgaagttcarcaaagcagcctgtgtgaatggttcctgcctgtaccaggcacgaggtttgccgactacaggtgagactatgtgcatctctcacttgtagggtgagaaaaca

SEQ ID NO: 544580 - DNA, 201 bp, Homo sapiens
aaaatgtaaaaactgttcttcgagttatttctaaacagaactaacatcagaatcatctgaatcatcagaatcatctatttcagaaaaattggattcatcaratgaatctcggccacaactctttgaggacaatgttaacatcacgtgtaggaatgctacgttttctaggatttgccattttcagcaatggagaattactat

SEQ ID NO: 544581 - DNA, 201 bp, Homo sapiens
aaactgttcttcgagttatttctaaacagaactaacatcagaatcatctgaatcatcagaatcatctatttcagaaaaattggattcatcaaatgaatctyggccacaactctttgaggacaatgttaacatcacgtgtaggaatgctacgttttctaggatttgccattttcagcaatggagaattactatattttctaa

SEQ ID NO: 544582 - DNA, 201 bp, Homo sapiens
ccatagtgctgggattacaggtgtgagccactgagccaggcctctatacccttcttcttaaggaaaagggaaatgggaaagtgtgaatgattttaggagcrtagtaaatgatttttagggaaaaatgactggacttgaagaatatacaatggcctgggacaaagtctgttgggcccacagagcagacaacagctgctaaat

SEQ ID NO: 544583 - DNA, 201 bp, Homo sapiens
acgttttctaggatttgccattttcagcaatggagaattactatattttctaaatggaaataccactgctaagaccagaatgctataaataggatgatgtytttgtttccaaagtcaatatactagagcaatgtgaaaataataataaaacaaaatattttgtggcaaagttatcttgggttaaaggctgtagctgcaggt

SEQ ID NO: 544584 - DNA, 201 bp, Homo sapiens
atgcacctaccaacagagtttcaaaatacatgaattctagctgggcccggtggctaatacctgtaatcctagcactttgggaggccaaggtgggcggatcwcttgaggtcaggagttcaagaccagcctggccaacatggtgaaaccccatctctactaaaaatacaaaaaatagccgggtgttatagcacgtgcctgtgg

SEQ ID NO: 544585 - DNA, 201 bp, Homo sapiens
atacacatttgaattttgccttgtttattaatatcttaaaactaaccaccatggtggacttaaggaggctgcccccaaaagaaacaactgcagtttcaaasacacaaactgtttgggaaaataaaagtcatagtgctatataaagaaaaaggaagaagaaacaagtgacatataacaacacattctgatgaccctagttaa

SEQ ID NO: 544586 - DNA, 201 bp, Homo sapiens
actgagcttagccagagacctaaggagataatgcccaaatactcagaattaatatgtccagcacgtttcacagacctatattctaacacttaattatttgwtgatatctatggtttcttatcagattgtgcgcccctgggcatagttgagaacttcatttttgtatcctaagaattgtttaatctacctttattgcatgct

SEQ ID NO: 544587 - DNA, 201 bp, Homo sapiens
tcacactcttggggcttgagttaaattactcaatgaaaggtaaacaattgtgaaacattatttatcattgtaaaagaaaaacactaattatcaaataaccmataatagcatgcttttgtaatttatagcacctcaccaaggtaaactattatacagctattaaatatcatttatttaaaaaggtggagaaacatggggaaa

SEQ ID NO: 544588 - DNA, 201 bp, Homo sapiens
cccagcactttgaaaggccaaggcaggagggtcacttaagcccaggggttcaagaccggcctgggaaacataacaagaccgaccacatctctacaaaaaaygtttttaaaaattttttttaattagctgggcatggaggtgcatgtctgtagtcctagctacttgggagactgaagtgagaggatcacttgagcccaggaa

SEQ ID NO: 544589 - DNA, 201 bp, Homo sapiens
agaccggcctgggaaacataacaagaccgaccacatctctacaaaaaatgtttttaaaaattttttttaattagctgggcatggaggtgcatgtctgtagwcctagctacttgggagactgaagtgagaggatcacttgagcccaggaattcgaggttgcagtgagccagtgagctaagattgcaccactgcactcctggt

SEQ ID NO: 544590 - DNA, 201 bp, Homo sapiens
agttaccacaagtcctgccgtcactgaccattacacattcttcctcttgaattaccttgtcactaacgagaaaaggctttgggtacctggcagacccaggytgaacttgaccaggcttttgctaagtccttaacaggaaatctcagcttttttgtatcctggcactcaccaagaggaactttttggcactgagttattgga

SEQ ID NO: 544591 - DNA, 201 bp, Homo sapiens
aagaatgctgacaagtagtgtcatgtcacacaagtagtttcataattacagagacttcactgttttttatgttggaaaaccaactagtacagaattaaggrataattataagagaatggaggtcaacaagagcttttctgaaaagataaaaaatccatgggggtgggagtagggggtggggagggaaaatgagaaaccaat

SEQ ID NO: 544592 - DNA, 201 bp, Homo sapiens
cagaagatattccaggaatatcctggaagttagtagataatagagaaaactgtatgagtggaattagcctcaaaataagagtttaaagggtggtggcaacmgaaaatgcatccataaagggcaatgggaaagaaaaagtatgtcaatacacatgaaaactgagaacattgattgcattcagggagagaaatctggtgattg

SEQ ID NO: 544593 - DNA, 201 bp, Homo sapiens
cgcgcctgtaatcccagctactcgggaggctgtggcaggagaatcactggaaccggggaggtgggaggttgcagtgagccgagatcgccccattgcactcyggcctggacaacagagcgagactccatctcaaaaaaaaaaaaaaaaaaaaggaaggaaggagggaggaagggagggaaggaaggaagaaagaaagaaaaa

SEQ ID NO: 544594 - DNA, 201 bp, Homo sapiens
tatttttagtagagacaaaatttttccatgttgggcaggctggtcttgaactcctgacctcaagtgatccgcccacctccacctcccaaagtagtgggatkataggcatgagctaccacatccagctttcttttctttgcttttttttttttttttaacaggttcttgctctgtcacccagcagggtggagtgcagtggtg

SEQ ID NO: 544595 - DNA, 201 bp, Homo sapiens
aaaatacatgaattctagctgggcccggtggctaatacctgtaatcctagcactttgggaggccaaggtgggcggatcacttgaggtcaggagttcaagaycagcctggccaacatggtgaaaccccatctctactaaaaatacaaaaaatagccgggtgttatagcacgtgcctgtggttccagctactcgggaggctga

SEQ ID NO: 544596 - DNA, 201 bp, Homo sapiens
gaagtctcactcttgtcccccaggctggagtgcaatggtgtgatcttggctcactgcaacctctgcctcctgggttcaagcagctcttttgcctcagcctyccgagtagctgtgattataggcacccgccaccacgccaggctgatttttgtatttttagtagagacagggtttcaccacgttggccaggctggtcatgaa

SEQ ID NO: 544597 - DNA, 201 bp, Homo sapiens
cccaggctggagtgcaatggtgtgatcttggctcactgcaacctctgcctcctgggttcaagcagctcttttgcctcagccttccgagtagctgtgattayaggcacccgccaccacgccaggctgatttttgtatttttagtagagacagggtttcaccacgttggccaggctggtcatgaacaaatttttaaaattata

SEQ ID NO: 544598 - DNA, 201 bp, Homo sapiens
attcactaacccaggcctgtactctctattgtgggtcttcttaaatatctgttgtggggtgagaggtttgaagaattataagtgggggagtttataaagaktgcttacttcttaaataggaagaatcccattcaactgcattttctgttttgttttgtacttccactgagggacagattaacagagtagctggggaaagaa

SEQ ID NO: 544599 - DNA, 201 bp, Homo sapiens
aatctcaagaaactaaatattttgaaataaatggaaatacaacttttttttcttttgagacgaaatctcactctgtcacccaggctggagtgcagtggtgygatctcagcccactgcaacctccgcctcccaagttcaagcgattctcctgcctcagtctcccgagtagatgggactacaagggcacgccaccacacccag

SEQ ID NO: 544600 - DNA, 201 bp, Homo sapiens
agaaactaaatattttgaaataaatggaaatacaacttttttttcttttgagacgaaatctcactctgtcacccaggctggagtgcagtggtgtgatctcrgcccactgcaacctccgcctcccaagttcaagcgattctcctgcctcagtctcccgagtagatgggactacaagggcacgccaccacacccagctaattt

SEQ ID NO: 544601 - DNA, 201 bp, Homo sapiens
aaaaaaaaaggcaaaacttgaatataaggaaatataattcatcatccacaaacacaactcaacttatcctagatggtgtgacttttccaggctagtcactrcaactattgcatgacaaacagcaatgcaagaggaataataccccagctaagactatatcagctaattagtcaacactataattaaaaagtggtgctagac

SEQ ID NO: 544602 - DNA, 201 bp, Homo sapiens
gattctcctgcctcagtctcccgagtagatgggactacaagggcacgccaccacacccagctaatttttatatttttttagtagagacggagtttcaccayattggccaggctggtgtcaaactcctgaccttgtgatccacccacctcagcctcccaaagtgctgggattacaggcgtgagccaccgcacccggcagaaa

SEQ ID NO: 544603 - DNA, 201 bp, Homo sapiens
cacgccaccacacccagctaatttttatatttttttagtagagacggagtttcaccacattggccaggctggtgtcaaactcctgaccttgtgatccaccmacctcagcctcccaaagtgctgggattacaggcgtgagccaccgcacccggcagaaatacaacttattaaaatttatggaatgaggcaaaagcagtggtt

SEQ ID NO: 544604 - DNA, 201 bp, Homo sapiens
ggttaacatggatcccgagccctgggccttccccggaactttctagcctagatttagtttgtcaggtttcagaaagaataaaattatctaaaattgagggraaaaaattggcaggcaatttggaaaagactctcagttggcctgccaacaacactggcagaagaaatgtagtcgagttagaatccttccagcatgttccct

SEQ ID NO: 544605 - DNA, 201 bp, Homo sapiens
gccaccacacccagctaatttttatatttttttagtagagacggagtttcaccacattggccaggctggtgtcaaactcctgaccttgtgatccacccacstcagcctcccaaagtgctgggattacaggcgtgagccaccgcacccggcagaaatacaacttattaaaatttatggaatgaggcaaaagcagtggttaga

SEQ ID NO: 544606 - DNA, 201 bp, Homo sapiens
aagaataaaattatctaaaattgagggaaaaaaattggcaggcaatttggaaaagactctcagttggcctgccaacaacactggcagaagaaatgtagtcragttagaatccttccagcatgttccctaggggatgctcacacaggaaccacaggtgaaatagggaagtccctggctcctaaagcctaagcaggaaccata

SEQ ID NO: 544607 - DNA, 201 bp, Homo sapiens
ctgtctccaaggccccattgtgcaggtgctactaattttcatgaaatgatactaggaggtaaagaaagttcgctggctctcagatatccatctgtgtgcaaacagacagagtacagaaaaataagtagaataacaaagttcctagttttgtgtgggctgagagtgaaaaaaaaaagagtaacgaggagtgaaaagaatgaa

SEQ ID NO: 544608 - DNA, 201 bp, Homo sapiens
aagaaatgtagtcgagttagaatccttccagcatgttccctaggggatgctcacacaggaaccacaggtgaaatagggaagtccctggctcctaaagcctragcaggaaccatatactccaccactcccctcctgaagtgaaattgagtcccaaaccaggagtaacaggagcacaaaggtgacggagctcatacaaactga

SEQ ID NO: 544609 - DNA, 201 bp, Homo sapiens
tgtctccaaggccccattgtgcaggtgctactaattttcatgaaatgatactaggaggtaaagaaagttcgctggctctcagatatccatctgtgtgcaaacagacagagtacagaaaaataagtagaataacaaagttcctagttttgtgtgggctgagagtgaaaaaaaaaagagtaacgaggagtgaaaagaatgaag

SEQ ID NO: 544610 - DNA, 201 bp, Homo sapiens
actaagatgatatggaaagacacccacttttcttaggccaggaacagaaggcctattaaatcagttatcaccatactcaccccaaatgatcctactcactwgtggtctataattaggtaaatattgctattattgggatttgggcaatagatattttgcaatctattatgcaatctttagaagctctaccaataaataagt

SEQ ID NO: 544611 - DNA, 201 bp, Homo sapiens
gaagcccatacatattaccttcaagagtgtgtgtttatctgaatgcatatgaatgtgggttattaaaggttaccaattctggcaaaaagaatggcatgaarcaataggcagaatcaactgaatgagtgaagttaatacatgtttaaatcattacttaatgttggttgaaacgtgttatcaagtcttttgccttaatatagg

SEQ ID NO: 544612 - DNA, 201 bp, Homo sapiens
ttcaatctggggacacttgcctttgctgaagagcccccaaaagagaaaaggcatggcgcagctcagaacaaagggaaagtaagagaagggctcccatcttyaattataactgaataaaaaatccatgttcagatttgttacagtaatataatatgtatcaattaatgtggatttaaccaagtctaagaagttttaagatga

SEQ ID NO: 544613 - DNA, 201 bp, Homo sapiens
ctctatttgcagccgctccccatcatttgcatcactgcctgagctccacttcctgtcagatcagcagcagcattaaattgtcatgggagcgccaaccctaytgtgaactgtgcatgcaagggatctaggttgcccgctccttatgagaatctaatgcctgatgatccaaggtggagctgaggcagtgatgcaatcactggg

SEQ ID NO: 544614 - DNA, 201 bp, Homo sapiens
ttctgtaactctgtcattttacatgaatggaatcacacagtatgtaaccttttgggactggctttcttcattcagcatagttctctggaaattcatccagsctgttgctgagaagtattccatggatgtactacagtttaaccattcattccttgaaggatatcctggttgtgcgcaatttggggcgattataaacaaagc

SEQ ID NO: 544615 - DNA, 201 bp, Homo sapiens
actttagaagttgtccctgtgtataaactgagatcttcggatggggcacattggttggtgaaatagatccctttatgaagtcacactcctaagaaacagawggaaaattaatgtttaaggaaaactgtgttgttgcaaaaaacgtaaaatttgtaaagggactctggccggcaatgcaaatatctggaacaaaggaagaaa

SEQ ID NO: 544616 - DNA, 201 bp, Homo sapiens
ctttaaataccttaagccaacaagtcttccacctttgctaagggaaactgtatgtgaaggcatacttccaaatttcaggcagcttacaaatcagccttagyatttacttcctgcttgtgcaggatctcaaggtcagccacaggtgagcgatggagctcctttcctttcccaggtctttcctcagcatgcacacatccctgt

SEQ ID NO: 544617 - DNA, 201 bp, Homo sapiens
tcctcatccaattacaggttcatggctgagacccctataacaaaagagagatgaacaagagcaaaacatacagacttatttaatataaattttacctgacrtaggagccttcagaaaggagacccagagccccaggaaaaactgtatttgtattgacagtcacacagtagtgtgattggaggaccaatgggtgtgatctaa

SEQ ID NO: 544618 - DNA, 201 bp, Homo sapiens
tgagacccctataacaaaagagagatgaacaagagcaaaacatacagacttatttaatataaattttacctgacataggagccttcagaaaggagacccaragccccaggaaaaactgtatttgtattgacagtcacacagtagtgtgattggaggaccaatgggtgtgatctaatggtgataagctgggggaactgaaca

SEQ ID NO: 544619 - DNA, 201 bp, Homo sapiens
tgggggaactgaacaaggcctgtctgtttggattcttcatgtcctctctgtgtgacattcctttcttcagggtatgagggttattatgggaggagagaggkagatggtcagagagtggtcttcctgtgttttatgacctacttcagggaagaaggtatgaagggaattctagcttctatggcccacttcaggggagtcagg

SEQ ID NO: 544620 - DNA, 201 bp, Homo sapiens
tgacttcctatgcaggattgtttttaatttaatgagactataggtaaagcgcctggctttattaaacactcaaccaacgaggaggaggatgggggtttgtrgagtaaattggtatagattttagtactgacttcacaggttcctaggttcctagactgtttttatttaattttggcaaatgacaagtacctaacagaaagg

SEQ ID NO: 544621 - DNA, 201 bp, Homo sapiens
cttcagggtatgagggttattatgggaggagagagggagatggtcagagagtggtcttcctgtgttttatgacctacttcagggaagaaggtatgaagggmattctagcttctatggcccacttcaggggagtcaggggacagaagaatgtcagtttctacgatctgcttcaggagagagggaataggagaaagtcagaga

SEQ ID NO: 544622 - DNA, 201 bp, Homo sapiens
cttccttttttctttttccatatttattatcaaccactaaaatctcttctaatgagttactctgtttaatattagctatatttagttttttccctgaagayagaaactcccctcaccttttctatgtgcctatacaatttgttggctgggaaggtttcgacagagggctaatcgtatctagtttatgttgattcatattaa

SEQ ID NO: 544623 - DNA, 201 bp, Homo sapiens
tttggtagatacggggtttcaccgtgttagccaggagggtctcgatcccctgaccttgtgatccgcccgcctcagcctcccaaagtgctgggattacgggygtgagccaccacgcccggccctttttccctatttctaagcaaattaccccgactaagatagtagtgaatagtttccttactcatcaccaacctgaatttc

SEQ ID NO: 544624 - DNA, 201 bp, Homo sapiens
tctattcacccgggcttctttgcagcacagtcattttaagaatattctgagagcatcttagctctcactccatttcagctcagtgaattctaaggcaacaraagtgtattaagtaattaatccataatgccagccactacctaaaaaaaggataaggccaaagctaaaaaaaaaaaaaatcaaaagctaggaaaacttatt

SEQ ID NO: 544625 - DNA, 201 bp, Homo sapiens
gtctccaaggccccattgtgcaggtgctactaattttcatgaaatgatactaggaggtaaagaaagttcgctggctctcagatatccatctgtgtgcaaacagacagagtacagaaaaataagtagaataacaaagttcctagttttgtgtgggctgagagtgaaaaaaaaaagagtaacgaggagtgaaaagaatgaaga

SEQ ID NO: 544626 - DNA, 201 bp, Homo sapiens
ctccaaggccccattgtgcaggtgctactaattttcatgaaatgatactaggaggtaaagaaagttcgctggctctcagatatccatctgtgtgcaaacagacagagtacagaaaaataagtagaataacaaagttcctagttttgtgtgggctgagagtgaaaaaaaaaagagtaacgaggagtgaaaagaatgaagaag

SEQ ID NO: 544627 - DNA, 201 bp, Homo sapiens
tattcacccgggcttctttgcagcacagtcattttaagaatattctgagagcatcttagctctcactccatttcagctcagtgaattctaaggcaacaaargtgtattaagtaattaatccataatgccagccactacctaaaaaaaggataaggccaaagctaaaaaaaaaaaaaatcaaaagctaggaaaacttattaa

SEQ ID NO: 544628 - DNA, 201 bp, Homo sapiens
taaatttatttgtttatttatttattttttttgagacggagtttcgctcctgttgcccaggctagagtccaatggtgtgatcttggctcactgcaacctcygcctcctgggttcaagcgattctcctgcctcagcctcctaagtagctaggattataggcacacgccactacacccggctaattttgtatttttagtagag

SEQ ID NO: 544629 - DNA, 201 bp, Homo sapiens
aatttatttgtttatttatttattttttttgagacggagtttcgctcctgttgcccaggctagagtccaatggtgtgatcttggctcactgcaacctccgyctcctgggttcaagcgattctcctgcctcagcctcctaagtagctaggattataggcacacgccactacacccggctaattttgtatttttagtagagac

SEQ ID NO: 544630 - DNA, 201 bp, Homo sapiens
cctcctgggttcaagcgattctcctgcctcagcctcctaagtagctaggattataggcacacgccactacacccggctaattttgtatttttagtagagayggggtttcaccatgttggtcaggctggtctcgaactcctgacttcagatgatccgcccgcctcggcctcccaaagtgctgggattacagacgtgagccac

SEQ ID NO: 544631 - DNA, 201 bp, Homo sapiens
caggagcacaaaggtgacggagctcatacaaactgagatgaattgcagcttccaggacggaaatgactagtagcttattatttgtcattggctccagatawatcttacaacctgattaaaagcaaatgtattgacttttttttttttttttttttggctatggctattctgactattctcttttactgaaaatggtttttt

SEQ ID NO: 544632 - DNA, 201 bp, Homo sapiens
cggctaattttgtatttttagtagagacggggtttcaccatgttggtcaggctggtctcgaactcctgacttcagatgatccgcccgcctcggcctcccaragtgctgggattacagacgtgagccactgcccccggcctcaaatttcatttccacaataatgctaaatattgcattgtttggtcatacctagtagcaacc

SEQ ID NO: 544633 - DNA, 201 bp, Homo sapiens
agtctctgataaaacagactttaagccaataaagatcaaaaaagactaagaagggcattacataatggttaaggagtcaatgcaacaagaagagctaactmtcctaaatatatatgcatctaatataggagcacccagattcataaagcaagttcttagagacctacaaagagacttaggcttccacacaataatagtggg

SEQ ID NO: 544634 - DNA, 201 bp, Homo sapiens
gtggtgctcaatagttgcttcttaaaaaatagattagttaggactatcggatgccagggactgaatctagtcacttaataatcaggttcccacagatctayttatctatatcccaaacactgtataattctaaaactatgagaaagaaagaaagagagagagagagagtgtgtgtgtgtgtgactcaactgcctcaaacac

SEQ ID NO: 544635 - DNA, 201 bp, Homo sapiens
ccccggcctcaaatttcatttccacaataatgctaaatattgcattgtttggtcatacctagtagcaacctaaaaaactttatacgagccatttttatcattattttttaaagttgaactttatttgaattattgaagtttgtagaatggtcagttcctcagtaaactgagtaaaatatttaaaactcatccccaaaacgg

SEQ ID NO: 544636 - DNA, 201 bp, Homo sapiens
agtcacttaataatcaggttcccacagatctacttatctatatcccaaacactgtataattctaaaactatgagaaagaaagaaagagagagagagagagwgtgtgtgtgtgtgactcaactgcctcaaacacaccaaggaaacatgtttgaatataaataactgaagacagaaaagacagaatgaatcaaccagaggact

SEQ ID NO: 544637 - DNA, 201 bp, Homo sapiens
ccggcctcaaatttcatttccacaataatgctaaatattgcattgtttggtcatacctagtagcaacctaaaaaactttatacgagccatttttatcattwttttttaaagttgaactttatttgaattattgaagtttgtagaatggtcagttcctcagtaaactgagtaaaatatttaaaactcatccccaaaacggtt

SEQ ID NO: 544638 - DNA, 201 bp, Homo sapiens
atcccagcactttgggaggcctaggtggtggatcacctgaggtcaggagtttgagaccagcctggccaacatggtgaaaccctgtctctactaaaaatacmaaaattagccaggcgtggtggtgggcccctgtaatcctagctactcggaagactgaggcagtagaatcacttgagcccaggaggcagaagttgtagtgag

SEQ ID NO: 544639 - DNA, 201 bp, Homo sapiens
taccctgtctcaaataaaaatacaaattaaaaataaaggctctggccgggcgtggtggctcacgcctgtaactccagcactttgggaggccgaggcaggtrgatcacgaggtcaggagttcgagaccagcctggccaacatggtgaaaccccgtctctactaaaaatacaaaaattagccgggcatggtggcatgcacctg

SEQ ID NO: 544640 - DNA, 201 bp, Homo sapiens
atttttggtggggtcatgaaggatgagtaggagtttgccgggcaaagaagagaccagcaaagattcaaaggcttggtccatggacaatgattcaaaagccrgaggttgagttcaagaaagcagtttggttctgttggagtttacagtattggagaaggaaagcagagtttcagggccagatcatgaagggcactgacttcc

SEQ ID NO: 544641 - DNA, 201 bp, Homo sapiens
ccatcagccaggaattctttttggatacactgatatttctctatgttatccttagtacagcttagcttaccaaaggatagatggacaaaagagtcttaaargttaagtcttggaacaatataaaatgcagtctgcaaacacttgggggtgcatcataccagtcaattacacataccaatacttttttagaaaaaacaaaag

SEQ ID NO: 544642 - DNA, 201 bp, Homo sapiens
ctatgcactaagtctacaataagtgaccccttgccttgctcctatatactgatacctaagcttcatccaactctatcactggcctttgctggccattgtcwtactgaggctatgacatttgcccaccaacctggaccccatgcttgcttgccatgctcgaggccctgattccggggtacctagtcttgcccatgaactctg

SEQ ID NO: 544643 - DNA, 201 bp, Homo sapiens
tggacagattttggtgtatattcatacggtgcaatattattcagctatacaaaggaatgaagtactgatacatgctacaacacggatgaaccttgaaaacrtcatgctagggctggatgcagtggcttgcacctacatgtagtcccaactacatgggagctgaggcaggaggattgtttaggcccaggagttggaagctgc

SEQ ID NO: 544644 - DNA, 201 bp, Homo sapiens
atgcacgggtcagatgcacatctcggtttagtaggacttgatgtagatttgtccttttctctcttcctttgctcattattttcagatactcacaacagatkttgtttttcctaaacttaccctttgtcctaaaaaaattcctcattttgtcaactgcacttattaggtagaacttctctccacagcaatccacattctaaa

SEQ ID NO: 544645 - DNA, 201 bp, Homo sapiens
tgtctcaaataaaaatacaaattaaaaataaaggctctggccgggcgtggtggctcacgcctgtaactccagcactttgggaggccgaggcaggtggatcmcgaggtcaggagttcgagaccagcctggccaacatggtgaaaccccgtctctactaaaaatacaaaaattagccgggcatggtggcatgcacctgtagtc

SEQ ID NO: 544646 - DNA, 201 bp, Homo sapiens
tctcaaataaaaatacaaattaaaaataaaggctctggccgggcgtggtggctcacgcctgtaactccagcactttgggaggccgaggcaggtggatcacraggtcaggagttcgagaccagcctggccaacatggtgaaaccccgtctctactaaaaatacaaaaattagccgggcatggtggcatgcacctgtagtctc

SEQ ID NO: 544647 - DNA, 201 bp, Homo sapiens
taaaaataaaggctctggccgggcgtggtggctcacgcctgtaactccagcactttgggaggccgaggcaggtggatcacgaggtcaggagttcgagaccrgcctggccaacatggtgaaaccccgtctctactaaaaatacaaaaattagccgggcatggtggcatgcacctgtagtctcagctacttgggaggatgagg

SEQ ID NO: 544648 - DNA, 201 bp, Homo sapiens
gccgggcatggtggcatgcacctgtagtctcagctacttgggaggatgaggcaggaaaatcgcttgaacccgaaaggtggaggttgtggtgagccaagatygtgccactgcactccagcctgggcaacagagcgagactccatcttaaaaataagtaaataaataataaataaattaattaattaaataaaggtcctatct

SEQ ID NO: 544649 - DNA, 201 bp, Homo sapiens
catcatgttggtcaggctggtctcggactcctgacctcaagtgatctgcccacctcggccttccaaagtgctgggattacagacatgcgccaccacgcccrgccccaattgtgtttctgattaagagctctggtctaaaccacaagaaagtctaataggtttgaagaaaaactgtgcaaaagagagtgtagacgtttcagg

SEQ ID NO: 544650 - DNA, 201 bp, Homo sapiens
gctgggtgtggtgacacgtgcctgtaatcccagctactcaggaggctgaggcaggagaatcccttgaacctgggaggcggaggttgcagtgagccgagatygcgccactgcactccagcctgggcaacagagtgagactccttttcaaaaaaaaaaaaagagagagagagaaagtgaggaataggagtgttggaaaggtga

SEQ ID NO: 544651 - DNA, 201 bp, Homo sapiens
agttcctcccaatgcctggaggcagtccaggtaagaggaataatgctgcaggaagcatcctgtttataactccagattctcaaataccagaaaacctgccmcaaagccttttttttttttttttgtaaagaggattaaactctctaaggccttctgtttctcaaactgtgaactctcttcattgcctttaatgaatctttc

SEQ ID NO: 544652 - DNA, 201 bp, Homo sapiens
cgtgcctgtaatcccagctactcaggaggctgaggcaggagaatcccttgaacctgggaggcggaggttgcagtgagccgagattgcgccactgcactccrgcctgggcaacagagtgagactccttttcaaaaaaaaaaaaagagagagagagaaagtgaggaataggagtgttggaaaggtgagagaaatctaaatctt

SEQ ID NO: 544653 - DNA, 201 bp, Homo sapiens
cattagtactcactgcattcctttctcctcccagtctctgtaactgctaatcggtttgctgtctctatggacttgcctcttctagatatttcttataaatkgaatcatacaatatgtggccttttgtgtgtagcctccttcatttagtgtgatgcttttgaggttcatccatgttgtagcatgtgttagtacttaattcct

SEQ ID NO: 544654 - DNA, 201 bp, Homo sapiens
caccaacaatgtatgagggttccagtttctccacaaactggccaacacttactttcctctttaaatttttttcccttatggctatcctagtgggtatgaartggcatgtcattgtggtgtggatctatatatctgtaatgactaatgatgttgattgtcttttcatgtctctattggccatttttatctctttggagaaat

SEQ ID NO: 544655 - DNA, 201 bp, Homo sapiens
ttctttatacattctggatactagatccttattaatatatgatttggaaacattttctcccattcttttttttttttttttttttttgagacggagtctcrctctattgcccaggctggagtgcagtggcgcgatctcggcttgctgcaggctccgcccccgggggttcaagccattctcctgcctcagcctcccgagtag

SEQ ID NO: 544656 - DNA, 201 bp, Homo sapiens
tatacattctggatactagatccttattaatatatgatttggaaacattttctcccattcttttttttttttttttttttttgagacggagtctcgctctrttgcccaggctggagtgcagtggcgcgatctcggcttgctgcaggctccgcccccgggggttcaagccattctcctgcctcagcctcccgagtagctggg

SEQ ID NO: 544657 - DNA, 201 bp, Homo sapiens
tacctatttatttttaatagctgcatcaagagattgcttaggtggaaaaaaaaaaacaaaaatgttgctggttctgattatcatcctcaggctgaatccaycccacctggtgtcccagctccaaaattctacccaaatcgttactcccgtacccaaaccctagacggtatatccatagcagaaaaaaaatgcatcttcata

SEQ ID NO: 544658 - DNA, 201 bp, Homo sapiens
gccccaaactattgcccttttttaacgtgtatgtttcggcttctagtgcctgtgttgctgccaaacttcagttgccttagttttcagcacacttgacttastaacaccattttcctcactgttgtttcaaattcactgtgagattagatgctagataaccacatttcataataactaatacttgctgagtacttttatcct

SEQ ID NO: 544659 - DNA, 201 bp, Homo sapiens
ggcttccagggttttctggcacactggccttaaaggctgttgtaaggttcacatgagatcattcacaaggaagcattatgcaaattacaaattagaatgcyctactttggctttgattttaaatctctcaatgtggcttagtttaataataatgataatagctaacctttaagcacttattatttgacaagcatacaaaca

SEQ ID NO: 544660 - DNA, 201 bp, Homo sapiens
gcgggccggggacagagcggagatgtttttaagctctgaaccaagcttgcacccggtgacttgcatccttagaggggatgcaggggttctaagatgctgcygcagccgctgcttcctggcccatctctggcaccaggaggagtctggagtctccagagagaaccgcactcaatgtgctgggagccgcaggctttccgcagg

SEQ ID NO: 544661 - DNA, 201 bp, Homo sapiens
atatgataaaattacttcctatgataaaattacttcctatattagtaaacatcttaattattaaacacatagtgcttggaacatccaatattttattactwatcatttgtgttttacttaacatgaatatttaaactaatcttattttagattccttatctgttctctgaataaattgtatggcatgtagtggaatacaaa

SEQ ID NO: 544662 - DNA, 201 bp, Homo sapiens
tctttccaatccattattttgatggtcttcaaccttgtactttccaaaattctgatatcatttttattaggggttagttttaaaagcatacactggcctcrtgttatcataggacatggagtttcacagtctgtccagttgcctgaaataccaagaggtcaccaaaacagataccagctaggatctcttgacatatggagg

SEQ ID NO: 544663 - DNA, 201 bp, Homo sapiens
cttagaaaatattttaatcagccacagctctttcctgacggtaccagtggctgagctccggaaaaataagaaaggatgtggatgggatatggtgagtgccmagagattccccctctagtttagtactgctttccttgtgtttgggcttgttttagaaaaacaagccagccgaccatgacggctgactccatcaatccagag

SEQ ID NO: 544664 - DNA, 201 bp, Homo sapiens
ttgtttattaatttcaacttcctcaaggcatgtgcaacaaatgtgaaatttacttttggaagaaagaacttacctcacacacagagtgagtgtctaatggmaaaaaaataaaacaaaacaaaacaaaaaaaacctccattacagcttctttcttaaaattaaagtgagtttttagttctccggaaaagaaagtgtggagga

SEQ ID NO: 544665 - DNA, 201 bp, Homo sapiens
atacattctggatactagatccttattaatatatgatttggaaacattttctcccattcttttttttttttttttttttttgagacggagtctcgctctaytgcccaggctggagtgcagtggcgcgatctcggcttgctgcaggctccgcccccgggggttcaagccattctcctgcctcagcctcccgagtagctggga

SEQ ID NO: 544666 - DNA, 201 bp, Homo sapiens
tttttttttttttttttgagacggagtctcgctctattgcccaggctggagtgcagtggcgcgatctcggcttgctgcaggctccgcccccgggggttcamgccattctcctgcctcagcctcccgagtagctgggactaccggcgcccgccaccacgcctggctaattttttgtatttttagtagagacggggtttcacc

SEQ ID NO: 544667 - DNA, 201 bp, Homo sapiens
tctcgctctattgcccaggctggagtgcagtggcgcgatctcggcttgctgcaggctccgcccccgggggttcaagccattctcctgcctcagcctcccgmgtagctgggactaccggcgcccgccaccacgcctggctaattttttgtatttttagtagagacggggtttcaccctgttagccaggatggtctcgatctc

SEQ ID NO: 544668 - DNA, 201 bp, Homo sapiens
gtggcgcgatctcggcttgctgcaggctccgcccccgggggttcaagccattctcctgcctcagcctcccgagtagctgggactaccggcgcccgccaccwcgcctggctaattttttgtatttttagtagagacggggtttcaccctgttagccaggatggtctcgatctcctgacctcgtgatccacctgccacggcct

SEQ ID NO: 544669 - DNA, 201 bp, Homo sapiens
cctcagcctcccgagtagctgggactaccggcgcccgccaccacgcctggctaattttttgtatttttagtagagacggggtttcaccctgttagccaggmtggtctcgatctcctgacctcgtgatccacctgccacggcctctcaaagtgctgggattacaggcgtgagccaccgcgcccggctctcatttctgatatt

SEQ ID NO: 544670 - DNA, 201 bp, Homo sapiens
ttcttgaactgatagaactgcaaggagaaaaagatgtatctactattataattggagacttcaacaattctctatcagaaatggacaggtcaagaaggcaraacatcagtaagcacacagttgaatgcaacaacactactgaacagctaaatatagttaacttctataaactacttcatccaacaacaacagattacacat

SEQ ID NO: 544671 - DNA, 201 bp, Homo sapiens
tcatactttctccccattgtcagccacaccccctttggccacgtgggaagcacaggaggtagatttggcttctgctggtgggcagggcctaggctcccccscaagggtatttctgcaatgttccatcttagaggctgaaatcacagcttcattctggcacagtccttgtgggggttgttcccatctgccactgagcttaga

SEQ ID NO: 544672 - DNA, 201 bp, Homo sapiens
gccaccacgcctggctaattttttgtatttttagtagagacggggtttcaccctgttagccaggatggtctcgatctcctgacctcgtgatccacctgccwcggcctctcaaagtgctgggattacaggcgtgagccaccgcgcccggctctcatttctgatattggtaatatgtgtcctttttttttttttatctgtctg

SEQ ID NO: 544673 - DNA, 201 bp, Homo sapiens
gcctggctaattttttgtatttttagtagagacggggtttcaccctgttagccaggatggtctcgatctcctgacctcgtgatccacctgccacggcctcycaaagtgctgggattacaggcgtgagccaccgcgcccggctctcatttctgatattggtaatatgtgtcctttttttttttttatctgtctgctaaaaga

SEQ ID NO: 544674 - DNA, 201 bp, Homo sapiens
ttagtagagacggggtttcaccctgttagccaggatggtctcgatctcctgacctcgtgatccacctgccacggcctctcaaagtgctgggattacaggcrtgagccaccgcgcccggctctcatttctgatattggtaatatgtgtcctttttttttttttatctgtctgctaaaagattatcaattttattagcttttg

SEQ ID NO: 544675 - DNA, 201 bp, Homo sapiens
ttcaccctgttagccaggatggtctcgatctcctgacctcgtgatccacctgccacggcctctcaaagtgctgggattacaggcgtgagccaccgcgcccrgctctcatttctgatattggtaatatgtgtcctttttttttttttatctgtctgctaaaagattatcaattttattagcttttgaaaagaaccagctttt

SEQ ID NO: 544676 - DNA, 201 bp, Homo sapiens
tgacctcgtgatccacctgccacggcctctcaaagtgctgggattacaggcgtgagccaccgcgcccggctctcatttctgatattggtaatatgtgtccyttttttttttttatctgtctgctaaaagattatcaattttattagcttttgaaaagaaccagctttttatttctttattcttctgtatagtttttctgtt

SEQ ID NO: 544677 - DNA, 201 bp, Homo sapiens
ggttaaaaatcagtagtctaagtggaggtaagtaggaacttcttagcatgggtagactactatcaggggccatggtagagggtaatgcaaaatacaactgycctatttgcagatgacatgttctttgggatcttgaaattaaaaaaaaaaaaaaatcccacaaatctgttattagataaaaatgcagctgctgggcgcagt

SEQ ID NO: 544678 - DNA, 201 bp, Homo sapiens
gtgggggaggaagtggagggtgtggacctagggcaccacacctgggagagtgtagtggaactggttttgttttctgaactgttcaaccaaaagctttttayatttccccatggttttccaggcaactgattgaggagggtatatgcaagatgataaatgggcttttcacttctttccactggggcagcagtgattctatgg

SEQ ID NO: 544679 - DNA, 201 bp, Homo sapiens
agttccatatgtttccatcagaggcacgcccctatcacctccctggtttggcatttctccagagcacttgtgacctgccagatatttattttatgtatttrtatatttaaatatatgtttattcttctaacatgttcgttctgtttattttctgtttcttccactagactgtaagctccctgagggaagggctttgtattt

SEQ ID NO: 544680 - DNA, 201 bp, Homo sapiens
gcaacaagcgtgaaactctgtctaaaaaaaaaaaaaaaaaaaagcaagaaagaaaaaggcaagtgggtaaaaaaaaaaaggcaaaacttgaatataaggaratataattcatcatccacaaacacaactcaacttatcctagatggtgtgacttttccaggctagtcactacaactattgcatgacaaacagcaatgcaag

SEQ ID NO: 544681 - DNA, 201 bp, Homo sapiens
ccccactccactgactggtcttttcagatggttcacctgaggggaatgtccacccggaggtttgactttggacgtctggctcaaatcagggtttctgaaartattttctttgtagacattattagcagctattatttttgttctctaaattgaatgtgtgactcaagctgcaggataattcaaagaacatgaacacaatca

SEQ ID NO: 544682 - DNA, 201 bp, Homo sapiens
aaggaagcattatgcaaattacaaattagaatgccctactttggctttgattttaaatctctcaatgtggcttagtttaataataatgataatagctaacytttaagcacttattatttgacaagcatacaaacagctgcatacattgtctaatgtaaccgtaatgaatactctatgacttgcacatgatattatcattta

SEQ ID NO: 544683 - DNA, 201 bp, Homo sapiens
atcaaatatccaatcccctgatctagtcatggtgttgtcagacagcactaaatggagaaaataatttttgccaactcatgcgtaaattaagcaggtggcamattctgttttgaggctgatgaagtggtcagatgtctgtgcccttgggttaagtaaaaaaatactaaactaatgtaattctgatctgactggtctcttgct

SEQ ID NO: 544684 - DNA, 201 bp, Homo sapiens
atagggagtggtggtagcctgtggcgagttgaagattttgaacaataggtgtttctgagctggatttattgaaagggtcttgtctgtgtcctgggggagaytgtaaatgagatgtcaacaggagctcttttgtgtggatggcattcatcctgaaagacaggaattcccttactgtgctagtatttaaagtacatttgttgc

SEQ ID NO: 544685 - DNA, 201 bp, Homo sapiens
gcctgggccacatagtgagacccaacattggtttaactcacagatgcaaaacccatggaaacagagagccaactgttttttttttttccaccgtgaaggtkggtattgaacattttagagtagtttcaaaacaacatcgagatgcttctttcttcttcatttcatttctttatcaactttcagtctttttatttccacttt

SEQ ID NO: 544686 - DNA, 201 bp, Homo sapiens
cactttgggaggctgaggcaagaggattgcttcagcccaggagttcaagaccagcctgggccacatagtgagacccaacattggtttaactcacagatgcmaaacccatggaaacagagagccaactgttttttttttttccaccgtgaaggttggtattgaacattttagagtagtttcaaaacaacatcgagatgcttc

SEQ ID NO: 544687 - DNA, 201 bp, Homo sapiens
aaagagaccttatgaattcagtgatgggactgaaatagtcattctctactgcaatggtttcctctggggatgaaaaggaatgggataggagtggagaacawatattttatctgtagggcttcatttcataggagtgagagaaaagggaaaaagaaaacaaattcagcaggatgcagtggctcatacctgtaatcccagcac

SEQ ID NO: 544688 - DNA, 201 bp, Homo sapiens
cctaagggagatgggtggcaaaaactgttaaccacatctgggttgaacaatctgtaaaaaaaaaaaaagcatgaccagaatgtgaaagagatcaactcaamacccatagagctttaaaacccccattctaactttcagagaaaatctgctgatgttgactatgggtgctactgtgctggtgagattgccccagtctaacac

SEQ ID NO: 544689 - DNA, 201 bp, Homo sapiens
aattattctgtaagatgcatttgaatgtgccctaagggagatgggtggcaaaaactgttaaccacatctgggttgaacaatctgtaaaaaaaaaaaaagcwtgaccagaatgtgaaagagatcaactcaacacccatagagctttaaaacccccattctaactttcagagaaaatctgctgatgttgactatgggtgctac

SEQ ID NO: 544690 - DNA, 201 bp, Homo sapiens
atatttcacctctaaagacacacatagactaaaataaagggatgggaaaagatattccatgcaaatggaatctaaaaaagtacaggagtagctatagttayatcaaaatagctttcaagacaaaaagctctaaaaagaaataaagaaggttattatttaatcataaagggttcaattcagcaagaggatgtaatgattata

SEQ ID NO: 544691 - DNA, 201 bp, Homo sapiens
tccatgtagattcccttctaatatagtatttacagtaagatacttaagtctaagtacagacttgcaaatctgtggaggaatcataaacatttatcagctaycttgagagtggataaaattgcattttactaacagcaacagagtcaaagagcgtgcagtgaaggtagtgtacacaaatattgaacaaggaggttataaatt

SEQ ID NO: 544692 - DNA, 201 bp, Homo sapiens
atcctggagggggccggacaacttctaaagcagccagtagttgagcctgcctctgcatcttgcatttctctttctccttagccctgtcctccttgttctawtctcagttataaaagactgaagaagctaatttgaggatttcctgtctaagggcacgagttctaaggctgatttttgtaattttcttccagtctgtttatt

SEQ ID NO: 544693 - DNA, 201 bp, Homo sapiens
caacaggatttggaggagagttgctcagaggagactagcacagagtaggcagcccttgaactcaagagagaaatttatcattttacttcccaactccagarttgcccttggctttatcccattaatgacaatgtctgatttggaagccagctagagcagagagacccttcatcttaaggacatcaaggattgggattctgt

SEQ ID NO: 544694 - DNA, 201 bp, Homo sapiens
actcctgacctcaggtgatccacctgtcttggcctcccaaagtgccaggtgcggcggctcatgccttctagtttatttttaggccaaacagtgttacaaargaaagctagtttttttttgttttaaggtttggggaaatcaaacttttcccaattcttggggatgcatccaaggggagtgtcctgagtatggagacacagt

SEQ ID NO: 544695 - DNA, 201 bp, Homo sapiens
cctcaggggccgggcccagcaatctcctcgcctctgggtcagccgacaaaggctcaccggcacattcttccagtccattctctctagtctccatgggcacytcctccccggagccctcctctggctctgccacctccactgccatctccgctgccgccgcctcctcttcctcctcctcctcctggtctctcaccttgtgga

SEQ ID NO: 544696 - DNA, 201 bp, Homo sapiens
aaaaaaaaaaaaaggagttggagggtggagccatagctaccttcacatgcaagagtgatgccagaagaaggtggaaacaggaaggaagtttcttctcttcktccaccttcctttgttagaacacagctggaaaccagctgacaaggaggcctaggaaatgtagtttgggagtcctggccgcagtgtcgaagagcagctaaa

SEQ ID NO: 544697 - DNA, 201 bp, Homo sapiens
ctgctttttgttgacagagccaagattgtacctagtgtctaacatgatcacattatactacttctttgatggagaataataagaaaaaaaaaaaatggccrggtgcggtggctcaggcctgtaatctcagcactttgggaggctgaggtgggcagatcacgaggtcaagagatcgacaccatcctggccaacatggtgaaa

SEQ ID NO: 544698 - DNA, 201 bp, Homo sapiens
tgaggtcactcatcctccacatcagctccagcctgaatcaagcctacactggaggtttctattacaggcttgctgtcttccccagcttggaatttaggcawgagatctgggatagtttccttacatattttatctgggtatttctattgccacaccaggtattgaccctaggagttggtaggatgagatatgaaccttctg

SEQ ID NO: 544699 - DNA, 201 bp, Homo sapiens
tctctttgttttttgcagaatagttctagaaacactaatgttactaacattgctgcctttgccatttcaatattgctatttttccaatgaggcatctggtrtgaaacaaaacaacaaattaaatgttagagtcagctattgtaggaggatcttctaaaatgtttttcatggtactatcacttccccctgaaaggaatggtc

SEQ ID NO: 544700 - DNA, 201 bp, Homo sapiens
ttttattttctccaacagaaaataagaaaaacaaacattctaaaaggtcctgctcatttctttaatttatatttaactttatcattaataaaatgatagcrttatcattaagaaatgatttattagttatcactgataaaatttcattaagacccatagtgtagcacagtgaaataaaatttaacattaaatcatggttcc

SEQ ID NO: 544701 - DNA, 201 bp, Homo sapiens
attttaagaaggaggctatatttgtacctactcttcaagaagggataagaatttgtatagagaatggaagtgagtattttagagagcatgaaacacagagycaatggggaatgtggcatgtggggaagaatacaaggagcccagtgtcactggagctgagctgtgtggggtatggggtggggagacagggctgtctggcag

SEQ ID NO: 544702 - DNA, 201 bp, Homo sapiens
atatttgtacctactcttcaagaagggataagaatttgtatagagaatggaagtgagtattttagagagcatgaaacacagagtcaatggggaatgtggcrtgtggggaagaatacaaggagcccagtgtcactggagctgagctgtgtggggtatggggtggggagacagggctgtctggcagatggacgccgggtcagg

SEQ ID NO: 544703 - DNA, 201 bp, Homo sapiens
agtggttacacatgctcctctaaagcgtctggggtcagtacacagtggagtcacaaattcgagaaagtggaatgagggaagtgagtggagaagtgagctcrggattacattttgtgttcaacatttacaaggtggagtgagagaaattctaccaagcacagggaaggcagaatcggggaagggcagagtcagccagagagc

SEQ ID NO: 544704 - DNA, 201 bp, Homo sapiens
gaaaaatgatttgaggaatgtaatgtctctgcagacaataaaagcatgccagaaagatttgcaaacaaaacagaagaaaatttagcctaatattttaactcaagctgaaaaaaaagatagcagcttttaaagaacagcataacccagaattttaagaactcaaaaagaagctaatttgaaaaaacaaagacttcaaaagga

SEQ ID NO: 544705 - DNA, 201 bp, Homo sapiens
cctctccctttgaataagaccttgaaggtctcaaggcatattgaaaagggcatggacattattagagaaacggaggctacaggaggaagtgggagaaaacragaggaatactcatggaaagcctttatatgttggattcaagagaggaatgttcatttgccctcttgacataaagaaggaacttctggaggacttgaggat

SEQ ID NO: 544706 - DNA, 201 bp, Homo sapiens
agaatgaccatcttctacgagtaaggctcctggaggggttggaactgggaaaaaaaaattaaaattagctgagtttttgaaaaacttgctctttaaaaacmaaataatgttgttgatttttttttttttcccccagaacactgtggaaactctggtgttagtctatgggaaaacttctactagagaatccattctttattc

SEQ ID NO: 544707 - DNA, 201 bp, Homo sapiens
cttctggaggacttgaggattggggtaagtgctcataaatggtaaagaaagaattttccctcctcccaaaggggtgctaattcaaaaaaagcaagtaggcrgggcccttaaaaggctacagagtaaggccctgtgcaggcagaaaaactgcttcaaaagccactgaaaaacttggccctggggcatagcaggaacaaaaag

SEQ ID NO: 544708 - DNA, 201 bp, Homo sapiens
gctaccatttcgtggctgatataagtcaagatattgatccaaagaatgaccatcttctacgagtaaggctcctggaggggttggaactgggaaaaaaaaawtaaaattagctgagtttttgaaaaacttgctctttaaaaacaaaataatgttgttgatttttttttttttcccccagaacactgtggaaactctggtgtt

SEQ ID NO: 544709 - DNA, 201 bp, Homo sapiens
tatttcaatcttcttttatttcttcatcagaattttataatgttcaacatacagattctgtacatatatttttgtgtacctaggtacttcattttctttgyagcatttgaaattatactgtgctttcaatttgtttccacatgttcactgttagtatgtagaaatatgattgatctttgtctattggtcttgtatccagca

SEQ ID NO: 544710 - DNA, 201 bp, Homo sapiens
gtatatgatgctaccatttcgtggctgatataagtcaagatattgatccaaagaatgaccatcttctacgagtaaggctcctggaggggttggaactgggraaaaaaaattaaaattagctgagtttttgaaaaacttgctctttaaaaacaaaataatgttgttgatttttttttttttcccccagaacactgtggaaac

SEQ ID NO: 544711 - DNA, 201 bp, Homo sapiens
tttcatttcatccaactttcaaaggctcaaaactgtctttatctatatgatgtatatgatgctaccatttcgtggctgatataagtcaagatattgatccmaagaatgaccatcttctacgagtaaggctcctggaggggttggaactgggaaaaaaaaattaaaattagctgagtttttgaaaaacttgctctttaaaaa

SEQ ID NO: 544712 - DNA, 201 bp, Homo sapiens
cccttgtgtgaaacagctgtctcagggagatggctcagtgctatttgacagtggcttgtatgttacatagatacgtctggtattatctaaccggggatgamacgaccagatggagctgaatgcctccaactaggaatgcagtctaccactgtggggaaagaacataggctcaggtttcaatggccctaagatgaaataccg

SEQ ID NO: 544713 - DNA, 201 bp, Homo sapiens
ctcagttcagttcactgtttttctgcttttcaaagataagatcaaactgattccaccttgtttcttttacatctgtttagcttgggttaccctgctaaaartgttcttctatcaaagaagaaaaatcatcctctctctccatttttgttgtgctatatcagtctgcgggtaccctttgaataataacttctcaatttgctg

SEQ ID NO: 544714 - DNA, 201 bp, Homo sapiens
ttcttaatggagtttacattctagtgggaggagaaaggcaataaatagaatgtgagaaggtgatcaatgctgtagagaaaagaacaaatcaaagaaaaccraaaggaatgccatgagtggaaggaggttgccaagttaaatagggccatcgtggagggccttactgagaaggtgataaatgaggaaaaccctgaagtagga

SEQ ID NO: 544715 - DNA, 201 bp, Homo sapiens
tggaaaatgtagtcattgttcagggctgcttgtacttttcaacaagaaaatcttttctttctctttagtggtatgttataacctggcatggacaagcttcyggcaggtggagggatgccaaaaagttgacttgagagatagagagttagaaggatgatcatttagaggctgggaagggtagttgagaggtgttgctaaggt

SEQ ID NO: 544716 - DNA, 201 bp, Homo sapiens
tgtcagaaggaacttggtcaggcactgactctaacactgttttggagtccagagaaaatactctgccctgatggaatagcagcctctgttagttactaaarctccggaagatccgagcttggaaatggactgagataccctacatgggatatgaatgagtgacttttccctgaggctgagctattaggtctggggtccttc

SEQ ID NO: 544717 - DNA, 201 bp, Homo sapiens
agagagagctgcagaaagcagttcccaaaaggaagaaggcaagttacaaataccgccgttggcattttcgtgggtgtttcccgccacatagagataaaagstttgaggtggggctttgaggcacactctctgggtagctgggcctgcagtctggaaatcctaagtaatccttgcaaataggctaactggaagccagcaata

SEQ ID NO: 544718 - DNA, 201 bp, Homo sapiens
ctcaggactgtgtcccagccactccagccatggctataaggggccaagttacagctcaagacattgtttcagagggtgcaagccccccagccttggcaacwtccacatagtgttggtcctgtgggtgcgcagaagacaaaacttgaagtttgggaatctccacctagatttcaaaggacatatggaaatgcctggatatcc

SEQ ID NO: 544719 - DNA, 201 bp, Homo sapiens
gacagctgcttttggcctcacagggctggaaaacaccttcctagttcacctgaaactgactaaatgtgggtaacaaaaggcagaccgaaaacaagcatttrgagtagccaggagcctcaagctatcttttgaacagtgtaactatacattctttgggtgcctggagttactgttttccctgataaatgcaaagcagagcaa

SEQ ID NO: 544720 - DNA, 201 bp, Homo sapiens
aatactactcatcggtgtgagtcttatactgtcctcttccctgtttcaatcacctaaaacctcctttttatgttaggtcttttgacattgaatgttttcartgtcatactcccatttacctgattaataataagttctttatgtttcacttttaaccaaagcaggaacaccagggcaattagtccagtaaagaagaaaagc

SEQ ID NO: 544721 - DNA, 201 bp, Homo sapiens
attgtgacagctgcttttggcctcacagggctggaaaacaccttcctagttcacctgaaactgactaaatgtgggtaacaaaaggcagaccgaaaacaagyatttagagtagccaggagcctcaagctatcttttgaacagtgtaactatacattctttgggtgcctggagttactgttttccctgataaatgcaaagcag

SEQ ID NO: 544722 - DNA, 201 bp, Homo sapiens
aacagttctctggcagtatcttgtccaaggtcacagaaaacagaagtgtctgatagaacagatacacatgaataacatttgacaagataatgatactttgygttgcctggcactgtcctccttaaagcccgccatgcagatctgtccctgactccttggcaagcaccactctgttctgataactgggcctagagttgcaga

SEQ ID NO: 544723 - DNA, 201 bp, Homo sapiens
aaaaggagtttatagaaatagaaaaatattaagagttgaagaaaaaacttattccaaaattttagactacactagaagaaataaaatagtgaatgaacacygcagaaagttccttaagaaaaatagaaaagaatgaatatttttaaaataaaaagatttaaaacatacatatgaaaaaggcatagaaaataggaataggag

SEQ ID NO: 544724 - DNA, 201 bp, Homo sapiens
cattccacaaacacttgaaggctttctctattttttcatactttgagcgacacgaaataggagcttcaaactactgggattccaaaattctagtcagtgcmgtggcaaaccctgcgcccaggacagagtcaccaatttcaaatgcggccaatccagatcagggagaattggaccataaagcagtagcaaccctctccagga

SEQ ID NO: 544725 - DNA, 201 bp, Homo sapiens
tggctagtccagatgaaccttgtgtgtcctgtctcattcttaagacacagttccattccacaaacacttgaaggctttctctattttttcatactttgagmgacacgaaataggagcttcaaactactgggattccaaaattctagtcagtgcagtggcaaaccctgcgcccaggacagagtcaccaatttcaaatgcggc

SEQ ID NO: 544726 - DNA, 201 bp, Homo sapiens
cccggattcaaacaatcctcctgcctcagcctctcgagtagctgggattacaagcatgcaccaccatgcccagctaatttttgtatttttagtagaggtgsggttttgccattttggccaggctagtctcgaactcctggcctccagtgatcctcccacctcagcctcccaaagtgctgggattataggcatgagccacca

SEQ ID NO: 544727 - DNA, 201 bp, Homo sapiens
gaaataaaatagtgaatgaacaccgcagaaagttccttaagaaaaatagaaaagaatgaatatttttaaaataaaaagatttaaaacatacatatgaaaawggcatagaaaataggaataggagaacaaatgaacatataatagaagttcctaaaaaagaaaatcaatgtaatgaaagaacaaatattatcaattataatt

SEQ ID NO: 544728 - DNA, 201 bp, Homo sapiens
ctaatttgttgttcaagctgaactgggtatcgccctggtgctcctgtaatgccctgtgtatttgtccttcaggtacttcccacattattttataataaccratgtatctttctcttccactaaaaagtaagctttctgaaaacagaaattattcttgtcttactcatcttcatatcaccagaccctctgacgcataacagg

SEQ ID NO: 544729 - DNA, 201 bp, Homo sapiens
tttttttgggttttggaatatttgcattccacttaccagatcagcatcccaaatctgaaaatccaaaatctgaaaatttttgagtactgatgtgacactcaaaaaaaaaatgctcattggagtattttggatttcagatttttggatttgggatactcaacctgtaatagcagtactcacctctttgagttcttgtatgtt

SEQ ID NO: 544730 - DNA, 201 bp, Homo sapiens
aaaattatagataatatgaagatgttaataaaaagggctcagaacaaaatagcacaaacatttctaaatacaaaaagaggctgggtgcagtggttcacacytgtaatcccagccctgtgggaggccgaggtgggaggactgcttgagctcaggagttcaagaccagcctgggcaacaaagtgagaaccctattccctacaa

SEQ ID NO: 544731 - DNA, 201 bp, Homo sapiens
gaataggactgttacccctttttttttttccaccaatattgcctctgtttccatttgcatttccagaagtgacccaattctgagtttttaaaatcttcctkgcttcacacatcaaagctcacagccttcgtaactgggtggaacaagcaagtggaaaggtagcattgttttctcttatagcacaatgtcagctactataaa

SEQ ID NO: 544732 - DNA, 201 bp, Homo sapiens
aataaacaggtgaaattgactaatagtgaatgtctagagcaagctttgtgtgttcagaggtgtgtatacctaaagggaaagccaggatcttttcatttacrtcagtggggtggaaatgggagcagatgcgtattttgatgatttgcataaaagtttctgctctttctgatcttctgttggtggagcaacctccttctctcc

SEQ ID NO: 544733 - DNA, 201 bp, Homo sapiens
tcccacgccctctcccttccggtggcacttataaaagcggggtcaccatgctcacgacctctttacaactagacagagagcgtctgatggcaggtaaggattttttttttttttttttttttttgaggcggaatcttgctctgtctcccaggctagagtgcaatgacgccatctcggctcactacaacctccatctcctgg

SEQ ID NO: 544734 - DNA, 201 bp, Homo sapiens
ttagagatttttctcataaaatgtgatgtttgtttttcaagcaagatgactgaaatggaacaactctatttatttgatgatttctccaggtggatgatgcygaagaacctgacaaaacaggggagaataaagcacccagtaagttccagtccgtgggagtgcaagtagaagaagagaagtggtaagtccacatgcacgcat

SEQ ID NO: 544735 - DNA, 201 bp, Homo sapiens
gccaccacacccggctagttttttaatatttttttgtagagacagagtcttcccatgttgttcagactggtcttgaactcatacgctctagcaatcctccygccttggcttcccaaagtgctgggattacagcactgagccaccgcacccagcaatcctgatgattcttaatctgattttacttttattttattgtgttgc

SEQ ID NO: 544736 - DNA, 201 bp, Homo sapiens
tttttttatttttttctttttctttctttttgagacaaggtctcactctgttgcccagactggagtgcagtggcatgatcatggctcacaacagccttgawctcccgggctcaagcgagcctcccacctgagcctcccaagtagctgggaccacaggtggtgccactgagccagctaatattttaattttctttgtagaga

SEQ ID NO: 544737 - DNA, 201 bp, Homo sapiens
cttgtctcaaaaataaataaataaataaataaataaataaataaaagcaaagtacacatttttttttccaagtacacacagagcatttaacaagatagacwatattttggcccaaaaaacaagtttcaataaattttcaagggttcaggaaaaagtacgttgtctgaccacaatggaattaaatagaaatcaatagctaaa

SEQ ID NO: 544738 - DNA, 201 bp, Homo sapiens
aacaataccaggtccaagggtaaggcaatgaatttaccaaaaccagcaagttcattacagctggcctttcttccacccgtcatccccagtgtgagctcatctttttttttttttgagatggagtttcactctcattgcccagactggagtgcagtggcgccctctccgctcactgtaacctccacctctcggattcaggca

SEQ ID NO: 544739 - DNA, 201 bp, Homo sapiens
aaaatgaaagaccattgggtatttatggagagagcccactgcacagagaagcataaatccatccatgtcccaagctatatgtgctaaacgtagccacacargaagaatcacttcctccactacagaaaatagcagctccctattttaaatgtgcttctcattggctgtaggagtagcagtaattcatcttctatagacctg

SEQ ID NO: 544740 - DNA, 201 bp, Homo sapiens
caaacaataccaggtccaagggtaaggcaatgaatttaccaaaaccagcaagttcattacagctggcctttcttccacccgtcatccccagtgtgagctcatctttttttttttttgagatggagtttcactctcattgcccagactggagtgcagtggcgccctctccgctcactgtaacctccacctctcggattcagg

SEQ ID NO: 544741 - DNA, 201 bp, Homo sapiens
gctaaaagcaatccacacccccctcagtctcccaaagtgctggattatgggcatgagccactgtgcccggctagctttaggttttttttttttttcttttkatagatgcctttttatttacttgaggaagttcctttcttttcctagtttgttgaggattatgatcaggaacagatgttggattttgtcaaatgcttcttt

SEQ ID NO: 544742 - DNA, 201 bp, Homo sapiens
tgaaactctcacacactggttattatagactgtgcagttgaaattaatagaatagagacgccctctgtctgatgagtcactatttttcctcttctgactcrtagtttttcttttttgtttttttcacattattgatcagtgaatagtctagtaatctaattcatgtgtatttcagggctaaaaatggaacactaaccttga

SEQ ID NO: 544743 - DNA, 201 bp, Homo sapiens
aaagtgctggaattacaggcctgaaccactgcacctggcctagtgcaatgttgagtagaagtcatgaatatggacatccttgccttgttactgatcttagrtgaaaatatgtagtttttcacctttaagtatgatgtgcagtggcgcgatccgaggtgtaccaccacgcccagctaatttttgtattttttgtagaaacgg

SEQ ID NO: 544744 - DNA, 201 bp, Homo sapiens
tcagaacaaaatagcacaaacatttctaaatacaaaaagaggctgggtgcagtggttcacacctgtaatcccagccctgtgggaggccgaggtgggaggaytgcttgagctcaggagttcaagaccagcctgggcaacaaagtgagaaccctattccctacaaaaacatttttaaattagccaggcgcagtggcatgtgcc

SEQ ID NO: 544745 - DNA, 201 bp, Homo sapiens
aatccacctgtctccacctccaaaagtgctggaattacaggcctgaaccactgcacctggcctagtgcaatgttgagtagaagtcatgaatatggacatcyttgccttgttactgatcttaggtgaaaatatgtagtttttcacctttaagtatgatgtgcagtggcgcgatccgaggtgtaccaccacgcccagctaatt

SEQ ID NO: 544746 - DNA, 201 bp, Homo sapiens
gtggtcttggaaaatgcaacatttgggcaggaaggcaggagtgcctgtcctcgcctaggtccgtgggggtagagccctagccagggaccacgccctcctcwacccagcacttcccttcccctcttccgtatcatttaaaggcatcacgctcttcccttcccagcactccttatcaataatacgcaagattttaaagatgca

SEQ ID NO: 544747 - DNA, 201 bp, Homo sapiens
ccgaggtgggaggactgcttgagctcaggagttcaagaccagcctgggcaacaaagtgagaaccctattccctacaaaaacatttttaaattagccaggcrcagtggcatgtgcctgtagtctcagctgtttaggaggctgaggcaggacaatcccttgagtccagaagtttgaggttgcaacgagctatgatggcgccac

SEQ ID NO: 544748 - DNA, 201 bp, Homo sapiens
cctggaagagatgagggaaggggcagaagtgaaaagtgctcttgctaggagtggtagctcatgcctaatcccaggtctttaggaggccaaggcaggaggaytgcttgggcccaggagttcaagaccagtctaggcaacatagtgagaccctctatctacaaaaaataaaaagaaagaaaaaaaaaaacaatttaaaaataa

SEQ ID NO: 544749 - DNA, 201 bp, Homo sapiens
tttttaaattagccaggcgcagtggcatgtgcctgtagtctcagctgtttaggaggctgaggcaggacaatcccttgagtccagaagtttgaggttgcaasgagctatgatggcgccactgcactttagcctagatgacagagcgagaccctgtctcagaaagaaaacacaaaacaaaaagataatgagagagagagaaca

SEQ ID NO: 544750 - DNA, 201 bp, Homo sapiens
tctgccggattatcaacattacttttagatgatttctgtttaaagatggtgaaaaaaaaggatacacatgtatcttggaggccttctgaaactaaatgacmataaaaggaatttttgtttgttttggcattaactcccaaggaggaagagaacaagagagaaaaaaaaaacagcaaaatttagcaagctagaaagcagata

SEQ ID NO: 544751 - DNA, 201 bp, Homo sapiens
acagatcatctaaggtcaggagttcaagatcagcctggcccacatggtgaaaccccgtctctattaaaaatataaaaataagctaagcatggtggcgggcrgctgtaattccagctacacgagaggctgaggcaggagaatcgtttgaacctgggaggcggaggttgcagtgagccgagatcgcaccactgcaccccagcc

SEQ ID NO: 544752 - DNA, 201 bp, Homo sapiens
aaaggcagacagagatttccctgaaaaatctgtttttaaagaaacctggtcctctctcccttcttccttccacctaatgtgcacctgggagagaagcttcrgaaagtcatatctgagtcacaatgaggagtctctttacgcgtactgtcaagtacgctcttacaatttattttctccaagaaaaagctaattcaggtcctt

SEQ ID NO: 544753 - DNA, 201 bp, Homo sapiens
tttagagtcctttcagatagccttgcagatggttcgctgaagtcatcatgccaacaaaattcgtttgactcaaaaatttaaatagccctaccaaattatgygtgtttctcttctaataaaaaactgaatgtcttatttctatctgctaagcttattccactctgcagtttgtgaactgaactacagaaataactccttaga

SEQ ID NO: 544754 - DNA, 201 bp, Homo sapiens
ttctggaatccccaaatatagtgttataaatgctgacttttctcatttgcttttgcatgtattcatgtcttgtctctttacacaagactgctatccaaaayatccaaaaggcattaaatactaatattatggaatcataaaggtgttctttcttcttctaattgcatgcattcctgccagtctctatgaccacagctgagt

SEQ ID NO: 544755 - DNA, 201 bp, Homo sapiens
agctgagtgacagataaagcccaaattaaaaatacttccctcttggcaagatacctccaacccagtgggctgctcagttggaaagctgggaagtggagagrcatgagtcactgtgttctctcagacattttaattcagagttgtttaagaagatttaaaaaaaaaaatcaagcaatggacccccaaaatgaccatttctca

SEQ ID NO: 544756 - DNA, 201 bp, Homo sapiens
gaagtggagaggcatgagtcactgtgttctctcagacattttaattcagagttgtttaagaagatttaaaaaaaaaaatcaagcaatggacccccaaaatraccatttctcactaagtcatgaaatttaattttttctttttcttttttttttagatggagtctcgctgtgtcacccaggctggagtctggagtgcagtgg

SEQ ID NO: 544757 - DNA, 201 bp, Homo sapiens
gggaacttgtctattgccatcccatagaaaggtagcaatttatgccttcctggttttgataacatttcccaaacatgtttactcctgtgaagcatatccarttgagcaccatgaagcacacctgctattttaaaattcaaggtagacgtcaggagcggcttacgcctgtaatcccagcactttgggaagccgaggtgggcg

SEQ ID NO: 544758 - DNA, 201 bp, Homo sapiens
taaacagtcacttcaagaactccctatgtctctccgtctctcacacacacagagcccctcctacgactcttctcactcttgactcttgaggtcatcttgtsttatctctctctatgtccatctgccagatcgcagcagaattacctcaattcatcctagagaaacaggtccctctttgctctgaacccaaaatataccaac

SEQ ID NO: 544759 - DNA, 201 bp, Homo sapiens
cctcagtgtgttgtcctggggtgttttgtttaatacatgtaaaacttttagagcaatacctgatatatacaatgctctgcgtgtttcctagtctattaagsactcaaatagaatctctctaaagaaagaagtttcaagataataattatgctgccttttcttcaaaaaaaaggaggagaaagtcgtctcctttactttact

SEQ ID NO: 544760 - DNA, 201 bp, Homo sapiens
actctgatgcctggtaaaaggataaactactaattaaaatgataaaattacatttgaactctggagaccatgagaactttataattgactcataatatgcyttggctgcacatacacagctattaatggtttgtagaggggaaagtccatttcattttgtattaacaaaaaaaacactccaaaaaatacacataatggaaa

SEQ ID NO: 544761 - DNA, 201 bp, Homo sapiens
gtgtaggttcctgaactgcaccaaaagtgccactctagtgtgaaatgtggatattagttgaggctgtgtgtgtgtcgggggaaggggtgtatgggagttcyctactttgtgctcaattttgctgtgagcctaaaactgttctaaaaaaacaaagtttattaattttaaaaaggggttggaggaaagcggactatagcatta

SEQ ID NO: 544762 - DNA, 201 bp, Homo sapiens
  misc_feature (1)...(201): n = A,T,C or G
taaccctactgtaaaccatggactttgggggtgataatgacagccagtgtaggttcctgaactgcaccaaaagtgccactctagtgtgaaatgtggatatnagttgaggctgtgtgtgtgtcgggggaaggggtgtatgggagttctctactttgtgctcaattttgctgtgagcctaaaactgttctaaaaaaacaaagt

SEQ ID NO: 544763 - DNA, 201 bp, Homo sapiens
gatggagcagcaatcttattttctccaggcatctcaaatcagttagggggatgcgggcctgggatgggagggtgtgaggctgctgtaagctgggtgatcargggagctgtagggaagtttacattttccccctgaagccttgataatttgagtctataaaacaaacatatagtaaattaacaggaaaaaaaagtatacact

SEQ ID NO: 544764 - DNA, 201 bp, Homo sapiens
aggctaactaagagagaagacacaaattactcttataatatcagacatgagcaatccatatgccttggcctcccaacgtgttgagattagaggcatgaacyaccttgcctaatcaacagtttcttacaaaactaaatatattctttaccatacaagtcagcaattttgtttcttggaatttatccacatgaattgaaaact

SEQ ID NO: 544765 - DNA, 201 bp, Homo sapiens
aaatttatggaatgaggcaaaagcagtggttagagggacagttatagcattgattgcatgtattagaaaagaagaacaatttcacatcaattatttaagcytccaccataggacactagaaaaagaagagcaaattaaatccaaaataaacacaataaaagaaataaataaaattataacagaaatcatgaaattgaaaat

SEQ ID NO: 544766 - DNA, 201 bp, Homo sapiens
caaataaaaaaaagaaaaaagaaaaagagagcaagtagctggatgtggctgagcactggatccctgaagtggatggtcataggcacgctagaaacatggayctctgtctatttagctgagaattctggattaaattcctagaaagccgctgaaggcttttaagcacaaaaatgtcttcagaactgctgcaggaatatacag

SEQ ID NO: 544767 - DNA, 201 bp, Homo sapiens
tttcattttttctattctctatattttccttaatgcatttgttattatggtaatatgtataacataaaattcacccttttaaccactttttttttgagacrgagttttgctcttgttgcccaggctggagtgcagtgcaacctctgcctcccgggttcaagcgattctccttcctcagcctcccaaagagctgggattaca

SEQ ID NO: 544768 - DNA, 201 bp, Homo sapiens; identical to SEQ ID NO: 542910

SEQ ID NO: 544769 - DNA, 201 bp, Homo sapiens
ttattattattattattattattattgtatttttagtagagacgggtttctccatgttggtcaggctggtctcaaactcccgaccttaggtgatccaaccrcctcagcctctcaaagtgctgggattacaggcatgagccactgccctcggccttaaccactttttaagtgtacagtttagtggcattaagtatttcacat

SEQ ID NO: 544770 - DNA, 201 bp, Homo sapiens
aagcaaataatgtaggcaagtgcttctcagactctgtagtgaagggccactttttccccccaataatttgtaagcgacacttgaaatatacaaaatcatakgcttgaatttagtggcaatatcaaattactttaaatgtttctaaatgtgttttgttgttgttgttgtttttgttactttctattcacaagtcatcatagc

SEQ ID NO: 544771 - DNA, 201 bp, Homo sapiens
aatttactgattaaatttacatttataaaaagatttccagattacctaacaaagcaaaacccaacactccaggttatatacatataaacttttaataatamtatatatgtttctttcaggtggagaaaagtctgtatagtatgctaccaattatctaataaaggagacgggataaaaaatacaaatatatatcaattttgt

SEQ ID NO: 544772 - DNA, 201 bp, Homo sapiens
cctaacaaagcaaaacccaacactccaggttatatacatataaacttttaataataatatatatgtttctttcaggtggagaaaagtctgtatagtatgckaccaattatctaataaaggagacgggataaaaaatacaaatatatatcaattttgtataatttgtatacaaattatatacaaatatatactaatggacat

SEQ ID NO: 544773 - DNA, 201 bp, Homo sapiens
gggtaagcttctctcctcaaggtcccaagataacttggagctcctgggcctgtcagaaagtgacattctttacttaccacaaatcaggtaccctgtacacrgactgtgtagatgaggtatgaggccagttttcccaaggggcttttattggcttgataagtcaaatttgattgcttaaaggaaagcatgccattccagtta

SEQ ID NO: 544774 - DNA, 201 bp, Homo sapiens
atttttatatgtttattaaatattaatttaaaggtcagcaatatttataaaacatctgtagggtataaagtataaaaatgtactaaatgcttcacacaccrtttaaaaagaaaataataacagtattttattttattttattttcttagagagacaggggtcttgctatgttgctagtacgatggtcttaatctcctggac

SEQ ID NO: 544775 - DNA, 201 bp, Homo sapiens
aagtggctgaggcaagatttgaacccaggcaatctggtcctaaagttcctgctacatgaagatagagaaaaaacattgaggccaggcatggtggctcatgyctgtaatcccagcactttggaaggctaaggcaggcggatcacctgaggtcaggcattagagaccagcctggccaacttggccaaaccccgtctctactaa

SEQ ID NO: 544776 - DNA, 201 bp, Homo sapiens
ccaagttgtatctaaatgattgaagctattatctgactggttatataaaaatgtcatgaggttacagctaagaattaagttataatgatttagctctttartgtagacattcaccttcctatggcaatgatatgtgccataaggatgctctttggactacttctctgttctctgtatagactgggaagggtgatattttat

SEQ ID NO: 544777 - DNA, 201 bp, Homo sapiens
gaaggggtctctcctcatagccatgacagctgtgaaacagttggtcacacctgaagtcagcacatctcagagtctcacccaatgcccagagagtgtggttscccacagtgtgtgctacctggctactgctgctgattattcagaggccaaaagctctttagtcagcccgtgatgaatcctgccaggactgagttcttccac

SEQ ID NO: 544778 - DNA, 201 bp, Homo sapiens
ttaaatatgagcaattacatttcttcaaaaacacattttttaaaaatggctgaaaaaatgtttttatatgctctttgcattatgtaattcacaattctacrtttaatttgtttttctaataatctgttcaaatgaacatgggatagtcgagatgaacaacagtctccttctaattcaaaaagaagtttttaggactggatg

SEQ ID NO: 544779 - DNA, 201 bp, Homo sapiens
tgtattatgaatacagcaaatgaataattatattcatgtcaataaaatttgaaatttgacagggaaaaggacactgtgaaaaaagtcctctacttgaattygaataggaaacatcatgaattcatgatgaatattattttattaaaatacatgttttctagctttgttctctgaaaagatggaacgtgctcaacccttcac

SEQ ID NO: 544780 - DNA, 201 bp, Homo sapiens
aagaaatgcaaatcttaggtaattctagaaattgggagccaatgatcaagaattactaaaagataccaaggagttatcagttcctttttccttttattttmggcacatatgaaactactttttttattggagaaagtgagatgattagaagagggtttcatggatggctcctaaggcaagaaaggtgaaagtcgagggaca

SEQ ID NO: 544781 - DNA, 201 bp, Homo sapiens
atcacggaccccaagatcccccttggtactctacctccttatggccaaactgatacctagtctgttttctttactcttgtttctgcttttctcaagaagamggggtctctcctcatagccatgacagctgtgaaacagttggtcacacctgaagtcagcacatctcagagtctcacccaatgcccagagagtgtggttgcc

SEQ ID NO: 544782 - DNA, 201 bp, Homo sapiens
gtgctgaagtgtgtccttttccttgctagctttgaatcaaatcacaaaaggtgacagtggagcaagtgcagaggaaaactgagtgttctcatcaataaaakaccctttcgtctgatgggggcaaatatccggcattctgcccgtatgaaaatacaggtctttggagacaaacaatcctactttttaaattctctcgcattt

SEQ ID NO: 544783 - DNA, 201 bp, Homo sapiens
cagaccacctgtgtttagcccaggttccatgacttaccagctttcttactttgaataagttactttacttctctgtggctcaatttctgcctctataaatyggggggtgattgaacctactttaaggtgttgtcaagattaaatggactaatgtatttgaagcacttggaaccatgcctggcacataataaggtctctata

SEQ ID NO: 544784 - DNA, 201 bp, Homo sapiens
cctcccctagccgaaggaagccttgagggactgtgctgtgaggaacagtgcgttccggctcagatactatgcttttcccatggtcttcacagcccgcaaamcaggagattcccttgggtgcctacaccaccagggccctgggtttcaagcacaaaaactgggtggctatttagacagacacctagctagctgcgggagttt

SEQ ID NO: 544785 - DNA, 201 bp, Homo sapiens
agctttgttttatatttgggtagaaaagaataatttctgtaataactaggggagggaaaaatcctattctgcatttctataaaatttgagaattaagttgygtggtataataacctatcagaacattgtaatgtttattttgccctattttgctttctgatccttgtttgttcttggaaaagaaattgtaaatgtatttta

SEQ ID NO: 544786 - DNA, 201 bp, Homo sapiens
aggaatggtctttatgtgagtgtctccactaaaccagacccttatatacaccttccacctataccaaatactgttttgcatggcaggccaatactgtaccrttttccaaacttgtatttatttcttcagcacatgattagaagttatatttatttcttcagcacatgattagaagcctgctaccgccagcatgtctgaatc

SEQ ID NO: 544787 - DNA, 201 bp, Homo sapiens
ctacaaaaaatacaaaaattagccgggcttcatgacacatgcctgcagtcccaactacttggaagactgaagtgggaggatcacttaagcccaggagttcragtccgcagtgagctgtgattgcaccagagggcaacagagtgaaacactgtcaaaaaaaaaaaaaaaaaaaaaaacctcacccagcccgcagggtactgt

SEQ ID NO: 544788 - DNA, 201 bp, Homo sapiens
ggagataagaaaatgtatttttatatgtttattaaatattaatttaaaggtcagcaatatttataaaacatctgtagggtataaagtataaaaatgtactraatgcttcacacaccgtttaaaaagaaaataataacagtattttattttattttattttcttagagagacaggggtcttgctatgttgctagtacgatgg

SEQ ID NO: 544789 - DNA, 201 bp, Homo sapiens
attttttttttcatttcttctagtttttctaatttattgcctgacagttactcatagtagcctctaatgatcatttgaatttcagtggtattgggttgaawgtctccttttccatttctaattttatttatttgggtcttctctctctgtattttgttagtctggcaagagttttctcaattttgtttatctttttaaaaa

SEQ ID NO: 544790 - DNA, 201 bp, Homo sapiens
tcaaaaaaaaaaaaaaaaaaacagtctctgaggattgggataattatactcattattataaagctattgtttggtcagaatttctctttcaatgttatagsttggtcatttgtttacttcggccctttttacattctatatacatactgcacttcctggtataaaatttgttttgcttatttttttggcattgagttctga

SEQ ID NO: 544791 - DNA, 201 bp, Homo sapiens
gagtgcctgtattcacttcttatggctgctgtaataaacttggtgacttagatgaacacatatttatcatcttggaattctgaaatgtcagaagtccgatrcaggtctcaccaggctaaaattaagatgtcagcaggactctgctccttctggaatctcttgggaagaatccatttccttgtcttttccagtttctagagg

SEQ ID NO: 544792 - DNA, 201 bp, Homo sapiens
ccactgcctgcccttcccgctttcttcctcccaggtgtgcaaatgtttctgaaaagaatttttgaatgagcatgcaaggtccctttgttctgccacttccyaaagaaagttctgactctttttttgaagtggaaagtttttcctaagtttgcatttccaagagcagatttaccccaaatcctccttaatgcctggctgctt

SEQ ID NO: 544793 - DNA, 201 bp, Homo sapiens
gttgctgatatatcatgcttaaatccactttttaccatgtgatacatttaccaaaaaaccttattaaggcaataactaaaatcaagaagcatggaagataygcttattttttacaaggtaatgcaggcttctcagcaatactcaatatttttattccaaatgtttacaggggaaaattagcgctttataaataatgccaaa

SEQ ID NO: 544794 - DNA, 201 bp, Homo sapiens
ctgatatatcatgcttaaatccactttttaccatgtgatacatttaccaaaaaaccttattaaggcaataactaaaatcaagaagcatggaagatatgctyattttttacaaggtaatgcaggcttctcagcaatactcaatatttttattccaaatgtttacaggggaaaattagcgctttataaataatgccaaacatt

SEQ ID NO: 544795 - DNA, 201 bp, Homo sapiens
tcaaataagttactaaactatgctgccttccctccttacacgattttggttgcaatgttgatggctaatgatgaccttttacatacaggtgtggtctaagwgacattttttttcctgtttcatcagaatctctgcaatttttctcctgtagagaaagaccctccctcccaggttttgcctagtctctgtcagtgaacaccg

SEQ ID NO: 544796 - DNA, 201 bp, Homo sapiens
gatgaccttttacatacaggtgtggtctaagtgacattttttttcctgtttcatcagaatctctgcaatttttctcctgtagagaaagaccctccctcccrggttttgcctagtctctgtcagtgaacaccgcaactgccctgaaggggtgccccaaccccgttgtcttttcttctttcacttcttatagaggattagttc

SEQ ID NO: 544797 - DNA, 201 bp, Homo sapiens
tttcttttttttgtgagacagagtctcactctgttgcccaggctggagtgcagtggcgtgatctcagctcactgcagcctccgccctcccgggttcaaatrattctcctgcctcagcctcccgagtagctgggattacaggtgcacgccaccacaatttttatatttttagtagagacaaaatttttccatgttgggcagg

SEQ ID NO: 544798 - DNA, 201 bp, Homo sapiens
ttttcttttttttgtgagacagagtctcactctgttgcccaggctggagtgcagtggcgtgatctcagctcactgcagcctccgccctcccgggttcaaaygattctcctgcctcagcctcccgagtagctgggattacaggtgcacgccaccacaatttttatatttttagtagagacaaaatttttccatgttgggcag

SEQ ID NO: 544799 - DNA, 201 bp, Homo sapiens
tgctcctttgccccaggaggcacagtggcctggtggcggcactgcttaggtccacagctgcatgaaagtggcaccatgattggtcagaaccagacccagcytcctttcttgagttcctattctgaggagaaaaatcatagctctattttgaaaacacttactcattatcctaactagactcccaggcttagaatgagtaga

SEQ ID NO: 544800 - DNA, 201 bp, Homo sapiens
taacgcctgtaatcccagcattttgggatgccgaggcgggtggatcatgaggtcaggagatcgagaccatcctggccaacatggtgaaactccgtctctaytgaaaatacaaaaattagccaggtgtggtggtgtgcacctgtagtcccagctgcttgagaggctgaggcaggggaatcacttgaacctgggaggcggatg

SEQ ID NO: 544801 - DNA, 201 bp, Homo sapiens
ttcataacccaagggaggtagtacaggagggtaatagtagatctctaggtatgtgtctttgacagaaacatttcaggatggtggatttaagaattaaataygaaaaaaagataacatgaaagcataaaagaaaatacaagaagacttttaaaaatatgctcagagaaaaagcctttccaaaccataaaagctggatgtgac

SEQ ID NO: 544802 - DNA, 201 bp, Homo sapiens
ttacatgtaatttttttcatattttctgcaggaaacattcattacttttataataaagaaaaagacacactgtttttatagaaagaggaagatgagaacgragtagaagtgctttgtccctaatgtaacgagcagaaattaaaacaaaatattacaaaacaaaacaaaattaaagtcatttggtcaaaaaccaaaacagca

SEQ ID NO: 544803 - DNA, 201 bp, Homo sapiens
acttctgcacaggacagttccattataatcttatgatcactattgtatatgtgctctatcgttaacagaaatgtcactatgtgtgtcatgactgtatatgrgaatgcctatatgagaatgtatggggaaatatatgtgagtaaagtttggtatcagataaagctggcatctcaaataaaaaaggcgaattagttaataaac

SEQ ID NO: 544804 - DNA, 201 bp, Homo sapiens
aattacatgtaatttttttcatattttctgcaggaaacattcattacttttataataaagaaaaagacacactgtttttatagaaagaggaagatgagaayggagtagaagtgctttgtccctaatgtaacgagcagaaattaaaacaaaatattacaaaacaaaacaaaattaaagtcatttggtcaaaaaccaaaacag

SEQ ID NO: 544805 - DNA, 201 bp, Homo sapiens
aatttgactctagagtcatgtaaaactttgcattattacaaagcaaaattcaatttaaaataaagtgattcctgaatatcaaaagtaaaataagcctattkagcctgtctgtccagtaggtggcagaacagcaccaaagggactattcccaagtgaccgtaaaacacaataatttgcctgttttagcggaatgttatcata

SEQ ID NO: 544806 - DNA, 201 bp, Homo sapiens
gtaaaactttgcattattacaaagcaaaattcaatttaaaataaagtgattcctgaatatcaaaagtaaaataagcctattgagcctgtctgtccagtagrtggcagaacagcaccaaagggactattcccaagtgaccgtaaaacacaataatttgcctgttttagcggaatgttatcataatgacaaaaacaactgcaa

SEQ ID NO: 544807 - DNA, 201 bp, Homo sapiens
tgtgtcatcaccatcaatgtggggaaaagggctgggtagcaccttatggggatacggctgaaaaaattcacactttcaggggaggaaatgaacaagttcamctccaagggttttttgtagggtttctttttcccccagaacttgagatttgtgtatgctaatggcattgacttagtaaactgctttgtggagaaaatgttg

SEQ ID NO: 544808 - DNA, 201 bp, Homo sapiens
ttcctgaatatcaaaagtaaaataagcctattgagcctgtctgtccagtaggtggcagaacagcaccaaagggactattcccaagtgaccgtaaaacacartaatttgcctgttttagcggaatgttatcataatgacaaaaacaactgcaaagtatcttaagctgatttttgtaatcattttgctggtggtagtcttcta

SEQ ID NO: 544809 - DNA, 201 bp, Homo sapiens
cttgcacttttataattttaagaccttcattcataaaatgacacattcattacatcagccattagactatttcaaggtgctgtttagttgcaaaaagttcrttatcgagaaaacaagtctaaccatttataatttctcacaatttctctccagtgtgcactgacttctgactaatttctctcctatgtaaagaagaatacc

SEQ ID NO: 544810 - DNA, 201 bp, Homo sapiens
aggtaggaaacctgaagatgctccactataattttagtaagtctaatggtaacctggtatataacacatcacgaaaacagatcaggaaaatacccagtgctttttttttttttttttttttttggacagagtctccctcagtcgctgaaggcagaagtatagtgccgcaatctctgcaacccccggctcactgcaacctct

SEQ ID NO: 544811 - DNA, 201 bp, Homo sapiens
ttataaattctcttgcacttttataattttaagaccttcattcataaaatgacacattcattacatcagccattagactatttcaaggtgctgtttagttrcaaaaagttcattatcgagaaaacaagtctaaccatttataatttctcacaatttctctccagtgtgcactgacttctgactaatttctctcctatgtaa

SEQ ID NO: 544812 - DNA, 201 bp, Homo sapiens
atgttcttagaagctaaagggaagagttccagggtagcagttcagtaaatgctgttgtttataatgatactgatgatcatgatattatagcatgtgagtgmatgttcaagctccataccaactgagcaatgggtcaggattttcttccctcaaagtcatataggttatgactatgagagctttaggtagatctgagaggag

SEQ ID NO: 544813 - DNA, 201 bp, Homo sapiens
aaaatatcagacaatctcaaactgaaagaccttatgcaaaacatctgaccagtaagctttaaaatgtacaatttttaaggtcatgaaagacaaggaaataytaaggaattgccacagattagaagagactaaggagacacaataacaaacttcaatctgttttctggcttagatcggggccagggatagaacataagtggg

SEQ ID NO: 544814 - DNA, 201 bp, Homo sapiens
taaaaactaattgatctctgagggggttttaacatatgcgcatattccttgataatactccctccaggaggtgaagcttaattcccttccctttgagtgtwggccaaacttaatgacttccttctaacaaataaagcatggaaaaggagaaacagtaactttacagtagagagagccagcatacaacatcgtaaccaggcc

SEQ ID NO: 544815 - DNA, 201 bp, Homo sapiens
gtttggtttgctcttgcttgtctgattctttaagatgcaccattagtttttttttttatttgaagtttttctacatttttggtggaggcgcttatagttayaaaatgtcctcttagtactgcttttgctgtatcccataggttttgtatattgtgtttccattatcatttgtttcaagaaattttttaattgcactcttaa

SEQ ID NO: 544816 - DNA, 201 bp, Homo sapiens
atagttaatgtctatttgaccttccatccaagaaactaaaaaaaaaaaaaaaatagcaaaaaagaaactttacatggcttgtgtttggaggacagttcttkggtgtcattttttatagatgactggaattttgctcaaactgagtcagaagtgaaaattaagatatttaaatattgaaatcatgcttctcaaaatatttta

SEQ ID NO: 544817 - DNA, 201 bp, Homo sapiens
ccatttaatatattctttctataaaagttaaaaatccaaagaaatctttcaaagtaaattattgttctcagaaggaagggtagaagagtttatacatttgraattaaattggctgggtgcataactaagaacatgttgaaaatgtacagcacttgaaccctgctgtgttatcatcatagtgaatcacaagttttgcttggt

SEQ ID NO: 544818 - DNA, 201 bp, Homo sapiens
aaacaatttttctaaaattcaacttaataagtggttaatgggtgtccactatgtggtgggcccgtgagggtacaaaatgaatgtgtcattcttctaatttsaaggagtgcttcaccaagggacagaagaatatgtgcttccaataagctggaaaacaggtttgagtagggtgttcgaagagagacaaaaatattgtgggta

SEQ ID NO: 544819 - DNA, 201 bp, Homo sapiens
aacataagcaagcaagaatgtattagaaggatcttgaggaaactaacaaatttgaagagaaggccgcagagtcagtctcagaaaaggcaggaacctggacwttccagagctgtgggtggcaggaacagtgtggctgaaccactcaacccccgtccttccccagaatcaaggcattaaccctgaccgttttttctgtctttc

SEQ ID NO: 544820 - DNA, 201 bp, Homo sapiens
cttttcacagggaagaggcatagaaataaggcagtatattgtagctatgaaaaccacggaagctgaagccaaggccgcatgggttcgaattctggttctcytccttactagccaggtgaactcagccaagtatcttaaccttgtatgcttcaacttcctcatctgaaaaatgggaataagagtataatgtctaatatagct

SEQ ID NO: 544821 - DNA, 201 bp, Homo sapiens
ctgttacctccttgatatttctcattaactcttgggtcctcatcactcttaacctcactcatgtcctcccaaatgccacagccgagggatatttctgcaarctcatcttttttgacatttccttaatattttacactgttgaccactatcttctaggaactttcctgttgacttaagtgatgcccctctctctttgctctc

SEQ ID NO: 544822 - DNA, 201 bp, Homo sapiens
ccctctctctttgctctcttcctaaaaatcagacattttctcagtgtcttttgggggtccccttccttcattgtccctttaaatattgatacaccctatgrtcctgccttgatcactgcctcttcttatccaatatagtctctttagacaatctcatccacccttgcagattcatctattatctgcttgactttaaccccc

SEQ ID NO: 544823 - DNA, 201 bp, Homo sapiens
ctgccctgaaggggtgccccaaccccgttgtcttttcttctttcacttcttatagaggattagttcctatagcattggaatagtagaatcttgggtgaatygcttttcctgttgtgaatgattcatgcaatgaaagtggaagatcactaattttcaaagcagtatggcttaaataaaaacatcttggccaggtgtggtggc

SEQ ID NO: 544824 - DNA, 201 bp, Homo sapiens
tttctaagtctaatcttttctctgtaaaacttcaggctaggttttaataaagctatttttacaggattgtatcagaacagttcttgcttatatattgttgrtatttttggtttgggttgtttattataaagagatactaaattgatctcttgatgtgttctacatctcttgatgtgttctcttgatgtttgaccttttctc

SEQ ID NO: 544825 - DNA, 201 bp, Homo sapiens
gggagccactgcgcccagccaccacacacttttaaatgaccagatctcacacgaattcactcactatcatgaggacaatatcaagaagggatagtgctaarctattcacgagaaaccatccccatgaccaaatcactccccacaaggccccaccttcaacattggggattacaactaagcatgagatttggagggggacac

SEQ ID NO: 544826 - DNA, 201 bp, Homo sapiens
aaattattatgagaaatgcccttttttagacattatctctgactctaagaaactaaatgacaaaaagtgagaggacagtactgttttcaagtccacttaarccacttgaaatttctctaggatgatgccaattcatagccccactctagtgttggaaacagtcattgaactgaactctcatcagcctccattttgtgttga

SEQ ID NO: 544827 - DNA, 201 bp, Homo sapiens
ctgcatttctataaaatttgagaattaagttgtgtggtataataacctatcagaacattgtaatgtttattttgccctattttgctttctgatccttgttygttcttggaaaagaaattgtaaatgtattttatccaaagccataaagcaattatttaatgtaatggggactctaagaacaaatacaagcatcctcaagaa

SEQ ID NO: 544828 - DNA, 201 bp, Homo sapiens
gtaaaggagagatggggaaatgagagaaaacgtgaaggagatgtgatttgagctgggtcttaaagaatctatgggaattcaataggcagagatagagagakaattccaagcagaaggaatcatcaaacaaatgacctggaggtgggaaagtccaaggtatgttaaaacaagagcaagtaggctgggcacactggcacacgc

SEQ ID NO: 544829 - DNA, 201 bp, Homo sapiens
gttaagttaatgaaaactcagggaagggatcaaggtaattgttggcttctttggcaggtctggactataagcagatgagacaacttcatcccttactttgygagagagagaggattgaaaggtgggtgagggatgggtcagagagaccttgtgacttcttcagttcagcatgtcaaagcaccatattttggggtatcagtt

SEQ ID NO: 544830 - DNA, 201 bp, Homo sapiens
agctgggtcttaaagaatctatgggaattcaataggcagagatagagagagaattccaagcagaaggaatcatcaaacaaatgacctggaggtgggaaagkccaaggtatgttaaaacaagagcaagtaggctgggcacactggcacacgcctgtaatcccaacactttgggaggctaaggcaggcagatcactggaggtc

SEQ ID NO: 544831 - DNA, 201 bp, Homo sapiens
atgagttatggtaaacaatcatttttcctataaggaaaatccttagtatagttaaattaaaagagaaaaacctacaggattcaaattcaaatcgtgaatgctactataaccactgcgtgctgcaagtcattatgctaagacaccaggttgcagcagagaaggaagtttaatcacagggctgctcaaacaggagatgggagg

SEQ ID NO: 544832 - DNA, 201 bp, Homo sapiens
ggagtgggtcagatggaggtggggatgggtggcatggatgagtcagctggagggtgaggccgctggagtggatgaagtgagcaaaggtgataggaatgcgrgaaacaaaactgtagggtaccactgcagtagcttattagcaacagatctttggagacgaaaattcagactctgaggccagagggccccaagttagaatcc

SEQ ID NO: 544833 - DNA, 201 bp, Homo sapiens
tgagttatggtaaacaatcatttttcctataaggaaaatccttagtatagttaaattaaaagagaaaaacctacaggattcaaattcaaatcgtgaatgctactataaccactgcgtgctgcaagtcattatgctaagacaccaggttgcagcagagaaggaagtttaatcacagggctgctcaaacaggagatgggagga

SEQ ID NO: 544834 - DNA, 201 bp, Homo sapiens
ctatgcagaacactgtaggccattataacataatgttaagtatttgtgtatctaaccatagaaaaggtacagtaaaaatacagtacaaaagatacagaatrgtacttctgcacaggacagttccattataatcttatgatcactattgtatatgtgctctatcgttaacagaaatgtcactatgtgtgtcatgactgtata

SEQ ID NO: 544835 - DNA, 201 bp, Homo sapiens
tagacgctaccatggggtcagagcccacgctccccatgacctgctcatctgcatgctccccctaggaattttaactctagggcaccaaagaagcaagccayaccccatcacatgccctgcacggaggaaaagggaacttttctagtttcacgaagtaactttcagcaacaaggaaatggatcaaagtacagcatgattaat

SEQ ID NO: 544836 - DNA, 201 bp, Homo sapiens
atgatttttatcacttggtggaggctaacaggacgagcttgacaatttgatgttaaagtttacttagaagttaatactccaaaataacctagagatttttkttttggtttgttctgtttttaaattacctttttttttttttttgagacactgtcttgctctgtcactcaggctggagtgcagtggcatgatcatggctca

SEQ ID NO: 544837 - DNA, 201 bp, Homo sapiens
tgaagtgagcaaaggtgataggaatgcgggaaacaaaactgtagggtaccactgcagtagcttattagcaacagatctttggagacgaaaattcagactcygaggccagagggccccaagttagaatccaaacacttccacccaaagctgtgccatcaaacagatgttgctggatctgagtgtcagttttctcatatttaa

SEQ ID NO: 544838 - DNA, 201 bp, Homo sapiens
gtcaacactcaaccctagacgctaccatggggtcagagcccacgctccccatgacctgctcatctgcatgctccccctaggaattttaactctagggcacsaaagaagcaagccacaccccatcacatgccctgcacggaggaaaagggaacttttctagtttcacgaagtaactttcagcaacaaggaaatggatcaaag

SEQ ID NO: 544839 - DNA, 201 bp, Homo sapiens
gtcagaaaaggagcaggtcaaaattgccctgctgatcactaatgggatcgactttgtgaatagccactgtactgtagcctgggcaacatagcaagatctcrtccagcaaataaataaataaaatataatactgtaataaatggaaaattatttactattcctacacaggaatactacatagtaaaaagacaacaatttcct

SEQ ID NO: 544840 - DNA, 201 bp, Homo sapiens
ctgacggccaagctgaaagagcaccctgtaacacttgcctactggggcctcgggagctgtcaacactcaaccctagacgctaccatggggtcagagcccaygctccccatgacctgctcatctgcatgctccccctaggaattttaactctagggcaccaaagaagcaagccacaccccatcacatgccctgcacggagga

SEQ ID NO: 544841 - DNA, 201 bp, Homo sapiens
agctaattaacataagccacctgctgacggccaagctgaaagagcaccctgtaacacttgcctactggggcctcgggagctgtcaacactcaaccctagaygctaccatggggtcagagcccacgctccccatgacctgctcatctgcatgctccccctaggaattttaactctagggcaccaaagaagcaagccacaccc

SEQ ID NO: 544842 - DNA, 201 bp, Homo sapiens
aaatttttaacaatggaaagattgttaaatgagttatggtaaacaatcatttttcctataaggaaaatccttagtatagttaaattaaaagagaaaaaccyacaggattcaaattcaaatcgtgaatgctactataaccactgcgtgctgcaagtcattatgctaagacaccaggttgcagcagagaaggaagtttaatca

SEQ ID NO: 544843 - DNA, 201 bp, Homo sapiens
ctggagggaactgagcaaggcctgtttgtgcagattcttctgtgtccctgagtcttagagataacgatgctcctgtcctgtgggtatagggtggacacctytcacacgagggtcataggagagaaagagaaaggggtaggagaaggtcagagagactttcctgcttctgtgcttttctcaaattctttcagcttaaaatat

SEQ ID NO: 544844 - DNA, 201 bp, Homo sapiens
acttgttttcctgttaaatgtctcagtgtgtttcatgtgccctaattcccaatggctgtcagttacaatatcagaaattaaaacccacgcagaaatcacaktgtctttgttttcactgtcttccagtgtcatcttgcattacaacatataagaagacaccacctccagtcccacccagaactaccacgaaacctttcattt

SEQ ID NO: 544845 - DNA, 201 bp, Homo sapiens
cagtgtatttggtaaataaagttaaggcattatagtggtcattcttactgataaattatacctactagattttaatgcataaatatagatgtaataagatrcattatcaaggctataaggaaaactacaagtaagaaaattcttcacatttttttaaatttaaaaaatgcatataaacactgtggaaactatgtaaacagt

SEQ ID NO: 544846 - DNA, 201 bp, Homo sapiens
tgataggttcgtcatatggagaatagtctttgtcccctaaaaagcctggggagaaagctataatcttcccaaaacaaagaaatggagtgtattttattgtratgaaaagacacattctacaaaaaatcagaatcatacattactaggtcgagggctttgaggatgaaggggaactgcttttgagaagcagatatgtctggc

SEQ ID NO: 544847 - DNA, 201 bp, Homo sapiens
tgaaaaaaaatcattccagcttagcatgctttaatatcttattgggataaataaataaataagattaaatatctaaataatttacagaaagatatcttacrttctctatagcaaaacactgatgaatacagtgtatatattgaaagtaaatcttggtggtttttttttttttactcacgttgcaccaaagcgagagaacac

SEQ ID NO: 544848 - DNA, 201 bp, Homo sapiens
aagaatgcataaaatatttcaagatgaatcttgataggttcgtcatatggagaatagtctttgtcccctaaaaagcctggggagaaagctataatcttccyaaaacaaagaaatggagtgtattttattgtaatgaaaagacacattctacaaaaaatcagaatcatacattactaggtcgagggctttgaggatgaaggg

SEQ ID NO: 544849 - DNA, 201 bp, Homo sapiens
tgcattcgtttaactttactttgtgaagttacgtggcccacatgcatattattcacaaggtcttggaagagacgctttgttcaaaccctgagcccataagyttagggacaagctcttcctggaaaggtctttcttacggaattttctgtcccgaagaagatacaaaagagtagagcattgccagagagtaacaattcataa

SEQ ID NO: 544850 - DNA, 201 bp, Homo sapiens
tgataggctattctaagtacttggctaagaaccatttcgttacactggatgatagcggatatcactgagatgcatacagtttggatttgtgttatgccccrgcacctatgaactaaaagcaattccatcctatatccattagccttttaatatccttgtgatgttgatggtgacataatcctacctattttatggctgaag

SEQ ID NO: 544851 - DNA, 201 bp, Homo sapiens
gacatccaggtggagatgactaggcggcagatgagtctggagttcagggcagctctccatcgatatttctagctcgctttgtctacagtcatggtaagtcmacgtgtctaaatgtctcccctttccccccttgagtaattgaacagattcggcagtctctataagaaaatgttaaaacaggcagttaggcagttagttaaa

SEQ ID NO: 544852 - DNA, 201 bp, Homo sapiens
gtaggcttttcctttctaagaagggtaatgcttaacatttgtgggattttggtgataagtttgctacaaaactactcctacagttcagagaaaatgacgcrgcagaaatgagctgccagcagggccaggctgtcggctttgaaattccagaggcctgcccagcccttttggtttcctggaatgctttcattcagtcgtcat

SEQ ID NO: 544853 - DNA, 201 bp, Homo sapiens
gagttatggtaaacaatcatttttcctataaggaaaatccttagtatagttaaattaaaagagaaaaacctacaggattcaaattcaaatcgtgaatgctactataaccactgcgtgctgcaagtcattatgctaagacaccaggttgcagcagagaaggaagtttaatcacagggctgctcaaacaggagatgggaggaa

SEQ ID NO: 544854 - DNA, 201 bp, Homo sapiens
cattaacaagctttagctctttcccatgtttcatgtaccataccactttttcctttgtatttcacttcatctagtttttattaagctggcattgggattarcatgtctgattctgtggtaaagaaaagccctttccaatatgggatgacagtaggtcttaatcacagtgtgggtgtaaaatttcactgtcttgtgtgccga

SEQ ID NO: 544855 - DNA, 201 bp, Homo sapiens
tttctaaacttaaatttagaaacattttaaacagtttgagcatccacgattttctttagacttttaggagagctccctaatttccaactaaagacataaaygtgaacaggcactaattacttttttctctatgcattcctgcgcccacacacccagaggctctcttgtgcttcctcttccccagcggttacaaaaaggaac

SEQ ID NO: 544856 - DNA, 201 bp, Homo sapiens
ctagtttttattaagctggcattgggattagcatgtctgattctgtggtaaagaaaagccctttccaatatgggatgacagtaggtcttaatcacagtgtrggtgtaaaatttcactgtcttgtgtgccgactaaacgcagaaagctttcgtctgaagtcgagagtatcacagtcaatctttttttcttttcttttttgaa

SEQ ID NO: 544857 - DNA, 201 bp, Homo sapiens
  misc_feature (1)...(201): n = A,T,C or G
gattgggctctccttcactgccacccctgtcttccctgatgatttgtttaaattttcttgttttcttgcatgaactctgtttctacatactgatcagagcncattgttgtcttttcagttgaatgacatttgctgacaccatgattatactcaaaaatgaatatggctgaaaaacttgatattctgatgtatataagaatt

SEQ ID NO: 544858 - DNA, 201 bp, Homo sapiens
ccacagaaatgcgaactcagaagggaccgggagaggagagaatgttctttcagcgttagaaatttatcttgtaaatagaagctggcagtggccacatggatttttttttttttttcagagctagggcaggcagttagtagacctcagttacagcgtcagctctgccactaactagctagttagacccagagctgctctgag

SEQ ID NO: 544859 - DNA, 201 bp, Homo sapiens
agaatgaattcaaggcagcttcgtgcagcttttcatgtcaaagagtgtgcacatcagtggaagaaatccactgtcagaaatgaaaccgctttccttttttwaaaaaaagagactctgctctatattatcctagagctctgaaactagtattaatattttaggtagattctcttattcttttcaaggaaaaataattgtcaa

SEQ ID NO: 544860 - DNA, 201 bp, Homo sapiens
ctttgaatagactgaatcctcccccttccttctcctttttcaaaattgttttagctattcttgttcctttgactttccatacaaatttttaaaaaatcttstctatatctacaaaaatctttatgagattttgataagagttgcattaaacctgcatatcaatttggggagaattgacatttctcctatttttgagtattt

SEQ ID NO: 544861 - DNA, 201 bp, Homo sapiens
  misc_feature (1)...(201): n = A,T,C or G
aaaagaaaaacccattttgtgtctcatgaatgctaaggttaaaggtggaatgtcctttgaatttaaacagaaacactcatcaatgctttgattattttgcnatgaggaaaaataagtgaatagggaaaaagttcagtttgaaagaaataattgcaaagtcttatcgataacactgatgaattctcacctctgattttagat

SEQ ID NO: 544862 - DNA, 201 bp, Homo sapiens
aatatctgttgaaaagtaggtgaattgtggtaatttttgtttttcaagcaattggttccttccatctatattgccaagtttacaagtatacagttgttcayagtatccctttatacctgcagaatctctagtgatattccatttcattccagatattggtcattagtgtcttttctcttttattctttgtcaggcttgtgc

SEQ ID NO: 544863 - DNA, 201 bp, Homo sapiens
tttatacctgcagaatctctagtgatattccatttcattccagatattggtcattagtgtcttttctcttttattctttgtcaggcttgtgcaaaaattayccattttattgaccttttcaaagaagaactttgattcttttcaagtattttatcttttatattgtttttctgcttgttttgagtttattctgatcttttt

SEQ ID NO: 544864 - DNA, 201 bp, Homo sapiens
ccgggttcaagcaattctcctgcctcagcctcccaagtagctgggactacaggcacacactgccacgcccagctaatttttttttttttttttttttttgkattttagtagagacgggtttcaccatgttgcccaggctggtctcaaactcctgagctcatgcaatccacctgcctcggcctcccagagtggtaggattac

SEQ ID NO: 544865 - DNA, 201 bp, Homo sapiens
tattaagaatagtttttggctgttatatattaagtaattccatacaagctttaagaatagatgcaatcgtacacaatgctactaagaggacacttagaatrtagggaatatctttacaatttgaggacatcaagatggatgtacatgaatgtaatgtgtaaatgtatgttttttaaaatccacatttctctaattactagt

SEQ ID NO: 544866 - DNA, 201 bp, Homo sapiens
aggcgtggtggcaggtgcctgtagtcccagctactcgggaggctgaggcaggagaatggcatgaacccgggaggtggagtttgcagtgagccaaggttgcrccactgcactccagcctgggtgacacagcaagactccgtctcaaaaaaataaaaaaaaaattaaaattaaataaaataactaacattaaattgattatat

SEQ ID NO: 544867 - DNA, 201 bp, Homo sapiens
ccttcattgtccgcatgtccagtgttttgcaaacagttatatcatatgttttgtctggtgtttttggttgtttcaggcgtgaggtaaatctgcccctcgtracactgtcttaggaagaagtatctcatccctttagtgatttatagaccctttgaaaagttcctaatcttgtatttatcatcatctgaaaaggctccttca

SEQ ID NO: 544868 - DNA, 201 bp, Homo sapiens
tctggtgtttttggttgtttcaggcgtgaggtaaatctgcccctcgtgacactgtcttaggaagaagtatctcatccctttagtgatttatagaccctttkaaaagttcctaatcttgtatttatcatcatctgaaaaggctccttcacttgtttcttatagataattctgagactttccctttatttgaacacaatgctg

SEQ ID NO: 544869 - DNA, 201 bp, Homo sapiens
tcttgtgtgaaatagttttattattttacttactagtaaaaatattgtttaatgttcattgaagtacattcagtttcatccttcacacatcctattactcrtcttcaaatgtgtcaattaaaataagatctgttcacaccacttaacatcaaaaatcctgttttggcagcttagtatcagagcttctgaaatccctgtggg

SEQ ID NO: 544870 - DNA, 201 bp, Homo sapiens
ttgaatccaggaggtggaggttgcggtgagccgagattgtgcaactgcattccagcctgggtgacagagcaagatcctgtttccaaaaaaaataaaaaaayaaaaaacagtaatgtctctgggagcattgagagtttcccaaatagcttcctaagacgaggaccctcctgaaatggcagaggtggagccacgtgacccaga

SEQ ID NO: 544871 - DNA, 201 bp, Homo sapiens
agtgcaaaaaaagtgaagaaaaaaaaaacctttcacaaatgttacggacttggatcattttaacaggaaaggttttctcaacattcatgaagcaaataatycctatgttatttaaagcatgtaatattacaaaaaagatcaagactcttttttcttttgagatggagttttgctcttgtcacccaggctggagtgcggtgg

SEQ ID NO: 544872 - DNA, 201 bp, Homo sapiens
aaaataaataaataaataaaataaaaacctggaggaagaaatcttataaccatagaataaagtgcaaaaaaagtgaagaaaaaaaaaacctttcacaaatrttacggacttggatcattttaacaggaaaggttttctcaacattcatgaagcaaataattcctatgttatttaaagcatgtaatattacaaaaaagatca

SEQ ID NO: 544873 - DNA, 201 bp, Homo sapiens
cactccagcttggatgacagaaaccctctgtctaaaaaataaataaataaataaaataaaaacctggaggaagaaatcttataaccatagaataaagtgcmaaaaaagtgaagaaaaaaaaaacctttcacaaatgttacggacttggatcattttaacaggaaaggttttctcaacattcatgaagcaaataattcctat

SEQ ID NO: 544874 - DNA, 201 bp, Homo sapiens
aagcttagggacaagctcttcctggaaaggtctttcttacggaattttctgtcccgaagaagatacaaaagagtagagcattgccagagagtaacaattcrtaaatactaaccccaagtgccagtataatatttagttcctacctcattttaaccttcacttgtatccaccattccttctattttcttctattcacccggg

SEQ ID NO: 544875 - DNA, 201 bp, Homo sapiens
acatacctgagtgccagctacttgggaggctgaggtgggaggatcacttgagaccaggaggtcacagtggcagtaagccatgattttgccacagcactccmgcttggatgacagaaaccctctgtctaaaaaataaataaataaataaaataaaaacctggaggaagaaatcttataaccatagaataaagtgcaaaaaaa

SEQ ID NO: 544876 - DNA, 201 bp, Homo sapiens
tgttgacagagccaagattgtacctagtgtctaacatgatcacattatactacttctttgatggagaataataagaaaaaaaaaaaatggccgggtgcggkggctcaggcctgtaatctcagcactttgggaggctgaggtgggcagatcacgaggtcaagagatcgacaccatcctggccaacatggtgaaaccccatct

SEQ ID NO: 544877 - DNA, 201 bp, Homo sapiens
catacttcctcccctatagtgtttcttactcaacgttggaccagacaccattggttatgcaggaaagatgaaattcaataggaaacaaacttaaaagcagcttttccagaaagtcataaggaagagcaatgtgaacataatctgttaaaaatcagtgtatgttcatacagataccaatttgatttaccagtattgaaaaga

SEQ ID NO: 544878 - DNA, 201 bp, Homo sapiens
ccaaaattctgtctgccacaataattcaacagtcaacatagatggtaaattagtgaggcgttcaccttcattgacagccatgcagttcaagggccatgaasttcattctgggaagagtaaatatagctttgctaccagaaagctgtgttcaaatcctgtgttttagcagttatacaacattgagtgagatatttcatgtct

SEQ ID NO: 544879 - DNA, 201 bp, Homo sapiens
ttcattctgggaagagtaaatatagctttgctaccagaaagctgtgttcaaatcctgtgttttagcagttatacaacattgagtgagatatttcatgtctrtctgccatggtctcctcctctgtaatgtggagataataaaaatacctatcatacagggttgtcaaaagaattaattgtgttaatacatgtggaaggtgca

SEQ ID NO: 544880 - DNA, 201 bp, Homo sapiens
tgaagttggcaggtacctgactctcacatgggagttctggaacaaaaatataaatgcatgagtcatctgcatagaagaggttttgctggagttcaaatttytctttaccatgcgtcttctcccttttaaaatttgaagatcatgtcctctgatagagaaaatagtagaaaaataaaagtgtgagagtttgatatttgtcct

SEQ ID NO: 544881 - DNA, 201 bp, Homo sapiens
aagttggcaggtacctgactctcacatgggagttctggaacaaaaatataaatgcatgagtcatctgcatagaagaggttttgctggagttcaaatttctytttaccatgcgtcttctcccttttaaaatttgaagatcatgtcctctgatagagaaaatagtagaaaaataaaagtgtgagagtttgatatttgtccttc

SEQ ID NO: 544882 - DNA, 201 bp, Homo sapiens
tgaagatcatgtcctctgatagagaaaatagtagaaaaataaaagtgtgagagtttgatatttgtccttctcctccctcctccctactgctcctcctcctyttcctcctctttcattatcatctgttcacattgtaccatctggaacaagccttgggattttcctcattctattcattctaagccatctcttttaaaaagt

SEQ ID NO: 544883 - DNA, 201 bp, Homo sapiens
aaaagtgtgagagtttgatatttgtccttctcctccctcctccctactgctcctcctcctcttcctcctctttcattatcatctgttcacattgtaccatytggaacaagccttgggattttcctcattctattcattctaagccatctcttttaaaaagtcttttttgtgtttactgtccttggcttttttttttttttt

SEQ ID NO: 544884 - DNA, 201 bp, Homo sapiens
gaatgctccaaaaggaaatcagttcagaagtcctagtttccctctattttcattgatcacacgtgctagaaatctctgatttaaatatttcatgatacccraatgcctcccaaacaaaataattatctttttgtttgtttctgtgtaacagaagagaaaaataaaagctgtttagtaaatcaaaacaaaacagtccagatg

SEQ ID NO: 544885 - DNA, 201 bp, Homo sapiens
attgcttgagcctgaaagatcgaggctgcagtgagctgtgattgcaccactgcactccagcctgggggagaaagtgagaccctgtcaaaaaaaaacaaggaggaaggaaggaaggaaggaaggaaggaaggaaggaaggaaggaaggaaggaaggaaggaatcttataattcatagaaaattaaagaaaaaagaaaattac

SEQ ID NO: 544886 - DNA, 201 bp, Homo sapiens
ttgcttgagcctgaaagatcgaggctgcagtgagctgtgattgcaccactgcactccagcctgggggagaaagtgagaccctgtcaaaaaaaaacaaggaggaaggaaggaaggaaggaaggaaggaaggaaggaaggaaggaaggaaggaaggaaggaatcttataattcatagaaaattaaagaaaaaagaaaattaca

SEQ ID NO: 544887 - DNA, 201 bp, Homo sapiens
tgcttgagcctgaaagatcgaggctgcagtgagctgtgattgcaccactgcactccagcctgggggagaaagtgagaccctgtcaaaaaaaaacaaggaggaaggaaggaaggaaggaaggaaggaaggaaggaaggaaggaaggaaggaaggaaggaatcttataattcatagaaaattaaagaaaaaagaaaattacac

SEQ ID NO: 544888 - DNA, 201 bp, Homo sapiens
caaatgtgtcaattaaaataagatctgttcacaccacttaacatcaaaaatcctgttttggcagcttagtatcagagcttctgaaatccctgtggggcctyttatttttgtccctcaagtggaatcccatgaacatagttctaatttattatgaaatgagaaatatttttaagataatatgtttttaggaagataacttta

SEQ ID NO: 544889 - DNA, 201 bp, Homo sapiens
actaaaagtattccttacaggaaataaagggatgggctgaaataaagggatgggtctggctagttatctgcagtaggagcatgtccttaaggcacagatcrctcatgctattgtttgtggtttaagaacaccttaagcagttttccgccctgggtgggccaggtgttccttgccctcattctggtaaacccgttgtgggca

SEQ ID NO: 544890 - DNA, 201 bp, Homo sapiens
tgaaatccctgtggggccttttatttttgtccctcaagtggaatcccatgaacatagttctaatttattatgaaatgagaaatatttttaagataatatgyttttaggaagataactttaaaaaaatacttgatctcttaattcttgaagtctttatcttttccacatttgaccatttcctttattaaaataaaaatacct

SEQ ID NO: 544891 - DNA, 201 bp, Homo sapiens
ggagtgggaaatcaggggtctcacagccttcagagctgagagccttgaacagagatttacccacatatttattgacagcaagccagtcataagatttactraaagtattccttacaggaaataaagggatgggctgaaataaagggatgggtctggctagttatctgcagtaggagcatgtccttaaggcacagatcgctc

SEQ ID NO: 544892 - DNA, 201 bp, Homo sapiens
gaaatccctgtggggccttttatttttgtccctcaagtggaatcccatgaacatagttctaatttattatgaaatgagaaatatttttaagataatatgtktttaggaagataactttaaaaaaatacttgatctcttaattcttgaagtctttatcttttccacatttgaccatttcctttattaaaataaaaatacctt

SEQ ID NO: 544893 - DNA, 201 bp, Homo sapiens
gttaattaaaagaaatatatatgccaagaccagctctgtcatggagaccctaacccagtggcactagaggaattaaagacacacatgcagaaatatagagytgtggagtgggaaatcaggggtctcacagccttcagagctgagagccttgaacagagatttacccacatatttattgacagcaagccagtcataagattt

SEQ ID NO: 544894 - DNA, 201 bp, Homo sapiens
ccaactacacagttcacatgaaacccattttaaaataaagaactaggttaagagtaaaaggatgaaaatatgtatatatgtcatttaaatatatatggcayataaatgtaaaaaaatacaccatgtaaatgttaattaaaagaaatatatatgccaagaccagctctgtcatggagaccctaacccagtggcactagagga

SEQ ID NO: 544895 - DNA, 201 bp, Homo sapiens
ctgaacattctcactcttaataaacagagttttacgcttcaagggggtctctgtggttcttctctccttatctttttacttcactcaccacattcttaccraaccaaaaggaaaacaacagtggagggaaagtcttacacatgtcaggcttttagacagaaccttttattcctcatctcatatatcttttctgctctataa

SEQ ID NO: 544896 - DNA, 201 bp, Homo sapiens
gtaccatgttctgagtcttgacagcttgtacaaagctgctgagttatgaacatgatctcagggccactgatccatacctgatggtatgcattcccagaggrcagcttgctggttagcttcttaaacatcaaatgtttaagctggatgagtcttcttgtattaaaacgagacaatatgatgaaatatggtagtattatcctt

SEQ ID NO: 544897 - DNA, 201 bp, Homo sapiens
agatcggtccactgcactccagcctgggcaacaaagagcaaaattccatctcaaaaaaaaaaaaagaaaagaaaaaatatttttccagaatgaagacaaawtaaagacaccctcaaatgaagactgcagaccaccgctaaaggaaattacaaatgatttattttatgtagaagaaaaatgatccctgatggaagatatgag

SEQ ID NO: 544898 - DNA, 201 bp, Homo sapiens
ggaaggtttgtttcccatcagcaagtggtactgaaacacttgcaggttttcagtggtaacgtttgaatatatatttaagggatttattatgaaaagcttcycccattccatgaggatgacttggagacttgcacaggcaaaacagatgagtcggggccctgtccccaagatgagtcggggccctgtccccaagcccttggc

SEQ ID NO: 544899 - DNA, 201 bp, Homo sapiens
agacatgagccaccacaactgtccagaatattttttaaaagacagaattaaaaatacatataacccagtagaagtcaggagttaaagtgttttaagtaccytgtattttctaagaaaaggttaagggtattaagtctagatattagtaagttaaatatgtggattagaatttctagactaactcctaaagtcatataaaaa

SEQ ID NO: 544900 - DNA, 201 bp, Homo sapiens
ggatttgccctattgagcatcaagattcataattagcctatagtaataagacatggtgttagcacaaggacagggcagtagcccaacagaacagactacarattacagaaatagtcccgtgctcatatggaagcttgagaggcatctttgcaattcagtggggaagggacaatattcagtagatggtgctgtcactgagga

SEQ ID NO: 544901 - DNA, 201 bp, Homo sapiens
tcagaatatttacatataaataaatatatgaatatataaaggttccaggctgcagggagaagtgaacacagattacttacaagggaatgaggagcaggtargatgagatgtttcatcgcaattcattctacacaccagcagtcattggatcaattctcccaagtgctcagggaaaatgaatactagtttgttaccagttca

SEQ ID NO: 544902 - DNA, 201 bp, Homo sapiens
aagcccaactacacagttcacatgaaacccattttaaaataaagaactaggttaagagtaaaaggatgaaaatatgtatatatgtcatttaaatatatatrgcatataaatgtaaaaaaatacaccatgtaaatgttaattaaaagaaatatatatgccaagaccagctctgtcatggagaccctaacccagtggcactag

SEQ ID NO: 544903 - DNA, 201 bp, Homo sapiens
agtctaaacatagcagtgacacagatgtcaatggtctcaacataacaaatcaagacagatcatgtcaactcaaacaaagcaaagcccaactacacagttcrcatgaaacccattttaaaataaagaactaggttaagagtaaaaggatgaaaatatgtatatatgtcatttaaatatatatggcatataaatgtaaaaaaa

SEQ ID NO: 544904 - DNA, 201 bp, Homo sapiens
tctttctttttcaaataaccagtcattttgctttaggacaagaatttaccatacaagatcctttatcatagaaaatatttttatttataatcttccttacragaaatacttatttaccttgataacttttgaatgagataagtcattttccttctgtgaggaagttgtttgtactgcaagttgttgtgcaagttctgtgaa

SEQ ID NO: 544905 - DNA, 201 bp, Homo sapiens
acacacacacacacgaagggaaattatgtgagggtaaataaaaagactcctttcttaatgtttagtcatgctatgagatagttgactgtctaaaggaaaastagtagcattgtgttgctggtttatagcatatgtaaaggtaaaatttttgacaacagcagcacaaaagatcagagagaaacactggaagtatattggtgt

SEQ ID NO: 544906 - DNA, 201 bp, Homo sapiens
ttccttctgtgaggaagttgtttgtactgcaagttgttgtgcaagttctgtgaagggggagcaaaatgaggaagttatgtacatactgtagaagctattcktcctcaagatattgctcagtttgattttcactagagcttgtctgaataattgtgggctatttttaaacctccgaggcaggactgtcgaggttaaagttgc

SEQ ID NO: 544907 - DNA, 201 bp, Homo sapiens
ccgtgcctatgtcctgaatagtattgcctacattttcttccaaggtttttatagtttgggatttacatttaagtctttaatctatcttgagttaatttttktttaagatgtaaggaaggggtccagtttctttctttttttttagacggagtccccctctatcacccaggctggagtgcagtggcgcgatcttggctcact

SEQ ID NO: 544908 - DNA, 201 bp, Homo sapiens
ctacagaaagagaaaaaatcttccctcctggcaagagtggattagcagcctggttctacccaaaatgtccttgtcttcagtgacataccgagaatttggcrtggacttttcaacaacagtttcttcaatcgttgccattgtagttcaggagcctctaactgtggaggaggttgaagaaggacaaatgagccccaggacaga

SEQ ID NO: 544909 - DNA, 201 bp, Homo sapiens
ttttaggaagataactttaaaaaaatacttgatctcttaattcttgaagtctttatcttttccacatttgaccatttcctttattaaaataaaaatacctwcttactttgaatgataaacaattgtctataacttttatatattaagagaaaacccaaatatcaatatttacctaatattaaaagcaagtgatgaaatatt

SEQ ID NO: 544910 - DNA, 201 bp, Homo sapiens
atttgtcaatttttgcttttgttgcaattgcttttgatgtttttgtcatgaaatacttgcccgtgcctatgtcctgaatagtattgcctacattttcttcyaaggtttttatagtttgggatttacatttaagtctttaatctatcttgagttaatttttttttaagatgtaaggaaggggtccagtttctttcttttttt

SEQ ID NO: 544911 - DNA, 201 bp, Homo sapiens
gttctgagtcttgacagcttgtacaaagctgctgagttatgaacatgatctcagggccactgatccatacctgatggtatgcattcccagagggcagcttkctggttagcttcttaaacatcaaatgtttaagctggatgagtcttcttgtattaaaacgagacaatatgatgaaatatggtagtattatcctttttgtat

SEQ ID NO: 544912 - DNA, 201 bp, Homo sapiens
acaatatatgcatgtaagaaacctatgcttataccccctaaacttataggaatttaaaaatattttccctttggaaaatacagagcagaactctgggacayaccatttcaggagctaaagaataagttactcaaaaatctgaggtaaagcaatttctcaggacaattaacttttgaaaaatttaggctgctttctgttttg

SEQ ID NO: 544913 - DNA, 201 bp, Homo sapiens
atatgcatgtaagaaacctatgcttataccccctaaacttataggaatttaaaaatattttccctttggaaaatacagagcagaactctgggacacaccayttcaggagctaaagaataagttactcaaaaatctgaggtaaagcaatttctcaggacaattaacttttgaaaaatttaggctgctttctgttttgcatat

SEQ ID NO: 544914 - DNA, 201 bp, Homo sapiens
tggtttttttcttgtaaatgtgtttaagttccttgtagattctggatattagacctttgtcagatgaatagattgcaaaaattttctcccattccataggytgtctgttcactctgatgatagtttcttttgttgtgccaaagctctttagtttaattaggtcccatttgtcaatttttgcttttgttgcaattgcttttg

SEQ ID NO: 544915 - DNA, 201 bp, Homo sapiens
ggaggtcccattaaagcccctgctaaactcgtcatccccagtctggaccacgtttggttaatttccagtttttcctttccttgcaataacctgcttgaaaytccaccagggaaaataaataataattcaaatgcaaaacgcgttgtcacttttataaaatattgctctccttgccccaccctcaccccctccctttctccc

SEQ ID NO: 544916 - DNA, 201 bp, Homo sapiens
aattagaaaggtgtcaattcacttaaaactgatctataaatttaatgcaatatcaaccaaaaacctgaattttgttgttgttgttgtgttttagtttttgsaaagtgccacatacagccaagatactcttgaaaagcagcaaaattagaggatttgccctattgagcatcaagattcataattagcctatagtaataagac

SEQ ID NO: 544917 - DNA, 201 bp, Homo sapiens
ccaggtagcaggtttcagagagaataggtcataaaagtttcttatcagacttaaaaaaaaaaatgccaaactctcagttaattctctcctgggttatgttrgtatcttattgctacaaagagtctgctttggcagtctcaagatgtctgttttaatgttaacgctggtcaactgtgcctgaattccaaagggagaagtata

SEQ ID NO: 544918 - DNA, 201 bp, Homo sapiens
ttccagcttgaatccaggagcctgagaaccaggagagctgatggatagtttcagtctgaggacctgcaggctcacaacccaaggaggaccaatgtttcagkccaagtctgaaggctggaaaaaaccgatgccccacttaaccgtcggacaggagaaattctctcatattcagtctttttattctattccggtcttcaattg

SEQ ID NO: 544919 - DNA, 201 bp, Homo sapiens
attagatgggcagtcccagctacttgggaggttaaggcaggaggatcacttgagcttaggaatttgaagttgcagtgagatgtgattacatcactgcactscagcctgggcaacagaggaagaccccatctctaaaaatatatatagcagagaaagaaggaatgccccacaactaaatattatattacaagacaaactact

SEQ ID NO: 544920 - DNA, 201 bp, Homo sapiens
aagatattattttattctttgtatgctgactagtattccatggtgtgtgtgtgtgtgtgtgtgtgtgtgtgtgtgtgtgtgtgacattttctttatctacwcattggctgatgggcactttgcaatggtgaattgctcacattgcttttctgtctctccttgtccccagctctccacaagccaatggatgctgagtggaca

SEQ ID NO: 544921 - DNA, 201 bp, Homo sapiens
gcatccgcacggggaccggccacatcctaaggctggaggctgccctgatgaaaaaggcccattagcagggaagcaaagggaaaagcattttctaggggggktttccttttttttttttttttttgagacggagtcttgctctgtctctcaggctggggtgcagtagtgtgacctcggctcactgcaagctccgcctcccag

SEQ ID NO: 544922 - DNA, 201 bp, Homo sapiens
cgtaactgcctgattgtgcatcatatatatttttttaatctcaagcaaaaattcccagatctttttgagaatcaatatcctaaggtaatatcttctactgycttgtaccaaagaaagatcaaagtgttgcccatgacctgttaatacacggcgaagggatcctttactgtatgtgactcagagtccaagaacctggtcaat

SEQ ID NO: 544923 - DNA, 201 bp, Homo sapiens
cagtgatgggattgctgggtcagatggtatttctggttctagatctttgagaaatcgccacacttttccacagtgattaaagtaatttacattcccaccartggtgtaaaagcgttcctatttcttcacagctttgccagcgtctattgtttgttgactttttaataattgccattctaactggcatgagatggtatctca

SEQ ID NO: 544924 - DNA, 201 bp, Homo sapiens
gactcccagctccatccatgtccctgcaaaggatgtggtctcattcttttttatggctgcatagtattccatggtgtatatgtaccacattttctttatcyggtctatcgttgatggacatttggattgattccatgtctttgctattgtgaatagcgctgccatgaacatacatgtgcatgtgtctttatgatagaatga

SEQ ID NO: 544925 - DNA, 201 bp, Homo sapiens
gaatgtgaactgcaggctcggaggcattctatagcttggcctacgtggtggtttcggaatcttcattttgtaattattctttaagaataggctgggcacastggctcatgcctgtaatcccagcactctgggaggctgaggtgggtggatcacttgaggtcaggagtacaagacccctggcggacatggtcaaacctcgtc

SEQ ID NO: 544926 - DNA, 201 bp, Homo sapiens
tggtcttgaactcctgacctcaagtgatccgcccacctccacctcccaaagtagtgggatgataggcatgagctaccacatccagctttcttttctttgcttttttttttttttttaacaggttcttgctctgtcacccagcagggtggagtgcagtggtgtgatctcggctcactgaagccttgaccccccacattcaag

SEQ ID NO: 544927 - DNA, 201 bp, Homo sapiens
acctcaagtgatccgcccacctccacctcccaaagtagtgggatgataggcatgagctaccacatccagctttcttttctttgcttttttttttttttttaacaggttcttgctctgtcacccagcagggtggagtgcagtggtgtgatctcggctcactgaagccttgaccccccacattcaagtgatcctcccacctca

SEQ ID NO: 544928 - DNA, 201 bp, Homo sapiens
aagcgtagtggcacacacctgtaatcccagctacttgggaggctgaagcaggagaatcacttgaacccagaaggcggagactgcagtgagctgagatcacmacactgcattccagcctggccgacaaagcgagactttgtctcaaaaacaaatccccaaaaacatagattccacattctgcctaaaggtaaaaaataatca

SEQ ID NO: 544929 - DNA, 201 bp, Homo sapiens
gcagtgtcagacctatgcgcacaaacagacggttcacgcccaggtcacaggcgcccgttgtctcctggccagaggttgacgcacaggccaaccgttggacrggctcatgctctgtgtcatgagaaaggtggagcagaggtgactcagggaaaggctgctttcccctaacactggcatttgattaatctcatctcaaatgct

SEQ ID NO: 544930 - DNA, 201 bp, Homo sapiens
aagggaggaggttctaggtcataggtggattcaaagattttctaattggcaattgcttgaaggggttaagttattaatattatctaaagacctggaatcartagaagagagtgtctgggttaagataaggggttgtgttatgcaggtgaagcctccaggtagcaggtttcagagagaataggtcataaaagtttcttatca

SEQ ID NO: 544931 - DNA, 201 bp, Homo sapiens
atcacttgaagccaggagttcgagacctgcctggccaatatggtgaaaccccatatcttaaaaaatacaaaaaatagccaagcgtagtggcacacacctgyaatcccagctacttgggaggctgaagcaggagaatcacttgaacccagaaggcggagactgcagtgagctgagatcacaacactgcattccagcctggcc

SEQ ID NO: 544932 - DNA, 201 bp, Homo sapiens
gatttaacagacaaggtctcactatgttgcccaggctggtctcaaactcctatcctcaagccttcttcccgcttcagctttgatgaaccttaggaggggargtcattagcagaacctaagatggattgaatctcttgtgtaggtgaaatcttgtataggatccttatatgtcaagcctggaaacagaagataatgtcaggg

SEQ ID NO: 544933 - DNA, 201 bp, Homo sapiens
atgttgtagtaagacataagtcaatacatgtaaggtgtacattgattcggtcaggaaaggggggacaactagaagtgaagggaggaggttctaggtcatargtggattcaaagattttctaattggcaattgcttgaaggggttaagttattaatattatctaaagacctggaatcagtagaagagagtgtctgggttaag

SEQ ID NO: 544934 - DNA, 201 bp, Homo sapiens
tgagcctaggaggtcaaggctgtagtgcgcaatgatggggtctatgagtagccactgcacttaagcctcggcagcatagcaagacctcatctcaaaaaacraaaaacaaaaaaaaaccaactccggcaaatatccttccatcccatatctcccaccaaaaaaaaaaaaaaaaaaggaaaaaactaaaagagcatcaggatt

SEQ ID NO: 544935 - DNA, 201 bp, Homo sapiens
atgccatatggtaataaatgcaaaggagaaacaaaacagagaaaaggaatatgtctaaatgagaaggagggtgtgcttttatcattttatatatataagtrtaatacatattatgtacactatgtgtgtcaatggaaacagtcaaactctgtaaaatatttgaggttgattctggccaaatatgagtgaccagggcccaag

SEQ ID NO: 544936 - DNA, 201 bp, Homo sapiens
tcacttggtctatgcacgtaggtcctgctgtctctcttcttagaaggacgccagtcatattggattatgaccctaatgacccaattaacttaatcatctctttttttttttttgagacggagtctcgctcagtcacccaggctggagtgcagtgacacgatctcggctcactgcaggctccgcttcccgggttcacaccat

SEQ ID NO: 544937 - DNA, 201 bp, Homo sapiens
gaagattagtgtgtatatagtatgccatatggtaataaatgcaaaggagaaacaaaacagagaaaaggaatatgtctaaatgagaaggagggtgtgctttkatcattttatatatataagtataatacatattatgtacactatgtgtgtcaatggaaacagtcaaactctgtaaaatatttgaggttgattctggccaaa

SEQ ID NO: 544938 - DNA, 201 bp, Homo sapiens
ccatgcatggagcaagtctatcaacaccatttttccaacagcatgtgctcacttcatgtctctgtgtcagcagttttcagcaatttttttttttttttttkgagatggagtttcactcgtgttgcccaggctgaagtgcaatggtgggatctcagctcactgcaacctccacctcccggattcttctgcctcagcctccca

SEQ ID NO: 544939 - DNA, 201 bp, Homo sapiens
attcaggaggcaatgattgaataaaaagagagaagattagtgtgtatatagtatgccatatggtaataaatgcaaaggagaaacaaaacagagaaaaggawtatgtctaaatgagaaggagggtgtgcttttatcattttatatatataagtataatacatattatgtacactatgtgtgtcaatggaaacagtcaaactc

SEQ ID NO: 544940 - DNA, 201 bp, Homo sapiens
cttagagatggctttcagtcttccaagggcagaacacagagtctagccctggtaggaacttaggaaaagaagcagatgaatccttcagtagttaagaggamaaatggccctggacatcaagaaggtggcatgtagccatccgtcctgggtgggtgaaagagattccaagtgcttatttacttattgtaaactctctcctgc

SEQ ID NO: 544941 - DNA, 201 bp, Homo sapiens
tttccctgggtcagtccagtctatttctaaaaatactgtgtgacaactctggatgtagactagatctaaacttagtcttgcccaaaatgtaaagaaagttyctcctgtgataaggagggaataaaggcttcctaggtaacaaacttctgacttaagcaggttttgctgaaaacttaagcaggttttgctgaaaaggaagca

SEQ ID NO: 544942 - DNA, 201 bp, Homo sapiens
tctgccggctgaaggaagtactactggcacttcgtgagttgcatttatgcattcattttagcaaacctgggcacattttctgacctgcacagttaaaacagctaaacgcaatgcagtggtcaaacttaaaattaccaaaggcaaatacaatttcttctacccactcctcgccctagcctcgtcctacacccacggaatgtg

SEQ ID NO: 544943 - DNA, 201 bp, Homo sapiens
gcaggagaaatcatgtccttttttggatactgccaccttttaggtaaatgcccaagaactaaagaatgtagatcagttataggagttagaattcctactgmattctcacgtttacctatattattccattaagtaatcagcaatgctatggagatgatattatggccattaaaggaaaaagagtctgagtctgatcaactt

SEQ ID NO: 544944 - DNA, 201 bp, Homo sapiens
agtagtaaagaactaatcctcccctcatcaagcccatattgcattcaggaggcaatgattgaataaaaagagagaagattagtgtgtatatagtatgccayatggtaataaatgcaaaggagaaacaaaacagagaaaaggaatatgtctaaatgagaaggagggtgtgcttttatcattttatatatataagtataatac

SEQ ID NO: 544945 - DNA, 201 bp, Homo sapiens
ggtgggtgaaagagattccaagtgcttatttacttattgtaaactctctcctgcctataattgttttccattgcttctgattctgtagcaataaagacaaytgttcagtaccctctaacatctttcatacacttatttcattcaatagacatctttctttatgcaagataatctcattgaagcttgaccaatgagtatatg

SEQ ID NO: 544946 - DNA, 201 bp, Homo sapiens
tccagtctatttctaaaaatactgtgtgacaactctggatgtagactagatctaaacttagtcttgcccaaaatgtaaagaaagtttctcctgtgataagragggaataaaggcttcctaggtaacaaacttctgacttaagcaggttttgctgaaaacttaagcaggttttgctgaaaaggaagcagattcctcagtgaa

SEQ ID NO: 544947 - DNA, 201 bp, Homo sapiens
tggctggcatacaaatttcgctaacgtgcacacatgtgcatgagtcatacaaattatgaaaactcttctgccataggaaaaaaatacatatgaaaactcaaaaaaaaaaaagaccatacagttaatacttttataccatctttttttatttttttgagggacagagtctcactgtcacccaggctggagtgcagtggcgtg

SEQ ID NO: 544948 - DNA, 201 bp, Homo sapiens
ttcaatatttattgagcaactactgagtaagtcactattacaagcctagagatacagtagtaaagaactaatcctcccctcatcaagcccatattgcattsaggaggcaatgattgaataaaaagagagaagattagtgtgtatatagtatgccatatggtaataaatgcaaaggagaaacaaaacagagaaaaggaatat

SEQ ID NO: 544949 - DNA, 201 bp, Homo sapiens
attgtaaactctctcctgcctataattgttttccattgcttctgattctgtagcaataaagacaattgttcagtaccctctaacatctttcatacacttayttcattcaatagacatctttctttatgcaagataatctcattgaagcttgaccaatgagtatatgttcagttaaatgattaacatttacccttttctctc

SEQ ID NO: 544950 - DNA, 201 bp, Homo sapiens
agtgattctcctgcctcagcctcccaagtagctgggattacaggcatgtgccacaacatctggctattttttttttttgtatttttagtagacagcatttkgccatgcttgccaggctggtctttaacttctgggctcaagggatctgcccaccttgtcctcccaaagtgctaggattacaggtgtgagctactgcccctg

SEQ ID NO: 544951 - DNA, 201 bp, Homo sapiens
aagactaaagttatggtttccaaatgtaaatatatgtaaaaatgtatgacattaatatatagtatatatcattatatataatatgcataaatatgcctacrtacataaacatatgtaacattataatatagtttaaaatttatgccaaaacacaaagtgtattatttattcattcattcaatatttattgagcaactactg

SEQ ID NO: 544952 - DNA, 201 bp, Homo sapiens
cctctgcggtgttatttcaaggatgctaaccccaaggttcccaccactgccactggccaatatctgaaattcccctgacaaagcttcctcattagcataakgtttggactcctgaaataaaccaaccacgtctcttaaacttttccttgaactctatccccccaccggaaatacagagagatgagtaaatacaaatatata

SEQ ID NO: 544953 - DNA, 201 bp, Homo sapiens
gggaatcgcttgaaccctggaggtggaggttgcagtgagccgagatcacgccactgcactccagtctgggcaacagagcaagatgctgcctcaagaaaaawaataataataatactataaagaaagaaaacagagtgttgtgagaaaaatgggaaaacagtttatataatgatgagattaaagtatttaaatcaaagcact

SEQ ID NO: 544954 - DNA, 201 bp, Homo sapiens
tctaaacatctaaatcagttcatgatattgttggtatattaaatatcacaaaatcagaagactaaagttatggtttccaaatgtaaatatatgtaaaaatrtatgacattaatatatagtatatatcattatatataatatgcataaatatgcctacatacataaacatatgtaacattataatatagtttaaaatttatg

SEQ ID NO: 544955 - DNA, 201 bp, Homo sapiens
cctgacaaagcttcctcattagcataaggtttggactcctgaaataaaccaaccacgtctcttaaacttttccttgaactctatccccccaccggaaatasagagagatgagtaaatacaaatatataagaattctatttaattctaatcatttcaatatttactgaaaaagtctgagcaagacatcagtaaaaaactata

SEQ ID NO: 544956 - DNA, 201 bp, Homo sapiens
attgcttttctgtctctccttgtccccagctctccacaagccaatggatgctgagtggacagcatatgcctaatgaggccagcagcttaggcctgccccayctatgctgggctatccttaaatttatgtgggaagtccgtgctctgatcacccaccaccagcgtgggctggacttcaggtgtcttctgccaatgataatgg

SEQ ID NO: 544957 - DNA, 201 bp, Homo sapiens
ttgggtctaagaaaagaaagagaaagtgttatatttgctttctccctatttctttttacactgtagagaaaggttgacccagtcacaactcagaagaatasaactagctatcgtattaaagtgtttgaagatttcttgctgttactcaccagcacaagatagcattgaaataagaatgcatatctggagaaactgttgcca

SEQ ID NO: 544958 - DNA, 201 bp, Homo sapiens
gacccagtagtcctgggtggagcctgaggatttgacccacgtgttcccaggtgctgacactactggtgggagaccaacctctgggaaccactgtttgaagrgtgaaagctctagaaatatgtataatttctggtcacacatcactgcctgtttaaatgtgataccaggccggacgtggtggctctggcctgtaatcccaac

SEQ ID NO: 544959 - DNA, 201 bp, Homo sapiens
ggtctttatctgaggtcttcagaaaactgcatgttgtgtttgttcatttaggagtttacggtattggttaaactgtatgatcgtagatgagctatgatttracaccataaataaaatgttaacaacaacaaaaacagcaacaaaaactcattggacctgggtagaaaaggcagttggcatgatgacataagtggctgaacg

SEQ ID NO: 544960 - DNA, 201 bp, Homo sapiens
tctgccaatgataatggttttttcttcatcaaaccacacttcttcatctaagggttatgaacaagagtatctatttgtaaaacagtcaaagtttgggaatrtaaactgtggccataaaatagaaaaaaaaatgctaactagtccataatggggactgaatctgtggtctttttatcattatcacagggctataaacctgag

SEQ ID NO: 544961 - DNA, 201 bp, Homo sapiens
gaaacccggaggtggaggttgcagtgagccaagattgcaccactgcactccagcctgggcaacagagatgactccgtctcaaaaaaaaaaaaagataatgrtgttgaaaatgatgatgatgttgatcgtgatgatgatgatgataatgaaaatgatgatgctgatgaaaatgaagatgaaagactgatttctaataggact

SEQ ID NO: 544962 - DNA, 201 bp, Homo sapiens
atgtcagagacaaacttttcttgcagtaagggatttcagaatagtgtcattatcgtacattgtgaaagagtaagcactaatataatgggactattattagaggtaattctaccttagaatgcggtgatggctgtgtagttttcctgagacgacgctgacaaatgtttcttgggaactgtgggagagggcactgccctggga

SEQ ID NO: 544963 - DNA, 201 bp, Homo sapiens
gtttcttgggaactgtgggagagggcactgccctgggaagtcggagatttgaaatcattaaaggaaattataaagcattttgaatagcaaatcgatcaccragcagaacttaagataattacatttatcattttgatgtgcatattattatttcctatgaaaagttggttatattaatatttaattttcccaaagaaagat

SEQ ID NO: 544964 - DNA, 201 bp, Homo sapiens
ccttttcttcattcccccagatccctgcccaagacgggtctggagcctgacttccgggtgtccatgaccctggcggctgcttccggtccgccatgaaaggrctatcaggcagccgcagccatcaccacggggtcacctgcgactcggcctgtgactcgctgtcgcaccactccgaccgcaagccctacctgctgagcccag

SEQ ID NO: 544965 - DNA, 201 bp, Homo sapiens
caaaagaatgtctaaaagacggtggagatgcattgattgacggtggtctctgctgtgatgttcctggcagcctagcgtctcttggtgcttagcaggaaagytattgaggagcaggaatagcatgtgctttaagtcttacagacctcagttgaagtcctagcttagctgcctactagttgtgccctgtgggcaagttattta

SEQ ID NO: 544966 - DNA, 201 bp, Homo sapiens
ttctccctcagtgcagctgcaaaaagtggttgcttatcacattctcagggtttagtattattaagaatagtttttggctgttatatattaagtaattccayacaagctttaagaatagatgcaatcgtacacaatgctactaagaggacacttagaatatagggaatatctttacaatttgaggacatcaagatggatgta

SEQ ID NO: 544967 - DNA, 201 bp, Homo sapiens
gttctgccctctgccggctgaaggaagtactactggcacttcgtgagttgcatttatgcattcattttagcaaacctgggcacattttctgacctgcacarttaaaacagctaaacgcaatgcagtggtcaaacttaaaattaccaaaggcaaatacaatttcttctacccactcctcgccctagcctcgtcctacaccca

SEQ ID NO: 544968 - DNA, 201 bp, Homo sapiens
caagactctgtctcaaaaaaatgaaaagtttcagactttggagtatttcagatttcaactagaataaatttattatctaacggtaacaaacaactgggggmcagtagggcaagagctgtctgttccttcttcgcctctgggtatagagcgagacctctctggaatgagcatcttatgacctactttcagacaaagataggt

SEQ ID NO: 544969 - DNA, 201 bp, Homo sapiens
gacaggcagcgccttgctttgtgaagttctgttcctctgttctgccctctgccggctgaaggaagtactactggcacttcgtgagttgcatttatgcattyattttagcaaacctgggcacattttctgacctgcacagttaaaacagctaaacgcaatgcagtggtcaaacttaaaattaccaaaggcaaatacaatttc

SEQ ID NO: 544970 - DNA, 201 bp, Homo sapiens
atcactgcttggtagaaataatcaaaccccaagaccacccacattttttttctgccttggtgacttgtctgtgcagtaaataattagcttcttgatttttwaaaaaggctgacaattagattctgcaaatagtatttccccttaccttttttatttacccacttaattctaccattcagttgcaccaagactgcctgtcct

SEQ ID NO: 544971 - DNA, 201 bp, Homo sapiens
ggtaacaaacaactgggggacagtagggcaagagctgtctgttccttcttcgcctctgggtatagagcgagacctctctggaatgagcatcttatgacctrctttcagacaaagataggtcagagcattccctcgtggccagctctcacagtgagtgaccttcttgctccttcagttttctcaattgccaagtcaccatat

SEQ ID NO: 544972 - DNA, 201 bp, Homo sapiens
aaacaataccaggtccaagggtaaggcaatgaatttaccaaaaccagcaagttcattacagctggcctttcttccacccgtcatccccagtgtgagctcatctttttttttttttgagatggagtttcactctcattgcccagactggagtgcagtggcgccctctccgctcactgtaacctccacctctcggattcaggc

SEQ ID NO: 544973 - DNA, 201 bp, Homo sapiens
acaataccaggtccaagggtaaggcaatgaatttaccaaaaccagcaagttcattacagctggcctttcttccacccgtcatccccagtgtgagctcatctttttttttttttgagatggagtttcactctcattgcccagactggagtgcagtggcgccctctccgctcactgtaacctccacctctcggattcaggcaa

SEQ ID NO: 544974 - DNA, 201 bp, Homo sapiens
aattagccaggtgtggtggcaggtgcctgtaatcccagctactggggaggctgaggcaggagaattgcttgaacccgggaggtggaggttgcaatgagccraggtcgtgccactgcactccagcctgggaaacaagaccgaaagtcatctcaaaaagaaaaaaattgtaatctagtcatgtcatagcagtgaagaaataat

SEQ ID NO: 544975 - DNA, 201 bp, Homo sapiens
ctcttcatttctattatttattaggtattacatagtcactacaaatgtaaaaacatttttatacaataatgtatactataaagcatattttatgcgttaaraatgcatagttatgcatcatgtttattaatatccaaaaataatctaaacatctaaatcagttcatgatattgttggtatattaaatatcacaaaatcaga

SEQ ID NO: 544976 - DNA, 201 bp, Homo sapiens
atgaattctctttcacacaaacttgttagtggcactcagtgtcctcggtaaactttttggtttttgtttacggctagcttttaaaaatctatagacaggcaaaaaaaatctcctgccgctaaaaagctccgtgaccttggaaaagtcacttaacctctctggagaaagctcaagttagagggtcagagtagtggactggag

SEQ ID NO: 544977 - DNA, 201 bp, Homo sapiens
ttttacacatttgacatgttcactgtagttttaccaacacacagcagatggcagtacagagcaagaaccggctaacctagctgcttctcttcaggtccctrtgattccaaaaataatgatttctcttcatttctattatttattaggtattacatagtcactacaaatgtaaaaacatttttatacaataatgtatactat

SEQ ID NO: 544978 - DNA, 201 bp, Homo sapiens
gttttatttatttatttattcattcatttgagaaggagtctcgcactgtagcccaggctggagtgcagtggcccgatctccactcactgcaatctccgctwcccgggttcaagcgattcgcctgcctcagcctcctgagtagctgggattacaggtactcgccaccacgcccagctaattttttttttttttttttttttc

SEQ ID NO: 544979 - DNA, 201 bp, Homo sapiens
tccactcactgcaatctccgcttcccgggttcaagcgattcgcctgcctcagcctcctgagtagctgggattacaggtactcgccaccacgcccagctaattttttttttttttttttttttccgagatggagtctcgctctgtcacccaggctggagtgcagtggcgtgatctgggcttgctgcaacctccgcttccttg

SEQ ID NO: 544980 - DNA, 201 bp, Homo sapiens
gattactccattctgggccaggcgcagtggctcacacctgtaaacccagcattttgggaggccgaggcgggtggattgcttgaggtcaggagttcgagacmagcctgatcaacatggtgaaaccccatctctactaaaaatacaaaagatagctggcatggtggcaggtgcctgtaatcccagctacttgggtggctgagg

SEQ ID NO: 544981 - DNA, 201 bp, Homo sapiens
ctgtgacatggatttgttctttaaaaattctttattttatgatatgataagggtctatgcccttcattctgcccctcctactactcctgtgtgctatttatctctctctctctctctctcacacacacaccccacacacgcatttccttctctttttctcacatgatctcaatactgtcatattcattttcttcctgtagt

SEQ ID NO: 544982 - DNA, 201 bp, Homo sapiens
cttctccttctcatcccatgcagctttactttctcacatgatatagtttccatttcccaactctgctggactcactaagaaaagacagtgctgtccaccarcaaggacgcaagctaggctgctccagggaactgggtaaccatggccagcaactcccttccctccaggagcatagggaccgggtcctgggagggagaagca

SEQ ID NO: 544983 - DNA, 201 bp, Homo sapiens
gcaagagtggattagcagcctggttctacccaaaatgtccttgtcttcagtgacataccgagaatttggcgtggacttttcaacaacagtttcttcaatcrttgccattgtagttcaggagcctctaactgtggaggaggttgaagaaggacaaatgagccccaggacagatgcggcctgtgtgctgcggatgaaacagca

SEQ ID NO: 544984 - DNA, 201 bp, Homo sapiens
caaatcaagggtttgtggcaaccatgcatggagcaagtctatcaacaccatttttccaacagcatgtgctcacttcatgtctctgtgtcagcagttttcarcaattttttttttttttttttgagatggagtttcactcgtgttgcccaggctgaagtgcaatggtgggatctcagctcactgcaacctccacctcccgga

SEQ ID NO: 544985 - DNA, 201 bp, Homo sapiens
tcatgcagtgtcacttccttccaattgtcttaattataggcaaatcacaaacctctcggattcaaggaaaagggaattcgtccacctcttttttttttccwgtttgtttgtttctttttgtttttttgagacagggtctccctctgccgcctagggtggtttaagtggcacaatcacggctcactgcagcctcgaccttct

SEQ ID NO: 544986 - DNA, 201 bp, Homo sapiens
tagcctggccaacatggtgaaactctgtctctactaaacccacaaaaattagccaggcatggtggcgcaggcctgtaatcccacctactccagaggctgakgcaggagaattgcttgaacccgggaggcagaggttgcagtgagccgagattgcaccattgcacctgggcgacaagagcgaaactccgtctcaaaataaaa

SEQ ID NO: 544987 - DNA, 201 bp, Homo sapiens
atggtgaaactctgtctctactaaacccacaaaaattagccaggcatggtggcgcaggcctgtaatcccacctactccagaggctgaggcaggagaattgsttgaacccgggaggcagaggttgcagtgagccgagattgcaccattgcacctgggcgacaagagcgaaactccgtctcaaaataaaaagagaacgtcact

SEQ ID NO: 544988 - DNA, 201 bp, Homo sapiens
ctctgtctctactaaacccacaaaaattagccaggcatggtggcgcaggcctgtaatcccacctactccagaggctgaggcaggagaattgcttgaacccrggaggcagaggttgcagtgagccgagattgcaccattgcacctgggcgacaagagcgaaactccgtctcaaaataaaaagagaacgtcactcttaaacaa

SEQ ID NO: 544989 - DNA, 201 bp, Homo sapiens
tgtgacatggatttgttctttaaaaattctttattttatgatatgataagggtctatgcccttcattctgcccctcctactactcctgtgtgctatttatctctctctctctctctctcacacacacaccccacacacgcatttccttctctttttctcacatgatctcaatactgtcatattcattttcttcctgtagtt

SEQ ID NO: 544990 - DNA, 201 bp, Homo sapiens
gtcttcattccaagtcagtcatcctacccaggagaccacacctcacccaccttcatgcactccacactccaatcccacacaccttgctccccactcccccmccacacaaaccctaaaccctaagcagaatgacattaagataataatttgtaattgcaatacacacagcaggcattcaaaaatggaagaagaaaggaaaag

SEQ ID NO: 544991 - DNA, 201 bp, Homo sapiens
ttttatctccacataactattagaaccaatcgtaccactcaatgatacttctaagccctacattctactccaaatgtaaccattttataagtgttttattrtatactcccaaaacaccaaatatggaacgatcaaagagtgatgtttacttgttgcttcaagcttgcttccatcttgtaagatgtttcatactttgcctag

SEQ ID NO: 544992 - DNA, 201 bp, Homo sapiens
ggattacaggtgcccgccaccacacccggctaattttttgtatttttagtagagacagggttttgctgtatcaggtcttgatctcctgacctcgtgatccrcccaccccggcctcccaaagtgctgggattacaggtgcgagccaccgcacctggccaaatagtccataattttatcacgtgtagatttctgtatccacca

SEQ ID NO: 544993 - DNA, 201 bp, Homo sapiens
tttcttagagctgccattaaaaagtaccacatactgagtggcttaaacaacagaaatttatttccttatgttctgaaggctggaagtccaagatcaaggcrttcacagggttgagttgttctgagacttctcttcttgacttgcaggtggctgtctttttcctctgtcctcacatggtcctccctgtgtgtctgtgtccta

SEQ ID NO: 544994 - DNA, 201 bp, Homo sapiens
tggatacaacttataaacattaattaggagaggggggaaaaaagaagtgacagagataaatgtgctggaaagggagtttaagagtaaggcaagaggaaaaygaagaatgagagaaggaagagcaggacctccatagtaggtgccaccagcaattgtctacccattgccaatggccttaggattttagatcatttgcccttg

SEQ ID NO: 544995 - DNA, 201 bp, Homo sapiens
ctcactctcgtcccccaggctggagtgcagtggcgcaatctcggctcactgcaacctccacctcccgggttcaagagattctcctgcctcagcctcctgartagctgggattacaggcacctgccaccacacccagctaatttttgtatttttactagagacagggtttcaccatgttggccaggctggtctcgaactcct

SEQ ID NO: 544996 - DNA, 201 bp, Homo sapiens
tttttctttctttttgagacaaggtctcactctgttgcccagactggagtgcagtggcatgatcatggctcacaacagccttgatctcccgggctcaagcragcctcccacctgagcctcccaagtagctgggaccacaggtggtgccactgagccagctaatattttaattttctttgtagagatggagctttgctgtgt

SEQ ID NO: 544997 - DNA, 201 bp, Homo sapiens
taattcagagttgtttaagaagatttaaaaaaaaaaatcaagcaatggacccccaaaatgaccatttctcactaagtcatgaaatttaattttttcttttycttttttttttagatggagtctcgctgtgtcacccaggctggagtctggagtgcagtggtgcagtctcggctcactgcaacctctgcctcccgggttcaa

SEQ ID NO: 544998 - DNA, 201 bp, Homo sapiens
ggtgaaaccccgtctttaccaaaagtacaaaaaattagccgggcgtggtggtgggcgcctgtagtcccagctactcgggaggctgaggcaggagaatggcrtgaacctgggaggtagagcttgcagtgagctgagatcacaccactgcactccagcctgggcaacagacagagactctgtctcaaaaaacaattaaaattt

SEQ ID NO: 544999 - DNA, 201 bp, Homo sapiens
cagaggaaagaacagcaatctttgctgttctgcagcctccgctggtgatacccaggcaacaggatctggagcggacctccagaaaactccagcagacctayagcagagggcaggttagaaggaaaactaacaaacagaaaggaatagcatcaacatcaacaaaaaggacatccacacaaaaaccccatctgaaagtcacca

SEQ ID NO: 545000 - DNA, 201 bp, Homo sapiens
aggctgtcctcagactgtgcccatccgtggtcagtccacctccaaatgccttagagattatagcaatcagacttatgagttttgtttcggttacgtaaggdgtacttgttatattccaggcactgtactccgcagaggcactttttaaccgaaaagaactattaaggaactattattgcattgattttacagatggggaaa

SEQ ID NO: 545001 - DNA, 201 bp, Homo sapiens
taacctagcaagacaggccaacattcaaattcaggaaatacagagaacactacaaagatactcctcaagaagagcaaccccaagacacataatcatcagaragaaaggtcgggttacccacaaagggaagcccatcagactaacagcagatctctctgcagaaaccctacaagccagaagacagtggaggctaatattcaa

SEQ ID NO: 545002 - DNA, 201 bp, Homo sapiens
cagataaatgactataagggatagcttgatttaccctttccacaatgtatgtatatttcaaaacaacatgtggtacatgataaatatatacaatttttatyatcaattaaaaataaatttaaaaatgtttagaaaactaatgataaggaaaaaaatcttagaacagtatcattggcctgtcaatagtcaatggaagtattg

SEQ ID NO: 545003 - DNA, 201 bp, Homo sapiens
gactgagtcagaggtgttgaaggaaagccccggtgacatattatgagagccactcctcgtctctagaaacaaatgcctcagtgaataggactgttaccccyttttttttttccaccaatattgcctctgtttccatttgcatttccagaagtgacccaattctgagtttttaaaatcttccttgcttcacacatcaaagct

SEQ ID NO: 545004 - DNA, 201 bp, Homo sapiens
agacaggccaacattcaaattcaggaaatacagagaacactacaaagatactcctcaagaagagcaaccccaagacacataatcatcagagagaaaggtcrggttacccacaaagggaagcccatcagactaacagcagatctctctgcagaaaccctacaagccagaagacagtggaggctaatattcaacattcttaaa

SEQ ID NO: 545005 - DNA, 201 bp, Homo sapiens
ctgaaattagaatgtagcttatatataatcagtatgtattttaatgttgtatgtttattttcctctgaaacattattattaaattaatggtggatcctccmactgatgatatttttgaaacaaggaaatttggtggtaggcattaatgcctgcttcatgtctgtgtgcaaagcatctaaaagagtattgctatgaagtaac

SEQ ID NO: 545006 - DNA, 201 bp, Homo sapiens
ccaacctgccggtcagcctggacaccccgctgctgaagaagagcgcctggtcctccacgctcaccgtgagccgggcccgggaggtttaccagaaggcctcrgtgaacatggaccaggccatggtgaagtccgagtcgtgtcagcaagaacgctcctgccagtacctgcaggtaccatttctgtcaatgatggaggcttaga

SEQ ID NO: 545007 - DNA, 201 bp, Homo sapiens
tgcagtctcccgagggctggttaccagcctgtcaactttagctgcacctctaaatctgtgaaatggaataataatcccacgtacaaattactcagcagaaytctatgcctgtgacaggcaaagtatacaatttcatttctccttcctgggcttcattatgatttgagagccacagaaaggtcttagctgcactatgggtct

SEQ ID NO: 545008 - DNA, 201 bp, Homo sapiens
acctataatcccagctacctgggaggccgaggcaggggaatcgcttgaacctgggggcggagcttgcagtgagctgagatcgcgccacttcactccagccygggcaaaagagggaaactccatctcaaaaaaaaaaaagtaacaactgttactgggtagctgctgcggcttctttgcctagcatctgcatagcactttgca

SEQ ID NO: 545009 - DNA, 201 bp, Homo sapiens
gggcgacagagtgagactctgtctcaaacaaacaaacaaaaaacaaaaaaactatgtgtgtatgtatcttctttttacgtattatctaccttttccacagkaattacatattattgaacaatgcaattaatgataagaaaaacaaagtagtatttacattgtaaaaatgtataaattacagaaataaaataaagtcgccca

SEQ ID NO: 545010 - DNA, 201 bp, Homo sapiens
gcagtgagctgagatcgcgccacttcactccagcccgggcaaaagagggaaactccatctcaaaaaaaaaaaagtaacaactgttactgggtagctgctgyggcttctttgcctagcatctgcatagcactttgcaacttacaaagggcttttacatattttaagtctttaatgttcactgtaacagccatcctgtagtta

SEQ ID NO: 545011 - DNA, 201 bp, Homo sapiens
taaattttcatgtacttccattcattaacctttctctttatggcatctaagtttaccacgatgcttctaaagtctttctctaccatattcctttgcatttstttaggccttctttattgccttccataaggctttataggtttttttattcataaaacattgataaatttctctttaaattgtttaagtatagaaattgag

SEQ ID NO: 545012 - DNA, 201 bp, Homo sapiens
agctttaagaatagatgcaatcgtacacaatgctactaagaggacacttagaatatagggaatatctttacaatttgaggacatcaagatggatgtacatraatgtaatgtgtaaatgtatgttttttaaaatccacatttctctaattactagtgagatcgagcattttgtcatatgcttggtgatatataaagttactt

SEQ ID NO: 545013 - DNA, 201 bp, Homo sapiens
ttatcacattctcagggtttagtattattaagaatagtttttggctgttatatattaagtaattccatacaagctttaagaatagatgcaatcgtacacawtgctactaagaggacacttagaatatagggaatatctttacaatttgaggacatcaagatggatgtacatgaatgtaatgtgtaaatgtatgttttttaa

SEQ ID NO: 545014 - DNA, 201 bp, Homo sapiens
caggaagtcatttccaatcttgttttgcatatatacaaataattggcattaagctaataaataaaattttcaaataggacaaatacaagatgctactggttttttttttttattgtgtaatacagggtatgggagaaatgataataccttttcctcatccaattacaggttcatggctgagacccctataacaaaagagag

SEQ ID NO: 545015 - DNA, 201 bp, Homo sapiens
acaggaagtcatttccaatcttgttttgcatatatacaaataattggcattaagctaataaataaaattttcaaataggacaaatacaagatgctactggttttttttttttattgtgtaatacagggtatgggagaaatgataataccttttcctcatccaattacaggttcatggctgagacccctataacaaaagaga

SEQ ID NO: 545016 - DNA, 201 bp, Homo sapiens
tcatataacaggaagtcatttccaatcttgttttgcatatatacaaataattggcattaagctaataaataaaattttcaaataggacaaatacaagatgytactggttttttttttttattgtgtaatacagggtatgggagaaatgataataccttttcctcatccaattacaggttcatggctgagacccctataaca

SEQ ID NO: 545017 - DNA, 201 bp, Homo sapiens
tttaaaatatttagctgttatatcacatgatgaaatcattttcatataacaggaagtcatttccaatcttgttttgcatatatacaaataattggcattaagctaataaataaaattttcaaataggacaaatacaagatgctactggttttttttttttattgtgtaatacagggtatgggagaaatgataatacctttt

SEQ ID NO: 545018 - DNA, 201 bp, Homo sapiens
tgctttaaaatatttagctgttatatcacatgatgaaatcattttcatataacaggaagtcatttccaatcttgttttgcatatatacaaataattggcaytaagctaataaataaaattttcaaataggacaaatacaagatgctactggttttttttttttattgtgtaatacagggtatgggagaaatgataatacct

SEQ ID NO: 545019 - DNA, 201 bp, Homo sapiens
gttgctttaaaatatttagctgttatatcacatgatgaaatcattttcatataacaggaagtcatttccaatcttgttttgcatatatacaaataattggyattaagctaataaataaaattttcaaataggacaaatacaagatgctactggttttttttttttattgtgtaatacagggtatgggagaaatgataatac

SEQ ID NO: 545020 - DNA, 201 bp, Homo sapiens
tcaggaaatacagagaacactacaaagatactcctcaagaagagcaaccccaagacacataatcatcagagagaaaggtcgggttacccacaaagggaagyccatcagactaacagcagatctctctgcagaaaccctacaagccagaagacagtggaggctaatattcaacattcttaaagaaaggaattttcaacccag

SEQ ID NO: 545021 - DNA, 201 bp, Homo sapiens
agttgctttaaaatatttagctgttatatcacatgatgaaatcattttcatataacaggaagtcatttccaatcttgttttgcatatatacaaataattgkcattaagctaataaataaaattttcaaataggacaaatacaagatgctactggttttttttttttattgtgtaatacagggtatgggagaaatgataata

SEQ ID NO: 545022 - DNA, 201 bp, Homo sapiens
ctttttatttagggaccttctgagtacataactaaaaaactgcagactaaaagctgatcattctcagcaggtaaaattgcttattcaatactttaatgacycaaaacttctaaacaaaagattttcttctttcttcagttcctttgtttaaaaaacctagaattcatcaaataaatgatgaaaaaaactaattttttttaa

SEQ ID NO: 545023 - DNA, 201 bp, Homo sapiens
tattcaggagaccaaactcatgtgcaaagacacacataggctcaaaataaagggatggaggaatatttaccaagcaaatggaaagcaagaaaaaagcaggrgttgcaatcctagtctctgataaaacagactttaagccaataaagatcaaaaaagactaagaagggcattacataatggttaaggagtcaatgcaacaag

SEQ ID NO: 545024 - DNA, 201 bp, Homo sapiens
tacagtacagtcacattccgagacactgggggttaggaattcaacttaggaatttggaaaggacacaaacccaaatagatggtctcatttagaaagaaaamatgaattataggctgttttattttaatttgggtttctttttcatgccagtttttctcaggtatgcttgatactctctgagttatctcccctttccaatga

SEQ ID NO: 545025 - DNA, 201 bp, Homo sapiens
aagttgctttaaaatatttagctgttatatcacatgatgaaatcattttcatataacaggaagtcatttccaatcttgttttgcatatatacaaataattrgcattaagctaataaataaaattttcaaataggacaaatacaagatgctactggttttttttttttattgtgtaatacagggtatgggagaaatgataat

SEQ ID NO: 545026 - DNA, 201 bp, Homo sapiens
atgacaagatctcattttttatggctaacagtactccattgtatttatataccacattttcttcattcatctgttgatggacactgaggttgtttccaaamtttgtctattgtgaacagtgctgcagtaaacacgggagtgcagagtgcagatatctcttcgataatacgaattcactttctttgcataatatatctagca

SEQ ID NO: 545027 - DNA, 201 bp, Homo sapiens
tgggtaaataatgaaattaaggaagaaataaataagttatttgaagccaatgagaacaaagacacaacgtaccagaatctctgggacacagctaaagaagygtttagagggaaatttatagcactaaatgcccagaggagaatgcgggaaagacgtaaaatcaacaccctaacatcacaattaaaagaactaaagaagcaa

SEQ ID NO: 545028 - DNA, 201 bp, Homo sapiens
atgactgaccagttctaccgatttgcaaattcataaaaggagtaatctggtgttaggcccagaccatttcctagcagtgatgttcttttcctcatgccagaaaaaaaaaaaaaaaaaaaccctctctttcacagtagataatcctccatctttgcagtttatcaccttaaaaaccttgacatgaataagctctttgatgat

SEQ ID NO: 545029 - DNA, 201 bp, Homo sapiens
aaagttgctttaaaatatttagctgttatatcacatgatgaaatcattttcatataacaggaagtcatttccaatcttgttttgcatatatacaaataattggcattaagctaataaataaaattttcaaataggacaaatacaagatgctactggttttttttttttattgtgtaatacagggtatgggagaaatgataa

SEQ ID NO: 545030 - DNA, 201 bp, Homo sapiens
tttcttctgaaactattccaaacaatacaaaaagagggactcctccctaactcactttatgaggccagcatcatcctgataccaaaacctggcagagacasaacaaaaaaagaaaatttcaggccaatatccctgacaaacatcaatacagaaatcctcaataaaatactggcaaaccgaaccaagtgtcacttcaaaaag

SEQ ID NO: 545031 - DNA, 201 bp, Homo sapiens
attcagaaagggaagacaataagagcaggtgaagttgaagataggagattgatgccagggaactaaataaccagaaaagacatgtgaaatagagaaccgamtggagagcacaaagaaaatggtaaccaattttctctgaaagtgaaaggtaaagaaagctgaagatgaaactacctatttatttttaatagctgcatcaag

SEQ ID NO: 545032 - DNA, 201 bp, Homo sapiens
ttatactgtaagagctgtgtcaaagaagttcattctttcatgtgacagcccttccattatttggaggtagaaataggtttctcctaagtgtgcctgagccctttctccttctactggaaatattccaggctacactgttgtttaaagctaacaccaaaccccagatgtgtctgacctgtaccaagtagaagatacttcctt

SEQ ID NO: 545033 - DNA, 201 bp, Homo sapiens
tcagcagtgaagccatcaggtcccaggcttatctttgctaggatactgtttatggtagctttgatctggttacttcttatttgtccattcaggttttggaytttttcgtggctcaatcttggtaggcttcatctcactaggcattttttttttcatttcttctagtttttctaatttattgcctgacagttactcatagta

SEQ ID NO: 545034 - DNA, 201 bp, Homo sapiens
atccctgacaaacatcaatacagaaatcctcaataaaatactggcaaaccgaaccaagtgtcacttcaaaaagcttatccaccacgatcaagtaggcttcrtccctgggatgtaaggctggttcaacatacgcaaatcagtaaacgtaattcatcacataaacagaaccaatgacaaaaaacacacgattatttcaataga

SEQ ID NO: 545035 - DNA, 201 bp, Homo sapiens
tactgtttatggtagctttgatctggttacttcttatttgtccattcaggttttggattttttcgtggctcaatcttggtaggcttcatctcactaggcattttttttttcatttcttctagtttttctaatttattgcctgacagttactcatagtagcctctaatgatcatttgaatttcagtggtattgggttgaatg

SEQ ID NO: 545036 - DNA, 201 bp, Homo sapiens
atgggcacctcctccccggagccctcctctggctctgccacctccactgccatctccgctgccgccgcctcctcttcctcctcctcctcctggtctctcamcttgtggacaatgaagaggtggcggctgagggagctggcagaggtgtagcacaaaccacagaggagacattgggctgtggagctgtccacctggtgctta

SEQ ID NO: 545037 - DNA, 201 bp, Homo sapiens
acagatacctttggaacctacctggtgctctattccactgtggctgagctggcacccaaacacaagacagttcttcccactcttctctcccctttccacargcagaggcgtcttcctccgtgtctgccaccaccacaggcctgcaggttgtattgccaggctactgccagtgttcactcaaggcccaagggctcttcagtc

SEQ ID NO: 545038 - DNA, 201 bp, Homo sapiens
tcgtccctgggatgtaaggctggttcaacatacgcaaatcagtaaacgtaattcatcacataaacagaaccaatgacaaaaaacacacgattatttcaatwgatgcagaaaaggccttcaataaaattcaacaccacttcacactaaaaactctcaataaactatgtattgatgaaatgtatctcaaaataataagagcta

SEQ ID NO: 545039 - DNA, 201 bp, Homo sapiens
gtgtgctacctggctactgctgctgattattcagaggccaaaagctctttagtcagcccgtgatgaatcctgccaggactgagttcttccactcaaggcarcaggttcccttctggcccaggttttgtctagaaatgtcaaccaggagttagggcctggaatgagtgtctcaggactctgctcagtgttctatgctcattc

SEQ ID NO: 545040 - DNA, 201 bp, Homo sapiens
ttgatgaaatgtatctcaaaataataagagctatttatgacaaacccacagccaatatcatactgaatgggcacaagctggaggcattccctttgaaaacyggcacaagacaaggatgccctctctcaccactcctattcaacatagtattggaagttctggccagggcaatcaggcaagagaaagaaataaagcgtattc

SEQ ID NO: 545041 - DNA, 201 bp, Homo sapiens
aaacatagaaaaagcacagtgaaaatatgatattataatcttataagaccactgtcacatatgtggtccactgttgacctaaaatatcattatatattgcwttgctgtgtaagaagaggccctggacctagatagaaagaatttcttccctgctcatcaaataaacatttttaaaaagagtaagagttcatctagatagat

SEQ ID NO: 545042 - DNA, 201 bp, Homo sapiens
tatttatgacaaacccacagccaatatcatactgaatgggcacaagctggaggcattccctttgaaaaccggcacaagacaaggatgccctctctcaccastcctattcaacatagtattggaagttctggccagggcaatcaggcaagagaaagaaataaagcgtattcaaataggaagaggggaagtcaaattgtctct

SEQ ID NO: 545043 - DNA, 201 bp, Homo sapiens
tcttctggggattgaagttcgcagatgcttggagaggttgatcctccaccaggtggaggcgagtgtcacaacgcctgtgtctgcccgcaggtgagcgagayggaagtgaacgggcagttcgagtccgtgtgcgagtccgtgttcagcgagctggagtcgcaggccgtggaagcgctggacctgcccatgcccggctgcttc

SEQ ID NO: 545044 - DNA, 201 bp, Homo sapiens
ttaaccagaatatttgtattatgagggatattatgaaaagtataccaattaagctatttaattttcataaaggacctatgatgaggtatcattattatccttttttttttttttttttgagatggagtctccctctgtcacccaggctggagtgcagcagtgcagtctcctgcctcagcctcccaagtagctgggattaca

SEQ ID NO: 545045 - DNA, 201 bp, Homo sapiens
cctaaaaccgtaaaaactctagaagaaaacctagtcaataccattcaggacataggcatgggcaaagacttcatgactaaaacaccaaaagcaggccaggsttggtggctcatgcctgtaatcccagcattttgggaggctgaaacgggtggaccatgaggtcaggggatagagaccatcctgactaacacggtgaaaccc

SEQ ID NO: 545046 - DNA, 201 bp, Homo sapiens
ggagtctccctctgtcacccaggctggagtgcagcagtgcagtctcctgcctcagcctcccaagtagctgggattacaggcacgcaccaccacacctggattttttttttttttttttaactttagtagagacatggtttcaccatgttggccaggctgctctcaaactcttgacctcaagtgatccacccacctcagcct

SEQ ID NO: 545047 - DNA, 201 bp, Homo sapiens
gcagtgagccaagagcacgccaccgcactccagtctggggcgacagaacaagactctgtctcaaaaaaaaacaaaaaaaacaaaaaaaacaccaaaagcartagggacaaaagccaaaattgacaaatgggatctaattaaactaaagagctcctgcacagcaaaagaaactcatcagagtgagcagacaacctacagaat

SEQ ID NO: 545048 - DNA, 201 bp, Homo sapiens
tgggaggttgaggcaggagaatcccttgaacccaggaggcagaggttgcagtgagctgagatcacaccactgcactctagcctgggtgacaaaacaagacaaaaaaaaaaaaaaaagaaagagaaaggaaggaaggaaggaagataaaatatataaaaatcaaaatataaatataaaaactgaatttatttaaggcaataa

SEQ ID NO: 545049 - DNA, 201 bp, Homo sapiens
tgagatcgcgccacttcactccagcccgggcaaaagagggaaactccatctcaaaaaaaaaaaagtaacaactgttactgggtagctgctgcggcttcttkgcctagcatctgcatagcactttgcaacttacaaagggcttttacatattttaagtctttaatgttcactgtaacagccatcctgtagttattgtcccat

SEQ ID NO: 545050 - DNA, 201 bp, Homo sapiens
aatcgccacacttttccacagtgattaaagtaatttacattcccaccaatggtgtaaaagcgttcctatttcttcacagctttgccagcgtctattgtttsttgactttttaataattgccattctaactggcatgagatggtatctcattgcggttttaatttgcatttctctaatgaacagggatgttgagcttctttt

SEQ ID NO: 545051 - DNA, 201 bp, Homo sapiens
cagatggagctgaatgcctccaactaggaatgcagtctaccactgtggggaaagaacataggctcaggtttcaatggccctaagatgaaataccggtgatkgtacttctaaatctgtctttgccttctgaattgtagacaacaaatacgtggaattttcaggctttatctgaaacaaactgataaacctagagcatgtgcc

SEQ ID NO: 545052 - DNA, 201 bp, Homo sapiens
gtaacaactgttactgggtagctgctgcggcttctttgcctagcatctgcatagcactttgcaacttacaaagggcttttacatattttaagtctttaatrttcactgtaacagccatcctgtagttattgtcccattccacagatggtaataaaatgaagcataaaactgtattgcctttggacacagaccaaccaattt

SEQ ID NO: 545053 - DNA, 201 bp, Homo sapiens
ttagctacgtaaatgtcttctttgaagaagtgtctgtacatgtcctttgcccgctttttgatggggtggtttttttcttgtaaatgtgtttaagttccttktagattctggatattagacctttgtcagatgaatagattgcaaaaattttctcccattccataggctgtctgttcactctgatgatagtttcttttgttg

SEQ ID NO: 545054 - DNA, 201 bp, Homo sapiens
tcttccaaggtttttatagtttgggatttacatttaagtctttaatctatcttgagttaatttttttttaagatgtaaggaaggggtccagtttctttctytttttttagacggagtccccctctatcacccaggctggagtgcagtggcgcgatcttggctcactgcaaactccgcctcccgggttcacgccattctcct

SEQ ID NO: 545055 - DNA, 201 bp, Homo sapiens
aaggagcacatacctagattcctcacgtggacagttcacaacagggatcatgctcctatgagaatttaatgccgccactgatctcacaagaggcagagctyaggccgtaatgcacgctggcccactgctcacttcctgctgtgcagcccagttcctaacaggaaccagtactggtctatgacctgggggttagggatccct

SEQ ID NO: 545056 - DNA, 201 bp, Homo sapiens
gtatagtcttacaacatctttaaaatcaacaaacattatttaaaaagttttctttttactattgaaaattcatagcaaacacctcttttaatgaatgcacmatactcaaattcataggaggaccataatttctgcccctttctccttctgccggattatcaacattacttttagatgatttctgtttaaagatggtgaaaa

SEQ ID NO: 545057 - DNA, 201 bp, Homo sapiens
gatcacttgagcccaggaggttgaagctgccgtgagccatgattgtgccactgcactccagcctgggcaacagtgagtccctctgaaaaacaaacaaaacmaaacagaagacaataaaccattgtttcctttactcctttctccagaatgctaactttttttttcctgagaagggttttatatctaatattacttatgaag

SEQ ID NO: 545058 - DNA, 201 bp, Homo sapiens
tttaaagatggtgaaaaaaaaggatacacatgtatcttggaggccttctgaaactaaatgacaataaaaggaatttttgtttgttttggcattaactcccwaggaggaagagaacaagagagaaaaaaaaaacagcaaaatttagcaagctagaaagcagatatggaagtgacaaccgatttggcagaccagagaaagctg

SEQ ID NO: 545059 - DNA, 201 bp, Homo sapiens
cttgagcccaggaggttgaagctgccgtgagccatgattgtgccactgcactccagcctgggcaacagtgagtccctctgaaaaacaaacaaaacaaaacrgaagacaataaaccattgtttcctttactcctttctccagaatgctaactttttttttcctgagaagggttttatatctaatattacttatgaagtgagg

SEQ ID NO: 545060 - DNA, 201 bp, Homo sapiens
ttgaggggtctgcagcagagcttggagaggatctgggatgttaaattctcaagtacttgaacttagcaacaggacttggtcccatccacaccctgctctcyaccccagctggaaataattagtgctgactatggaggcaaagagaaacatacttgtaagcttttttgtttggattttctttggggtttcctttttgtcttt

SEQ ID NO: 545061 - DNA, 201 bp, Homo sapiens
atgaagctggacaccatcattctcagcaaactaacacaggaagagaaaaccaaacacaacatgttcttactcataagtgggagttgaacaatgagaacacrtggacacagggaggggaacgtcacactctggggcctgttgggggctgaggggggggtggctaggggagggatagcattaggagaaatacctaatgtagac

SEQ ID NO: 545062 - DNA, 201 bp, Homo sapiens
gaccccaatctctacaaaaaaaaaaaatttaaataagtgagacatggtagggtacacctgaagtcccagctattcaagacgctgaggcaggaggatcgctkgagcccaggagttcgaggctgcagtagctatgatggcaccactgcactccagcctgagcgacatagactctgtctctgaaaaagaaaatatagtttgcct

SEQ ID NO: 545063 - DNA, 201 bp, Homo sapiens
caaggttaagcaagaataaaacactttgcctggattttccactgtgaaattgatggtgaggagggagggtgtttttaatgtgatgcactgcggtcagaaamaaaaacaaaaacaaaaaaaaaaccacaacagtcctgtcagttaaaactgctagatacagccatccttatgaatgttttataatcattgtaaaagatcaaa

SEQ ID NO: 545064 - DNA, 201 bp, Homo sapiens
cctgtaatttcaacactttgagaggccgtaggggacagatcgcttgagcccaggaatttgagactagcctgagcaacatggcaagaccccaactctacaamaaatacaaaaattagccgggcttcatgacacatgcctgcagtcccaactacttggaagactgaagtgggaggatcacttaagcccaggagttcaagtccg

SEQ ID NO: 545065 - DNA, 201 bp, Homo sapiens
aaaattggatagccacatgtggaagaataaaactgcatccctatttctcaacatatacaaaactaactgaagatggattaaagacctaaaatcataaaaayttctggaggaaaaactcttctggacattggcctaggcaaagaatttgtgagtaaatcccaaaagcaaatgcctcaaaagcaagaataaataaacgggact

SEQ ID NO: 545066 - DNA, 201 bp, Homo sapiens
gtgcgcgggccctcagccagcctggcccctgtgctggctatggcacgactgtccccaaagactgtgcccttgctgtcaacacacatagttgccaggaacargataccacccatgtcctacaaaccaaaggttttccttccctatctgcctctatccccgcctctggccactctcccacacctctttcccatctctatctct

SEQ ID NO: 545067 - DNA, 201 bp, Homo sapiens
ggaggatcacttaagcccaggagttcaagtccgcagtgagctgtgattgcaccagagggcaacagagtgaaacactgtcaaaaaaaaaaaaaaaaaaaaamacctcacccagcccgcagggtactgttaataatcctgaagttcagaaattctcaacaatgcttaggaattccacaaaaaaaaaatgggaatcaaggggga

SEQ ID NO: 545068 - DNA, 201 bp, Homo sapiens
catcaagagattgcttaggtggaaaaaaaaaaacaaaaatgttgctggttctgattatcatcctcaggctgaatccaccccacctggtgtcccagctccaraattctacccaaatcgttactcccgtacccaaaccctagacggtatatccatagcagaaaaaaaatgcatcttcatagtttgaacaaaacaaataatttt

SEQ ID NO: 545069 - DNA, 201 bp, Homo sapiens
cttctggaggaaaaactcttctggacattggcctaggcaaagaatttgtgagtaaatcccaaaagcaaatgcctcaaaagcaagaataaataaacgggackgaactaaactaaaaagcttctgaacaacaaaaaaaagtcgtcaacagaaagacaacctatagaatggaagaaggtatttgcaaagcatacatctgacaag

SEQ ID NO: 545070 - DNA, 201 bp, Homo sapiens
actttatcctgttcagttttttccattctatttggacggatgggagaccaagttactgcagcccttcctaagacaaatttggttggcacaaattcagatgycatcgctttgttgatccttcctagaacttacttactagtctgaatacaatttcccaagatcatctcctctgtcaccaggacctggaaaacgtattctgaa

SEQ ID NO: 545071 - DNA, 201 bp, Homo sapiens
attgacaaaacccttatttgagatcctcttgggttctggcttcttccacagatgggagataaatctcaaataggccatgaccatctcttagaaatccaatrataggtgtttttattattgttattatttatttcatttatttatttatttattttttgagacagagtctcactctgtcgcccaggctggagtgcagtggca

SEQ ID NO: 545072 - DNA, 201 bp, Homo sapiens
ggggagggcaagcattgccagatgtctccaagccaaccctttaacccattcctttacctgcttcccaccttcaagttttgtttcttatttttggtagggtktgtgtgtgtgtgtgtgtgtgtgtgtgtgtgtgtgtgtgtgtctttttttaatacctagaatatatcttaaactgatgggaaaaaagcaaatattatcaac

SEQ ID NO: 545073 - DNA, 201 bp, Homo sapiens
ctctattctgcctcctccggacccctggattgactctatcactgaagaccctctggaggccgtgcaaaggtcagtgtgccaccgggatggccactggttcytgaagcttctccaggcagagcgagaccgcatggaggggtggtgtcaacagatggagcgggaagaacgggaaaacaacctgcccgaagacagtaagtaatg

SEQ ID NO: 545074 - DNA, 201 bp, Homo sapiens
ccacactgaactgatttttgtattttaaatagaggtggggtttcaccacattggccaggctggtctcaaactcctgacctctggtgatccacccacctcgrcctcccaaagtgctgggattataggcgtgagccactccacccagcctcttttatttttatttttctaattttcttttaatatttatttaattgtgcttct

SEQ ID NO: 545075 - DNA, 201 bp, Homo sapiens
caagaccagcctggccaacatggtgaaaccgcgtctctactaaaacaaaatacaaaaattagctgggcgtggtggtgcatgcctgtaattccagctactcrggaggctgaggcaggagaatcagttgaacctggaaggcagaggttgcagtgagccgtgatcgcaccactgcactccagcctgggtgacagagcgagaccc

SEQ ID NO: 545076 - DNA, 201 bp, Homo sapiens
cattttcatctgtcgttatggcaaacatatcttgatgtgctagatgtagcaaaatgattgtttaaaggaaaaaaatcaatttcaggtatacgtccatgaaygaaaaaaatttttgcaacttttggtaagagggtttatgtgaagtgaagtctttctagatactttctctttctaaattaagggattaatgaaaagactcct

SEQ ID NO: 545077 - DNA, 201 bp, Homo sapiens
tgaggcaggagaatcagttgaacctggaaggcagaggttgcagtgagccgtgatcgcaccactgcactccagcctgggtgacagagcgagaccctgtctcaaaaaaaaaaaaaaaaaaacagtctctgaggattgggataattatactcattattataaagctattgtttggtcagaatttctctttcaatgttataggtt

SEQ ID NO: 545078 - DNA, 201 bp, Homo sapiens
ttgagatttttgcacattgattttgtatcctgagactttgctgaagttgcttatcagcttaaggagctttagggctgagatgatggggttttctagatatrggatcatgttatctgcaaacagaggcagtttgacttcctctcttcctatttaaatacgctttattgctttctcttgcctgcttgcgctggccaaaacttc

SEQ ID NO: 545079 - DNA, 201 bp, Homo sapiens
aaggatatcttggttgcttgtagctttcgtgtgcaggtttttgtgtggacataagcttgtaactcacttgagtaaatacctaggagtatgattgctgtatsttatcacaagcctttgataaggtttgcataaaactgctaggctgtcttctaaagtgactgtaccattttatattcccatcaacaatgtatgggagcgcct

SEQ ID NO: 545080 - DNA, 201 bp, Homo sapiens
gaggcaggagaatcagttgaacctggaaggcagaggttgcagtgagccgtgatcgcaccactgcactccagcctgggtgacagagcgagaccctgtctcaaaaaaaaaaaaaaaaaaacagtctctgaggattgggataattatactcattattataaagctattgtttggtcagaatttctctttcaatgttataggttg

SEQ ID NO: 545081 - DNA, 201 bp, Homo sapiens
tgctgaagttgcttatcagcttaaggagctttagggctgagatgatggggttttctagatataggatcatgttatctgcaaacagaggcagtttgacttcytctcttcctatttaaatacgctttattgctttctcttgcctgcttgcgctggccaaaacttccaacactatgttgaacaggagtggtgagagagggcatc

SEQ ID NO: 545082 - DNA, 201 bp, Homo sapiens
ctgcagtgagctgtgattgcaccactgcactccctcctgggggacagagtgagaccttgtctcaaaaagaaaaggaaaaaaatttttaattaaaaaaaaamttacccaatcatattataaatatatggtactttaacgagctgtcatctctcctagagtgcattttttgtatcagtgatagaatacagctatttaactagc

SEQ ID NO: 545083 - DNA, 201 bp, Homo sapiens
caaacagaggcagtttgacttcctctcttcctatttaaatacgctttattgctttctcttgcctgcttgcgctggccaaaacttccaacactatgttgaayaggagtggtgagagagggcatccttgtcttgtgccagttttcaaggggaatgcttccagcttttgcccattcagtatgatattggctgtgggtttgtcat

SEQ ID NO: 545084 - DNA, 201 bp, Homo sapiens
ttatctgtacaccaaacacttatgacatgcaacttacctatataacaaacctgcaaatgcatccctgaacctaaaataaaagttaaaacaaaaaaagaacyagagtctctaactaaagagttgaaaccaaacttggaagcagcagcaagccaaggaagtgtgtgtgtgtgtgtgtgtgtgtgtgtgtgtgtgtgtgtgtgt

SEQ ID NO: 545085 - DNA, 201 bp, Homo sapiens
ttttttttttttttttttgagacggagtctcgctctgtcttccaggctggagtgcagtggcgcgatctcggcttactgcaagctccgcctcccgggttcaygccattctcctgcctcagcctcccaagtagctgggactacaggtgcccgccatcacgcccagctaatttttttgtatttttagtagagacaggggtttca

SEQ ID NO: 545086 - DNA, 201 bp, Homo sapiens
tttaatttaatttaaaattaaaattaaaataggaaatgttttctatagaaaaaataaatgtttaagaaacataaacaagagatcaatagttgaggaaaaayagaatgataaaaattatttaattaaaaaaaacagaaaaagagggaaaggggaaagattaacaaacagaacaaatagaagacagctagccagatgttagat

SEQ ID NO: 545087 - DNA, 201 bp, Homo sapiens
gtttacccacatttttgccactttcttgtctatcattattcttgcatctcagccttccatcttgtatcattttttttttttctgtctaaaacatatctttkggaattccctatagggaaacaccactggcaaaacaaactcttcattttttttaatttatattaaaaagtccttaattctgccttgttcttggaagatatt

SEQ ID NO: 545088 - DNA, 201 bp, Homo sapiens
tagaagacagctagccagatgttagattttagtctaaacatagcagtgacacagatgtcaatggtctcaacataacaaatcaagacagatcatgtcaactcaaacaaagcaaagcccaactacacagttcacatgaaacccattttaaaataaagaactaggttaagagtaaaaggatgaaaatatgtatatatgtcattt

SEQ ID NO: 545089 - DNA, 201 bp, Homo sapiens
agttgatagtattttcttttagtttttatattactccactaactcctgacttccattgttgttgctgaagaattagttgtctaactatagtgaatcacctraaaagcaaactgcaaatgagcatatctttatctgcagttttaccctgatgtacagaattgttaattgtttgatttatcatgctgggaattttggtgcctt

SEQ ID NO: 545090 - DNA, 201 bp, Homo sapiens
agaagacagctagccagatgttagattttagtctaaacatagcagtgacacagatgtcaatggtctcaacataacaaatcaagacagatcatgtcaactcaaacaaagcaaagcccaactacacagttcacatgaaacccattttaaaataaagaactaggttaagagtaaaaggatgaaaatatgtatatatgtcattta

SEQ ID NO: 545091 - DNA, 201 bp, Homo sapiens
cctggcgttttctaggccacaggctgaacatgttcgctccttagaaaatattttaatcagccacagctctttcctgacggtaccagtggctgagctccggraaaataagaaaggatgtggatgggatatggtgagtgccaagagattccccctctagtttagtactgctttccttgtgtttgggcttgttttagaaaaaca

SEQ ID NO: 545092 - DNA, 201 bp, Homo sapiens
gaagacagctagccagatgttagattttagtctaaacatagcagtgacacagatgtcaatggtctcaacataacaaatcaagacagatcatgtcaactcaaacaaagcaaagcccaactacacagttcacatgaaacccattttaaaataaagaactaggttaagagtaaaaggatgaaaatatgtatatatgtcatttaa

SEQ ID NO: 545093 - DNA, 201 bp, Homo sapiens
aagacagctagccagatgttagattttagtctaaacatagcagtgacacagatgtcaatggtctcaacataacaaatcaagacagatcatgtcaactcaaacaaagcaaagcccaactacacagttcacatgaaacccattttaaaataaagaactaggttaagagtaaaaggatgaaaatatgtatatatgtcatttaaa

SEQ ID NO: 545094 - DNA, 201 bp, Homo sapiens
tctggctagttatctgcagtaggagcatgtccttaaggcacagatcgctcatgctattgtttgtggtttaagaacaccttaagcagttttccgccctgggwgggccaggtgttccttgccctcattctggtaaacccgttgtgggcatcaaggccatcacaagcatgtcatagtgctgcagagattttgtttatggccagt

SEQ ID NO: 545095 - DNA, 201 bp, Homo sapiens
tacttgtaagcttttttgtttggattttctttggggtttcctttttgtcttttctgaactggagggtgatagagaaggtgcggaaaaggtttgaaaccacyggcaggggtccaccatacaagccctgagaaacgcgtggtaagttctgccatgttccaaggtgcaaggaagcaggggctgcagcgggtcctgctatgtaat

SEQ ID NO: 545096 - DNA, 201 bp, Homo sapiens
agaaaaagttcgagtggtctgggtagaagatcaaaccagccacaacattcccttaagccaaagcctaaaccaaagcaaggccctgactctcttcaattctrtaaaggctgaaagagatgagaaagatgcagaagaaaagtttgaagctagcagaggctggttcatcaggtttaaggaaagaagctgtctttctaacataaa

SEQ ID NO: 545097 - DNA, 201 bp, Homo sapiens
tcccgcctcagcctctgagtaactgagactacaggcttatgccacacatggctggcatacaaatttcgctaacgtgcacacatgtgcatgagtcatacaawttatgaaaactcttctgccataggaaaaaaatacatatgaaaactcaaaaaaaaaaaagaccatacagttaatacttttataccatctttttttattttt

SEQ ID NO: 545098 - DNA, 201 bp, Homo sapiens
gtttttgaataaggagaaccaaagtaaatacaaccacagctatccagagaggaacttttcataaatctttgaactgtatagccaaaaactaatcaaatctrtgctgaataagcggccttgagcacttaacaacaaattagcataacccagaagacagtgtgcatcccaagcaccataacctacccttcaccctcctccctg

SEQ ID NO: 545099 - DNA, 201 bp, Homo sapiens
ttttttcctacattgtagctgcctgtagcctttgatccctgtaggtccatctctgtccctgtccctgtccctaaaaggaaggtacttccttccctcattgwccccaaagggctcactggctgaccatgaagcaacctgctccaccaagctgcctccagctttgtcctctgactatggatctgtgtggctgcttttgtgtct

SEQ ID NO: 545100 - DNA, 201 bp, Homo sapiens
cattgcataagaaggcagttcttaaagacaatggtctaattagcagtctttgaagccaattcaatagtaatatcaaagccacttctagtatttcaagcccraatttagaaaatggccttgatattttcagtctaaaactatagtctgaccttactattaattttagaacacaccataatgtagacaactgctgaaatcact

SEQ ID NO: 545101 - DNA, 201 bp, Homo sapiens
agaggataagctcttcccaaaagcatagacttctaagctgggtttagtgtgcttctcaagaatgagaagacaaggatcagcaaactcagggagataagacmagagccagaaaactagaaacaaaaattgttcaggaacattcagaaaattaaaaagttatttttgagagaaaagagaggaaaggtgagtaaagaagcatcc

SEQ ID NO: 545102 - DNA, 201 bp, Homo sapiens
agcatagacttctaagctgggtttagtgtgcttctcaagaatgagaagacaaggatcagcaaactcagggagataagacaagagccagaaaactagaaacmaaaattgttcaggaacattcagaaaattaaaaagttatttttgagagaaaagagaggaaaggtgagtaaagaagcatccatgagggatgtggaagttgtc

SEQ ID NO: 545103 - DNA, 201 bp, Homo sapiens
gaaactggaccccttccttacacgttatacaaaaattaactcaagatggattaaagacttaaatgtaatagcaaaaaccataaaaaccctagaaaaaaacytaggcaataccattcaggacataggcatgggcaaagatttcatgacataaatgccgaaaggaattgcaacaaatgtcaaaattgacaaatgggatctaat

SEQ ID NO: 545104 - DNA, 201 bp, Homo sapiens
gagtgcagtggcgcgatctcggcttactgcaagctccgcctcccgggttcacgccattctcctgcctcagcctcccaagtagctgggactacaggtgcccrccatcacgcccagctaatttttttgtatttttagtagagacaggggtttcaccatgttagccaggatggtcttgatctcctgactccatgatctgcccac

SEQ ID NO: 545105 - DNA, 201 bp, Homo sapiens
ctgaagagcttctgcacagcaaaagaaattatcatcagagtcaacagacaacctacagaatgggagaaaatttttgcaatctacccatctgacaaaggtckaatatccagaatttacagggaatctaaacaaatttccaagaaaaaaaacaaccccatcaaaaagggggcaaaggatatgaacagacacttctcaaaagaa

SEQ ID NO: 545106 - DNA, 201 bp, Homo sapiens
ctacaggtgcccgccatcacgcccagctaatttttttgtatttttagtagagacaggggtttcaccatgttagccaggatggtcttgatctcctgactccrtgatctgcccacctcagcctcccaaagtgctgggattacaggcgtgagccagcacgcccggcctccaaattttcaatggctaagcattgagggttaaaga

SEQ ID NO: 545107 - DNA, 201 bp, Homo sapiens
ttggtgagaaagtaaattagttcaaccattgtgatagactggataaagaaaaggtggtacatatacactgtggaaaactacagagccataaaaaaatgagrtcatgtccttcacagggacatggatgaagctggaagccatcatcctcagcaaaccaacacaaaacagaaaaccaaacactgcatgttcttactcataagt

SEQ ID NO: 545108 - DNA, 201 bp, Homo sapiens
acaggggtttcaccatgttagccaggatggtcttgatctcctgactccatgatctgcccacctcagcctcccaaagtgctgggattacaggcgtgagccascacgcccggcctccaaattttcaatggctaagcattgagggttaaagaacagaacatgtctgacaacagaatagattaggtaaaatcatgactttctcag

SEQ ID NO: 545109 - DNA, 201 bp, Homo sapiens
ttacaataaactgcattatttgggcactctacagttcatatcacactttcgtgtggattagctcactctgctacctggaacaccttttcctcactgggccktctaaggcactgtaaagaatagtagtgcgtacagatatacaacgtggttcaactacgattgctaagctcatagacttttctcccacagttaccatttagt

SEQ ID NO: 545110 - DNA, 201 bp, Homo sapiens
aaagggccattaaaggtgataatgtataaaactgtccttccttctgccattcccctcttgactttttctactagtttttatttgatatttcatgttattcyaagtaaataaaaaacaaaaatataaacttagcacaaattttaccattcactttgtattgtgcaatgcaactataagaatagttgctttgcatgcacaatc

SEQ ID NO: 545111 - DNA, 201 bp, Homo sapiens
ttagcagtgggcgagtcagactcaagcatttaacatcatggaagacaacaaagagtactttgcgactagctcaaaacagaatgatattatgtttttttttaaaaaaaaactctgattatttcagataatggtgtgcgttgacattgcaaaatattgtaattaaggaacaggcttagtagagcactttaaattgcacagctt

SEQ ID NO: 545112 - DNA, 201 bp, Homo sapiens
tgactccatgatctgcccacctcagcctcccaaagtgctgggattacaggcgtgagccagcacgcccggcctccaaattttcaatggctaagcattgaggrttaaagaacagaacatgtctgacaacagaatagattaggtaaaatcatgactttctcagaaagctgagactctgtgatcactgtactcacctgtacccct

SEQ ID NO: 545113 - DNA, 201 bp, Homo sapiens
aaactgtccttccttctgccattcccctcttgactttttctactagtttttatttgatatttcatgttattccaagtaaataaaaaacaaaaatataaacttagcacaaattttaccattcactttgtattgtgcaatgcaactataagaatagttgctttgcatgcacaatcagcaaaaattaggtatttcatagatcgt

SEQ ID NO: 545114 - DNA, 201 bp, Homo sapiens
agctcactacaacctccaccttccaggttcaagtgatttgtgcctcagccttctgagtagctggggttacaggtgcccaccaccacacagggctaactttygtatttttaatagagacaggatttcaccatgttggccaggctggtctcgaactcctgacctcaagtgatccacccaccttggccaaagtgctgggattgc

SEQ ID NO: 545115 - DNA, 201 bp, Homo sapiens
accactgcaaaggccttaatggaaagccctgttagagggcacattatggagtgggtcagatggaggtggggatgggtggcatggatgagtcagctggaggrtgaggccgctggagtggatgaagtgagcaaaggtgataggaatgcgggaaacaaaactgtagggtaccactgcagtagcttattagcaacagatctttgg

SEQ ID NO: 545116 - DNA, 201 bp, Homo sapiens
aactgtccttccttctgccattcccctcttgactttttctactagtttttatttgatatttcatgttattccaagtaaataaaaaacaaaaatataaacttagcacaaattttaccattcactttgtattgtgcaatgcaactataagaatagttgctttgcatgcacaatcagcaaaaattaggtatttcatagatcgta

SEQ ID NO: 545117 - DNA, 201 bp, Homo sapiens
ggccgctggagtggatgaagtgagcaaaggtgataggaatgcgggaaacaaaactgtagggtaccactgcagtagcttattagcaacagatctttggagaygaaaattcagactctgaggccagagggccccaagttagaatccaaacacttccacccaaagctgtgccatcaaacagatgttgctggatctgagtgtcag

SEQ ID NO: 545118 - DNA, 201 bp, Homo sapiens
cttggatagtcatgcattgaacagtacttaggtgaatatgctattgggacccgtgcagatctcagaccttcactctgtgcagttctctcctcttccatacrctgccatgcaaattccagctgccttgtcctcctcgtacccctagcaatgtctcattagtcagggagactgccgactccccatggggaccactccctggaa

SEQ ID NO: 545119 - DNA, 201 bp, Homo sapiens
gcatgcagggctgggggcatgacagctgattgtgcagcctgcctttctgccaatgaaatactagcgtaatgattggaaaaggggtgaatttccaagggcaraagtttcccttggaggtctcaggactagaacccgggcttctgtgtgagctacagccacatcgtaggtttcttggcactgaacgtgctgttttgtggccct

SEQ ID NO: 545120 - DNA, 201 bp, Homo sapiens
gaggcggaggtcgcagtgagctgagatcgcaccactgcactccagcctgggcaacagagtgagactccctctcaaaagaaaaaaaaaaggctgggtacagkggctcactcctgtaatcccagcactttgggaggccgaggcaggctgatcacctgaggtcaggagtttgagaccagcgtggccaacatggtgaaaccccgt

SEQ ID NO: 545121 - DNA, 201 bp, Homo sapiens
gttgatttctaaagtatctgactccaggccctggctcctggattgtgtccctagacctccccaggacaaaggggaacttgccatcctgaagggtaggataygagcctagctggctttgctgcctcctgattgtagagccctagggccttgagcaaatatacgtggtagccaggcagtggttagtgcgggccttgggtgaga

SEQ ID NO: 545122 - DNA, 201 bp, Homo sapiens
ggatagcttcagcccaggaattcaaggctgcagtgagccatgattgcaccactgcactccaggctgagtgacagtgcaagacctcaactctaaaaaaaaaraaaaaaaagtaaaaaaagaaaagaaattgccacaaccacaccaaccttcagcaaccaccaccctgatcatcagcagccaccaacattgaggtaagaccct

SEQ ID NO: 545123 - DNA, 201 bp, Homo sapiens
gctgagatcgcaccactgcactccagcctgggcaacagagtgagactccctctcaaaagaaaaaaaaaaggctgggtacagtggctcactcctgtaatccsagcactttgggaggccgaggcaggctgatcacctgaggtcaggagtttgagaccagcgtggccaacatggtgaaaccccgtctctactaaaaataaaaaa

SEQ ID NO: 545124 - DNA, 201 bp, Homo sapiens
ttgatttctaaagtatctgactccaggccctggctcctggattgtgtccctagacctccccaggacaaaggggaacttgccatcctgaagggtaggatacragcctagctggctttgctgcctcctgattgtagagccctagggccttgagcaaatatacgtggtagccaggcagtggttagtgcgggccttgggtgagac

SEQ ID NO: 545125 - DNA, 201 bp, Homo sapiens
ctaacaatgcaaccccaaaatacaacaacagcaattgacagaactgaagggagaaatggataattcaacaataataaatgtttcagcaccctactttccayaatgaatagaattactagacagtagataaacaaggaaatcaaaaactcgaacagtataaactaacaagatctaacagacatctatagaatcctccaccca

SEQ ID NO: 545126 - DNA, 201 bp, Homo sapiens
aactgaaaaaaatcatgtgactttctttattgctgtggtccagaaccaaacccgcactatctccaaggtatgcctgtaaaaagatagacagacagacagayagatagatagatagatagatagatagatagatagatagatagatgatagacagatagatagatagatagacagacagacagacagacagacagacagata

SEQ ID NO: 545127 - DNA, 201 bp, Homo sapiens
ggccagaagcaggaatgaatataaaattttgagtaattaaaagaaggctagagtgactggaacacagagatggaggggaggggagggaaggtgggaaaaaraaagaagggatgggagtgatccaagacaaaactagaagtaataccggctcaggtagcccagaatgttgtaagccacattaaggattttgacagttttgcg

SEQ ID NO: 545128 - DNA, 201 bp, Homo sapiens
tagtaatatcaaagccacttctagtatttcaagcccaaatttagaaaatggccttgatattttcagtctaaaactatagtctgaccttactattaattttrgaacacaccataatgtagacaactgctgaaatcacttgatgttatgaacccggaaatcacaccctcttaaacgatacatcacacccattaaaattaactg

SEQ ID NO: 545129 - DNA, 201 bp, Homo sapiens
tatttctattgggaatacctgtttctgcaaaaagaaactgtatgtatgaagtgtggtaaatgcatacattttcaaaaacgcatacaaaacacagacatgtktgtatttttaaaaagtttcttgggactgctgaacatatgaaaagctgcttgcattctctactgaatttggcaaacaagctgcaaaagaatggtcaaaaaa

SEQ ID NO: 545130 - DNA, 201 bp, Homo sapiens
aaatcaaaaactcgaacagtataaactaacaagatctaacagacatctatagaatcctccacccaacagcaacagaatattcttctgaagtacacatgaarcattttccaaggtagaccatataggagtccatagacaagcctcaataaattcaaagaaattaaaataataaaaaattattttttcttaccacaacagaat

SEQ ID NO: 545131 - DNA, 201 bp, Homo sapiens
agagaaattcccgggaagtcaaaaagtgttcattggtgattgcacgtcttttgaaatcgcatcagaggtctccattttctaacctcttctcttgaaaatgaatatatgtttccagtctcccacaggatgtataattttgcatgattgttagtagctattggcaccatttatctctctagtcatccactgttccattttgta

SEQ ID NO: 545132 - DNA, 201 bp, Homo sapiens
ctttaaccgacatgtgtgcttaagtgaaggcagaaggaaacctggtacacttctgctgagtacagtgtttcttaaacatgcacctgttaagagatagagargcaaatttaatttcctttttagccttctatatcccattgttgattttatacatgccctccttaaatatgaactcctaaaattgtgtttggaacacatatt

SEQ ID NO: 545133 - DNA, 201 bp, Homo sapiens
tgcatacattttcaaaaacgcatacaaaacacagacatgtgtgtatttttaaaaagtttcttgggactgctgaacatatgaaaagctgcttgcattctctmctgaatttggcaaacaagctgcaaaagaatggtcaaaaaaaggagaaggggtgaagaatgaagctaaaatctaattcagaaaatcttcattactacagtg

SEQ ID NO: 545134 - DNA, 201 bp, Homo sapiens
atcttcaacaaaacactagcaaactgaatcaagcaacatagaaaaaggattattcaccttgacctaatgggatttatttcagaaatgtgaggttggttcarcattcaaaactcaaataatgtaatacatcatatcaatacaacagaaaaaaactcagaagatcatcttaatagacacagaaaaagtatatgacgaaattct

SEQ ID NO: 545135 - DNA, 201 bp, Homo sapiens
gaaagcccatctctactaaaaatacaaaaattagccaggtgtggtgcgcgcctgtaatcccagctactcgggaggctgtggcaggagaatcactggaaccrgggaggtgggaggttgcagtgagccgagatcgccccattgcactccggcctggacaacagagcgagactccatctcaaaaaaaaaaaaaaaaaaaaggaa

SEQ ID NO: 545136 - DNA, 201 bp, Homo sapiens
gtctaaaaatatataccataaagtttcacagtaattacataaatgttgggtttttttttttttttttttcaaaacagttttgcttttggttgatttgcctkggggaatattgctcactggggtcctcatgcatcagtttagaaataaagacttaaattcttttactttaattaatcaactctaattttcacatttgattat

SEQ ID NO: 545137 - DNA, 201 bp, Homo sapiens
gaatgagactctgctcgtccccttagttatttgttaatatcttcactatttctcatgaaaatcttggaatttgtgtaaggcctgtctttaaatattgacawagataattggtagcaacataagtgctgcataaaatagcattttgtcattcataattttattttaagatacttcgtggtgatacctctgagttgatgtata

SEQ ID NO: 545138 - DNA, 201 bp, Homo sapiens
tgtcaaccctgtatccagaacatatcctaaattccccccgagcctacaaagctcatgatttggcatctccttacagctctaacctcacctctagtctgcaratccacattggcctcatttggttccattgccctaccttagggaacatttattcttttatttgcctggaatttgcttcctctagatcttcacttggctgct

SEQ ID NO: 545139 - DNA, 201 bp, Homo sapiens
ctcccttacccttgagaaatgttataaataagggcgttttttatgatcaggagaaaaaggatgtgccacaccaactatattgatgaagtcatttcttcatyatgttaattatattatctaaatttgaatacaccttcccctttgtcatatctttactatgagtcctagtgttgcttcagggttctcttggtgttagtttag

SEQ ID NO: 545140 - DNA, 201 bp, Homo sapiens
agtgagaaagggaagatttgcaaggggcatatactgaagaatcaaacagtcactagctagaccacattagggtgtagcctgcaaggaacccagggagcctygcacaatctgccactggcatgtgtctgttaaagaggagctcgacccacctctatgccttcagtgacaagttcagaaagatggatggaactgccaatcctg

SEQ ID NO: 545141 - DNA, 201 bp, Homo sapiens
tgttgatcagctttgaaataactggaattagatataaaggaatcccaccatttctctccttagaagagaaaacttactcagaattcaagtggtatgtatargaatcatgcatgtattcacgcgcatgcaagactaaatggtgatatatttagaaagttgcctgtgtacaagacatgtgactcttaagtcatgagactcaga

SEQ ID NO: 545142 - DNA, 201 bp, Homo sapiens
gggaacccacaaaacaaatccacttatcaacagtgaattcataccttaaaacaaaggtaccaagaacatatattggagatagaacagtctcttcaataaayggtgctgggaaaactggatatccatatgcagaagaataaaacaagacccctacctcttggcatatacaaagactggattaagaaaatgtggcacatatac

SEQ ID NO: 545143 - DNA, 201 bp, Homo sapiens
gatagcattaggagatatacctaatgttaaatgacgagttaatgggtgcagcacaccaacatggcacatgtatacatatgtaactaacctgcacgttgtgyacatgtaccctaaaacttaaagtataataaaaaaaaccacatcaaaattgaataaaaactgaaatataagacctcaaactataaagctactgcgaaaagc

SEQ ID NO: 545144 - DNA, 201 bp, Homo sapiens
cctagattcaggcccccaccattttttttagaccgaatcttgctctgtggcctaggctggagtgcagtggcacgatctcagctcactgcaacctcctcccyccaggttcaagcaattctgctacctcagtctcccaagtggctgggattacaggcatgcaccaccacacccggctaatttttgtatttttagtacagatga

SEQ ID NO: 545145 - DNA, 201 bp, Homo sapiens
aatgacgagttaatgggtgcagcacaccaacatggcacatgtatacatatgtaactaacctgcacgttgtgtacatgtaccctaaaacttaaagtataataaaaaaaaccacatcaaaattgaataaaaactgaaatataagacctcaaactataaagctactgcgaaaagcttggggaaactctctagaatattgggctg

SEQ ID NO: 545146 - DNA, 201 bp, Homo sapiens
cattggacaaggaattaataacaagaatatataaggagctcaagcaaatctataggaaaatatctaataatgcaatttaaaaatatgcaaaatatctgaayagacacttcttaaaacaagacatacaaataccaaacagatatatgagaaggtgctcaccatcattgatcattagagaaatgcaaatcaaagctataatga

SEQ ID NO: 545147 - DNA, 201 bp, Homo sapiens
tggcacgatctcagctcactgcaacctcctccccccaggttcaagcaattctgctacctcagtctcccaagtggctgggattacaggcatgcaccaccacrcccggctaatttttgtatttttagtacagatgaggtttcaccatgttgaccaggctcgtctcaaactcctgacctcaggtgatccacccgcctgggcctc

SEQ ID NO: 545148 - DNA, 201 bp, Homo sapiens
cacttggtgtgattgtaacttccttccctccttagcaaagcaatgactcagtcatttacatttagaaaggaaggctcctaagaagatttcttggattttcwtcagcttgagcctcttttcttgaccatcacgtgggcctgatctgtcggcaatcctgttaacccagggtgaggggagtctagccgggctgcttttctcact

SEQ ID NO: 545149 - DNA, 201 bp, Homo sapiens
aaactgcttttatccaaaagacagataataacaaatgctggtgaggatgtggggaaaagggaaaccagtgctggagggaatgtacattcgtacaaccactrtggagaacagtttggaggttcttcaaaaaactgaaaatagagctatcatacaatcccacaatctcactgctaggtatatatccaaaagaaaataaatcag

SEQ ID NO: 545150 - DNA, 201 bp, Homo sapiens
ggtgcagcacaccaacatggcacaggtatacatatgtaacaaacctgcatgttgtgcacatgtaccctagaacttaaagtataataataaaaaataataakaagaataataataaaagaaaatgtggtaggtatacattatggaatactattcagccgtaaaaaaaaaaaaaaaaaagaatcagattctctcatttacaac

SEQ ID NO: 545151 - DNA, 201 bp, Homo sapiens
aagtataataataaaaaataataagaagaataataataaaagaaaatgtggtaggtatacattatggaatactattcagccgtaaaaaaaaaaaaaaaaaagaatcagattctctcatttacaacaacatggatagaactggaggtcattgtgttaagtgaaataagccaagcacagaaacacaaacttcacatattctca

SEQ ID NO: 545152 - DNA, 201 bp, Homo sapiens
agtcatgacccttaccttccaccccaagcttagggaaactgattgaggagctctaatccagggagatgcaaccaagaaaatgagactcttcccaccaccaccccagctccccagctccccagctccccagcctggggctacagtttcaccatgggaggaatgggctgacagagtttctcatcttccagccccattttacag

SEQ ID NO: 545153 - DNA, 201 bp, Homo sapiens
gtcatgacccttaccttccaccccaagcttagggaaactgattgaggagctctaatccagggagatgcaaccaagaaaatgagactcttcccaccaccaccccagctccccagctccccagctccccagcctggggctacagtttcaccatgggaggaatgggctgacagagtttctcatcttccagccccattttacaga

SEQ ID NO: 545154 - DNA, 201 bp, Homo sapiens
ggccaaagtgctgggattgcaggcatgagccaccacccacctaagccactggcccacatttttaatatttatccctgtttctgtttgctattaggttcatygctgcacaattttcaataatacacttctgccacctcttccctgtctattcccttactgttggtgaactagtcctcctccagtttcatcctctatcaagtt

SEQ ID NO: 545155 - DNA, 201 bp, Homo sapiens
tcagtagtgtcccaatcaacaaaaagatatccaagactctctatgagctgagtacatttccaccttcatctcccatcactctctgtttagaacttaatatytctgattattatacaatgcctcttccattcatgtattcattcatttattcatcagatactacacaacaccttttaatgaccatactcttgataggggagt

SEQ ID NO: 545156 - DNA, 201 bp, Homo sapiens
atcaacaaaaagatatccaagactctctatgagctgagtacatttccaccttcatctcccatcactctctgtttagaacttaatatctctgattattatayaatgcctcttccattcatgtattcattcatttattcatcagatactacacaacaccttttaatgaccatactcttgataggggagtgaatttgatagtga

SEQ ID NO: 545157 - DNA, 201 bp, Homo sapiens
ctcctgccatggcccccttttcactctcagagtaaaagctgaaaagccatgagccatccttgatccactccttcttccacttccccacagcaccccaccascccaccatgtttaatgttacaaattcataacagctcatctttgctcataagcttgtctaagtactgaattgctggacatatatcttttaatatacatata

SEQ ID NO: 545158 - DNA, 201 bp, Homo sapiens
ttttttaacttcctagctacctgtacagaatctaggccagatgtattttatatatttaatcttcattgttgttgttaatctggaacggcatattgggcacrtgccatttttataaatctgtggacccaaatattgtacataaggtaggttaggtatgaaattatggaagtaaatggcatagtgttagcttttcttagcata

SEQ ID NO: 545159 - DNA, 201 bp, Homo sapiens
tttcatttgcaagcatggtataggaagagcacaggatcagattagatgaccccagggtcctgagtgcagcagtgggacactggggaaccacccctggggcytgacctgccggtgtctccacgtgcttggtttctcctcagtttgggagctttgttggtttccatcacttgttcaaccaagaattcatttccgacctgagct

SEQ ID NO: 545160 - DNA, 201 bp, Homo sapiens
ggaagaagcgcaggccaaattatgggtgggttagcaagtccaccactgcaggcaatgggaacttggttcctcccaggaggggtacagatgcccaaatttcygttagaaagatgtgcagcaggaggtttactgactgactttttctccttggttttggatttccccaaggagcatgaattccctcacaatgctgggctgtgc

SEQ ID NO: 545161 - DNA, 201 bp, Homo sapiens
agtgatccgcccacctccacctcccaaagtagtgggatgataggcatgagctaccacatccagctttcttttctttgcttttttttttttttttaacaggktcttgctctgtcacccagcagggtggagtgcagtggtgtgatctcggctcactgaagccttgaccccccacattcaagtgatcctcccacctcagcctcc

SEQ ID NO: 545162 - DNA, 201 bp, Homo sapiens
tcagttaatctctcctaggtctggataggcggagggcctcagaaaaagcctagctgtttatttcattgctgcagattttctctgcagatgtacgtctcctycacaaatggcaacttggcagggctattcctgcctgtgggccctctgaacagccatctcaaaaatatgccaaagaagtatattttgaggtaaaatagtttt

SEQ ID NO: 545163 - DNA, 201 bp, Homo sapiens
ggacaaggaattaataacaagaatatataaggagctcaagcaaatctataggaaaatatctaataatgcaatttaaaaatatgcaaaatatctgaatagayacttcttaaaacaagacatacaaataccaaacagatatatgagaaggtgctcaccatcattgatcattagagaaatgcaaatcaaagctataatgagata

SEQ ID NO: 545164 - DNA, 201 bp, Homo sapiens
gacaagtttcattctatgacgcaccacgatttcccaccctctccttcatgatgaaggaaagatagaggagctgcctgatgtggcccaatacaatttttaawgaaaagacaatgctgagatactgcattaccatagtgtagtccggacagccatatgcttgcccaaactattatatgtgtgtgtaatacttgaatttagatt

SEQ ID NO: 545165 - DNA, 201 bp, Homo sapiens
agattctgggaatcaacctctggcctattctattaatatttatcagccagttgttaagactccttctaactttgcccaaccttggttcctgtttccaacaytctcgtgaacatctcagttcaggcctcatggctacctggaaggggtcacacatcctgcagcctgaactgcagccaggcccctccttgtctcagtgggttc

SEQ ID NO: 545166 - DNA, 201 bp, Homo sapiens
tttaatacagtgttgttgggaaataatggctaaatgcatatggaattatggaggcacttgggggaagaagcacctattctggaacaagggggaagccatcsttttcaaatgctgcccctattaggaggaattggggaaatgaaaatgtaaaggtacaggaaaggaagaggctcagcaccaactggaaatgtcatggtctgt

SEQ ID NO: 545167 - DNA, 201 bp, Homo sapiens
ttggtctgtcttcgttacacaatgctaagatgatgttcaaaagttttatcaatttcccctctacatagttcttacttactaacacttgagaaaatgatagyatctcaacaccaagtgcctgaatcagctttttagttgttctcaataagtttctgctgagatttgctggtcccgttgctccaatgtatccttgaaggatac

SEQ ID NO: 545168 - DNA, 201 bp, Homo sapiens
gatggaacttcattccataagaaatctcagataataacttttaaagccttaagcccagccataggtttgtgccatcaaatacatgtatgagttgggtaagyttctctcctcaaggtcccaagataacttggagctcctgggcctgtcagaaagtgacattctttacttaccacaaatcaggtaccctgtacacggactgtg

SEQ ID NO: 545169 - DNA, 201 bp, Homo sapiens
acaccactgcactccagccctggcaacagagcgagaccctgtctctttaaaaaaaaaaaaaaaattggctgggaatggtggctcacgcctgtaatcccaamattttgggaggccgaggtgggcggatcacaaggtcaagagatcgagaccatcctggcccacatggtgaaactacatctctactaaaaataccaaaattag

SEQ ID NO: 545170 - DNA, 201 bp, Homo sapiens
tgacccttaccttccaccccaagcttagggaaactgattgaggagctctaatccagggagatgcaaccaagaaaatgagactcttcccaccaccaccccagctccccagctccccagctccccagcctggggctacagtttcaccatgggaggaatgggctgacagagtttctcatcttccagccccattttacagaaatt

SEQ ID NO: 545171 - DNA, 201 bp, Homo sapiens
gacccttaccttccaccccaagcttagggaaactgattgaggagctctaatccagggagatgcaaccaagaaaatgagactcttcccaccaccaccccagctccccagctccccagctccccagcctggggctacagtttcaccatgggaggaatgggctgacagagtttctcatcttccagccccattttacagaaattc

SEQ ID NO: 545172 - DNA, 201 bp, Homo sapiens
aatgcctcttccattcatgtattcattcatttattcatcagatactacacaacaccttttaatgaccatactcttgataggggagtgaatttgatagtgartataactggtgccacccttcagggagctaacaggccagggaaggactcagacaatgaattgactttttaaaattacgattcatgagagaggacgtggagc

SEQ ID NO: 545173 - DNA, 201 bp, Homo sapiens
acccttaccttccaccccaagcttagggaaactgattgaggagctctaatccagggagatgcaaccaagaaaatgagactcttcccaccaccaccccagctccccagctccccagctccccagcctggggctacagtttcaccatgggaggaatgggctgacagagtttctcatcttccagccccattttacagaaattcc

SEQ ID NO: 545174 - DNA, 201 bp, Homo sapiens
aatccacagaaagaaatgaattgtaaacagtatataataaggttaatacagcaaactatataaatacgtacttcctcttctttcttttctcagttttgttaaaaaaaaaaaaacataagattatgtaaaattataacaatgtattttttggtttgtaacatatttagctcaatatacacaacattaatagtacccaaaaga

SEQ ID NO: 545175 - DNA, 201 bp, Homo sapiens
taggggagtgaatttgatagtgagtataactggtgccacccttcagggagctaacaggccagggaaggactcagacaatgaattgactttttaaaattacrattcatgagagaggacgtggagcattccatgggaacaaatggaaggtgtaattcacccattctgtgtggttaggggaagtttctaaggatgtgaatttta

SEQ ID NO: 545176 - DNA, 201 bp, Homo sapiens
cagatattgaatattttgtgtccttgctttggcttttctattatttctgctatgccttatcttccaagagggcaagaactgtgtctttcttatacactatwatattcactccacctaacatagatcttggcaccaatttgtaccccccaaaattttgtatgatgaattaacctttataaatgatagttaaaattcaaacac

SEQ ID NO: 545177 - DNA, 201 bp, Homo sapiens
cagcctccacgtgtagggaggggcttagccacccctaaaactcacagctgtgtggaaaagatcaacagtactggggtctcattagcaagcaggatagagaraatggttatgaggaggcaaacaaccatgtttgccactggcgtaaaggcatgcaaaaggatggtatgttctggaaatgataagcagccagataagaaattg

SEQ ID NO: 545178 - DNA, 201 bp, Homo sapiens
gctacatgcgagccatgagcaccatcagccaggtgagggccgtcagggcagcggtggtcaggagccattagtggcaggaaggttagtgagaattgagaggscatgaggtggggaggcagtcattcatccagtagaccattgatggatcagacaggaggtccagtcaagtgctgcaaagagcatgccatgggttcagccgca

SEQ ID NO: 545179 - DNA, 201 bp, Homo sapiens
tcctgcctcagtctcccgagtagctgggactacatccacgcgctaccacgcccggctaatttttgtatttttagtagagacggggtttcaccatgttggcyaggctggtctcaaactcctgacctcaggtgatctgcccgtctcggcttcccaaagtgctgggattacaggtgtgaaccactgcgcccagacaagattctt

SEQ ID NO: 545180 - DNA, 201 bp, Homo sapiens
cctgcctcagtctcccgagtagctgggactacatccacgcgctaccacgcccggctaatttttgtatttttagtagagacggggtttcaccatgttggccrggctggtctcaaactcctgacctcaggtgatctgcccgtctcggcttcccaaagtgctgggattacaggtgtgaaccactgcgcccagacaagattctta

SEQ ID NO: 545181 - DNA, 201 bp, Homo sapiens
catcatatatatttttttaatctcaagcaaaaattcccagatctttttgagaatcaatatcctaaggtaatatcttctactgtcttgtaccaaagaaagakcaaagtgttgcccatgacctgttaatacacggcgaagggatcctttactgtatgtgactcagagtccaagaacctggtcaatcatgttagcatcctgcat

SEQ ID NO: 545182 - DNA, 201 bp, Homo sapiens
gaggagcaggaatagcatgtgctttaagtcttacagacctcagttgaagtcctagcttagctgcctactagttgtgccctgtgggcaagttatttaacttycatgaacctcagtttcttcatctgtgaaaagggaagaaaccatgtcacacttgcaagcatgagaaggagcatatatcaagttttcagcacatacatgtaa

SEQ ID NO: 545183 - DNA, 201 bp, Homo sapiens
tctacagctaaagcccatgtaaaacatagccaatgaatgggcattcatctgtgtttcatggcacatcaaaatgtattttaaatgccttttcctatggccamctccagtcttttttgccttaattatggcatcaaggtgactattaggagtttgcagtagccagtgatgtgggggtaaggcaggagcaatattcaggacatg

SEQ ID NO: 545184 - DNA, 201 bp, Homo sapiens
cagagagatctcatgcaccttatacccagttttccccccccacccaccgtggtaacatttcaaaaaactgtagaacaatatcacaaagaggatattgacaytggtagtcaagatacaaacatttccatcattgcatgggtccctcatgttgcccttttatagccacacccacttccctcccaaccccaccactttctttac

SEQ ID NO: 545185 - DNA, 201 bp, Homo sapiens
tttttgagtatttcaactcataaacatgctatgtgtctccatttattaaaatcatctttgatttatttcatcagtgccatgtacttttcagctcaccagayccgaacatattttgttagatttacacctaagtattttattttctaagcagttgtaaatggtattggatttttaatttctgcgtccaggtgttcattacta

SEQ ID NO: 545186 - DNA, 201 bp, Homo sapiens
aacacgtattaagtaatgtagtatcctgctttatagtatatttgtttatacatgttcttgttcccctcaaaaggatttacatttgatataaacaaattaartatatttaaatatgaggcctatgatctcctttaattttactaaattaaaacaggagagtatatacctcaaatgcgtgatagctgtatccgtttcaatgac

SEQ ID NO: 545187 - DNA, 201 bp, Homo sapiens
gtattttgccacaatgaagggggagcacgagaaagacagagagacagacagatgtttattacgcagtaaattcacacaattccataaggtggatattgttrgctctgttttaaagaggaagctgtggcttgcacagtgtcacggacccaaccaaaactcagactgatgaaccagtgttcaacgaattgaagagccaaatcc

SEQ ID NO: 545188 - DNA, 201 bp, Homo sapiens
tactgctcccaaaaaaagaaactaattcccctgggcctgactgtactctagatatcaggtaaaaggtgtcgccacttgcctcctgtcacccaggagcagarctcggcaggtctgacctctcaactgcttcctcttggattggccctgtgtcgcccctcctgtcttccttccgcagttccctgattttctccaggccctcat

SEQ ID NO: 545189 - DNA, 201 bp, Homo sapiens
aatttcacatctccaggttaagaaggacatgcagaactgacttcaatataatccatgttaagcttataaatagatgtgcaagcaagcaaccataagagggyagaaaaagaagagactcatttggagcgcaggcattagggagagcttcagacagaaagtggctttgagttagaccctgagtctataaataaaaatagtctg

SEQ ID NO: 545190 - DNA, 201 bp, Homo sapiens
tgacataatccaccagtgaaacgatctgagcctgaactattatttatggaaagatttttatttaaaaattaaatttatttagctgttggagatctattcarattttttatttcttcttgaggcagttttggtaatttgggggtttttttagaatttttttctattttgtctcagttgctgacttcagtattctcttacaat

SEQ ID NO: 545191 - DNA, 201 bp, Homo sapiens
acaacatatgttactggcataatggaaatagatcaaaatgagttcccaactccacctatggctcagactccagcattaaattagtcaagtcattgggcttygcattggttcaaagagtgttttaatgtgtgtaaaagaaaaacagatcataattacatttgctgtttcctattatttcatgcaaatttatggtatttcaag

SEQ ID NO: 545192 - DNA, 201 bp, Homo sapiens
gtgttttaatgtgtgtaaaagaaaaacagatcataattacatttgctgtttcctattatttcatgcaaatttatggtatttcaagtatattgtgtatcaartttgcttttatgagctggtctggaaacaattacaatttataatattttttctatggaaattattttagatgttccaaacacaaaatttacaagtgaactt

SEQ ID NO: 545193 - DNA, 201 bp, Homo sapiens
cacagaaaagcttaacgagtttctgtgacactggaacctgcataataatatagccgtgggctatatatgacaatgtgtgcatatgaaacatatatataccrtgggctatatatgacaatgcgtgcatatgaaacatgtatatatatatatatatatatatatataacatttgcgttccaaaaagaaaatcccactgtctaa

SEQ ID NO: 545194 - DNA, 201 bp, Homo sapiens
acatcacaaaaaagccaccagacatatgcttctgtatggaggtacacaccaccacctgtggggtattttggccaaaaattgaacctcagtctgatgatgtmcctgggtctactgtattcagtactaatcccatgtggctactgagcatttgaaatgtggataggccaaattgagatgttctgtacacgtaaaatacacacc

SEQ ID NO: 545195 - DNA, 201 bp, Homo sapiens
tccaggttctggactacctcacctcctggtttcccttctgcttcactggccacttctcttagaaaacctggctttctcctcctcctcctcctctcttggayctcagaacattgaatgccccaagcagctcttttcctgatgaccttctcctctattcctagatgatctcatttagtcccaaggtttcagataacatcaaca

SEQ ID NO: 545196 - DNA, 201 bp, Homo sapiens
aattttaaataataatctacagaggttttcggctctttttgttattttcagatggagacatcacaaatgtctgggtcaatatctagcctagagtgcacacytacagagcaagcatcttcttcatactacatactgaagtcctctatggatgtagcattatactaaataatcagctgtatttctttatattataaataattt

SEQ ID NO: 545197 - DNA, 201 bp, Homo sapiens
tgcagccaaacaggagagtctgagggcaggtggaactaagagacaactgggacctagccagccaggcccttcttgacaaaggagaagggaggagacgtgcrgagttaggaatgaagcatttaagtatatgtggtgtcctcgttcattcatgggttcatttgttcagctggtacttaaccttgctgtgtaccaggcactgtg

SEQ ID NO: 545198 - DNA, 201 bp, Homo sapiens
aacacagtatctttaaggataatttcaaacgtcctgttgtagttgcaacattgtcattattcaaaggagaatagtttcctcttcaaagcaatgctactgtrtataccctagacttttcaaaaagaggttggcttttaagatgttagagctattttctcaaatagatcattagtagaagctataatactatagaatttaagt

SEQ ID NO: 545199 - DNA, 201 bp, Homo sapiens
ggtagatgtccgtatattcttgctcactaggaaattctccaagaacaaccacaggttaataaattaaatgagagttatttatgaagagaaaaatatatatwtttttgaaaaatcaaccatgagcatgtttgtatgtgtttgcattcatgcagtaagtgtgatttggaaggtctgccctgtccctgtagcttatcactatgt

SEQ ID NO: 545200 - DNA, 201 bp, Homo sapiens
aacacattcctggacagaaatacaaatctgggatttgggtccccaaacaggcagtggtggatagcagtttggctctttggtggttagctggactaaaagcrgctcatgtggagaagcgggtggatccagaggcagatctgtgtttggcctctcccaaggctgcagaagctgctcccaaaccctcccagaagtcaagatacc

SEQ ID NO: 545201 - DNA, 201 bp, Homo sapiens
ttcataaaatgaaatcacagacaagagtctgatgccacaagagagaattatgaagatgggctcagctctaggtggctgcagggatcctctaggtattagtrggtgagcaaggatgaatggagatatctcagcaaatcaggaaaaattaaggatgaagttacggaacttaaagttatgcttccttgggcttattgacttctt

SEQ ID NO: 545202 - DNA, 201 bp, Homo sapiens
atagactcaacaagttttcatataaaccacagtgcctgggactattagattaatattagaggaggaaatattagagcagttaatattacagtaggaatatyagggtaggaaagtagaatgcaaacatgattcagttaatatcatgactgaaaaaacaagaacccttgcctcaatcatctaaaatatttcaggtaacagtag

SEQ ID NO: 545203 - DNA, 201 bp, Homo sapiens
cagtaggaatatcagggtaggaaagtagaatgcaaacatgattcagttaatatcatgactgaaaaaacaagaacccttgcctcaatcatctaaaatatttyaggtaacagtagaacttgatgctggaaatacacccagacctccacttcagaggattggattaaacctgcctctgaaggaatataccaatgcaattctatg

SEQ ID NO: 545204 - DNA, 201 bp, Homo sapiens
gtagctaggcagacttgtatctggtgataccaatagtctaaataggcagaaacattgtctaataatcatatgtggtgatctaattattgtctaataatcasacatccggccaaatacaggcacacactcgtaaatgtacagaaaaaacttcaaaaaggacacaaagtaaatcatttgcagtggtttcccagaaagtagtag

SEQ ID NO: 545205 - DNA, 201 bp, Homo sapiens
taaaaatcagaagccattccaagtatcaacatgataaaaagcatttataagaaaccaaactaaaggccgggtgtagtggctcacacctgtaatcccagtaytttgggaggctgaagtgggtggatcacttgagatcaggagtttgagaccagcctggccagcatggcaaaatcccgtctctactaaaaatacaaaaattag

SEQ ID NO: 545206 - DNA, 201 bp, Homo sapiens
ttgtagccataaaaatgtaccacccagatctcatgctgtgggatcataactgtctgagggctagtttctggccgttctgaatctaccacatttatgtcaarttttgtgttttccccaggccgcttctggccagtgactaagcacatcagaagtatgaagacaggcacagctagcaaacagtgctagcgctcttaggagtga

SEQ ID NO: 545207 - DNA, 201 bp, Homo sapiens
tagatttttcaattgagcacaccatatatctttcaaggttaagcaagaataaaacactttgcctggattttccactgtgaaattgatggtgaggagggagrgtgtttttaatgtgatgcactgcggtcagaaaaaaaaacaaaaacaaaaaaaaaaccacaacagtcctgtcagttaaaactgctagatacagccatcctt

SEQ ID NO: 545208 - DNA, 201 bp, Homo sapiens
aataaaacactttgcctggattttccactgtgaaattgatggtgaggagggagggtgtttttaatgtgatgcactgcggtcagaaaaaaaaacaaaaacaraaaaaaaaccacaacagtcctgtcagttaaaactgctagatacagccatccttatgaatgttttataatcattgtaaaagatcaaagtgaattaatgata

SEQ ID NO: 545209 - DNA, 201 bp, Homo sapiens
tatttcagaaatagcttgttctatgccagtatgctgttttccttgttttaacttttcttcttccttgtgatcattatttttaagatgcaaagatttaattsatcttaaaaccctccaagtgcacaaaagaattcccaggaacagatcaatcatatcttatgtttggaattaggttctaaatgccctttttaagttgcaatt

SEQ ID NO: 545210 - DNA, 201 bp, Homo sapiens
ctcttcctttttgaatattttgagatggacttcactattcagataacaggttaagatcctcattgtcatttctctttccttggctgtcttaaagaaaacartcatctcaggtagaggagtattagcgggagggaggaatgatccttggggaaaaatttataggtgttttgttttgttttgaattaggtaaatccattaact

SEQ ID NO: 545211 - DNA, 201 bp, Homo sapiens
ttctaaatgccctttttaagttgcaattagcagcttccatctttgttcctttttaatctcctcaattaccttgctaagtcataactgggcccctccttccrtgagctgcactgcagtgaactgccactttaccaagtcacccactattttaagtctgcatgaggttcacttcacagggactttgactaaagctcagctagt

SEQ ID NO: 545212 - DNA, 201 bp, Homo sapiens
ttacttttgagaagacatctgacttagccccaacttgtgtggttgcatgttgccctaataatggcttagaacagtgctgtctcctcttttgagaatcactrtcttactcagttacttttattatggcagtctattatatagctcaggcatcagacataattgagaaccatcagctcaaagtttttaggtaagtcagaatag

SEQ ID NO: 545213 - DNA, 201 bp, Homo sapiens
gatcatggtaaaccacgtagcaaaggaggatgcatagagcagaacacattaggatatgtgatctttagggaatttgctcagagccctggttagattttgargacagcatgcatccttccagcatcttccactcctttgaaatcagcatccctcatcttacttctccaggataaaaattaacatagctgttaccatatttgc

SEQ ID NO: 545214 - DNA, 201 bp, Homo sapiens
acagccgccatcgaagctgcaaacgcccagatccatggccctgccagtcaacacatgggcaataacactgccaccgtcaccaccacgactaccatagccascgtcaccacggaggacaggaagaaggaccactttaagaaaaatcgatgcctgtctatcgggatacaggtaacagcctccctttctatcctttgaaatagg

SEQ ID NO: 545215 - DNA, 201 bp, Homo sapiens
ctacgagtaaggctcctggaggggttggaactgggaaaaaaaaattaaaattagctgagtttttgaaaaacttgctctttaaaaacaaaataatgttgttgatttttttttttttcccccagaacactgtggaaactctggtgttagtctatgggaaaacttctactagagaatccattctttattcattagccaccaagt

SEQ ID NO: 545216 - DNA, 201 bp, Homo sapiens
cttgtgtgccgactaaacgcagaaagctttcgtctgaagtcgagagtatcacagtcaatctttttttcttttcttttttgaaagacagtgtttccctttgwcacccaggctggagtccagtggtgtgatcatggcttactgtagccttgacctcctgggctcaagcgaccctcccacctcacccttcagcgtagctgggac

SEQ ID NO: 545217 - DNA, 201 bp, Homo sapiens
tctgcttggtacatgagcctcatatatcccagagtgttaactaagtgtttgggagatttacccattttactatttgttaaattactagtccaggtttgaargaaaagatatgtttctctaaagatctacccttagaatgttgcgtaattacccatcaaagtaaaattgaattagtgagtcatatactatccaaggtggaac

SEQ ID NO: 545218 - DNA, 201 bp, Homo sapiens
atgcataagaatgaaatattaattattcacttaacagggacttctaaggaactgagaagtgaaataattccctaaaattaaaccatgccaatttgatctcwtgtatgtttttgaaggtgttattagatgaatagatgaatagaactaagcgttgcatttcttcgcttcaacccatcttgattctacctgttgtaacatgta

SEQ ID NO: 545219 - DNA, 201 bp, Homo sapiens
ctgggcttcagcttccttacatgtaaacgaaagggttaaactagatgagacgttctctttacacatcagtattgtctgaagagttgtaatagatctttagkctccatccagacataatacagtcttctgggattggaatcaggaatcttctaaattttggtttttatatagctgttctctatctggaagccactgctgcag

SEQ ID NO: 545220 - DNA, 201 bp, Homo sapiens
agaggccatcgtcctctttcatctgcagagttttccattcctcttgctcattttccccagagacatcatgtatatagtaaatattgaatcaatcaaggcartaagaatcatgtgaaaaagtctgttccactggaatcgtcttttccttttcctagctcagcataaatgaggcattaatgataactcttgagtctacttttc

SEQ ID NO: 545221 - DNA, 201 bp, Homo sapiens
ccgtttcaatgactcaaacaataagttgaaagacttattaaaatgagtattttgaaacactaatcaaggtaaatctgcttatcagatattcaggattgaargagcaggctttgactcgtacatatataacttgctactgtccattaagtgaaaatggtgtttctctttatggcccttttgtcttctggaaagagtaacttc

SEQ ID NO: 545222 - DNA, 201 bp, Homo sapiens
aggctgaagtgggtggatcacttgagatcaggagtttgagaccagcctggccagcatggcaaaatcccgtctctactaaaaatacaaaaattagccaggcrtgatggcacatgcctgtagtcccagctactcgggaggctgaggcaggagaatcacttgaacctggggggtggaggttgcttagtgagcttagattgcgcc

SEQ ID NO: 545223 - DNA, 201 bp, Homo sapiens
aagaagtaacaggttcattatttcaaaaaaatgcggatgatttctagtagataatacaatatgaggcatttattctgctccacacacataaatgatttttyaataggggaaaaaagaaagcttaaaagacagacctagaattcaaaccaagataaacacattcctggacagaaatacaaatctgggatttgggtccccaaa

SEQ ID NO: 545224 - DNA, 201 bp, Homo sapiens
gaagtaacaggttcattatttcaaaaaaatgcggatgatttctagtagataatacaatatgaggcatttattctgctccacacacataaatgattttttartaggggaaaaaagaaagcttaaaagacagacctagaattcaaaccaagataaacacattcctggacagaaatacaaatctgggatttgggtccccaaaca

SEQ ID NO: 545225 - DNA, 201 bp, Homo sapiens
gaaagagaggtgaaggggcataaagaaggaggaaatagaacactatggcttttaactgtcgtatgcaaggaattcccttatctgacagtaggcagagccaygcatgctgatgtgggccctctccaaactagtgtaaagactggaagacacggtttctttatcctggcctgaggagttttccctcccatgggcatcactgac

SEQ ID NO: 545226 - DNA, 201 bp, Homo sapiens
agggaacttaaggaaaggaattgactttgaccttcatggaacatccaacatgtccctttacaattctaaactgaattttttttacctcttacttcatctayatttcaaatgtattcctgtttgatgtcaaacctcttaaaactaattaagtaatagatttttcaattgagcacaccatatatctttcaaggttaagcaaga

SEQ ID NO: 545227 - DNA, 201 bp, Homo sapiens
ttcaaatgtattcctgtttgatgtcaaacctcttaaaactaattaagtaatagatttttcaattgagcacaccatatatctttcaaggttaagcaagaatraaacactttgcctggattttccactgtgaaattgatggtgaggagggagggtgtttttaatgtgatgcactgcggtcagaaaaaaaaacaaaaacaaaaa

SEQ ID NO: 545228 - DNA, 201 bp, Homo sapiens
tctttgttcctttttaatctcctcaattaccttgctaagtcataactgggcccctccttccatgagctgcactgcagtgaactgccactttaccaagtcayccactattttaagtctgcatgaggttcacttcacagggactttgactaaagctcagctagtgtgcttttggcattctcttatttttatacataattgtca

SEQ ID NO: 545229 - DNA, 201 bp, Homo sapiens
gcagcccacttaactcacacctctgatggcacagggacatgggggtggcccacacacatctcaccattctgtggcagcattagtacagttcaccaaacagygccaggtcgctcccagggcacaccacagaattacacttccctgccttatttacagttagtcgtgaccctgggacttgcactggccaataaaatgtaagca

SEQ ID NO: 545230 - DNA, 201 bp, Homo sapiens
aaactaatgcaggaacaacaacaaaaaaaacaaatactgcatgttctcacttaagagtgggagctaaaacattgagtacacatggacgcaaagaagagaamaacagacgacaccggggcccacttgagggtggagcgtgggaggacagtgaggataaaaaactacctatcaggttctgtgcttatcatctggatgatgaaa

SEQ ID NO: 545231 - DNA, 201 bp, Homo sapiens
acaaatactgcatgttctcacttaagagtgggagctaaaacattgagtacacatggacgcaaagaagagaacaacagacgacaccggggcccacttgaggstggagcgtgggaggacagtgaggataaaaaactacctatcaggttctgtgcttatcatctggatgatgaaataatctgtacaccaaactctcacggtgtg

SEQ ID NO: 545232 - DNA, 201 bp, Homo sapiens
tatcttcttaatgatgtgggagcaaagagattctttatgagaagggaacgagttgcccattatacagagttaaatacattcaagaaaacactggcggggcraagtggcttgtacctgtaatcccagcacttgggaggtcgaggcaggaggatcttgtggccaggagttcaagaccagcctgagcaacaatgtgagacccca

SEQ ID NO: 545233 - DNA, 201 bp, Homo sapiens
ctatcttcttaatgatgtgggagcaaagagattctttatgagaagggaacgagttgcccattatacagagttaaatacattcaagaaaacactggcggggygaagtggcttgtacctgtaatcccagcacttgggaggtcgaggcaggaggatcttgtggccaggagttcaagaccagcctgagcaacaatgtgagacccc

SEQ ID NO: 545234 - DNA, 201 bp, Homo sapiens
ggaccttccctgggccagaggggaacctgctgccctgaagagtgagtcccaggcctggcagcactcaccacaagctaactcaagagcccttggaccttgartgaccaccagcagtaccctggcagtactcatcacgggccttgggcagtggtggccatggagagaggttcttctgcttgtggaaaagggagggaacagtgg

SEQ ID NO: 545235 - DNA, 201 bp, Homo sapiens
cctggtggcggcactgcttaggtccacagctgcatgaaagtggcaccatgattggtcagaaccagacccagcctcctttcttgagttcctattctgaggaraaaaatcatagctctattttgaaaacacttactcattatcctaactagactcccaggcttagaatgagtagacaaaagttggcctcttccaacgtaacta

SEQ ID NO: 545236 - DNA, 201 bp, Homo sapiens
aagaccagatgggtagctgaccactcagctggtagaaataagcaagtggagaacagaatttattcctagttgacaagataatacaggattttattttctamggtacccaagttgcccaaagatggaagatatggtctagcctggaggccaggccaaaggaatttaacctctgggcagcatttctcaggggaaccaatggta

SEQ ID NO: 545237 - DNA, 201 bp, Homo sapiens
aatttgtataattatacatcatgaaattataaattcaatcatcccatctcacctacctgacttctcctttttttttttaggaccactattatctcaatgtsaaaatctttgggtcatcctcgatttattctttctcctctacttgtccagcctctcactaggtcttggttgtttttccccaagtccttttaaatccctgcc

SEQ ID NO: 545238 - DNA, 201 bp, Homo sapiens
tttaacctctgggcagcatttctcaggggaaccaatggtatgaggataggaaaagagcagggagctgcttcctagaggggcctgggaggttgcaggctccygagcccagccaccaggcagctggctgcagaggtggtggggctgagcgggccctggggaagaaacctagcaagcagcactgcactgttgtgaggaaaatac

SEQ ID NO: 545239 - DNA, 201 bp, Homo sapiens
ctgtggcataatacttcctgtggccatgtataaaagagacgatggtgaccagactccaggagataaagctgggtaaattaggatcagggttgtaaaagatmccattaatttcacccaatggaccaacatttattcaaggcttttaagcagggactggagaaacaggcacatgatcagattttattttactaaatagttctg

SEQ ID NO: 545240 - DNA, 201 bp, Homo sapiens
tttctaaccaaaaactacaaaattgtttcattttatattgttaaatgagtctttttgtagattccaggatggaaattggtggcagcctagcatttgactgkttttttcccccaaagctgttgtttttgggcagtttcacagagttgtgatgttggctcaactttcatacagccacagagtttctctaggccgttctatttg

SEQ ID NO: 545241 - DNA, 201 bp, Homo sapiens
caggcagctggctgcagaggtggtggggctgagcgggccctggggaagaaacctagcaagcagcactgcactgttgtgaggaaaataccctcagattcacrtcgcatccatgcactcagcatcagtaccagtcagcaagatggaatggcatggacgctgtggatagcagtagcaacactgtgcacccggagaatttagatg

SEQ ID NO: 545242 - DNA, 201 bp, Homo sapiens
aatctttcattttaacatttcatttataaacaaccaagatgagaagatggatgtgatcaaaggactctattttataaaagagatgtgaaaaatcctagacstaaatcaccttactaagttaggtcaaatagtcaagaaaatgtgagacactcttatctaacttgggcactaaaagaatattattttatttttgctcaaacc

SEQ ID NO: 545243 - DNA, 201 bp, Homo sapiens
ccctcagattcacatcgcatccatgcactcagcatcagtaccagtcagcaagatggaatggcatggacgctgtggatagcagtagcaacactgtgcacccrgagaatttagatgcctctggggccaccctcagagacctaaatgcttccaggtgtgagaagagcagagctagctagttaggagataaccccagggaataat

SEQ ID NO: 545244 - DNA, 201 bp, Homo sapiens
ggacacccttgtagttgtcatcttccacaagcagagctctgaacatttgacttcccagcaaatctttactgaaagccagtttctccattacttcctcctgkttagaagtgatttcccctacctctgagcatatctctttgctatgataaaattttgtaaaccttccccatctaaagaatattatatgtgtgtgagaaacgg

SEQ ID NO: 545245 - DNA, 201 bp, Homo sapiens
gctgtggatagcagtagcaacactgtgcacccggagaatttagatgcctctggggccaccctcagagacctaaatgcttccaggtgtgagaagagcagagmtagctagttaggagataaccccagggaataatgaacgggtttattaccaaaacttaactttatctccagattataacacctgaggatgtagctattagat

SEQ ID NO: 545246 - DNA, 201 bp, Homo sapiens
gagtcaattatgtaacatacctagctttcaataagtacaactcacttccccttagaaacatgaggactaacatgggcctggggttttggtgggattcttasccaccttttattagtcactcatgacctgctggccattgtgctgggcacgtcatgtgcattatctccctggatcttcccacccacctggcgctgtcccctc

SEQ ID NO: 545247 - DNA, 201 bp, Homo sapiens
tagctttcaataagtacaactcacttccccttagaaacatgaggactaacatgggcctggggttttggtgggattcttagccaccttttattagtcactcrtgacctgctggccattgtgctgggcacgtcatgtgcattatctccctggatcttcccacccacctggcgctgtcccctccacgtgcctgtcggctcctct

SEQ ID NO: 545248 - DNA, 201 bp, Homo sapiens
ttcaataagtacaactcacttccccttagaaacatgaggactaacatgggcctggggttttggtgggattcttagccaccttttattagtcactcatgacstgctggccattgtgctgggcacgtcatgtgcattatctccctggatcttcccacccacctggcgctgtcccctccacgtgcctgtcggctcctctgcgtt

SEQ ID NO: 545249 - DNA, 201 bp, Homo sapiens
gtcccctccacgtgcctgtcggctcctctgcgttttgtacctccctcaccattagccaagtaggcagcaccttacgtgatatctccattctcacgctgagytttgggcggtagttgctgaagctctcttttggacagtaatcctcatctgtgattctcttcctcatttaagaaacatgtctgcaaaacttttcttctcctc

SEQ ID NO: 545250 - DNA, 201 bp, Homo sapiens
cagggtactggtttaattgaaccctgtttgctgagacaagtgagtctcaaacctttccaatgcacattgaaaaatgaacatgattgatgtacaagtgtcarcgtctggcttcatttgtttactcaccagacttccaaagctgcatttttcgtattgctctctgaaaccaggcactctttcgccatctttgaggcctggaaa

SEQ ID NO: 545251 - DNA, 201 bp, Homo sapiens
ggacagggtggggaggtggggagatggtttcgggataaaactgttccacctcaaatcatcaggaatgagattctcataaggagcacatacctagattcctyacgtggacagttcacaacagggatcatgctcctatgagaatttaatgccgccactgatctcacaagaggcagagctcaggccgtaatgcacgctggccca

SEQ ID NO: 545252 - DNA, 201 bp, Homo sapiens
tacagccatccttatgaatgttttataatcattgtaaaagatcaaagtgaattaatgatatttttgaaatttcctgagaaaatgacttcctgcccattgarttgtcttggcaagattcccaccttttgagcttactggagaatgaaaagaataacaaccttcttgtcctgattttatggaaagcgaagcaatctgctgtgt

SEQ ID NO: 545253 - DNA, 201 bp, Homo sapiens
gccaaggatcttagcaggaaaacttgcaatttatagcgctgatttttcctaccaagcttccccagaggagaaaaacagagggagagggagaaaaagaacartacatttctaagctcacactggcggaaagtgggatagtaagagaagatggcttccttctggttaaagatgctatggtagaaggaaactagacagaaattc

SEQ ID NO: 545254 - DNA, 201 bp, Homo sapiens
aagtgacaactgtcattcttgggggtatgcaaagaagctactggtctcataacaatgttctggaaagcgaattccaggatgttatttttctggtgtatgtwtacttaatattttcatctgtgcctttacaaatgatttatccactgtctgaaatctttagagatcatccaagtggaattcagtgttgctgcgagaactctt

SEQ ID NO: 545255 - DNA, 201 bp, Homo sapiens
ccattttgactggggtaaagtggtatctcattgtgactttaatttggattttcctgatggttagtgatgttgagcatgttttcatatgttttttggccatytgtataatcttcttttgagaaatgtctgttcacatcttttccatagtttttaatggtattctttgttttttttcttggtgatttgtttgaaagcccaagt

SEQ ID NO: 545256 - DNA, 201 bp, Homo sapiens
agcaggaaaacttgcaatttatagcgctgatttttcctaccaagcttccccagaggagaaaaacagagggagagggagaaaaagaacaatacatttctaarctcacactggcggaaagtgggatagtaagagaagatggcttccttctggttaaagatgctatggtagaaggaaactagacagaaattcaaagcaatggga

SEQ ID NO: 545257 - DNA, 201 bp, Homo sapiens
tgttaaatttctggcagattaaatgatgttaaagataaaattttgaaaactgcaatttactgacattcttgccaactcattcatcctatcaaatatatggrtttcattttcgagattaaaaagttttcataatattatcgatgaccatcctaaactatttttaaaggattagaaagggtgacaactgtctgatgcgttaaa

SEQ ID NO: 545258 - DNA, 201 bp, Homo sapiens
taacatttgtcattgacagtgtagtggtgcctaaactgtgagctctggagtctgacttcctggattaactacaagtaaattatttaactttcccatacctyattttcctcctctgggaaatgaagataataagagtacctgcttcatagggctgctgtgataattaagtgggataatacatataagatgcctaggacaggg

SEQ ID NO: 545259 - DNA, 201 bp, Homo sapiens
gagctgcattcgctcttctatttttagtttaaggtggaagctgagcattgatttgaaaccttaattctttttgactaatggtgtctactgctttaactatrtcctacaaattttgatacattgttttttctttttcattcggtttgaaatactttctattttcctttttgattttttttttctttaacccatgggctactt

SEQ ID NO: 545260 - DNA, 201 bp, Homo sapiens
tgttaaagataaaattttgaaaactgcaatttactgacattcttgccaactcattcatcctatcaaatatatgggtttcattttcgagattaaaaagtttycataatattatcgatgaccatcctaaactatttttaaaggattagaaagggtgacaactgtctgatgcgttaaatgtgcattattcaaatatgttctcaa

SEQ ID NO: 545261 - DNA, 201 bp, Homo sapiens
ttgagcaccaacatgaaactcaaagaaaattctcattggagcattttggattttggcatttcagatttgggatgctcaaccagtaaataaagtaaattgcraatgttccaaaacatgaaaaaaatcagaaattcggccgggcgcagtggctcacgcctgtaatcccagcactttgggaggccaaggcgggcggatcacgag

SEQ ID NO: 545262 - DNA, 201 bp, Homo sapiens
gttttagaaaaacaagccagccgaccatgacggctgactccatcaatccagagctatactggtaaacacttgaaattcatccttgcggtaaaggaagtttwaaaaaaaaaaaaagcaacaactgtttgcctcttctcttggtaacatccagttcttggtaacatcagtgctggaaaactccattgctcccaagaaatatgc

SEQ ID NO: 545263 - DNA, 201 bp, Homo sapiens
tattgaatgaagcactggatgaaggagcaccagtcccatgtggattttctttgatctcacccttcttagcacccacaggcatgagaaccagctaaccaacygatgattacaataacaaagacacagcagactggattatctgtgccctgtttttcttattcctaaggtttatctgtaaactccctcttcaaacatgtcctc

SEQ ID NO: 545264 - DNA, 201 bp, Homo sapiens
tcgcatcttttatcatttttagagcaagacaattggggctgactagaaccagacaacaaagtccctactgcagctggagcttactccacttatgcctattygtaggcttagtagttgtgaaagatgcatattgtttcctcaaatggcttgtttatccaagcatagttgctcatgaagttaaaaaaaaaagttcaaagtctc

SEQ ID NO: 545265 - DNA, 201 bp, Homo sapiens
gttgcgccattgctggtgcctggagcgtcccccactccactgactggtcttttcagatggttcacctgaggggaatgtccacccggaggtttgactttggrcgtctggctcaaatcagggtttctgaaagtattttctttgtagacattattagcagctattatttttgttctctaaattgaatgtgtgactcaagctgca

SEQ ID NO: 545266 - DNA, 201 bp, Homo sapiens
cctgtactctctattgtgggtcttcttaaatatctgttgtggggtgagaggtttgaagaattataagtgggggagtttataaagagtgcttacttcttaartaggaagaatcccattcaactgcattttctgttttgttttgtacttccactgagggacagattaacagagtagctggggaaagaaaggaaagggaggagt

SEQ ID NO: 545267 - DNA, 201 bp, Homo sapiens
gacaattggggctgactagaaccagacaacaaagtccctactgcagctggagcttactccacttatgcctatttgtaggcttagtagttgtgaaagatgcrtattgtttcctcaaatggcttgtttatccaagcatagttgctcatgaagttaaaaaaaaaagttcaaagtctcatatattgtactgtgtctcatgaatct

SEQ ID NO: 545268 - DNA, 201 bp, Homo sapiens
agagccttttattttccacggtccgcacggcaggtggaagacgcttcggcaccacccctgaccatgcacactgcaaagtctccggtcacacctgaggggayggtgcgtggctgtcctggtcctgagaggcctgtggttgactgtgatcattgtggccaccgtcgtcctcaggggccgggcccagcaatctcctcgcctctg

SEQ ID NO: 545269 - DNA, 201 bp, Homo sapiens
gctggagcttactccacttatgcctatttgtaggcttagtagttgtgaaagatgcatattgtttcctcaaatggcttgtttatccaagcatagttgctcaygaagttaaaaaaaaaagttcaaagtctcatatattgtactgtgtctcatgaatcttgaatgggaatggcttaatctggatggcttcaagtgcacagagac

SEQ ID NO: 545270 - DNA, 201 bp, Homo sapiens
agagtgggagctaaaacattgagtacacatggacgcaaagaagagaacaacagacgacaccggggcccacttgagggtggagcgtgggaggacagtgaggrtaaaaaactacctatcaggttctgtgcttatcatctggatgatgaaataatctgtacaccaaactctcacggtgtgcaatttacctatatggcaaaccag

SEQ ID NO: 545271 - DNA, 201 bp, Homo sapiens
agtggaagctaaacattgggtactcatgggcataaaggtgacaacagtagtccctgtggtctactggtgcggaagggaatggggcaaagttgaaaaaccarctgttggctactatgctcagtacctgggtgagaggattaattgtaccccaaacctcagcatcaggcaatatacatataacagttggggttacaggatgag

SEQ ID NO: 545272 - DNA, 201 bp, Homo sapiens
atgcagaacaatgattcttttcaacttggaagaaatatgcacttttcaaaacagactaatggtttactttgccatgctgagaaggatttcattaaaattaytgagaaaaaaaatcaattctaaaagagcccacatcataggagatttgggggtgtttttcctccctgccgatatactatctatccctcatggggctcccat

SEQ ID NO: 545273 - DNA, 201 bp, Homo sapiens
gaggttcacttcacagggactttgactaaagctcagctagtgtgcttttggcattctcttatttttatacataattgtcacagctgagcttattaaactcrgcttatgataaaactagtaaaattcttattaaaagaagccatagtttccagagcaaggaaacaaatcacccagtttaaaaatgggcaaaggacctgaata

SEQ ID NO: 545274 - DNA, 201 bp, Homo sapiens
agggtcccggccgaccccacatttcctggggctgggggatacccagcactggcagctcagggcagacgctactgcagggtacaaccggccacactcacccygggggcagagccttttattttccacggtccgcacggcaggtggaagacgcttcggcaccacccctgaccatgcacactgcaaagtctccggtcacacctg

SEQ ID NO: 545275 - DNA, 201 bp, Homo sapiens
tttggatgggacaaattgcagaagtgtcataaattattaactgatgattttacttttgacctagtttcaataatctatgcaaaatttggaatatataaggkaaacatataaaaaatgagatcaaatatgaattctagccagagctggccgtgtatcagtactgaaatccaggccaggcccacgtccagctgagtctcttct

SEQ ID NO: 545276 - DNA, 201 bp, Homo sapiens
aatgagaaatttcatattttaaatacttttaattatatgataccaaatactggattttacccataattccagaaacaaggtgtattagtccattctcacawtggtataaagaactacctgagtagtttataaactacctgggtaatttataaagataagaggtttaattggctcacggttctgcaggctgtacaggaaacg

SEQ ID NO: 545277 - DNA, 201 bp, Homo sapiens
gactttgactaaagctcagctagtgtgcttttggcattctcttatttttatacataattgtcacagctgagcttattaaactcagcttatgataaaactaktaaaattcttattaaaagaagccatagtttccagagcaaggaaacaaatcacccagtttaaaaatgggcaaaggacctgaatagacatgcctcaaaagaa

SEQ ID NO: 545278 - DNA, 201 bp, Homo sapiens
actgtgtcagcacccctcatttccctccttctcaggatctaaaggcaggaaggagagctggtgtctgcaggaaaacagggctctgaggagcgccctggctraaggcagcaagcgggaacctcccagaagagcacagccgctgtggggttcaagcctagttgacagcattggggttgggccacataagcagcctggggttgg

SEQ ID NO: 545279 - DNA, 201 bp, Homo sapiens
tatttgaaaacaatataaaaacttaccttacataaaatataagacctccaggcggccgggaacattggctcacgcctgtaatcccagcactttgggaggcygaggcgggtggatcacgaggtcaagagatccagaccatcctggccaacatgatgaaacccagtctctactaaaaaatacaaaaattagccgggcgtggtg

SEQ ID NO: 545280 - DNA, 201 bp, Homo sapiens
ttttatcaccatcatttaccatgataaacttccatgaacaatggcatccgctccattccttcttccaattctcacacaaagtcctgtcttggccaacttawctcagaacaatagagaagcagagggttccaggaaaagtagtttctagacttcaccaagttgacataaatgaccaagagcttgaccagtgctatgcattag

SEQ ID NO: 545281 - DNA, 201 bp, Homo sapiens
ccttctgagacactgtgggggagtttagtaatcacagaagggcatctatgtcatttgtcccagtatttagggtgctacataaatgacaatagtgccacatsttattgcttcctgcattttggaatgtgactaatgcacctcttccattgttcccttccagaatctccaatgaacactcacccaaactccagatccggagtc

SEQ ID NO: 545282 - DNA, 201 bp, Homo sapiens
ccatgataaacttccatgaacaatggcatccgctccattccttcttccaattctcacacaaagtcctgtcttggccaacttatctcagaacaatagagaarcagagggttccaggaaaagtagtttctagacttcaccaagttgacataaatgaccaagagcttgaccagtgctatgcattagtaatagtattaatatcag

SEQ ID NO: 545283 - DNA, 201 bp, Homo sapiens
ccaccagcagtaccctggcagtactcatcacgggccttgggcagtggtggccatggagagaggttcttctgcttgtggaaaagggagggaacagtgggaargactttgacttgtgagtaccagctcagctgcagtacaatagggcatcaggttgatttctaaagtatctgactccaggccctggctcctggattgtgtccc

SEQ ID NO: 545284 - DNA, 201 bp, Homo sapiens
aaacttccatgaacaatggcatccgctccattccttcttccaattctcacacaaagtcctgtcttggccaacttatctcagaacaatagagaagcagaggrttccaggaaaagtagtttctagacttcaccaagttgacataaatgaccaagagcttgaccagtgctatgcattagtaatagtattaatatcagcaacctg

SEQ ID NO: 545285 - DNA, 201 bp, Homo sapiens
acaatggcatccgctccattccttcttccaattctcacacaaagtcctgtcttggccaacttatctcagaacaatagagaagcagagggttccaggaaaaktagtttctagacttcaccaagttgacataaatgaccaagagcttgaccagtgctatgcattagtaatagtattaatatcagcaacctgtaggctacaaac

SEQ ID NO: 545286 - DNA, 201 bp, Homo sapiens
atagggtagcttaagaagtaggagttagctctggggctttgaactcacataatatgaatggttggtccattaaaaatatacaccacacgaatggctgctgrtttgaaatagaaataaacttggttttagatgtgtggaggtgctgtatgactagtgaagaggatatacaataaatatctggaaatgaagggctggaacact

SEQ ID NO: 545287 - DNA, 201 bp, Homo sapiens
agttgcctgtgtacaagacatgtgactcttaagtcatgagactcagagaaattaaaagggacgaacattggcatttatgtagttatcttgaacagaaaaaytatttcaaattggaggtggccacatcctgtcaacttcagtgacagctgtcaaaattaacacaataacttctatttatggttcattctccaaaaatgcagt

SEQ ID NO: 545288 - DNA, 201 bp, Homo sapiens
aaaaattatttcaaattggaggtggccacatcctgtcaacttcagtgacagctgtcaaaattaacacaataacttctatttatggttcattctccaaaaawgcagttttctgctgtacttttacaggaacattaagacatatgtatctgaggcaaaggttctctaccattggatcaactttctaatcagctgtctttgcct

SEQ ID NO: 545289 - DNA, 201 bp, Homo sapiens
gtcttccatctgatcttctttatctcaagtgctagaaggaaaaatctttggaaaaaaaagatccaggaggctctgtgccctggttgcttagtcactagtcyatttaaacaggacaagacgcagtttgtaatttttttccaatatacactcagaagtgaacttgtgaaaaggatgtaagttggcttaatactggggaatcaa

SEQ ID NO: 545290 - DNA, 201 bp, Homo sapiens
aacctccacctcccaggttcaagcgattctcctacctcagcctcctgagtagctggaattacaagcacccatcaccaggcccagctaatttttgtattttyttagtagaaaggggatttcaccatgttggccaggctggtctcgaactcctgacctcaggtgatccacccgcctcagcctcccaaagcgctggaattacag

SEQ ID NO: 545291 - DNA, 201 bp, Homo sapiens
aggacattgtcctcctctcttggtatactccttcttttcttccagtcttctctcataaactgctcttgcaagaaatcattgcttctttgagatctttttgsccctccccactcccacatgtattctctaactacagctagagaaatctttagcacaagtgtgaccatgccactgtcttgtttaaattcctctaatggatta

SEQ ID NO: 545292 - DNA, 201 bp, Homo sapiens
cactggagaacaaatgctgcatgattctgcttatatgatgtatcttaaaatagtcaaaactcaggaaacagagagtggaacggtgggtgccatgatgtagrgggagagggaaagggaaaggggaattgctgtccagtggatctaaagttatgcaaggtgaataagttctcgagatctgctgtacaacgctgcgccaccatt

SEQ ID NO: 545293 - DNA, 201 bp, Homo sapiens
tggtagtcacagaaaccctcatgaagacatgctgaccacagtccccatccttgctcaaagaacaaggcctgaaaggcaatttccctctctatttccagcarttgttatcattacttaaaatctaattgagaggctagcatcctcttttttcaagaatgcatagaagaatgagaattgttatttatctcttttcatgttttt

SEQ ID NO: 545294 - DNA, 201 bp, Homo sapiens
ggctgcagggagtggagacaatggagagcagaagaaatacgagagcgaaggcatgctgccctttggagaatggggatttaaagggaatgtaataatttgcyaaggctgccataataaagtacccatggaacaggtcacttaaacaggagaaattaattttctcacagttttggaggctggaagttcgagatcaaggggctg

SEQ ID NO: 545295 - DNA, 201 bp, Homo sapiens
gtactgaaatccaggccaggcccacgtccagctgagtctcttctctgcagcatgctcctgagaagacttattgtcctagcatttgagtccttaacaaatcwcatggactataccaatgcacttgataacactgaattctagttctattcagtggctgactcatcaatgcaggcagtagcctgcgcaaatgacaaacattag

SEQ ID NO: 545296 - DNA, 201 bp, Homo sapiens
aaagcatattccttcagtggagataataggagttagttacatgggcacagtctaggccatcaaagagctcacattctggtcggaaatctgacatattaacrgaacatgttgaaaagaatgaggaaaaggcagagacagctatgcaggggaattttaggagcagtgaggagggagaggtgaaaggaggtaaggctttctggc

SEQ ID NO: 545297 - DNA, 201 bp, Homo sapiens
aagatgtctttttctggaatttggattatcagtacctttcttcaatgagaaggtaattcctgtctttgcctctcttccaacgtgaacaacttctgtcaacmctgtatccagaacatatcctaaattccccccgagcctacaaagctcatgatttggcatctccttacagctctaacctcacctctagtctgcagatccaca

SEQ ID NO: 545298 - DNA, 201 bp, Homo sapiens
atattctatttttataagagaagaaactgacacttagaaatatcaagtcatttaaagccccacaatctggaggttgtacaactgagatttaggctcaagtmtgtttgatgccaaaaccaagctctttctaatatgccctagcacagacctgaaatcaagggcatcaaaaatggtgagcaagaagaaaataaaaatctttaa

SEQ ID NO: 545299 - DNA, 201 bp, Homo sapiens
aagaggtgaagtgatgtggttaattgggggcagaactgggcctggaaacagatctgttcctaggccagtggtgtttctgtcattccagagatggcaaagaragggactggctcacggagcaagacctcctatcattttctccaataactgtttctgtgaaatataaatgcaatggactggtggggcgcagtggctcatgcc

SEQ ID NO: 545300 - DNA, 201 bp, Homo sapiens
cgtgaacaacttctgtcaaccctgtatccagaacatatcctaaattccccccgagcctacaaagctcatgatttggcatctccttacagctctaacctcayctctagtctgcagatccacattggcctcatttggttccattgccctaccttagggaacatttattcttttatttgcctggaatttgcttcctctagatct

SEQ ID NO: 545301 - DNA, 201 bp, Homo sapiens
aaactaaaaaaacaaaaactcagaaataggcagcagcagctaaagataagcagaacaaccatgttcatgttcatattcatgtaagaatgtattttgttaawtgactccctgaattcaaaatacagtgcatccatggcaaaaaaaaaaaaaaaaaaaaaagtttggaaaataacctgtttactcactggaaatttgaggttc

SEQ ID NO: 545302 - DNA, 201 bp, Homo sapiens
tgatgtgctagatgtagcaaaatgattgtttaaaggaaaaaaatcaatttcaggtatacgtccatgaacgaaaaaaatttttgcaacttttggtaagaggktttatgtgaagtgaagtctttctagatactttctctttctaaattaagggattaatgaaaagactcctttaagccatgagtttcttatttaatgtatttc

SEQ ID NO: 545303 - DNA, 201 bp, Homo sapiens
actttacatgcaatttatgaaagtgctgaacagttctgctaatgactttggctactgggatgtttctttgctgcctttttctgaaatcccatccaccacaktcattgatgattttctttatttttaatttaaattgccctaataatccagcaagtgaatgtcaaggttcctgaatggatttcctattgggtttgcacaatc

SEQ ID NO: 545304 - DNA, 201 bp, Homo sapiens
acaatataaaaacttaccttacataaaatataagacctccaggcggccgggaacattggctcacgcctgtaatcccagcactttgggaggccgaggcgggyggatcacgaggtcaagagatccagaccatcctggccaacatgatgaaacccagtctctactaaaaaatacaaaaattagccgggcgtggtggacgtgcct

SEQ ID NO: 545305 - DNA, 201 bp, Homo sapiens
catagctcactgtagcctggacgtcctgggcccaagtgatcctcccacctcagcctcatgaggagctgtcactacaggtgtgcaccaccatgcctggctartttttaaaaaattttatagagatagattctcactgtgttgcccaggctgatctcaaactcctggcctcaagcaatccccccacttctgcctcccaaaatg

SEQ ID NO: 545306 - DNA, 201 bp, Homo sapiens
aactatatacttttaaaaatagactttgtttttagagaagttttagatttacagaaaagttgtatagaaagtacaaagttcccatataatcccttcctttmtgcacacaatttctcccattattagtatcttgcattagtaaggtacgtttgttacaattgatgagctaatattaatacataaatattcactaaagttcat

SEQ ID NO: 545307 - DNA, 201 bp, Homo sapiens
agacagggcctcactcctcacccaagttggagtggcgcaatcatggctcaccccagccttgacctcccaagtagttgggactacaggcatgcaccccatgygcagctgatttttgtatttttggtagagacggggtttcgccatgttgcccaggctggtctcaaactactgaactcaggcaatccgcccacctcggcctcc

SEQ ID NO: 545308 - DNA, 201 bp, Homo sapiens
gcattcattatcgtacaaatcagaaaagaacataaaaaagtaattatcatttttaagagtttttacagtgagacagatgaactttgaatatgattaaatayaaaataataaaacattgatgacaacatcattcaaaaatatctccagtaaagaaatccagtgagtaaaaggtcttctgggtaaatttatttgatttaattt

SEQ ID NO: 545309 - DNA, 201 bp, Homo sapiens
ttctccaggcagagcgagaccgcatggaggggtggtgtcaacagatggagcgggaagaacgggaaaacaacctgcccgaagacagtaagtaatgccaccaygtgccacacccgtcccctggggctggggttgctttgtgtgtgcagaccttgttgttttcttctctgccagcttcacttgtataaccttgacgttccacac

SEQ ID NO: 545310 - DNA, 201 bp, Homo sapiens
aacatagtattggaagtcctggccagaacaatcagacaagagaaataaagggcatccagataggaagagaagaagccaaactatctctgtttgccgatgamatggttctatatgtagaaaacttcatacttttgacccaaaagctctttaagctgataaacaatttcagcaaagtttcaggatacaaaatcaacgtacaaa

SEQ ID NO: 545311 - DNA, 201 bp, Homo sapiens
acggttctgcaggctgtacaggaaacgtggctgggaagatctcaggaaattttcaatcatggtgaaaggtgaaggggaagcaggcacctcttcacatagcraagcaggaaagatagagcaaagggggaggtgctatgtacttccaaacaaccagatctcatgagaactctaattcaacatgagtttcatatagtgatactc

SEQ ID NO: 545312 - DNA, 201 bp, Homo sapiens
gagagaatacccctttggttttgatttactttttctttctctctttctttctttcctttcttctttcttctttctttctttttctttcatctgtcctcccgtttctacgtatacaaaaggtggcatattatacactctctttgcttttcaaaattctgtagtatattctggaaatcattcattttattaaaatcttcttcc

SEQ ID NO: 545313 - DNA, 201 bp, Homo sapiens
agccaaactatctctgtttgccgatgacatggttctatatgtagaaaacttcatacttttgacccaaaagctctttaagctgataaacaatttcagcaaartttcaggatacaaaatcaacgtacaaaaatcactaacattttatataccaacaacagtcaagccaagagccaaatcaggaacacaatctcatttacaatt

SEQ ID NO: 545314 - DNA, 201 bp, Homo sapiens
tgggtgtatttacccaatgtctgtaccccacttgtatctaggaagtaactaacttgcttttgattttacagtctcatgggcagaagggacttgcattgtcttagatgagactttggacttggacttttgagtttatgctagaatgagttgagaccttgagggactgttggaagggcatcattgtgtttgaaatatgaggac

SEQ ID NO: 545315 - DNA, 201 bp, Homo sapiens
tctctgtttgccgatgacatggttctatatgtagaaaacttcatacttttgacccaaaagctctttaagctgataaacaatttcagcaaagtttcaggatrcaaaatcaacgtacaaaaatcactaacattttatataccaacaacagtcaagccaagagccaaatcaggaacacaatctcatttacaattgccaccaaag

SEQ ID NO: 545316 - DNA, 201 bp, Homo sapiens
tgagttctcacaagatcttatggttttataaggggctttccccccacttcactttgcatttcttcttgctgctgccatgtgaagaaagacatgcttgcttycccttctgccacaattgtaagttccctgtgacctccccagccatgctgaactatgagtcaattaagcctctttcctttctaaattacccagtcttgagta

SEQ ID NO: 545317 - DNA, 201 bp, Homo sapiens
gaggccgaggcgggtggatcacgaggtcaagagatccagaccatcctggccaacatgatgaaacccagtctctactaaaaaatacaaaaattagccgggcrtggtggacgtgcctgtagtctcagctattcaggaggctgaggcaggagaatggcttgaacccccgaggcggaggttgcagtgagccgagactccgccact

SEQ ID NO: 545318 - DNA, 201 bp, Homo sapiens
ggcgttgggataactggttagccatatgcagaagattgaatattgaccccttcctcacaccatgtacaaaaatcaatgaaagacaggttaaagacttaaakgtaaaagccaaaactataaaaaccatggaagacaacctagcaataccattctggatataggaactagcagagattgatgacaaagatgctaaaagcaatc

SEQ ID NO: 545319 - DNA, 201 bp, Homo sapiens
cgggtggatcacgaggtcaagagatccagaccatcctggccaacatgatgaaacccagtctctactaaaaaatacaaaaattagccgggcgtggtggacgygcctgtagtctcagctattcaggaggctgaggcaggagaatggcttgaacccccgaggcggaggttgcagtgagccgagactccgccactgcactccagc

SEQ ID NO: 545320 - DNA, 201 bp, Homo sapiens
cgaggtcaagagatccagaccatcctggccaacatgatgaaacccagtctctactaaaaaatacaaaaattagccgggcgtggtggacgtgcctgtagtcwcagctattcaggaggctgaggcaggagaatggcttgaacccccgaggcggaggttgcagtgagccgagactccgccactgcactccagcctgggcgacag

SEQ ID NO: 545321 - DNA, 201 bp, Homo sapiens
gccgggcgtggtggacgtgcctgtagtctcagctattcaggaggctgaggcaggagaatggcttgaacccccgaggcggaggttgcagtgagccgagactscgccactgcactccagcctgggcgacagagtgagagtcccaagactccatctgaaaataaataaataagtaaataacctccatgcatggtcatgcacacc

SEQ ID NO: 545322 - DNA, 201 bp, Homo sapiens
tatagtgatacatccacttacaggtgtaatattttgatttcttaacatctctaatgttaagatgagtttcttaatatctctgcatctcagtcttctgaggrataataatcattgaacaaaatggtaataatcattgaacctacctcattaggcttattgtgaattttaaatgaaataatcgatgcattaataatatgcttt

SEQ ID NO: 545323 - DNA, 201 bp, Homo sapiens
taaattgtaaatctttttgtaacaagacaacagttgtgatatcacaatgagtcattacgcactttctgttcatggaggatcccaaaatcatcttatttgcraagaagtgagttggtgtgggaggcagtaccttaacatttcagcagagtcctttagccaaattcctgaagctgccaagcttccacaggcggactgagatat

SEQ ID NO: 545324 - DNA, 201 bp, Homo sapiens
tttctgaaaagcataaaaatacaaagtgtgacatcatgcaagaacacggccatgtagattttctatgaaactctcttcttaacagcattgaatataatgtstgtcagaatagttcttatgagatcatttttaagtgtctttttgtttcaggctagttattacatctaattattgcattgttatgtttcagagcagttgaac

SEQ ID NO: 545325 - DNA, 201 bp, Homo sapiens
catctcataggaggcaaggttgttgaagatgagggaataggggttgagttgagaatggataagattcaggaaattagagttagagagagaggtaaccaaayacattgcaaaggactaacgggcagcagtgaaggatcagccaagtttggggaccattggtttatggtgtcatcaagtcacatggctaagcacaatctggaa

SEQ ID NO: 545326 - DNA, 201 bp, Homo sapiens
ttccctccattttcatctcataggaggcaaggttgttgaagatgagggaataggggttgagttgagaatggataagattcaggaaattagagttagagagrgaggtaaccaaacacattgcaaaggactaacgggcagcagtgaaggatcagccaagtttggggaccattggtttatggtgtcatcaagtcacatggctaa

SEQ ID NO: 545327 - DNA, 201 bp, Homo sapiens
gggtcagaagggcaagaggcggtcccttcaaccttgagtcctttaataaaggcactaacctcattcaggacagccgagctctcatgacttaatcacctccyaatgccccaccgcttattgttattgccttggggattcagtttcaacatatattttggaggagacactatcatccaaatcacagcagtgttcatgcctgat

SEQ ID NO: 545328 - DNA, 201 bp, Homo sapiens
taaactaaatgatccaggctggcactacaatttctgcgttacagtttgagtcaaagactgatcacaatgaaaggtcttccttgccaacatcaccattgtgrgtaggtgtgttagtttaataacaagctctgagtcttctggtcagttaccatcttaatatcataaaattcccaacagtaagatttttgatgcatttttata

SEQ ID NO: 545329 - DNA, 201 bp, Homo sapiens
cctccagaggggacaaaccctgtgtccttgcatggcagtagggtcagaagggcaagaggcggtcccttcaaccttgagtcctttaataaaggcactaacckcattcaggacagccgagctctcatgacttaatcacctcctaatgccccaccgcttattgttattgccttggggattcagtttcaacatatattttggagg

SEQ ID NO: 545330 - DNA, 201 bp, Homo sapiens
gccagggtggtttgccacacctatcaacctgtcatctaggttttaagccccacatgctttaggtatttgtcctaatgctcaagactgggtaatttttaaayaatacaaatttacttctcattactctagttgcggagaaatccaagatcaaggtgccagcaggttgtgtgtctggtgagggctgctctctgcttccaagat

SEQ ID NO: 545331 - DNA, 201 bp, Homo sapiens
ggaactttgaattaacaaagttgaaattctctctgtaatgatgaatgggtatttgaacagagttagaaaatcataatgacaggctgcaagtaagaaggctytcattgtctcttccacctctccttcgagacaattcagacaaccagacccatccttttggacctattacaatgtcagagacaaacttttcttgcagtaagg

SEQ ID NO: 545332 - DNA, 201 bp, Homo sapiens
ataaaatgaccgattaagtactctctgaaagaaacgtaaatgttatttttagatgatgaaatactttcttcgtaaaataagagtataatagagtttattasaaatcacatatttgagtatttgtttatactgtaagaatgttcaaggacaacatttgactatgcagtaaaaaggtgcaacttggaagaaaaggcacattga

SEQ ID NO: 545333 - DNA, 201 bp, Homo sapiens
agtctgatgccacaagagagaattatgaagatgggctcagctctaggtggctgcagggatcctctaggtattagtaggtgagcaaggatgaatggagatayctcagcaaatcaggaaaaattaaggatgaagttacggaacttaaagttatgcttccttgggcttattgacttcttggcttgtctaactatggtagaatct

SEQ ID NO: 545334 - DNA, 201 bp, Homo sapiens
cacagtcatgattgtgctgcatgccaggtaatatctatctatatactctcagagcaatcataaaatgtaaatagctctaaccccaaaaggacattgaaacygagaaggctaagtaactcaatgaaggccatgtagcaaaatactaaagtaagcctatctgactccagaactcctagccttgccactaagcagcacttcttc

SEQ ID NO: 545335 - DNA, 201 bp, Homo sapiens
gaaaccccgtctctattaaaaatataaaaataagctaagcatggtggcgggcggctgtaattccagctacacgagaggctgaggcaggagaatcgtttgamcctgggaggcggaggttgcagtgagccgagatcgcaccactgcaccccagcctgggtgacagagtaagacacggtcttaaaaaaaaaaagaaaagaaaaa

SEQ ID NO: 545336 - DNA, 201 bp, Homo sapiens
ctcttttttctaattctgatcatttgtttcttctcttttttcttgtttaatcttgctaaagtattgatttttttaaagagcctacttttgttcaaaaacarctaattcgtttttcttttgctttccatttcatttatttccactataatagctattatatgcttcattctgcttgcactggatttaaattgctctttttca

SEQ ID NO: 545337 - DNA, 201 bp, Homo sapiens
tgactaatggtgtctactgctttaactatatcctacaaattttgatacattgttttttctttttcattcggtttgaaatactttctattttcctttttgattttttttttctttaacccatgggctacttagaagtgtgttacctagtctccaaaaatttgaggattttccaaatattttttagctattgtctatttaatt

SEQ ID NO: 545338 - DNA, 201 bp, Homo sapiens
tctttggggctaattatctttctatgattccatttcttttttttttctttttgttttggagacggggttttgctctgtcacccaggctgcagtgcagtggygtgatctcggctcactgcagcctccacctcctgggtttgactgattctcctgccttggcctccagagtagctgggattataggcatctgccaccactcct

SEQ ID NO: 545339 - DNA, 201 bp, Homo sapiens
cctgtagtctcagctacacaggaggttgaggtaggaggatcccttgagaccagggaggcagaggttgcagtgagctgagatggagccactgcattccagcmtaagcgacagtgccagaccttgtctcaaaaataaataaataaataaataaataaataaataaaagcaaagtacacatttttttttccaagtacacacaga

SEQ ID NO: 545340 - DNA, 201 bp, Homo sapiens
tgcgatctcagctcactgcaagctccgcctcccgggttcatgccattctcctgcctcagcctcccaagtagctgggaccacaggtgcccaccaccacgccygactaatgttttatattttttggtagatacggggtttcaccgtgttagccaggagggtctcgatcccctgaccttgtgatccgcccgcctcagcctccca

SEQ ID NO: 545341 - DNA, 201 bp, Homo sapiens
ctttcagcttctttttatttatttatttatttttctgagatggagtctcgctttttcgcccatgctggagtgcagtggcacaatctcagctcaccacaacytccacctcccggattcaagcaatctcgcgcctcagcctcccaagtacctgggactgcaagcacatgccaccacacctggctaagatttgtgtttttagta

SEQ ID NO: 545342 - DNA, 201 bp, Homo sapiens
ggaatgcgggtagtacagttctgtgtagataaaaacagaggcacaggaaagtaggtcattctgttttatatgtggaacagattctggctgtggcagtttgstctgattgaaaacaatgagggactagtacttctttaagtttggaaatgtaatgcctctggcaatacaggatcttggagcgtggaggctaatgttttcata

SEQ ID NO: 545343 - DNA, 201 bp, Homo sapiens
tatttttctgagatggagtctcgctttttcgcccatgctggagtgcagtggcacaatctcagctcaccacaacctccacctcccggattcaagcaatctcrcgcctcagcctcccaagtacctgggactgcaagcacatgccaccacacctggctaagatttgtgtttttagtagagacaggtttcgccatgttggccagg

SEQ ID NO: 545344 - DNA, 201 bp, Homo sapiens
tgaactgtacatttaataatggttcagctggtaaattgtatgttatgtatattttatcataataaaaaataagtaaactattaggccaggaagcgactttaaaaaaaaaagacatacagggcatcgtaacagacacatggtgctatcttcagtggacttatattccgtcattgtttcctgtcttctccagaggcagcaaag

SEQ ID NO: 545345 - DNA, 201 bp, Homo sapiens
aaagaaagaaatcaagtcctttacaggaacatggatggagccaaaggccattagcaaactaacacaggatcagaaaatgaaatacctcatgttctcacttrtaagtgggagctaaacgatgaaaacacatggataaatacagaggcgaatgaaagacactggggcctacttgggagtcgagggttggaggagagagaggat

SEQ ID NO: 545346 - DNA, 201 bp, Homo sapiens
actccgtctcaaaaaaaaaagaaaaaaaaaagataggcctttcatttcccgttaactgaagcaaaggatcaaaatttgggatgatttaacatcatttgatmtaaagaagatctaaaagtcacccaaaaagagcttaccagaagtaaaaaatgagattataggccatgtgtgttagtcagggttctctagagagacagaact

SEQ ID NO: 545347 - DNA, 201 bp, Homo sapiens
ggagtgcaatggcatgatctcagttcaccacaacctccgtttcctggattcaagcgattctcctgcctcagcctcctgagtagctgggattacaggcatgygccaccacgcccagctaattttttttgtatttttagtagagacgggattattccatgttggtcaggctggtctcgaactcccgacctcagatgatctgcc

SEQ ID NO: 545348 - DNA, 201 bp, Homo sapiens
ggagctaaacgatgaaaacacatggataaatacagaggcgaatgaaagacactggggcctacttgggagtcgagggttggaggagagagaggatcagaaamaataactattgggtacctgggtggtgaaataatctgtacaacaaacccccatgacgcaagtttacctacgtaagaaacctgcacgtggacccctgaacct

SEQ ID NO: 545349 - DNA, 201 bp, Homo sapiens
tggcatgatctcagttcaccacaacctccgtttcctggattcaagcgattctcctgcctcagcctcctgagtagctgggattacaggcatgtgccaccacrcccagctaattttttttgtatttttagtagagacgggattattccatgttggtcaggctggtctcgaactcccgacctcagatgatctgcccgcctcggc

SEQ ID NO: 545350 - DNA, 201 bp, Homo sapiens
catataacaacacattctgatgaccctagttaaatatgacaacagatgataataggatgaggcttccccatgaagggtgatggagaggaaaatgccacagyagaacttcagtcatgaatcaaaatctctaagtgttctttggaaaatgtttcctgagctacctgctgtttttgtcagggtttaataatgagctcacatctt

SEQ ID NO: 545351 - DNA, 201 bp, Homo sapiens
gccaccacgcccagctaattttttttgtatttttagtagagacgggattattccatgttggtcaggctggtctcgaactcccgacctcagatgatctgccygcctcggcctcccaaagtgctgggattacaagcgtgagccactgcgcacggcctttcttcccatttctttttttcttttcttcttttttttttttgagac

SEQ ID NO: 545352 - DNA, 201 bp, Homo sapiens
ttaaattatagtgcaaaaggtaattttgtcaataaagtggcttgtaccttcaaataattttttgattttttgaaatgcctacttttgatagacatatatakagagaaataatatacaatgaaatgttccctttagtctgcttcttctcatgtaatctatgaaatcctggtatatctctcttctttctaaatatttcttatt

SEQ ID NO: 545353 - DNA, 201 bp, Homo sapiens
ccatgaagggtgatggagaggaaaatgccacagtagaacttcagtcatgaatcaaaatctctaagtgttctttggaaaatgtttcctgagctacctgctgtttttgtcagggtttaataatgagctcacatctttcaaagataagaggcaagtgatttcatctttctacctccccacttggattcatagattaaagtaata

SEQ ID NO: 545354 - DNA, 201 bp, Homo sapiens
tttatcacttggtggaggctaacaggacgagcttgacaatttgatgttaaagtttacttagaagttaatactccaaaataacctagagatttttgttttgktttgttctgtttttaaattacctttttttttttttttgagacactgtcttgctctgtcactcaggctggagtgcagtggcatgatcatggctcactgcag

SEQ ID NO: 545355 - DNA, 201 bp, Homo sapiens
cttcattaagggcagcacattattatttcacttgattctacctgtccatggtccagcatttctaaaacccaactatcctttgtaggtgctagtgtggtggyaacatttaataaccagtgtaggggaagaagaataattattatctcaaccctgataagttttaagttggaatggaccccatagcaaaagacactttaaaaa

SEQ ID NO: 545356 - DNA, 201 bp, Homo sapiens
ggcaggagggcagctcccatgaatgcagtcacagagccaaatataacccaggctatggctgacatctgtgtggcgggaagttctacgaccaggcatataattttttttttttttttttgagacagagtcttgctgtgctgccaaggctggagtgcagtggcgtgatcttggctcactgcaacttctgcctcttgggttcaa

SEQ ID NO: 545357 - DNA, 201 bp, Homo sapiens
aggacgagcttgacaatttgatgttaaagtttacttagaagttaatactccaaaataacctagagatttttgttttggtttgttctgtttttaaattacctttttttttttttttgagacactgtcttgctctgtcactcaggctggagtgcagtggcatgatcatggctcactgcagcctccacctctcaggctcaagca

SEQ ID NO: 545358 - DNA, 201 bp, Homo sapiens
tccaaaataacctagagatttttgttttggtttgttctgtttttaaattacctttttttttttttttgagacactgtcttgctctgtcactcaggctggartgcagtggcatgatcatggctcactgcagcctccacctctcaggctcaagcaatcctccttcagcctcctgagtagctgggagtacaggcgcatgccact

SEQ ID NO: 545359 - DNA, 201 bp, Homo sapiens
aagctgaggtgggagaattgcctgaacccggaaggcggaggttgcagttagccgagattgggccacttcactgcagcctgggcgacagaatgaggtctccmaaaaaaaaaaaaaaaaagagttgactgcacgtgtctttaaagtaagtggatagacccacttttaaaattccctttctctttcttcacccctaaagtctac

SEQ ID NO: 545360 - DNA, 201 bp, Homo sapiens
atacgcattcaaacaaccagatctcttgagaactctatcaagagaacagcaagagggaagtctgcccccatgattcagtcacctcccaccaggcccttcckccaacatgtgaggatgacaatttgacatgagatttgtgtggggacacaaagccaaaccatatcgatgtgcataacacaggggaatggaaggagaattgtt

SEQ ID NO: 545361 - DNA, 201 bp, Homo sapiens
ctatatctccattctgtaatgtatatagacatcattccacactgtggaaagaaacagttcaaatcccctaccagggcccttactacaattataataaaaaygaataaaaagaatgtttctggccaggcacggtggctcatgcctgtaatcccagcactttgggaggccgaggcaggtggatcacctgaggtccggggttcg

SEQ ID NO: 545362 - DNA, 201 bp, Homo sapiens
gttgtggaaataaaactgaagttactctgataatttgtcgaaggcctacaagatccctatatttcccacctctgaaataaatcctttatgtcagataaacrgaaatgtagtttacaagatgtaacatcactataaggattgtgaccaaatatttacatgtagaaattaaggacaagaattgccctagttttagcatatact

SEQ ID NO: 545363 - DNA, 201 bp, Homo sapiens
cgtcccaaagtgctgggattacaggcgtgagccactgtgcctggcctttttattttgctgagtgtttcctttgataacaggagctttttcattttacacartctcatttatttatttttgcttttgtagcctgatcttttgttgtgatatccaaaacattattgccaaggctaatgttgaggaacctttcccttccgtttt

SEQ ID NO: 545364 - DNA, 201 bp, Homo sapiens
aagagtctttgcctggcaatctagaaaatttttcccgatcttctccgagaccaccaaggcagcacctctgtgattctgcaagagcagaatcacctcacagmattgctgggcttggggtaccgcctaatacagatatgcccatagtgacagaaaaacttagatcataatactcaaatttatgaataccaatacctggagagc

SEQ ID NO: 545365 - DNA, 201 bp, Homo sapiens
attgctgggcttggggtaccgcctaatacagatatgcccatagtgacagaaaaacttagatcataatactcaaatttatgaataccaatacctggagagcmttccaaaggacaggtacaaacaagccttttaatcctgttggctatttttctattttaatattctataaatcttctcaagttagtgtgttctgagataaat

SEQ ID NO: 545366 - DNA, 201 bp, Homo sapiens
gtgtgttctgagataaatcttaactattttgccgttctatactttttatgtcagaaataatttagaagctagaaacttctattgctatttgataacttgawtttttcagacatctgtaagatactaaaatctatttgtggaatacgtgtttatttttcatgtctcagagacctatcactatcaagatgagaatcttacaga

SEQ ID NO: 545367 - DNA, 201 bp, Homo sapiens
agcaaatgcacctggcctgttgttatgtttcctttagagaaatgtctgttcagatcttttgcccatttttgtttcttctggttttgtttgtttgtttttgktttgtcttgttcaaaccctgtgtcaaggacctttgccctccttttttttttttttgagacagagtcttgctctgtcgcccaggctggagtgcagtggcgc

SEQ ID NO: 545368 - DNA, 201 bp, Homo sapiens
gagcaaatgcacctggcctgttgttatgtttcctttagagaaatgtctgttcagatcttttgcccatttttgtttcttctggttttgtttgtttgtttttkttttgtcttgttcaaaccctgtgtcaaggacctttgccctccttttttttttttttgagacagagtcttgctctgtcgcccaggctggagtgcagtggcg

SEQ ID NO: 545369 - DNA, 201 bp, Homo sapiens
cagactaggaaatttcgttaacatggtaatgtcataattttaaatctagaaatttctatcttttgaatatggcatctattttataaatttgtataattatrcatcatgaaattataaattcaatcatcccatctcacctacctgacttctcctttttttttttaggaccactattatctcaatgtgaaaatctttgggtca

SEQ ID NO: 545370 - DNA, 201 bp, Homo sapiens
gcctcggcctcccaaagtgctgggattacaagcgtgagccactgcgcacggcctttcttcccatttctttttttcttttcttcttttttttttttgagacrgaatctcactctgtcacccaggctagagtgcagtggtgcgatctcagctcactgcaagctccgcctcccgggttcatgccattctcctgcctcagcctcc

SEQ ID NO: 545371 - DNA, 201 bp, Homo sapiens
tcccacctcagtctccggtgtagctgggactacaggtgcatgccaccatgctcgactaatttttgtagcgaaggcgtttcaccatgttgcccagactggtytcaaactcctgggctcagacaacctgcttgcctcagcttcccaactgctgaggttacaggcgtgagccaccaagcctggcctgtttttcagtggagtgct

SEQ ID NO: 545372 - DNA, 201 bp, Homo sapiens
actgcgcacggcctttcttcccatttctttttttcttttcttcttttttttttttgagacagaatctcactctgtcacccaggctagagtgcagtggtgcratctcagctcactgcaagctccgcctcccgggttcatgccattctcctgcctcagcctcccaagtagctgggaccacaggtgcccaccaccacgcccgac

SEQ ID NO: 545373 - DNA, 201 bp, Homo sapiens
ttttttggtagatacggggtttcaccgtgttagccaggagggtctcgatcccctgaccttgtgatccgcccgcctcagcctcccaaagtgctgggattacrggcgtgagccaccacgcccggccctttttccctatttctaagcaaattaccccgactaagatagtagtgaatagtttccttactcatcaccaacctgaat

SEQ ID NO: 545374 - DNA, 201 bp, Homo sapiens
ctcttgtcacccaggctggagtgcaatggcctgattttggctcactgcaacctctgtctcctgggttcaagtgattctcctgcctcagcctcctgagtagytgggattacaggcacctgccaccatgccaagctaatttttgtatttttagtagagacggggtttcaccatgttggccagtctggtcttgaactcctgacc

SEQ ID NO: 545375 - DNA, 201 bp, Homo sapiens
cttgtcacccaggctggagtgcaatggcctgattttggctcactgcaacctctgtctcctgggttcaagtgattctcctgcctcagcctcctgagtagctrggattacaggcacctgccaccatgccaagctaatttttgtatttttagtagagacggggtttcaccatgttggccagtctggtcttgaactcctgacctc

SEQ ID NO: 545376 - DNA, 201 bp, Homo sapiens
gtgtgtgagaaacggaacacaaatgatagagcaaagtggtgaaatgttaatactaggtgagcctgggtgaaagttgtatgcatattctttgtactagtatkgaaactttttgtatttaatatttatttcaaactactttttaaaaaccttcaacatcagatcccagtttattaaactcaataataattctcccatcggtgc

SEQ ID NO: 545377 - DNA, 201 bp, Homo sapiens
agtattgaaactttttgtatttaatatttatttcaaactactttttaaaaaccttcaacatcagatcccagtttattaaactcaataataattctcccatyggtgccacctgctccagttaccccaggtgatgatggtattggctctaaattaagccttgcaagatgtgcagttcctgatagagcaacacaaagggcaatg

SEQ ID NO: 545378 - DNA, 201 bp, Homo sapiens
attatattaggaaaggccagacatgcaaccagcactttgagaggctgaggcgggcagatcagctgaggttgggaggtcgagaccagcctggccaatgtagygaaatcccgtctctacgaaaaatacaaaaattagccaggcatggtggcacacacctataatgccagctacttgggaggctgaggcaggagaatcacttga

SEQ ID NO: 545379 - DNA, 201 bp, Homo sapiens
cctgattttggctcactgcaacctctgtctcctgggttcaagtgattctcctgcctcagcctcctgagtagctgggattacaggcacctgccaccatgccyagctaatttttgtatttttagtagagacggggtttcaccatgttggccagtctggtcttgaactcctgacctcaggtgatccacccgtctcggcctccca

SEQ ID NO: 545380 - DNA, 201 bp, Homo sapiens
agccgagatttaatggctcgataagtgttgagtgaggttactgggagaagatttcaagttgccagaagttttgattctaggattcatgtacttaaaatagragaaagagctttcttttcattttattacaaataaacttattgagacactaaagcacataggatatgtgtgaggctttaagaggctacaatttgggcctaa

SEQ ID NO: 545381 - DNA, 201 bp, Homo sapiens
tctacgagtaaggctcctggaggggttggaactgggaaaaaaaaattaaaattagctgagtttttgaaaaacttgctctttaaaaacaaaataatgttgttgatttttttttttttcccccagaacactgtggaaactctggtgttagtctatgggaaaacttctactagagaatccattctttattcattagccaccaag

SEQ ID NO: 545382 - DNA, 201 bp, Homo sapiens
ctgtgtgaccttgaataagttactctgtgtctcagtttcctcatctcatagaatgatgatagtatgtcttataattaatgtaagacacttatcacagtgcstggtactcaataggcactgaatcaataagaacaataataacaaaaggcatcatgactattttaatgttgaaaggaaatggtcttaagttaggaacttaaa

SEQ ID NO: 545383 - DNA, 201 bp, Homo sapiens
taaatagcaactgagcaaatgttacataatttcctctttatcactttcaggcttagagaaatagcataatgtccctaaagaaatgtgctggcactggcgcrgggaaggcagggggtgaggagaaaaagcatcttcactttctggttataacggagagtcggcacagccccaagagtggtcatgctccctaagcaaggaagc

SEQ ID NO: 545384 - DNA, 201 bp, Homo sapiens
ccatatgccttggcctcccaacgtgttgagattagaggcatgaaccaccttgcctaatcaacagtttcttacaaaactaaatatattctttaccatacaastcagcaattttgtttcttggaatttatccacatgaattgaaaacttatgttcactcaaaatcctgcacgtggttatttataacacctgtatttctaatca

SEQ ID NO: 545385 - DNA, 201 bp, Homo sapiens
tacgagtaaggctcctggaggggttggaactgggaaaaaaaaattaaaattagctgagtttttgaaaaacttgctctttaaaaacaaaataatgttgttgatttttttttttttcccccagaacactgtggaaactctggtgttagtctatgggaaaacttctactagagaatccattctttattcattagccaccaagtt

SEQ ID NO: 545386 - DNA, 201 bp, Homo sapiens
ggataggaatcatgttcctagcatactgtgatttttacactaaacacataattttccttgcaatgggtgggtttattataaataaaaatgttatgaataawgttctatttcaagataatctagcatcatgtatgtaatcattttcagtagatattagtttagacatttctatattgcatactctttataacaatatgttca

SEQ ID NO: 545387 - DNA, 201 bp, Homo sapiens
aaaaattcgctgggcatggtagcatgcacctgtggccccagctacttgggaggttgaggtgggaggatcactggagcctgggaagaccagactgcagtgarttatgaccaaaccactgtactccaaccagggcaacagagcaaccccatctctaaaaactaaaaaataagtttttactttctcattaaacctcaatgatct

SEQ ID NO: 545388 - DNA, 201 bp, Homo sapiens
ccatttttgtttcttctggttttgtttgtttgtttttgttttgtcttgttcaaaccctgtgtcaaggacctttgccctccttttttttttttttgagacaragtcttgctctgtcgcccaggctggagtgcagtggcgctatctcagctcactgcaagctccgccttctgagttcacaccattctcctgcctcagcctccc

SEQ ID NO: 545389 - DNA, 201 bp, Homo sapiens
attttgccatcggctattaactttttttttttttttttgagacagggtctcattctgtcacccaggctgaagtatagcggtgcattcacaactcattgcarcctcaacctcctgggctcaagcaatcctctccccacttgagtagctgggactacaggcatgcaccaccactcccagctaatttttttttttttaaagact

SEQ ID NO: 545390 - DNA, 201 bp, Homo sapiens
gatttttacactaaacacataattttccttgcaatgggtgggtttattataaataaaaatgttatgaataaagttctatttcaagataatctagcatcatrtatgtaatcattttcagtagatattagtttagacatttctatattgcatactctttataacaatatgttcatactctaaaatgtaatatgaaaatacatt

SEQ ID NO: 545391 - DNA, 201 bp, Homo sapiens
ggaagctccgggagtggaatttagaaacagttacatagacaacataaatgttctttttgcatggttctgcattcagagtagggttaagcaacatttgactytaattttcttctggaaattcaacattgaagtaagttatttgagtaggctggaaaatatactttcctataattctgtaacaaaaatctctagttccaggat

SEQ ID NO: 545392 - DNA, 201 bp, Homo sapiens
tagctgcaggtgccaccagcaagtattctcagggcaaataggaacagggttaaacattagtattttacatatatcattaaaagacagagattgtcagagtrgataagaaaacaagacttaactatatgttgtctacaagaaacccactttaaatataaagacagatatagattgaaaagtaaaggaatggaaaaagagaaa

SEQ ID NO: 545393 - DNA, 201 bp, Homo sapiens
tccttttttttttttttgagacagagtcttgctctgtcgcccaggctggagtgcagtggcgctatctcagctcactgcaagctccgccttctgagttcacmccattctcctgcctcagcctcccagtgtagctgggactacgggcgcacgccaccacgcctggctaattttttgtatttttagtagagacggggtttcacc

SEQ ID NO: 545394 - DNA, 201 bp, Homo sapiens
gagagaggttgcagtgagccgagatcgtgccattgcactgcagcctgggcaacagagcaaaaactccatctcacaaaaaaaagaaaaagaaaagaaaaagaaaaaaaagaataagacccaagaagcaagagaacgatacatccagttattggggtcatagagggaaggagagttattgtttcaaataatttaaaaacaatt

SEQ ID NO: 545395 - DNA, 201 bp, Homo sapiens
catcatgtatgtaatcattttcagtagatattagtttagacatttctatattgcatactctttataacaatatgttcatactctaaaatgtaatatgaaartacattgaccttaatatatacttactatttattatttaagttacatgagatttatcaagctctgtatattttaagattcttggaaaaagctcttggaatg

SEQ ID NO: 545396 - DNA, 201 bp, Homo sapiens
aaattcaacattgaagtaagttatttgagtaggctggaaaatatactttcctataattctgtaacaaaaatctctagttccaggatgtggaggcaaagaakaagggtcattagcatctcgctcaggtcttatcaatctgacatcccaaaattgtcacatctcctgcagatttgcaccttttatcctgaggccagcttagag

SEQ ID NO: 545397 - DNA, 201 bp, Homo sapiens
tattggggtcatagagggaaggagagttattgtttcaaataatttaaaaacaatttggtttttttttaaatatagttttcttttcctagttttctttttcyttttttttttttttttttttttctgagatggagtctggctctgtcccccaggctggagtgcagtggtgccatctctgctcactgcaagctccgcctccca

SEQ ID NO: 545398 - DNA, 201 bp, Homo sapiens
catttaaagagcaccttattctatttctgaagcaccatactagtcactatgagatacacaaagataaataaggtttagtgtctgaccttaagattattcakactggaaactaagaaaagtatgcaaaaaattataaaacaaactatgatgtgttctaaaacatgttttagaatcaagtaagcagagataaaaaaaaatata

SEQ ID NO: 545399 - DNA, 201 bp, Homo sapiens
tggccaatgtagcgaaatcccgtctctacgaaaaatacaaaaattagccaggcatggtggcacacacctataatgccagctacttgggaggctgaggcagkagaatcacttgaacccgggaggtggaggttgcactgagccgagatcataccactgcactgtaacctgggcaacagagtgaaactccatctcaaaaaaaaa

SEQ ID NO: 545400 - DNA, 201 bp, Homo sapiens
ggctggagtgcagtggtgccatctctgctcactgcaagctccgcctcccaggttcaagcaattctcctgcctcagcctcccgaatagctgggattacaggmacccaccaccacgcccagctaatttttgtatttttagtagagacagggtttcaccatgttggccaggctggtctcaaactcctgacctcaggtgatccgc

SEQ ID NO: 545401 - DNA, 201 bp, Homo sapiens
tgactttaaaatagggagattatctggaatgatccagttggataatcacaagcagccttacacgtgaaaagggaggcggaaaagttagcgttggagggggrcctggacagacccagccaaccactgccggctttgcatatggaggaagaggccacacatccaggaatacaggaggcctctaaaagctggaaaaggcaagga

SEQ ID NO: 545402 - DNA, 201 bp, Homo sapiens
taatacagaggtatctggatgtagatttgctacctctactacaatttgtttccacgagagattaaagtggtttatgagatgatgatgatgatgatgatgatgtgtgtgtgtgtgtgtgtgtgtgtgtgtgtgtgtgtgtgtgtaataaacatccaagggaaatacaatgatagtaggataaaaatggaaaagtactaaaac

SEQ ID NO: 545403 - DNA, 201 bp, Homo sapiens
atcaatatcatgaaaatggccatactgcccaaagtaatttatagattaaatactattacaatcaacctaccactgactttcttcgcagaattagagaaaaytactttaaatttcatatggaatcaaagaacaccccatacagccaagacaatcctaagcaaaaagaacaaagctagaggcatcacactacccgacttcaaa

SEQ ID NO: 545404 - DNA, 201 bp, Homo sapiens
aatacagaggtatctggatgtagatttgctacctctactacaatttgtttccacgagagattaaagtggtttatgagatgatgatgatgatgatgatgatgtgtgtgtgtgtgtgtgtgtgtgtgtgtgtgtgtgtgtgtgtaataaacatccaagggaaatacaatgatagtaggataaaaatggaaaagtactaaaacc

SEQ ID NO: 545405 - DNA, 201 bp, Homo sapiens
aaacttattaacattttctaaaattacattgttgttgcctattttaagggcatgagtagtgactttatgctacattttgcaaaaagtattgagcataatcyatagatacttaatgtatgatgaggtaaacatttacacctcagactcagaacaggcagacagctaagttctctcgctttttaaatatgcaatgaattttct

SEQ ID NO: 545406 - DNA, 201 bp, Homo sapiens
atacagaggtatctggatgtagatttgctacctctactacaatttgtttccacgagagattaaagtggtttatgagatgatgatgatgatgatgatgatgkgtgtgtgtgtgtgtgtgtgtgtgtgtgtgtgtgtgtgtgtaataaacatccaagggaaatacaatgatagtaggataaaaatggaaaagtactaaaacca

SEQ ID NO: 545407 - DNA, 201 bp, Homo sapiens
acgcaggacctcactgttagtgcctcacccacgaacttcactccaaaattccattttgcaagcaagcccaaaatactgtttctgacatgtttttaatagtrtttgttgaatccttccgtaccagacactatgctaagtgtgctatttcatttaattcctataacccattttacactttgcaaatgagcaaattgatctcta

SEQ ID NO: 545408 - DNA, 201 bp, Homo sapiens
ttaaatcaccttatttccttttcctgcatttccagattactagcagaatctgtcagtttgggaataagcgacatatatggtatgttttaaggactagatarctctggcagtacctatagtccagcaggactcatctcaaagtcattgagtttgatgacatttggagttcagtgtcctttgccctgcctgtcagtgctatgc

SEQ ID NO: 545409 - DNA, 201 bp, Homo sapiens
atgaaagaatgctcaacatcactaatcatcagaaaaatgcaaattaaaaccacaaggagataccatcttacaccagtcaaaatggctatcattaaaaaatmaaaaaataacagacgttggcaaggatatggagaaatgagaaaatgtctatacacttttggtgggaatgtaaattagtataacctctatgaaaaacatatg

SEQ ID NO: 545410 - DNA, 201 bp, Homo sapiens
caataaatgtgtaacaagtacatttaattacctttacctgttagtatgttttattttattaaagctcctggataacaggaattatgcttttgaagctttcrtaatacccagcaacatgtatggcacgcagcaaatgaaattacttgattcctttaacagattttcattttctgttgttttcctcttttcattttgaatacg

SEQ ID NO: 545411 - DNA, 201 bp, Homo sapiens
gaacttcagacccatgtatctatctccagctatatatgttctacagacacttcaaacttagcctctgcaaggcagaatttcctatcaacccacaacctccraggataaattgtcccaatgtattcactcctttgattactagtgatgtaagtttaatcagttgtttatttttctttcaaaaaacatctattgagaacactt

SEQ ID NO: 545412 - DNA, 201 bp, Homo sapiens
aagaacaaggactgaatctgtcttcctcaccactgtcttcctagattctaatattgtaaagcatttagaaaacagaaagtggcacataaatgacaagtgaytcaataaataaatataaaataaatgaatgtcctgaacttacaagtgttgaaatggtaagagtttctaatcacatctagatgtcactgggatcttcactca

SEQ ID NO: 545413 - DNA, 201 bp, Homo sapiens
tagattctaatattgtaaagcatttagaaaacagaaagtggcacataaatgacaagtgattcaataaataaatataaaataaatgaatgtcctgaacttayaagtgttgaaatggtaagagtttctaatcacatctagatgtcactgggatcttcactcaattttgctgatgtcacttacacattcacttactaatccatc

SEQ ID NO: 545414 - DNA, 201 bp, Homo sapiens
gaattgacaggatctaaaaaccatgtgttgtagccataaaaatgtaccacccagatctcatgctgtgggatcataactgtctgagggctagtttctggccrttctgaatctaccacatttatgtcaagttttgtgttttccccaggccgcttctggccagtgactaagcacatcagaagtatgaagacaggcacagctagc

SEQ ID NO: 545415 - DNA, 201 bp, Homo sapiens
ccattctcctgcctcagcctcccagtgtagctgggactacgggcgcacgccaccacgcctggctaattttttgtatttttagtagagacggggtttcaccrtgttagccaggatggtctcgatctcctgacctcgtgatccgccctccttggcctcccaaagtgctgggattacaggcgtgagccaccgcacctggtcgga

SEQ ID NO: 545416 - DNA, 201 bp, Homo sapiens
cgggcgcacgccaccacgcctggctaattttttgtatttttagtagagacggggtttcaccgtgttagccaggatggtctcgatctcctgacctcgtgatscgccctccttggcctcccaaagtgctgggattacaggcgtgagccaccgcacctggtcggacctttgcccatttttaaattgagttttttggggttagtt

SEQ ID NO: 545417 - DNA, 201 bp, Homo sapiens
ctcactgcaaactctgcctcccaggttcaagtgattctcctgcctcagcctcctgagtagctgggattacaggcatgcaccaccatgcccggctaaatttktttgtattttttagtagagacggagtttcaccatgttggccaggctggtcttgaactgctgacctcaagtgatccacctacctcagcgtcccaaagtgct

SEQ ID NO: 545418 - DNA, 201 bp, Homo sapiens
ttagttgactgcagctgggtgcagtggtttacacctataatcccagctctttggaaggccgaggtgggcagatcatctgaggtcatgggtttgagaccaamctggccaacatggtgaaaccccgtctctactaaaaatacaaaaaatagccaggagtggtggtgggcccctatagtcccagctacttgggaagctgaggtg

SEQ ID NO: 545419 - DNA, 201 bp, Homo sapiens
tgagccgagatcgtgccactgcattccagcctgggtgacagagcaagactccgtctcgaaaaaataataataaaaaataaaataaaataaaaacaatgaarttaatcagtatgtccacaggcagctcagggcaggtgttatcccctgacttaaggactggaattctaccacagatgggaagctccttcttgggcctctggg

SEQ ID NO: 545420 - DNA, 201 bp, Homo sapiens
tgggaagctgaggtgggagaattgcctgaacccggaaggcggaggttgcagttagccgagattgggccacttcactgcagcctgggcgacagaatgaggtytccaaaaaaaaaaaaaaaaaagagttgactgcacgtgtctttaaagtaagtggatagacccacttttaaaattccctttctctttcttcacccctaaagt

SEQ ID NO: 545421 - DNA, 201 bp, Homo sapiens
aatgtccaattagcattccagaaaactggagaaagagggtggaggttgagtgaatcctaggtcaaggagaatcactgatgtttaatttttagcgtgggagrtgagggaaagggaggccaggtaggggtgcagaaggtggaacttatgtaaatagtgatacaggtcattcctctgaggataaaggaactggagatgtcccga

SEQ ID NO: 545422 - DNA, 201 bp, Homo sapiens
gatggtgaaaccccgtctctactaaaaatacaaaaattagctgggcgtggtggcacgcgcatgtaatcccagctactcgggaggctgaggcaggagaatcrcttgaatccgggaggcggaggttgcagtgagccgacatggtactattgcactccagcctgggcaacaagcgtgaaactctgtctaaaaaaaaaaaaaaaa

SEQ ID NO: 545423 - DNA, 201 bp, Homo sapiens
ttttcaccaaatcacggaaggtttccctggctcagagtctggctggattcatatgtgcatttctcttcctcctttttactgagactttgcagtctacgacygggctaggctgcagtgtcatgcttcccatgtgaagtccaaaaccttgaattttaataagtagagcctaggattttttttttaattttcaaatagaaacca

SEQ ID NO: 545424 - DNA, 201 bp, Homo sapiens
aaaccccgtctctactaaaaatacaaaaattagctgggcgtggtggcacgcgcatgtaatcccagctactcgggaggctgaggcaggagaatcacttgaayccgggaggcggaggttgcagtgagccgacatggtactattgcactccagcctgggcaacaagcgtgaaactctgtctaaaaaaaaaaaaaaaaaaaagca

SEQ ID NO: 545425 - DNA, 201 bp, Homo sapiens
aacttcagtgacagctgtcaaaattaacacaataacttctatttatggttcattctccaaaaatgcagttttctgctgtacttttacaggaacattaagayatatgtatctgaggcaaaggttctctaccattggatcaactttctaatcagctgtctttgcctctgaaatatgatgatgttattgagtatttcagagaat

SEQ ID NO: 545426 - DNA, 201 bp, Homo sapiens
cacacacctataatgccagctacttgggaggctgaggcaggagaatcacttgaacccgggaggtggaggttgcactgagccgagatcataccactgcactstaacctgggcaacagagtgaaactccatctcaaaaaaaaaaaaaaatttaggaaaaaggagagggaaggtcaataagcccagcagatcaataggccagaa

SEQ ID NO: 545427 - DNA, 201 bp, Homo sapiens
gtgggggaagagtattaagagacacagaacattaagactatttgtctttgtttgtttgtgttgctccaacaaaataccaaagactgggtaatttttttttwaattttactttaagttctgggatacatgtgctgaacgtgcaggtttgttacataggtgaacatgtgccagggtggtttgccacacctatcaacctgtcat

SEQ ID NO: 545428 - DNA, 201 bp, Homo sapiens
tggtgcgatctcggctcactgcaagcttcgccttccgagttcacgccattctcctgcctcagcctcccgagtagctgggactacaggcgcctgccacctcrcctggctgattttttgtatttttagtagagatgggctaattttttgtatttttagtagagacggggtttcaccatgttagtcaagatggtctcaatctcc

SEQ ID NO: 545429 - DNA, 201 bp, Homo sapiens
tgcccaccaccacgcctagctaagttttgtattttagtagagacggggtttcaccatatcggccaggctggttttgaactcctgatcttgtgatccgcccscctcggcctcccaaagtgctgggattacaggtgtaagccaccacgcctggcccctctcatttactttaatgtgaccatatatctatgcccaaaaaatcta

SEQ ID NO: 545430 - DNA, 201 bp, Homo sapiens
cacagaacattaagactatttgtctttgtttgtttgtgttgctccaacaaaataccaaagactgggtaatttttttttaaattttactttaagttctgggrtacatgtgctgaacgtgcaggtttgttacataggtgaacatgtgccagggtggtttgccacacctatcaacctgtcatctaggttttaagccccacatgc

SEQ ID NO: 545431 - DNA, 201 bp, Homo sapiens
tggtgagctgattgttcctgaccccacacctacactttttcccacacacaggtgtacctcattttattggcattgctttattgcactttgaagacactgcttttttttttttaaacaaattgaaggtttgtggcaaccctgagttgaccaagtctaccagcaccatcttttcaaaagcatatgctcattttctgtttttgt

SEQ ID NO: 545432 - DNA, 201 bp, Homo sapiens
ggatgtctaatagacattttaaaacttaacatgtccgacctaacacttgagcttacctaccactggaaagttttcaacctcagtcttcatcaaagtaaatrgaactccattaatcccattctaaagctaaaaatcttgaattcttcctctactcctctttcatgcccaacgttcaataaaaaagcaaatcctgttgacttg

SEQ ID NO: 545433 - DNA, 201 bp, Homo sapiens
aatattatgttgacctggaaaataaatttgggttaattatgattataacttgtctttagttactcatctctgattgacattgttctttggtttatcttggkgtttgctgggttgtttcctctatgggaagaggaggtggtgatatgcagtgttccccaagcctgaagaatgaaaaaattcaacaagacatttgtaaacatg

SEQ ID NO: 545434 - DNA, 201 bp, Homo sapiens
aatggaactccattaatcccattctaaagctaaaaatcttgaattcttcctctactcctctttcatgcccaacgttcaataaaaaagcaaatcctgttgasttggcattgaaaacatatttagaatcttactcttcctacctatctgctctgctactggcttcctctaaaccatcatcacttgatgatggaaggtggaaac

SEQ ID NO: 545435 - DNA, 201 bp, Homo sapiens
cagatttctaacaaaaagtatgtgttaatgatagcaacttaaccaacagatacttttaatttgccatatgtattttgttaggttatctcccttgaatagtrtaactaatacatggacatttattacataagattcaaaataatttacttttctgatcataaagggtagtacaagttgtgttcttttcacacttaacttttt

SEQ ID NO: 545436 - DNA, 201 bp, Homo sapiens
caaaggaatattatcctgcctttaaaagaaatgagagccagacatagtggtgtacaccagtagttccagctacttggaaggctgaggtggtaggatcactkgagcccagaggttcgagttcagcctggccaacatagtaagacccccatctttaaaataaataaattaatcatttacttaaaaggaatgaaattctgatac

SEQ ID NO: 545437 - DNA, 201 bp, Homo sapiens
ttttttaaaagcttctccatgtctacataggaccttgacaagattttgataggaattgcattaagcctatagatcagtttgggtagaagtgatatctttartatgttgagtcttccaatccatgaatgcaatatgtctttccatttatttcaatcttcttttatttcttcatcagaattttataatgttcaacatacagat

SEQ ID NO: 545438 - DNA, 201 bp, Homo sapiens
ggtcaataagcccagcagatcaataggccagaaacaggtctttatatgtatgtcacttaatgacagggatacacctgggaaaatgtgttattaggtgattycgtcattgtgtgaacatcatagaaggtacttacacaaacctaggaggtagagcatactacccacttgggctatatagtatggcccattgctcctaggcta

SEQ ID NO: 545439 - DNA, 201 bp, Homo sapiens
tatatgtatgtcacttaatgacagggatacacctgggaaaatgtgttattaggtgatttcgtcattgtgtgaacatcatagaaggtacttacacaaacctrggaggtagagcatactacccacttgggctatatagtatggcccattgctcctaggctataaacctgtacagcatatgactatgcagaacactgtaggcca

SEQ ID NO: 545440 - DNA, 201 bp, Homo sapiens
tgttccctccaaatcttcactatggaagatttcccaggacaatcttgagtctacagttctgagtgctttgcctgtcttaatcacaaattaatttctctctytctatgtctgcattagaacccagaacagagatacagaagggcgatatcagtaatcaatgctggtgataatgtttgcttggggctgctggggaaacctggc

SEQ ID NO: 545441 - DNA, 201 bp, Homo sapiens
tctttcatgacaggatcagacctgagctttggtctgaaggctccacggccttctcctgcccccttccccatagataacctgcctctctcacctcatcatcrgtgtttgcttcatgacagccctgaatttatataccacatgaatatgtatctatctttaaagggaagatgatcaaccctctatttttccccttccccgcat

SEQ ID NO: 545442 - DNA, 201 bp, Homo sapiens
atcatttgcaagtgtatatttataggagcactttgaaggaaggactatgttttttccacggttgtataaccagtatctggcatataataaatactcagtaratatttgttgaataaattaactaaacaaatagactttgtaaatttttttctgtcccagtctttttggagagtggattcaaccaaactgtaggcttttgaa

SEQ ID NO: 545443 - DNA, 201 bp, Homo sapiens
ctgcatgttctcacttaagagtgggagctaaaacattgagtacacatggacgcaaagaagagaacaacagacgacaccggggcccacttgagggtggagcrtgggaggacagtgaggataaaaaactacctatcaggttctgtgcttatcatctggatgatgaaataatctgtacaccaaactctcacggtgtgcaattta

SEQ ID NO: 545444 - DNA, 201 bp, Homo sapiens
taatttcaagcttgtcattttctacatttgcataaggtccagccagactggctgtgcaaatgctttttgttaattaaatttgattgttttgcctatactgrgtatagaaattatatttacaacaaatatttccaatagaaattaagtatgtgcaaatattactacagtaatgaaaatcatatgagaaggtctactcttccc

SEQ ID NO: 545445 - DNA, 201 bp, Homo sapiens
atcataaaatttgatctcaacttgattcaaagttttggtgcttgcctcctaaatataaaaagggaattttctcttaatcattctaggagcatgcattttcyaaagccagtgctcaagtatacactgaagaaaatgttattttcggtgagtaatatgtaattaaagaaagaatgctatgaaaggtttgatattgtggctaaa

SEQ ID NO: 545446 - DNA, 201 bp, Homo sapiens
tttgatcagtgatctttgatgctactattataattgttttgagatgtcatgaactgcacccatataaggcagcaaacttaatcaataagtgtgtgtgttcrgactcctccattcaccagctattctcatgcctcttctcatgccttcatatttccggagacacagcaatactgaaattaaaccaattagtaatcccacagt

SEQ ID NO: 545447 - DNA, 201 bp, Homo sapiens
ttttgctaattctcacaattatattttcaactttttcatgagtatgttatctattgtagtgatctttgatcagtgatctttgatgctactattataattgytttgagatgtcatgaactgcacccatataaggcagcaaacttaatcaataagtgtgtgtgttcggactcctccattcaccagctattctcatgcctcttc

SEQ ID NO: 545448 - DNA, 201 bp, Homo sapiens
atacctcattttattgcacgtcacttttttatgcttggcagaaattgtgttttgttgcaaattgaaggtttgtggcaaccctgcgttatgcgagtctatcrgtgctatttttctaatagcatgtgcctactttgtgtctctgtatcacattttgctaattctcacaattatattttcaactttttcatgagtatgttatct

SEQ ID NO: 545449 - DNA, 201 bp, Homo sapiens
gttcagagctcttgagtaccgagtgccttccttcacagaatgcttaaatgacatgcaaagctttcctaatagtttgtttaaatttacatagggatttgggrcctgtatactcctgtcttaatccatctggtgttgctataaaggaatccctgaggctaggtaatttatttttaaaacagtttattttacccataattctaa

SEQ ID NO: 545450 - DNA, 201 bp, Homo sapiens
aattaatttcaatggttacatatagtggcaagggagaaatagaataaagtcagagttggcagcaagactgcagtacacaggtatacctcattttattgcaygtcacttttttatgcttggcagaaattgtgttttgttgcaaattgaaggtttgtggcaaccctgcgttatgcgagtctatcagtgctatttttctaatag

SEQ ID NO: 545451 - DNA, 201 bp, Homo sapiens
ctgagaagaggtcccctttacccatggagtatctgtcgtttacaatgaatagaaaaaaactcttaaccttgtaaaccccatgacattttccacagcagtcwgactggtccccattgtctaggccatattccaccagaggcttcagcattctgcctatttacacagcctgtttaaattcctatgaagcaaactggcactttc

SEQ ID NO: 545452 - DNA, 201 bp, Homo sapiens
caatattttagtgttactgttatcagttgtacagaataatctttctagaaggatatgtatgaagatagtaaagattcgatcccattgtaactctgctaaawctctaaagctttagtaacttatttccctgagaagaggtcccctttacccatggagtatctgtcgtttacaatgaatagaaaaaaactcttaaccttgtaa

SEQ ID NO: 545453 - DNA, 201 bp, Homo sapiens
ccttccaaaataagctcccaaggaaagtaatcttctcactgtcaaaaataaccaagcatacaaggaaacaaggcatcataaatgagagaaacaacccaccmaggattaagacgttggattataagaattaggatgggcatgatggctcacacctgtaatcgtagcactttgggaggccgaggcaggcagatcacctgaggt

SEQ ID NO: 545454 - DNA, 201 bp, Homo sapiens
gtgttttgtaaaactgtagcactcacactgatatatgagtttatggaacctctttgttcattttttatctaaacaatggaggttttgaggatttaattttrtctgatgtgtgaagtgtctagtgcctaatttcacattgattctttcagctgctctgcactttgttagcactcatttcaagagtaaccatggagagctatt

SEQ ID NO: 545455 - DNA, 201 bp, Homo sapiens
atggactcattgatatatccattcatacctcccgtcttcctcccttgaaacctgcattctcccacccaagaaacatgattgaataccaggtttccagatcktgtaaagttacttcagagtaagttagatagatgaccagtgttttgtaaaactgtagcactcacactgatatatgagtttatggaacctctttgttcattt

SEQ ID NO: 545456 - DNA, 201 bp, Homo sapiens
acttcttgaaggaaatgaaaagtgctacccaagtgaacatacaaatgataaggaagcgaaacagcctttttgttgatatggatgaagtttgagtggtctgragagaagaacaaaccaggcacaacattcccttaagccaaagcttaatcagagacacattgtgactctcttctttttttttttttcccgagacagagtttc

SEQ ID NO: 545457 - DNA, 201 bp, Homo sapiens
ataatggggactgaatctgtggtctttttatcattatcacagggctataaacctgaggttggcaaaccatgtttcacttaagaatcctcaagtttcaaggraacatggactcattgatatatccattcatacctcccgtcttcctcccttgaaacctgcattctcccacccaagaaacatgattgaataccaggtttccag

SEQ ID NO: 545458 - DNA, 201 bp, Homo sapiens
aagccaaagcttaatcagagacacattgtgactctcttctttttttttttttcccgagacagagtttctctcttgttgcccaggctggagtgcaatggcamgatctcggctcactgcaacctctgcctcccgggttcaagtgattctcctgcctcagcctcctgagtagctgggattacaggcatgcgccaccgtgcctga

SEQ ID NO: 545459 - DNA, 201 bp, Homo sapiens
taaactgtggccataaaatagaaaaaaaaatgctaactagtccataatggggactgaatctgtggtctttttatcattatcacagggctataaacctgagrttggcaaaccatgtttcacttaagaatcctcaagtttcaagggaacatggactcattgatatatccattcatacctcccgtcttcctcccttgaaacctg

SEQ ID NO: 545460 - DNA, 201 bp, Homo sapiens
agatgaaagttgttttcatgcctgcaaacatgacatctgatttggtttggctgtgtccccatccaaatctcatcttgaactgtagcctccataattcccayatgttgtgggagggacctgatgggagatgattaaatcatgggggtggttcccctatactgttctcatggtagtgaataagtcttatgagatctgatgatt

SEQ ID NO: 545461 - DNA, 201 bp, Homo sapiens
gggaatataaactgtggccataaaatagaaaaaaaaatgctaactagtccataatggggactgaatctgtggtctttttatcattatcacagggctataarcctgaggttggcaaaccatgtttcacttaagaatcctcaagtttcaagggaacatggactcattgatatatccattcatacctcccgtcttcctcccttg

SEQ ID NO: 545462 - DNA, 201 bp, Homo sapiens
ggctggtctcgaactcctgggctcaagcaatcctcctatcttggcctcccaaagtgctgggattacaggcgtgagccaccacgcccagccttgaccccaatttttttttttttttttttttgagatggaatctcgctctgttgcccaggctggagtgcagtggcacgatcttggctcactgcaagctccgcctcctgggtt

SEQ ID NO: 545463 - DNA, 201 bp, Homo sapiens
agcaatcctcctatcttggcctcccaaagtgctgggattacaggcgtgagccaccacgcccagccttgaccccaatttttttttttttttttttttgagakggaatctcgctctgttgcccaggctggagtgcagtggcacgatcttggctcactgcaagctccgcctcctgggttcaagccattctcctgcctcagcctc

SEQ ID NO: 545464 - DNA, 201 bp, Homo sapiens
caggcgtgagccaccacgcccagccttgaccccaatttttttttttttttttttttgagatggaatctcgctctgttgcccaggctggagtgcagtggcaygatcttggctcactgcaagctccgcctcctgggttcaagccattctcctgcctcagcctcctgagtagctgggtctacagtgcccgccaccacgcctggc

SEQ ID NO: 545465 - DNA, 201 bp, Homo sapiens
attttttagcagagacggggtttcaccgtgttagccaggatgggctcgatctcctgacctcgtgatccacccaccttggcctcccaaagtgctgggattayaggcgtgagccaccgcgcccggccccttgactccaattttgaaaaaagttttactgtgggtaaaatgctgtcaaacaaatattgcacgcaacagagaaac

SEQ ID NO: 545466 - DNA, 201 bp, Homo sapiens
accgtgttagccaggatgggctcgatctcctgacctcgtgatccacccaccttggcctcccaaagtgctgggattacaggcgtgagccaccgcgcccggcmccttgactccaattttgaaaaaagttttactgtgggtaaaatgctgtcaaacaaatattgcacgcaacagagaaacctttcatgaaaggaaaagtcaatt

SEQ ID NO: 545467 - DNA, 201 bp, Homo sapiens
atatgtctattcttctctgtttctgaggccttaaagtaaggtctgatgatcgtggagttaggtgtagcatcatgtaagaattagaagcagtcagagaggcmgggcacagtggctcatgcctgtaatcccagctactcgggaggctgaggcaggagaatcacttgaactcgggagttggaggttgcagtgagccgagatcgt

SEQ ID NO: 545468 - DNA, 201 bp, Homo sapiens
tcttttcaaaaagattcacaaaatgagatatcagtgcctttattattaatctctttgtaccttatatgccctttaatatgttaagaatttattgtttaaawccctaacagagatgaagagcaattggtcaccatcttttgtaggaaacagatgtggttgtatggactttcccatgaatccaactccacagtggaactaatg

SEQ ID NO: 545469 - DNA, 201 bp, Homo sapiens
cacagtggctcatgcctgtaatcccagctactcgggaggctgaggcaggagaatcacttgaactcgggagttggaggttgcagtgagccgagatcgtgccrctgcactccagcctgggtgacagagtgagactcttgtctcaaaaaaaaaaaaaagaagcagtcagagaaatgagcacgtctgcctttttagttctagaga

SEQ ID NO: 545470 - DNA, 201 bp, Homo sapiens
attttgttttaataaagtgagcaataggaaaccactgatagccgagccagataatgaagtgatgtaagtgttgttttagaaagatggcctgcgtggcgggktcggtggctcatgcctgtaatcccaacactttgggaggccgaggcgggcggatcacaaagtcaggagttcaagaccagcctggccaatatggtgaaaccc

SEQ ID NO: 545471 - DNA, 201 bp, Homo sapiens
gacttctttccagaggaatcaaagttttcaagctgctaaatgccctgagggagacaagagagctataaggctctgtctccactgcacatatacgattcagtgccgccaagagcaatgaaaacaattttgtatcattatttgtaagttttgaaattacattatgtatgttaccgctaactaaaagtgctatatttgtccaaa

SEQ ID NO: 545472 - DNA, 201 bp, Homo sapiens
gggcggggtggcatgcacctgtaatcccagctactagggaggctgagtcaggagaatagcttgaacccaggaggcagaggatgcagtgagccaagattgtracactgcactccagcctgggtgacagagccagactctggctcaaaaaaaaaaaaaaaaaaaaagtaatggagggggaaagagccctggggtcacctggac

SEQ ID NO: 545473 - DNA, 201 bp, Homo sapiens
actgaaaagaaaagagaatgcttagacactgttggtggaaatgtaaattatttcagtcactgtggaaagcagtttggagatttctcaaataatttaaaacrgaactaccattcaacccagcaatcccgtaactgaatatatatccagtggaaaataaattgttctactaaaaagacacgtgttcatatgttcatcacaaca

SEQ ID NO: 545474 - DNA, 201 bp, Homo sapiens
agctacaccaggtaagtcaagcaatcagaaggccaaaaggggagaaacttgcaaagaggtgttatttgtgtgtatgtgtgtgcacgggtgtgcagaggccaagaaaaaataaaagcaagaaaatgccattatcttccattaggagatcattggaaacctttagagagtgctttaagcagatctaaggaagctgaatccaaa

SEQ ID NO: 545475 - DNA, 201 bp, Homo sapiens
ccatatgagctaatcagtttgtcattagtctctgacatactccagagagcaatgcttatgaacttcacatcaggattgagaaatagcaagtgtggtgtgcrtcatctatgaccctcagctgtaccaagttaatttttaaaatgtaattgctaaacctataatgaggctctgaagatgatcatatctatgcagtgagtcacc

SEQ ID NO: 545476 - DNA, 201 bp, Homo sapiens
gtttgcactctattgagaacaatccttaagataatttaaacactcctatagtggatagtacaggatatgatgggagtacatgggctcagaaaccttcctastagcccctaaatccattctatacaccttaaaactttggcttccaagtgacttgtgtccaaacgatgtgacatgatcatccacccctggattttagccggc

SEQ ID NO: 545477 - DNA, 201 bp, Homo sapiens
agagcctggacagtatgaaggctctgacagccgccatcgaagctgcaaacgcccagatccatggccctgccagtcaacacatgggcaataacactgccacygtcaccaccacgactaccatagccaccgtcaccacggaggacaggaagaaggaccactttaagaaaaatcgatgcctgtctatcgggatacaggtaacag

SEQ ID NO: 545478 - DNA, 201 bp, Homo sapiens
gaggcaggagaatcacttgaactcgggagttggaggttgcagtgagccgagatcgtgccactgcactccagcctgggtgacagagtgagactcttgtctcaaaaaaaaaaaaaagaagcagtcagagaaatgagcacgtctgcctttttagttctagagacctaactcctcttgaaataggaaaggatgcatatgataatt

SEQ ID NO: 545479 - DNA, 201 bp, Homo sapiens
gtctcaaaaaaaaaaaaaagaagcagtcagagaaatgagcacgtctgcctttttagttctagagacctaactcctcttgaaataggaaaggatgcatatgmtaattatgcttaaggatttgtaatcctgattttaactcagcaaaaagatcaccagcacactgaaactccttgcagctttgccatagacccactgggaggg

SEQ ID NO: 545480 - DNA, 201 bp, Homo sapiens
tgacacagcagagaaaattattctgtaagatgcatttgaatgtgccctaagggagatgggtggcaaaaactgttaaccacatctgggttgaacaatctgtaaaaaaaaaaaaagcatgaccagaatgtgaaagagatcaactcaacacccatagagctttaaaacccccattctaactttcagagaaaatctgctgatgtt

SEQ ID NO: 545481 - DNA, 201 bp, Homo sapiens
tttttttgagacgaggtctcactctgttgcccaggctggtctccaacacctgggctaaagcgatccttatgcttcagcctcccaaagtgctgggattacargtgtgagccaccacacccagcccccatgtctattaagttcttagcacagtgtccagtacacagagtaaggatttgctctctggtgattaggaagatctaa

SEQ ID NO: 545482 - DNA, 201 bp, Homo sapiens
gcatcacaaagtgtagatttgatcttcttgaaacaaatgaagaattcatccttcttggacatgcaaaaacaaagcaaaacaggctgggcgcaatggctcaygcctgtaatcccagcactttgggaggccaaggcagacggatcacctgaggtcaggagttcgagaccagcctggccaagatggcaaaaccctgtctctact

SEQ ID NO: 545483 - DNA, 201 bp, Homo sapiens
ctggccaagatggcaaaaccctgtctctactaaagatacaaaaattagctgggcatggtggcaggtgcctataatcccagctactcaggaggctgaggcasgagaatcacttgaacccaggaggcggaggttgcagcgagctgaggttcattgcactctagtttgggggacagagtgagacttcatctccaaaaaaaaaaa

SEQ ID NO: 545484 - DNA, 201 bp, Homo sapiens
gatggcaaaaccctgtctctactaaagatacaaaaattagctgggcatggtggcaggtgcctataatcccagctactcaggaggctgaggcaggagaatcrcttgaacccaggaggcggaggttgcagcgagctgaggttcattgcactctagtttgggggacagagtgagacttcatctccaaaaaaaaaaaaaaaaaaa

SEQ ID NO: 545485 - DNA, 201 bp, Homo sapiens
ccctgtctctactaaagatacaaaaattagctgggcatggtggcaggtgcctataatcccagctactcaggaggctgaggcaggagaatcacttgaacccrggaggcggaggttgcagcgagctgaggttcattgcactctagtttgggggacagagtgagacttcatctccaaaaaaaaaaaaaaaaaaaaccttcaaga

SEQ ID NO: 545486 - DNA, 201 bp, Homo sapiens
tttgtttttgtttttgttttgagatggagtctcgctctgttgtccaggctggagtgcaatggcacgatctcggctcggctcactgcaacctctgcctcccrggttcaagcgattctcctgcctcagcctccgagtagctgggactacaggtgcatgccaccatgcccagctaattttttgttttgttttgttttgttttgt

SEQ ID NO: 545487 - DNA, 201 bp, Homo sapiens
gcagattttcacgttcacatgtcagcttccaagacattgtcttccagaacttcatctcctaaataatttgccatgagcaccacttatcaacaaactgataycttggctgaaatgagtcctcactcaaattttttaatggtatgtcaagatttgtgtgacagggaaaaaagagatagcaaagaaactactaatcacttactt

SEQ ID NO: 545488 - DNA, 201 bp, Homo sapiens
gaagaagagtgtaaacattgtacatattttaaagatgaaattgcaaacaaaagttttgaaaaatttgcagatttcttttttttttttttgacatggagttycactttttttttttttttttttttttgagacggagtctcactcttgttgcccaggctggagtgcaatggcgcaatctcggctcactgcaacctccgcctc

SEQ ID NO: 545489 - DNA, 201 bp, Homo sapiens
caccacttatcaacaaactgatatcttggctgaaatgagtcctcactcaaattttttaatggtatgtcaagatttgtgtgacagggaaaaaagagatagcmaagaaactactaatcacttacttcatagtttctaccacattgtgaaaatgaaatatttcttttttctttctctttacttgagccaagatagaaatctctc

SEQ ID NO: 545490 - DNA, 201 bp, Homo sapiens
gaaatatttcttttttctttctctttacttgagccaagatagaaatctctctgcatcctagacctgttatggatgaatgtttcgtaattgtataagaaagrgccatccattaaatttaagtaaacttctatttatctattataagtttcatcaacaataaaatatagctgttttataatgactagaattataatagccaac

SEQ ID NO: 545491 - DNA, 201 bp, Homo sapiens
aaggtgaggtttagagaaatgatgatcaaataatataaaatttttgttgaatgggaggaatgacttcaagagccctagtgtccaacatggggactattgtwaatgtattgcatacttgaaaaaaaatttaagtaaaaatgctacttgcttggaaaaaaacaaagggttagatggcatttagcacatttaattcacaaagca

SEQ ID NO: 545492 - DNA, 201 bp, Homo sapiens
tcccttagcagtcatgtaaaacaattttatatatgtgtatatatgatatttataaattgtatatatatggcttgaattattttcaaaacttagtaattatyagcagaaaatagaactcagatggaaaacagtaaccttagaaggcagagatctaaactctggaaacttacaatatgtttgttctgttaaaaatgacaatgt

SEQ ID NO: 545493 - DNA, 201 bp, Homo sapiens
tagggctaaaacgaacattcagaataaatgaccccaatggaaacagaaagaatttttttaaataagaaaactttcagaaactacaacttaatattactcarttagttttcacagaacattgaaaggatattgcaatcacaatagaagaatataaatagggccgggaccggtggctcacacctgcaatcccaggactttggg

SEQ ID NO: 545494 - DNA, 201 bp, Homo sapiens
ctgagaacaatgttgcgtttgattagcagcgcagccagtgctttctgaaagatctgctctccccagaagaggcggctgctatcagttgaatagatctctargccagacatgccgaggcttggggcatttgtctggcgttaggaagtgtctggaatactagcaactaccaactggcgtgtcttatgactacaggaattatta

SEQ ID NO: 545495 - DNA, 201 bp, Homo sapiens
catgcattatgctcccaacaggctaaatctcttctgggatccactgaatgccactagagggtctgctcgagagaattcctgattgaatgacaacggcgctragaacagtaagtcatggttgggaagcagtaagggaagaatggagcccagatatcctaaattaaaatataaaaggctaacgttattaggcatgtacatcta

SEQ ID NO: 545496 - DNA, 201 bp, Homo sapiens
ggagcgttctagtccttatttgctgctaactagtaacatgacctggaaacatgctttcagctctctggacctccttcctctgctagaaaatgaggcgcttrgtccaaaagatgtatgatctcagtatgcattttcaaactcgtaaattacatgtgtcagagtactaattagaactattttcaagaattggaagtcccagga

SEQ ID NO: 545497 - DNA, 201 bp, Homo sapiens
atcatttgcccaggaacacataaacagtaagtgggggagctagcacttgatcccaaatctacccaactccgtaatatgcttcagtaatggaaatgagtgcrtattttttattttattacttgatttattttgtggtaaatgtatgtgtgcatttgacctcatatgcatgtgagaagttaagagggcatggatatgaaatta

SEQ ID NO: 545498 - DNA, 201 bp, Homo sapiens
cttatactgaagctgctacattgtctggagtaaatacccagggtttgtcatctcgcggcaggaaaatttaggacatggacactcatgaggagtttaggagyggaagtttaacaggcaaaagaaggaggaagaaaaagaaaggaaaacagctctctctagtgagagaagggtcttccgagaggacctgccagtggtggatgt

SEQ ID NO: 545499 - DNA, 201 bp, Homo sapiens
gaggcaggaggattacccgagctcaagagttcgagaccagcctgggcaatatagcaggactccatctgtgctaaaaaaaaaaaaaaaaaaaaaaattagcyaggcatggtggtgcatccttgtagtcccaactactcaggagtctgaggtgggagaattgcttgagcccgagaggatgaggctgcagtgagctgtgattgc

SEQ ID NO: 545500 - DNA, 201 bp, Homo sapiens
attacaggcatgagccaccacacccagctgaaaggtaaatttaatctatgttccctgagtctaaaaagttctatccagagtttcaatctggggacacttgyctttgctgaagagcccccaaaagagaaaaggcatggcgcagctcagaacaaagggaaagtaagagaagggctcccatctttaattataactgaataaaaa

SEQ ID NO: 545501 - DNA, 201 bp, Homo sapiens
tcttttttttttttttgacatggagtttcactttttttttttttttttttttttgagacggagtctcactcttgttgcccaggctggagtgcaatggcgcratctcggctcactgcaacctccgcctcctgggttcaagaggttctcctgcctcaccctcccgagtagctgggattacaggcatgcgccaccacagccggc

SEQ ID NO: 545502 - DNA, 201 bp, Homo sapiens
aacaagagctgtctaaacaaccttcccccatgattccttaattgaaggaatctgttagggattcctagtgctttttgaaagggtgtcatacttgatcaaarcagtcaggtttccaagaaatacccttacacagcattctctttctattttcattttatttatttattttagtttattctgtttgtttgtttgtttgtttgt

SEQ ID NO: 545503 - DNA, 201 bp, Homo sapiens
ggaacactgtctttgccctacaatatataaactgaataaaaatatgcaatatttattattatcataaccaacatagtctttaaataatgctgttaattctrttaacagtgtgctttgctacagttctcaaaacaagagctgtctaaacaaccttcccccatgattccttaattgaaggaatctgttagggattcctagtgc

SEQ ID NO: 545504 - DNA, 201 bp, Homo sapiens
caatattcatattctgtagcttacaataatattcattcatttattcatgctttctgtcattaattcaatgtgtatttacttatccaacaccaactaagacscagccactgtggatacaaaggtgaccataatgtttgctatcatcaagaagcttacagagacggagagacagagacagagaggtttgcactctattgagaa

SEQ ID NO: 545505 - DNA, 201 bp, Homo sapiens
tctccacctcctggttcaagctattctcctgcctcagcctcccaagtagctgggtttacaggcacccgccaccacacccagctaattttttgtatttttartagagacggggtttcaccatgttggctaggctgatcttgcactcctgacctcaggtgatccaccctcctcggcctcccaaagtgttgggattacaggtgt

SEQ ID NO: 545506 - DNA, 201 bp, Homo sapiens
gtttacttcggccctttttacattctatatacatactgcacttcctggtataaaatttgttttgcttatttttttggcattgagttctgagttttttctaygaaagtcctgtatacacttttgcaagttattgtttttaagttcatagctatatcttcaagtatttctgaaagtacttttccattgtgatgactatatata

SEQ ID NO: 545507 - DNA, 201 bp, Homo sapiens
gatagtacaggatatgatgggagtacatgggctcagaaaccttcctagtagcccctaaatccattctatacaccttaaaactttggcttccaagtgacttstgtccaaacgatgtgacatgatcatccacccctggattttagccggccctgctgtagaaactctctagggacaggctttgatttagctgtttctgtcttt

SEQ ID NO: 545508 - DNA, 201 bp, Homo sapiens
ccacacccagctaattttttgtatttttagtagagacggggtttcaccatgttggctaggctgatcttgcactcctgacctcaggtgatccaccctcctcrgcctcccaaagtgttgggattacaggtgtgagccaccgcacctggcccaaaaatttgcagatttctagaaaatgttaacctccttaaagccagcttttga

SEQ ID NO: 545509 - DNA, 201 bp, Homo sapiens
tgagctggtctggaaacaattacaatttataatattttttctatggaaattattttagatgttccaaacacaaaatttacaagtgaacttccaaaacacarcctgctcctaaggtggaggcagcctgtacaggagatcttaatggcagagattttatgttttatttcctctctgattgttgtatcaagaatagagcaattt

SEQ ID NO: 545510 - DNA, 201 bp, Homo sapiens
ttagttattttgtcctcatcagtgccagctgctttcccaagatggcagaacattcatcattgctaccagacagcctcgttggagctctttctctggcctcyttttttggcttctttcttcagctcttcagcatcattctctgtgggaccctccctagtttgcaaattcttgtctaaatttcactcattatcataaccatcc

SEQ ID NO: 545511 - DNA, 201 bp, Homo sapiens
aaaagtcaagagcctaacatgtgcctgacaccctgctgaaagcgtttagatttctgggctggttacatgctcaaaaagaacacatggagttgatagtgacttttttttttttttttttttttagagggagtctcactctgttgcccaggctgggagtgcagtggcgcaaactcagctcattgcaatctctgcctcacgggt

SEQ ID NO: 545512 - DNA, 201 bp, Homo sapiens
cctcagcctcccgagtagctgggactataggcgcccaccacgacacccagctaattttttatctttttagtagagacagggtttcatcatattggccaggytggtctcgaactcctgaccttgtgatcctcccgcctcggccttccaaagtgctgggattataggcatgagccaactcgcccggcccgatagtgacatttt

SEQ ID NO: 545513 - DNA, 201 bp, Homo sapiens
aggatcttgtggccaggagttcaagaccagcctgagcaacaatgtgagaccccatctctacaaaaaaacacaaaaattagccaggcatggtggcacacacytgtaatcccagttactcaggaggctgaggcaggagagtcgcttgaacctgggaggcagaggttgcagtgagctgagattgtaccattgcactccagcgtg

SEQ ID NO: 545514 - DNA, 201 bp, Homo sapiens
tgttcccacagctctcattcattctctctctctccacccccccaacctctccttctcccttttcctctctccctctctctttctccctctccctctgttcyttctctttctctctctctttttctctctgtcaccctcttggtgttggtgagagagggagcatcttaaatactttgagtcaaaagctggtgaaaataaaaa

SEQ ID NO: 545515 - DNA, 201 bp, Homo sapiens
ataaactttaaaatttatttcttctaatgaactttagaacttttgggcactttaggaactataaatttataaatatatctatctatctatctgtttatttrtttatttttgagacagaatgtcgctcttgtcacccaggctggagtgcaatggcacaaccttggctcactgcaatctccgcctctcaggtccaagcgattc

SEQ ID NO: 545516 - DNA, 201 bp, Homo sapiens
agtagagatggggttttgccatgttggccaggctggtctcgaactcctgacctcaggtgatccacccacttcggactcccaaagtgctgggattacaggcrtgagccaccacgcccagacttcatttatttttattttgaggtaggccaataatactggtgcacccaaggacttaaaatgtctttccaatccattattttg

SEQ ID NO: 545517 - DNA, 201 bp, Homo sapiens
gaaaaggtcaaagaagcctccaaaagcccaggcttaacctgtgtaagcaaatagcaacatttatggctagcagtcaccagtgccaactccctgcaggttayttatttgatgcacaattcacagctattcccctaaattccaccaagtccatacacaccctggacacagtggaaataaaggagcagccagtgagtgtttgtg

SEQ ID NO: 545518 - DNA, 201 bp, Homo sapiens
ggttttgccatgttggccaggctggtctcgaactcctgacctcaggtgatccacccacttcggactcccaaagtgctgggattacaggcgtgagccaccaygcccagacttcatttatttttattttgaggtaggccaataatactggtgcacccaaggacttaaaatgtctttccaatccattattttgatggtcttcaa

SEQ ID NO: 545519 - DNA, 201 bp, Homo sapiens
gccaatgagaacaaagacacaacgtaccagaatctctgggacacagctaaagaagtgtttagagggaaatttatagcactaaatgcccagaggagaatgcrggaaagacgtaaaatcaacaccctaacatcacaattaaaagaactaaagaagcaagagcaaacaaatgcaaaagctagcagaagacaagaaatagatcag

SEQ ID NO: 545520 - DNA, 201 bp, Homo sapiens
tggagacactttcaccccaaatgccacctctttcaaactttcccattcaataccttttatctctacctgtaaaatgaaatactttgttttctgtttagagytgaaagaatttcttagctagactttaagcaggaataacaacaaatgctttcaagataaatctgttaacttccaaaaaaaaaaaaaaaaaacaatgatatt

SEQ ID NO: 545521 - DNA, 201 bp, Homo sapiens
acagtaaaactcaggctttagaaaactctgcaacttgaggccctcataaggacttttctgtcctcctttgaccaaactgtttaaccgagcctaggggtgasggggagcgacccaagctggcatctttctctacggagacagattttagaaaatacttttcttgcccatgaatttcttttctggttgatttttatcattttc

SEQ ID NO: 545522 - DNA, 201 bp, Homo sapiens
ctaaatataacaattattaatgagaaatattacattcttttggctttgtactaaacatttgaaatgtgctgtacatttttcacttatagcctatgcaattmaaatgctatatttttattaggaatatttaatctaaatagatatcttaaaatttacatttgaaaaaaatagattcagatacctaagttgttacaagcatac

SEQ ID NO: 545523 - DNA, 201 bp, Homo sapiens
aatcaccaataataaagtctaaatactagcaaagctctgcttctctctttgcggaattatcacttagaattcgcttaatttaggccattgccatgattctrtagaaaatgagaagtctataagtatttagcctctgcctgacattgacttaggaatcaaatactgtagcttgaaatcgttgcaagtcccagttaatacggt

SEQ ID NO: 545524 - DNA, 201 bp, Homo sapiens
ggttctctgtggagtgtttcctccgtggtgcttttccaccattgatagaagatgaccaaatgtccttggccatcactcttctttgctcgtgcccaaagtcsctaagccaggtatatcattcttctaatgttgtagaaattgaaaagagcaagtaaacactgaagccagatctctctcatgacctcttctccacagaaccat

SEQ ID NO: 545525 - DNA, 201 bp, Homo sapiens
ccttaatttcttcgttcactgatcttactgacacaagccttagaaacccataccagtggttaatttcatcccctcctccttccttccccaccccgtgaacyctctttagcaagagagctgagctcagcaatactttcccctccccagtactcccttctctcacttcttttccctttccttttgtgcagctattttattaca

SEQ ID NO: 545526 - DNA, 201 bp, Homo sapiens
ggagggcaagcattgccagatgtctccaagccaaccctttaacccattcctttacctgcttcccaccttcaagttttgtttcttatttttggtagggtgtgtgtgtgtgtgtgtgtgtgtgtgtgtgtgtgtgtgtgtgtctttttttaatacctagaatatatcttaaactgatgggaaaaaagcaaatattatcaacag

SEQ ID NO: 545527 - DNA, 201 bp, Homo sapiens
aaacagtgcaacatcagacactgatcatgacactgagatgctgagactaaatgctcctctagcagcttcctagcccaatatggattcccttttgtcctttkcaataaacagattttcagcagagaataatacttccattttaagtgtattggggtcgtcttacttcagctgtgaaatcatagagaatttatggtcctcagt

SEQ ID NO: 545528 - DNA, 201 bp, Homo sapiens
aaagttttcaaggacaaagaaacctggacttagctttgttatgtcttgttttcttatttttcttttttttgatgttcaaaactttattggggaaaaaccamggtatctgtgtgcttaatgcactgtttgctaatggtgcactgtaaaacactggttttctcacaatatcaataggtagactacagagattttcagaccctt

SEQ ID NO: 545529 - DNA, 201 bp, Homo sapiens
agaaaagggataattttgcttgttactcataatgctaccttgtttatctgtgtgcatatgttcacatatgaccatatgtcatatgaccatagccaccacaygtggtttcatatatgtcaagaatttaatattgtttcatatgatttttcaaagttgctctgtcatttttatcatcatcattttaattgaagcactattttc

SEQ ID NO: 545530 - DNA, 201 bp, Homo sapiens
aagtcgcatgccaatttataattaattttgtgagatattccaggacaaagactgtgaaaaggtttttgcatgtcttttatgataactagtttcactgaatrgactatttcatagcccagaaagtccctgtgtgtccaaagaatcagaaatagaaaatgtggcaccactaaaggatagtttctacttcacagattatgatgt

SEQ ID NO: 545531 - DNA, 201 bp, Homo sapiens
tgtagaagctattcttcctcaagatattgctcagtttgattttcactagagcttgtctgaataattgtgggctatttttaaacctccgaggcaggactgtygaggttaaagttgcaggttgaagatttaggtatctttccaggagaaatagggctatcagagagaaagatgaattcagaggttggtaaatattaagcaggt

SEQ ID NO: 545532 - DNA, 201 bp, Homo sapiens
tagaagtgaagataaggtctgactctgtccagcatagctagagggcatggctagctttatatgtccccaggccttaccgaggtttaaagaaggcaagttgyacagttaagagtcgtagtagcacttcatgatgcatttagtaggcctaataacctttaaattttaccacatttctttcataaatttcctttcatgaatttt

SEQ ID NO: 545533 - DNA, 201 bp, Homo sapiens
caattctaattatgtattaggtgtgaagactaggacaccagatagaagtgaagataaggtctgactctgtccagcatagctagagggcatggctagctttrtatgtccccaggccttaccgaggtttaaagaaggcaagttgtacagttaagagtcgtagtagcacttcatgatgcatttagtaggcctaataacctttaa

SEQ ID NO: 545534 - DNA, 201 bp, Homo sapiens
tacatgccctgcatgtaaaattatttttccagtagtctcaagtacatgttacactgttaactcttggcaacttttacttttggtgaaaacttggtaagtargcaattctaattatgtattaggtgtgaagactaggacaccagatagaagtgaagataaggtctgactctgtccagcatagctagagggcatggctagctt

SEQ ID NO: 545535 - DNA, 201 bp, Homo sapiens
tttatgggtaaactgaataatacccctttaaatttagctaatatgttcacacacagattttttataagattaatctttcacaaaccttccacgacttcctyaaaccttcagctttatcctatctaacttaaaacaatcctttaaccctctaaactaggcaaaaaaattcacattcccatgtattcttataatcttttacaa

SEQ ID NO: 545536 - DNA, 201 bp, Homo sapiens
atgttcaatttatgggtaaactgaataatacccctttaaatttagctaatatgttcacacacagattttttataagattaatctttcacaaaccttccacracttccttaaaccttcagctttatcctatctaacttaaaacaatcctttaaccctctaaactaggcaaaaaaattcacattcccatgtattcttataatc

SEQ ID NO: 545537 - DNA, 201 bp, Homo sapiens
atcccattaagagagttgaggtgaatttagagaagggtctgtttatagagcagggagcagggttaagaaaatacagccagagaggccgaggtacccagagmcaagcacagtgggaagccctcgccactctaggcctgaagagtcagatgaagggaaggaacggggtccccaagcctatgggcactagagctgtggacaggc

SEQ ID NO: 545538 - DNA, 201 bp, Homo sapiens
gcttacatcagccactgatacaaacagtgcaacatcagacactgatcatgacactgagatgctgagactaaatgctcctctagcagcttcctagcccaatmtggattcccttttgtccttttcaataaacagattttcagcagagaataatacttccattttaagtgtattggggtcgtcttacttcagctgtgaaatcat

SEQ ID NO: 545539 - DNA, 201 bp, Homo sapiens
gcagagaataatacttccattttaagtgtattggggtcgtcttacttcagctgtgaaatcatagagaatttatggtcctcagtataattatatgccaaatkgcactgagtcaattacccctggatgtgtgagtttctcttttctttttaatcatcttcagcaggaagctgtaccactaatctgactggcacacatctctgc

SEQ ID NO: 545540 - DNA, 201 bp, Homo sapiens
tctcctcaaacaagaacacagtgcccctgttctcctgggcagggtccaccactttctttctaaagtaagtcgcaattgcctgcctgtccatcctcatgggrtaagacagaggagggccttcagtatgctcttatttctgcatgtaaagaaaaatcaagaaaagcagctctaaataaagacatgcacaaaaatcaaaatgga

SEQ ID NO: 545541 - DNA, 201 bp, Homo sapiens
catgcctgtaattccaaaactttgggaggctgaggcaggtggatcacttgaagtcaagcattcaagaccagcctggccaacatggtgaaatcccgtctctmctgaaaagtacaaaaattagctgggtgtggtggtgcacacctgtagtcccagctattctggaggttgaggtgggaggattgcttgagccccggaggtgga

SEQ ID NO: 545542 - DNA, 201 bp, Homo sapiens
tgtggtggaaacacaagagaggaactaattctctctgctaggagagccagcagaggtttcctagaggaactgagcccctctccagttctatctttaacaaytaacatgtagagactagcctgaccaacatggtgaaacctcataaatacaaaaattagccagccatggtggcaggcacctgtaatcccagctactctgaag

SEQ ID NO: 545543 - DNA, 201 bp, Homo sapiens
ttgaataaattaactaaacaaatagactttgtaaatttttttctgtcccagtctttttggagagtggattcaaccaaactgtaggcttttgaagaggtgtraggcatctcaaaggcagacagagatttccctgaaaaatctgtttttaaagaaacctggtcctctctcccttcttccttccacctaatgtgcacctgggag

SEQ ID NO: 545544 - DNA, 201 bp, Homo sapiens
gatattccaggacaaagactgtgaaaaggtttttgcatgtcttttatgataactagtttcactgaatagactatttcatagcccagaaagtccctgtgtgwccaaagaatcagaaatagaaaatgtggcaccactaaaggatagtttctacttcacagattatgatgtgatctcctgatgatttttccaatctggagaacc

SEQ ID NO: 545545 - DNA, 201 bp, Homo sapiens
aatgtggcaccactaaaggatagtttctacttcacagattatgatgtgatctcctgatgatttttccaatctggagaaccagaaatgattgcttatactcmgagctccatctcatagatagtgctatagaaagaaaattcctattctctcgactcttcttttttttcaccctttggtaacatccaacccctaagtacctgt

SEQ ID NO: 545546 - DNA, 201 bp, Homo sapiens
acctgttacagtcctataggtgattataaaaccatcttttcaagaggattaaaacaagacaaaaactgtctgtggatgacaaaaagtcctagggaagccayagtcaaagacacagctgatagaaaatttgttacctctgtggcacacataatttactgtaacaattataattattactgataacatatactaagtcatatc

SEQ ID NO: 545547 - DNA, 201 bp, Homo sapiens
agggcctttagagtcagaaaaccaggacttggatcaattgcatgaccgtgggccaatcactttaccaccctgaagaactgttgcctcattggaaaaatggytatacaggttgagtgtcccttatctgagatgcttgggtctataagtgcttcagatttcagatttttttgggttttggaatatttgcattccacttaccag

SEQ ID NO: 545548 - DNA, 201 bp, Homo sapiens
aattttccattaatgtttttagccaatttatttgtctaaacataaaaaaagcattaatacacctggatgatgttttcaaaggaatatatataatgtatttwtgtgtgtgtatatgttagaagcaatgaaatctttaatattgagagaatggtatccctcactaaggattatatggagcttgatggcccatccctcttgttt

SEQ ID NO: 545549 - DNA, 201 bp, Homo sapiens
agataggagagagagttttcagtgactaccctgttgaatttgggattttaaaccatgaaaatgctttaaattaattagaagagtactttttctaattaatyggttaatgtttgtttgtttgtgtatactgacctcacaatttcttctaaaaaaaaaaacaggagaagtagcctcaaattggcaaggtcttgagggtaatgg

SEQ ID NO: 545550 - DNA, 201 bp, Homo sapiens
caaattttccattaatgtttttagccaatttatttgtctaaacataaaaaaagcattaatacacctggatgatgttttcaaaggaatatatataatgtatktttgtgtgtgtatatgttagaagcaatgaaatctttaatattgagagaatggtatccctcactaaggattatatggagcttgatggcccatccctcttgt

SEQ ID NO: 545551 - DNA, 201 bp, Homo sapiens
ttagccaagcttatctgcagacttttgagctcaaaatgtagttattcctggatagcaatggaaacaaaacccttcatagattgtagtaaactccaatattsaatatattgataggagaatatgtgtaacattgcttcagtgactttactgtattatatatgctagccatttatcgcctctcattagagaagttctactctg

SEQ ID NO: 545552 - DNA, 201 bp, Homo sapiens
tgaaggctcccttagtgagaatagatagtaaatgtttcttttcagatttttataggtataaaactctttatctctcctagatctgaggaaaggcatggaargtagagggggtatgactgcattaatggagattctctaaaaatgcaaatttgccccacttaagacagccttgtaaggccacttctgtcagggtggccaacc

SEQ ID NO: 545553 - DNA, 201 bp, Homo sapiens
tatgtagatgaaggctcccttagtgagaatagatagtaaatgtttcttttcagatttttataggtataaaactctttatctctcctagatctgaggaaagrcatggaaggtagagggggtatgactgcattaatggagattctctaaaaatgcaaatttgccccacttaagacagccttgtaaggccacttctgtcagggt

SEQ ID NO: 545554 - DNA, 201 bp, Homo sapiens
gaaaagagtaggacaagatatgagattcctggtctggagagtgggtgagatattaacatattaaagcaggaatgtctgaaacatgcattgtgtattttccrctgtctcagcccaaatcaggcatagctctggggagaagggagaagggcaataccaaccagaaagtatctctgtgattcttcaggctgcttgggcagtcag

SEQ ID NO: 545555 - DNA, 201 bp, Homo sapiens
aaggatgctaaccccaaggttcccaccactgccactggccaatatctgaaattcccctgacaaagcttcctcattagcataaggtttggactcctgaaatraaccaaccacgtctcttaaacttttccttgaactctatccccccaccggaaatacagagagatgagtaaatacaaatatataagaattctatttaattct

SEQ ID NO: 545556 - DNA, 201 bp, Homo sapiens
tatatctatatataatttaatttatatataagtttaattactttgtcttattgtgtttttatttgtggttccttatggacttgctctctcatgttttaaaraatttctaaaatgcagtaatcaggaactgctaaatagttgctctacatagcttatggtgtatgatccattcgcttagctggtaagggtttatgaataaaa

SEQ ID NO: 545557 - DNA, 201 bp, Homo sapiens
gatagaactcacagcaaatccaaggttgctttccccatgagctctgtgtaggcgctgccacttctcaaggatgatcaaatcacagcttgcttgataatagytgcacttaataacaacgccttggggtaacaacatgtttacatcaaaaagatgttacttgactctgggacatctgcatatatatctatatataatttaatt

SEQ ID NO: 545558 - DNA, 201 bp, Homo sapiens
gtaaatacaccaaggtcaacaatttcaagctaacagtgaaaagtgactgaatacagaggtagaaagaaatgtgcacaatcgagcttagcaagctgagaagrgccagttccagcacgcttctgtcaaccccattagattttaaaaatctttttaataaagcccttttggccaggcacagtgactcacacgtgtaatcccaac

SEQ ID NO: 545559 - DNA, 201 bp, Homo sapiens
caccgcaaggagcaggagccctatgatgcactgttaagtgcacaactatggggtctgcttggctggaagcagcagcagcaaacttgtctattagttatttwgtcctcatcagtgccagctgctttcccaagatggcagaacattcatcattgctaccagacagcctcgttggagctctttctctggcctccttttttggct

SEQ ID NO: 545560 - DNA, 201 bp, Homo sapiens
gaatcctgtttctgggctgtttatcctcactgccatccaccctacccttggctgtgactaggatgtgaagaaagagattgggtggaaaaggctaccgcagytcttgctccgtttaactcaccaccttaaaaaacatggccttggctgctgctttaaaacaacaacaacgaaaatccccagccccaacccagaggtttaacc

SEQ ID NO: 545561 - DNA, 201 bp, Homo sapiens
gaagccagcaatacaaatgagcagtgcttctggcctgagagaaaggtgtctgcattcaaagtacaacttcagataaaaatggaaaatgccagtcccacccygcaggaatcctgtttctgggctgtttatcctcactgccatccaccctacccttggctgtgactaggatgtgaagaaagagattgggtggaaaaggctacc

SEQ ID NO: 545562 - DNA, 201 bp, Homo sapiens
gagtctccctctgtcacccaggctggagtgcagcagtgcagtctcctgcctcagcctcccaagtagctgggattacaggcacgcaccaccacacctggattttttttttttttttttaactttagtagagacatggtttcaccatgttggccaggctgctctcaaactcttgacctcaagtgatccacccacctcagcctc

SEQ ID NO: 545563 - DNA, 201 bp, Homo sapiens
aatgcaataggaaaaaatccatatttaaaatttaatttaatttaaaattaaaattaaaataggaaatgttttctatagaaaaaataaatgtttaagaaacmtaaacaagagatcaatagttgaggaaaaatagaatgataaaaattatttaattaaaaaaaacagaaaaagagggaaaggggaaagattaacaaacagaac

SEQ ID NO: 545564 - DNA, 201 bp, Homo sapiens
tttcatataaaccacagtgcctgggactattagattaatattagaggaggaaatattagagcagttaatattacagtaggaatatcagggtaggaaagtagaatgcaaacatgattcagttaatatcatgactgaaaaaacaagaacccttgcctcaatcatctaaaatatttcaggtaacagtagaacttgatgctggaa

SEQ ID NO: 545565 - DNA, 201 bp, Homo sapiens
tcatataaagtaatggaacaaatggaaatttaatcctaacagatgtaacagggcagtcacttgtgtacacggatgacttgattgcacctgttggaaaggckgggaaaatgagccgtgaaatcctgatcacattccctactggaagcagcactcctgccttgcaaattagtaagcctgatgttctcaacatcctgacttcaa

SEQ ID NO: 545566 - DNA, 201 bp, Homo sapiens
taaccagaatatttgtattatgagggatattatgaaaagtataccaattaagctatttaattttcataaaggacctatgatgaggtatcattattatccttttttttttttttttttgagatggagtctccctctgtcacccaggctggagtgcagcagtgcagtctcctgcctcagcctcccaagtagctgggattacag

SEQ ID NO: 545567 - DNA, 201 bp, Homo sapiens
caaaacggggagaagggaatcaacctgcacagaggggatcgcatttgctccttcttggactctatgaatcttatcctaagtacgagccacctccaccttcwactctcttggggaaggctccaggcttggctgcccctgcaaggatttaagggcagaaaggtgtgacttgcccctggggttggtgatgcataaaatgccaag

SEQ ID NO: 545568 - DNA, 201 bp, Homo sapiens
ttcatataaagtaatggaacaaatggaaatttaatcctaacagatgtaacagggcagtcacttgtgtacacggatgacttgattgcacctgttggaaaggytgggaaaatgagccgtgaaatcctgatcacattccctactggaagcagcactcctgccttgcaaattagtaagcctgatgttctcaacatcctgacttca

SEQ ID NO: 545569 - DNA, 201 bp, Homo sapiens
tgctttcccttctcacccttaacgggaacaccacacatagacactacagaatgaagaatagctgaagaaggctttcaccctggatccggactgtttggttmtttcttcttgagtcatgtggcatttggctcctctgatgagatcattagtacacttaaaaagccatcatcaggccaggtgctgtgggtcacacctatagtc

SEQ ID NO: 545570 - DNA, 201 bp, Homo sapiens
gttacccagatacgtttttctgtttttcctttgaaaacggcggtttcgggagggcagagagaaggaggaggatgaaaaattaagtgcctaactacacagaycaggggggcctgcagcctcccacacgcctgctttccagatccaggtaattattcctcatcgtgctgacaccaacaggaaggaacggtggatgcattttct

SEQ ID NO: 545571 - DNA, 201 bp, Homo sapiens
aaagcctgtgtcagaatattgtatcactccattttagtgctaggtgcatcaaatgtcagtaattatcattcagtctagaacttccgcaggcttaagagttwaaaggtcctcaaatccaagttaaaatccttctaactagatatatggaattgaggtgataattttatttaaaataaatatatgggttaaacaagaggagtt

SEQ ID NO: 545572 - DNA, 201 bp, Homo sapiens
aataaattggaaagaaaagcctgtgtcagaatattgtatcactccattttagtgctaggtgcatcaaatgtcagtaattatcattcagtctagaacttccrcaggcttaagagtttaaaggtcctcaaatccaagttaaaatccttctaactagatatatggaattgaggtgataattttatttaaaataaatatatgggt

SEQ ID NO: 545573 - DNA, 201 bp, Homo sapiens
gggagccagggaaagctgtcatgtgggatttcagtgctgacccatcgtgtgtttccttgctttacagaaatctccaagaacatgcaaacctattcgtgctrgttactgcttgtccaatgatatacattatcccaattctcagggaaatagctggagcctcattttggtgcattttggacttgttttgtttttatctttttc

SEQ ID NO: 545574 - DNA, 201 bp, Homo sapiens
agttgctcattgtaaaaggggtttttgtaggaccttgaagccagcttatactgaagctgctacattgtctggagtaaatacccagggtttgtcatctcgcrgcaggaaaatttaggacatggacactcatgaggagtttaggagcggaagtttaacaggcaaaagaaggaggaagaaaaagaaaggaaaacagctctctct

SEQ ID NO: 545575 - DNA, 201 bp, Homo sapiens
ggaaaacaaatagtttggggctgcttttcattcaaaggaaaacattaccaaggacttccgtaccctcactatctgcctaagtaatttcttcttaactcctstatcaatactggctcatgagagctgactatgaaagttttaataattttttcagctggttgacatcaagttggttggtacaaaaaaaagtcatgtggcagt

SEQ ID NO: 545576 - DNA, 201 bp, Homo sapiens
atagtttggggctgcttttcattcaaaggaaaacattaccaaggacttccgtaccctcactatctgcctaagtaatttcttcttaactcctctatcaataytggctcatgagagctgactatgaaagttttaataattttttcagctggttgacatcaagttggttggtacaaaaaaaagtcatgtggcagtatttacacc

SEQ ID NO: 545577 - DNA, 201 bp, Homo sapiens
gtgttgtagagatggaatgagacaatgcatatagaacagctaaccctggctgggtacggtggagcacacctgtaatcctagcactttgggaggctgaggcyggcggattacctgaggtcaggggttcaagaccactctggacaaccaacatagtgaaatcccgtctctactaaaaacacaaaacttagccaggcgtggtgg

SEQ ID NO: 545578 - DNA, 201 bp, Homo sapiens
cattcagttggttgaggggcttagaattttatttttgatctacatatatatatagttttgtgataagaactgattggagggtgtaaaagatatatgagatrctgtccttttaatttaaatgagaattcattagtggaaaaaaaaagacaaaacctaagtagtagattatatggtacagatgatttctctagaatatcagat

SEQ ID NO: 545579 - DNA, 201 bp, Homo sapiens
agcacgaacagacatgtcactccgagcataagtgttaagaggggaatttgccacgtcccctttgcctgtcttgttgaactcggaagccagtttccgtgaaraagcattagtatcaccattgtgggggtagcactcccttgatccagatcaggaacatggggttcttcccagctgtggtgctcccttcctgtttaggcctca

SEQ ID NO: 545580 - DNA, 201 bp, Homo sapiens
cacgataaccaatgggagcaatgctttagtaaaccagacaggtcgctgagggcaacaggaatatgaacaattacaatgccatccagtaagggccataatasagatatgcaaagtgttaaaagaatgcagtagagggataggtttgtgccgcaggaggaccagggaggcatcactatcaaagacagtgaattgagccctgaa

SEQ ID NO: 545581 - DNA, 201 bp, Homo sapiens
ggtgtggaggcaagtaagtacaaggcatgtgaagtaaaagagcgaagccaaagaatagggcctggggaaccacggaagacagagttgaatctagactaagrtagaccttgaactttatccttttgccagtaggaagtaatcggtgtcttagagtatcattcactttaacgtagaacaaattaaagaggcaaaagactgaag

SEQ ID NO: 545582 - DNA, 201 bp, Homo sapiens
taggaatccaccaggggaggtggccagggagaaagtagaactacagtgaaaggaggaggcagactagcttggttcttgccagctagtctgccttgatgccrgacatgtgctcgccaccactattgatgaatggttgaaactgatacaacaagattagggagaacacgataactttaagaggaatacaaagtaagaactaga

SEQ ID NO: 545583 - DNA, 201 bp, Homo sapiens
ctttttttgttgtatctttgccaggttttggtatcagggtgatgcctacttcagggaggatccctccttattaattttttggaacagttttagtaggaatrtactggctcttctttgtacatctgttagaattcatctgtgaatccatccagtcctgggcttttttttattggtaggctatttattactacttcagtcaga

SEQ ID NO: 545584 - DNA, 201 bp, Homo sapiens
tgatacaacaagattagggagaacacgataactttaagaggaatacaaagtaagaactagaacttagttgtgagtagtctctaaaagtcttaaacactccygggtttatctacctgtttctcattaacttttttttttttttttttttttttttgagatagagttttgctcttgttgcccaggctggagtgcaatggcgag

SEQ ID NO: 545585 - DNA, 201 bp, Homo sapiens
gcttgagcctgaaagatcgaggctgcagtgagctgtgattgcaccactgcactccagcctgggggagaaagtgagaccctgtcaaaaaaaaacaaggaggaaggaaggaaggaaggaaggaaggaaggaaggaaggaaggaaggaaggaaggaaggaatcttataattcatagaaaattaaagaaaaaagaaaattacacc

SEQ ID NO: 545586 - DNA, 201 bp, Homo sapiens
accccaaggttcccaccactgccactggccaatatctgaaattcccctgacaaagcttcctcattagcataaggtttggactcctgaaataaaccaaccaygtctcttaaacttttccttgaactctatccccccaccggaaatacagagagatgagtaaatacaaatatataagaattctatttaattctaatcatttca

SEQ ID NO: 545587 - DNA, 201 bp, Homo sapiens
gttaactgcaaaagagccctagagctatagcggatccaggactgacaataagctccatgattcaatttcagacaacagattctgataaaacaacaacaacwactttagattcttctttaaataatcagcatttctcttgtaaagcaataaactcatgtcgtatttaaatacaagtgaacaaagaacaactctataacgaga

SEQ ID NO: 545588 - DNA, 201 bp, Homo sapiens
cttgagcctgaaagatcgaggctgcagtgagctgtgattgcaccactgcactccagcctgggggagaaagtgagaccctgtcaaaaaaaaacaaggaggarggaaggaaggaaggaaggaaggaaggaaggaaggaaggaaggaaggaaggaaggaatcttataattcatagaaaattaaagaaaaaagaaaattacacca

SEQ ID NO: 545589 - DNA, 201 bp, Homo sapiens
gtgtttttaaggagaaaagaaaaacagcacattgggaggaaactaaactgagctgagaaccaataaatgaagtttcagctctctcttctgcatttccaaaytgtgtggcctcacttcaatgagttgtatacttatttttgaggaaatgcaataggcattggcagacagagagcgagaaagggagagggagagggagagcga

SEQ ID NO: 545590 - DNA, 201 bp, Homo sapiens
catccaggagcagcctcaaatggaaggaggaaagttgacagacaagtgggtgtacaaaggagaaaggtgctctcactcctctgcctcagtgatgggggggrcacctaagctgcctcccgttttccacccctgcatcccccacaagggccttcttgcccctactttgtattttctgtttcagacttcttccagtaatattga

SEQ ID NO: 545591 - DNA, 201 bp, Homo sapiens
tgtaataggaaaaacatcatcactgaatatgaagtgtgcttgtgcgttcatgtgtgtgtgacagagagaggatactaaagactgaattccagtcaatgtcrggagacagaaggaataatggagtgtgcatgcatgggttctggttatttctatatgcaaaggtaatcatttattatcttgacgaagcattcttctctcatt

SEQ ID NO: 545592 - DNA, 201 bp, Homo sapiens
tcaatatttcatattgacattgaatactatgtaaattataataaaaagatgggattgttcttgaaagtttttttttttaaggttttgttttgtctttttgkccttttttttttttttttttttttttgagatagagtcttgctctgtcacccaggctggagtgcagtggcctgatcacaactcactggagccttcagctcc

SEQ ID NO: 545593 - DNA, 201 bp, Homo sapiens
cacggattcatcagaggcaaggtaatattattaaaagctttgatgtcagacaaatgcacatttctaccaattattatgaccttgggcaagtcgtttcatctttttttttttttttttttttttttgacacagagtctcactctgtcggccagctggagagtggtggcaccatcatagctcactgcagcctcaaactcttgg

SEQ ID NO: 545594 - DNA, 201 bp, Homo sapiens
taagaaaaaatgtgcatataattttgctttgaaatttcaaataaggaaaaataaatctaaaaaataaatattttctatattcctttgactctgaagaaccrcccaaaagaaccctctaataagtatgcatctaatattttctataagcaagttttttgggaacctttgttcctgatatgttattataattcctcagataca

SEQ ID NO: 545595 - DNA, 201 bp, Homo sapiens
aatcagtttgtcattagtctctgacatactccagagagcaatgcttatgaacttcacatcaggattgagaaatagcaagtgtggtgtgcgtcatctatgaccctcagctgtaccaagttaatttttaaaatgtaattgctaaacctataatgaggctctgaagatgatcatatctatgcagtgagtcacctgccaatgcaa

SEQ ID NO: 545596 - DNA, 201 bp, Homo sapiens
tatagatggtacagtataccataaattctctattatccagttcaggccatcctgggacaccctgaaaatagtcaatcagtcctttatttcaatctcaagcrttttgtcccaagccatgcagaatctgaagggcattggagatttagtgagagtttttctcacctagtctactctttctcttgattgtccccagtgccctgt

SEQ ID NO: 545597 - DNA, 201 bp, Homo sapiens
ccctagagagagaacagtgcagtgaaaattgctgagcgttttggtttttttcctttccggaaaggagtaggaaagctatgtggcagaaacacctgtacatytaagcaaagctctggtattcagctaggaattaggagatgcccttccttttgcaaacacatttaaatcacattgaacaaaattactatgggtaaagatgaa

SEQ ID NO: 545598 - DNA, 201 bp, Homo sapiens
aagtagtagctacaccaggtaagtcaagcaatcagaaggccaaaaggggagaaacttgcaaagaggtgttatttgtgtgtatgtgtgtgcacgggtgtgcagaggccaagaaaaaataaaagcaagaaaatgccattatcttccattaggagatcattggaaacctttagagagtgctttaagcagatctaaggaagctga

SEQ ID NO: 545599 - DNA, 201 bp, Homo sapiens
agtagtagctacaccaggtaagtcaagcaatcagaaggccaaaaggggagaaacttgcaaagaggtgttatttgtgtgtatgtgtgtgcacgggtgtgcagaggccaagaaaaaataaaagcaagaaaatgccattatcttccattaggagatcattggaaacctttagagagtgctttaagcagatctaaggaagctgaa

SEQ ID NO: 545600 - DNA, 201 bp, Homo sapiens
tgaggcaggagaacggcatgaacccaggaagcagagcttgcagtgagccaagattgcaccactgcactccagtctgggcgacaaagcaagaccccatctcaaaaaaaaaaaaaaaaaatagaaatgttaaatctaaaaaaaaagaaaaagaaaagaaaaaggtaggcttttataaaaagtgatttatctgttttctatctg

SEQ ID NO: 545601 - DNA, 201 bp, Homo sapiens
gagggtgacaagacttgcctttatctggtgacctgacaaggttatcagcaactgcaaatgggctgaacctcggagcagggaccatcaaaacgcttccctcyccttgatccatttcccaaccctttattggtaattcatttcaatccgaagactagctctagtttctgcaagttcttccgcattcctacaccttagctctgt

SEQ ID NO: 545602 - DNA, 201 bp, Homo sapiens
ggctgaggtttgactcactccacctttagatgataaggcaaccgttttattacttcgcagccaggtgcctgagggtgacaagacttgcctttatctggtgwcctgacaaggttatcagcaactgcaaatgggctgaacctcggagcagggaccatcaaaacgcttccctccccttgatccatttcccaaccctttattggt

SEQ ID NO: 545603 - DNA, 201 bp, Homo sapiens
attttctacctaaccttttgcattttctaaatggtgaaactgcatgactcatctgatttcactacccactaagtgacaactcagagttggagaaaccttgmgttaaggaagttgctgtgatactccagaagataacattaaaactgtaggatctagggaagcagaaagatgcacagaaggatgtggaatgactccacaggg

SEQ ID NO: 545604 - DNA, 201 bp, Homo sapiens
ggtttcacaacaagacttactttttctacacaggatgtacgctgacattttctacctaaccttttgcattttctaaatggtgaaactgcatgactcatctkatttcactacccactaagtgacaactcagagttggagaaaccttgagttaaggaagttgctgtgatactccagaagataacattaaaactgtaggatcta

SEQ ID NO: 545605 - DNA, 201 bp, Homo sapiens
tgtacacagatccggggacacgcacacacaaactgaaagaggtttcacaacaagacttactttttctacacaggatgtacgctgacattttctacctaacmttttgcattttctaaatggtgaaactgcatgactcatctgatttcactacccactaagtgacaactcagagttggagaaaccttgagttaaggaagttgc

SEQ ID NO: 545606 - DNA, 201 bp, Homo sapiens
tctaagactttctaccaggttgctaaaaaattatctctgaatcccatgttgtctaggcacaaagttccaaatgtaacattcaaaagtgtcacagtaagacwccattctcctttgagatcttctttcctgctattcccttacaagcacagaacacttgtatgggaagtaacatcacgccacttcaacaagccactggttgtt

SEQ ID NO: 545607 - DNA, 201 bp, Homo sapiens
gaatcgattgcacatgcaaacccagggaacttgatgggttgaataactaaaggaaaagtggtcaggaggaggcagaattctgagacctgaaaagggtgaayaggaactcttatcctgaggggagatttgtaaactgcagactgacaggacctgctggagggtttccactcttcctctaagtgtacacaatagtttggaaac

SEQ ID NO: 545608 - DNA, 201 bp, Homo sapiens
ttccaattgtcttaattataggcaaatcacaaacctctcggattcaaggaaaagggaattcgtccacctcttttttttttcctgtttgtttgtttcttttkgtttttttgagacagggtctccctctgccgcctagggtggtttaagtggcacaatcacggctcactgcagcctcgaccttctgggctcaagtgatcctcc

SEQ ID NO: 545609 - DNA, 201 bp, Homo sapiens
tggcaataagtgcacaataccctggtcccatcttaaaacaaccagctaccccacagtctcagagtcagggatgctcaagtactatttattctgtttaccaracatatagcagccgggcagggagtcttcatagcctgttgcgtcatgtgattccattccagatttttccttttattcctgtctccaaggccccattgtgca

SEQ ID NO: 545610 - DNA, 201 bp, Homo sapiens
catgacctccaagtcctgatactgagaatctttctgatgctaatactttgtctttgacaagtcattcatgtatgatttaagaaaagagctgaacaattaakaagagggatgatatttgtatatactatctcagagattaccaaagagaggagttttaatttgacttccaaagtttgagttggaattttacacttctaaatt

SEQ ID NO: 545611 - DNA, 201 bp, Homo sapiens
aagaagattatgacttgctgatggctcagattaccattagcattttttagcaataaagtattaggtacttttttgtgacattatgctatgacacacttaayagactacagtatagtgtaaacataacttttatatgcactgggaaacaaaaaattcatgtgactcactttattgtgatattcatttattgtagtggtctgg

SEQ ID NO: 545612 - DNA, 201 bp, Homo sapiens
tggctaagtgagatgatgaggtgaaaggactttcaaactgtagagtgaaatataagtatttgttatgaatttattacagaaaaaccaatctactattgttrccatagaggacagtattatatactgtgtgtgtctgtgtgtgtgtgtgtgtgtgtgtgtgtatatatatatgtgtacattgtcttatgttctttttttttt

SEQ ID NO: 545613 - DNA, 201 bp, Homo sapiens
cattgaaaaaaacttctaaaagaaatcccatcttcataacttattttcaatgattaaaaaaacagaatattaacttttcaaatctgctttctgaatgtccytctttcctttttaataatgcttttgtttttcctgaacaaatatctcattgcagaaaattgtaaagaaaaaaacacgaaatatacaaataacatgaattat

SEQ ID NO: 545614 - DNA, 201 bp, Homo sapiens
tgcatgatcctggcttttaagaaattattattcctgctctgctgagaataaactacatgagggcaggggtaaaataatctatgactatttccttaaaatarattatttaaaatggaattacttcatcaagactatatttgcttaggttctcttaaagatcatactcccattatttgtgaatgagtatgtgtgggagaatat

SEQ ID NO: 545615 - DNA, 201 bp, Homo sapiens
gggagtgatccaagacaaaactagaagtaataccggctcaggtagcccagaatgttgtaagccacattaaggattttgacagttttgcgaagagcagtggragattattaagcagtttcaatcaagggccaagcaagctaaacttttctgatattcttaataaggtaaactaaaataaaactaacagattgaccttgatct

SEQ ID NO: 545616 - DNA, 201 bp, Homo sapiens
tgtgcgtggtggtgggttcctgtaatcccaggaactcgggaggctgaggcaggacaatccctttaacccaggaggcagagattgcagtgagccaagatgaygccattgcgctccagcctgggtggcagagcagactctgtcttaaaaagaaaaagaaaatatattcctccatctcccaccagcccagcttggtgccttttc

SEQ ID NO: 545617 - DNA, 201 bp, Homo sapiens
agtagttctcagccattgaggaagccagaaggaagatggccttcccctagagttgggccacccgctgcccggctctcctctgactgccccggaccaactcyccctcattccgcaggtcgcgggtcgatggcatcgatccatgtgcgggagtctatcgatgtgctcttccgcagacatgctctctaatgaccagacacataa

SEQ ID NO: 545618 - DNA, 201 bp, Homo sapiens
gttgactgtaacaaaaaatcaattggaaatgctatgaaaaagaaacagcaacaaacatgaacagtgtccttgatgggcttatcagtagagtcagcacagtygtggaaagaatcaatgaacttaataggtcaatagatattacccacctgaaagaaaagagtaaaaaaggagatgaagacagaacagagtattgaagagctg

SEQ ID NO: 545619 - DNA, 201 bp, Homo sapiens
tagagtcaactttctctggttgcagaaaaatctgtgggaagggatttatgacaattgagttttgggaggaggttctgctttggggcagataaggagtttaraaataagcctcttatcaaatgccttcagctcaaaatcatttttatgccacagtggcatattctagaggaacctgggccaaggaagaccacccttggcctt

SEQ ID NO: 545620 - DNA, 201 bp, Homo sapiens
gagagatgttgactgtaacaaaaaatcaattggaaatgctatgaaaaagaaacagcaacaaacatgaacagtgtccttgatgggcttatcagtagagtcarcacagtcgtggaaagaatcaatgaacttaataggtcaatagatattacccacctgaaagaaaagagtaaaaaaggagatgaagacagaacagagtattga

SEQ ID NO: 545621 - DNA, 201 bp, Homo sapiens
cagcactttgggaggccagggcaggcagatcacttgaggccaggagctcaagaccagcctgaccaatatggcaaaaccccatttctactaaaaatacaaamattagctgggtgtggtggcgtgcgcctgtgatcccagctactcaggaggctgagtcacttgaactcgggaggcagaggttgcagtgaaccaagatcttgc

SEQ ID NO: 545622 - DNA, 201 bp, Homo sapiens
acacacccagaggctctcttgtgcttcctcttccccagcggttacaaaaaggaactccagcaacttcagttgtgcttagctgccgtcacagacaatagcawagtaggaccagtggcctcatattaagtcacagtctttcccagttacaatggctgagaacccagattttcacaaggtgcaaagaaaagaatattgacatgg

SEQ ID NO: 545623 - DNA, 201 bp, Homo sapiens
gagaagttaaaatgaccatgtttaatatgttaaaggatccattggaaaagctgagtaacagtcctgaacagatacggaatttcacagagagatgttgactstaacaaaaaatcaattggaaatgctatgaaaaagaaacagcaacaaacatgaacagtgtccttgatgggcttatcagtagagtcagcacagtcgtggaaa

SEQ ID NO: 545624 - DNA, 201 bp, Homo sapiens
tgaggcagaataatcacttgaacctgggaggcagaggttacagtgagccaagatcacgccactgcactccagcctgggtgacagagcaagactccatctcaaaaaaacaaacaaacaaacaaacaaacaaacaaaaacacagatggcctgcgtggcgtggagtcaaaaagccaattacaagagagattttttttcttattt

SEQ ID NO: 545625 - DNA, 201 bp, Homo sapiens
tcaaatttggaattcacaatcactagttcacgaacgtcacaggcatttcttaggcgcttcttatataaatggaaataccattaactttcttcttcatgcamgctctctgacagcatcgggtcaaaggaacttttttcctgcctcttttcatagcttccaccgccccatccttcttctaaatctttaattttgcaaagccat

SEQ ID NO: 545626 - DNA, 201 bp, Homo sapiens
attcattaaaaaattatgagatgtacaaaaaagcatgtggaaaaaaaaaacatgatcaagaggcaaaattatcaactagactcaaatatgacctagatatyggaactatcaagcagagaagttaaaatgaccatgtttaatatgttaaaggatccattggaaaagctgagtaacagtcctgaacagatacggaatttcaca

SEQ ID NO: 545627 - DNA, 201 bp, Homo sapiens
gaggcagaataatcacttgaacctgggaggcagaggttacagtgagccaagatcacgccactgcactccagcctgggtgacagagcaagactccatctcaaaaaaacaaacaaacaaacaaacaaacaaacaaaaacacagatggcctgcgtggcgtggagtcaaaaagccaattacaagagagattttttttcttattta

SEQ ID NO: 545628 - DNA, 201 bp, Homo sapiens
ttgacactgggaggaggggcaggatcacagagcaagccccactcctaagatccagagacacagggcctccctaagactattggggggccaggacaatggaraacctcttcgctgctccactcccgtcggccttataagcaccaggtaacaagcaatggcactctacttctgagtggggagagcaaggaagagctccctgtg

SEQ ID NO: 545629 - DNA, 201 bp, Homo sapiens
cctcaaggtttatccatgttgtactatatgacaggatttcctacctatgtaagactgaataatattccatgctatgtattgcttttatattttttatttayaaattgtaaaatactactcatcggtgtgagtcttatactgtcctcttccctgtttcaatcacctaaaacctcctttttatgttaggtcttttgacattga

SEQ ID NO: 545630 - DNA, 201 bp, Homo sapiens
aggcagaataatcacttgaacctgggaggcagaggttacagtgagccaagatcacgccactgcactccagcctgggtgacagagcaagactccatctcaaaaaaacaaacaaacaaacaaacaaacaaacaaaaacacagatggcctgcgtggcgtggagtcaaaaagccaattacaagagagattttttttcttatttag

SEQ ID NO: 545631 - DNA, 201 bp, Homo sapiens
acaatctctcatgggagatctaccagatgcaaggcagaatttggttgacactgggaggaggggcaggatcacagagcaagccccactcctaagatccagasacacagggcctccctaagactattggggggccaggacaatggagaacctcttcgctgctccactcccgtcggccttataagcaccaggtaacaagcaatg

SEQ ID NO: 545632 - DNA, 201 bp, Homo sapiens
tatgacaggatttcctacctatgtaagactgaataatattccatgctatgtattgcttttatattttttatttataaattgtaaaatactactcatcggtrtgagtcttatactgtcctcttccctgtttcaatcacctaaaacctcctttttatgttaggtcttttgacattgaatgttttcaatgtcatactcccattt

SEQ ID NO: 545633 - DNA, 201 bp, Homo sapiens
ggcagaataatcacttgaacctgggaggcagaggttacagtgagccaagatcacgccactgcactccagcctgggtgacagagcaagactccatctcaaaaaaacaaacaaacaaacaaacaaacaaacaaaaacacagatggcctgcgtggcgtggagtcaaaaagccaattacaagagagattttttttcttatttaga

SEQ ID NO: 545634 - DNA, 201 bp, Homo sapiens
aatctccatacctgggtgaggggtacaaaagagtcctaagtccgagatcctacaccaataccattagatgtctcctaccacaaggggatggacgagaaacmatctctcatgggagatctaccagatgcaaggcagaatttggttgacactgggaggaggggcaggatcacagagcaagccccactcctaagatccagagac

SEQ ID NO: 545635 - DNA, 201 bp, Homo sapiens
acaggatttcctacctatgtaagactgaataatattccatgctatgtattgcttttatattttttatttataaattgtaaaatactactcatcggtgtgartcttatactgtcctcttccctgtttcaatcacctaaaacctcctttttatgttaggtcttttgacattgaatgttttcaatgtcatactcccatttacct

SEQ ID NO: 545636 - DNA, 201 bp, Homo sapiens
gtctagcttccatgatcattcactgtgccccggaggtaacaatgtaaaattcaaatgataattttaaaatattaacaatgtttttgtgtttcctgtatttaaaaaaaaaaaaaaggcactacgttttttaagtgacatggtacaacagggtctgctggtcaccctcaataccactggaaatggaataatttcaggaatgag

SEQ ID NO: 545637 - DNA, 201 bp, Homo sapiens
gaggcagcctgaaataataagagaaggcagaacagtgtacaaatctggactttacaaatttgcagccttatgtgagtgacttctctggttgtggctttttstttttcatttttaaaatgggtctattgccggacacagtggctcacgcctgtaatctctttaggaagccaaggctggtggatcacgaggtcaggagttcaa

SEQ ID NO: 545638 - DNA, 201 bp, Homo sapiens
aattaattactgttacacagagataaaggagaaaatattgtgtaaagaaaggcataacatttactcttactgttacttttgaccaaattcttgtttttaatttttttttttttttttttttgtcttggagagcactcacgtgattaaagaaagacctcttctgattccctgatcttttaaatgtaggaatatttaggactc

SEQ ID NO: 545639 - DNA, 201 bp, Homo sapiens
accctcatctctaaaaataaacaaacaaataaataatacaagtaaatttaaaaatagaaaacaggccaggcgcggtgactcatgcctgtaatcccagcactttgggaggccaaggtgggcagatcacgaggtcaagagatcgagaccatcctggccaacatggtgaaaccccgtctctactaaaaatacaaaaattagctg

SEQ ID NO: 545640 - DNA, 201 bp, Homo sapiens
ggaagttagtagataatagagaaaactgtatgagtggaattagcctcaaaataagagtttaaagggtggtggcaaccgaaaatgcatccataaagggcaakgggaaagaaaaagtatgtcaatacacatgaaaactgagaacattgattgcattcagggagagaaatctggtgattggaaacgcagataggagagagagtt

SEQ ID NO: 545641 - DNA, 201 bp, Homo sapiens
tccacgggaccctttccaggtgccattccccattgctatagtcaagttcaacaaggtagtaagagcaagactttgacacggagagttttgaagtcagaaawaaatgaatccatgcctataattgagatgggctttgaacatgtatcacaataatgcacactgtcagctgcactgagtctcttctgtatatgttctgtccta

SEQ ID NO: 545642 - DNA, 201 bp, Homo sapiens
atgtttgtttgtttgtgtatactgacctcacaatttcttctaaaaaaaaaaacaggagaagtagcctcaaattggcaaggtcttgagggtaatggtattaycaaggaaaaatccttggttcccttaaggcagaggtgtgaaagaaggaagttgctcattgtaaaaggggtttttgtaggaccttgaagccagcttatactg

SEQ ID NO: 545643 - DNA, 201 bp, Homo sapiens
gcaggcaggaggggaaacgggcatccgcacggggaccggccacatcctaaggctggaggctgccctgatgaaaaaggcccattagcagggaagcaaagggraaagcattttctaggggggttttccttttttttttttttttttgagacggagtcttgctctgtctctcaggctggggtgcagtagtgtgacctcggctca

SEQ ID NO: 545644 - DNA, 201 bp, Homo sapiens
ggaggcggaggttgcagtgagcagagatcggtccactgcactccagcctgggcaacaaagagcaaaattccatctcaaaaaaaaaaaaagaaaagaaaaawtatttttccagaatgaagacaaaataaagacaccctcaaatgaagactgcagaccaccgctaaaggaaattacaaatgatttattttatgtagaagaaaa

SEQ ID NO: 545645 - DNA, 201 bp, Homo sapiens
accacggaagacagagttgaatctagactaagatagaccttgaactttatccttttgccagtaggaagtaatcggtgtcttagagtatcattcactttaaygtagaacaaattaaagaggcaaaagactgaagacacaaaaaccagttggaatacaacaggcaagaggagataaggacttgccccaggcatggcactgggg

SEQ ID NO: 545646 - DNA, 201 bp, Homo sapiens
taaccttccaaaataagctcccaaggaaagtaatcttctcactgtcaaaaataaccaagcatacaaggaaacaaggcatcataaatgagagaaacaacccmccaaggattaagacgttggattataagaattaggatgggcatgatggctcacacctgtaatcgtagcactttgggaggccgaggcaggcagatcacctga

SEQ ID NO: 545647 - DNA, 201 bp, Homo sapiens
gggggctgtgagattagagacagaagataatagagaacaaagtaaaaccaaagtaaatgaaacaaaatagaagcattctgtggattgacgataataaaatrtcatgcagttcacaatcatcttaaattttcttatctaaagtctatgtttaaaaaagttttctgaacatttaaaagttgaggaaaaaacaaaattaagaac

SEQ ID NO: 545648 - DNA, 201 bp, Homo sapiens
gtgtgtgtgtgtgtgtgtgtgtgtgtgtatactgacccataattatggaggctgagaagtcccaagatctgcagtcagcaagcaagcttgaaacccaggasagccaatggtatagttccaatctgggtccaaagacctgagaacatggagaacaattgtgtaagttccagttcaagtcgaagtccaaagggaagagaagac

SEQ ID NO: 545649 - DNA, 201 bp, Homo sapiens
cctggcaccttcatttcaatggctgggagtgtgggctcctgatcagtagcaatatggtaactgttgactagagcacctgtaattggcacctccagccttgyggcttcaagactccttacatgtcagttcagggcttccagagacagttcctatacaagagataggaaatcttaaggtcttaaggtctgagcccagatactg

SEQ ID NO: 545650 - DNA, 201 bp, Homo sapiens
cttaaggtctgagcccagatactggcagagcatcttttccttcatattcttggtgacggccaaagcagtccacaagcccactcagaccaaagggaataacraagatgccacttctcaataggaagagtttcaaataatctgtggtcatcgttagtcatccatgcttcagcctctggacacaaattattcacatcttctgta

SEQ ID NO: 545651 - DNA, 201 bp, Homo sapiens
ttcttaccatctaaataaggttcagttgctgatggggcccatttgatgctgttgtcttatacaatttctctcaatatgaagacctctcaatatgaaaaagrtatttgcctcatatatgtccaacgtatactgataatacagggatgggataagtgcttgggatattcccactcaaagagtggataaacagctatacgccag

SEQ ID NO: 545652 - DNA, 201 bp, Homo sapiens
tctgggaacattagcatgtcaaaagcgtgagggagagaagagaggctcatcagaattagaaccagaagagtatagcttcacagaagccacaggaagcaggrgtgcaatgagaccaagagagataaaaacaggaaaaaagccatcaaattttataataaaaagcagacaaggtgattgcttgtagaggaagagaacagctac

SEQ ID NO: 545653 - DNA, 201 bp, Homo sapiens
aaaaggtatttgcctcatatatgtccaacgtatactgataatacagggatgggataagtgcttgggatattcccactcaaagagtggataaacagctataygccaggcattaccatagcaagtctgaaatccacatgctgccagttccttggctggagggccgagtcctgctctctggaatgattctctgcggctcttgga

SEQ ID NO: 545654 - DNA, 201 bp, Homo sapiens
acagctatacgccaggcattaccatagcaagtctgaaatccacatgctgccagttccttggctggagggccgagtcctgctctctggaatgattctctgcrgctcttggatccaccctccagactcttgttgcaccttctgagttgtcccctttccataagaaatagcactttcagctgaataatcttctcagcttatgtc

SEQ ID NO: 545655 - DNA, 201 bp, Homo sapiens
agaagctcaataaactccaagtaggagaaatacaaagaaattcacgctcggacacattatagtcaaaatgtagaaggagaaaacagcaagaaagaaatgaytcaccacttgcaagggaatctcaaaaagattaacaattgtcttcttattagaaatattggaggcaatggtatgacatatttgaagtgctaaaaagtaaaa

SEQ ID NO: 545656 - DNA, 201 bp, Homo sapiens
ttcctctgtattctaatggtcaaagcagccacagagcttacccagattcaaggagaggagacatagcctccacctgtctgtgggaggagtgtggaagaatktgtggccatttttattcacctataagtgacatcatagagggttttgcagtcatgttaaggctttttgtcttaagaatttcactgggcactctggtacatg

SEQ ID NO: 545657 - DNA, 201 bp, Homo sapiens
gaaacaatgtctgaaaaattcctaaatatgatgaaaagcatttttctacagagtcaagaagctcaataaactccaagtaggagaaatacaaagaaattcaygctcggacacattatagtcaaaatgtagaaggagaaaacagcaagaaagaaatgactcaccacttgcaagggaatctcaaaaagattaacaattgtcttc

SEQ ID NO: 545658 - DNA, 201 bp, Homo sapiens
gcccactcatatgacctcattttacctaattacctctttgaaaggccctgtctccaaatacagtcacattctgagatattggaggttaggacttcaatctrtgaattttggggagaaacacttcatcccataacatattcagctcatagtagatacacagacagaagaaaggcagggaatagaaactgcttttgaaggagc

SEQ ID NO: 545659 - DNA, 201 bp, Homo sapiens
ccttaacttgtagatggccacctccctccacgtggtcttcacatgctgtcttcacgtgatcttccctttgtgtgtgtatctaatctcctctttttggaagsacaccagtggtattccattagggcccactcatatgacctcattttacctaattacctctttgaaaggccctgtctccaaatacagtcacattctgagata

SEQ ID NO: 545660 - DNA, 201 bp, Homo sapiens
aaactccatgcagaaggggttgagagaagggaagtaagaggtcaaagtttccatcaaagagatcagtatgacgccaaggcagatgtcccatcataatatctttttttttttgagatggagtctcgctggagtgcagtggtatgatcttggctcactgctgcaatctctacctcctgggttcaagcagttctcctgccccag

SEQ ID NO: 545661 - DNA, 201 bp, Homo sapiens
tgtgggcagatttgaaaacaccactaaaccacatacggaataatccacaaagggcagaagcctcactggcactagaggcttaagcacaaacttcaccacarctggctgaactgacccagaggcaactcctaggaaagcaggcttaagaagaaaaaccatgctgatccctggcagcctgaaagtccctgtacacacccaaga

SEQ ID NO: 545662 - DNA, 201 bp, Homo sapiens
tgacaccattgtagtaacaactgtatatgaaattacaagagaaaaaaatgctggttttcacagccttcccatctgcgctgatttctagtgagtactgctaygctatattaagccaattttgattagtaattatcatcatgccttgcaaagttcctagaagataaggtgcttgtcaagtgtattattacaatgcctgtgcct

SEQ ID NO: 545663 - DNA, 201 bp, Homo sapiens
ggaaaattaaccagacatggtggcacatgcctatagtcccagctgcaggggaggctgaggcgggaggatcacttgagcccagaagttcgaggctatagtgyactgtgatcatgccactgcactctagcctggaccacaaagtgagaccccatctcaaaaaaaataaaataaaatactgagataagggtattagcatataaa

SEQ ID NO: 545664 - DNA, 201 bp, Homo sapiens
gacattgtgggtgggttgccgttgattgggagaaaatgtcttcagcatttggacacctgaacagaggagtaaaaatagattctccaggattcttaaaaaawaacacatacacggcagacccaagtcattccagagactataacagcttacgaaaaagaagaagaaaacggaaaacaaaccttgatagaaaagaaggctagg

SEQ ID NO: 545665 - DNA, 201 bp, Homo sapiens
gtgaggattagctctttgctctgtcctgcagtgcactaattattggtggctctgttatttaaaatactgagataggctgagtgcagtggctcacacctgtratcccagcactttggaaggctgaggagggaggattgcctgagcccaggagttcaagaagagcccgtgagacatagtgagaacccatctctacaaaaagaa

SEQ ID NO: 545666 - DNA, 201 bp, Homo sapiens
aatggctttttttaaacctcaaagagatacttaaaattcagtcattgtatcaaataaataggtgcctatgtcaagtaattttgccagtgagaatatttatrtatccaaatgatgtctcatttcataggaaatcttatcaaaagcacaagtttcatcgcattgttactaaattaaaatatagaaacagaaaatttccagatt

SEQ ID NO: 545667 - DNA, 201 bp, Homo sapiens
caacttgcacccccactctagacaagttctgtcacgtgaaccagtgtccgtcttgcctaacagccaccataaccagaactcatcttgcatttgtttatgcrttcactgtctgtgcccacctcctccaaccaccaccatgagaatgtgggtactgagaacagggtctgtgtctaccttgttctctgctatatccctgtagct

SEQ ID NO: 545668 - DNA, 201 bp, Homo sapiens
aagacagagttgaatctagactaagatagaccttgaactttatccttttgccagtaggaagtaatcggtgtcttagagtatcattcactttaacgtagaayaaattaaagaggcaaaagactgaagacacaaaaaccagttggaatacaacaggcaagaggagataaggacttgccccaggcatggcactggggatggaga

SEQ ID NO: 545669 - DNA, 201 bp, Homo sapiens
tagcttggttcttgccagctagtctgccttgatgccagacatgtgctcgccaccactattgatgaatggttgaaactgatacaacaagattagggagaacmcgataactttaagaggaatacaaagtaagaactagaacttagttgtgagtagtctctaaaagtcttaaacactcccgggtttatctacctgtttctcatt

SEQ ID NO: 545670 - DNA, 201 bp, Homo sapiens
caccatgttggccaggctggtcttgaactcctgacctccggtgatccaccctcctctgcctcccaaagtgctgggattacaggcatgagccatcgtgcccrgccttgacctgctttttacctgtacccaaaaatataattagttcaaggctatgatgcatgcaattaaatttttctcctaaagatatatctttaatcagaa

SEQ ID NO: 545671 - DNA, 201 bp, Homo sapiens
tcaagactatatttgcttaggttctcttaaagatcatactcccattatttgtgaatgagtatgtgtgggagaatatatctgtttcaaaagtacttaaggartacaaatgcaaaatctggtttcaacctttatgaaaacaactggctccatcttagtcttaaataatcaacctcttgtggcatggttgacatttctgctcaa

SEQ ID NO: 545672 - DNA, 201 bp, Homo sapiens
aggttctcttaaagatcatactcccattatttgtgaatgagtatgtgtgggagaatatatctgtttcaaaagtacttaaggagtacaaatgcaaaatctgktttcaacctttatgaaaacaactggctccatcttagtcttaaataatcaacctcttgtggcatggttgacatttctgctcaagtgcagccatgaagcagg

SEQ ID NO: 545673 - DNA, 201 bp, Homo sapiens
catttctgctcaagtgcagccatgaagcaggaaaacatgcattgccaatttaagagtcaggtggaactacgaatcccttcccttatttaacaagcatttayggagcacctaacgtgtgccaggcaccaggctgctcctgaggatacagcaataacactgacccagcctctgctctgacttcaaaagcaaataatctgagag

SEQ ID NO: 545674 - DNA, 201 bp, Homo sapiens
acaatcataccagatgggtaacagctaaatgtcagccctgggcgtttgaagatgtcctccgcaggctagaaaaaaatccacgttggattggaatcctgctkagaatagctacactataattggaactctggagactgtatctgttccttctcatttggtctttctagaaatcaaagttctcctctggactcttccaaaaca

SEQ ID NO: 545675 - DNA, 201 bp, Homo sapiens
tcgccggtgcaagaggggggttcctgcttgggtacccacatcagtaggttttgtctcctcatctgcttgtcttctgaagataaatcgttggcagaactgaaaaaaaaaaaaatcatggaatggcttttttacatttctgccagggggaggctattttgtaatctttttgcagccttcctgtgcacaacccaatcccaagct

SEQ ID NO: 545676 - DNA, 201 bp, Homo sapiens
ccgcccaaaagaaccctctaataagtatgcatctaatattttctataagcaagttttttgggaacctttgttcctgatatgttattataattcctcagatrcaagcaatagtgaaaccactttactctttaatcatcatatgaaggttttagtaattatagaaaatgacacttaagaaaaaaattcaaaacaaatttcata

SEQ ID NO: 545677 - DNA, 201 bp, Homo sapiens
gctggagagaaaagacttaatgatgaggagaagaagggctataaatggaatgaatgtcttaagggcttaccatgtgtcaggcatgtagataataagaactkatcacaggctatcccatggaaacctcaccacgtctctgagaggtacccccattgatgttcagagaagttaattaccagcaccaaatcacaagtctgtctg

SEQ ID NO: 545678 - DNA, 201 bp, Homo sapiens
accaaagtaaatgaaacaaaatagaagcattctgtggattgacgataataaaatatcatgcagttcacaatcatcttaaattttcttatctaaagtctatrtttaaaaaagttttctgaacatttaaaagttgaggaaaaaacaaaattaagaacatgtgaacaatactataaaaacaccaactctgtttgagagccttca

SEQ ID NO: 545679 - DNA, 201 bp, Homo sapiens
attattattcatgtagctaaaccttgggacgataaaccaaaaataaaattcaaaggcccctcacaaccatctgaatgtacttcctcctcagccaggcgctmtaaaatttaacctgaaagactggttcaggccatgacaggaagtcgggggttggacatgcctcacaatacccctccagcattaacatcaacacagacctta

SEQ ID NO: 545680 - DNA, 201 bp, Homo sapiens
acaaaatacaattttcattttaaaagtcagaaagtcaagagagcattaagtaattttaaaactattgttttgctagaggttattagtgggtgtcatggctkgtctacacccccaggacagggttttgttttctccagaaagatgagagtttgagggaaaacaaaggcaggaagcagagtgactgcttggggctagtccggc

SEQ ID NO: 545681 - DNA, 201 bp, Homo sapiens
aagagatcaactcaacacccatagagctttaaaacccccattctaactttcagagaaaatctgctgatgttgactatgggtgctactgtgctggtgagatkgccccagtctaacactcaaaatgacccttagcgatcacctttccaggaccagaaaagagaccttatgaattcagtgatgggactgaaatagtcattctct

SEQ ID NO: 545682 - DNA, 201 bp, Homo sapiens
gaacacaggtcatggaagagctgagtcacccctgagtcagaatgactctgatattctataggcagctatttatttccagggaaggaggggccacccgagcyggaaactcttggtccaaccgaagtggtgtattcagacatggggagtgggagtgttccagcaggcacaggcctggagggacaagatgagccagccgtggtg

SEQ ID NO: 545683 - DNA, 201 bp, Homo sapiens
gacctcaagagatccacccacctcggcctcccaaagtgctgggattacaggcgtgagccactgcactcggcctcccaaagtgctgggattacaggcgtgarccactgcacccggcttaatttttgtatttttagtggagacgggggttcgccttgttggccaggctggtctcaaactcctggcctcaagtgatctgaccgc

SEQ ID NO: 545684 - DNA, 201 bp, Homo sapiens
accttgcccagctgaatctttctatttttagagcaaagccatgtgctcagcgtgtcaaggtagactgtggtaaatcctttaataaacagatgctgatggayttaccaccagtagtaaactgagaatgaagtttcaactttttgtttgtttgtttgtttttgttttttaggcagagtcttgctctatcgccaggctagagtg

SEQ ID NO: 545685 - DNA, 201 bp, Homo sapiens
gggattccaggcacgcatgaccacacccagctaatttttgtattttaatagagacagggtttcaccatgttggccaggatggtctccaactcctgacctcrtgatccgcccaccttggcctcccaaagtgctgggattacaggcgtgagcagccatgcctggccagtttcaacatttttactaccggaaatcaaaatgtta

SEQ ID NO: 545686 - DNA, 201 bp, Homo sapiens
ctaggagaaggttcagaagcctacataaagtctggccaaccaaagatgctttgtcccttcatcctcttgcccatcctgacttccacagcattacctcctcyacatcaatctatccttgagttcctgcacaccctttcctgtctcagggattctgctcttgctgtttcctctgtctggaatgttcttctcacagtcagttcc

SEQ ID NO: 545687 - DNA, 201 bp, Homo sapiens
gaatattatagaaactgagaacaaaactcaagaaacttgtttctgcaaagaaacccagacatcctgtttataaaaatgacgtggaggctggagcaccacastaaacaaacgaatgttctcttctcagatgtatctttacttgtcattatacttttggctaaacgtttcttttttctttctttcttttgtagagacagggtc

SEQ ID NO: 545688 - DNA, 201 bp, Homo sapiens
atataaaggttccaggctgcagggagaagtgaacacagattacttacaagggaatgaggagcaggtaggatgagatgtttcatcgcaattcattctacacrccagcagtcattggatcaattctcccaagtgctcagggaaaatgaatactagtttgttaccagttcaaactcaaatttaatgtgaagaaacgatgagtga

SEQ ID NO: 545689 - DNA, 201 bp, Homo sapiens
gactacagacgcccaccaccatgcccagctaatttttgtattttttgtagagactgagttttgccatgttgcccaggcttgtcttaaattcctgggcttamgcaatcctcccacctcagcctcccaaaatgctaagattacagatgtgagccgccattcctgatcttttttttttttttcttttttgagactgggtctcac

SEQ ID NO: 545690 - DNA, 201 bp, Homo sapiens
taatgggtttgttttgtttttgtttttgttttgagacagggtctcactctgtctcctaggctggagtgcagtggcacgatctctgctcattgcaacctctrcctcccagggttcaagtaattctcgtgcctcagacttccaaatagctgggattacaggtgcacaccaccacacctggctaatttttgtatttttaataga

SEQ ID NO: 545691 - DNA, 201 bp, Homo sapiens
agcaggtataatcagaattgtgacttacatttaagcacactgaactagacattaattagaaatttctcataaagataccacaatattatgcttgattgcayctgtagaaaacaaacccttgaattttcactttaggcttagagaataatcaccattcttccaaatcctttgccaaatgaaaatgaaaacttctaagatgaa

SEQ ID NO: 545692 - DNA, 201 bp, Homo sapiens
gctgacaattaccaaaaaagaattgggggaataaatgggagagacagctgtccaggaagttatcagttgccagatttgcttgtaatgcagagaaattcccrggaagtcaaaaagtgttcattggtgattgcacgtcttttgaaatcgcatcagaggtctccattttctaacctcttctcttgaaaatgaatatatgtttcc

SEQ ID NO: 545693 - DNA, 201 bp, Homo sapiens
taaaacgatctcacttcgatcgtcttactccagcaatacaatttttaggggtttgttttgttttgttttgttgtaaaacaatatactcttttcctatcgtyataatgaaatgggaaaggttcccttgttcccatcgcacaccctatgtggctcacttcttcagtgcctcactacgcatacctctaggggagcatacaaaca

SEQ ID NO: 545694 - DNA, 201 bp, Homo sapiens; identical to SEQ ID NO: 542907

SEQ ID NO: 545695 - DNA, 201 bp, Homo sapiens; identical to SEQ ID NO: 542908

SEQ ID NO: 545696 - DNA, 201 bp, Homo sapiens
gatttgggtccattatataactgccactttttgtttttattcaaggtgtcataaaactgagttctgcagttgaaggtatgtttttacaaccacaaaatcartaatgttttgcttaaaggttgcatagcgtggcttgtagctaaaaagcttctgtggcagtggtgtttgacgccatgtgcgaattgccagctattgccattg

SEQ ID NO: 545697 - DNA, 201 bp, Homo sapiens; identical to SEQ ID NO: 542909

SEQ ID NO: 545698 - DNA, 201 bp, Homo sapiens
tttaccatccccaccaacaatgtatgagggttccagtttctccacaaactggccaacacttactttcctctttaaatttttttcccttatggctatcctaktgggtatgaagtggcatgtcattgtggtgtggatctatatatctgtaatgactaatgatgttgattgtcttttcatgtctctattggccatttttatctc

SEQ ID NO: 545699 - DNA, 201 bp, Homo sapiens
accatgcccagctaatttttgtattttttgtagagactgagttttgccatgttgcccaggcttgtcttaaattcctgggcttacgcaatcctcccacctcrgcctcccaaaatgctaagattacagatgtgagccgccattcctgatcttttttttttttttcttttttgagactgggtctcactctgtagcccaggctgg

SEQ ID NO: 545700 - DNA, 201 bp, Homo sapiens
taatgctgtctgctagtatcttttgaaaagcaaactgaatcattaactggtccaaccgaatgttgccaattgatgccttctccattgaccaactttctggaaaaaaaaaaaaagtatagcacattaggctttaggtagacttactggtagattgtttcactaatcggcaaagcaaacattgataactggcaaaccattcac

SEQ ID NO: 545701 - DNA, 201 bp, Homo sapiens
tttcatgggagaattaaaatatcaacatctatacaatattatttgtttacctttatatatcttgatttgttccacaaagaatttggagtggcttgtaagarttgttagctcaacagtgggatagattgatggatagagatataaataaaaattagtatcattgtatgatttttgttatagtgtgctatgcaattgttgaca

SEQ ID NO: 545702 - DNA, 201 bp, Homo sapiens
caacaatgtatgagggttccagtttctccacaaactggccaacacttactttcctctttaaatttttttcccttatggctatcctagtgggtatgaagtgrcatgtcattgtggtgtggatctatatatctgtaatgactaatgatgttgattgtcttttcatgtctctattggccatttttatctctttggagaaatgtc

SEQ ID NO: 545703 - DNA, 201 bp, Homo sapiens
aacaggtgcttgtccagaatggctctagtctaatatttacactataattaataactatttgggtctttttgtttgtatttatttttattaatatacaacarttgtacatattttggggggatatgtgatattttgatacctgcatacaatgtgtaatgatcaaatcagagtaattgagatattatcaccccaaacatttat

SEQ ID NO: 545704 - DNA, 201 bp, Homo sapiens
atcacgctcttcccttcccagcactccttatcaataatacgcaagattttaaagatgcagtgcaaaataagaaaaacatctggaaggtctggaaccctaawaccagtctgcgttgtctttcttaaagactgaaattgtacaacatttattttcatttaacaaacacttatcacttgtatttgtcagcctttgttcaaagat

SEQ ID NO: 545705 - DNA, 201 bp, Homo sapiens
aagattgcagtgagctatgattgcaccactgcactgcagcttgaatgacacagcaagaccctatctctaaaacaaatttaaaaattgtttaaaaaaaaackttttaaattgacagattagaatctgatcagtttctttccagagctacttgaacatctcaggagattctgctaaggatggaaaaggaaggagttttaattt

SEQ ID NO: 545706 - DNA, 201 bp, Homo sapiens
aggtaattccagtctgggcctgtgttttgtttccagctcggcagccgccaggtgtctgccctcccttaacctccaaggatgagagatcaaaggtgcccctrcatctgcctcctgcccagctctttaatctgttacatgttcaaaagggacaaatgcagtattgtgcactcagggagggaggacaaatcagagaagtggaaa

SEQ ID NO: 545707 - DNA, 201 bp, Homo sapiens
acataaatgatacggaatatgcctgtcgacatattagccctgccactgtagaggtgttttcttcttaaaagagcaagaatattatgcagaaatggaaatcytcttttctccctttggaagcctactaaacccatttaatgaaatatcgtacacagacccatttggaggtcactattagaaatataacgaggtaaaacaaaa

SEQ ID NO: 545708 - DNA, 201 bp, Homo sapiens
tagtcttatgggactgccactgtacatgcaatgcagtctgtggttgaccgaaacattattatgtggtgcatgaccatagtggtttttctgtgcgtggcttrtttcatttagcataatgtcatccaagttcatccatgttgtgcaaatgacagcattttcttctttttatggctttgtagtgttccattgtttatatatacc

SEQ ID NO: 545709 - DNA, 201 bp, Homo sapiens
aatttaacctcaaattattttccaaatcaaaaagaaatgaacagagtaattttctcttgacataggtatagatttaaaaattacaaagactgcccagtaayatgaagaaaattaatactatataaaaatatgcagggaacagagaacaccagaagaaaacatagcagtggtaagctagggtgctgagaattatgggtgatg

SEQ ID NO: 545710 - DNA, 201 bp, Homo sapiens
catgcctgtggtcccagctactcaggtggctgaggcaggaggatcctttgacaccatgagccaagattgcgccactgcagtccagcctgggtaacagagtragaccctgtctcaaaaaaaaaaaaaaagaacaggagcaatctgttaacaagatagtcaaagaaaatttatagaataaaaagaaaaagacaaatgtcaaat

SEQ ID NO: 545711 - DNA, 201 bp, Homo sapiens
aattacaagggcacttgtagagacctgagcttattttatatgtggcaaaaatgataaactaatctttaagcagagcagatatattttaagaaagactattyccagcggagcatgtattttccatatccgtagagctaagtaggggaatgcattttaaaacagtaggaattcagattaggtattaagaaaataatactgaga

SEQ ID NO: 545712 - DNA, 201 bp, Homo sapiens
tatttgcctcatatatgtccaacgtatactgataatacagggatgggataagtgcttgggatattcccactcaaagagtggataaacagctatacgccagrcattaccatagcaagtctgaaatccacatgctgccagttccttggctggagggccgagtcctgctctctggaatgattctctgcggctcttggatccacc

SEQ ID NO: 545713 - DNA, 201 bp, Homo sapiens
taatctttgtgggcatcctttgaatcttactgggtttctttctgttaaatgaaacacatacctacaattctcttcaagatagtcccttttttggtctgggbtcagagttgggtgctgtgggacaatacccttaggattcttaaaagcctttttgtctattttggaaactctatgaggtacatccttaaatatttctacagt

SEQ ID NO: 545714 - DNA, 201 bp, Homo sapiens
cttagaacttatacctgttgtactatttgtaaaacaaatacaattttatactgtaagagctgtgtcaaagaagttcattctttcatgtgacagcccttccrttatttggaggtagaaataggtttctcctaagtgtgcctgagccctttctccttctactggaaatattccaggctacactgttgtttaaagctaacacca

SEQ ID NO: 545715 - DNA, 201 bp, Homo sapiens
taggattctggaatgaaccagtcttaccatggacccttggtcccatcttgccacaattacagaggaggcaatggagcacacagagggccccctattcatcyttggggttttgaaatgtactggtcttaccactgcccttacctgtgtacccctaaccctgcctgcatctctgttctcatggtaatctgttagcctcagact

SEQ ID NO: 545716 - DNA, 201 bp, Homo sapiens
ccttagaacttatacctgttgtactatttgtaaaacaaatacaattttatactgtaagagctgtgtcaaagaagttcattctttcatgtgacagcccttcmattatttggaggtagaaataggtttctcctaagtgtgcctgagccctttctccttctactggaaatattccaggctacactgttgtttaaagctaacacc

SEQ ID NO: 545717 - DNA, 201 bp, Homo sapiens
agcgaagacatggactcaacctagttgcccatcagcaatggattggataaaggaaatgtggtacatacataccacagaatactacatagctataaaaaaaagaataaaatcatgtcctttgcagcaacatggattcagctaaaggccaataccctaagcaaattaacacgggaacagaaaatgaaatactacatgttctca

SEQ ID NO: 545718 - DNA, 201 bp, Homo sapiens
ggagaccgaggtgggcagatcacctgaggtcaggagtttgagaccagcctggccaatatggtgaaaccccctctccactaaaaatacaaaaattagctggrtgtggtggcaggtgcctgtaatcccagctactggggagactgaggcagtggcaggtgcctgtaatcccagctactggggagactaaggcaggagaatcgc

SEQ ID NO: 545719 - DNA, 201 bp, Homo sapiens
cgttacttgcttgagacagtgacttgggtatggcaatttattagggagctgatccaaagatcaagagttggaagcaggaagagtgaatcagggaagaagcrcaggccaaattatgggtgggttagcaagtccaccactgcaggcaatgggaacttggttcctcccaggaggggtacagatgcccaaatttctgttagaaag

SEQ ID NO: 545720 - DNA, 201 bp, Homo sapiens
ttctattttttgcagtatatacccatagtgggattgctggatcatacggtaattctgtgtttaatttttttaacaaccaccaagccattttccacagtgastgcgttcaagggttccaatttctccacatctttgccaacactcactttctgtttctttcaataataaccatcctaacaggtgtgaagcggtatctcactg

SEQ ID NO: 545721 - DNA, 201 bp, Homo sapiens
gacccttggtcccatcttgccacaattacagaggaggcaatggagcacacagagggccccctattcatccttggggttttgaaatgtactggtcttaccaytgcccttacctgtgtacccctaaccctgcctgcatctctgttctcatggtaatctgttagcctcagactagccttcatctctgtcctgtgggtctcttga

SEQ ID NO: 545722 - DNA, 201 bp, Homo sapiens
cctccacagcaaaaccccacattgaggagaaactactggaatagaatccaaattgagcaggaaatagatgataggagcaaaggaggcaaaagaaagaagaygcagatgcaagtggagggaagagcaaagagccaacagatagcagatacatacttgtaaacacatccaaaaataacagaaaaggcagctctaaatctctag

SEQ ID NO: 545723 - DNA, 201 bp, Homo sapiens
tcatcagatcttgatgatttcctgtcaaaagctcttccttctgagacactgtgggggagtttagtaatcacagaagggcatctatgtcatttgtcccagtrtttagggtgctacataaatgacaatagtgccacatgttattgcttcctgcattttggaatgtgactaatgcacctcttccattgttcccttccagaatct

SEQ ID NO: 545724 - DNA, 201 bp, Homo sapiens
caggggttgaacacatccagctaaggaaggcaagtcatagaggtgtcttaacactgggtgacatatccaagtcacagtgccaaagtatgatagcagcggcraatccatacaggtctgaagcatacttgattcttgcctcctccgaataaagaatttgactaaggagcataaagcagagagagaaagagagagaccaagaca

SEQ ID NO: 545725 - DNA, 201 bp, Homo sapiens
aggaagtaaagtacacttggaagagggccaagcaggcaacttgagagattcacgtgcatggtttgacctttgacttggagtcttatacattggcaggcttstgggggattgcgatccttctcccctgattcttccgttagggtgggctgtccacatgcgcagtggcctgccagcacttgggaggggctgcacacacagtgt

SEQ ID NO: 545726 - DNA, 201 bp, Homo sapiens
gagttgggtgctgtgggacaatacccttaggattcttaaaagcctttttgtctattttggaaactctatgaggtacatccttaaatatttctacagtcatwaaaaggtattttacagccaccccctaggagtgttaaaacaatttttgttttgttttgttttgtttttactcaacacattctagctctttattgtctccaa

SEQ ID NO: 545727 - DNA, 201 bp, Homo sapiens
tacacttggaagagggccaagcaggcaacttgagagattcacgtgcatggtttgacctttgacttggagtcttatacattggcaggcttctgggggattgygatccttctcccctgattcttccgttagggtgggctgtccacatgcgcagtggcctgccagcacttgggaggggctgcacacacagtgtgtttactggag

SEQ ID NO: 545728 - DNA, 201 bp, Homo sapiens
tgtttttactcaacacattctagctctttattgtctccaaattttgtttgaaaactgaacagttcttttttgactcatctttctctacctgcaccttttaytgtgtgtagctttaaaaaaaattttttttttaaatttttaaatggcactttaagcattctgcctagaagttttcttactaaaatccgtgggttccttggg

SEQ ID NO: 545729 - DNA, 201 bp, Homo sapiens
tttgacttggagtcttatacattggcaggcttctgggggattgcgatccttctcccctgattcttccgttagggtgggctgtccacatgcgcagtggcctkccagcacttgggaggggctgcacacacagtgtgtttactggagttgtacacatgctcacttgaggtgtttttcccttaccaataaagtgttcctacaagg

SEQ ID NO: 545730 - DNA, 201 bp, Homo sapiens
gccactacattaatagagttaccttttctccaggctccagtgacaattttcagtcctcccagccttcaccagcagtcttctcaagaccttacagctggccrggagcagtggctaactcctgtaatcctagcactttgggaggccaagatgagcggattgcctgagctcaggagttcgagaccagcctgagcaacatggtga

SEQ ID NO: 545731 - DNA, 201 bp, Homo sapiens
tatttttagatgatgaaatactttcttcgtaaaataagagtataatagagtttattacaaatcacatatttgagtatttgtttatactgtaagaatgttcraggacaacatttgactatgcagtaaaaaggtgcaacttggaagaaaaggcacattgactggatttattttccttttgcatattcttatcatatgctagac

SEQ ID NO: 545732 - DNA, 201 bp, Homo sapiens
gcaggagaagaaggaattagctggggaggatgcaaagagagacaggagaacacgggtgtttcttggcatgaaggctaaaagtattaataatgttaacaggmttcagactaggaaatttcgttaacatggtaatgtcataattttaaatctagaaatttctatcttttgaatatggcatctattttataaatttgtataatt

SEQ ID NO: 545733 - DNA, 201 bp, Homo sapiens
tgtttttctattttgtagcaaatgtatgattcttacaattatgctgagttatgtttttcagataatatattttattttgaaaaatcattatcaagtcaackgctgggaaatacactagtaaagtagccccaattttgccttgtgaaatcaattgacttttttctttcatcaatggatcaactaaataaatgcttccagatg

SEQ ID NO: 545734 - DNA, 201 bp, Homo sapiens
tctacataccattttccactaaaaggaatcaaaggctccctgaagaaatagctgattagaggtctgtggaaggaagtgtacaagacggacctggaatatcrtaaacggctttggtgatatcagaactctgcaattaagttaactctgcaatgaactgaggcacatcaaatattaacattcacgaattcctaataatactgt

SEQ ID NO: 545735 - DNA, 201 bp, Homo sapiens
tttgcagtagcttttatttattttttaatgtgatccccctacccctacccatgagaggactcacttacaaaaagctacagctgtgtccctgctcggtgcargctgccttggccaggtgcttcaaattgcaagcttccatctatgagcctgagtccagctgtgctgggattgattcctgccacacaggaaagtaaaggggaa

SEQ ID NO: 545736 - DNA, 201 bp, Homo sapiens
aagacggacctggaatatcgtaaacggctttggtgatatcagaactctgcaattaagttaactctgcaatgaactgaggcacatcaaatattaacattcaygaattcctaataatactgttaaaataaaatattattgatcatccttggaaaatgcaaggaaaccaaaatcattattttaaaaactggcaaataaaaggaa

SEQ ID NO: 545737 - DNA, 201 bp, Homo sapiens
atcatacggtaattctgtgtttaatttttttaacaaccaccaagccattttccacagtgagtgcgttcaagggttccaatttctccacatctttgccaacrctcactttctgtttctttcaataataaccatcctaacaggtgtgaagcggtatctcactgtggttttgatttgcgttgccctaatgattagtgatgttga

SEQ ID NO: 545738 - DNA, 201 bp, Homo sapiens
ccaatttctccacatctttgccaacactcactttctgtttctttcaataataaccatcctaacaggtgtgaagcggtatctcactgtggttttgatttgcrttgccctaatgattagtgatgttgaacatcttttcatgtattgatgggccacttgcatatcctgtttggagaaaggtccattcaatttccttgcccattt

SEQ ID NO: 545739 - DNA, 201 bp, Homo sapiens
gtgagttgtatgaagtgtttgttttgcatatgtatttatatatataatttttatttttaattgtaattaaaaaacacataaaagtaaccatccttactttctttgagtgtacagttcaatagtgttaagtaccttcacattgtggtgcaacagatctccagaaatcttcatcttgcaaaactgaaactctgtacccattaa

SEQ ID NO: 545740 - DNA, 201 bp, Homo sapiens
aagggtactgacttgcttcatgaacaacttgacttgctcagataacccgttcactctctgacttgagggagctgaaatctaaacccatcagaccaagaaamgggctctggcccaaccaccccagagaagaaagttaccagatcacaccatggtttttaaccacctgttacatgtttcaacagaaactctgtcctaacatgc

SEQ ID NO: 545741 - DNA, 201 bp, Homo sapiens
cccagagaagaaagttaccagatcacaccatggtttttaaccacctgttacatgtttcaacagaaactctgtcctaacatgcatcagatgatctctagatrcagtatcaaagaggaagtgctggtccctagcatcctattgtgtgaacttttattgatccataatctggtataatttatacacagaaatagtcactcaggc

SEQ ID NO: 545742 - DNA, 201 bp, Homo sapiens
aaaataatctaaacatctaaatcagttcatgatattgttggtatattaaatatcacaaaatcagaagactaaagttatggtttccaaatgtaaatatatgkaaaaatgtatgacattaatatatagtatatatcattatatataatatgcataaatatgcctacatacataaacatatgtaacattataatatagtttaaa

SEQ ID NO: 545743 - DNA, 201 bp, Homo sapiens
acttcccattgtggctttaactacttttccttccttccttccttccttcctccctccctcctttcctcccttcctttctttcttttttacttttatttaakttcaggggtacaagtgcccatttgttacacaggtaaatttgtgtcatgggtgtctgttgtatggattatttcatcactcaggtattaagccccgtacaca

SEQ ID NO: 545744 - DNA, 201 bp, Homo sapiens
ttcctcctgggcagtgtgacccaccactatgaggcatagtgaagaccaagttcctttactgttgtccgtgtcagtgagtggcagttcccttcagtcatacrttcaaaaagccgagaagaaaaggaagaagaatttaaggaaagtacaaaagagacgtccaagcaaagtgttttgctgagtaaccccaagaatattaaaatg

SEQ ID NO: 545745 - DNA, 201 bp, Homo sapiens
caaaaagccgagaagaaaaggaagaagaatttaaggaaagtacaaaagagacgtccaagcaaagtgttttgctgagtaaccccaagaatattaaaatgacytcattttctgaaatgatttattggtataaaattgatctccttagccccataggagtttcacaaatcaaaagtagagaatgtgtcattttcttcttttgtg

SEQ ID NO: 545746 - DNA, 201 bp, Homo sapiens
tatttgtggcattcgtggcagaaagtatgatgctactctaaactcagcaaaaggtgcaggcagcggtgtttcagagtggagagaaaaagaccttctcacckcgaggagaaagtgcatgttgcaggcctgtggtaggccaagcagaaattcaagttcgctttgcgcatcaaagtggaattttactgaaggacaatccaagtt

SEQ ID NO: 545747 - DNA, 201 bp, Homo sapiens
agaaattcccgggaagtcaaaaagtgttcattggtgattgcacgtcttttgaaatcgcatcagaggtctccattttctaacctcttctcttgaaaatgaatatatgtttccagtctcccacaggatgtataattttgcatgattgttagtagctattggcaccatttatctctctagtcatccactgttccattttgtatt

SEQ ID NO: 545748 - DNA, 201 bp, Homo sapiens
tgggatttatttcagaaatgtgaggttggttcagcattcaaaactcaaataatgtaatacatcatatcaatacaacagaaaaaaactcagaagatcatctyaatagacacagaaaaagtatatgacgaaattctacagcccttcacgataaaaaccgacaaactgggaatggaaggcagcttcctccacttgatacagagc

SEQ ID NO: 545749 - DNA, 201 bp, Homo sapiens
ctcactacgcatacctctaggggagcatacaaacaggcaggctgtagggctcccaccccacggcagtgtctaggggtgaatgtttacagctgaagccccartggtcgtgtgtcgcagggtgttcttttagtttagccctataggcagcttgtgttagttcacttagatccgcttcctcatcacaaggacagaggactttct

SEQ ID NO: 545750 - DNA, 201 bp, Homo sapiens
aactcagaagatcatcttaatagacacagaaaaagtatatgacgaaattctacagcccttcacgataaaaaccgacaaactgggaatggaaggcagcttcmtccacttgatacagagcacctagaaaaaaaccacggctaatatcataacctttagatgagatcagcttcatgaaatgaagagagcttcatttgcatttgg

SEQ ID NO: 545751 - DNA, 201 bp, Homo sapiens
cggatcacgaggtcaggagatcgagaccatcctggctaacacggtgaaaccccgtctctactaaaaatacaaaaaaaattagccgggtgcggtggcgggcrcctgtagtaccagctattcgggaggctgaggcaggagaatggcgtgaacccgggaggcggagcttgcagtgagccgagatcgcgccactgcactccagcc

SEQ ID NO: 545752 - DNA, 201 bp, Homo sapiens
actcagaagatcatcttaatagacacagaaaaagtatatgacgaaattctacagcccttcacgataaaaaccgacaaactgggaatggaaggcagcttccyccacttgatacagagcacctagaaaaaaaccacggctaatatcataacctttagatgagatcagcttcatgaaatgaagagagcttcatttgcatttggg

SEQ ID NO: 545753 - DNA, 201 bp, Homo sapiens
atttgggagtgcggttgttgggctggggggacgtgtgttccatgcatgcattctcagtgcatctgaaacgtggaactcttacaagcatgctcagtggcacgtgtgtcggacactatctcttgatgagaaatcaaacctcagatggtcggccttgccactgcttagctaattaccgtacttgcaactttccatctgcagaat

SEQ ID NO: 545754 - DNA, 201 bp, Homo sapiens
tagccctactcaataaaaaataaggagtaaaattttcttttgttcccagaatcctgatctcttttactattactactataattcattttcattatgggctratcaaacccacagggaacccagaaacctaaccagcattttccccaaaatatagtatctctaggactaggctctaaacaattgactgaaaagtaaactatg

SEQ ID NO: 545755 - DNA, 201 bp, Homo sapiens
tttgggagtgcggttgttgggctggggggacgtgtgttccatgcatgcattctcagtgcatctgaaacgtggaactcttacaagcatgctcagtggcacgtgtgtcggacactatctcttgatgagaaatcaaacctcagatggtcggccttgccactgcttagctaattaccgtacttgcaactttccatctgcagaatg

SEQ ID NO: 545756 - DNA, 201 bp, Homo sapiens
tggacactttagccttctctgaacactacagtaaccatggaatgttttaattccagtcaccctgtgaagtgcagaattctaagagtggcctaatgccccaygctgatgtacaattccctccttttgagtgtgggtggaacctctgaagatgaggagatatcactcccttaattatgttatgttaaatggcaaaaagttgat

SEQ ID NO: 545757 - DNA, 201 bp, Homo sapiens
ggctggagcgcagtggcgtgatctcggctcgctgcaacctccgcctcctgggctcaagtgattctcctgcctcagcctcccgagtagctgggattacaggygcccgccaccacgcccggctattttgtatttatagtagagacagggtttcaccatgttagccaggctggtctcgaactcctgacctcaagagatccaccc

SEQ ID NO: 545758 - DNA, 201 bp, Homo sapiens
actgttaaaataaaatattattgatcatccttggaaaatgcaaggaaaccaaaatcattattttaaaaactggcaaataaaaggaagagatcaaacatttkttctaacttccctatacatattattccaagtaaccaagcagttgatgagatgtttctcttgataaaagtactccatctaataaatgaagaaggaatttta

SEQ ID NO: 545759 - DNA, 201 bp, Homo sapiens
ttcaccatgttagccaggctggtctcgaactcctgacctcaagagatccacccacctcggcctcccaaagtgctgggattacaggcgtgagccactgcacycggcctcccaaagtgctgggattacaggcgtgaaccactgcacccggcttaatttttgtatttttagtggagacgggggttcgccttgttggccaggctg

SEQ ID NO: 545760 - DNA, 201 bp, Homo sapiens
tgttaaaataaaatattattgatcatccttggaaaatgcaaggaaaccaaaatcattattttaaaaactggcaaataaaaggaagagatcaaacatttgtyctaacttccctatacatattattccaagtaaccaagcagttgatgagatgtttctcttgataaaagtactccatctaataaatgaagaaggaattttaaa

SEQ ID NO: 545761 - DNA, 201 bp, Homo sapiens
ttagacagctccaaacattacggagttctttcgtgtctccttagaacttatacctgttgtactatttgtaaaacaaatacaattttatactgtaagagctrtgtcaaagaagttcattctttcatgtgacagcccttccattatttggaggtagaaataggtttctcctaagtgtgcctgagccctttctccttctactgg

SEQ ID NO: 545762 - DNA, 201 bp, Homo sapiens
cctgtaatcccagcattttgggaggtggaggtgggaggatggtttgagaccgggagtttgagagaccagcctgggaaacatggggaaaccctgtctctccaaaaaaaaaaaaaaaagccaggcgtggtggtgcgtacctgtggtcccagctatccaggaaaatgagtcgggaggattgcttgaggctacagtaagccttgt

SEQ ID NO: 545763 - DNA, 201 bp, Homo sapiens
tctactaaaaatacaaaaattagccaggcgtggtggcacacacctgtagtcccaggtactcgggaggctaaggcaggagaatcgcttgaaccccagaagcrgaggttgcagtgagccaagatcgtgccattacacttcagcctgggtgacagagcaagtctcggtttaaaaaaaaaaaaaaggagcttaaataaaatcaga

SEQ ID NO: 545764 - DNA, 201 bp, Homo sapiens
atccgagtttaatggttgttaccttgacagaaatattttgctatctctttgtaaagtttggcatgttgattaaaaggggaaaaatgaataaattatatacrtatacatatattatatatatgtctatatatacacccatacatttgcagatgtatatagacatacacacatatatatttgctttatttttggctttgaaat

SEQ ID NO: 545765 - DNA, 201 bp, Homo sapiens
aatttgactactttagttacctcatataagtagaatcatacaggatttgcctttttgagactgattaatttttatttttattttttttttatgtcctcaargtttatccatgttgtactatatgacaggatttcctacctatgtaagactgaataatattccatgctatgtattgcttttatattttttatttataaattg

SEQ ID NO: 545766 - DNA, 201 bp, Homo sapiens
aacatcaacatgctgatgtcatccaaatctgttatctctagctcagacgtcccctctcacctcatactcgttaatccagctgccaactcggcctctccacttgaatatctaataaacatctccaatgtaacaggtccaaaacaaaatcctcacttacctcaagcctacttctgtcccgtctttcctgcctcagtagatatc

SEQ ID NO: 545767 - DNA, 201 bp, Homo sapiens
catatggttgtttacttaagtatttgtctgtatctgacaactacattgttaactccaagcaggcaggcagagattttgtcttcttaatagctgtactctattttttttttttttttttgacatggagtcttacccggtcgcccagtgcagtggtaggatctcggctcacggcaacctccgcctcccgggttcaagcaattc

SEQ ID NO: 545768 - DNA, 201 bp, Homo sapiens
acaccccacgaggtaaagatgatgaaattccatgccgaagaatgcggagtggcagttatatcaaggccatgggggatgaagacagtggagactcagacacsagtcctaagccttctccaaaagttgctgcgcggagagaaagctatctcaaggctactcagccatcccttacagaactcaccacactcaagtgagtagtcc

SEQ ID NO: 545769 - DNA, 201 bp, Homo sapiens
ctacttgggagtctgaagtggcaggaccagttgagctcaagagtttgaggctacagtgagctatgactgcgccactgcactccagcctggtcaacagagcragaccctgtctctaaaataaaaactttttaaggaaattctgttgttcatagtatgacaagccaggtgtccaaaaacaccccaaagggatttaatgtatta

SEQ ID NO: 545770 - DNA, 201 bp, Homo sapiens
ggtgtgagccacactgcacccagcctagtttatcttttgtaacagtaaaatgcaataagagatttactttcgatgttatattctagatctgtcttaatttkgtttctccctcagtgcagctgcaaaaagtggttgcttatcacattctcagggtttagtattattaagaatagtttttggctgttatatattaagtaattc

SEQ ID NO: 545771 - DNA, 201 bp, Homo sapiens
aagcgattctcctgcctcagcctcccgagtagctgggattacaggtgcccgccaccacacccagctaatttttgtatttttagtagagacgggatttcctyatgttggtcaggctcccagcctcaggtgatccgcctgccttggcctcccaaatttctgggattacaggcatgagccagtgcgcccggcctcttgtcttat

SEQ ID NO: 545772 - DNA, 201 bp, Homo sapiens
ttttttagacggggtttcattcttgttgcccaggctggagtgcaatggcaccgtctcggctcactacaacctctgcggctcactgcaacctctacctcccsggttcaagcaattctcctgcttcaggctcctgagtagctgggattacaggcatgtgccaccacccccggctaatttttgtatttttagtagagacagggt

SEQ ID NO: 545773 - DNA, 201 bp, Homo sapiens
actgatccatacctgatggtatgcattcccagagggcagcttgctggttagcttcttaaacatcaaatgtttaagctggatgagtcttcttgtattaaaaygagacaatatgatgaaatatggtagtattatcctttttgtatattcatcttttcttttagcagctaaatctttcttcaaaagaatgtctaaaagacggtg

SEQ ID NO: 545774 - DNA, 201 bp, Homo sapiens
tgatctaaaaacccatcaagtacaacagaggctcgcgaccttgcacctgcacttccctcggccaagaatgccctttcccagatttctacatgcgtcgcacyctcatacatctaagtctcagcttgaacgtctcctcctcagagaggctttttctcatccccttacacttcttctccccaggcccttctttattttccctca

SEQ ID NO: 545775 - DNA, 201 bp, Homo sapiens
aagagtcctttcattaatcaataagctttgaatccatcaaacttgatttctaaattggctgtgaaattaccaaagaggttatgaaaaagaccctttgaacyccttagcagaaatggggtcttgagaacaaatggagttcacatatgagaaaatagagaacattccatttctgcaacctgaaccgtgatgatcaattctcag

SEQ ID NO: 545776 - DNA, 201 bp, Homo sapiens
ggctgtcacagcagatagcctaggtgttggacgtgagctgaaggggcttacactagagatcccatagaagatacacctacagccttggtgagggacaaggrcatatatcaaggtacttgcaatggaaacaaagaatcaatccataatcacactgaaaatatgaagcagagaaccagaaggcaaatgtaatccaattaagta

SEQ ID NO: 545777 - DNA, 201 bp, Homo sapiens
gctccaaattttgtttagaagaatacactttctgaaaaacaaaggatcagcaatattttaaacaaaaagtcacacaaggattactttggctacttaattcytgttttgcttgatatttatgaacacattagttttccaaaagagtgatagaagttctttcctctccattttaatgtcacaatctctaaagttatcagcatc

SEQ ID NO: 545778 - DNA, 201 bp, Homo sapiens
caaaaacaactgcaaagtatcttaagctgatttttgtaatcattttgctggtggtagtcttctatttattcgagactgttgcacatgtgtattatgaatamagcaaatgaataattatattcatgtcaataaaatttgaaatttgacagggaaaaggacactgtgaaaaaagtcctctacttgaatttgaataggaaacat

SEQ ID NO: 545779 - DNA, 201 bp, Homo sapiens
caccacattcttaccaaaccaaaaggaaaacaacagtggagggaaagtcttacacatgtcaggcttttagacagaaccttttattcctcatctcatatatmttttctgctctataaaaaactaaaactttatcttctcaacatctcgctatgataagcttttaagtgggtcttaagcccacttaaaagatgctgcaccctg

SEQ ID NO: 545780 - DNA, 201 bp, Homo sapiens
cctcagaaccttctccttctcatcccatgcagctttactttctcacatgatatagtttccatttcccaactctgctggactcactaagaaaagacagtgcygtccaccaacaaggacgcaagctaggctgctccagggaactgggtaaccatggccagcaactcccttccctccaggagcatagggaccgggtcctgggag

SEQ ID NO: 545781 - DNA, 201 bp, Homo sapiens
tccaaaaaaaataaaaaaacaaaaaacagtaatgtctctgggagcattgagagtttcccaaatagcttcctaagacgaggaccctcctgaaatggcagagrtggagccacgtgacccagaaactggaagatgtgtggaaagaaatttccaagggttagccatttgtcatcttgtgattaccctcacctcagataaagttga

SEQ ID NO: 545782 - DNA, 201 bp, Homo sapiens
gtgaagcaaacccatgatatattcatggaaaagctggactttttctctcctcagaaagtgagatctttttgtgtgaagaactattgaaatctgaagcttcycttaggaagttaaaagttcttttgaaaatatttaaaagccctgaattaaaagatcttaatacagtcacacatgcaatacaactacatttaggtcacggat

SEQ ID NO: 545783 - DNA, 201 bp, Homo sapiens
tcctaagacgaggaccctcctgaaatggcagaggtggagccacgtgacccagaaactggaagatgtgtggaaagaaatttccaagggttagccatttgtcrtcttgtgattaccctcacctcagataaagttgacctcaaatgaccaaccattgacctcatctcagagctctctcacatttatctttttactttttttttt

SEQ ID NO: 545784 - DNA, 201 bp, Homo sapiens
cttggggcagttgcagagactaaactagatgctagagagaaagccttaacacagtgtacggaaggcagtaggtgctctccttcccgctttcctctttccartgtctaatgatcatttctactagaatcatggtgtagcacactgctgagagtttcattttcggcaaagccacaaacagagccagtttataaatccttgctt

SEQ ID NO: 545785 - DNA, 201 bp, Homo sapiens
cgctttcctctttccagtgtctaatgatcatttctactagaatcatggtgtagcacactgctgagagtttcattttcggcaaagccacaaacagagccagyttataaatccttgcttctcccctttgagagtccttagagggaagcgactcctcgtgttggatagagctctctgatcacctttctgggacctgtggcatct

SEQ ID NO: 545786 - DNA, 201 bp, Homo sapiens
ctctctgatcacctttctgggacctgtggcatctgccaggggcaagtcacagccccagtttggagtgttcgattcagatgagattgtcccccagtctgttytttgagtcctggaaggtggggaggagaggaaaggttttcaggcaacaaacaagtgctgactgaagactgatttcatcaatattaattgtgttttattaca

SEQ ID NO: 545787 - DNA, 201 bp, Homo sapiens
agccctcattatgggagatgtgcaggtaagaaagcaggaacaagagagtgagaaaccaagggtgcacagcagaggatgtgaaagctggagcactgtagatycatcaaccttgcaatctctggatgaggagatgagtcaccatcaaggccaaggtggttttggaagtcaaatgtgaactcccaaattccttactgggtgcta

SEQ ID NO: 545788 - DNA, 201 bp, Homo sapiens
ccagcatctatacggaacttaaacaaatttacaagaaaaaacaccaccattaaaaagtgggcaagtgacaggaacagacacttttcaaaagaggacatacatgaggccaataagcagatgaaaaaaactcaatatcactgatcattaaagaaatgcaaatcaaaaccataaagagatactatctcacactggtcagaatgg

SEQ ID NO: 545789 - DNA, 201 bp, Homo sapiens
acagaactaccatttgttccagcaatcccattgctagtgtatacccaatggaatacaaatcgttctaccataaagacccacgcatgcaaacgttcattgcrgcactattcacaattgcaaagacatgaaatcaacctaaatgtccatcaatggcattcaacctaaatgaaatcaacctaaatgtccatcaaatgtccaaaa

SEQ ID NO: 545790 - DNA, 201 bp, Homo sapiens
caatggaatacaaatcgttctaccataaagacccacgcatgcaaacgttcattgcagcactattcacaattgcaaagacatgaaatcaacctaaatgtccmtcaatggcattcaacctaaatgaaatcaacctaaatgtccatcaaatgtccaaaatgtggtacatgtacaccatggaatactatgcagctataaaaaaga

SEQ ID NO: 545791 - DNA, 201 bp, Homo sapiens
tcacatggcagttaaaaggtaatttttgtttttgagacggagtctcactctgttgcccaggctggaatgcagtggcgtgatctcagctcactgcaacttcsgcttcctgggttcaagtgattctccagcctcagcctcccgagtagctgggacaacaggcatgcaccaagatacccagccaatttttgtatctttggtaga

SEQ ID NO: 545792 - DNA, 201 bp, Homo sapiens
taaattgtcacacttttcccatgaaaatatcttgtttaccgagcaggaaaattcccattcatgtatttatttggctaacatttatcgaatgcatctatgcrttgggacatccagctgattctgatgcaaactcgagtttgagaaccattgtcacagtcaatggatgatatcaagtgagggaaaaagcatattgacatattt

SEQ ID NO: 545793 - DNA, 201 bp, Homo sapiens
gataaggcaaccgttttattacttcgcagccaggtgcctgagggtgacaagacttgcctttatctggtgacctgacaaggttatcagcaactgcaaatggkctgaacctcggagcagggaccatcaaaacgcttccctccccttgatccatttcccaaccctttattggtaattcatttcaatccgaagactagctctagt

SEQ ID NO: 545794 - DNA, 201 bp, Homo sapiens
ctgctgagtacagtgtttcttaaacatgcacctgttaagagatagagaagcaaatttaatttcctttttagccttctatatcccattgttgattttatacmtgccctccttaaatatgaactcctaaaattgtgtttggaacacatattggaagaaagtatagaacagtatataggacagtcctaggttcaaacttcgtag

SEQ ID NO: 545795 - DNA, 201 bp, Homo sapiens
tttcctttttagccttctatatcccattgttgattttatacatgccctccttaaatatgaactcctaaaattgtgtttggaacacatattggaagaaagtrtagaacagtatataggacagtcctaggttcaaacttcgtagccataacttcctggctgtgttgtaatctggagcaagttactccgtctgtaccacacttt

SEQ ID NO: 545796 - DNA, 201 bp, Homo sapiens
gaatatagggaatatctttacaatttgaggacatcaagatggatgtacatgaatgtaatgtgtaaatgtatgttttttaaaatccacatttctctaattaytagtgagatcgagcattttgtcatatgcttggtgatatataaagttactttcctgtgaatttatatatttattttcttatgattccctctttataggctt

SEQ ID NO: 545797 - DNA, 201 bp, Homo sapiens
actcctaaaattgtgtttggaacacatattggaagaaagtatagaacagtatataggacagtcctaggttcaaacttcgtagccataacttcctggctgtrttgtaatctggagcaagttactccgtctgtaccacactttcctcatctgtaaaatggggtaatgctacttagcactccagttgattaagaagcttaaata

SEQ ID NO: 545798 - DNA, 201 bp, Homo sapiens
catcaagatgcattggtcacattcactgagtgacactttgggtcttgggtgataagatagaggaattgctcttgtccacagcaatacccaggtaagaggaraacagaaagatgtagagccatgaggaagatgagaagagtgctctgaggagactgaggacagggctagagggtaggggctgaaatcaatgtcacaattgtg

SEQ ID NO: 545799 - DNA, 201 bp, Homo sapiens
tcctacctctaacgctcgagatcacagttcaacatgagatttgggaagggacacagagccaaaccatatcagcgacaaaggaaaattttgcatagaaatcrtaaggcatatgaattcggcatagtggatgaggatctgtactctggggccagaccacctgtgtttagcccaggttccatgacttaccagctttcttacttt

SEQ ID NO: 545800 - DNA, 201 bp, Homo sapiens
ccctttcttgcatctttagaaatattttgaaggcacataatgaactttcagcataattactgaggtgagaaatatgtctctatgttcaaatgctcttccargaaaagacttgagagcatcaacatggcaacaactcaagagccaatgggttttgttccataaaccagatacctagcaggttaaatatgaaaaactacaagt

SEQ ID NO: 545801 - DNA, 201 bp, Homo sapiens
ttgtcatcttccacaagcagagctctgaacatttgacttcccagcaaatctttactgaaagccagtttctccattacttcctcctgtttagaagtgatttyccctacctctgagcatatctctttgctatgataaaattttgtaaaccttccccatctaaagaatattatatgtgtgtgagaaacggaacacaaatgatag

SEQ ID NO: 545802 - DNA, 201 bp, Homo sapiens
atgctccttgggaacctatggattatattgggaaaaaattcatgctgcttaatgacataatgtaaaatgtacaacttttactccttaataataaattcacrtgttggtatttccatcagtttaccatagtgagacttcatgtttaaagactctatgaatataaaggaataattcaaacatgacttctttactctactagca

SEQ ID NO: 545803 - DNA, 201 bp, Homo sapiens
ttaataacagcagcttagtgcctaaaccttggaaaggaacaatcctgtcaggctaaatcagaaagtcgcatgccaatttataattaattttgtgagatatyccaggacaaagactgtgaaaaggtttttgcatgtcttttatgataactagtttcactgaatagactatttcatagcccagaaagtccctgtgtgtccaaa

SEQ ID NO: 545804 - DNA, 201 bp, Homo sapiens
gtacctgggtggtgaaataatctgtacaacaaacccccatgacgcaagtttacctacgtaagaaacctgcacgtggacccctgaacctgaaataaaagttaaaaaaaaaaaacctcaaatacttcatgaaaatcttgtttaaaatagaaaccaaattttattcttgtcttattgtatttaatattaaagctaattttaaaa

SEQ ID NO: 545805 - DNA, 201 bp, Homo sapiens
ccagcctgaccaacatggtgaaaccccatctctattaaataaaaaaaattagcctggtgtggtggcacatgcctgtaatcccagctactcaggaggctgargcaggagaattgcttgaacctgggaggtggatgttgcagtgagccgagacggtgccattgcgctccagcctgggcaacaagagcgaaactctgtctcaaa

SEQ ID NO: 545806 - DNA, 201 bp, Homo sapiens
atttgattgcttaaaggaaagcatgccattccagttaaagccctggtaaaataaccagtttctccaattgtgtcctgttgtgaaagaaaacagattcttaytgcacttaggcaaatcactatattgccgtaagttaagaatactcacaaatagtttccaaattttggagtactcaggtagaaagaaatatgctccaaattt

SEQ ID NO: 545807 - DNA, 201 bp, Homo sapiens
tgattgcttaaaggaaagcatgccattccagttaaagccctggtaaaataaccagtttctccaattgtgtcctgttgtgaaagaaaacagattcttactgyacttaggcaaatcactatattgccgtaagttaagaatactcacaaatagtttccaaattttggagtactcaggtagaaagaaatatgctccaaattttgt

SEQ ID NO: 545808 - DNA, 201 bp, Homo sapiens
ccggctgcttccgcatgcggagccacagctatgtgcgggccattgagaaaggctgctcccaggacgacgagtgcgtgtccctgaggtcgtcctcgccgccrcgcaccaccaccaccgttaggaccatccagagcagcacgggtgagtgcgcgggccctcagccagcctggcccctgtgctggctatggcacgactgtcccc

SEQ ID NO: 545809 - DNA, 201 bp, Homo sapiens
cttgccacagcctacttttaggaccataacttcatacaaagcaatcccaaggttttctgtttcattagtctgtcaccagtggacacgttttttacctatcrgttcttccttatccacaggtatcataagtcctgaattccttttttgtcccttcaagagtcagtttctctctctcttccaggcggattgccctctgtctaa

SEQ ID NO: 545810 - DNA, 201 bp, Homo sapiens
gattgcttaaaggaaagcatgccattccagttaaagccctggtaaaataaccagtttctccaattgtgtcctgttgtgaaagaaaacagattcttactgcrcttaggcaaatcactatattgccgtaagttaagaatactcacaaatagtttccaaattttggagtactcaggtagaaagaaatatgctccaaattttgtt

SEQ ID NO: 545811 - DNA, 201 bp, Homo sapiens
gaccgtaaaacacaataatttgcctgttttagcggaatgttatcataatgacaaaaacaactgcaaagtatcttaagctgatttttgtaatcattttgctrgtggtagtcttctatttattcgagactgttgcacatgtgtattatgaatacagcaaatgaataattatattcatgtcaataaaatttgaaatttgacagg

SEQ ID NO: 545812 - DNA, 201 bp, Homo sapiens
tggctttcctctgtccatgcccctcacagcagcatgatgagtctgcaggcccccaagcccatgcttccccttgccccacttgtgggccatgctccaggtayctgggatggtagaattcccagtcagttggccctgaggccccttccaaggcctgcaaagctgttctccaggtctgccctcccactgctgaccaggcatcag

SEQ ID NO: 545813 - DNA, 201 bp, Homo sapiens
ataaggcaaccgttttattacttcgcagccaggtgcctgagggtgacaagacttgcctttatctggtgacctgacaaggttatcagcaactgcaaatgggytgaacctcggagcagggaccatcaaaacgcttccctccccttgatccatttcccaaccctttattggtaattcatttcaatccgaagactagctctagtt

SEQ ID NO: 545814 - DNA, 201 bp, Homo sapiens
tacatgttttctagctttgttctctgaaaagatggaacgtgctcaacccttcacacacagataatgttctctacataccattttccactaaaaggaatcamaggctccctgaagaaatagctgattagaggtctgtggaaggaagtgtacaagacggacctggaatatcgtaaacggctttggtgatatcagaactctgca

SEQ ID NO: 545815 - DNA, 201 bp, Homo sapiens
tgttcaagggtaattatgcagattcgagaaggtgcagtgtatgtggcgcacttagcacagtccctggcacacagtagttgctccacatatgttagctatcrccatcattattatcagttttggccacctactatgtgctaagcattgggatatattatagtagtcaggattcccagtacaacagaacttgcgatctaatgg

SEQ ID NO: 545816 - DNA, 201 bp, Homo sapiens
ttccacctcccatccctgtaaatctcattcgctatctcagaaaagaacactgaggatgcaaacccacctggacagaccttttcacaagacaatacctcccrggttcattcaaaatccaaattccatttacaagttaatttctgtcttctaggcccattcattctccctaatgatcatttactgcccctcaaaagaatggtc

SEQ ID NO: 545817 - DNA, 201 bp, Homo sapiens
acagtaaaaatacagtacaaaagatacagaatggtacttctgcacaggacagttccattataatcttatgatcactattgtatatgtgctctatcgttaayagaaatgtcactatgtgtgtcatgactgtatatgagaatgcctatatgagaatgtatggggaaatatatgtgagtaaagtttggtatcagataaagctgg

SEQ ID NO: 545818 - DNA, 201 bp, Homo sapiens
taataatggcttagaacagtgctgtctcctcttttgagaatcactgtcttactcagttacttttattatggcagtctattatatagctcaggcatcagacrtaattgagaaccatcagctcaaagtttttaggtaagtcagaatagctggagtttctgcgatagctcccaggagctatggaacccagccatcaaagtggag

SEQ ID NO: 545819 - DNA, 201 bp, Homo sapiens
caagagagaaactccgtctcataaaaaaacaaaaacaagaaaaaagaatgtttctgagtacagtgtgtgaatcacatgcatggtgatgaactaatgaacayccagaactccaacaggagacaatgtcagaaggattaacaaatctgaccttgaccctgggcaacatagtgagaccctgtctttacaaacagttttttaaaa

SEQ ID NO: 545820 - DNA, 201 bp, Homo sapiens
agacctaagcctgcacacagacagaaggatgaaaaacgcctagccctccaggagtcagatgtgactgcagctccatgcccacaagggaaaacatccaggcrtgaagttgggaatgctggttggaaatacattttcaaagttcctacaggcaatacatagccagaaaaggatgttatttatttatttattttcattttctgt

SEQ ID NO: 545821 - DNA, 201 bp, Homo sapiens
ccagctactcgggaggctcaggtgatcctctcacctgggaagtcgaggctgcagtgagctgtgattcctccactgcactccagcctgggctatagagtgasaccctgtctcaaaaaagaaaaacaaaaaaattaaaatacgagggaaaaatgcattgactcaatacacagttcccattccccttaacaggtaacctaccat

SEQ ID NO: 545822 - DNA, 201 bp, Homo sapiens
tcccagatctttttgagaatcaatatcctaaggtaatatcttctactgtcttgtaccaaagaaagatcaaagtgttgcccatgacctgttaatacacggcraagggatcctttactgtatgtgactcagagtccaagaacctggtcaatcatgttagcatcctgcatccagtcctccctgaaacctgagcaacccaagcca

SEQ ID NO: 545823 - DNA, 201 bp, Homo sapiens
tggggaggcatatcttcagataaactcctagaggttgaattgttgggtgaaagtgtcgaagagtagctggtttgactagacattgccatatccccctcccwaggggctgtaccttttgtactcccaccagcagtatattaaaatgcttagctctggggtgtgctttttaagttctggacaaagaatgtatcttatcaagaa

SEQ ID NO: 545824 - DNA, 201 bp, Homo sapiens
tagagtgaaggtcattcatttataaattaactcaactgatgcacactggaacccttctctgagcagaacaggtccctgctctagtagagctcagccttgcraagtaacaaacattgagccaacaagtacttaacatataataacaaatggtgataaatactataaagaggccaggcaccgtggtttacgcctgtaatccca

SEQ ID NO: 545825 - DNA, 201 bp, Homo sapiens
ggttatatcaaaatttataagttgaagtaaatacatgttattcacaaactcaacgataagtgagtataatatgaatttaagtagtgttgctaaaaatatcrgaagtaatgtgaagtgagatttagactaaatttacagtttaatttacaatggtctttccacctctgaaataaaagacttttatttcactttgatattatt

SEQ ID NO: 545826 - DNA, 201 bp, Homo sapiens
taacccaaaagttcaaaggttatatcaaaatttataagttgaagtaaatacatgttattcacaaactcaacgataagtgagtataatatgaatttaagtartgttgctaaaaatatcagaagtaatgtgaagtgagatttagactaaatttacagtttaatttacaatggtctttccacctctgaaataaaagacttttat

SEQ ID NO: 545827 - DNA, 201 bp, Homo sapiens
agcaccttatggggatacggctgaaaaaattcacactttcaggggaggaaatgaacaagttcacctccaagggttttttgtagggtttctttttcccccaraacttgagatttgtgtatgctaatggcattgacttagtaaactgctttgtggagaaaatgttggcatcttgaaagagaaggaaaacataaacagaaaatc

SEQ ID NO: 545828 - DNA, 201 bp, Homo sapiens
gtgtgtgtgtgtgtgtgtgtgtgtgtgtgtgtttattccaggacccgtaggatttctacaggtagagataaggaagagagagtaagaccctatagtgggayagtctgaatctcagaagtagataatacttgaatggaattcaataaagatttgagtggaagtcacgtggatggtgtggatttgaatagaaagaataggatt

SEQ ID NO: 545829 - DNA, 201 bp, Homo sapiens
ttccagttaaagccctggtaaaataaccagtttctccaattgtgtcctgttgtgaaagaaaacagattcttactgcacttaggcaaatcactatattgccrtaagttaagaatactcacaaatagtttccaaattttggagtactcaggtagaaagaaatatgctccaaattttgtttagaagaatacactttctgaaaaa

SEQ ID NO: 545830 - DNA, 201 bp, Homo sapiens
tccctgtccttgggctattcagcaccagacaaggttccagcagttgaatatagtctgtggtggacagcagagagcaaatccagccctcagatgttgagagrgaagccttatggatgtccttggggatattaatttgtttacttgagcaagggtgactataattcagtgtcaatctgcttctacactgtccttttctgctga

SEQ ID NO: 545831 - DNA, 201 bp, Homo sapiens
gtggtggacagcagagagcaaatccagccctcagatgttgagagagaagccttatggatgtccttggggatattaatttgtttacttgagcaagggtgacyataattcagtgtcaatctgcttctacactgtccttttctgctgatgggcatcttgctatagtagagtagggaattttctctgttttcattgacttttact

SEQ ID NO: 545832 - DNA, 201 bp, Homo sapiens
ttagaacatgaatgtcttgggggaccattattttgtctattgcagtttcaaatcctggaaaagagatgagtaaataagaaatgttggcagagtgtggtggytcatgcctgtaatcccggcactttgggaggctgaggcaagtggactacttgagcccaggagtttgagacaagcctgggcaacatagtaagaccccatctc

SEQ ID NO: 545833 - DNA, 201 bp, Homo sapiens
catagtgagaccctgtctttacaaacagttttttaaaacttagctggatgtggtggtgtgcgcttgtggttccagctgttccggaggctaaagtgggaggwtcgcttgagcccaggagttagaggatgtagtgagccatgatcacaccactgcactccagccctggcaacagagcgagaccctgtctctttaaaaaaaaaa

SEQ ID NO: 545834 - DNA, 201 bp, Homo sapiens
agagtcagggatgctcaagtactatttattctgtttaccagacatatagcagccgggcagggagtcttcatagcctgttgcgtcatgtgattccattccaratttttccttttattcctgtctccaaggccccattgtgcaggtgctactaattttcatgaaatgatactaggaggtaaagaaagttcgctggctctcaga

SEQ ID NO: 545835 - DNA, 201 bp, Homo sapiens
accttttgtactcccaccagcagtatattaaaatgcttagctctggggtgtgctttttaagttctggacaaagaatgtatcttatcaagaagatatgaagrcttatgatacaaagagctaacatttgttgagcactttataatacgttcataattatagtaagcaaaggcaaggcgtatgttatctcattaatacttcaca

SEQ ID NO: 545836 - DNA, 201 bp, Homo sapiens
ttttttttgtatttttagtagagacggggtttcaccgtgttagccaggatggtctcgatctcctgacctcatgatccgcccacctcggcctcccaaagtgmtgggattacaggcgtgagccaccgcgcccggcctaattacaacttttaaggcctccttttctcctgatttttggatatcagagataaaaaagcaacaaac

SEQ ID NO: 545837 - DNA, 201 bp, Homo sapiens
tgtgcactcaataaatggtgatagtacttgtaatagtaacagtagtcatattggcggagaaaggagattgagaatgattctggacataagcagacataagrtttgctgtaaagcacaggaaactgccgggttgctccgcttttggcattggtcatcacgtctttggccctcagctaggaaacatctttcatttgcaagcat

SEQ ID NO: 545838 - DNA, 201 bp, Homo sapiens
attgtgtttggaataggattgaagcaataaagatggagagaagtaaacacacctttctactgtatcttgagagtatcaagttggtcaagaattgagtgggrtggatgaggaagagggaggaatgaaggcagctggatttatgattgtgcagttctggaagacatcagaactggagaaaggcactggggagttatcacatag

SEQ ID NO: 545839 - DNA, 201 bp, Homo sapiens
gtggctctgaaattcgagccccgagtctgtggcaaaactacatttcgcgcactgaaaaagggacttgtgccttttggtggaagagacagttgcgccattgytggtgcctggagcgtcccccactccactgactggtcttttcagatggttcacctgaggggaatgtccacccggaggtttgactttggacgtctggctcaa

SEQ ID NO: 545840 - DNA, 201 bp, Homo sapiens
acactttctttttttcttttttttctttttttcagacggagtttcattctgtcgcccaggctggagtgcagaggtacgatcttggctcactgcaacctctrcctcttgggttcaagcagttctcccgcctcagcctcccaaatagctgggattacaggcgcctgccaccacgctgggttaatttttttttatatattttta

SEQ ID NO: 545841 - DNA, 201 bp, Homo sapiens
tttttcttttttttctttttttcagacggagtttcattctgtcgcccaggctggagtgcagaggtacgatcttggctcactgcaacctctgcctcttgggytcaagcagttctcccgcctcagcctcccaaatagctgggattacaggcgcctgccaccacgctgggttaatttttttttatatatttttagtagagacgg

SEQ ID NO: 545842 - DNA, 201 bp, Homo sapiens
ataactgactcctcactgcaatgagaggttgtgaccaattctgttccctgctgagttctctgcaccccagaagttagagtttcaaaggtgtgaccatatcscagattgatgctaacaatacagttagtgtgcacttttatgttactggaaaatcatccattttcacccagaactgttatacataaatgctttgtcctagaa

SEQ ID NO: 545843 - DNA, 201 bp, Homo sapiens
tcaacactcttagcagtgggcgagtcagactcaagcatttaacatcatggaagacaacaaagagtactttgcgactagctcaaaacagaatgatattatgtttttttttaaaaaaaaactctgattatttcagataatggtgtgcgttgacattgcaaaatattgtaattaaggaacaggcttagtagagcactttaaatt

SEQ ID NO: 545844 - DNA, 201 bp, Homo sapiens
ggggagctcaggacaataggtaattaccaactggtataaaagtgattttaacaaggtacaatcataccagatgggtaacagctaaatgtcagccctgggcrtttgaagatgtcctccgcaggctagaaaaaaatccacgttggattggaatcctgctgagaatagctacactataattggaactctggagactgtatctgt

SEQ ID NO: 545845 - DNA, 201 bp, Homo sapiens
gttttcattcataagtgggagttgaacaatgagaacacatggacacgtggggttggtcggggaaacaacacacactggtgtctgtcctggggaaaggtggsgggagggagagcatcaggaagaatagctaatggatactgggcttactacctaggtagtgggttgatctgtgcagcaaagcaccatggcacatgtttatct

SEQ ID NO: 545846 - DNA, 201 bp, Homo sapiens
aacttcctgtttaacttactgccaaacttcaatagaagtccagattagaagttttagacctcagcctctggccctgggccttctgaaatgaccttcctccwaacaccatttaatttccgctaacttagttaatgaatggaactttctgaagacagcagttactttgatctgaacccctttcctagtttccagttaacatag

SEQ ID NO: 545847 - DNA, 201 bp, Homo sapiens
ttctggctttgctcctaagagtgtgccattctctgttgcttgggctatagatcaaggacttcagcacgtagtctggagtgagaagagaacaggacaacatrgtacttagcccacagcagtccttaagtaggacttttatgtcaagttacccctgtatttatttatatctattttttaaataaatatttattaagcatctat

SEQ ID NO: 545848 - DNA, 201 bp, Homo sapiens
ggctgaggtgggaggatcacttgaggccaggagttcaagaacagactgggcaatatcataagaccctatctttacaaaacaacttttaaaaactagccagkcatggcggtacaagtccatagtcctagacactcaggaggctgaggcaggaggatcacttgagctcaggaggtcaaggctacagtgagctatgattgcacc

SEQ ID NO: 545849 - DNA, 201 bp, Homo sapiens
gaggtacgatcttggctcactgcaacctctgcctcttgggttcaagcagttctcccgcctcagcctcccaaatagctgggattacaggcgcctgccaccaygctgggttaatttttttttatatatttttagtagagacggggtttcaccatgttgaccaggctggtttcgaactcgcgacctcaaattatcccctgcctt

SEQ ID NO: 545850 - DNA, 201 bp, Homo sapiens
atccacattgaacccactctaaggctaatttaaaagccaggcgtggccaggcacagtagctcatgcctgtaatcccagcactttgggaggccaaggcgggygggtcacctgaggtcgggagttcgagactagcctgaccaacatggagaaactccatctttactaaaaatacaaaattagctgggggtggtggcgcatgcc

SEQ ID NO: 545851 - DNA, 201 bp, Homo sapiens
ccaggactgagttcttccactcaaggcagcaggttcccttctggcccaggttttgtctagaaatgtcaaccaggagttagggcctggaatgagtgtctcargactctgctcagtgttctatgctcattctcatttctctaactagaattttccaagttgtatctaaatgattgaagctattatctgactggttatataaaa

SEQ ID NO: 545852 - DNA, 201 bp, Homo sapiens
gagaccagcaaagattcaaaggcttggtccatggacaatgattcaaaagccggaggttgagttcaagaaagcagtttggttctgttggagtttacagtatyggagaaggaaagcagagtttcagggccagatcatgaagggcactgacttcctaaccaaggagattgtatcagaccctgcaagcaattgagtttaagccga

SEQ ID NO: 545853 - DNA, 201 bp, Homo sapiens
gacctcaagtgatccacccacctcagcctcccaaattgctgagattacaggtgtgagccagtgcgcccttttaaaaattaaatcaccttatttccttttcmtgcatttccagattactagcagaatctgtcagtttgggaataagcgacatatatggtatgttttaaggactagatagctctggcagtacctatagtccag

SEQ ID NO: 545854 - DNA, 201 bp, Homo sapiens
atcagtagggctatgttccttctggaggtttctagagaagacacccttttcttgccttttcaagcttctagaagccacctacattccttgactcctggccycttccttcatctccaaagccagcaattgcatcaccctgatctgtgtctgtggccacaactctcgctctgactttccttctacttatttgtgattatattg

SEQ ID NO: 545855 - DNA, 201 bp, Homo sapiens
agaatcaatccataatcacactgaaaatatgaagcagagaaccagaaggcaaatgtaatccaattaagtataaaattgcactaaaaaaaaaaaaaaaaaaaacagcccaaagtacacagaagagaatggagcttcaaaggtaaaggataaaaacaaaccacagcccaggagagaagctcagagacaaactgtacaagaaag

SEQ ID NO: 545856 - DNA, 201 bp, Homo sapiens
tgcctactacagaatctactatctaaaacataagctatttcttaaacttaataccatttttttaaacttggtgtgaaagatgtgtgaaattatatatctaktgcctatcagctaaatgagatcattgtatatatgcactggtccctggatatttcacgtatatggtgatgaaatgaaaataccatccatttctgtgttttt

SEQ ID NO: 545857 - DNA, 201 bp, Homo sapiens
gaatcaatccataatcacactgaaaatatgaagcagagaaccagaaggcaaatgtaatccaattaagtataaaattgcactaaaaaaaaaaaaaaaaaaaacagcccaaagtacacagaagagaatggagcttcaaaggtaaaggataaaaacaaaccacagcccaggagagaagctcagagacaaactgtacaagaaagg

SEQ ID NO: 545858 - DNA, 201 bp, Homo sapiens
taattttttagtccctgttaaaaattgtcacctgctctaacatctcacttaaaatatacttataacctcatgtatggaaaaagctctgaagcatgaaagtyctattgttcactcttcttgaaacataagcattcaatagcttcatccaccacttttcttcttacatttaaagtgttaactcttagtgtcatctaaaaggag

SEQ ID NO: 545859 - DNA, 201 bp, Homo sapiens
caccccaaggagaccttgtcaacagaaaaaaaagcaaagacaattttcagataagcataataaccaaagaaatgtaatcattttgtcctcaaatattcaakaaaataagaccaagccactctttttaaaactcctgggagatacacgctgtcagtccaaagcaaaatgcatacaactaaagaataaatgtcctggaaggat

SEQ ID NO: 545860 - DNA, 201 bp, Homo sapiens
gaccaaaatgtcgtttggcccatgaccgtgttctaaaatccgaaaaaatctgaaattcaaaacctttctggttccaagcatttcagataaggaatactcamcctgtaccttgaaaatgtaagtgttcagtttcctggaaaaataaagcattcaaaactcagtaaaaacagaaaccttgaatatatccataacaacttaaga

SEQ ID NO: 545861 - DNA, 201 bp, Homo sapiens
gtatttattattgcacacatactagttttctctctagatgttcaattgggtgtcttttatatctttcatgtctctacctaacttttttttttttttgagayggagtttcactctttttgcccagggtggagtgcaatggcacgatctcggctcaccacaacctctacctcctgggttcaagtgattctcctgcctcagcct

SEQ ID NO: 545862 - DNA, 201 bp, Homo sapiens
taaataattaaaaataatgtaaaataacatggccagatgacaattatttattaacaaaaagaaaggttaactttggaaaagatattcacataactctcagygcttaaagattaaaggataaaaagcacataggattgtctcaatatatgcagaaaaggtatttccaaatattcaacagccattaatgatctaacaaaaaaa

SEQ ID NO: 545863 - DNA, 201 bp, Homo sapiens
acttttcttctctgtaaaccagagtttcttgaaattacaaaaaaatttagtggatacatttgaaattaaattcagctgaagagctggaccaatcaataaayaaataaatcaaacaaaaggaaaaatgaagaaccagtacatcattttcaaattactttgacagctattgtccaaaagttttctatttatccatcaagagac

SEQ ID NO: 545864 - DNA, 201 bp, Homo sapiens
ataattttataacatctctttttttcagaaacaggatttattttcttaggccaatgctatcctgataccaaaacaagaaaaagatattacaagaaaagaartttactgacctagcttccttataaaatagacatgcaagccctttaacaaattgaatacatcaatatatttaaaagatcatatatcatgagcaagcaaatg

SEQ ID NO: 545865 - DNA, 201 bp, Homo sapiens
atagcttgatttaccctttccacaatgtatgtatatttcaaaacaacatgtggtacatgataaatatatacaatttttattatcaattaaaaataaatttwaaaatgtttagaaaactaatgataaggaaaaaaatcttagaacagtatcattggcctgtcaatagtcaatggaagtattgcctaagtttctttccaaaat

SEQ ID NO: 545866 - DNA, 201 bp, Homo sapiens
ctctatctcaccctcgtgtctctcctctaaggcagactcataaaagttagttgaatgaatgaatgagtggaaaaaaaaaaaaacaccaaatcttatttctrtccacttctcgccattccttttgccacgatcccagttaaacctccatcatttctcagctagactattgtaaatatctcctagtggtcttcctgcctctag

SEQ ID NO: 545867 - DNA, 201 bp, Homo sapiens
agttacatattttgattagaattaatagtgctgctatacatatataatccctcattatcttgtatcatcatgttcatatttactgaataaaacttctcagyaagtagttactgagtaagttttttgaaggaaggataccaaaaatcgagagtgaaaaagaggtattatttctcaaaacttctacggtgtatttacatagtt

SEQ ID NO: 545868 - DNA, 201 bp, Homo sapiens
cctctcttccctacttaacctcttcccaactttccagtctcatctaagataatgtttcctcctggaagccttctctgactggccaagtttaagtgaggtaycctctcccaatatgctctcatagcacccatcatttccttatcatgcttcttctatcttaggtaggattgcctgttttcttgtttgactcttccactagat

SEQ ID NO: 545869 - DNA, 201 bp, Homo sapiens
gaggtttaaacataaaaggaaaagaagaaagaaaataacatatgcttggatttcaaaatcctgttacatcatagcacccaaaattggaaggaagatagaamacacatcttgaaagcctatttcgcaggcttggctccacctcacaaaatccctgtgccattttcttaacaaacttctttacatgtagcagttggatctaat

SEQ ID NO: 545870 - DNA, 201 bp, Homo sapiens
actattggtgggaacataaaatagtacagctgctatggaaaatcatataggagttcctcaaaaaattaaaaacaaaactaccatcgaatccagtaatccarcttccaaaggatatatccaacttccaagatatatattcaaaggaaatgaaatcagtagttgaagggagagctgcaccccgtgttcactgcaggattattc

SEQ ID NO: 545871 - DNA, 201 bp, Homo sapiens
aatccaacttccaaaggatatatccaacttccaagatatatattcaaaggaaatgaaatcagtagttgaagggagagctgcaccccgtgttcactgcaggrttattcacaagatggaatcaatctaagtgtccatcaacaatgaatggataaagaaaatgtggtttatgtattaaaaattgaacactattcagtcttaaaa

SEQ ID NO: 545872 - DNA, 201 bp, Homo sapiens
aggattattcacaagatggaatcaatctaagtgtccatcaacaatgaatggataaagaaaatgtggtttatgtattaaaaattgaacactattcagtcttaaaaaagaaagaaatcctggcacttgcaacaacatggatgcatctggaaaacattatgctaataaagaaagcccagcacagaaaggcaaatactgcacgac

SEQ ID NO: 545873 - DNA, 201 bp, Homo sapiens
tgacctttctaggtttcacggcttcccttggaggagaggggttctagtttctgtgacacaccttgggaaagaggaattatggttgccatgactcacttcawgggagaaagacaggtaggagacaggaggctgggagaaggtcaaagagacatagcttctgagacatttccgatgtccttcagtccacagtactcagcacac

SEQ ID NO: 545874 - DNA, 201 bp, Homo sapiens
agatacttgaaaatgtggaagcgactttggaactgggtaacaggcagaggttgaaacagtttagaggactcagaagacaggaaaatgtgggaaagtttggractccctagagacttattgaatggctttgaccaaaatgctgatagcgatatggacagtgaagtccagactgaggtggtctcagatggagatgaggaactg

SEQ ID NO: 545875 - DNA, 201 bp, Homo sapiens
aacttgcccaaggtcacctgctttttgttgacagagccaagattgtacctagtgtctaacatgatcacattatactacttctttgatggagaataataagaaaaaaaaaaaatggccgggtgcggtggctcaggcctgtaatctcagcactttgggaggctgaggtgggcagatcacgaggtcaagagatcgacaccatcc

SEQ ID NO: 545876 - DNA, 201 bp, Homo sapiens
cagaatggtgtcataggtatttttccaaaatgtatattctatgccacttgtttttttgtttgtttgttttttggtttttggggggttttttgtttgtttgkttttttggtgtttttttgttggtttttttttttttttttttgagacagaatctcactctgtcacccaggctggaatgcagtggtgcaatctcagctcact

SEQ ID NO: 545877 - DNA, 201 bp, Homo sapiens
agatggggtttcaacatgttggccaggatggtcttgatctcctgaccttgtgatccacctgcctcagcatcccaaagtgctgggattacaggagcgagccmccgcactctgccgtataatgtctttcttaaaaatataactttttttttttttgagacggagtttcattcttattgcccaggctggagtgcaatggcgcaa

SEQ ID NO: 545878 - DNA, 201 bp, Homo sapiens
gggaggctgaggtgggcagatcacgaggtcaagagatcgacaccatcctggccaacatggtgaaaccccatctctactaaaaatacaaaaattagctgggkgtggtggcacacgcctgtagtcccagctgcttgggaggctgaggcaggagaatcacttgaacccaggaggcagaggttgcagtgagccaaggttgtacca

SEQ ID NO: 545879 - DNA, 201 bp, Homo sapiens
cacacagggctaacttttgtatttttaatagagacaggatttcaccatgttggccaggctggtctcgaactcctgacctcaagtgatccacccaccttggycaaagtgctgggattgcaggcatgagccaccacccacctaagccactggcccacatttttaatatttatccctgtttctgtttgctattaggttcattgc

SEQ ID NO: 545880 - DNA, 201 bp, Homo sapiens
tgcatatggtcaaatggcatatatatttatatacatataaatactacatacataggcacatatatacatacatgcatgtgtgtgtgtgtgtgtgtgtgtgwatatatatatatatatatgtcatttgcttacactagtgagtctccacagggggcagttttgcccccagggacatttggcactatctggagatgtttttgg

SEQ ID NO: 545881 - DNA, 201 bp, Homo sapiens
ggctgaggtgggcagatcacgaggtcaagagatcgacaccatcctggccaacatggtgaaaccccatctctactaaaaatacaaaaattagctgggtgtgrtggcacacgcctgtagtcccagctgcttgggaggctgaggcaggagaatcacttgaacccaggaggcagaggttgcagtgagccaaggttgtaccactgc

SEQ ID NO: 545882 - DNA, 201 bp, Homo sapiens
atcctagaatgcactgaaagtatgtttccgaattgctgtcccatacctcaacaggaaaacaaacctatttcctaaaactcagtgtgataagtatgattccraattgctgtcccatacctcaacaggaaaacaaacctatttcctaaaactcagtgtgataaaatgggatttttgtgttttgtttggcttgggtttcagttt

SEQ ID NO: 545883 - DNA, 201 bp, Homo sapiens
tcaagttaaatatagtcaacatcaactttatatttgttttataacaactgtgcctcccacatagcagacacacaataaataattgataaaagaatgatggygatggcggggaggcactacataattggaagggagaagggagagaaaaatcttcctatgctattattggaaactttccaaccatgtttatgtttccattaa

SEQ ID NO: 545884 - DNA, 201 bp, Homo sapiens
tcttagcatgggtagactactatcaggggccatggtagagggtaatgcaaaatacaactgtcctatttgcagatgacatgttctttgggatcttgaaattaaaaaaaaaaaaaaatcccacaaatctgttattagataaaaatgcagctgctgggcgcagtggctcacacctataatcccagcactttgggaggctgaggt

SEQ ID NO: 545885 - DNA, 201 bp, Homo sapiens
atctgggatgaaaggtgtccatactttatttctcagttgaataaaataggtacaacctgagtgatgtaattagagatttcatgagcacttttactttacartatgttgttttcttttatactctgcttagaactagaattataggaatgaatattggtctctgccagacaaatgacatcatccctcctctcaagttgctta

SEQ ID NO: 545886 - DNA, 201 bp, Homo sapiens
tatttcttcatacgaatataccacattgttcattcatttatctgttcatgaacacgtggatggtgtttctaccttttggctacggtgaattaatgctgctstgaacagtagtatacaaatatctgtttaagcctatgctttcgattcttgggtatatacccagaagaggaattgccagatcatgtgataattctgtttaat

SEQ ID NO: 545887 - DNA, 201 bp, Homo sapiens
atagcatgactcaagaattctaccttgaccactggatttttccaccactgccatattagcttgttaaagtagtactatggctctgggacctccttgggcaraaatcatccgtagctccctcttaccaatccaataaatccaaaatgtaaagtcattcactagcctcaacctaactttcagttttatctcccagttaaactc

SEQ ID NO: 545888 - DNA, 201 bp, Homo sapiens
ttttttttgagacggagtttcattcttattgcccaggctggagtgcaatggcgcaatctcggctcaccgcaacctccgcctcccaggttcaagtgattctyctgcctcagcctcccgagtagctggggttagatgcatgtgctgccacgcctgactaattttgtatttttagtagagatggggttcctccatgttgttcag

SEQ ID NO: 545889 - DNA, 201 bp, Homo sapiens
ataatcccagcagtttaggaggctgagacaggcagatggcttgagcccaggggcccaaaaccagcctgggcaacatggcgaaaccctgtctctacaaaaayacaaaaattagccaggtgtcatggcatgcacctgtagttccagctccttggaaggcaggaggatcgcttgagtccaggaggtggaggttgctgtgagcca

SEQ ID NO: 545890 - DNA, 201 bp, Homo sapiens
ggatataggctaggaaagatcaaatagagtagaatatattactgtagtgctttggttttcctaatactgtatcaggaagtaaactgcagtcacccgatttgggggggtattggtcccaggacccccgccctgcccccactgacgctaacatccatggatgctcatgtccccaatataaaatcgtatagtattataatattt

SEQ ID NO: 545891 - DNA, 201 bp, Homo sapiens
gtcaagaagttgtcaaattgacttaaattaaaaagctagctttatgctttctgatgatctaagtaacttcagatatcaggcttttttattctatgtatcarggatataaacctgaccttgggttttcagtagaaaatagtttggaatgtctatttagattggggtcataattcacagaagttcttctaagaacgtttacag

SEQ ID NO: 545892 - DNA, 201 bp, Homo sapiens
tgtagatgatgtatgtagtcagcctatgtacatgtctctggaatatatatggcttccatggtttcaattattgtcttattggagaataataataataatakatgaataactttatttctagttcatgttggaaagcgtgatttttctctggtgtcttcttattatgcttatgttaaggtatattcaagttaaaggacattg

SEQ ID NO: 545893 - DNA, 201 bp, Homo sapiens
taaagtgaaagaagagaaccctgtaatgaatactccagttggaacatttcctttcaatggaccttgagctagcctggaagcactgatttggataactattragtgtatcatactcatctgtacacatgtttgtgggacatcctctgttcattatagatatcttgctgcctgtggaaagtagattgaaacgtagcttaaagt

SEQ ID NO: 545894 - DNA, 201 bp, Homo sapiens
ttttagggcctcttgctgaaaaaagaaactaactctggataacataagcaagcaagaatgtattagaaggatcttgaggaaactaacaaatttgaagagarggccgcagagtcagtctcagaaaaggcaggaacctggacattccagagctgtgggtggcaggaacagtgtggctgaaccactcaacccccgtccttcccc

SEQ ID NO: 545895 - DNA, 201 bp, Homo sapiens
ttcagttattttcccgatctcaagaactagatgcatgtggtttgacggtttcattgcattagaatggatgggattcaggaaggaaagattattttggcccrtttgaatgccgtatgctttcaggtgttataaatgtagcttggaataaaaagtccaaacagccccaagatgcagtgggaatcagatgatgatgacgagaag

SEQ ID NO: 545896 - DNA, 201 bp, Homo sapiens
gtctcactgtgttgcccaggctggtcttgaactcctggattcaagtgatcctctcacctcagcctcccaagtagctgggactacaggtgcattctaccacrcccagcatcttagttattatttcttgatgtgatatcacgagagtgtcttatccacagttagtgccccttttgatgtcatccagcacctcagtaacatttt

SEQ ID NO: 545897 - DNA, 201 bp, Homo sapiens
ttggagctggaactggcccagcttcaggtgaagcctccaagtgggtattctgaagtgaggactgtaacaagagaggccaagaaggctatgttccagttaargaaaaatcccctctggcacccccaaagcaaagcagtctcccccatcctgctctccccacaattatagaaggcagacagaagagatcaagatgcacatgaa

SEQ ID NO: 545898 - DNA, 201 bp, Homo sapiens
catgaatgtcagatgcctaactctcctttttgaatctcaattttgaagcagtaagatggaaatagtaatgcctattctatacaactgctgcaaagattaamataaagtaacataggcactgcccctagctcattgagattattccataattgtcagattttttcatgaatgtcagatgcccaactctcctttcataatgta

SEQ ID NO: 545899 - DNA, 201 bp, Homo sapiens
ggatggatggatagaatggatgaacaggtttagcaaccaagaactggtttcaacatgaaacttaacttcttacaaaaaaactactctggcttgtgctataragaaaggtggttttccttcacacagaaaccttattatataagcccatactcaatatataagaccttttattagatgaaataacactacatagttaaagcc

SEQ ID NO: 545900 - DNA, 201 bp, Homo sapiens
ttttccttgctctactgcctttgttttcaccaaatcaaccaaatgcctaggttccttcctcccagttctttggttcctgatgaaatagaactttgctttaygtactcacagccttgggttcatcagttttcctcccaaatctctgcaacccagaatagctcacagaatcgcacaggcctgcccttgtatattttcaggaca

SEQ ID NO: 545901 - DNA, 201 bp, Homo sapiens
taaagttaacaaggatcagaggctttaaatggcttgcccaagtcagaaaactaagtggctgaggcaagatttgaacccaggcaatctggtcctaaagttcmtgctacatgaagatagagaaaaaacattgaggccaggcatggtggctcatgcctgtaatcccagcactttggaaggctaaggcaggcggatcacctgagg

SEQ ID NO: 545902 - DNA, 201 bp, Homo sapiens
atagtatataattactacagttatctgagtggcactaaatttgttcacctgtcattcttctagtggtatatatttgctaaaatatgattcaaagaagtgtyattgtttttataatttgaagaacaaaaggcctgtattatataaaatattttccatttaatatattctttctataaaagttaaaaatccaaagaaatcttt

SEQ ID NO: 545903 - DNA, 201 bp, Homo sapiens
gcagctaagtagatgtatcaattcacatctttggcagcccagctgcaataagagaggaaggagaagtgctatgattcagtaaaaggaatcaagtcttgttyatttcagttcctgctaaatagttcacaaaagagccatcaatcagctcattagaaaactgacttggattgcttttctgtaggattgaaaatttatgtaatg

SEQ ID NO: 545904 - DNA, 201 bp, Homo sapiens
ttcggccgggcgcagtggctcacgcctgtaatcccagcactttgggaggccaaggcgggcggatcacgaggtcaggagatcgagaccatcctggctaacamggtgaaaccccgtctctactaaaaatacaaaaaattagccgggcgcggtggcgggcgcctgtagtcccagctactcgggaggctgaggcaggagaatggc

SEQ ID NO: 545905 - DNA, 201 bp, Homo sapiens
tgaaaggaatggtcaacctaacaaactcacagacatcttagatttctccattcttcctataaaacatccaacaaatattagacccagtggagtgaaatacrtgctgtaaatatggctcttattgtttgtggttgtgtctagggttaagagaattttatagtgtgattcatctgaggtttaaaagatctgctgcaaaagaac

SEQ ID NO: 545906 - DNA, 201 bp, Homo sapiens
cactttgagaggccaaggctggaagattgcttgagcccgggagtttgagaccagcctggcagtgtagtgagaccccgtctctacaaaaaataaagaaaaamttcgctgggcatggtagcatgcacctgtggccccagctacttgggaggttgaggtgggaggatcactggagcctgggaagaccagactgcagtgagttat

SEQ ID NO: 545907 - DNA, 201 bp, Homo sapiens
gatttctccattcttcctataaaacatccaacaaatattagacccagtggagtgaaatacatgctgtaaatatggctcttattgtttgtggttgtgtctarggttaagagaattttatagtgtgattcatctgaggtttaaaagatctgctgcaaaagaaccctaggaccattttccccatgcatatttgcagcatgaata

SEQ ID NO: 545908 - DNA, 201 bp, Homo sapiens
tgttgttcaggctggtctcgaactcccaacctcaggtgatctggccgcctcagcctcccaaagttctgggattacaggcgtgagccacagcgcccggcccmaaaaatatataacttcttaaatgtaaataccaacctctggtctctctgtgcactacagtatccactgaatgaaaatgtcactgaaatctgcagctctagt

SEQ ID NO: 545909 - DNA, 201 bp, Homo sapiens
caagtaactgggactacaggggcaagctttttttttttttttttttttttttttttttttgtagagatggggtctttctatgttacacaggctgtgatctstatttccaagaaatgcaaatcttaggtaattctagaaattgggagccaatgatcaagaattactaaaagataccaaggagttatcagttcctttttcctt

SEQ ID NO: 545910 - DNA, 201 bp, Homo sapiens
catcctggccaacatggtgaaaccccatctctactaaaaatacaaaaattagctgggtgtggtggcacacgcctgtagtcccagctgcttgggaggctgargcaggagaatcacttgaacccaggaggcagaggttgcagtgagccaaggttgtaccactgcactccagcctggcgacagagtaagactccatctcaaaaa

SEQ ID NO: 545911 - DNA, 201 bp, Homo sapiens
gccttgtaaggccacttctgtcagggtggccaaccaatagctgtttcaaaatatgtcaaaaaatatattttggggtaaaatattttaatttccttcagaayaaaagatcctctcttctgtatcttatatagtcagataaataagagactttcctgctagcttcattgccttagccaagcttatctgcagacttttgagctc

SEQ ID NO: 545912 - DNA, 201 bp, Homo sapiens
ttgtttgtttgtttgtttgttttgtttgtttgttttttgttttgtttttggtgagggagtcttgctctgttgcccaggctagaatgcagtggtgcaacctyggcttactgcaacctctgcctcctgggttcaagcaattctcctgcctcagcctccagagtagctgggattacaggcgcccaccaccgtgcctggctaatt

SEQ ID NO: 545913 - DNA, 201 bp, Homo sapiens
atgctagccatttatcgcctctcattagagaagttctactctgtatctgttaccaagaaaaactctccttttggataccaagcttttttataaagtatagkctctgagtcccaaattttccattaatgtttttagccaatttatttgtctaaacataaaaaaagcattaatacacctggatgatgttttcaaaggaatata

SEQ ID NO: 545914 - DNA, 201 bp, Homo sapiens
tccccccagaaagaaaccctgaaatcccttttttcataatggtgaggcagaaggcattgtaatccattctgggtcatggggaacaagtacattgggaagcrggatagggaaaggggagccagacgtagctagaggagggtcggtattcttcatcgatcgcacgggcttcctgtgcttctactaaaagacagcttccagacg

SEQ ID NO: 545915 - DNA, 201 bp, Homo sapiens
acctctgcccagctcacaatagcagctgcagccatgtaattctccctttctttacaatcaaaaggcagtaacatttcactctttgggcctggtatgcttaycactttatatgctttcttctaaaactatctacctaagcaatgtctcccttttgctttagggtttaagaaacaaaaactaaaaactgactcgattatatcg

SEQ ID NO: 545916 - DNA, 201 bp, Homo sapiens
aaatacaaaaattagccaggcgtggtggtgggcgcttgtaatcccagctactcgggaggctgaggcaggagaatcgcttgaacccaggaggcagaggttgyagtgagccgagatcacgccactgcactccagcctgggcaacaagagcgaaactccatctcagaaaaaaaaaaaaaaaaaaagggccgggcgcggtggctc

SEQ ID NO: 545917 - DNA, 201 bp, Homo sapiens
ggtatgcttatcactttatatgctttcttctaaaactatctacctaagcaatgtctcccttttgctttagggtttaagaaacaaaaactaaaaactgactygattatatcgatgttaatggcccttacagttcagcagttgtgtttttcttctccaaggtctcgattttctgtctttacactttccctagaacggattact

SEQ ID NO: 545918 - DNA, 201 bp, Homo sapiens
aaattagccaggcgtggtggtgggcgcttgtaatcccagctactcgggaggctgaggcaggagaatcgcttgaacccaggaggcagaggttgcagtgagcygagatcacgccactgcactccagcctgggcaacaagagcgaaactccatctcagaaaaaaaaaaaaaaaaaaagggccgggcgcggtggctcatgcccct

SEQ ID NO: 545919 - DNA, 201 bp, Homo sapiens
taccctgtggtgatgtcccagtgattagaggtgtccaaattgcctggtagttttctgtgtgcccaaagcggggcagggaggcccagtgagggcgagggccrccctgcttgaatgcctgtcctccatgccctcacagtgtggcattaaataaatcattccaccattaaaacttctttttcttcatttgcaaaaatacttacc

SEQ ID NO: 545920 - DNA, 201 bp, Homo sapiens
ccttttgctttagggtttaagaaacaaaaactaaaaactgactcgattatatcgatgttaatggcccttacagttcagcagttgtgtttttcttctccaargtctcgattttctgtctttacactttccctagaacggattactgtattattttatgtgtaatcttgttgtatgctacctttaggtatataaataatgtat

SEQ ID NO: 545921 - DNA, 201 bp, Homo sapiens
ggaggcagaggttgcagtgagccgagatcacgccactgcactccagcctgggcaacaagagcgaaactccatctcagaaaaaaaaaaaaaaaaaaagggcygggcgcggtggctcatgcccctaatcccagcactttgggaggcggaggcgggcagatcacgaggtccggagatggagaccatcctggctaacacagtgaa

SEQ ID NO: 545922 - DNA, 201 bp, Homo sapiens
aaactgactcgattatatcgatgttaatggcccttacagttcagcagttgtgtttttcttctccaaggtctcgattttctgtctttacactttccctagarcggattactgtattattttatgtgtaatcttgttgtatgctacctttaggtatataaataatgtattactattcaaattccactccaatggaagtcactt

SEQ ID NO: 545923 - DNA, 201 bp, Homo sapiens
tccaaagaaatctttcaaagtaaattattgttctcagaaggaagggtagaagagtttatacatttgaaattaaattggctgggtgcataactaagaacatrttgaaaatgtacagcacttgaaccctgctgtgttatcatcatagtgaatcacaagttttgcttggttactgtcaaatggaaatagaaattaaatttaaac

SEQ ID NO: 545924 - DNA, 201 bp, Homo sapiens
taacattttttgcatcctgaccatgccccagactctgggctcactaggtaagtgtgccgtctcatttaatttcactagagcatatcattattctttttttytttttttttttttttttttttgagacggagtcttgctctgtcacctaggctggagtgcagtggcaatcttggatcactgcaacctcctcctcccggattc

SEQ ID NO: 545925 - DNA, 201 bp, Homo sapiens
ggtgaggcagaaggcattgtaatccattctgggtcatggggaacaagtacattgggaagcaggatagggaaaggggagccagacgtagctagaggagggtyggtattcttcatcgatcgcacgggcttcctgtgcttctactaaaagacagcttccagacggctttccctagtaaatttcgccggtggaaaattcactgtg

SEQ ID NO: 545926 - DNA, 201 bp, Homo sapiens
aactgactcgattatatcgatgttaatggcccttacagttcagcagttgtgtttttcttctccaaggtctcgattttctgtctttacactttccctagaayggattactgtattattttatgtgtaatcttgttgtatgctacctttaggtatataaataatgtattactattcaaattccactccaatggaagtcacttc

SEQ ID NO: 545927 - DNA, 201 bp, Homo sapiens
actttgaaaaaaatatctgaacaaaatttgccatgttttgttgcataagccatatgagctaatcagtttgtcattagtctctgacatactccagagagcawtgcttatgaacttcacatcaggattgagaaatagcaagtgtggtgtgcgtcatctatgaccctcagctgtaccaagttaatttttaaaatgtaattgcta

SEQ ID NO: 545928 - DNA, 201 bp, Homo sapiens
gccgtgcaaaggtcagtgtgccaccgggatggccactggttcctgaagcttctccaggcagagcgagaccgcatggaggggtggtgtcaacagatggagcrggaagaacgggaaaacaacctgcccgaagacagtaagtaatgccaccacgtgccacacccgtcccctggggctggggttgctttgtgtgtgcagaccttg

SEQ ID NO: 545929 - DNA, 201 bp, Homo sapiens
tcgatctcctgacctcgtgatccacctgccacggcctctcaaagtgctgggattacaggcgtgagccaccgcgcccggctctcatttctgatattggtaawatgtgtcctttttttttttttatctgtctgctaaaagattatcaattttattagcttttgaaaagaaccagctttttatttctttattcttctgtatagt

SEQ ID NO: 545930 - DNA, 201 bp, Homo sapiens
gatctcctgacctcgtgatccacctgccacggcctctcaaagtgctgggattacaggcgtgagccaccgcgcccggctctcatttctgatattggtaatawgtgtcctttttttttttttatctgtctgctaaaagattatcaattttattagcttttgaaaagaaccagctttttatttctttattcttctgtatagttt

SEQ ID NO: 545931 - DNA, 201 bp, Homo sapiens
ggcgattaagccgagttaaatattatagaagatgaatgcataatgactgggtttctgttacttcctattttcacaatgaagagttttgtagtcaaccagayttaaaattatggaccatgtgttatttgacagtcaaatctagaagcatggtaaatcctaagcttcttgtgtttgcggagatgctaccaggaaagcattttg

SEQ ID NO: 545932 - DNA, 201 bp, Homo sapiens
agagaagagcaaatgcacctggcctgttgttatgtttcctttagagaaatgtctgttcagatcttttgcccatttttgtttcttctggttttgtttgtttktttttgttttgtcttgttcaaaccctgtgtcaaggacctttgccctccttttttttttttttgagacagagtcttgctctgtcgcccaggctggagtgca

SEQ ID NO: 545933 - DNA, 201 bp, Homo sapiens
tgctgggattacagagaagagcaaatgcacctggcctgttgttatgtttcctttagagaaatgtctgttcagatcttttgcccatttttgtttcttctggktttgtttgtttgtttttgttttgtcttgttcaaaccctgtgtcaaggacctttgccctccttttttttttttttgagacagagtcttgctctgtcgccca

SEQ ID NO: 545934 - DNA, 201 bp, Homo sapiens
tgaataagaaaagttagaagatacttatgccacagtatcatctatgtaaattaagcacagtgaatgcaaaaatttttcacatcttctctgtgtgtgtgtgktgtgtgtgtgtgtgtgtaaaaggtagaatggatgaacatatatattataaatattatatatttcatatatatataataaaagctgactatggttggaggg

SEQ ID NO: 545935 - DNA, 201 bp, Homo sapiens
gtcttgaacacctgggctcaaacattcttcctgccttggcctccaaaaatgctgggattacagagaagagcaaatgcacctggcctgttgttatgtttccyttagagaaatgtctgttcagatcttttgcccatttttgtttcttctggttttgtttgtttgtttttgttttgtcttgttcaaaccctgtgtcaaggacct

SEQ ID NO: 545936 - DNA, 201 bp, Homo sapiens
tgtcttggttttaagacttttgtcttttctgagttttagagctggtcccctcttgaggcaaaaggaaatttcaaatgctctcaggaagatatctcaggtcytctttacttggtcatccaagcaagattctgaatcttgctttttatattaggttgaaggtgatactgctgactgaatgaacgggaagaagggcatggagga

SEQ ID NO: 545937 - DNA, 201 bp, Homo sapiens
ttttttaacatgaatggatgttgaattttatcaaaagacgtttctgcatctattgagataatcatgtggtttttgtctttagttctgtttatatgatgaamcacatttattgatttgcatatgttaagccagccttgcatcatggggatgaagcctacttgattgtggtggataacctttttgatgtgcttctagatttga

SEQ ID NO: 545938 - DNA, 201 bp, Homo sapiens
gttcccagtgagcttcactttctactgggtttgctgttcatttcttcagctcaggtagcatctgtaagcaggtcattgatttttccatatttccttccctcagtacatccccaaatatctccattcatttatttaattcagtcagtaacaagattagagatagaaagatgtatgagaactggttcttgccttccaagagcg

SEQ ID NO: 545939 - DNA, 201 bp, Homo sapiens
tataaaattatatgccctttataggtcatagaatttgctcttggtgaaatttcaggttttgggagggaagggggtgtgtgcgtgtgtatgtgtgtgtgtgygcgcgcacacgcgcgcgcctatgtgtctcgtttcctagattccttggacaggcatagccaggtaccctggttaaagattgatcctgcaacacagaagaag

SEQ ID NO: 545940 - DNA, 201 bp, Homo sapiens
caatcaattttttctgctctgcctgaactaaaaggattaaaagagaatggaaatggaaataactttctcactgtgaaattcaatgctggtattgaggttcygtgctctaggcagctactgtgctgggaagtgggaaggcagacatgcacttcactttattctctgagagcttggtggagcggaaagacaagcccacaaatg

SEQ ID NO: 545941 - DNA, 201 bp, Homo sapiens
gctggagcgcagtgacgcgatcatggctcactgcagccttgacctcttaggctcaagcattcccccaacctcagcctcccaagtagctgggaccacaggcytgtgccaccacacccggctagttttttaatatttttttgtagagacagagtcttcccatgttgttcagactggtcttgaactcatacgctctagcaatcc

SEQ ID NO: 545942 - DNA, 201 bp, Homo sapiens
atgtgcagttttacaaagagatgacaagttgatgtttattttacggaagagctggacataataactttgttgttgttacttggtgtatatgtgtgtgtgaktgtgtgtgtgtgtgtgtgtgtgtatatatatatatttatttatttacatatagggtttggttctgtttggggcatcaggcatccactgaggatcttggaa

SEQ ID NO: 545943 - DNA, 201 bp, Homo sapiens
aaaatcattgtttttgagaacgtcattctgtgtctggaatttattccttcttgtgggttcctggtcttgctgacttcaagaatgaagccgcggaccctcayggtgagtgttacagctcttaaagctggtgtgtgcggagttgtttgttcctcccggtgggttagtggtctcgctgacttcaggaatgaagccacagaccct

SEQ ID NO: 545944 - DNA, 201 bp, Homo sapiens
ttctattctcagttataaaagactgaagaagctaatttgaggatttcctgtctaagggcacgagttctaaggctgatttttgtaattttcttccagtctgwttatttatttatttatttatttatttttgagatggagttttgctcctgttgtccaggctggagtacaatggcacgatcttggctcaccataacctccacc

SEQ ID NO: 545945 - DNA, 201 bp, Homo sapiens
attgctctcctttcaaatggcattcttatgcctgactcaactattatcagcatgagaaaactgagatgtacaaatgattcaaagccaatggttttaatttwtcctactacatgagtcatgttaaagactgagagacgtggatttgtacatattcaaaatatttatgagcctattacaataaaatattgttattgaaaggtt

SEQ ID NO: 545946 - DNA, 201 bp, Homo sapiens
ctgacttcaggaatgaagccacagaccctcacaatgagtgttacagctcataaaggtagtgtggacccaaagagtgagcagcagcaagatttattgtgaaragcgaaagaacaaagcttccacagcatggaaggggacccaagcgggattgctgctgctggctggggtggccaacttttattcccttatttgtccccgccc

SEQ ID NO: 545947 - DNA, 201 bp, Homo sapiens
tccctgtagtctcagctatttgagagggtgaggtagaaggatcacttgaacactgggggtcaaggatgcagtgagctgtgatcgtgccactgcactccagcctgggcgacagagcaataccctgtctcaaaaaaaaaaaaaaagccaggggttgggtggggaacagaggcactaattttcccagggacacataactcaaaa

SEQ ID NO: 545948 - DNA, 201 bp, Homo sapiens
gacttcaggaatgaagccacagaccctcacaatgagtgttacagctcataaaggtagtgtggacccaaagagtgagcagcagcaagatttattgtgaagarcgaaagaacaaagcttccacagcatggaaggggacccaagcgggattgctgctgctggctggggtggccaacttttattcccttatttgtccccgcccac

SEQ ID NO: 545949 - DNA, 201 bp, Homo sapiens
agagggtctgctcgagagaattcctgattgaatgacaacggcgctaagaacagtaagtcatggttgggaagcagtaagggaagaatggagcccagatatcytaaattaaaatataaaaggctaacgttattaggcatgtacatctaaatttcaaagtaaaaggccaacatcccactacgcctcccgaatccagcacattcc

SEQ ID NO: 545950 - DNA, 201 bp, Homo sapiens
catacatttttaaatttgggcactcgatatgtattacaattgaaggccttaaaaaggttttgttttgcaaatataaatatagtcatacatcatttaaggayggagctacattctgagaaatgcatcattaagcgatttcactgtgcacacatcatagagtacacttacaaaaacttagatggtctagcctattacacactt

SEQ ID NO: 545951 - DNA, 201 bp, Homo sapiens
cgttattaggcatgtacatctaaatttcaaagtaaaaggccaacatcccactacgcctcccgaatccagcacattccacctttccacctaacacacgcgcrcacacacacacacacacacacacacacacacccttccctctgaggcaattaatggacccaaactgacttttttatggaaccataatatagaaagaaatgc

SEQ ID NO: 545952 - DNA, 201 bp, Homo sapiens
gggcagattgcttgggcccaggagttcgagaccagcctgggcaacatggcaaaaccttgtctctacaaaaactacaaaaattagctgggtgtggcggcgtrcacctgtagtcccagctactcgggaggctgaggtgggaggatcatttgaacccaggaagtcaaggctgcagtgagccatgattgagccattgcaccccag

SEQ ID NO: 545953 - DNA, 201 bp, Homo sapiens
gcattaccatagtgtagtccggacagccatatgcttgcccaaactattatatgtgtgtgtaatacttgaatttagattggaaattggaagctccttatggrtttctcttaaacatagagaatctttaaaggtgctacccgtcttcattgccaaatatcattacgttagtttttctctctgtggaatttatcaaaaggattc

SEQ ID NO: 545954 - DNA, 201 bp, Homo sapiens
atgaaatactttgttttctgtttagagttgaaagaatttcttagctagactttaagcaggaataacaacaaatgctttcaagataaatctgttaacttccaaaaaaaaaaaaaaaaaacaatgatattaagcacctgaaaaagaagatgggtccaaaaagaaattacatccttgggctcctgccttcttttctctcttttc

SEQ ID NO: 545955 - DNA, 201 bp, Homo sapiens
taaatttaaatttggaaaaatactaagtagctgtgtgccttttggcaaattgattaatgtctctgaacctcctcgtaaatgagagtctcagtctcttagcrtggatggcaccacttgggcggctctccctacaactcctcccaccccaaacctgtggaagacagcattagccaatcccagcattgatggattccatcaccc

SEQ ID NO: 545956 - DNA, 201 bp, Homo sapiens
cattgtcctggaaggaaagaggatttactcagatgatttaaatgaagaaagtttttaaaataaagaatttgtttactaaggaaagaaatagaggatatggraggatccagagaatagaaatggtaggaatgagttattaaaaaaaaaatagaactgaaaacaaaggaagaagcaagccccagggagggctagagctctaac

SEQ ID NO: 545957 - DNA, 201 bp, Homo sapiens
tgctacccgtcttcattgccaaatatcattacgttagtttttctctctgtggaatttatcaaaaggattcttttattttcttgtgcttcatgcagtgagcrctaatttagctgtcacatttcggtagcccctctattatgattttaataattaggtgtaagtaatacaattgtacttatagatggcctttgactgcaaatg

SEQ ID NO: 545958 - DNA, 201 bp, Homo sapiens
cagtgcacacgtttacctatgtaacaaacctgcacatcctgtacacgtatcccaaaacttaaaataatttttttttaagtaggagggatatttacattttracaaggttctaagtgcctgactgagtgctacgggctttacatacgtgttttcttttgatcatcagaactctatgcatgcaattttgcccattttacaaat

SEQ ID NO: 545959 - DNA, 201 bp, Homo sapiens
aaaaggattcttttattttcttgtgcttcatgcagtgagcgctaatttagctgtcacatttcggtagcccctctattatgattttaataattaggtgtaartaatacaattgtacttatagatggcctttgactgcaaatgccccttgcccctcccttccttaccaaaccaaaaaaacttctgttcactctatagcctttg

SEQ ID NO: 545960 - DNA, 201 bp, Homo sapiens
tcagagagattaaataacttttttaaggttacctatcaatcaaatgtcagagctaagatttgagcccaggtgttgaaaccagaaaagataaaaagctggayggaaagttgaacttactaagactgcagtgatgagctatttaaaagatgtttaataatggaggggaaaggaagatcaactgggtgtggacaactgagaagt

SEQ ID NO: 545961 - DNA, 201 bp, Homo sapiens
ggtggacatctcttcccaactccatattcagttttgtcatcctgggagcctgatattggccgtgatggaaatatttacaccatggaaatcgacacgctctrcgaggcagagcttcttcctcccaaaaagtcagtttctaaacatttaccactttaccaatggcattatttttaggtagcctttcttcagagagagaatgaa

SEQ ID NO: 545962 - DNA, 201 bp, Homo sapiens
attcgctcttctatttttagtttaaggtggaagctgagcattgatttgaaaccttaattctttttgactaatggtgtctactgctttaactatatcctacmaattttgatacattgttttttctttttcattcggtttgaaatactttctattttcctttttgattttttttttctttaacccatgggctacttagaagtg

SEQ ID NO: 545963 - DNA, 201 bp, Homo sapiens
aaaaaatatatttaccatagacctagacctctatttttttttttttttttttttttttttttgagagggagtctcactctgtcacccaggctggaatgtartggtaccatcttggctcattgcaacctccacctcccaggttcaagcaattctcctgcctcagcctcctgagtagctgggattacaggtgccagccaccaa

SEQ ID NO: 545964 - DNA, 201 bp, Homo sapiens
tatacagctattaaatatcatttatttaaaaaggtggagaaacatggggaaattcccatgatacaatgttaggtgaaaaactttaatatataatatccacrcatagtgttcatgcagatggacaaggactgaaatgtaatacgtacaaatggtaggtttaggagtgacttttttcttttactctgaaaagttttagtaatc

SEQ ID NO: 545965 - DNA, 201 bp, Homo sapiens
atgaaaaagaagatattccctgtcattatcctgaatcaccagtccttcagattactctttacctactttagagccttagtatctataaatgggaaatgtakgatttcataaaattacagaatttggggtcaataatttcatgttgtaaatgagaatctgatggagagaggcatgtgaatttctcaaactgggagtttcttg

SEQ ID NO: 545966 - DNA, 201 bp, Homo sapiens
ataagaagtcaataaatatttttgtccaggtgcggtggctcacgcctgtaatctcagcaatttgggaggccgaggcactcaaatcacgaggtcaggagttygagaccagcctgaccaacatggtgaaatcccatctctactaaaaatacaaaaattagctgggcatggtggcacgcgtctgtaatttcagctactcgggag

SEQ ID NO: 545967 - DNA, 201 bp, Homo sapiens
accctcagcaccatcagttgactcttaaggagtcaccctccctcccttctttttaatgaagggagcagctttccacccggcctcacctgaggacagttacygttatttacttcttttcccactacttgaaaatttaattgccactgacagtggttgtggtcacgtgggagctctctctgctttctgcaggtaatgagttct

SEQ ID NO: 545968 - DNA, 201 bp, Homo sapiens
tctccatgtgaagctgatcatatcactttgctcctccaaacccttcaatggttctcttcgccctcagagtaaagatgaaatcccttggtaccaactctcaygtttttgccccaatttgctttggcatctgcttcaaggaacggcagagactgtatctcattaatctttataccttcaaagtctaatttcatgctttgtact

SEQ ID NO: 545969 - DNA, 201 bp, Homo sapiens
caaatggtgctaggaattaaaaaaacagcaggttcaaacaaagcttagataatttcatggattatagcttgatttgcagagtaactgctattttacaggcmaacatgagcaattcccaagtggttcatatgatgttactctcacgatgtctcctctggcccccagttacccctcacatttgaggggagggagtgcagcaag

SEQ ID NO: 545970 - DNA, 201 bp, Homo sapiens
gtaagcgacacttgaaatatacaaaatcatatgcttgaatttagtggcaatatcaaattactttaaatgtttctaaatgtgttttgttgttgttgttgttkttgttactttctattcacaagtcatcatagcttggtagcaaacagttcatggagcagccttgatattgaccacataggaaaagagtagaaatgtaaggca

SEQ ID NO: 545971 - DNA, 201 bp, Homo sapiens
cactccatttcagctcagtgaattctaaggcaacaaaagtgtattaagtaattaatccataatgccagccactacctaaaaaaaggataaggccaaagctaaaaaaaaaaaaaatcaaaagctaggaaaacttattaacattttctaaaattacattgttgttgcctattttaagggcatgagtagtgactttatgctaca

SEQ ID NO: 545972 - DNA, 201 bp, Homo sapiens
tcagctcagtgaattctaaggcaacaaaagtgtattaagtaattaatccataatgccagccactacctaaaaaaaggataaggccaaagctaaaaaaaaawaaaatcaaaagctaggaaaacttattaacattttctaaaattacattgttgttgcctattttaagggcatgagtagtgactttatgctacattttgcaaa

SEQ ID NO: 545973 - DNA, 201 bp, Homo sapiens
gtcgccggtgcaagaggggggttcctgcttgggtacccacatcagtaggttttgtctcctcatctgcttgtcttctgaagataaatcgttggcagaactgaaaaaaaaaaaaatcatggaatggcttttttacatttctgccagggggaggctattttgtaatctttttgcagccttcctgtgcacaacccaatcccaagc

SEQ ID NO: 545974 - DNA, 201 bp, Homo sapiens
cataagcctcctgtcccagagggccataagtgcctcaggtctacttagtgcagactccagggttcttccttcctccacaagccacccatcagagtgaaccragagatcagccaggaggagcagagcctctatggctgagaggaatcatccctactagttggttagtaagcacaatagtgaaaggggaggagaaaatcatgt

SEQ ID NO: 545975 - DNA, 201 bp, Homo sapiens
ctcaggtctacttagtgcagactccagggttcttccttcctccacaagccacccatcagagtgaaccgagagatcagccaggaggagcagagcctctatgkctgagaggaatcatccctactagttggttagtaagcacaatagtgaaaggggaggagaaaatcatgtacaggggttgaacacatccagctaaggaaggca

SEQ ID NO: 545976 - DNA, 201 bp, Homo sapiens
ccatcaggaaaagaaagttaaatagtaaccaataatataatataaaaagtagtcaagataactacagaagagttgtcataagacattagcaatgaaaagtmtgtgttgtaggagatcagaggagggaagaatcactagattaggatgattgaggaaattcctgtgaaagagaatccatcactatatttcatatacatatag

SEQ ID NO: 545977 - DNA, 201 bp, Homo sapiens
tcactttgagttcacgcaagatctggttgttcaagagtgtggcacctccccaccctcttgctcccttgctctcaccgtgtgtcatgctgacaccctgtcaycttcagccatgattgtaagcttcctgaagactcaccagaagcagctaccagcaccgtgcttcctataaaccctgcagaatcatgagctgattaaaaccct

SEQ ID NO: 545978 - DNA, 201 bp, Homo sapiens
gtttcttcctggttcagtctagggagggtgtctgtgtccatgaatttatccatttcttctagattttctaagttatgtgcataaaggtgttcataatagtytctgatggctgtttctatttctgtggggtcagtggtgatgtcccccttatcatttctgattgtgttcatttgaatcatctctctttttttctttgttggt

SEQ ID NO: 545979 - DNA, 201 bp, Homo sapiens
ctataaaccctgcagaatcatgagctgattaaaacccttttctttataaattacccagcttcaagtatttctttctagtgacccaaaaacagcctaatacmacaggtcagatctccttgttgctgctgctattattttgtcttgcttgccgtagtgatacgccattctccaatatacaccatacccacatgtctctttttt

SEQ ID NO: 545980 - DNA, 201 bp, Homo sapiens
tcaagtatttctttctagtgacccaaaaacagcctaataccacaggtcagatctccttgttgctgctgctattattttgtcttgcttgccgtagtgatacrccattctccaatatacaccatacccacatgtctcttttttatttagaaataatgggaagatttccttttttattattacaaaatataatactcataaaaa

SEQ ID NO: 545981 - DNA, 201 bp, Homo sapiens
aagtttttaaaataaagaatttgtttactaaggaaagaaatagaggatatgggaggatccagagaatagaaatggtaggaatgagttattaaaaaaaaaayagaactgaaaacaaaggaagaagcaagccccagggagggctagagctctaacagagagatcacacagtgggagtggtagtctttaaaaatctaattgctt

SEQ ID NO: 545982 - DNA, 201 bp, Homo sapiens
caaacctcaaacgtctatcaaataggaatttcagaagaaaagaacaaaaaatggaagagggaaaatactgaccaaattaaaagaaaatttccctgaagtayacagcttggtaaatgttcagaatatttacatataaataaatatatgaatatataaaggttccaggctgcagggagaagtgaacacagattacttacaagg

SEQ ID NO: 545983 - DNA, 201 bp, Homo sapiens
cttcctttttgaatattttgagatggacttcactattcagataacaggttaagatcctcattgtcatttctctttccttggctgtcttaaagaaaacaatsatctcaggtagaggagtattagcgggagggaggaatgatccttggggaaaaatttataggtgttttgttttgttttgaattaggtaaatccattaactgc

SEQ ID NO: 545984 - DNA, 201 bp, Homo sapiens
aaatagaggatatgggaggatccagagaatagaaatggtaggaatgagttattaaaaaaaaaatagaactgaaaacaaaggaagaagcaagccccagggarggctagagctctaacagagagatcacacagtgggagtggtagtctttaaaaatctaattgcttcacagtaattttgccaaagcagtgaaggtgcagggag

SEQ ID NO: 545985 - DNA, 201 bp, Homo sapiens
aatggagagcaaacaccataagaaaatgctttattggcagcaagcattttgtctttccaggtcatattttaaatatgcttaaatataaggaaaaatttatrcgtgtttgagatttcatgtaaatatttatataagttgaataattataatattcctgaatatgacatttatttcttctcaagagataatatttctgacaat

SEQ ID NO: 545986 - DNA, 201 bp, Homo sapiens
atggaataatttcaggaatgagaggaacgctatgaagaaacccccgcagaagggacagcacgccttagccacactcctcttcttccctctccctttctggyagcacccatgcctgtagggtcccagtcctgctgacttagaggcagcctgaaataataagagaaggcagaacagtgtacaaatctggactttacaaatttg

SEQ ID NO: 545987 - DNA, 201 bp, Homo sapiens
actcctcttcttccctctccctttctggtagcacccatgcctgtagggtcccagtcctgctgacttagaggcagcctgaaataataagagaaggcagaacwgtgtacaaatctggactttacaaatttgcagccttatgtgagtgacttctctggttgtggctttttctttttcatttttaaaatgggtctattgccggac

SEQ ID NO: 545988 - DNA, 201 bp, Homo sapiens
tttgcggtcacatactagatcttagtcattctttctatttatgtacccattaaccatccccatttcctccccaccttccacttcccagcatctgacaaccrtcattctattttctatctccatgagctcaagtgttttaattttagctcctacaaataagtgagaacatgtgaagtttgtctttttgtgccaggatatttt

SEQ ID NO: 545989 - DNA, 201 bp, Homo sapiens
aaaaatccgaaccgcagtgggcagtgcccaacttctcatggcccagaaattctaccagttcagagaactgtgtgaagaaaacctggtaggtaacactctcyttctacaatttccctgctagtgccatgagaagaacatgtcaccaagactggcccaactaaagtaaaactgattttgaaccaagtcaaggtccattggagt

SEQ ID NO: 545990 - DNA, 201 bp, Homo sapiens
actaaaaatacaaaaattagccaggcatgatggcacatgcctgtagtcccagctactcgggaggctgaggcaggagaatcacttgaacctggggggtggargttgcttagtgagcttagattgcgccactgcactccagcctgggcaacagagtgagactctgtctcagaaacaaacaaacaaacaaacaaacaaataaat

SEQ ID NO: 545991 - DNA, 201 bp, Homo sapiens
tgtaaggtttatcattttaaccatcattaagtgtacaattcactggtatgaagtacattcacattattatgcaaacattatctatcttcagatatttttcrtcattccaaactgaaactctgtatccaacaagcaagaacatttcctccttctccaagcccatgctaatgactattctactttttgtctctctgaatttgc

SEQ ID NO: 545992 - DNA, 201 bp, Homo sapiens
ttcccaccagcaatgcacaaaggttccaatttcttcacatccttgtcaacactcataatcttatatatatatattttataacagccaacctaatgggtatsaagtagtaactcattgtggttttgattttcatttccctagtgtttagtgatattgagcatcttttcatgtgctattggtcatttgtatatattctttgga

SEQ ID NO: 545993 - DNA, 201 bp, Homo sapiens
caccttgtggcactctgcttctagaatatttaaagatataaatttctgtataatatggcaccaaaacaagtcaagtactttatctggtgtttttcttgatrccctagtgctgggggtgatgggggcattgtggggactggctgctctggatttagagcaaagttgtatgtctaaactaaaagtcataggcacctttaggat

SEQ ID NO: 545994 - DNA, 201 bp, Homo sapiens
acattgaaattgaaatttataaaactgtaaaccatgttgacagacataacttgggtttatcttttatttctcaaaacactgaaaatgggttgtattttcartcaaataagagaaagtgttcatttaagcagtgctggcaaaaacaaatgaacaaagaaatttttatgtaacacattattccaaatggtgctaggaattaaa

SEQ ID NO: 545995 - DNA, 201 bp, Homo sapiens
cttcacatccttgtcaacactcataatcttatatatatatattttataacagccaacctaatgggtatcaagtagtaactcattgtggttttgattttcayttccctagtgtttagtgatattgagcatcttttcatgtgctattggtcatttgtatatattctttggagtagtgtctattcaagtcctttgttcattatt

SEQ ID NO: 545996 - DNA, 201 bp, Homo sapiens
ataaatgtgctgtttccttcaatcagcatgtgtgttaaaagacctaaaatggacatgatccgtgtgcagtcttgattcctatgttcttatgggagcacctygtggcactctgcttctagaatatttaaagatataaatttctgtataatatggcaccaaaacaagtcaagtactttatctggtgtttttcttgatgcccta

SEQ ID NO: 545997 - DNA, 201 bp, Homo sapiens
ttgtatgcttcaacttcctcatctgaaaaatgggaataagagtataatgtctaatatagctggtggttctaaagattaaatgacttaatacgtgaaaaatrcttacatcagtgtgaaacacatggatgcactcagtaatgatttataataaatattactattactgctagtaatatagtaatactattgttactgccattt

SEQ ID NO: 545998 - DNA, 201 bp, Homo sapiens
atcttatatatatatattttataacagccaacctaatgggtatcaagtagtaactcattgtggttttgattttcatttccctagtgtttagtgatattgakcatcttttcatgtgctattggtcatttgtatatattctttggagtagtgtctattcaagtcctttgttcattatttaattggattttgtggttattgttt

SEQ ID NO: 545999 - DNA, 201 bp, Homo sapiens
tcaccaaaacaaagctctttgtctgatataataaataaatgtgctgtttccttcaatcagcatgtgtgttaaaagacctaaaatggacatgatccgtgtgyagtcttgattcctatgttcttatgggagcaccttgtggcactctgcttctagaatatttaaagatataaatttctgtataatatggcaccaaaacaagtc

SEQ ID NO: 546000 - DNA, 201 bp, Homo sapiens
ctttctgtttgaagaacttcctttagccaagttttaaagttaggttgggtagtgacagacttttctaattttcctttacataagaatgcctttattttctyttctttcctgaagacagttttgctgaatgtagaatttgctgttgacaacatttttgttttatcacttgaaaaccgttttgccactttcttctggccttca

SEQ ID NO: 546001 - DNA, 201 bp, Homo sapiens
aatgaaaataagttacaataaactgcattatttgggcactctacagttcatatcacactttcgtgtggattagctcactctgctacctggaacaccttttyctcactgggccttctaaggcactgtaaagaatagtagtgcgtacagatatacaacgtggttcaactacgattgctaagctcatagacttttctcccacag

SEQ ID NO: 546002 - DNA, 201 bp, Homo sapiens
aagcgtttttaatttacaaaagtgtagtcatatggaattggttaaaatctcatccaggaaatcacagaccaggctcacttcttaaacagagacagtttaakacacaaaattggttacacaggtatgggaagactgagagagcaataaaaggaacaagaaggaaaaggtggggttaccagaagtttaggagctcagaagaaa

SEQ ID NO: 546003 - DNA, 201 bp, Homo sapiens
tttcgtgtggattagctcactctgctacctggaacaccttttcctcactgggccttctaaggcactgtaaagaatagtagtgcgtacagatatacaacgtkgttcaactacgattgctaagctcatagacttttctcccacagttaccatttagtatattttctgaatgtaaagttgtgtataattgcccttccaaagtag

SEQ ID NO: 546004 - DNA, 201 bp, Homo sapiens
gctgggtgtggtggtgcatgcctgtaatctcacctacttaggaggctgaggcagaagaatcacttgaacctgggagacggaggttgcagtgagccgagatygtgccattgcactccagcctgggcaacaagagtgaaacgccgtctcaagaaaaaaaaaaaggccgggcgtagtggctcacgcctgtaatcccagcacttt

SEQ ID NO: 546005 - DNA, 201 bp, Homo sapiens
gggtatatgtatattagaagatatatgtccagcaattcagcccatagacaagcttatgagcaaagatgagtggttatgaatttgtaacattaaactatatyttgggtttagatgtctttctattgctggacattagtaaagatgtcttagtgctggcctacaatggggacagaatatcagctatacctactcaacactctt

SEQ ID NO: 546006 - DNA, 201 bp, Homo sapiens
tgggtgtggtggtgcatgcctgtaatctcacctacttaggaggctgaggcagaagaatcacttgaacctgggagacggaggttgcagtgagccgagattgygccattgcactccagcctgggcaacaagagtgaaacgccgtctcaagaaaaaaaaaaaggccgggcgtagtggctcacgcctgtaatcccagcactttgg

SEQ ID NO: 546007 - DNA, 201 bp, Homo sapiens
aaagagaaagaaagaaaaaaaaaagtctattgaggccattaagtgagatcagaatgttaaaatttttaaattaaaaatggttctaattatctattattaartaaatattgtgagagttaactgagcaacttatgttaagcacctcacctggaatgccctatacagtaagcatatacttagcatctcctgtgtgcaagctac

SEQ ID NO: 546008 - DNA, 201 bp, Homo sapiens
agccctttgaccatcggatagcatctctttaagactggcccaatcctgcggctctgctcattccacctgctcattcctcccagcactgccagatgtccaaygagatcatacaatacaaggataacaaatttttttgtgggttttggttggtatatatgaggagaacctttgtgttttatttggataatttgtattcaacaa

SEQ ID NO: 546009 - DNA, 201 bp, Homo sapiens
cactttttctcctccatatgttatcagattagccagatcctatgtgctgagaactggcagagcttcctccgctgctgaatagattgagcagtaactcccarccacacagccaccttgataattaggtgacatttctgccaacttctgcaatctgccctctaggggggcagtgggccaagtcacacctttgtggctacgtat

SEQ ID NO: 546010 - DNA, 201 bp, Homo sapiens
tagaggaaccttccaccttcagccccatggtcagtgctgactgacagcatcctgggtgggttctccacgggaccctttccaggtgccattccccattgctrtagtcaagttcaacaaggtagtaagagcaagactttgacacggagagttttgaagtcagaaataaatgaatccatgcctataattgagatgggctttgaa

SEQ ID NO: 546011 - DNA, 201 bp, Homo sapiens
gtgctggacactggggataccacagtgaacaaaacaggcagtagcccctgcccttacagagcttgcatcctagtagggaagacaaaaaccagcaagacagrtaagtgacataaagagcaaggaagactaggataacggctaagaaggaaaaagttaagcaggaggaggtgctgttcagagaaagtgattacgaaaggccac

SEQ ID NO: 546012 - DNA, 201 bp, Homo sapiens
gtgcattcacggatcagacatgggctgtggaagaaaacagagctggccattggatcacatggatgactctggagaggccatatggaaccgtggtgtgctgraacagtccttctcagagagagagggcaagcaattcatctgctaattcctcctggtctcctgcctttcattggtcgagtcgtattccatgggatattaaca

SEQ ID NO: 546013 - DNA, 201 bp, Homo sapiens
tctcctgccccagcctcccaagtaggtgggattacaggccatgcaccaccatgcctggctaatttttgtgtttttagtagagacagggtttcaccatgttrgccaggctggtcttgaactccaggcctcaagtgatccatctacctcagcctcccaaagtgatgggattacaggtgtgagccatcgtgcccagccccatca

SEQ ID NO: 546014 - DNA, 201 bp, Homo sapiens
acaatgtatatgcactggcattgtttagccagaggcttagctgtgggctagtgggaagaacctgaggctggctggctcgctcctgactctgcaccttgcargcactgtattttccctgagtcgtatttcctgtcaggtgcattagctaaaaaatgaggaagtcgacacttattgttgagctgcattcaaatgataaagatg

SEQ ID NO: 546015 - DNA, 201 bp, Homo sapiens
ctgcctgtttttgtaaattaactgtcatcaggcataactcacacccatttgtttacctgctatctgtaaacagaagtttcagcgaatagttccctcttttraaagcagagttgaatagttcctgcagagtagtctctgcaggaatgttttggcccacaaagccaaatacatttatgatgtggccctttacagagaaagtct

SEQ ID NO: 546016 - DNA, 201 bp, Homo sapiens
cagccaccaggtggcgtccaattgcagttggcctggggagtgtaggagccgcactggaggctcagtccccaaggtcagtcatgcgttggaaacaatgtgamctagcccctcccacccccacttatcacatcatggcaggatttttactgtatgtcacagcaaatcaaatgattccatatttggctgaattatctagctttt

SEQ ID NO: 546017 - DNA, 201 bp, Homo sapiens
ctgcaggaatgttttggcccacaaagccaaatacatttatgatgtggccctttacagagaaagtctgctgcacctatctaattcatcaaacccattcaaargtaaggaaactaaggcccaaagtggtgaacctccaacaggaggcaaagtcagaataagaagctcaggtctctcagtaaacagccctttgttccttcggtg

SEQ ID NO: 546018 - DNA, 201 bp, Homo sapiens
cacctatctaattcatcaaacccattcaaaggtaaggaaactaaggcccaaagtggtgaacctccaacaggaggcaaagtcagaataagaagctcaggtcyctcagtaaacagccctttgttccttcggtgcccggctctacaaattatttattgcttgagtatgaagttaatctgaacttcagtttcttcatgtataaaa

SEQ ID NO: 546019 - DNA, 201 bp, Homo sapiens
tcatggaagacaacaaagagtactttgcgactagctcaaaacagaatgatattatgtttttttttaaaaaaaaactctgattatttcagataatggtgtgygttgacattgcaaaatattgtaattaaggaacaggcttagtagagcactttaaattgcacagctttctgttttccattattgaatagctttagggtggct

SEQ ID NO: 546020 - DNA, 201 bp, Homo sapiens
tgcccaggctggagtgcaatggcaccgtctcggctcactacaacctctgcggctcactgcaacctctacctcccgggttcaagcaattctcctgcttcagsctcctgagtagctgggattacaggcatgtgccaccacccccggctaatttttgtatttttagtagagacagggtttcaccatgttcgccaggatggtctc

SEQ ID NO: 546021 - DNA, 201 bp, Homo sapiens
atctctaatatatgacaaactgtcaaagtttaattagcttttatccctagaatattctgtggtttcaaaagggtacataatattattacacttgacattgrttaaccagtttcatgctgtagagatgtatgtctgacaagaagtatcagatctaatcaagacggaagttcatcctgaatttctggataagactgccatcct

SEQ ID NO: 546022 - DNA, 201 bp, Homo sapiens
aagacaacagttgtgatatcacaatgagtcattacgcactttctgttcatggaggatcccaaaatcatcttatttgcgaagaagtgagttggtgtgggagrcagtaccttaacatttcagcagagtcctttagccaaattcctgaagctgccaagcttccacaggcggactgagatataaggataagagagaagaacgcag

SEQ ID NO: 546023 - DNA, 201 bp, Homo sapiens
atccttcagtgcagtgacatcatttcaattcagaaagcattctcatcctggctgggcacggtggctcacccctgtaatcccagcactttgggaggccgagkcaggcagatcatgaggtcaggagtttgagaccagcctggccaacatggcaaaaccccaatcctactaaaaatacaaaaattagccaggcatggtggcggg

SEQ ID NO: 546024 - DNA, 201 bp, Homo sapiens
aaacttcaatagaagtccagattagaagttttagacctcagcctctggccctgggccttctgaaatgaccttcctccaaacaccatttaatttccgctaayttagttaatgaatggaactttctgaagacagcagttactttgatctgaacccctttcctagtttccagttaacatagccagagggagacagaaggggtgc

SEQ ID NO: 546025 - DNA, 201 bp, Homo sapiens
agtgaaaaaaaaaagagtaacgaggagtgaaaagaatgaagaagaaaaacagctgcacaggaaaagggcagtgtcacaggtgcctcccacggtcctttgcsgagagcctgtgggggaggccaagtggggagaatgggggacatcgggtggacgacccaggggaccagctggtgtcagagaatggtagattaggatttggcc

SEQ ID NO: 546026 - DNA, 201 bp, Homo sapiens
ttcatttctggatacactctctccctttgacttactcatgagtaaggaaggattgcaagaaaaagacctgtggtttgctctttctttctctctctttgtakgtcttcattttcagcataaacagttggctgatacagggaattattcaaggaagaaaggatgcaataggctcccgtggtcatctgtgtttcttaaaaccct

SEQ ID NO: 546027 - DNA, 201 bp, Homo sapiens
gggggagggtcagccttttctccaaagtccagcaagcctgccagtgaaccaaggttactgatgaatccacgctgaagtcttggtgaggactcagcctgacyggactctcattagatgggacggaccctggttcatacacaggccactcactctgcacagccaccccacttactgaagcaagaattggcaataagtgcacaa

SEQ ID NO: 546028 - DNA, 201 bp, Homo sapiens
gatccgcccacctcagcctcccaaagtgctgggattacaggtgtgagccaccacgcctggccaatttcctgtttatttaccatggtgggatgtttcaggtractgtagattttcctgttcatttgtcaacaagaaataaaaattccatgaatgactcttttgcccttaaagaacattgtcaatgaaattgacatgccaggc

SEQ ID NO: 546029 - DNA, 201 bp, Homo sapiens
aaaagaaaagaaaatggagaatcaggagttctgcattttaatctcagtgctgtcaccaagaagcaaatgccctgggcaagtcaattctctggtttcaatgsccttctctatataatgagtaaatcagacagaattggtaggtttcccaacctgcttcatcaggagaattagctgggatcattttcaaaatgcagattcccc

SEQ ID NO: 546030 - DNA, 201 bp, Homo sapiens
aagatctcggctccctgcaacctccgcctcccgggttcaaggtattcttctgcccccagcctcccgagtagctgggattgcaggcatgtgccaccacaccyggctaattttttgtatctttaatagagatggggtttcaccatgttagccaggctggtcttgaactcctgacatcgtgatccgcccacctcagcctcccaa

SEQ ID NO: 546031 - DNA, 201 bp, Homo sapiens
agttctgcattttaatctcagtgctgtcaccaagaagcaaatgccctgggcaagtcaattctctggtttcaatgcccttctctatataatgagtaaatcaracagaattggtaggtttcccaacctgcttcatcaggagaattagctgggatcattttcaaaatgcagattcccctgccttacccatgaatattctgattt

SEQ ID NO: 546032 - DNA, 201 bp, Homo sapiens
acgaggtcaggagttcgagaccagcctgaccaacatggtgaaatcccatctctactaaaaatacaaaaattagctgggcatggtggcacgcgtctgtaatytcagctactcgggaggctgaggcaggagaattgcttgaacccgggaagcggaggttgcaggagctgagattgcgccactgcactctagcctgggggacag

SEQ ID NO: 546033 - DNA, 201 bp, Homo sapiens
gaaaatacttagcaggatactagtatataaatcagggctcataatctttaaagtatgactaaaagcttttgatgatggcgtctcatttttgtcttctatgkcatggataaagaggtatgtgtgaaagtcaagtgttcctcctgtgtattattatcatgcctgaggctgttgtgtttctgttgttcttgccttttaccaccc

SEQ ID NO: 546034 - DNA, 201 bp, Homo sapiens
ttccctttgtcacccaggctggagtccagtggtgtgatcatggcttactgtagccttgacctcctgggctcaagcgaccctcccacctcacccttcagcgyagctgggactacagactcaggtcaccgtgccagactaattttttatgtagagacggggtttcgctatgttgcctaggatggtgttaaacttttggcctca

SEQ ID NO: 546035 - DNA, 201 bp, Homo sapiens
agaacttgcaggtttgttacataggtatacatgtgccatggtggtttgctgcacccatcaacccatcatctaggttttaagacccgcatgcattaggtatytgtcctaattaaggatagtggcttgacttaggcaccagcaagtctctagtagcacacttgggaatattatgccatgaatggcatcctcctgtggcttttt

SEQ ID NO: 546036 - DNA, 201 bp, Homo sapiens
acatggtgaaatcccatctctactaaaaatacaaaaattagctgggcatggtggcacgcgtctgtaatttcagctactcgggaggctgaggcaggagaatygcttgaacccgggaagcggaggttgcaggagctgagattgcgccactgcactctagcctgggggacagagtgagactctgtctcaaaaataaaataaaat

SEQ ID NO: 546037 - DNA, 201 bp, Homo sapiens
caaaaataaaataaaataaaataaaataatcatttaggccaggcgtggtggctcatggctgtaatcccagcactttgggaggccgaggcgggcggatcacdaggtcaggagatcgagaccatcctggctaacacagtgaaaccccgtctctactaaaaatataaaaaattagccaggcgtggtggcgggcacctgtagtcc

SEQ ID NO: 546038 - DNA, 201 bp, Homo sapiens
gtcaacatcaactttatatttgttttataacaactgtgcctcccacatagcagacacacaataaataattgataaaagaatgatggcgatggcggggaggyactacataattggaagggagaagggagagaaaaatcttcctatgctattattggaaactttccaaccatgtttatgtttccattaaattaattataatca

SEQ ID NO: 546039 - DNA, 201 bp, Homo sapiens
tggctcatggctgtaatcccagcactttgggaggccgaggcgggcggatcacgaggtcaggagatcgagaccatcctggctaacacagtgaaaccccgtcyctactaaaaatataaaaaattagccaggcgtggtggcgggcacctgtagtcccagacacttgggaagctgaggcaggagaatggtgtgaacctgggaggc

SEQ ID NO: 546040 - DNA, 201 bp, Homo sapiens
cctgctagactcacagcgagggctcaatcaaggactagcaccataatatccatctgtttcttctgtgatatactagcactgtaggtgctggcacagagtaygtgctaaattaattgtgcgaatgaatcgataaatgtataaatgatctgtcacattagaagaatgtttgaaaatgaaacaattagctgtaatatcaccaca

SEQ ID NO: 546041 - DNA, 201 bp, Homo sapiens
ggagtttcgctttgtcacccaggccagagtgcagtggtgcaatcttggctcactgcaacttccgcctcccagattcaagcaattctcctgcttcagccttscaagtagctgggactacaggtgcccaccaccacgcctagctaagttttgtattttagtagagacggggtttcaccatatcggccaggctggttttgaact

SEQ ID NO: 546042 - DNA, 201 bp, Homo sapiens
aaaggcttggtctttgctcagtgagggccccatgttctcacctgtgactgcaggtgattggtcaaatgctgagagttccttgtcagaaccaaggactgctkaagttggagagttccatgctggcacgcaccatagctagtccaaacccaagaccacacataccactgatagccttttccatggatgacatcttctctgcat

SEQ ID NO: 546043 - DNA, 201 bp, Homo sapiens
cccctcaaaagaatggtctacattcccccatgtccccctcccctaggcagaaggctttataagatctgtactccactgagttattgagtactcattctccygcaattctcccatgctatgcacattagaataaatgttgcatgcctttttttctattaatctgctttttgtcagccagtttttcagtgaaccttcagaggg

SEQ ID NO: 546044 - DNA, 201 bp, Homo sapiens
ctaatcagagaacgcactgacattgtgggtgggttgccgttgattgggagaaaatgtcttcagcatttggacacctgaacagaggagtaaaaatagattcyccaggattcttaaaaaataacacatacacggcagacccaagtcattccagagactataacagcttacgaaaaagaagaagaaaacggaaaacaaaccttg

SEQ ID NO: 546045 - DNA, 201 bp, Homo sapiens
caatggcttgggggctgacacttctcccttcatcggcctcccacttacacatggatttgcaaacatacacacaaacacaatttgtttctttacactctagkctgtgcaatgacttccattgtagacaaaagacctcatgctcaaatttggaaattatgcttttgttggacacacaagatcagcatacagagagaaaaatga

SEQ ID NO: 546046 - DNA, 201 bp, Homo sapiens
tctcgagctcctgacctcgtgatccgcccacctcagcctcccaaagtgctgggattataggcatgagccgctgcaccgggccttttctggttttattaatrgtgcatttgctatatccctttaaataaaaagaatgttgacataaatccaggttaaactgacacaaattaaagcaactttctttttatttaaaaattggta

SEQ ID NO: 546047 - DNA, 201 bp, Homo sapiens
taaaaagaatgttgacataaatccaggttaaactgacacaaattaaagcaactttctttttatttaaaaattggtaacctgaaacatgaagagctgttctygttctcagaaaaagagaacgagaaactcacaatccaaaagcccataacactttctaaattagttaaataaataggatgcaagcacttgactttggcacgt

SEQ ID NO: 546048 - DNA, 201 bp, Homo sapiens
atgtcagaggcagttaatttgcaaaccacagttgcaggtggtttttgaagtggagggagtttaggacaaaggaataaagctacataaaaccagttcatggkgtctttaaaaatataaatccatgcctttgtagtccttactctaacaaaagctcagctctcaagggcatgctttcagttgtacctgtgttccagccagaaa

SEQ ID NO: 546049 - DNA, 201 bp, Homo sapiens
tcctttgaaaacggcggtttcgggagggcagagagaaggaggaggatgaaaaattaagtgcctaactacacagatcaggggggcctgcagcctcccacacrcctgctttccagatccaggtaattattcctcatcgtgctgacaccaacaggaaggaacggtggatgcattttctttcttcttcacttcaccatgcatcct

SEQ ID NO: 546050 - DNA, 201 bp, Homo sapiens
cgctaaaagaggattaagaaaccttgcattgtgagctgtgtcaaagcaatgaaacaaaggataatgctttctcgtacacctgtacacctcagtgcagcacygtgcaagctctagtaggaatagtgctactgagttagctggtgacattcattgcagcctgtgcctttcccttctccaacctcttccttgacttttcctttg

SEQ ID NO: 546051 - DNA, 201 bp, Homo sapiens
tgaaacaaaggataatgctttctcgtacacctgtacacctcagtgcagcactgtgcaagctctagtaggaatagtgctactgagttagctggtgacattcrttgcagcctgtgcctttcccttctccaacctcttccttgacttttcctttgccttccctttttcttgctcttttccagagagagctcaaaggcatttgtc

SEQ ID NO: 546052 - DNA, 201 bp, Homo sapiens
agccaagatcacaccattgcatgacagagcgagactccctctaaaaaaaaaaaaaaaaaaaaaaaaaccacgtaatcagctaattcttttaaacctattaktatgctgtggcagtcaagctgaatgtgtgcaacaggaggctttcaacccaagatgatgagcaaaccaaagctgattttcagcctagtgcttaggttttgt

SEQ ID NO: 546053 - DNA, 201 bp, Homo sapiens
gcccgattcttttgtgtgtatgtgtgtgtgtgtgtgcgtgtgcgtgtgtttgtaaacataaatatgctccttaatttgaagtacatcccaagaaaaacatrtaactccagaaaatgtccaagttttattaaaagaagaagggaaatggcagaaatggaaagaagggaatcagtggggaggaaggagtgggctctagcactt

SEQ ID NO: 546054 - DNA, 201 bp, Homo sapiens
gagaaacggtagaatggtcctgagtccacacgaacccaggctgtacttgttggtggttcagggtctatcctgtgtatatagatctcccaatagtctgcatstggtttttgcaccaaggcagggtttgatgaggattgattgaaaagaataacagctttaaaggccagtactagagcttttgcaaatattcactgtgtcctg

SEQ ID NO: 546055 - DNA, 201 bp, Homo sapiens
aggaaaaaccagaggaaagaatatccctaacgaggaatcgattgcacatgcaaacccagggaacttgatgggttgaataactaaaggaaaagtggtcaggmggaggcagaattctgagacctgaaaagggtgaataggaactcttatcctgaggggagatttgtaaactgcagactgacaggacctgctggagggtttcca

SEQ ID NO: 546056 - DNA, 201 bp, Homo sapiens
tagcatattgaacaaatttgcatttatccacacagacatgttcaacatgatgtaagtgtgctaagaaaggcaatgaaaggcagggcgtggtggctcacgcytgtaattccagcactttgggagaccgaggtgggcagatcacctgaggtcaggagtttgagaccagcctggccaatatggtgaaaccccctctccactaaa

SEQ ID NO: 546057 - DNA, 201 bp, Homo sapiens
aacggtagaatggtcctgagtccacacgaacccaggctgtacttgttggtggttcagggtctatcctgtgtatatagatctcccaatagtctgcatctggwttttgcaccaaggcagggtttgatgaggattgattgaaaagaataacagctttaaaggccagtactagagcttttgcaaatattcactgtgtcctgcccc

SEQ ID NO: 546058 - DNA, 201 bp, Homo sapiens
tcaagttagagggtcagagtagtggactggagaggattttagagatcagagttctgcccttcctgtttacagatctgacattcagagaggccagaagtcamaacagctttcttgaagttttattattttgatttttaaggaaaggagtccaatgaatttgcaaattaacgaagcagtgtttgaaaagaaaatatgcaagag

SEQ ID NO: 546059 - DNA, 201 bp, Homo sapiens
gtggctcacgcctgtaattccagcactttgggagaccgaggtgggcagatcacctgaggtcaggagtttgagaccagcctggccaatatggtgaaaccccmtctccactaaaaatacaaaaattagctgggtgtggtggcaggtgcctgtaatcccagctactggggagactgaggcagtggcaggtgcctgtaatcccag

SEQ ID NO: 546060 - DNA, 201 bp, Homo sapiens
taatcccagcactttgggaggccgaggcgggcggatcacgaggtcaggagatcgagaccatcctggctaacacagtgaaaccccgtctctactaaaaatayaaaaaattagccaggcgtggtggcgggcacctgtagtcccagacacttgggaagctgaggcaggagaatggtgtgaacctgggaggcggagcttgcggtg

SEQ ID NO: 546061 - DNA, 201 bp, Homo sapiens
accatgttcatgttcatattcatgtaagaatgtattttgttaattgactccctgaattcaaaatacagtgcatccatggcaaaaaaaaaaaaaaaaaaaamagtttggaaaataacctgtttactcactggaaatttgaggttcagatattgcatgtggggtagttgtaatcatctttctctattagagagttgaagaaga

SEQ ID NO: 546062 - DNA, 201 bp, Homo sapiens
cccctgctcactaccacactgatgctgggctgacccccactacagtccaggctgttttccacctcttctagaacactcaagaaataaaggtggggctgcayttctcaaggagaattgagaaggcaaaaagtgcagtgagatccccactcagtaagtgtgtgttctgggtttgcagcctcagccttcaggagcagaaagaaa

SEQ ID NO: 546063 - DNA, 201 bp, Homo sapiens
tttggagggagaaaaaaagaagggtcttaccacatataaatcaaatatactacagaagtggtgtcagatcagaaggagattcatattgctgaataataagytattgtctttgtctgcgttacttgcttgagacagtgacttgggtatggcaatttattagggagctgatccaaagatcaagagttggaagcaggaagagtg

SEQ ID NO: 546064 - DNA, 201 bp, Homo sapiens
gtgttttgtttgaagtctcctatttcttcatgaattctctttcacacaaacttgttagtggcactcagtgtcctcggtaaactttttggtttttgtttackgctagcttttaaaaatctatagacaggcaaaaaaaatctcctgccgctaaaaagctccgtgaccttggaaaagtcacttaacctctctggagaaagctca

SEQ ID NO: 546065 - DNA, 201 bp, Homo sapiens
catgcatgggtagaaagcagaaagacacttagttgtcacttgaggtgtacactgtaaggcagtggtccagggaccggtttcgtggaagacaatttttccayggacagggtggggaggtggggagatggtttcgggataaaactgttccacctcaaatcatcaggaatgagattctcataaggagcacatacctagattcct

SEQ ID NO: 546066 - DNA, 201 bp, Homo sapiens
acctctgaaaacaaaaaaaataagagaccttcccatatgagacagtgcactttttatgagaagagaacttaccttatttctatttctattcccaacacttaatagtgtctggtgtttagtgtgtgctcaatgaatgatgaatgaatgaatgatgaatgaatgaatgaatgaatgaatgaaaaagaagatattccctgtcat

SEQ ID NO: 546067 - DNA, 201 bp, Homo sapiens
agcgagacctttttttttcttaatgtcccgacctgcctaggcaggaatccattatggttgttgttgattttagtgttttgtttgaagtctcctatttcttyatgaattctctttcacacaaacttgttagtggcactcagtgtcctcggtaaactttttggtttttgtttacggctagcttttaaaaatctatagacaggc

SEQ ID NO: 546068 - DNA, 201 bp, Homo sapiens
atgagaatttaatgccgccactgatctcacaagaggcagagctcaggccgtaatgcacgctggcccactgctcacttcctgctgtgcagcccagttcctamcaggaaccagtactggtctatgacctgggggttagggatccctgcaaaggcaaggagactcccctgcagctgtggttgacatccaaagtgaaccccggga

SEQ ID NO: 546069 - DNA, 201 bp, Homo sapiens
ctctgaaaacaaaaaaaataagagaccttcccatatgagacagtgcactttttatgagaagagaacttaccttatttctatttctattcccaacacttaatagtgtctggtgtttagtgtgtgctcaatgaatgatgaatgaatgaatgatgaatgaatgaatgaatgaatgaatgaaaaagaagatattccctgtcatta

SEQ ID NO: 546070 - DNA, 201 bp, Homo sapiens
aaggaagtaatgaaaacgtctgtctttgagagcagcgaattctttagtgtggttctggcaggggaaggaagcggggaagggttctaagaagcggggcccartttcatcctggcgagttgcagctttcttcctgagcgtggtgactcgtcaaggcaccaaggctcaggaatgagacagacattagagcttgttctggttggc

SEQ ID NO: 546071 - DNA, 201 bp, Homo sapiens
aaagtcttccagaatcacaattctgatcatgtctgctttttgctcagaaaatgttctctgatttaccaattcatcattatctaaatttcttaagcagacayttaaagcatgccactctaagttgttagacttactatttttattctttgacctcacttaccagtggcctagcccattgtgtagaaatgtaagggctgtgat

SEQ ID NO: 546072 - DNA, 201 bp, Homo sapiens
cagggtctctcacgaaagactttttgctacttgattgagtacaaccggggaaatgtcatttatatcaagataaattgtacattttagtttgtgaaagagcygctggttgtgtgaaaccagcaaatcacatctatttaataaattcctttgcaaatgtcttttccttgagtttaaattttgcagctgcagcataatttgaat

SEQ ID NO: 546073 - DNA, 201 bp, Homo sapiens
gaattcaaaactcggctctttcatttattaactgtgtgaacgtggcgaatggactgaaccactctatgtactttagtatcttcatctgtaaaatgggggcmgtgttattacctgaaaggtcactttaaagaccagaggtagtgtataaaataaatccggcatctggtaggagctgaacatacatagctagaagctgaccag

SEQ ID NO: 546074 - DNA, 201 bp, Homo sapiens
ttgtaatctagcttggggagaaactaaaataaagattcttcaaggcaaaagtttaacctgaataaatgttcatatggtctcaatttttaactgatttcagwatgactaaaattattcatttttttcttctcgttctccaaaaaattattttcatagccaatttgccagatgcagctttatacccagaggcaaaagaaatca

SEQ ID NO: 546075 - DNA, 201 bp, Homo sapiens
attcatcagtagtttgcaagtttttcccaactttttttggagtaaacgctgatgggtttttctcttctctgtgaatattctacccccatcaattgtacccscataagacaggctgtccccctgctgcagcacctcctgaagggcactgtccatggctggttaaggtaaccacattctcctagctggctcccaagggaattc

SEQ ID NO: 546076 - DNA, 201 bp, Homo sapiens
atttgtctggcgttaggaagtgtctggaatactagcaactaccaactggcgtgtcttatgactacaggaattattacactaccctccatttcattcacatyccctctcctccccttacacacacacacaagcatatttttttctactttagaaaaagttgagcgagtcatcttgtggtttccgtggaggatgtaactggga

SEQ ID NO: 546077 - DNA, 201 bp, Homo sapiens
gcactttacctcagtgcttaaacatcggtttcacttatgaggacacataagattctcaccaccaccagtattacccctctcgaaatcgctgtggcatccayagaaagggaaaagccttatattcacatgtaagcaacttccaaaggatattgctttttgtagtaaccactttatttagatataatgcacatactatataac

SEQ ID NO: 546078 - DNA, 201 bp, Homo sapiens
acacacacacacacacacacacacacagagaagattgagaagatgagacttctaatggtcacacctgccaagtaaagtagaaagtagttttgcttcaagawatatccttgccaggcacggtggctcacacctgtaatcccagcactttgggaggcagaggcaggcagatcacttgaggccagtagttcgagacccacctgt

SEQ ID NO: 546079 - DNA, 201 bp, Homo sapiens
cgcactgttgacaccttgatttcagccaatgagacccatttcatatttctgacctccaggaatgtaacataataaggtaatgttgttttaatccactaagyttgtggtgatttattacagtagcaataaggaataaatacagatacatgataataacttatctttaaataactaaactgtggagaaaggatacctttattt

SEQ ID NO: 546080 - DNA, 201 bp, Homo sapiens
atattgccatgcagagatggaggagatcaaaacaatggggcagcatgaacaaagcaatgaggcaggcccactggaggacaatcaagtgtcgtctttcttgwccacagcagtgcagtattacctgtatcctcagagagtgttcaggcatgatccgagagggcttggatggattactatgggtttgggcttaatttggtaggc

SEQ ID NO: 546081 - DNA, 201 bp, Homo sapiens
ggacaatcaagtgtcgtctttcttgtccacagcagtgcagtattacctgtatcctcagagagtgttcaggcatgatccgagagggcttggatggattactrtgggtttgggcttaatttggtaggcaatggaaaccactgaaagttttggagttttggggaaaaaactgattgctgggccagacatggcggctcacacctg

SEQ ID NO: 546082 - DNA, 201 bp, Homo sapiens
cttctaaacctatacctcttcttgataaactaacaaacaaacaaaaattcaaattcatgtccctctgcagagcctgaagctgggtgtggaggagaaagggygggggatgacgtagggcccctatcaaaaatctgcaggggcaggtgagaattttttatcacaaggagtcttgagtcccagcccctcaaatcattttcccta

SEQ ID NO: 546083 - DNA, 201 bp, Homo sapiens
tatacctcttcttgataaactaacaaacaaacaaaaattcaaattcatgtccctctgcagagcctgaagctgggtgtggaggagaaagggcgggggatgamgtagggcccctatcaaaaatctgcaggggcaggtgagaattttttatcacaaggagtcttgagtcccagcccctcaaatcattttccctaaatattcctt

SEQ ID NO: 546084 - DNA, 201 bp, Homo sapiens
tgtttaaccttgagaatgctccattcatgccgctttgcacagcgctggtgccagaaggccattagacaccatccttttgtggatgtgcttcttgagggtgstgtctcccagctcaggagggcacgaaagcatgaagaggtgaagtgatgtggttaattgggggcagaactgggcctggaaacagatctgttcctaggccag

SEQ ID NO: 546085 - DNA, 201 bp, Homo sapiens
gaggggttcacagtcttgcatggaaacctactttttccattgacttttcatgtcaataccatgtgctaaatcttcaatttctgcactgctgctttacagtragtctctaggacccagtgcaaatgtacatgttctgcacagactgaaaaaatgttgaaaagcctggtgtactgtctccctaaatgaccaagggattgtata

SEQ ID NO: 546086 - DNA, 201 bp, Homo sapiens
  misc_feature (1)...(201): n = A,T,C or G
ctataatgtaaggaagtaatgaaaacgtctgtctttgagagcagcgaattctttagtgtggttctggcaggggaaggaagcggggaagggttctaagaagnggggcccaatttcatcctggcgagttgcagctttcttcctgagcgtggtgactcgtcaaggcaccaaggctcaggaatgagacagacattagagcttgtt

SEQ ID NO: 546087 - DNA, 201 bp, Homo sapiens
agaccctatctctacaaaaatatatatttttttaattaggcaggcttggtggcatgcacctgtggtcccagctactcatgaggctgaggtgagagcattgyttgagcccaggaggtcgaggctacagtgagccgtgatcgtgccactgcactccagcctgggagacagagggagactctgtctcaaacaaacaaaaaacaa

SEQ ID NO: 546088 - DNA, 201 bp, Homo sapiens
tctaggacccagtgcaaatgtacatgttctgcacagactgaaaaaatgttgaaaagcctggtgtactgtctccctaaatgaccaagggattgtatacagtkgacatgtgcaattactttcaactctactggtacgttgttgagaactcaacttcaggtcaaacatgctaacagttcagctcacattcgaacaaagcttatc

SEQ ID NO: 546089 - DNA, 201 bp, Homo sapiens
gtgagctcatctttttttttttttgagatggagtttcactctcattgcccagactggagtgcagtggcgccctctccgctcactgtaacctccacctctcsgattcaggcaattctcctgcctcagcctccccagtagctagaattacaggcatgcgccaccacacccggctaattttgtatttttagtagagacagggct

SEQ ID NO: 546090 - DNA, 201 bp, Homo sapiens
cacataatctaggaaggaaagaaaaaagaagagcacctaattcctatatgtcacagggtaagtggaacactctatcccctttccctacattcacctcttcrctcaccgcatcacactatgagataggtgctgttatcctaactcaacagatgaggaaactcaggaaaagatgatttaatagtgtaaagttaagtagcttgt

SEQ ID NO: 546091 - DNA, 201 bp, Homo sapiens
ctcaaatgatccacccacctcggcctcccaaagtgctgggattaaaggcgtgagccaccgcgcccggcctccgagatggttttcatatttgaattttgttrcatcacataatctaggaaggaaagaaaaaagaagagcacctaattcctatatgtcacagggtaagtggaacactctatcccctttccctacattcacctc

SEQ ID NO: 546092 - DNA, 201 bp, Homo sapiens
gattcatgcagatattgaatacttttctgttctgttttatgtgttttttagtttcagttgtcattttgatattggttaccccagcacttgtcagcagaaawtcaaagctgcctacttaacaggagtagatcaataaagttttgctggaatatttcatcaatcttagcccaggatttaatcctgttggctatttttctattt

SEQ ID NO: 546093 - DNA, 201 bp, Homo sapiens
aaagaacgaaaagagaagaagaatgcagagaatgtgtccatatctagtgaactttcaaatatccctccgtcttctaaaaagaaacaagtggacaacagccrctcgctctcctctgaacacacatcctcctcacactcctccttctacagagatcagggccactgcactttcgtgcttgaagcagttctgggaatttctgtc

SEQ ID NO: 546094 - DNA, 201 bp, Homo sapiens
agagagcatgaggacaaagcagataacctaggaaggcttcacaggagaggtgacagcacacctgaaggatgataggagttggccaggtaaagaaagggagrgtggaaactccaagcagaagggttgcacgtgtcaagtcagggaaacaggaccatacacatatctgagaaaagagcgaaaggtatgtggggagagaatagg

SEQ ID NO: 546095 - DNA, 201 bp, Homo sapiens
cagtcctggcaggattcatcacttgatgagtaaagagcctttgagccctgaatattcaaccgtcacagccaggcagcacttgccatgggccttggttgtgwctcagagccatgctggatgcacatgtgacccaatacatccccagtttgggtgactaggggtagagaccatttctgcttgtgaaaatgagaggggaaagta

SEQ ID NO: 546096 - DNA, 201 bp, Homo sapiens
gctgatcctgccttcacagaattgagaacactccagagacccttgcttgcctttgtcctagcaagtaagctttcatgtcaatttctaagacaaagtctccrtcttatactcctttctgggacttggatccctgtcctctctcttctccctctgtcccttactgcttcctggatgaactgcctgtacctgagtggctgcagg

SEQ ID NO: 546097 - DNA, 201 bp, Homo sapiens
tttctccaggcatctcaaatcagttagggggatgcgggcctgggatgggagggtgtgaggctgctgtaagctgggtgatcaagggagctgtagggaagttyacattttccccctgaagccttgataatttgagtctataaaacaaacatatagtaaattaacaggaaaaaaaagtatacactttttttttttaaagacagg

SEQ ID NO: 546098 - DNA, 201 bp, Homo sapiens
tgatgagtaaagagcctttgagccctgaatattcaaccgtcacagccaggcagcacttgccatgggccttggttgtgactcagagccatgctggatgcacrtgtgacccaatacatccccagtttgggtgactaggggtagagaccatttctgcttgtgaaaatgagaggggaaagtaaagtggactttgtcttgcaccat

SEQ ID NO: 546099 - DNA, 201 bp, Homo sapiens
ataaatattcgagtacaagaagcatatagaacaccaagcagatttaatccaaagaagactacctcaagacctttagtagtcaaacttccaaaggtcaaggmtaatgaaaggatcctaaaagccccaagagaaaaaaacaaataacatgcaatggatctccaatatatctggcagcagacttctcagtggaaaccttatagg

SEQ ID NO: 546100 - DNA, 201 bp, Homo sapiens
ggaagtgaagaaggaagacagagaggaggaggaaggggaaagacaagaaagagggagacggagagagagagagaaggaaaaggaaggatgacaagacaggwagacagagaaaagaaaaagactgaaggagggaaggaaggaaagaagggaaggaggtggggaaacacagagggacagagagagaaagggagggagggagga

SEQ ID NO: 546101 - DNA, 201 bp, Homo sapiens
cctagcactttgggaggccgaggcgggcggattgcctgagctcaggagttcgagaccagtctggtcaatgtggtgaaactgtctctactaaaaatacaaamtttagccgggtgtggttgtgggcacctataatcccagctacctgggaggccgaggcaggggaatcgcttgaacctgggggcggagcttgcagtgagctga

SEQ ID NO: 546102 - DNA, 201 bp, Homo sapiens
taaaataaagggatgggaaaagatattccatgcaaatggaatctaaaaaagtacaggagtagctatagttatatcaaaatagctttcaagacaaaaagctstaaaaagaaataaagaaggttattatttaatcataaagggttcaattcagcaagaggatgtaatgattataaatacacttacacccaacactggagcacc

SEQ ID NO: 546103 - DNA, 201 bp, Homo sapiens
gtgggtcatgaagaaattgagaagaaaatttaaatatgtcgtgaaacaaatgataatggaaacacaacgtatgaaagcctatgtgatacagcgaaagcagygctaaaaggaaagtttatagctataaatgcctacattaaaaagtagaaaaaactacaaataacctaatgatgcagcttaaaaaactagaaaagtgagagc

SEQ ID NO: 546104 - DNA, 201 bp, Homo sapiens
aaaataccaatgaaaggaaagttgcttttataaaaatataaacaaaatcaataaacatttagctagactaagaataaaagagagaagacccaaataaataraatcagagatggaaaaatacattacaaccaatacagcagaaatttaaaggatcgttagagactactatgagcaactgtatgtcaataaattggaaaacct

SEQ ID NO: 546105 - DNA, 201 bp, Homo sapiens
aaaaagcttctgaacaacaaaaaaaagtcgtcaacagaaagacaacctatagaatggaagaaggtatttgcaaagcatacatctgacaagggactaatatytagaatctaatcaaattttacctaaagtctagtggaggagttgagcagagcagattctcattacaatgttgtgaagttgtggaaataaaactgaagttac

SEQ ID NO: 546106 - DNA, 201 bp, Homo sapiens
ctgtaataaaaattctcctagaaatgaaaagcccaagacccagtggtttcactgatgaattttaacaaacatacaaagaagaactaataccaatcttactsaaactctgctgaaaaatagaggaagaacaaatatgtctaaattcattctacaaggccagtattactctgataccaaaaccagacaaggacacatcaaaga

SEQ ID NO: 546107 - DNA, 201 bp, Homo sapiens
aaattataatagaaaaataggggccagcaaaaatctttttaaaaaatctgaaaattaatttcttcatctatgttattctgtttaatttccagattttcacrttatattaaagatctaagtcctttacaattttttttattgttggcagtgttaccaagttcactggggcattgaaaatatattcaaaacagaaaaagcaaa

SEQ ID NO: 546108 - DNA, 201 bp, Homo sapiens
ggcgcctgtagtcccagctactcgggaggctgaggcaggagaatggcgtgaacccgggaggtggagcttgcagtgagccaagattgtgccactgcactccrgcctgggcgacagagccagactctgtctcaaaataaataaaataaaataaaataaaataaaataaaataaaataaaataaaaaggcacattatcttggat

SEQ ID NO: 546109 - DNA, 201 bp, Homo sapiens
cctgtgccgccgatgatgactttgacacggattttgacccctctattctgcctcctccggacccctggattgactctatcactgaagaccctctggaggcygtgcaaaggtcagtgtgccaccgggatggccactggttcctgaagcttctccaggcagagcgagaccgcatggaggggtggtgtcaacagatggagcggg

SEQ ID NO: 546110 - DNA, 201 bp, Homo sapiens
catccactctggtgcttcttaagggatttgaatctctccccacttgccgctgctgtgcacaggtctccctgcctgggccttctagtgagagatccccagcrgccctgaaaaacctgcctatacagcccacactattgagaaacctgtttttattgctaacctagatcctttggtcaaaagtcttatcttcctcatatcagc

SEQ ID NO: 546111 - DNA, 201 bp, Homo sapiens
aatcagaaattctagagtaagtctcattgataagaacacaaagtaaagggctggtaaaaagcaaaaacagaagaacagatgtgagagtctgcttacttackaaggattcattccatttgagttctacaaacacacacacactacacatccccccagctcagaaaaggaccacctacccaggactctgactttagatctaaa

SEQ ID NO: 546112 - DNA, 201 bp, Homo sapiens
agcataatgtccctaaagaaatgtgctggcactggcgcagggaaggcagggggtgaggagaaaaagcatcttcactttctggttataacggagagtcggcrcagccccaagagtggtcatgctccctaagcaaggaagccaagaactggtcccatgttaaaggttaagcgtgcatttgttcatccaagaggccggtctctt

SEQ ID NO: 546113 - DNA, 201 bp, Homo sapiens
agactggtaacctttaaaagccaaagttaatgtttcctctaaaattagccacatatcctcttctagatttctgaggatctatagtccctttctgaatgctsttttccattcagtgcacacgatctgttactcagaggctggtgatcccgtatgcggaatgcacaaacttaccatcttccccgtcttttccctcaggctgct

SEQ ID NO: 546114 - DNA, 201 bp, Homo sapiens
atatcctcttctagatttctgaggatctatagtccctttctgaatgctgttttccattcagtgcacacgatctgttactcagaggctggtgatcccgtatrcggaatgcacaaacttaccatcttccccgtcttttccctcaggctgctcactggtcatttctctgctcatcaatcctgtgccggatgggggtgggaaact

SEQ ID NO: 546115 - DNA, 201 bp, Homo sapiens
tttagcaagagagctgagctcagcaatactttcccctccccagtactcccttctctcacttcttttccctttccttttgtgcagctattttattacataayttggaagggaatcctagtccaagattgtcagtttacaatgagacaactgagatctggagaggctaagcggcatttccatggccctcggttgtggagagag

SEQ ID NO: 546116 - DNA, 201 bp, Homo sapiens
ctagtgttggggggaggagcaaagaaagctaatatctactttgccctctgaaaacatccttttggatggagtggaaggagaaggacagtggaagaggagartcggttagaagacaaatgtaatatccaggtgcaagaaaatggttactgggactaggatggtgacagtgatattggggtaagtgggtggtttccggagatt

SEQ ID NO: 546117 - DNA, 201 bp, Homo sapiens
gcttagggtttcacaggctgtacaggaagcgtgcttggtgaggcctcgggaaacttacaatcatggtggaaggggaaagggaagcaggcatgtcctacatkgctggagcagtaggaagaaagaatgaagggggaagtgctatacgcattcaaacaaccagatctcttgagaactctatcaagagaacagcaagagggaagt

SEQ ID NO: 546118 - DNA, 201 bp, Homo sapiens
acctcagcttcctaatcagctgggactacttgcatgctaattttacctggttaatttttttattttctgtagagacagggtcccactctgttgcccagggwggtctcaaacatctcagcttcccaaaatgttgggattacagaagtgagacaccgtgcctggcccttgtctctttttaaaattcacaaacctcatttcatt

SEQ ID NO: 546119 - DNA, 201 bp, Homo sapiens
aggcctcgggaaacttacaatcatggtggaaggggaaagggaagcaggcatgtcctacattgctggagcagtaggaagaaagaatgaagggggaagtgctrtacgcattcaaacaaccagatctcttgagaactctatcaagagaacagcaagagggaagtctgcccccatgattcagtcacctcccaccaggcccttccg

SEQ ID NO: 546120 - DNA, 201 bp, Homo sapiens
caggttgaacttgaccaggcttttgctaagtccttaacaggaaatctcagcttttttgtatcctggcactcaccaagaggaactttttggcactgagttaytggaacagcttaaggatgccgcctaaacccagaagttggcgactgctgcagaccttccctcagagagcagctgaaaattattcctattaagtaggaggaa

SEQ ID NO: 546121 - DNA, 201 bp, Homo sapiens
ttgataacatttcccaaacatgtttactcctgtgaagcatatccaattgagcaccatgaagcacacctgctattttaaaattcaaggtagacgtcaggagyggcttacgcctgtaatcccagcactttgggaagccgaggtgggcggatcacctgaggtcaggagttcgagaccaacctagccaacatggtgaaacttcat

SEQ ID NO: 546122 - DNA, 201 bp, Homo sapiens
tctctgctgctttagctgaaaccacagattctccaacaacttctaatctctcagattcctcagctcaactagctggcaccaaatttatcacataagcatgkgtcgaatccttctgctttgcccggcttttttctttgatgttgcagcactgtcattctcctaatcacatattattattttaacattcttcagcaaccagga

SEQ ID NO: 546123 - DNA, 201 bp, Homo sapiens
tttgggaggccgaggtgggcggatcatgaggtcaagagacagagaccatcctggctaaaacggtgaaaccccgtctttaccaaaagtacaaaaaattagcygggcgtggtggtgggcgcctgtagtcccagctactcgggaggctgaggcaggagaatggcgtgaacctgggaggtagagcttgcagtgagctgagatcac

SEQ ID NO: 546124 - DNA, 201 bp, Homo sapiens
gagaagagcaaatgcacctggcctgttgttatgtttcctttagagaaatgtctgttcagatcttttgcccatttttgtttcttctggttttgtttgtttgkttttgttttgtcttgttcaaaccctgtgtcaaggacctttgccctccttttttttttttttgagacagagtcttgctctgtcgcccaggctggagtgcag

SEQ ID NO: 546125 - DNA, 201 bp, Homo sapiens
tgagctgagatcacaccactgcactccagcctgggcaacagacagagactctgtctcaaaaaacaattaaaattttaaaaaaataaaataaaatgctaggyggctggcaagatggctgaataggaacagctccagtctgcagctcccagtgagatcaacacagaaggcaggtgatttctgcatttccagctgaggtacacg

SEQ ID NO: 546126 - DNA, 201 bp, Homo sapiens
gatccttatatgtcaagcctggaaacagaagataatgtcagggcaggtataataatcatagctattattagcagcctcccaaagtgctgggactacaggtrtgagccactgaactcagccccaggtcacttatctttaaggtgaaccttagcatgcctcagaattaccagaaggacctgttcaaacacagggtgctggccc

SEQ ID NO: 546127 - DNA, 201 bp, Homo sapiens
cagctccagtctgcagctcccagtgagatcaacacagaaggcaggtgatttctgcatttccagctgaggtacacggcccatctcactgggactggttagayagtgggtatagcccacagagggcgagctgaagcagggtggggttttgccttactcgggaagcacaaggggttgaggaacttcctcccctagccgaaggaa

SEQ ID NO: 546128 - DNA, 201 bp, Homo sapiens
catggtggcacatgcctgtagtcccatctactggggaggctgaggcacaagaatcacttgaacctgggaggcggaggttgcaatgagccaagattgtgccwctgcactccagcctgggcgacagagagagactctatctcaaaaaaaaagaaaaagaaaaaaaaagaaatcaatgaatgtgtaatttcaaactccaggctg

SEQ ID NO: 546129 - DNA, 201 bp, Homo sapiens
tctactattataattggagacttcaacaattctctatcagaaatggacaggtcaagaaggcagaacatcagtaagcacacagttgaatgcaacaacactaytgaacagctaaatatagttaacttctataaactacttcatccaacaacaacagattacacattcttctcaagctcatatggaacattcacctagataggg

SEQ ID NO: 546130 - DNA, 201 bp, Homo sapiens
acacggcccatctcactgggactggttagatagtgggtatagcccacagagggcgagctgaagcagggtggggttttgccttactcgggaagcacaagggsttgaggaacttcctcccctagccgaaggaagccttgagggactgtgctgtgaggaacagtgcgttccggctcagatactatgcttttcccatggtcttca

SEQ ID NO: 546131 - DNA, 201 bp, Homo sapiens
gaatgcaggcaggaggggaaacgggcatccgcacggggaccggccacatcctaaggctggaggctgccctgatgaaaaaggcccattagcagggaagcaamgggaaaagcattttctaggggggttttccttttttttttttttttttgagacggagtcttgctctgtctctcaggctggggtgcagtagtgtgacctcgg

SEQ ID NO: 546132 - DNA, 201 bp, Homo sapiens
agatactatgcttttcccatggtcttcacagcccgcaaaccaggagattcccttgggtgcctacaccaccagggccctgggtttcaagcacaaaaactggstggctatttagacagacacctagctagctgcgggagttttttcataccccagtggtgcctggaacaccagcgagacagaatctttcactaccctggaaag

SEQ ID NO: 546133 - DNA, 201 bp, Homo sapiens
aaaggtggagcagaggtgactcagggaaaggctgctttcccctaacactggcatttgattaatctcatctcaaatgctgtcactcacccagaaagggcctmaatgtgccttacttccgctgctggagcggtggaatgtggcagcagctgtctggatgatgtggaagcccagcacgaggaggagggaggaaaagtaccagat

SEQ ID NO: 546134 - DNA, 201 bp, Homo sapiens
cccccagagagcctagcaagctaagatccactggcttgaaattctcattgccagaacagcagcctgaagtccacctgggacgcttgagcttggtcaggggmggggcgtccaccattgctgaggcttgagtaggcagttttcccttcacagtgtaaacaaagccatggggaagtttgaaccgcagctcagcaaagccactgt

SEQ ID NO: 546135 - DNA, 201 bp, Homo sapiens
accacacccactgctgcaagaatgaatgaatgagttggccaagaaggtggagctcctatttgctgacaaaaaaatgggacagacaggccgggcgcggtggytcacgcctgtaatcccagcactttgggaggccgaggaggtgggaggatcacaaggtcaggagatcgagaccatcctggctaacaaggtgaaaccccgtct

SEQ ID NO: 546136 - DNA, 201 bp, Homo sapiens
gtatggcccttagagccatttactctctggccctttgagaaaaagctttctaacctgtgctttaaagtattacagttcttcgcatgttttacttttaaatrtcactatttcttattccatttgtcatgtggaataaaatgattgtgatggcctgaatgacatgagcccacacatggtttgactttcttctaatgtttagta

SEQ ID NO: 546137 - DNA, 201 bp, Homo sapiens
caaagccatggggaagtttgaaccgcagctcagcaaagccactgtagccagactgcctctctagcttcctcctctctgggcagggcatctctgaaagaaasgcagcagccccagtcaggggcctataagtaaaactcccatctccctgggacagagcacctgggggaaggggcagctatggagacagcttcagcaggctta

SEQ ID NO: 546138 - DNA, 201 bp, Homo sapiens
taggaaggcttcacaggagaggtgacagcacacctgaaggatgataggagttggccaggtaaagaaagggagggtggaaactccaagcagaagggttgcaygtgtcaagtcagggaaacaggaccatacacatatctgagaaaagagcgaaaggtatgtggggagagaataggaagaggcagaagataaagggcccaactg

SEQ ID NO: 546139 - DNA, 201 bp, Homo sapiens
gttacctgtctgtataactgaaaaggttttgttagagtacatgaaacttttactctagaacaagaacagcttgaaaaaccaacacggaaggaaaatatttratgttcttataataaaacatgtaatgatgttcttgcagtgaaattgaacagactatgatcatttaaatcacaatgttctggaaggtttggacatggtgaa

SEQ ID NO: 546140 - DNA, 201 bp, Homo sapiens
aaacaaattctattgaactgggcactctatagggtctggactcagaaatagtgaggacatgggttcttatctcttggggagacagaaatctataattagtkaatgaaaggtgtaaaagacagcctttaaaggctaagagagcatgaggacaaagcagataacctaggaaggcttcacaggagaggtgacagcacacctgaa

SEQ ID NO: 546141 - DNA, 201 bp, Homo sapiens
catttaagggagggaaaaaaatatttataaaacttaaagagtctaagctataaagtgcagcttgtaaattagggtgtcacttttgactgatgtttgaagakattggttcagtataaggcagtggcacataagtgaacaaattcctaagcgttgtgaggaagaggtgtaaaagcacaaggaaaatgattgcaatctccttct

SEQ ID NO: 546142 - DNA, 201 bp, Homo sapiens
cagaatggtcaggtggaatttaaaacagtccacaacttcacatttatccttcctcatcttccagtaacccaaagcctcagggaaagtcgcagtgttccttrtagtcttagaaaagcacatatctacaagaaagcagattggcctgtgaggatgatgaaccagtgcttctgacaagtttcattctatgacgcaccacgattt

SEQ ID NO: 546143 - DNA, 201 bp, Homo sapiens
atagtgttcatgcagatggacaaggactgaaatgtaatacgtacaaatggtaggtttaggagtgacttttttcttttactctgaaaagttttagtaatcatttttttttgtttgtttgttttttgtgtgtggtttttttgagacagagtctcactctgtcgcccaggctggggtgcagtggtgcaatttcggctcactgca

SEQ ID NO: 546144 - DNA, 201 bp, Homo sapiens
tgaaattattgaaaggttgaaaacagtttaacatattctgtcctacattgggaaataattaaccaagctagttcaaccttttaaactaaactccaagttartccttattaatagatattgaatgtattaagcttctatttatgcaagactttcaaactaggggaaaaaatctatatttcaatgttgggaggtagtatgtta

SEQ ID NO: 546145 - DNA, 201 bp, Homo sapiens
gaaagtgtgaatgattttaggagcgtagtaaatgatttttagggaaaaatgactggacttgaagaatatacaatggcctgggacaaagtctgttgggcccmcagagcagacaacagctgctaaatgattctctttaaaataccaaatgggaccaaaacagaaggcaatggttgatgacaagtttgtcctggtgcattgaca

SEQ ID NO: 546146 - DNA, 201 bp, Homo sapiens
gcagtgttccttgtagtcttagaaaagcacatatctacaagaaagcagattggcctgtgaggatgatgaaccagtgcttctgacaagtttcattctatgaygcaccacgatttcccaccctctccttcatgatgaaggaaagatagaggagctgcctgatgtggcccaatacaatttttaatgaaaagacaatgctgagat

SEQ ID NO: 546147 - DNA, 201 bp, Homo sapiens
cacagagcagacaacagctgctaaatgattctctttaaaataccaaatgggaccaaaacagaaggcaatggttgatgacaagtttgtcctggtgcattgamagacttcagtctttcttcctccaatatgagttaagttaatgaaaactcagggaagggatcaaggtaattgttggcttctttggcaggtctggactataag

SEQ ID NO: 546148 - DNA, 201 bp, Homo sapiens
atgtaatacgtacaaatggtaggtttaggagtgacttttttcttttactctgaaaagttttagtaatcatttttttttgtttgtttgttttttgtgtgtgktttttttgagacagagtctcactctgtcgcccaggctggggtgcagtggtgcaatttcggctcactgcaacctccgcctcctgggttcaagcggttctcc

SEQ ID NO: 546149 - DNA, 201 bp, Homo sapiens
ttctctttaaaataccaaatgggaccaaaacagaaggcaatggttgatgacaagtttgtcctggtgcattgacagacttcagtctttcttcctccaatatragttaagttaatgaaaactcagggaagggatcaaggtaattgttggcttctttggcaggtctggactataagcagatgagacaacttcatcccttacttt

SEQ ID NO: 546150 - DNA, 201 bp, Homo sapiens
ggtctctttggcagctaaaaatttggctctaacaaatgaactagtcaccaacctgattttttaaaaaataaggctcttctatactttggcatagaaaattkatttataagaacagggaaaacttatgttcattgcagcactattcacaatagcaaagacatggaatcaacccaaatactcatcaatggtagactggataaa

SEQ ID NO: 546151 - DNA, 201 bp, Homo sapiens
tgggactacaggcatgcgccactacgcccagctactttttgtatttttagtagagacaggttcactatgttggttggccaggatggtcttgatctcttgaycttgtgatccacccacctcagcctcccaaagtgctgggattataggcgtgagccaccgcacccggcccaaggcataatttttttaagcactaaccctgtt

SEQ ID NO: 546152 - DNA, 201 bp, Homo sapiens
agtcttgcccatgaactctggctagtggtggatggtctccaggaaggcctgtcaaagtttctactgctggtaacaatggctaaaatcctgggatgtatgcrtggcctttctctgtttcaggctaggaaatagcccatatcaagagaatgtgattctcatgaactctgaaccctggagagaaaacaccaagcatgtaaacct

SEQ ID NO: 546153 - DNA, 201 bp, Homo sapiens
ctttggcagctaaaaatttggctctaacaaatgaactagtcaccaacctgattttttaaaaaataaggctcttctatactttggcatagaaaatttatttwtaagaacagggaaaacttatgttcattgcagcactattcacaatagcaaagacatggaatcaacccaaatactcatcaatggtagactggataaagaaaa

SEQ ID NO: 546154 - DNA, 201 bp, Homo sapiens
ccctttttgtctatgtccctagtataatccttaaccttctttcagtgaattttcagtctgcatcttcctacccaaatgtgttcctgctcccacttttggcrggagaaatggaccaccaacatcaggaggagatgcactgccagagatgtgatgttttacctttgctatgaaaattgcatttctgcttgttttaaaaacaca

SEQ ID NO: 546155 - DNA, 201 bp, Homo sapiens
agcaaagagaaagaagactgataaaaagccagatcagctgggcacggtggctcatgcctgtaatcccagcactttgggaggccaaggtgggcggatcaccrgagctcaggagttcaagaccagcctggccaacatggagaaaccccatctctactaaaaataaaaaattagccgggtatggtggtgcatgcctgtaatccc

SEQ ID NO: 546156 - DNA, 201 bp, Homo sapiens
gtgatccacctgccacggcctctcaaagtgctgggattacaggcgtgagccaccgcgcccggctctcatttctgatattggtaatatgtgtcctttttttytttttatctgtctgctaaaagattatcaattttattagcttttgaaaagaaccagctttttatttctttattcttctgtatagtttttctgtttactcct

SEQ ID NO: 546157 - DNA, 201 bp, Homo sapiens
agattaggatttggcctgctagatcatgctggcggcattggccaacatcaaacacgagggggctctggtgacaggacatgacactgcacaatcagagatcwcagcgaatggctttgctgaggtgtccactttactcctgccccgatcacctccccttcctgattgttagtccttttgtttctccaggaagtctcttctcat

SEQ ID NO: 546158 - DNA, 201 bp, Homo sapiens
ggctgcagtgagccaagatcatgccactgcactccagcctggacgacagagcaagactctgtctcaaaaattaaaataaaggccgggcgcggtggctcacrcctgtaatcacagcactttgggaggccgaggtgggcggatcacgaggtcaggagatcgagaccatcctggataacactgtgaaaccccgtctctactaaa

SEQ ID NO: 546159 - DNA, 201 bp, Homo sapiens
tttctactcccatttttaaataatcaatatttcatattgacattgaatactatgtaaattataataaaaagatgggattgttcttgaaagttttttttttwaaggttttgttttgtctttttgtccttttttttttttttttttttttttgagatagagtcttgctctgtcacccaggctggagtgcagtggcctgatcac

SEQ ID NO: 546160 - DNA, 201 bp, Homo sapiens
aaagtacaaaaattagccaggcatggtggtgtgtacctgttgtctcagctattcaggggctgaggcatgagaattgcttgaacctaggaggcggaggctgmagtgagccaagatcatgccactgcactccagcctggacgacagagcaagactctgtctcaaaaattaaaataaaggccgggcgcggtggctcacgcctgt

SEQ ID NO: 546161 - DNA, 201 bp, Homo sapiens
ataatggaaagctatgatggctcaactaacaattccaagccaacagatatgcctccaatacaccagaaaatgaagttatcttaaaaactaaaaaggggctytaagttagcttatctcctatatagtcagtggaaaaaatatatttaccatagacctagacctctatttttttttttttttttttttttttttttgagaggg

SEQ ID NO: 546162 - DNA, 201 bp, Homo sapiens
acactataactaattttagaactgttttatcactgcaaagagaaactccatacccttcagatatcacttcctaatgccaccatcttcctatgctttccccrcccagctctagtcaaccactcacctactttctatctttagcgatttgcctattctggacatttcatgtaagtagaatcatgtaatatgtggtcttttgta

SEQ ID NO: 546163 - DNA, 201 bp, Homo sapiens
cataagctgaacccctcatctctaagaagcagaagaaatcccatcttttcagaagccattctggatttaaaagaatccagaatggcttctgaaaaggattraaatttctggtcaatgagaatatacatgtatcccaattcttgaacgtttgctcaggcacgaagtacacacaagaactttttcttaagactcttgaatttt

SEQ ID NO: 546164 - DNA, 201 bp, Homo sapiens
ctgggcttgatggcatgttcctgtaatcccagctgctctggaggctgaagcaggagaatcgcttgaacccaggaggcagagattgcagtgagctgagatcrcactactgcactccagcctgggcaataaagcaagactccatctcaaaaaaataaataaaaataaaaaataaaatatagctgagatcagataaagggcatt

SEQ ID NO: 546165 - DNA, 201 bp, Homo sapiens
aaattagctgggcttgatggcatgttcctgtaatcccagctgctctggaggctgaagcaggagaatcgcttgaacccaggaggcagagattgcagtgagcygagatcgcactactgcactccagcctgggcaataaagcaagactccatctcaaaaaaataaataaaaataaaaaataaaatatagctgagatcagataaa

SEQ ID NO: 546166 - DNA, 201 bp, Homo sapiens
aaagtatagctgaggccgggcatggtggcacactcctgtaatcccagcacttggggaggccaaggtgggcagatcccttgaggtcaggagttcaagaccakcctggccaacatggtgtaaccccttctctacaaaaatacaaaaattagctgggcttgatggcatgttcctgtaatcccagctgctctggaggctgaagca

SEQ ID NO: 546167 - DNA, 201 bp, Homo sapiens
taagtaatttagggagaaggatggaaaaagaagagtgccatttcgttagaccaacattggaaataattaacgtaacatgagagagttaatgtttctgaatrtgcacactgtctttcttctgagcagatcaactttcttttgaggtaaagacaaagtcatcgatgcactattttggtgtttatttaatgagcgtttctgcat

SEQ ID NO: 546168 - DNA, 201 bp, Homo sapiens
tatgttgcaaagttagtcattttgtcttttgagacactggtttaaaactttgtggtctgatgattactgtacacgctcttcttcgcaatggcagccttccrgatacaaagggtcaagcttgtttgtgtggttggctcactgtcacctaagaacttcccattattggttgtactttaaagtcatgataatgaatgggacctc

SEQ ID NO: 546169 - DNA, 201 bp, Homo sapiens
catgatagtcatgctgcgtggctttcatcggcatgagcagagccttgaagctccaagtccagaattactaacctaggtcccagctctgtgttggcttcagrcccacctcatttgctagttctggaacactagagaagttgtttgaatttccagggacagagcttcttgatttcctaatgtggaatgagaaaagttaataac

SEQ ID NO: 546170 - DNA, 201 bp, Homo sapiens
aaaaagaaaaaaaagtaaaaaaagaaaagaaattgccacaaccacaccaaccttcagcaaccaccaccctgatcatcagcagccaccaacattgaggtaaracccttcaccgcaaaaagattacaactccctgaaggctcagatgatcattagcatttttagcaataaagtatttttaattaaggttcacatattattttt

SEQ ID NO: 546171 - DNA, 201 bp, Homo sapiens
gagcctaattctgttggtggtggtgaaaaagactaataaattaggaagctggaggaaaaaactacagtatatgaaaacaaaaaaagaatagacattacaargaatttctcctttaaagaaatactcgaggaagaaatagggaagcgaaaagactaatcacttcctttccttattcctttttaaaaattactctcttctcta

SEQ ID NO: 546172 - DNA, 201 bp, Homo sapiens
ctgtagattttaatagacaatatcttcttgtatttttatgtactttaatttgactgctggtatgaaatctgcaaccagctgggcacggtagctcctgcctrtaatcccagcagtttgggaggccgagacaggaggatcacttgagcccaagaggtggagaccagcctaggcaacatggcaaaatcccgtctctacaaatac

SEQ ID NO: 546173 - DNA, 201 bp, Homo sapiens
gaaaaaaaaaaaagaatggcaaaaagtaccttaagcaaaggaaaaagcatatctgtgaaaaggacatatagcagatgagaaatatatacaggtttttctgrtaaaatatggtgggtttacattttcacaggccatgacaaagcctatgtgagagaaatagcttctttacttttctataacctgctttgattcttttctaga

SEQ ID NO: 546174 - DNA, 201 bp, Homo sapiens
ggcttaaataaaaacatcttggccaggtgtggtggctcacatctttcatcccagcactttgggaggctgaggcaggaggattacccgagctcaagagttcragaccagcctgggcaatatagcaggactccatctgtgctaaaaaaaaaaaaaaaaaaaaaaattagctaggcatggtggtgcatccttgtagtcccaact

SEQ ID NO: 546175 - DNA, 201 bp, Homo sapiens
aattagccgggtatggtggtgcatgcctgtaatcccagctacttgggaggatgaggtaggagaattgcttgaacttgggaggcggaggttgtggtgagccragatcgtgccactgcactccagcctgggcaacaagagcgaaattccgtctcaaaaaaaaaaccaaaaaaacaaaaaaaagccataacagattatctgaga

SEQ ID NO: 546176 - DNA, 201 bp, Homo sapiens
gagcccgagaggatgaggctgcagtgagctgtgattgcaccactgcactccctcctgggggacagagtgagaccttgtctcaaaaagaaaaggaaaaaaawttttaattaaaaaaaaacttacccaatcatattataaatatatggtactttaacgagctgtcatctctcctagagtgcattttttgtatcagtgatagaa

SEQ ID NO: 546177 - DNA, 201 bp, Homo sapiens
acttgggaggcggaggttgtggtgagccgagatcgtgccactgcactccagcctgggcaacaagagcgaaattccgtctcaaaaaaaaaaccaaaaaaacaaaaaaaagccataacagattatctgagaacagtgagacagctacaacaggtgtaactttacatgagagaggaatacaagaaggagaggatggagaaagga

SEQ ID NO: 546178 - DNA, 201 bp, Homo sapiens
taatcccaacactttcggagacacagcgagacttagtctcaaaaaaaaaaaaaattaaccaggcgtggtggcgcgtgtctgtaatcccagctacttgggargctgaggcaggaaaatcacttgaacccaggaggtggaagctgcagtgagccgagatcacgccactgcactccagcctgggtgacagagtgagactccatc

SEQ ID NO: 546179 - DNA, 201 bp, Homo sapiens
ttcggagacacagcgagacttagtctcaaaaaaaaaaaaaattaaccaggcgtggtggcgcgtgtctgtaatcccagctacttgggaggctgaggcaggakaatcacttgaacccaggaggtggaagctgcagtgagccgagatcacgccactgcactccagcctgggtgacagagtgagactccatctaaaaaaaaaaaa

SEQ ID NO: 546180 - DNA, 201 bp, Homo sapiens
ccaggcgtggtggcgcgtgtctgtaatcccagctacttgggaggctgaggcaggaaaatcacttgaacccaggaggtggaagctgcagtgagccgagatcrcgccactgcactccagcctgggtgacagagtgagactccatctaaaaaaaaaaaaaaaaaaaaaaaagggagagaagagggcttctgcagggaaattccc

SEQ ID NO: 546181 - DNA, 201 bp, Homo sapiens
cgcgtgtctgtaatcccagctacttgggaggctgaggcaggaaaatcacttgaacccaggaggtggaagctgcagtgagccgagatcacgccactgcactscagcctgggtgacagagtgagactccatctaaaaaaaaaaaaaaaaaaaaaaaagggagagaagagggcttctgcagggaaattcccatttttaaagcca

SEQ ID NO: 546182 - DNA, 201 bp, Homo sapiens
gcgtgtctgtaatcccagctacttgggaggctgaggcaggaaaatcacttgaacccaggaggtggaagctgcagtgagccgagatcacgccactgcactcmagcctgggtgacagagtgagactccatctaaaaaaaaaaaaaaaaaaaaaaaagggagagaagagggcttctgcagggaaattcccatttttaaagccat

SEQ ID NO: 546183 - DNA, 201 bp, Homo sapiens
agctacttgggaggctgaggcaggaaaatcacttgaacccaggaggtggaagctgcagtgagccgagatcacgccactgcactccagcctgggtgacagartgagactccatctaaaaaaaaaaaaaaaaaaaaaaaagggagagaagagggcttctgcagggaaattcccatttttaaagccatcagatctcatgagacc

SEQ ID NO: 546184 - DNA, 201 bp, Homo sapiens
gaggctgaggcaggaaaatcacttgaacccaggaggtggaagctgcagtgagccgagatcacgccactgcactccagcctgggtgacagagtgagactccmtctaaaaaaaaaaaaaaaaaaaaaaaagggagagaagagggcttctgcagggaaattcccatttttaaagccatcagatctcatgagacccactcgttat

SEQ ID NO: 546185 - DNA, 201 bp, Homo sapiens
ccatttagaaaaaaatgtgcagcttgctgccagtgctcatttaattttacataaacatgctttttttttttttttttttgagactgagtcttgctctgtcrcccaggctggagtgcagtggcacaatattggctcaccacaacctctgcctcccgggttcaagcaattctcctgcatcagcctcccgagtggctgggatta

SEQ ID NO: 546186 - DNA, 201 bp, Homo sapiens
atgagaatatacatgtatcccaattcttgaacgtttgctcaggcacgaagtacacacaagaactttttcttaagactcttgaatttttcagataattgagyaacataatagaagagattgtcttagagaagcttatagagtgtgaccgtgctttaaaattggatatgtgaaggttcttgacatacatttttaaatttgggc

SEQ ID NO: 546187 - DNA, 201 bp, Homo sapiens
agaggagagaactccttgtgtgcctttaaaggaggcaaaagaataaaagaaagtcccgatacttttctagagagaaggaatgagacatttttaaaagttargagtcagggattgggggagggagagagcatcaggataaatagctaatgcatgctgggcttaatacctaggtgatgggttgataggtgcagcaaaccacca

SEQ ID NO: 546188 - DNA, 201 bp, Homo sapiens
ctccaattgaaaagagttgataaagttacagggaattttccattcactaaattcaccttaatacttacaccaacgtgtcctgctcttcctaaaggaatggyacatccctgttgtctgtctatgtgtactgttgtgtagttatgatttatacttgtggattttctagaactatttatatggagctattaaatgaactgtgat

SEQ ID NO: 546189 - DNA, 201 bp, Homo sapiens
atatatttttaaataagtgtttagcttagtttccaataagaaaatctctgtgtctgtttcaaggaatttgggggtttcttcctggcttttcatgacatccrtctcccctgtcacttaggacactcagtgggtgtctctgtgatcctctggatcctggctagaatgagttatatatgtccacggagtcttacactcatgcca

SEQ ID NO: 546190 - DNA, 201 bp, Homo sapiens
accactgcactccctcctgggggacagagtgagaccttgtctcaaaaagaaaaggaaaaaaatttttaattaaaaaaaaacttacccaatcatattataartatatggtactttaacgagctgtcatctctcctagagtgcattttttgtatcagtgatagaatacagctatttaactagctggatcaaacatcaccttgt

SEQ ID NO: 546191 - DNA, 201 bp, Homo sapiens
ttaatcctcgtgtccccccagtgagggagatattacttgctccatcttaagagcaagatgaaattttttcattaagatgaaaaaattaagaatcttgaagmgtaagtgatttcccaaaaaacatacctctagtaagagatcgcaataccacactccctcccaaacactaattgtatttcctttcctttttcttaccatcat

SEQ ID NO: 546192 - DNA, 201 bp, Homo sapiens
attaagatgaaaaaattaagaatcttgaagagtaagtgatttcccaaaaaacatacctctagtaagagatcgcaataccacactccctcccaaacactaaytgtatttcctttcctttttcttaccatcatttctcaacaatactgctaacgatgtttgccttttacagtcttacaagtgttctgagatgatttaatactc

SEQ ID NO: 546193 - DNA, 201 bp, Homo sapiens
ataatcctttgtctgagcctcattactgctgcacatccctcatatagggaaaacagcagctatatttatttctagcccacttgagcacttattatttcatycttggtttttagctggttctctgaaactgaaatgcatcgtctatcatcccaaatagagattttaaaaaaaaagtttctctcttgatagatttggaggctt

SEQ ID NO: 546194 - DNA, 201 bp, Homo sapiens
gaaaacagcagctatatttatttctagcccacttgagcacttattatttcatccttggtttttagctggttctctgaaactgaaatgcatcgtctatcatmccaaatagagattttaaaaaaaaagtttctctcttgatagatttggaggctttctaagtctaatcttttctctgtaaaacttcaggctaggttttaataa

SEQ ID NO: 546195 - DNA, 201 bp, Homo sapiens
ttgatgtgttctacatctcttgatgtgttctcttgatgtttgaccttttctcacctgatttcatctaccatcagctccttctctgtaactgatcagtaagrgcactcagtaggaaacataccactcaatggattttcttcctcaaagttttggatatggccgggtgcggtggctcacacctgtaatcccaacattttggga

SEQ ID NO: 546196 - DNA, 201 bp, Homo sapiens
tcatctaccatcagctccttctctgtaactgatcagtaagagcactcagtaggaaacataccactcaatggattttcttcctcaaagttttggatatggcygggtgcggtggctcacacctgtaatcccaacattttgggaggctgaggcgggtggatcatgaggtcaggagttcgagaccagcctggccaacatggtgaa

SEQ ID NO: 546197 - DNA, 201 bp, Homo sapiens
ctccagcctgagcaacagaacaagactccatctcagaaaaaaaaaaaaaagaaagaaagaaaacaagctttggatactagtcttcaatcaatcaaataatkcttataaataatgaggatgctctaggagtcctgtgttatcagtgctttccctagaacccagttagaggccagtgcctacaccccacaccagtcctcagag

SEQ ID NO: 546198 - DNA, 201 bp, Homo sapiens
ctgcatcagcctcccgagtggctgggattacaggcccacgccaccacacctggctaattttttttttttttttttttttgagacggagtctcgctctgtcrcccaggctggagtgcagtggcgcgatctcagctcactgcaacctccgcctcccaggttcaagtgattctcctgcctcagcctaccgagtagctgggatta

SEQ ID NO: 546199 - DNA, 201 bp, Homo sapiens
gggttaagataaggggttgtgttatgcaggtgaagcctccaggtagcaggtttcagagagaataggtcataaaagtttcttatcagacttaaaaaaaaaaatgccaaactctcagttaattctctcctgggttatgttagtatcttattgctacaaagagtctgctttggcagtctcaagatgtctgttttaatgttaacg

SEQ ID NO: 546200 - DNA, 201 bp, Homo sapiens
aagcatgagatttggagggggacacagatccaaaccatgtgacttggtctcttagtaatcacacagctggctttttggggaagaaagttacttatttcatrtgaacccaagcataaggaatctgcagatttttttccagcaatatcgatttatgtaaatactttatattccattcttggaggagacaagcatttcatttag

SEQ ID NO: 546201 - DNA, 201 bp, Homo sapiens
gctgggattacaggcccacgccaccacacctggctaattttttttttttttttttttttgagacggagtctcgctctgtcacccaggctggagtgcagtgrcgcgatctcagctcactgcaacctccgcctcccaggttcaagtgattctcctgcctcagcctaccgagtagctgggattacaggcacacaccaccacacc

SEQ ID NO: 546202 - DNA, 201 bp, Homo sapiens
ccaccacacctggctaattttttttttttttttttttttgagacggagtctcgctctgtcacccaggctggagtgcagtggcgcgatctcagctcactgcwacctccgcctcccaggttcaagtgattctcctgcctcagcctaccgagtagctgggattacaggcacacaccaccacacccagctaatttttgtaatttt

SEQ ID NO: 546203 - DNA, 201 bp, Homo sapiens
ggagtgcagtggcgcgatctcagctcactgcaacctccgcctcccaggttcaagtgattctcctgcctcagcctaccgagtagctgggattacaggcacayaccaccacacccagctaatttttgtaattttagtagagacggggtttcactgtgctggccaggatggtcttgatctcctgacctcgtgatccggtcatct

SEQ ID NO: 546204 - DNA, 201 bp, Homo sapiens
ttagtagagacggggtttcactgtgctggccaggatggtcttgatctcctgacctcgtgatccggtcatctcaccctcccaaagtgctgggattacaggcrtgagccactgcgcctggcccatttttctcattcttaactgatctaacagataagtttgttcaaaatactaatagcaaaaatgtatttaaatatatgtaca

SEQ ID NO: 546205 - DNA, 201 bp, Homo sapiens
ttcgctccttagaaaatattttaatcagccacagctctttcctgacggtaccagtggctgagctccggaaaaataagaaaggatgtggatgggatatggtragtgccaagagattccccctctagtttagtactgctttccttgtgtttgggcttgttttagaaaaacaagccagccgaccatgacggctgactccatcaa

SEQ ID NO: 546206 - DNA, 201 bp, Homo sapiens
ggctgagggagaagaatcacttgaacccaggaggcagaggttgcagtgagctgagatcgtgccactgcaccccagcctgggcgacagaacgagactccgcaaaaaaaaaaaaaaaaaagtggattggattcgtggtaaatgcataatgcaaactctagggctctagggtaaccactaaaaagaggtaaaagaaaaataaaa

SEQ ID NO: 546207 - DNA, 201 bp, Homo sapiens
ttttcaatatggatgaaacctttctattctggaaacagatgcctgaaaggactttgatccatgaggtagaccaaagcaatgccaggcttcaagtcttttarggactggatgacagtcttgcttgggggcaatgttgcaggccacaaattgaaaccctttgtgatttggcatgttgagaaccctaggggcttcaagcatatc

SEQ ID NO: 546208 - DNA, 201 bp, Homo sapiens
tttgatccatgaggtagaccaaagcaatgccaggcttcaagtcttttaaggactggatgacagtcttgcttgggggcaatgttgcaggccacaaattgaamccctttgtgatttggcatgttgagaaccctaggggcttcaagcatatcaatacacacacacttggccagtgcactgcaggagatataagaagtcgtgggt

SEQ ID NO: 546209 - DNA, 201 bp, Homo sapiens
aatcttgctaccgctccaaaaaaaaaaaaaaaaaaaattgtacagctgtataaaaatattttgtcttcatatgcttacaggctttttcctagtcttaaactttttttttttttttaactttttaaactgttgttaaaaactaagacacagacataattagcctaggcctacacagggtcaagatcaatggtattaccattg

SEQ ID NO: 546210 - DNA, 201 bp, Homo sapiens
acctgccttggcctcccaaagtgctgggaaagtttttttttaaaacaaatttttttaagcttatagaataggcatatgaagatagaaaatatttttgtacrgctgtacaatgtgtttgttttgggggtttttgtttgtttctgagacggagtctcgctgtgttgcccaggctagagtgctgtgctgtgatcttggctcact

SEQ ID NO: 546211 - DNA, 201 bp, Homo sapiens
gtcaatgctagtaagactgctgacaaaaagctcaaccttgggaaggaagatgacagttcctcagacagttttgaaaatttggaagaagaatccaatgaaastggtagcccttttgaccctgtttttgaagttgaacctaaaatctctaacgataacccagaggaacatgtactgaaggtaattcctgaggatgcttcagaa

SEQ ID NO: 546212 - DNA, 201 bp, Homo sapiens
tgctggggtttaacatgaaagaattaaataaagtcaagcatgagatggattttgatgctgagtggctatttgaaaatcatgatgagaaggattccagagtyaatgctagtaagactgctgacaaaaagctcaaccttgggaaggaagatgacagttcctcagacagttttgaaaatttggaagaagaatccaatgaaagtg

SEQ ID NO: 546213 - DNA, 201 bp, Homo sapiens
aagccattctcccacctcagcctcccaagtagctgggactataggcatgcaccatcacacctggctttttacatatatatatatatatatatatatacacktaaatatatgtattttttcaggctggtcttgaactcttgggctcaagcaatcctcccacctcagccttccaaagtgctgggagctgtgagctacacctgt

SEQ ID NO: 546214 - DNA, 201 bp, Homo sapiens
gtgtataaaccacagcaagctgaggttattattgaagaaaaaatattttttagggctcggcacagcggcttgcaatcccagcactttgggaagccaaagcrggaggattgctcgagcccaggagttcaaggccagcctgggcaacagagggagaccctgtctctacaaaatttaccctagtgtggtggcacacacctgtag

SEQ ID NO: 546215 - DNA, 201 bp, Homo sapiens
cccatgcatggcagcttagccggagttaaactgagcagccaacaggcctaagtgccaggttccctggcgttggtgacatgctgcagcctggaactctgatmtccagtgtgactgcaaagctgtcttctcactggtactgccttgtgagtactggttggactgtggggcatgtggccgctgcagttccagtggttatttcta

SEQ ID NO: 546216 - DNA, 201 bp, Homo sapiens
cgcgattgcttctcttcctcttctgcccaagaccaagactctaggtctgatatcctttttagccacacacacacaccccccacacacgaagtcttcttaaycttcttgaatttaccagttactctggacacttcttgccataaccccatttcacagacaaaggcttaggagggaaaaagaaccaaactgtttctgtgtttg

SEQ ID NO: 546217 - DNA, 201 bp, Homo sapiens
ctgaaactagggaaacctgggggaaactctcatggacattggtctaggcaaagaattcatgactaagacctcaaaagcacaagcaacaaaaccaaaaatasatgggacttaaactgaaaaagtttctgcacagatacaaatatcatgcatatggttttaatttatctgtagcctagggcctagatgaatcttagattttca

SEQ ID NO: 546218 - DNA, 201 bp, Homo sapiens
tggcagccacagtcacagaggaaacttgtggaaaacccaagatctgtcatctgcaaatagaatgctttctcttgaggcacctggtacaaaatctgtttttktttttttttttttttttttttttttttttaactgaaaaacaaacacccttgagtttttcagttcaccttttgttaaggagcagagcctgcatatatatgt

SEQ ID NO: 546219 - DNA, 201 bp, Homo sapiens
gaaatatggtggaatttattaaaattttcaattcgaattataaatttaggttgacagaatccttgctcttgtgaaagaagtgagctgagactgggagtatscaaatgcaagaagtgctcagaatcctgcttcaagatcagttacacttaaaaacagcaacaagaggatgggtgcggtggcttacatctgtaatcccagcac

SEQ ID NO: 546220 - DNA, 201 bp, Homo sapiens
cggctaatttttgtatttttagtagagatggggtttcaccatattcgccaggctggtctcgagctcctgacttcgtgatctgcccatcttggcctcccaargtgctgggatttcaggcatgagccaccacacccggcctggattaatcctcttaaagtgccattagaatcatgtcccttctgtacttcgttacctgcagca

SEQ ID NO: 546221 - DNA, 201 bp, Homo sapiens
gcctgtaatcccaaaactttgggaggctgaggcaggagaatcacttgaggccaggagttcaagaccagcttgggcaacataatgagaccctgtctctaccaaaaaaaaaaaaaaagtgaaacaattgggcttgaagactggaatttatagtaggtaaactatatacttcattaaagtatagtaaaaggttcaattaactag

SEQ ID NO: 546222 - DNA, 201 bp, Homo sapiens
tttaattcctggtgctttgtcttttgtttttgctgttttgggttttagaactactttatatcctgcgaaattgtgttagatttggattattaaattgatamatttttaccatattatgggaagcatttctgatctcattagaaaccatacatattctcagctgcccaggttttactgattttattttctcattaaagacaa

SEQ ID NO: 546223 - DNA, 201 bp, Homo sapiens
acccagctcgctcatgggcaagcagttgcttcacctcagctgctaatttgtaggatgagaagagtttagattaggcagctcctaggttctttcagtgattsagagtgctgctttttcataacagatttctgttgatggtgtgatttggaagatgaatctcaatcttttgactttcctaaggcctgcactggacacttgttt

SEQ ID NO: 546224 - DNA, 201 bp, Homo sapiens
agatcctgcagactttaccttgagcctgctaaactgggactgtcatctgttgggtgatgccattgcactccagcctgggcaacaagagtgaaactgtctcaaaaaaaaaaaaaagaaaagaaaagaaatctgggttttagtgtatccatcacccaaataatgtacaaggacatctttttcagttagtgttggtaggaaaat

SEQ ID NO: 546225 - DNA, 201 bp, Homo sapiens
ggctataagcttcacctgtgaaccttttcttttcccctcgttttactcttaccccagtatcctattatctcatacctaaggcagtgatggtttctcagacytcttagattgagaagatgtggcatgggtgtaaggtccctcaggtaattctgagggttgggtaggtctggtatctactcttttacttaattgacttcctcc

SEQ ID NO: 546226 - DNA, 201 bp, Homo sapiens
agctcctgacttcgtgatctgcccatcttggcctcccaaagtgctgggatttcaggcatgagccaccacacccggcctggattaatcctcttaaagtgccrttagaatcatgtcccttctgtacttcgttacctgcagcatctcctcggtgcctaccagacatggcagcagactccagcttcacattcaagatccccatcc

SEQ ID NO: 546227 - DNA, 201 bp, Homo sapiens
gatttagtttgtgacacatctgatacatcgcctcttttactgcaaatatttattggatgtcatatctgtaagccttttctaggcagagattcattcattcwgtctgaatttattgagtgcctgctttgttctagtcattgacatagatgatagagatacagcagggaaaaaaaccaaagttccagggtctccctttgtaac

SEQ ID NO: 546228 - DNA, 201 bp, Homo sapiens
tgaggtgagaggatcacttgagcccagaaggttgaggctatggtgaatcgtgagtgcactgcagtcaatgaaccatgagtgcactgcactccagcctgcgygacagagtaagactctgtcttaagaaaaggaaggaaggatggatggatggatatatcaagccatatgcacatgaaagcaggtgtgtgtctgtgtgtgtac

SEQ ID NO: 546229 - DNA, 201 bp, Homo sapiens
cgcctcttttactgcaaatatttattggatgtcatatctgtaagccttttctaggcagagattcattcattctgtctgaatttattgagtgcctgctttgktctagtcattgacatagatgatagagatacagcagggaaaaaaaccaaagttccagggtctccctttgtaacgcaggctggagtatagtggcaccatcat

SEQ ID NO: 546230 - DNA, 201 bp, Homo sapiens
atattgtagtagcctgattgtcttcctaatttttattaacttagaaaatacagataccttttttttttttttttttttttttttttttttttttttttgaracagagtctcactcttgcccaggttggagtgcagtggcgtgatctctgctcactgcaatccccacctcctaggttcaaacgattctcaggcctcagcctc

SEQ ID NO: 546231 - DNA, 201 bp, Homo sapiens
tgattgtcttcctaatttttattaacttagaaaatacagataccttttttttttttttttttttttttttttttttttttttttgagacagagtctcactyttgcccaggttggagtgcagtggcgtgatctctgctcactgcaatccccacctcctaggttcaaacgattctcaggcctcagcctcccaaatagctggga

SEQ ID NO: 546232 - DNA, 201 bp, Homo sapiens
tttttttttttttgagacagagtctcactcttgcccaggttggagtgcagtggcgtgatctctgctcactgcaatccccacctcctaggttcaaacgattytcaggcctcagcctcccaaatagctgggattacaggtatgtgccaccatgcccagctaattttattgtatttttagtagagatggggtttcgccatgttg

SEQ ID NO: 546233 - DNA, 201 bp, Homo sapiens
agccatatgcacatgaaagcaggtgtgtgtctgtgtgtgtacacactagatgaggatatctatgcaccttttttgtcagatgggtaggttttatgatcctrtcatcagtggaattagtaaatattacaagttgtacgtgttttgactttgacttaaatttttttttccaatagaaactatgttccaacttcctgtcaacaa

SEQ ID NO: 546234 - DNA, 201 bp, Homo sapiens
gtgtatccatcacccaaataatgtacaaggacatctttttcagttagtgttggtaggaaaattggattgccatagtgcagaagaatgaaactagacccctrtctctcaccgtatgcggaaatcaactcaagatagaaaaaagactcaaagtgagacctgaaactagggaaacctgggggaaactctcatggacattggtct

SEQ ID NO: 546235 - DNA, 201 bp, Homo sapiens
cacctgtaatcccagcactttgggaggccaaagccagcagatcacttgagctcaggagttcaggaccagcttgggcaacatggcaacaccccatctctacaaaaaaaaacacacacacacacacaaaatatagccaggcgtctaggtagtgtgcacctgtagtcccagctggtggggctgaggtgggaagatcacttgtgc

SEQ ID NO: 546236 - DNA, 201 bp, Homo sapiens
ttgagaaaaagctcacctacaaatgtatccattgccttggtgtgtataccagcaacatgaccgcctcaactatcactctgcatctagttcactgcaggggygttggaaagacccaaaatggccaggataagacaaatgcaccctctcggcttaatcagtctccaagtctggcacctgtgaagcgcacttacgagcaaatgg

SEQ ID NO: 546237 - DNA, 201 bp, Homo sapiens
agctcacctacaaatgtatccattgccttggtgtgtataccagcaacatgaccgcctcaactatcactctgcatctagttcactgcaggggcgttggaaaracccaaaatggccaggataagacaaatgcaccctctcggcttaatcagtctccaagtctggcacctgtgaagcgcacttacgagcaaatggaatttccct

SEQ ID NO: 546238 - DNA, 201 bp, Homo sapiens
tcccagcactttgggaggccaaagccagcagatcacttgagctcaggagttcaggaccagcttgggcaacatggcaacaccccatctctacaaaaaaaaacacacacacacacacaaaatatagccaggcgtctaggtagtgtgcacctgtagtcccagctggtggggctgaggtgggaagatcacttgtgcccaggaagt

SEQ ID NO: 546239 - DNA, 201 bp, Homo sapiens
cccgggttcaagcgattctcctgcctcagcctcccgagtagctgggattacaggcacgtgccactacgtccagctaattttttgtatttttagtagagtcrggttttcaccatgttggccaggttggtctcgatctcttgacctcgtgatctgccctcctcggcctcctaaagtgttgggattacaggcgtgaggcaccat

SEQ ID NO: 546240 - DNA, 201 bp, Homo sapiens
agtaacacgcatggagccatcatttcctgtgatggcagtgtcgtcttctagatacctcctgaaggatctggctgaggctgttttagagttaactttttttwaaaaaatatagaagtaagtggtacactcaaataatgattaaaaactcattaccggccgggcgctgggctcatgcctataatcccagcactttgggaggcc

SEQ ID NO: 546241 - DNA, 201 bp, Homo sapiens
gctgaggctgttttagagttaacttttttttaaaaaatatagaagtaagtggtacactcaaataatgattaaaaactcattaccggccgggcgctgggctsatgcctataatcccagcactttgggaggccgaggcaggtggatcgcctgaggtcaggagttcgagaccagcctggccaacatggtgaaaccccctctcta

SEQ ID NO: 546242 - DNA, 201 bp, Homo sapiens
aaagttacaaggaagcagaattaggccaacatttccagcaattaaaacaatgatgggaaactccaatccatgaggaggctggtcagtcacctcaaggatastggcctaaagaagtctgaagtggctgatgtccataacttctgagtctgtttccaaaagaaagactcttgttaatgctgttaccagagagtagagatttga

SEQ ID NO: 546243 - DNA, 201 bp, Homo sapiens
cctcctattacccctacgctatatggtatggcctgttgctcctaggctacaaacttgtatggcatgttactataagagaatactatatactgaatactatragagtgattaacacaatggtaagtatttgtgtttctaaacatagtgaagcatagaaaaggtacagtaaaaatgcaatataaaagaaaaattggtacacct

SEQ ID NO: 546244 - DNA, 201 bp, Homo sapiens
cccaaattaagatactacagattaccaaatcagaaataaccagctggatttaggccagctcacatttatttggaaattaccctccctgattaacaggcttytgagttgtacgtggaggactaatgagacttgtacaagacaccacggggcttggggtccaggtcccagttggatatcggaacagacacagataagtgtgtt

SEQ ID NO: 546245 - DNA, 201 bp, Homo sapiens
gtccaggtcccagttggatatcggaacagacacagataagtgtgtttcctcattaaggtggtgagagtgtgccttttggcattcagaaaagggtttagccmccctaagagttggaaataaagattcccaactggaaatgttgcagaatccctacaagtgtctcaataaaagccattttaaaagaatattgttgctactgtt

SEQ ID NO: 546246 - DNA, 201 bp, Homo sapiens
gatttagcgaatgggatacagtgttgaatgatgtcctaagtggtaacagccattttcccttaaaggaaaacttgctgtgagctcttagaaagcatgtattytactgtttcaaaggtttcttggttttaacactcaaaaaataaggtgaggccaggtgaggtggcttacgcctgtaatcccaaaactttgggaggctgaggc

SEQ ID NO: 546247 - DNA, 201 bp, Homo sapiens
gctgaggctggagaattgctcaaacccgggaggcagaggttacagtgaggcgagattgcaccactgcactccagcctgggggacagagtgagattctgtctttaaaaaaaaaaaaaaaaaacgcaggaggactgggttcagagagcttccagatagttgaacacacctggagggtggcgcccccagagagggtatggaagc

SEQ ID NO: 546248 - DNA, 201 bp, Homo sapiens
atttttggcattagtgttaaggtttctttctccctaagagtaataattacctgtattttagtttttagctctctttgcattcgaaagtgaggaaagggccytgaatttcaggcagagacaatttcttatctattctgttcccacccctcagttacttaagtatggatcccttgtccacatttataaaggagaatcaaatag

SEQ ID NO: 546249 - DNA, 201 bp, Homo sapiens
ggggacagagtgagattctgtctttaaaaaaaaaaaaaaaaaacgcaggaggactgggttcagagagcttccagatagttgaacacacctggagggtggcrcccccagagagggtatggaagcccagtgcccttacgcatttctttatctgtactttttataataaaccggtaaacataagtgtttccccaagttttgtga

SEQ ID NO: 546250 - DNA, 201 bp, Homo sapiens
aatacaattttaggtgaactcttaaattgatgaagggtcggggggccagacctctggctgcccagctttcaccttgtccctcaggcatcatcttccctctrtttgtatacatatcttaaactcttagaggagttcagcctgaaaacaactggttctactggtgtactggaaattctggtggtcactgctagaattcttgcc

SEQ ID NO: 546251 - DNA, 201 bp, Homo sapiens
catttctttatctgtactttttataataaaccggtaaacataagtgtttccccaagttttgtgagatgctccagcaaattaatagaactcaaggagggggwcttgggaaccccagcttgaagtgtcagtcagaagttctggaggcccagacttacagttggagtctgaagaaggagagagcagttttggggactgagcccc

SEQ ID NO: 546252 - DNA, 201 bp, Homo sapiens
tgcttatgccataagaaaacagacctctagaggttaaataacatgtgtaggatcacaaagcttgtaagtggcagagcaaggatttaaatacagatctgtcyaactgtagggtggaccactgcatctttattttctagcaaagaaaagctttactgtgctatgtcaccctacctcttgttaaggaggtttgaagttataagg

SEQ ID NO: 546253 - DNA, 201 bp, Homo sapiens
acatctgttttttgaaaagctggcctgttatttaagaataccaaggttgtggttttcattttacaagatattaccattatgatttgcatagaaagagattsttcaaatgtgactatctagtgactcttggcctccatggtgatggtaagagtgatttaagacaagtgtccttagagctgaattcttctctggatgtgatgg

SEQ ID NO: 546254 - DNA, 201 bp, Homo sapiens
tgtcagtcagaagttctggaggcccagacttacagttggagtctgaagaaggagagagcagttttggggactgagcccccatcttgtggaatatgacactrtatccaggtagacagtgtcagaaccaaattagaggatactcagctggtgtccgctgcttgggaaaaaaccctacacgtttggtcacagaagacaacttca

SEQ ID NO: 546255 - DNA, 201 bp, Homo sapiens
ttccagttgtgggcaccagtcttgtagtctgaaaatcttcctaaaagaccagtgactccacatattttttaaaacttaagatacgcaaaatctagatgacrcctttatgtttctacataactgtaagtcacctgggtttatttaagatagttgcagatgttcagttgcctaaatattttaagtgtcactgagcttgttaag

SEQ ID NO: 546256 - DNA, 201 bp, Homo sapiens
gctctgttgcccaggctggagtgcagtgactgcaacctccgcctcccggattcaagcaatttttctgcctcagcgtcctgagtagctgggattacaggcgcacaccaccacgcccggctaatttttgtatttttagtagagatggggtttcaccatattcgccaggctggtctcgagctcctgacttcgtgatctgcccat

SEQ ID NO: 546257 - DNA, 201 bp, Homo sapiens
gtgaacactctaccatttttttttctttaagtacttaaaggttttggggccacctaggttccattaatgtattaccactcatattaaatgattatagtgtyaaaaatggtctggaaatttgtatagaccttcaaaatgctgtgttacatccacggtttgttctagaggttctctccttttctgggtaatattaacaaatgc

SEQ ID NO: 546258 - DNA, 201 bp, Homo sapiens
aaacacacttaggctacataaaaagtaaaactttaaaattcttaacttctgaatcttttgtaataacacttagcttaaaacacaaacacggcaacctgccygggtccccttccacactgcggaagctttgtcctttcactcttcataatgaatcttgctaccgctccaaaaaaaaaaaaaaaaaaaattgtacagctgtat

SEQ ID NO: 546259 - DNA, 201 bp, Homo sapiens
acctatattgggcacttgcgggactggaagttgctctgagtggtgactgaatatgaagggacattattgtacatcactgtagactttataaacacacttargctacataaaaagtaaaactttaaaattcttaacttctgaatcttttgtaataacacttagcttaaaacacaaacacggcaacctgcccgggtccccttc

SEQ ID NO: 546260 - DNA, 201 bp, Homo sapiens
aaaagctagccctctgtataagagggtttgagcatcccaagaatactgtatctttgatctacatttgtttggaaaaaatccacatataagcagttcaaacytatgttgttgaagagtcaactgtatagtaaatactaggtgacagaaatttttcagccccgttataatcttgggggaacatagtcccatatgcagtctgta

SEQ ID NO: 546261 - DNA, 201 bp, Homo sapiens
ctgccctacagtgagcagcccacacaggaacgctcctctcgcgagcggcccgggcagggaccctgtcccaacaccaacacctcctctccagcccaatcttytgggtccagacctgcttgtcccttttttagaaaacacttttaaactttttaaaaattttaaaccttttttcagcagatatggagagagctgacaatcaat

SEQ ID NO: 546262 - DNA, 201 bp, Homo sapiens
tagggaagggattttggctcaaaacgatctgaccacctctgccctgtccaccaggataagtgacacctaggacccaggaaataaatgccgatgatttgtgwgactggtttaagattatttctccttaaccttgcaaaaacaggggttgggccttattttccccaagtccacaattagccggacttgccccaggcttctaga

SEQ ID NO: 546263 - DNA, 201 bp, Homo sapiens
gctaggtgaaagctgtataaccctttatagcctcatcttggaggtgacacaaaatcatttttgttgcattctatttgttagaggtcattaaggccagctcrttcggggaaattgaaattaaactctacctcccgagaggaggaatgtcagataatttgcagacatgtttcagaaccaccacagagatacccagtttccccc

SEQ ID NO: 546264 - DNA, 201 bp, Homo sapiens
ggcctgccctacagtgagcagcccacacaggaacgctcctctcgcgagcggcccgggcagggaccctgtcccaacaccaacacctcctctccagcccaatyttctgggtccagacctgcttgtcccttttttagaaaacacttttaaactttttaaaaattttaaaccttttttcagcagatatggagagagctgacaatc

SEQ ID NO: 546265 - DNA, 201 bp, Homo sapiens
gagaagaaaccacatttaagtcaggcctgccccatggtcagtggcagagtccagcaatctctaggttggaagatgtttgagtctcaggccccaaggactcytctggacaggcatccgggactcttcctgtccccctgccccctagcccaggtccctccacttctcgctatccccacagctatacctggctctggccactca

SEQ ID NO: 546266 - DNA, 201 bp, Homo sapiens
agaatgtaaaacactgtatttactatgcaaaaagaaatagaagccaagataaaaacgtcacaatgggccgggtgtgatggctcacgcctgtaatcccagcsctttgggaggcctaggcaggtggatcaccaggtcaggaattcaagaccagcctgaccaacatagtgaaaccccatctctactaaaaatacaaaaaattag

SEQ ID NO: 546267 - DNA, 201 bp, Homo sapiens
gaaaatgtattgagagatgtgtgtattctctacctttgttttattccttttacaaaaactataaggaatagtgcttaacagtgtactgtcaaaacactgamatctatttacaggaagttcatttctgaccagaattgtttgtttgtctctccaaagcttgccaaattctataggttttatgtaagtttataaatattcttg

SEQ ID NO: 546268 - DNA, 201 bp, Homo sapiens
gatagtcttgatctcctgaccttgtgatctgcccacctcggcctcccaaagtgctgggattacaggcgtgagccaccgcgcccggcccaacattttccttktacttggtaaatgcattcttggaaaatacattgcctctaaaatcatgcaaaagtactttgctacagacaaaaaggagtggagttctaggttcagataact

SEQ ID NO: 546269 - DNA, 201 bp, Homo sapiens
catttattctgttgtattctaccaccaccactttgttccacaaaaggttatacagcagatttttatttatttaaccattaagagtgtctccccgtgtattkgaatcggctaggaaatattcgtaattgctacacttttctatataaaaagggacttgaagcagactcagggccaacacaatgtagaatctgtttcttctag

SEQ ID NO: 546270 - DNA, 201 bp, Homo sapiens
ctagctacttgggaggctgaagtgggaggatcacttaagcccaggagtttgaagttacagtgaactatcatcacgccactgtacttactccagcctgggasacagagtaagaccctgtctccaaaacatatatatacatatatgtttctgccttcagaacacttcacaagtatcattccagtaaaaactgaaaatcataga

SEQ ID NO: 546271 - DNA, 201 bp, Homo sapiens
gtaaaatgtctcatgaagtcatgtgagagttaattgttataaagcttggccactcgaaggggcttaatgaatgtgagttatcttcctttctcccagtcctrattttgcaaacctacctactccgtgtttctgctaatcaccagaatgaaacttaaaaaaaaaaagaaaaagctgatggtttaatcttgattttcagtgtca

SEQ ID NO: 546272 - DNA, 201 bp, Homo sapiens
caccaagattgaaagcaactgaaaatgaaaatgatatttccggggaggctaataacttacggagctttcctgtggcctcagggtcattgttctctgttagscaatccttagaaattgctagaactcataggaatgcagagttgtatgatgagaagaacaagaacttgggtttcagggagatcagggtaaccttgggcaagg

SEQ ID NO: 546273 - DNA, 201 bp, Homo sapiens
tgtttttgattctctggttatacttgaggtagagtaaatgattctaaccagcactggaaccattaaaggaatgtagggcctcgtcagtattagttggttgsagaggggaaggaagttaggaccaggcaggaatgagtgggtggagaaactgactcagccgtttggttggcttctaggcatgggaattcagcggagggagcc

SEQ ID NO: 546274 - DNA, 201 bp, Homo sapiens
gctttttttttttctttctttttgacacagagcctcactcttttgcccaggctggaatgcagtggcgtgatctccactcactcactgcaacctctgcctcytgggttcaagcaattatcctgcttcagccacctgagaagctgagattacaggcacgtaccaccataccccactaatttttgtatttttagtagagacagg

SEQ ID NO: 546275 - DNA, 201 bp, Homo sapiens
ggtctctggaaagcagcagaacagtccatctggatcactgcttggtggctgggcatgctgggtcctccccgggcctcctgctgcggatgtatgatctaaayttgccgaggctcagctacacagcaaggttctcagagagtggcagtctccatcctactgtgaaaggaggggcagttttccaaggacttccttgctttcctg

SEQ ID NO: 546276 - DNA, 201 bp, Homo sapiens
ggacacacagtgcagtgtctgagcagtgtgtgaagagactcccttactgtctgaagggcttcactcaccctacactagtgagaagcctctgaatattgtcwtggaagggaagcattcacatattaagggtaaaatcaaagtcagagcaaaatttaaagtctgctctttgcccctcaagaccctgaaagtccccagtgactg

SEQ ID NO: 546277 - DNA, 201 bp, Homo sapiens
gtgcccctggtgctgtaaaagtacaactgtcctgtggatgccccaagtacaaccacgaaaatgcatgcccagcaccccaaacatgtcaacatgtttgaacrtagtatattcaccccataagtggtagccaattttttattttattaaatattaaataaattaattttaaacacatttttgttttgttttactcttatcatt

SEQ ID NO: 546278 - DNA, 201 bp, Homo sapiens
cgtcatgcagctagcaattggtggagccccgattcatacaggctctgacccatagcttaagcttacttgcctcccccattcccacccctcacccctcttcrgctctgtctccttgcaatgggggcagaaaatccagcctttatttctccaggtcctagtagtcctgggagtctgggggatttccagctcctttgaattccc

SEQ ID NO: 546279 - DNA, 201 bp, Homo sapiens
tgatttcaaatattataggctggacatggtgactcacacctgtaattccagcactttgggaggctgaggcgggagttcgagaccaacctgggcaacatagygaaaccctgtttctataaaagaaaaaaaaaaaatccaaaaagtagctgggcatggtggcgtgcacctgtagtcccagctactcaggaggccaaggtggga

SEQ ID NO: 546280 - DNA, 201 bp, Homo sapiens
tgcagcactccatggaaattccatgggccaaacacagtgcagagggggttccctggctggagttgagtctggaggtgtccatgaatgaatctgaactttaycctgatggctctgaatggaaagtcgctggagggctttaagcaggggagagttgtgagtcaggcttaggaaggagactgtctagcttcagtttgggtaagg

SEQ ID NO: 546281 - DNA, 201 bp, Homo sapiens
cttagtactataaagaattctaattatgtaggacattcatccagccactcctcccaccacacacacacacacacacacacacacacacacacacacacacmtatatctgtctgagataataattagatactgtgggaagagaaatgaaatatccctgatggttttaataattttctgcagtgtttgtttggacaagaaaat

SEQ ID NO: 546282 - DNA, 201 bp, Homo sapiens
ccccacccacataccgctgtatttcaagtttagctctaattttaatttctccctgggcaaagtctcatgtttgtttgcatatctcaaaggtgcttgtgttstgggctccaatcactactatctgcaattggttagagcctgcggccatcatttatactttcctggacgtgtgtgtagattcatctactgctaagaaccctt

SEQ ID NO: 546283 - DNA, 201 bp, Homo sapiens
taattgtaactatgtacccgttgaccagctttccatcctttcctctcctctcccctccccagtctctggtaaccactgttgtattctctccttctatatcmacttttttttttttttttgacagagttttgctctgtcacctaggctagagtgcagtgtcatgatcttggctcactgcaagctccgcctcctgggttcacg

SEQ ID NO: 546284 - DNA, 201 bp, Homo sapiens
attgtggattttttttttctgattgcaaaattagaatatgttcaagggaagaaaagctagatagtacagaaaaacacacttaaaataaatcatcactcagkgatttcacttctctgtttttgaataagggcctgtctcccaatccccccacccacataccgctgtatttcaagtttagctctaattttaatttctccctgg

SEQ ID NO: 546285 - DNA, 201 bp, Homo sapiens
atccacctgcctcggcctcccaaagtgctgggattacaggcatgagccaccatgcccagcctcaaatttgtaaactttcttaaaacattatgagattttttgtgtgtgtgattttttttcttcttccaatgtggcccagggaagccaaaagaatggatacccctgtttaaaatcttcttaatctatagccatttctcctct

SEQ ID NO: 546286 - DNA, 201 bp, Homo sapiens
tgtcccaggaacctaggtcagttactgttttagtactttatcagtgtagtctttaacattccataaatgtacattgaggacctgttagtactaagcactgractagaggaccagggtaaagacactgcctctggtcttgtggaattctctgtgcaacaagggaagatagacagaggagtgaataattttaatggcacgtga

SEQ ID NO: 546287 - DNA, 201 bp, Homo sapiens
agataggtagaaaaaattaaggtggctcgctaattcataccttattacagataaattctagatcaaagatttaaatgtgaaaagggaagccataaaagtastagagaggccaggcgtggtggctcacacctgtaatcccagcagtttgggaggctcaggcaggagtatcacttgagcccaggagttcaaaaccagcctggg

SEQ ID NO: 546288 - DNA, 201 bp, Homo sapiens
tatatatttaatgcagtcctgataaatacaagataaattgggggacaagttaaatgactattaagtttataagaaaacatagatcagcaaaaacagccagraaaaaaaaatctaaagtcaaaaaagatttgagctatgagaaggaaaccatcctacaacatgatactagtatatgagtagacagatcagctggagagatta

SEQ ID NO: 546289 - DNA, 201 bp, Homo sapiens
caggctgggcactgttgctcatgcctgtaatcccagctctttgggaggccaaggtgggaggattgcttgaggccaggaatttaagactaggctgggcagcrtcgtaagaccctgtctctacaaaaacattaaaaaaaaaaagaagaagaaatgacaggactgggtaaagaattgtccatgggtggtgaagaagaagcgagg

SEQ ID NO: 546290 - DNA, 201 bp, Homo sapiens
aagtttcttaaaaaaaaaatcccttcttgtttgggggccagaaaataactcaaaactgtgcagaaaatttatttgtgtgtgtgactcttctggggccagaraggattgacttctttgtgcgtcagttttatcgtctgcaaaatgggaatcatggtagcacctgtctgatgacgttattacaaggtaaatttatatttaaaa

SEQ ID NO: 546291 - DNA, 201 bp, Homo sapiens
tggaacccagtttcccaggggacacaccagtgctgtttccaagccttccccgggggcacacatcacctcccctacatgaaggacaaactcatgtactgtgyccagcatgtacctaggagacctgggagaaatgaaacaacttggaaaattgggcaggaagaaagagatgggtgtggggtggggtgaagatctccaccctaa

SEQ ID NO: 546292 - DNA, 201 bp, Homo sapiens
aaagacctgcccccaactaaatatgtgtcatcagagaaaagggtatgtttcttaagagagaaacagagcatactaaggaaattcagaggaaggagagaccycttctaaactgggggtaaaaggtggaattaaacagccaaagtttccttcatcctcaaatggagctgatgctgctgtctgtgaaaaacagccaagtttcct

SEQ ID NO: 546293 - DNA, 201 bp, Homo sapiens
attagacacagatcttttccttaaaaagttaggattctggcagagaaaaaagacctgcccccaactaaatatgtgtcatcagagaaaagggtatgtttctyaagagagaaacagagcatactaaggaaattcagaggaaggagagaccccttctaaactgggggtaaaaggtggaattaaacagccaaagtttccttcatc

SEQ ID NO: 546294 - DNA, 201 bp, Homo sapiens
cagtctcttactagaagccctcgatcaatcctaggcagttcattcaatttatttaaagaggcctcctgtctttggctgtggttctgcagagcttttgggcvctctgtgtgctgcaggtatgggatagaggagctggctggcacaggaccttcagtggatcccttaattttttggcccttctgaatcttctcgacgcctgct

SEQ ID NO: 546295 - DNA, 201 bp, Homo sapiens
tcagttttttgtttgtttttgagacagtctcgctctattgcccaggctggagtgcagtggcaccatctcagctcactgcaacctccacctcccaaggttcmagtagttctcctgcctcagcctcccaagtagctgggattacaggcatgcgccaccatgcctggctaatttttgtatttttatttttgagacggaggctgg

SEQ ID NO: 546296 - DNA, 201 bp, Homo sapiens
gagattagcaaaaggccctgctagtaactgatagtagcaactgataataatagctaactttaaaaaatccaagtaatacatgaatatgactttttaaaaartctctgagtctagaaaggcatctgtctcctgcttacccctcaccctgaggcagccattttatttttctgcttttacttcttttggtggttacttctattt

SEQ ID NO: 546297 - DNA, 201 bp, Homo sapiens
atctcatagaactgatattttaatgtgggacaggaggaggcagcagtgaaaggcagtaaagaaatgaatgaacaacaaaaaaaagtggtgctgtatggacrcttaacagaaagtgacatgataggtagatgggtggttattttaggttgggtggcttgggaaagtttttctgaagaagtgacatctcagctaaggtctcag

SEQ ID NO: 546298 - DNA, 201 bp, Homo sapiens
atcgcacactccccgtgtaatcctgctgtccagagatatacaatttggtgtattgtatatccttttagagatttaaatgtaggctgggctcagtggctcaygcctgtaatcccagcactgtgggaggccaaggcatgaggattacttgagaccagaagtttgagaccagcctggcgacacagtgagaccctgtctccacag

SEQ ID NO: 546299 - DNA, 201 bp, Homo sapiens
atacatagcttcctttaacccttataataatcctatgagttaggcattttattctctccattttgtgggtgggagaactgagacttgatatgtggactatrtgattgatcgattggttgattttggtaaagttcagatatcttttgtcctgtgcttgacactctaaaatagtaagtatttgggtaacaaataattgtaaga

SEQ ID NO: 546300 - DNA, 201 bp, Homo sapiens
tgcatagcagagggactaggaacctcactatttctccaaagttgactagctttctataagataacccccataaaatcactagtcattagtaataaaacttygtctttaaatgactataatatttttaaaaaggacaatgaatatgtactctatgccatccctttccatactgtaaatgtgtttctgaaaggtatgctattt

SEQ ID NO: 546301 - DNA, 201 bp, Homo sapiens
tgatctcaatctcagttcactgcaacctctgcctcgcaggctcaagcaattctcgtgcctcagccttcccagtacctgggattacaggcacacaccaccaygcctggctaattttttttttgtatttttagtagagacagggtttcaccatgttggtcaggctggtctcgaactccggcctcaagtgattcacccacctca

SEQ ID NO: 546302 - DNA, 201 bp, Homo sapiens
ttagtactataaagaattctaattatgtaggacattcatccagccactcctcccaccacacacacacacacacacacacacacacacacacacacacacahatatctgtctgagataataattagatactgtgggaagagaaatgaaatatccctgatggttttaataattttctgcagtgtttgtttggacaagaaaatc

SEQ ID NO: 546303 - DNA, 201 bp, Homo sapiens
tctctctcaaggcttctgtgtcctcaccctcagctctggtgagctctgttctgtctctctctccctcagcagttgtagctgctggcccatgtgcccaggcyctcctaacacctgttttccctgactcagattccctaaagtatgggtcctctggctacatgacattcacctgccagggtgactgacatttaaaaagggggc

SEQ ID NO: 546304 - DNA, 201 bp, Homo sapiens
ttatcctcatactcatcttggccattcctatcatcaggtggcgtaactcaaggctgaggtccctgaacagagcttagagctcatttcttcccactttcagygtaccttcaacggcttttctagctactcctcattgaggttgtccagcttgtgtttcttgtgcaccttccagtgccgggcacaggctgggcagcacacctt

SEQ ID NO: 546305 - DNA, 201 bp, Homo sapiens
gtacgaggtgactttatgccacctgtagtagatggtaagctctgtgaggccagggaccatggccagtttgttcatggtggtatctgtgccagtgcctggcrcatggtattaataaatgtgtgtacatgtttgtcaataattttatttaaagaaaagtctgagcccatgttctttaaaatgttgatggtggttgtctgggtg

SEQ ID NO: 546306 - DNA, 201 bp, Homo sapiens
gtgtctttagtttcctgctattataaataatactgtgggccaggcgcagtggcttaggcctgtaatcccaacactttggaagtccgaggcaggaggatcasttgagcccaggagtttgagaccacgagtttgagaccaccttggttaacataatgagattcccatccctgaaaaaaaatgagccagacatggaatagtccc

SEQ ID NO: 546307 - DNA, 201 bp, Homo sapiens
tggtgtctttagtttcctgctattataaataatactgtgggccaggcgcagtggcttaggcctgtaatcccaacactttggaagtccgaggcaggaggatmacttgagcccaggagtttgagaccacgagtttgagaccaccttggttaacataatgagattcccatccctgaaaaaaaatgagccagacatggaatagtc

SEQ ID NO: 546308 - DNA, 201 bp, Homo sapiens
tgtgccccaaggcgctgggtagggctttgcagccagccccaggcaggccacacatggatagaaccggcagccctcccttttcccaggttcttggaatattytcattttggggctctgagttttctgttggcctcagtgcctctcttttctggctttctatcacagagagaagccgctacccttgaaatttgatgaatgcct

SEQ ID NO: 546309 - DNA, 201 bp, Homo sapiens
attgcttgaggccaggaatttaagactaggctgggcagcatcgtaagaccctgtctctacaaaaacattaaaaaaaaaaagaagaagaaatgacaggactkggtaaagaattgtccatgggtggtgaagaagaagcgaggtcagggatggtcctgggtttccagctgggcagatggtggtgcccttgctcagttgggaagg

SEQ ID NO: 546310 - DNA, 201 bp, Homo sapiens
tgggaggccaaggtgggaggattgcttgaggccaggaatttaagactaggctgggcagcatcgtaagaccctgtctctacaaaaacattaaaaaaaaaaaraagaagaaatgacaggactgggtaaagaattgtccatgggtggtgaagaagaagcgaggtcagggatggtcctgggtttccagctgggcagatggtggtg

SEQ ID NO: 546311 - DNA, 201 bp, Homo sapiens
agcctgctgctgcccctcaccccaccaagatgtctgacaggatggatttgagaaggaggtacaacacacaccccatgatgcacggttggcccccacagacyctgatgcaggccacaccctggcgctccctgagctggcctggttcagtgctctttactctcttagaagaacattggccgggcacggtggctcacacctata

SEQ ID NO: 546312 - DNA, 201 bp, Homo sapiens
aagatctgtttcatttccttaggagttttgtctgcattcccttctggtttccattactcaatctgtcaggattctcaggtgctactaacaataagtgtctrctccagctggtttaagcagaaaagcatttcttaaaaaaaagtagggatcttacagaatcttatagagggccagataacagatcctagtgctacctagatg

SEQ ID NO: 546313 - DNA, 201 bp, Homo sapiens
gcctggcgcatggtattaataaatgtgtgtacatgtttgtcaataattttatttaaagaaaagtctgagcccatgttctttaaaatgttgatggtggttgyctgggtgtggaattatgagtgacttgttttgttctttgtacttttctgtgctttttgctttgttttcaataagaggcaataactgtcattttgacagaag

SEQ ID NO: 546314 - DNA, 201 bp, Homo sapiens
ctttattattttttttttactgacatgtcattgtatatatttgtggggtgcaacttgatgttttgatacatatatgttgtataataatcagatcagggcasttagcatatccatcatctcatgcatttatttctttgtgatgagaatattcaaaagcttctgtagttattttgtaatatagaatgcctttttttttttttt

SEQ ID NO: 546315 - DNA, 201 bp, Homo sapiens
gctgttgtaatgcttattaaattctctctgccttttaagtccagcaggtgaggtaaatcagtttctttcaaactttttgactttgaaaataagatgcacamtttatattatgactcatgcatgcatatcatatattatatgtaaatgaaacattttcttcttttcattctattctataccgtttcatgttttgaaaagtat

SEQ ID NO: 546316 - DNA, 201 bp, Homo sapiens
gtccgtcaaggatggggaatcagataaaccacttttttagtttgaatggaacccctaagggcataagagggaacttgaactaagccaaccctcacaatagycttgccaccaagcttctaggtgtagggaatgtagaccaagatctttcatcattatggttctcaagtaataatgccatcaggcagctggcagaagcaaatg

SEQ ID NO: 546317 - DNA, 201 bp, Homo sapiens
gccttgatcttggacttcccagcctccagaactgtgtgaaataaatttctgttctttagaaattactgagactcagatattttgttgtagcagcacaaaayggactgagagacaggaactaacttctgtggggagaagttggcaatacctgttataataaaaaagtcacagatcctttgaggtggcaattccacttttata

SEQ ID NO: 546318 - DNA, 201 bp, Homo sapiens
  misc_feature (1)...(201): n = A,T,C or G
cattttttaggttaagctgtatttttggtgtcttcatatatgaggacagaattcttagcttgttgtccgtcaaggatggggaatcagataaaccacttttntagtttgaatggaacccctaagggcataagagggaacttgaactaagccaaccctcacaatagccttgccaccaagcttctaggtgtagggaatgtagac

SEQ ID NO: 546319 - DNA, 201 bp, Homo sapiens
acacatcacctcccctacatgaaggacaaactcatgtactgtgcccagcatgtacctaggagacctgggagaaatgaaacaacttggaaaattgggcaggragaaagagatgggtgtggggtggggtgaagatctccaccctaactagtatattatataccaaagaaaggaattaaacacacaggaaagcagacaacccac

SEQ ID NO: 546320 - DNA, 201 bp, Homo sapiens
gcaggtccttggcactactgcatgccagaggccctctgccgggccccgggctagcctccaagtcctagactgcccatactttcttagagaagaaaccacayttaagtcaggcctgccccatggtcagtggcagagtccagcaatctctaggttggaagatgtttgagtctcaggccccaaggactcctctggacaggcatc

SEQ ID NO: 546321 - DNA, 201 bp, Homo sapiens
ctctatagtaagttctttatcaggcctcgtacagaaagggcacagaaatattttgaagaccgcatgccctgtcttgcatgcccactgggaagacctgactkactttggccttctcaaaatatttgcataactctcagcacctactccattgcttctgagatgacctctgcaacgtgtatatgttttggctgatacagccaa

SEQ ID NO: 546322 - DNA, 201 bp, Homo sapiens
cgtgcaccaccatgcccggctaatttttgtatttttagtagagatggggttttaccatgttggtaaagctggtctcgaactcctgacctcgtgatccgccmgccttggcctcccaaagtgctgggattacaggtgtgaaccactgcgcctggtgcccctggtgctgtaaaagtacaactgtcctgtggatgccccaagtac

SEQ ID NO: 546323 - DNA, 201 bp, Homo sapiens
ttattgagtatctcttaagcactaggccctatgttatgctcaaccctttacagagcactagatggtcagtattattccctaaccccattgactgaggacarccatctacttatatgttttcatattatcctgaactaaactgtatttacataattactggcataacttcaattccccatgtctccactagaccatctgcac

SEQ ID NO: 546324 - DNA, 201 bp, Homo sapiens
cttgggcaagtgtttcacactctctgggtcttgtttctttatttgtacctaatgaggggacaaaactagatgatctctgtatttccaaattcagtatgaartgaactgtccatatttcttttccctttgtattgggcccttatggctttaggagcaaaggaccctaggttttcagtttcccagagtagctaaaaacgggtg

SEQ ID NO: 546325 - DNA, 201 bp, Homo sapiens
gttgtgttaaatttcagttacagatatggtcagactccatgaatttaccacatataaacccagtgctgcagcagctgtgtggaaaactccaagatggaaargggttggaaatctttaaccttgggtttgcgatctttttattgcttccttttaaaaatttgctgtttatgcctggaatataaacaggacatgtaagccttt

SEQ ID NO: 546326 - DNA, 201 bp, Homo sapiens
tactattatttttgttcaagtaacaaaacatgattcaaagcacccatcttcaagagcccagcctcatttcctgacacctactcagtcttctggaataaagsctcagccaaacaatagccctgacctccagtccctccaaactgagtgttgctgctgagaacaggccttacagctctgggtgggcttttgttcattactcat

SEQ ID NO: 546327 - DNA, 201 bp, Homo sapiens
acaggaggaggcagcagtgaaaggcagtaaagaaatgaatgaacaacaaaaaaaagtggtgctgtatggacgcttaacagaaagtgacatgataggtagaygggtggttattttaggttgggtggcttgggaaagtttttctgaagaagtgacatctcagctaaggtctcagtgataaggatagttttataattcaaaaat

SEQ ID NO: 546328 - DNA, 201 bp, Homo sapiens
cgagactccgtctcaaaaaaaaaaagtcagtaagtagacactgtcaaaagtgacagcagatttgaaaaaatccaaatagacattctagaaccaaaacatayaataatcaaaaacaagaatgcagtggatgtatttaaagtagattacctagcaagagagaactagtgaactagaagatagaagaaaattctccagaataaa

SEQ ID NO: 546329 - DNA, 201 bp, Homo sapiens
aagaattgcttaaacttgggaggcagaggttgcagtgagctgagattgtgccattgcactccagcctgggtgacagagtgagactttcaaaaaaaaaaaaagaaatggagtcacttataccaagagtaaaggagggagagggagtaaagaagggtgctggattattccttcctttgctcattattgattctaaaaatctca

SEQ ID NO: 546330 - DNA, 201 bp, Homo sapiens
tgtcattgtgcatctctgaggttccctcatggagctccacagatccatttttagggaagggattttggctcaaaacgatctgaccacctctgccctgtccmccaggataagtgacacctaggacccaggaaataaatgccgatgatttgtgtgactggtttaagattatttctccttaaccttgcaaaaacaggggttggg

SEQ ID NO: 546331 - DNA, 201 bp, Homo sapiens
aaaagcatggaccttctaactgcatggcacagtgaataagtgagttggaaatggtatgacagctgaaacctgcctttgatgggtgatgagcgattgcactstacagcagctgtgtggactagaaagtgggtagtggtggccagaatttctttattcatatactccttcaacagatatccgtcagttgctagctgatatagt

SEQ ID NO: 546332 - DNA, 201 bp, Homo sapiens
gacgtggtgctttttacaaaaagtatgttaatgttttaccatagactggactaagtagagtgtgtgtgtgtgtgtgtgtgtgtgtgtgtgtgtgtgtgtttagaaaatatttattgagtttcctattttatgccaggcactcttctaggcacttgggatagatgtattcagtgaaccaaggagacatactgttgactttgt

SEQ ID NO: 546333 - DNA, 201 bp, Homo sapiens
ccaccctgggtgccttctgggcacttctgccaatgtcagctaccttctaaaagcattgcacaataatttgggtttataaaacttcaaccattgaaaaaatrtagacttagaaaacgaaagttccccttaatcacaaagaaccacagttgacagggttgatagatgttttttcagatttttttttcatatgtctgctatctt

SEQ ID NO: 546334 - DNA, 201 bp, Homo sapiens
ctcttctctgtctctctctttctctctctctctctctctctcttctctctctctctctcacacacacacacacacacacacacacacctgcagcacttackggctcaaccccaccctgggtgccttctgggcacttctgccaatgtcagctaccttctaaaagcattgcacaataatttgggtttataaaacttcaaccat

SEQ ID NO: 546335 - DNA, 201 bp, Homo sapiens
acaacagagtatcatgcagacaataaaaggaacaatttagttattactttgggtttgttttcagtgtgttgatgtaatcagtgctgcagtggcttcagagygatctacagttgtttccaaggtgtgtgtgtgtgtgtgtttgtgtgtgtatatgtgtgtgtgtgtgtatatatatatatatattttttttttttttttttt

SEQ ID NO: 546336 - DNA, 201 bp, Homo sapiens
gtgagtccagattgcaccactgcactccagcctgggcgacagagtgagactccgtctcaaaaaaaaaaaaaaaaaaaaaaagattcagaaacagaccccartacacagttttgtatgtaacaatgatagctttttacatcaatgaggaaatgatggattactccacaaatgatttgagataggtagaaaaaattaaggtgg

SEQ ID NO: 546337 - DNA, 201 bp, Homo sapiens
tagcacataccataatctgtgataagattcatttacttgtgcagtgcctttttctctttacacattgtaaatatcttttttagtttccagtatataccctrtgcccggcacagtgcctggcatgtagaagttgctcagtacattgaatgaataaatgaaatatcaagactggaagacttggaggccaggtgcggtggctca

SEQ ID NO: 546338 - DNA, 201 bp, Homo sapiens
  misc_feature (1)...(201): n = A,T,C or G
gctgacctagttaggagttgaggcttcatttctaattctgtccctttcgttttgagctgtgtgaccttgggcatgtcacctaacttctctgtatatgtctncttatccaggaaggagagattaataatgtagcctcatagcacttatctgattctcctaaggatgttatgagaatcaaatgagattatgtacaacgagagc

SEQ ID NO: 546339 - DNA, 201 bp, Homo sapiens
ggagtattagaaacccacgggagaagtggcttcctgtggggaaatgcccagagcaggcacctgcaggcactgtaacctctgaccccagggccccaaaaggyctggggacagagtataagggcttcaccctttgtcctgggcattcaaggtcaatcacatgtctggcaatcatccagatcccacaagataccaaaacctcct

SEQ ID NO: 546340 - DNA, 201 bp, Homo sapiens
tttagctaaactgtcattgtgcatctctgaggttccctcatggagctccacagatccatttttagggaagggattttggctcaaaacgatctgaccacctytgccctgtccaccaggataagtgacacctaggacccaggaaataaatgccgatgatttgtgtgactggtttaagattatttctccttaaccttgcaaaaa

SEQ ID NO: 546341 - DNA, 201 bp, Homo sapiens
taattcaggtctgcgaggtagccagagtccatgcaatgactgctatctaattgccttcagaaaaccataggtgctcaatgagagatactagtatccccttygcaaattaaccttttgttaatatagtagcagtacttcttgttgccaagagtacataaatggacaatcttgtgtgctactggtgggaatataaataaaaac

SEQ ID NO: 546342 - DNA, 201 bp, Homo sapiens
tttaagccattttagctaaactgtcattgtgcatctctgaggttccctcatggagctccacagatccatttttagggaagggattttggctcaaaacgatytgaccacctctgccctgtccaccaggataagtgacacctaggacccaggaaataaatgccgatgatttgtgtgactggtttaagattatttctccttaac

SEQ ID NO: 546343 - DNA, 201 bp, Homo sapiens
aaccaaggccaggaatccatttatccacttaggaggctctatagggagcagggttacagagaatgttgtacacagaggaaatagtctagtaaaggctttgwggtcaggaattaaatgaggtttgaggatttaaagagaggcccagtgtgaccagagcaaaatggaccaagaagagagtagaaatgagacaaaggctcatct

SEQ ID NO: 546344 - DNA, 201 bp, Homo sapiens
gtcgctgcagcttatcgcctgggatgagagcagtgaagaagccctagcctcaggatcagtctcacagctccctctccctgcagccaagaaggaccggtctrcagaggggagggagcaaacactgaccgaaggccaggtgtgtgcttggcaccacccacagacaaaagagtgcttgggcagagctgctagaactattattta

SEQ ID NO: 546345 - DNA, 201 bp, Homo sapiens; identical to SEQ ID NO: 209128

SEQ ID NO: 546346 - DNA, 201 bp, Homo sapiens
aactgctgggcctcctgagcctgctgcagcagaagccgcctccgcgccgcctctgcccgcaggtgggccatggccttctccagctgctgcacccgggcggycacctcgtgggcggcaaagtgcccagcctgcaccagcttgtacccagtgcccagcaccacccgggtcagagcctcgtggctgctcatctcactctccagg

SEQ ID NO: 546347 - DNA, 201 bp, Homo sapiens
atgacatagcgcgtgaggaaagtgctctgtaggctgcacagagctctgtacggtctcaggctttcttttcagggaggcgtcatgcgacctgggcccagacyctcacctggagctggagggaagccagcaactgcctcctcctctgctcactcctcccctggagcctggtccactgtgcctggatactctgcagctgctctc

SEQ ID NO: 546348 - DNA, 201 bp, Homo sapiens
tctgaaccagcttctcgccgtgtgcccgcagagcctctgcccgaggccccagggtgctcaggagccgcccaaactcccggtgctgctgcagcaggctcagrgcctccctcacgtcctcctgggagtgcagagacctgaggtcatgcctgggagaatgggggtcaggaccatctcacccgccactgccccaggggcctcctg

SEQ ID NO: 546349 - DNA, 201 bp, Homo sapiens
ggatggatggcagcagctttgggactggtttgggtgccaaggggatgccagcagcatcaaggaggcttgcagggggaggttctaggttcacgctgaggctratttttccttcaaagactcttccatgaaaacaggtggtgcagtagggttgggaatttgaagacaaggaggctctgcaccctctgtcccgtgtcccccacc

SEQ ID NO: 546350 - DNA, 201 bp, Homo sapiens
attgggatacccaggggtgagggcttagaggccaggacacctgagtaggggcagagggtttctaaggtctgggaagcggatgtcggtaatcctgtaggaaraagagggctattaccttgtgcttgcggtgaaggctctgggcaccattcaagcactcggtatagctggtggggctgccatggggcatgtgctcggctaccc

SEQ ID NO: 546351 - DNA, 201 bp, Homo sapiens
tagaggccaggacacctgagtaggggcagagggtttctaaggtctgggaagcggatgtcggtaatcctgtaggaagaagagggctattaccttgtgcttgyggtgaaggctctgggcaccattcaagcactcggtatagctggtggggctgccatggggcatgtgctcggctacccaagagagctccatgttgctcaggtg

SEQ ID NO: 546352 - DNA, 201 bp, Homo sapiens
ggaggaagacacctgtgggagatgtggagcgggctgggcaggtgaccttgacagaggagaaaggtgccaggggtggggtagagaggaagcaagaggaggcrgagaaaccccaaggccacagggagaggcaagactcgtaagaagatgaagggagaaagcgtgtacatcacagtgcccaggttgccttggaagaaggggcac

SEQ ID NO: 546353 - DNA, 201 bp, Homo sapiens
ccagatgcatttcagtgcccacttggccacctgtcaagtgccttcaggaggggcacagcctgtggactgtccctggtggccttgcctgcctgccagcccawaacatcatccctgcaggaggagaggcgccaccttactaaggaggtggggatctcagacccgtgggtgggtcctgagccattccacttaggggccgctggg

SEQ ID NO: 546354 - DNA, 201 bp, Homo sapiens
tgaagacaaggaggctctgcaccctctgtcccgtgtcccccacctgctgcagggcctccacgtgtctgcgggtggcgagtagctcgctctcagctgcttcrtgccgcttgagtgtctgcaggatgtttctgcgcgctccggagggctcatgcgcagccatcagccccttctcttccatccactgcatcagctctgccacat

SEQ ID NO: 546355 - DNA, 201 bp, Homo sapiens
cctggacagacagtgagaagggctcttcaccagcaggaacctactgctttcctttaagtagattcttaaatgcactcatgctcctattggccattcacatyttcttgtgaattcgttttcccgacagttatctgaggccctgttgaaggaggaggactctgacagagaaagaggagagttcattcggcacagggaccaggc

SEQ ID NO: 546356 - DNA, 201 bp, Homo sapiens
gacaaggaggctctgcaccctctgtcccgtgtcccccacctgctgcagggcctccacgtgtctgcgggtggcgagtagctcgctctcagctgcttcgtgcygcttgagtgtctgcaggatgtttctgcgcgctccggagggctcatgcgcagccatcagccccttctcttccatccactgcatcagctctgccacatcctg

SEQ ID NO: 546357 - DNA, 201 bp, Homo sapiens
gccggggtggcttctcctgggtgcggaagatggtgaatgctgccagtagctgccgcatggcgggcagcgagtctggaaaatcccgcgcctccagctgcatmtgcttctctgcaatccagcgtagaaggtcagccaccagctgctcgtactgggtctgcagcagctctgtctcctggagctgaagcaggatctggtggaggg

SEQ ID NO: 546358 - DNA, 201 bp, Homo sapiens
gaggcccaggaagggccattcctcccctggcttcccttgtataccaggcaccgtgctgggcccattacccatgctccctggaacactcacaagggccttcbgttatccaggcatcatcatctccatgtgatagagggtgcacagtgaagttgggtgacttggccaaggccacacagctagtacgtggcagggcaggcttca

SEQ ID NO: 546359 - DNA, 201 bp, Homo sapiens
cagctagtacgtggcagggcaggcttcacgcttaggcctgtctgcctctggagcccttgctcaccccacccctcctttctcccccaccttagtgagtctcytctggacagtctgcccctgatgcaggcgggagcagtagtggtagtagagggagacgtaggtcatgatagagcgctcatctggctgtgcggctgccacgtc

SEQ ID NO: 546360 - DNA, 201 bp, Homo sapiens
tcccctggcttcccttgtataccaggcaccgtgctgggcccattacccatgctccctggaacactcacaagggccttctgttatccaggcatcatcatctycatgtgatagagggtgcacagtgaagttgggtgacttggccaaggccacacagctagtacgtggcagggcaggcttcacgcttaggcctgtctgcctctg

SEQ ID NO: 546361 - DNA, 201 bp, Homo sapiens
gtcaccatgcggggatggggtggggaggcagagagcctgcaggctgtgggagaggcaggctggccacagcaggatcctgctcctccctggcccggggccartgtgactctcctctcttcagagtatctgattttgcccaatttcatccacggtgggcaaggattgggggtgagagtgactggccttccaaagaagtggagc

SEQ ID NO: 546362 - DNA, 201 bp, Homo sapiens
gcagggagccgtagtccaacaggtctggcctggacagacagtgagaagggctcttcaccagcaggaacctactgctttcctttaagtagattcttaaatgyactcatgctcctattggccattcacatcttcttgtgaattcgttttcccgacagttatctgaggccctgttgaaggaggaggactctgacagagaaagag

SEQ ID NO: 546363 - DNA, 201 bp, Homo sapiens
tgaccacagctgcactccacgggctgcctggaagaaagcagttcatgtggccccaaaactgcaggtaggggggctttcctctgacccctgcaaatagagcrgggtgagccggcattaggttggtggctggggagagccgtgttctggtagaggtggccggctctgggacttgccacggagagttgtaggggaagggatgga

SEQ ID NO: 546364 - DNA, 201 bp, Homo sapiens
agagctcacctggatgaggccatgagaggactggcggctagcaagatcagccccatcaagactgcttgatggggaaagaaagttcacctgctcttcaaagkccccttggccgcatttgcctggcaaagccttccctggtatttgacattgcactgctctccttgttctctgaattactaatttaacccttacagtcttctg

SEQ ID NO: 546365 - DNA, 201 bp, Homo sapiens
tgctgcctgcccctggaaagacagccatccgagtccttaagggccaggaggccctcgaaattcaggccagctctctgctcccctcccccaggcaggacggwagttaaattggaaaactgagtcacagcagcagaccacagggaggcaggggcaaggcgaggaggaggtgccaagctcccagggctgtacctcatatttgag

SEQ ID NO: 546366 - DNA, 201 bp, Homo sapiens
ctgctcccctcccccaggcaggacggtagttaaattggaaaactgagtcacagcagcagaccacagggaggcaggggcaaggcgaggaggaggtgccaagytcccagggctgtacctcatatttgagctgcatgacctccagggtgtcagcctggggctgcaccctttggagcagcactgtctgcttctccagccacaact

SEQ ID NO: 546367 - DNA, 201 bp, Homo sapiens
ctgattttgcccaatttcatccacggtgggcaaggattgggggtgagagtgactggccttccaaagaagtggagcaagggaaaagccgtcactgcagaggygctggctttgtgtcaccacaggtgatcacacagcaacagctcccgttttttgagcccttctgacgggccaggtgctgtgctaactgacctaggctcatgg

SEQ ID NO: 546368 - DNA, 201 bp, Homo sapiens
aggccccagtaccctgcatggtggggccaggctggcagacggaactaaggaaaatgctgggatggcttgtgagggatcggggctagcctgagcccaaacayatctgagtcagcagggagcagggctggagggggctgcagacagacagagacggtgctggtcagggaggatgcccacctgctgctcccaagggcctgggct

SEQ ID NO: 546369 - DNA, 201 bp, Homo sapiens
tgtgtagggtgccagggactttgtaaacctccagagctgggactccctccacacatttcatttttcccaacagtacattgtggtgtaatggaagttacagwgcctcagtgccaagtggggagcaccacacaggggtgaaagtgggtgctgggcagtgaccctgaaccccccactagtgaatgacttgcccagacctggttt

SEQ ID NO: 546370 - DNA, 201 bp, Homo sapiens
cagacctggtttgaagcccatggccctggccctcactttagcatattacaatgttacaatatctctggtatcctgggttcttcacccatggttggagagtraatatggactttgcagtttccaggatctcctatggggatcataaaagttgtgtggaacttatgaatccccaggggtctgaggtgaggccagggctgggct

SEQ ID NO: 546371 - DNA, 201 bp, Homo sapiens
ctgcagcctctggctggagcgcaggtcctgccctgtttccgagctctgtagggccccttcgagctgctccagctgctcctttgcatcctgggagggacgcrtggagctgcattaggttctctgtgtacagcacagcaagtggccttcccgggctctgggactgttggacttttaggaccagattcaccagggagctctgtc

SEQ ID NO: 546372 - DNA, 201 bp, Homo sapiens
ccaagatcagtggttcagctgcagggtttggaaatgaggggtcataacagtcaatgtgtgagcccaacagacaatagcaactgtctgcctccatctcccasggtgtcctgggatcttcagggggtggctgggtccctgggctcacacccaaatctcagccctcttcttctgttccggctccaacagggccagctataaatc

SEQ ID NO: 546373 - DNA, 201 bp, Homo sapiens; identical to SEQ ID NO: 367637

SEQ ID NO: 546374 - DNA, 201 bp, Homo sapiens
ctataaatccagactcccaggctccacccagtcagactgtcttgggccagagcctgggaatttgcacttgaacaacaccttgggtggctcttaggtacacyaaagttgagactcctctgccctacatcctgccatttggacagggaggatgggtgagtcaaggggagaagccctgcaggatctggcccccagccccctgtg

SEQ ID NO: 546375 - DNA, 201 bp, Homo sapiens
ctctgacctgggttgcggcctgggtgaagctggccatcagcagggaggcatgcagggcgtgtccccggctctccgccagctccttcactctcatccggcgytgcagcaggatgggaagccggtcccgcacccgggggcgccggagcgtcttcagccgctcacgcagggctgcctcctgtggggcaggggcacagctgctgc

SEQ ID NO: 546376 - DNA, 201 bp, Homo sapiens
ccgtgcctgctgtctgaaagtattctcccaggtatctgcatggctattcacctccctgcctttaactcttcactcagatgttgcctagcctgaccactttwtttaacacagaaacttaaggactatttctcccacccaaatacacactctcgatccccttgccctgctcaagtgaggatcttggctttgttttctggtgta

SEQ ID NO: 546377 - DNA, 201 bp, Homo sapiens
cactctcgatccccttgccctgctcaagtgaggatcttggctttgttttctggtgtatcctaggggagtggcacacagcaggcaatcgatcagtaagtacygaatggagaaagaaaaggagtgagactttccataagacctgaagggcaactggcttcagccggccactactagccctgtgggaggagctgcaatcctggg

SEQ ID NO: 546378 - DNA, 201 bp, Homo sapiens
ttgttaaacgtttaccagcacaccgctgatctgggttcaatgaatctgtctccctttgaagccaggtgccttgaggtgggggtctgggctttgcttagtgkagcccagcgcctgcatagaatgcccagggcatgggagcatctccataagcgaatgcatccctcattctgccacacattccctgtgtgtttgcggcaactc

SEQ ID NO: 546379 - DNA, 201 bp, Homo sapiens; identical to SEQ ID NO: 367648

SEQ ID NO: 546380 - DNA, 201 bp, Homo sapiens
ggacatgctggacctctccattgccatggagtggggattggggaaagcaggggaggaccaggtagagaacgggttggaacaagggtggggcagggtctggycgtcctgccaatgtgctgtgccttggagaggggagaggagggaggaaagtgaggagtgcatgggaaacaaacccaggcaggctctcagcactgggcagag

SEQ ID NO: 546381 - DNA, 201 bp, Homo sapiens
ctgcaggccgtgccccctggcctccgccctccgcagcagctctgcgtgggcctcccgaactgcctgcagctgggctagcaccttggggctgtgggaagagmgcgacagtctggactgcagccctgcctttccaggctggagcagtctcctgccatctctgtagggggcttctctctgctccttcgcggatggtgtggcttc

SEQ ID NO: 546382 - DNA, 201 bp, Homo sapiens
ggcctcctactcaacagctctctcccaacctggagtggagataaaggcccagggagtttggctgagctgctggtaccaccagtggccgcagcaggctggayctgggtggcagtggaggtgagggggtgaccacagctgcactccacgggctgcctggaagaaagcagttcatgtggccccaaaactgcaggtaggggggct

SEQ ID NO: 546383 - DNA, 201 bp, Homo sapiens
gccagggccagtgtggccctcacagcatgccatcctctcttaccactctgggccctgcctgcccagctccttcccccaaaccccatgctggcctggcccgytgggcactcactgcagatcctgctgcctctgacggaccatggggccagcactgtgcccacgctctagcaggctctccgccagcagccggcaggcggccac

SEQ ID NO: 546384 - DNA, 201 bp, Homo sapiens
atcagatgtccctggtgcagactgctgggacccacctccaagtacccagctgaacaggagaggccagtgaggggggagacgcatgggagactctaggcagygccccctcccctgactgcatttgctcacagcccccaccgggacctctttccaccacgtaccttctcctgaatcctcttggtgacattgtccagctctcgg

SEQ ID NO: 546385 - DNA, 201 bp, Homo sapiens
ccattagaagcttaatagcccgagagtcgggaagaagggggaggcccaggaagggccattcctcccctggcttcccttgtataccaggcaccgtgctgggyccattacccatgctccctggaacactcacaagggccttctgttatccaggcatcatcatctccatgtgatagagggtgcacagtgaagttgggtgacttg

SEQ ID NO: 546386 - DNA, 201 bp, Homo sapiens
tccccagttcctggaggggagatgactggctcacagggtcattgtccctggatcaactagggcccagcattctgcagctggcagcgttctgctcttgcacytgctcaggacagcagtcactcccattccctttgcttgggcttctcccctccctggctttcctccaacacaccccaggaggctggatgtaagctccactcc

SEQ ID NO: 546387 - DNA, 201 bp, Homo sapiens
cagagcagctgctttggaagaaggagctctggcctcagcttggcctcaggcagatgaccccacagctcaccccggaggcccactggccagagctgggggcstggtatgggtgggctgtgggtcacagctggctatactcacctggccgcactggaagacgttattgatccacttggtgaaagtcttctcctgcatctgcat

SEQ ID NO: 546388 - DNA, 201 bp, Homo sapiens
cccaggatgagtgtctggtctccgtccacgatgttctctggcccgatgagtggtactggcacctgtgggcacagttggatgggctaagccatgaagcccaygtccagagaggactcagtcaccaaaagcttagggggccagctgcgggatgggagcatcctggaatctatcctgccccagctgggagttccctcagggaga

SEQ ID NO: 546389 - DNA, 201 bp, Homo sapiens
ccatgagcctccccctcccatcccaggctacctgccttcccacctagaaccatcctaccaaatgctcatccacagagcggctgctccgcccaaacacatcyctcacatccctcaaggctgtttccagctttaggacagtgattcccagccaggggaggcatttggattagggatcaagagccagaatctctgaggcaagca

SEQ ID NO: 546390 - DNA, 201 bp, Homo sapiens
gggccctcttcttgagccacacatacaacttgctcagtcaaccccaaccaggaccccagccttgcaggctcatcagcactgcctccaggaacacaccaagygccccgtgacccccttcaggactctctcccaaccaccacactctgaccacgcccaggcctcctgactccattaccttcttgtcctgggcagtcagaacct

SEQ ID NO: 546391 - DNA, 201 bp, Homo sapiens
gggcctgcccacagctgcatgggaactgctctagatgacgggtaagtaactgcccagtgacggatgtggcccagggtggggagatggccccgaaggggagsatccctggcctagggagctcaggcagcactggctggtttgacccctaatgctgctctggtaattcccccctcctgcccattcctgctgggcacctaccca

SEQ ID NO: 546392 - DNA, 201 bp, Homo sapiens
ggctgcctcctgtggggcaggggcacagctgctgctctcccaccctgggctggggcagggcctggcctgcagggctcacagtcctttctttgagggccccrgagccctttcctcagccccacatggctgaggggtatctgatcctcccagccacaagccagaccagtctgctccccaaggaccacacggtgtggacagagc

SEQ ID NO: 546393 - DNA, 201 bp, Homo sapiens
ggtcagccaccagctgctcgtactgggtctgcagcagctctgtctcctggagctgaagcaggatctggtggagggcataggaaggggtcagggtccttctsagggcaggccctggaatgggcactgagtgccagccagagttccccaggtgggctgtagctacttctctgagccaaagatgctttgaagtggtggtacccc

SEQ ID NO: 546394 - DNA, 201 bp, Homo sapiens
tcatccaggaacaggctcagagagctgccctgcaagttcccgcggcagctgtcccaggagctcgagctaggctgtggagaggaggcgggaaggtcgcatgrgccacacgcaggaagccagagctagggcctgtccacgcctcaccatgtgtgtggagcttcccaggaaaagcggtggattggaccaaagtcccaatgggga

SEQ ID NO: 546395 - DNA, 201 bp, Homo sapiens
atctttattcctaatgaccttcagctcctgtgcccgggctcccagcactggctccagggtgtgggccctcacccccacagccccagccccactgcatgctycagggagaccacggcgggggtgcctgcagccccatagggacacctgcctgggggtccctcgtctcagccagctgtgctcctagcccctggtgtccagagg

SEQ ID NO: 546396 - DNA, 201 bp, Homo sapiens; identical to SEQ ID NO: 367666

SEQ ID NO: 546397 - DNA, 201 bp, Homo sapiens; identical to SEQ ID NO: 367667

SEQ ID NO: 546398 - DNA, 201 bp, Homo sapiens; identical to SEQ ID NO: 367668

SEQ ID NO: 546399 - DNA, 201 bp, Homo sapiens
tggggagaggagagggcctcgtgcatctcagggaaaggcagacgcgaggtgttgggtccacgtgagggagcaggccggttctcggggatctggctgacccyggcagtaccacctgcagtgcctctcatggggctgggggaccgggtcagctcaggaggcagccccagcccaggacctacagagatggaatgtcctgggctg

SEQ ID NO: 546400 - DNA, 201 bp, Homo sapiens
ggcatacaccttggcctggcccaggctctgcacttcctttctgaaagcatcaaacttctcttccagcacctgcaaaggtatgaggcccagcagggtcactygagatggtatcatgagctctcaaagctcatgaagagctcagcagactctgatggctctgaaatccctcagcccaggttctggaaccatcgggatcctccc

SEQ ID NO: 546401 - DNA, 201 bp, Homo sapiens
tctcccaccctgggctggggcagggcctggcctgcagggctcacagtcctttctttgagggccccggagccctttcctcagccccacatggctgaggggtrtctgatcctcccagccacaagccagaccagtctgctccccaaggaccacacggtgtggacagagccaaatgccccgtgtgggtctctgcagtgtggccca

SEQ ID NO: 546402 - DNA, 201 bp, Homo sapiens
cgccctccgcagcagctctgcgtgggcctcccgaactgcctgcagctgggctagcaccttggggctgtgggaagagagcgacagtctggactgcagccctscctttccaggctggagcagtctcctgccatctctgtagggggcttctctctgctccttcgcggatggtgtggcttccgcccacctttctgggttcttcct

SEQ ID NO: 546403 - DNA, 201 bp, Homo sapiens
cgtgggcggcaaagtgcccagcctgcaccagcttgtacccagtgcccagcaccacccgggtcagagcctcgtggctgctcatctcactctccaggttctgygggggaggaggcaggaggatgcggatgttgctgacccttgggggactcccacagttgtgcttgaagtttcacgggaccccactaacttgtccccaaggag

SEQ ID NO: 546404 - DNA, 201 bp, Homo sapiens
atccacttctagccacccctccggctcacacctggacctgggtgaggacttccaagagatctctgtgaactctgagggtggtctcggtgtctcggagcgcrtggcctcgggcctgggtcagctcccacagctccgaccaggcggtcctgcccacggcgtgtggaagaccagccggggatcagctgccgggccgtgtcattc

SEQ ID NO: 546405 - DNA, 201 bp, Homo sapiens
gggcaggggtgggggtccctccaggaaggcagggaagagaagctgagggcacgggtggatctacctctgaagcagccgccgggcctgctcttccacatctygggcaaggcagtggccttccctcacaaaggcctgggcctggcccagcagtgcctcagcctgcctggccttcttgtccactgctgcctccagctccctctg

SEQ ID NO: 546406 - DNA, 201 bp, Homo sapiens
gcccctggtggcttctcagctgcgcctccagcccacacaggtcccgtgccacattgttggggaggctcgtggctttctcctgaggaagggagaatgccgasgagatgagggatggagcgtgggcactgagcctggagtgtatccacttctagccacccctccggctcacacctggacctgggtgaggacttccaagagatc

SEQ ID NO: 546407 - DNA, 201 bp, Homo sapiens
gggaggcatttggattagggatcaagagccagaatctctgaggcaagcagagctttttcatttaaggtgaaagctccctcctctgcactccctggaggacsatgttagtccccagttatcctctgaggtctcctataagttacactcgtctgcttcagggttggggcagtggcgggaaaagccaacctctaggcatttggg

SEQ ID NO: 546408 - DNA, 201 bp, Homo sapiens
ggtggccaggcacaggcttggtcagctagggtatgtgggggcaccaggggagggggcccacctccttggtgggtgtccctgcagcaagaagtgcctgctgscccagctgggtggcctgctgccacagcttctcccgggcctccagctccgcccggagccactggtgggcactgagcttcagcgggccactgctaggctctt

SEQ ID NO: 546409 - DNA, 201 bp, Homo sapiens
ggacttcggggccagtgagggtttgggccgtctggtcaagctcctccatggagctccagtaaatggctagttcctcctgtagagcctatgatgcatgaggwcccatgccaggctcagcctgggtgactcatccacccacctgtccgtcccccacccatccagtcaccaatcctcatccattcacccaccactcacacgccc

SEQ ID NO: 546410 - DNA, 201 bp, Homo sapiens
ccatgaaaacaggtggtgcagtagggttgggaatttgaagacaaggaggctctgcaccctctgtcccgtgtcccccacctgctgcagggcctccacgtgtstgcgggtggcgagtagctcgctctcagctgcttcgtgccgcttgagtgtctgcaggatgtttctgcgcgctccggagggctcatgcgcagccatcagccc

SEQ ID NO: 546411 - DNA, 201 bp, Homo sapiens
tgggcagcaggaaaccaggtgctgaggcaactgcagcccacctgagtccactcacacagcccgagccgacctgggtcagggcctcgggtgaggcacatgtrgccctttgtcacttggtttctccgttctcatccaacccgatcctcccagaaccacgaaccccctacatgagccagacccttaccacgacacatctctgcc

SEQ ID NO: 546412 - DNA, 201 bp, Homo sapiens
tagcctgtccctttctttcaggtgactctgcctccccccatttgctgaggcctcctccctccttctccaagacaggccctgctcctcttccccacctgccrtcttagtcccacatctgggctctgttggctggttaaccatcgatcttgcctggtaaataattcagggcctctgtttcctcatctgtgaaatgaaaagcct

SEQ ID NO: 546413 - DNA, 201 bp, Homo sapiens; identical to SEQ ID NO: 367694

SEQ ID NO: 546414 - DNA, 201 bp, Homo sapiens
gcttgtacccagtgcccagcaccacccgggtcagagcctcgtggctgctcatctcactctccaggttctgcgggggaggaggcaggaggatgcggatgttrctgacccttgggggactcccacagttgtgcttgaagtttcacgggaccccactaacttgtccccaaggagttccctgtccccatgactcccaaagaatcc

SEQ ID NO: 546415 - DNA, 201 bp, Homo sapiens
gggcaggcttcacgcttaggcctgtctgcctctggagcccttgctcaccccacccctcctttctcccccaccttagtgagtctcctctggacagtctgccyctgatgcaggcgggagcagtagtggtagtagagggagacgtaggtcatgatagagcgctcatctggctgtgcggctgccacgtcctcggggtccagcagc

SEQ ID NO: 546416 - DNA, 201 bp, Homo sapiens
aagagaagctgagggcacgggtggatctacctctgaagcagccgccgggcctgctcttccacatcttgggcaaggcagtggccttccctcacaaaggcctsggcctggcccagcagtgcctcagcctgcctggccttcttgtccactgctgcctccagctccctctgtgtgcccaggagctcgcccaccccaggcagggcc

SEQ ID NO: 546417 - DNA, 201 bp, Homo sapiens
agggcagaagccaggggctagaagtcagggtggcactgtgctgggggaagctgagcctgccaggaaccacctaaggtgactggggtagggggtggtgacaragaccagcaaagcaaagtttgcattctgttaattcaaagacctccacaggtacccaggtgtggtccacctgcaagaatggagagggggtggccgcgacca

SEQ ID NO: 546418 - DNA, 201 bp, Homo sapiens
aggaggaacttgtctgagtcctgccattagtgggcagcacagggactcaggactgtgaccctggaaggccgatgcttgacctctgtgccctgcgaccttcygtttcgtgagatgatttcctcttggtctcctagcataagcctctctttaaactccctttgatctcaactgaatgaagaaggaagtgggattttccacgtg

SEQ ID NO: 546419 - DNA, 201 bp, Homo sapiens
ccctcctctgcactccctggaggaccatgttagtccccagttatcctctgaggtctcctataagttacactcgtctgcttcagggttggggcagtggcggsaaaagccaacctctaggcatttgggaagcgaggagggcaggggtgaggtggcaagaatgggtcaggcccacacaggcactctagaagctccttggtgttc

SEQ ID NO: 546420 - DNA, 201 bp, Homo sapiens
aaacagagagtgtgttttctggcctctggacctgccatgtatctggggaccagatctgggggagaaaggagacagggaatcccccactgagctcgcaatgsgtgcttctatggtcctgagttgatcctgagggccagcccatcagatgtccctggtgcagactgctgggacccacctccaagtacccagctgaacaggaga

SEQ ID NO: 546421 - DNA, 201 bp, Homo sapiens
aacagagagtgtgttttctggcctctggacctgccatgtatctggggaccagatctgggggagaaaggagacagggaatcccccactgagctcgcaatggrtgcttctatggtcctgagttgatcctgagggccagcccatcagatgtccctggtgcagactgctgggacccacctccaagtacccagctgaacaggagag

SEQ ID NO: 546422 - DNA, 201 bp, Homo sapiens
ggtcctgagttgatcctgagggccagcccatcagatgtccctggtgcagactgctgggacccacctccaagtacccagctgaacaggagaggccagtgagsggggagacgcatgggagactctaggcagtgccccctcccctgactgcatttgctcacagcccccaccgggacctctttccaccacgtaccttctcctgaa

SEQ ID NO: 546423 - DNA, 201 bp, Homo sapiens
tcctgcaggggaggtatgggtgagggcattggcaccccccatgcagagccccttcttcccacctcagcaggcactgaaagcatgcctgggccccggagcaygaggaactgcatatttgggcagtgggaagaactgcctcctgcctcctctactgcggcaggtccctgaggtcaccccgtccaggtgaagtgagcaagatca

SEQ ID NO: 546424 - DNA, 201 bp, Homo sapiens
gcagcatcctatataatgataacattaaaaccacaaagctgacgttggtgtaatactaccaactagaccagacctcattcagattttattagtttttgcargtatgcatctgtgcggggcagtgggggataggtctatgcagttttatcacagctagagattcacgtacctgccaccacacacgtgctctcttacctctga

SEQ ID NO: 546425 - DNA, 201 bp, Homo sapiens
cccacctgcagtgctgcccagggctcgccaccagctctcagcctgctcttcggacggtgctgcaaacaggatctctgccccactggtcagcctggcacccmcagtcacaggtcaaactccactgtccctttggggacccccacgcctccagcccccgctgagccaggtggctgctgggggtgatgccggagtccatgtctc

SEQ ID NO: 546426 - DNA, 201 bp, Homo sapiens
acccagagcccagagccctgggcccagctcaaagtgcaccccttctgccctcctgtcctgacctctcctgccacaggtggatctcctccagcaggtcttgrtgctccctcagcagccgctgagccgaggccacatccactgacacctccttgctgcgcagctgagcctggacactctctgcccacagtagcagttgctggc

SEQ ID NO: 546427 - DNA, 201 bp, Homo sapiens; identical to SEQ ID NO: 367606

SEQ ID NO: 546428 - DNA, 201 bp, Homo sapiens
taaaatacttagcagggtgatttatatcagagggagccagcctggggtcaggacctgcctttgcaggtggaaaagagaatgttttaaaaagtgctatgctrggcacagtggctcattcctgtaatcccagcactttgggaggctgaggcaggtggatcgcctgagctcaggagtttaacaccagcctggacaacatggcaa

SEQ ID NO: 546429 - DNA, 201 bp, Homo sapiens
taaattcacatggaggagtgacacacaggtgggtgggaggacagaccccacctccggaggtgcttctgggtctcttccaggatggccggggaggcggccaygccatgggccatggaggcgagggcagccatcttggcagccagggtccggctctcactctccagctgttggtgccgtttctgcagcctctggctggagcgc

SEQ ID NO: 546430 - DNA, 201 bp, Homo sapiens
gaccccagccttgcaggctcatcagcactgcctccaggaacacaccaagcgccccgtgacccccttcaggactctctcccaaccaccacactctgaccacrcccaggcctcctgactccattaccttcttgtcctgggcagtcagaaccttcaggaagacctcgtgcttgcgaatcaactgctctacctcttccaccgagc

SEQ ID NO: 546431 - DNA, 201 bp, Homo sapiens
gcctgtagtcccagctacttgggaggctgaggcaggagaatggcgtgaacccgggaggctgagcttccagtgagccgagatcacgccactgcactcagccygggcgacagagcaagactccgtctcaaaaagaaataaaaaaacatagggctcttcctgtccccaggaccattttctcctgatcatccccccatctttgcc

SEQ ID NO: 546432 - DNA, 201 bp, Homo sapiens
gggcagagggtacaaggttgtctccacaacagggacacctccccatccatccgggagccttggccagagcctcacgtgacagaagctgccagactggctgycccttgccccttccctgtgcctcggacacgtccagcctctccatctggcatggcgggaggcaggtgagtcaggcccgggctgggcactgtgtctgcctgc

SEQ ID NO: 546433 - DNA, 201 bp, Homo sapiens
tggcactggggaagtcccccaccctgctgtgtttcccaagggcctgctggtccagtgcccacctgcagctcctccagctggtgggaggcagcctccacctyctgcagcaggctcagcacagcctgcatgtctgccacctgcttcctctgtccctgtagatgctgaaggagcctctgccagcgcacggtaacttcctcctgc

SEQ ID NO: 546434 - DNA, 201 bp, Homo sapiens
cagccgcaggaggtggatgccgtcagccagctctgtgtacaggttccggatcttgatgcccgcctggggaggggacaggggtaagtatggggtcagcccakcctcacctgtcctcccatcctgggacctgagaggtacgacccagagcagctgctttggaagaaggagctctggcctcagcttggcctcaggcagatgacc

SEQ ID NO: 546435 - DNA, 201 bp, Homo sapiens
cagggccagggtggcaggaagcctcactccagggccctgggttcctcaggctttctcctggagggctcagggcagagttcacctgtgtgacaaagggcagygcgtctacaggcgaccccatcaagcagcaggggctttggccaggccacccctacctccgtgccctgagacctggaggcgctgagctgtagctcaaagggt

SEQ ID NO: 546436 - DNA, 201 bp, Homo sapiens
cctcaggcagatgaccccacagctcaccccggaggcccactggccagagctgggggcctggtatgggtgggctgtgggtcacagctggctatactcacctrgccgcactggaagacgttattgatccacttggtgaaagtcttctcctgcatctgcatgtgccgggcctgtagcttgcgaatgtggcccgtctcgtactga

SEQ ID NO: 546437 - DNA, 201 bp, Homo sapiens
gcagggcctcacccgctgcagctcctgctgttggtgcatgctcgcgtccagctccgcctggaaattctgctgcttctgtaactgtgctggcagcatggctrtgtccagcaaaccctcctccaaggccaccaggttcttctccctcagccacgcagccacctgggcacatggggaggacaggcctgctgtccagggctttcc

SEQ ID NO: 546438 - DNA, 201 bp, Homo sapiens
gagcagggcctctgcggcccctcgctgctgtagccggggtggcttctcctgggtgcggaagatggtgaatgctgccagtagctgccgcatggcgggcagcragtctggaaaatcccgcgcctccagctgcatctgcttctctgcaatccagcgtagaaggtcagccaccagctgctcgtactgggtctgcagcagctctgt

SEQ ID NO: 546439 - DNA, 201 bp, Homo sapiens
tcgctcctggatggcctccgaggctgggtggcccccctgcagcagcctctgtccctcctgcagccacaacatgaaacacaccttgtggactcaggactgcyggtaccagggcacttgtgttgactctgaccaccagcactagagctgcagagtccctgcggtccagctgcatgatcttgagcaactttctttacctaagcc

SEQ ID NO: 546440 - DNA, 201 bp, Homo sapiens
gccatagtcccgactgctcaccagcggccgcttctcctccacccagccctccagctctgacacatccagaaagtactgccaagagtggggccaactcaccyggaggatctcagacaggaccctccgtcagccctggagacatctgcccctgctctccagcatcaaaggggcttctgtgcccataggggcacccatcagctc

SEQ ID NO: 546441 - DNA, 201 bp, Homo sapiens
agctgctggtaccaccagtggccgcagcaggctggacctgggtggcagtggaggtgagggggtgaccacagctgcactccacgggctgcctggaagaaagmagttcatgtggccccaaaactgcaggtaggggggctttcctctgacccctgcaaatagagcggggtgagccggcattaggttggtggctggggagagccg

SEQ ID NO: 546442 - DNA, 201 bp, Homo sapiens
ggcctttccctgggtcgactccttccccaccatgaccgcctccctctccaagcgaggcgaacctcctgggagtcctgcaggaaggcctgcagctgccggarctcctccaggcgatggcggcgggtcccggcttgcctgaagagcgcctccttcctgccaggaggagaggctcatgggcctggagccacccccggggccagg

SEQ ID NO: 546443 - DNA, 201 bp, Homo sapiens
ccacccccacctgcctctctagtctctcctctggccatggcctccccagcgtctgtgctgcagggacctgggccttcgcttcctccgctgggcccccttcytacctttgcacaggtcctggccagcacccctgggtttacctgctttctgtttctcattcaagcctcagcttaaaagtccttccctccaaggtgccttccc

SEQ ID NO: 546444 - DNA, 201 bp, Homo sapiens
caggatgccagcctccagcatgcccagcctctggacggctgcctccactgtggccaggctggctggcggggctctggcctggtctagcacctgctctgcayccttaaggaaactctcccggagggctgccttgcgctggaagcgccgggccagggtttctagccgctgcagctgcagtagcctctgctgcagggcctggct

SEQ ID NO: 546445 - DNA, 201 bp, Homo sapiens
ccaccatgcccggctaatttttgtatttttatttttatttttattttttatttatttatttttgagacagagtctcactccttcgcccaggccggactgcrgtggcacgatctcggctcactgccagctccgcctcccaggttcatgccattctcctgcctcagcatcccgagtagctgggactacaggtgcccgccacca

SEQ ID NO: 546446 - DNA, 201 bp, Homo sapiens
ccgcctcagcctcccaaagtgctgggattacaggcatgagccactgcgcccggccaatttttgtatttttagtagagacgggtttcaccatgttggccagkatggtcttgaactcctgacctcaggtgatccacccgccttggcctcccaaagtgctgagattacaggcatgagccaccaggcccggcctaacatcttgat

SEQ ID NO: 546447 - DNA, 201 bp, Homo sapiens
tgcagaggcgctggctttgtgtcaccacaggtgatcacacagcaacagctcccgttttttgagcccttctgacgggccaggtgctgtgctaactgacctakgctcatgggattgtggctgggcttcatgaaactgggtcccgtcactgcaggctttctgtgagccaggcccagtgttatgggctggagtgcagtggcacga

SEQ ID NO: 546448 - DNA, 201 bp, Homo sapiens
gcagccacaacatgaaacacaccttgtggactcaggactgctggtaccagggcacttgtgttgactctgaccaccagcactagagctgcagagtccctgcsgtccagctgcatgatcttgagcaactttctttacctaagcctcattttcctcatccgtatcatagagaaaataatggttattttgtttaaatgagataag

SEQ ID NO: 546449 - DNA, 201 bp, Homo sapiens
tcccatgttctgggctccagcacagcctctgggaaagccatccacccccgaacctgtttccgcctcacagtgttgcggtgtgaaggcggctgaaaactgtygagtgtggttccagtggaaggccctgggctgggggtgccctctgacctgggttgcggcctgggtgaagctggccatcagcagggaggcatgcagggcgtg

SEQ ID NO: 546450 - DNA, 201 bp, Homo sapiens
cagggaggcatgcagggcgtgtccccggctctccgccagctccttcactctcatccggcgctgcagcaggatgggaagccggtcccgcacccgggggcgcyggagcgtcttcagccgctcacgcagggctgcctcctgtggggcaggggcacagctgctgctctcccaccctgggctggggcagggcctggcctgcagggc

SEQ ID NO: 546451 - DNA, 201 bp, Homo sapiens
tctttgagggccccggagccctttcctcagccccacatggctgaggggtatctgatcctcccagccacaagccagaccagtctgctccccaaggaccacayggtgtggacagagccaaatgccccgtgtgggtctctgcagtgtggcccatctccccctgggccctcttcttgagccacacatacaacttgctcagtcaac

SEQ ID NO: 546452 - DNA, 201 bp, Homo sapiens
ccccgtgtgggtctctgcagtgtggcccatctccccctgggccctcttcttgagccacacatacaacttgctcagtcaaccccaaccaggaccccagcctygcaggctcatcagcactgcctccaggaacacaccaagcgccccgtgacccccttcaggactctctcccaaccaccacactctgaccacgcccaggcctcc

SEQ ID NO: 546453 - DNA, 201 bp, Homo sapiens
caggaggcgtgcccgctccagctgggccctgcgctgctccatgcgtcgctgcagcactgcccacgcctgcgtcacagcttgctgcctctgctgcaccgcaygggcctgaggccccggacacagcttctgcaccctgcctgcagtctccagcagttcctgcagctgcgggaggggcagggaatagggaggcaagggtcatgt

SEQ ID NO: 546454 - DNA, 201 bp, Homo sapiens
tatcgggacttgcccaaagctcctccttcttaaaacctctcccgcctgtggccctgcctacgcaccttcttcctgggagcctgtcttctagctttaccatkaattcagtgctttgctgctgtaatgctcggcactgcatggtatctgtgctgtgatactctttacatcctgtgctttgactcacagtgcgtcacccaggtt

SEQ ID NO: 546455 - DNA, 201 bp, Homo sapiens
cagggaaaggtgaatgctggctaatctgggccaaggaagggagggcacaggaggcattagactggaccccaacatccatgtgtaagagagaggcagagttraacaagctgtccagtatagccgggagatgggtgctccgtgaggccaaggctacaggcctttagaaagaccttctctgaaggtcctgtcgcagaacacact

SEQ ID NO: 546456 - DNA, 201 bp, Homo sapiens
ctcggccagaagtgcccaatcttcccctgttccctcacgcttcttcttccctgggggactcaagtggtgctgaccacccgctgggcacacaggagagaatyctgcattggccgactgagcggaaagccacgctcagcttgtcctaggccagaagcctccagaggctgcagagccagggtcagcagaacacccagacttctc

SEQ ID NO: 546457 - DNA, 201 bp, Homo sapiens
cgtgtcccccacctgctgcagggcctccacgtgtctgcgggtggcgagtagctcgctctcagctgcttcgtgccgcttgagtgtctgcaggatgtttctgygcgctccggagggctcatgcgcagccatcagccccttctcttccatccactgcatcagctctgccacatcctgcttccactcctgccaagaaccaggcga

SEQ ID NO: 546458 - DNA, 201 bp, Homo sapiens
acaaaggcctgggcctggcccagcagtgcctcagcctgcctggccttcttgtccactgctgcctccagctccctctgtgtgcccaggagctcgcccacccsaggcagggcctggcccacagtgggggctctcagctcaacctcgatgggctccagccagttctccagttcctccatgctccgccgcagacgcagggcctag

SEQ ID NO: 546459 - DNA, 201 bp, Homo sapiens
atgcatttcagtgcccacttggccacctgtcaagtgccttcaggaggggcacagcctgtggactgtccctggtggccttgcctgcctgccagcccataacrtcatccctgcaggaggagaggcgccaccttactaaggaggtggggatctcagacccgtgggtgggtcctgagccattccacttaggggccgctggggtcc

SEQ ID NO: 546460 - DNA, 201 bp, Homo sapiens
ctcggcctgcagcctctcttgcttccgtgcccaggtctgatacacctggtcccgctggtcctgcagggctcgaagctcttcctggacctggggatggacayatgaggagcctcagctggggagggtggtgtgggtgaggtgaggactggatcctgagggaagctcctgaggagaggccagcatggcacagtaggacggggc

SEQ ID NO: 546461 - DNA, 201 bp, Homo sapiens
gaggggctctgacgggaaaccaagcagaaggggaagagcaggtggggaggaggaatcccagcacctcctggtgggggtgggtaggtgggggcggtggcagragctgggaagggtcccaaggagccaaactgcctggacagcatggtggggggtggcatctgcccaagttcacagtgcaagggtgccaggcccagatggctc

SEQ ID NO: 546462 - DNA, 201 bp, Homo sapiens
tcgaggggccaaacgtgagcacaggatctgatggctttgatttccacatcgtgtgctgcatacacagcttcttgaaagagggctgtgagccaagctatacstgttttaaagaactttgggggctcaatgaactgagcaaggggtgtcagaaggcagtctgggtgagtgatgaggccaccccaaaccaacaaggcgggctaa

SEQ ID NO: 546463 - DNA, 201 bp, Homo sapiens
tgcacaagctgggccaagtcctagggcccctcggggaaggatctgggtttctggagaagaggctgaagcaggctggggtgggagggctgagataggtcccytcagccaccgccttcgggcaggggctcagacaggcaggctgcagggcgtgggcctcacctccaggcgcctgtgctgttgctgcagggtccgcacagatga

SEQ ID NO: 546464 - DNA, 201 bp, Homo sapiens
gggaaaaggaggacccagccctcttgggggactttttctctttccacactcccctctagcctatgacggacctgagtggtgctctctgctacagggatgcycatgctgcctgcccctggaaagacagccatccgagtccttaagggccaggaggccctcgaaattcaggccagctctctgctcccctcccccaggcaggac

SEQ ID NO: 546465 - DNA, 201 bp, Homo sapiens
atccatccgggagccttggccagagcctcacgtgacagaagctgccagactggctgtcccttgccccttccctgtgcctcggacacgtccagcctctccayctggcatggcgggaggcaggtgagtcaggcccgggctgggcactgtgtctgcctgcctcaccacctgcactcctgcctcattctcacctctggctcagtt

SEQ ID NO: 546466 - DNA, 201 bp, Homo sapiens
tgtccccggctctccgccagctccttcactctcatccggcgctgcagcaggatgggaagccggtcccgcacccgggggcgccggagcgtcttcagccgctyacgcagggctgcctcctgtggggcaggggcacagctgctgctctcccaccctgggctggggcagggcctggcctgcagggctcacagtcctttctttgag

SEQ ID NO: 546467 - DNA, 201 bp, Homo sapiens
gctggggcaggggagctctgggccacccaagcccctcctccccacttgtgcccagggtcctactcaggagatgccctgggcccagctctacagccagctaygcacctccacctgggcctggatggggtgcacttcccgctccagctcctcgtgtttccgcagcagcctctgcacgctctccagatctttcccacagtccag

SEQ ID NO: 546468 - DNA, 201 bp, Homo sapiens
cagcatgccagacaccaaccagtctgggcccctccctggggaaatcacactacttcccgcatgctctttctgggcctgaacccagagcccagagccctggkcccagctcaaagtgcaccccttctgccctcctgtcctgacctctcctgccacaggtggatctcctccagcaggtcttggtgctccctcagcagccgctga

SEQ ID NO: 546469 - DNA, 201 bp, Homo sapiens
ccagacaccaaccagtctgggcccctccctggggaaatcacactacttcccgcatgctctttctgggcctgaacccagagcccagagccctgggcccagcycaaagtgcaccccttctgccctcctgtcctgacctctcctgccacaggtggatctcctccagcaggtcttggtgctccctcagcagccgctgagccgagg

SEQ ID NO: 546470 - DNA, 201 bp, Homo sapiens
ccatcccaatttctgtcccttcctcattccactgccctgcccacgccttcccatggtcctcactgcctcccaatgccaccactgcgctggccgtactttaygaccacactttggaggaagtggaccctcctctccagcaccagggtcttcttctgggccagctgcagggcgtggcgggtgtcctctgagctccctggctgc

SEQ ID NO: 546471 - DNA, 201 bp, Homo sapiens
ccaccactgcgctggccgtactttacgaccacactttggaggaagtggaccctcctctccagcaccagggtcttcttctgggccagctgcagggcgtggcrggtgtcctctgagctccctggctgcagggcctccagctggaggagcacgtctcgcagctggacctgtgtgggtccacactcctgcagaaaactgcacact

SEQ ID NO: 546472 - DNA, 201 bp, Homo sapiens
gacagaagctgccagactggctgtcccttgccccttccctgtgcctcggacacgtccagcctctccatctggcatggcgggaggcaggtgagtcaggcccrggctgggcactgtgtctgcctgcctcaccacctgcactcctgcctcattctcacctctggctcagttcctcctgctgtcgttggatttgtgtggagttcc

SEQ ID NO: 546473 - DNA, 201 bp, Homo sapiens
gggtttagacactccccttagacaggatttttcttttccctggatgactcaacaggtgagacggaggctttggaagtgagggtcagtgtggagaaaactgscaggccaacagtactttaacctgggcaggagataatttgggttacagaaaagttctgggaaaggtggaagagttggggcaggctcttaccgggccctgac

SEQ ID NO: 546474 - DNA, 201 bp, Homo sapiens
gcggtggacctggccggctcctggccagagatgatggtcattgcagtggtcccaaggtgctgggtccctctgagcactggcactggggaagtcccccaccytgctgtgtttcccaagggcctgctggtccagtgcccacctgcagctcctccagctggtgggaggcagcctccacctcctgcagcaggctcagcacagcct

SEQ ID NO: 546475 - DNA, 201 bp, Homo sapiens
caggagccctcaccgccgtgcggaagcgggccaggaggcgtgcccgctccagctgggccctgcgctgctccatgcgtcgctgcagcactgcccacgcctgygtcacagcttgctgcctctgctgcaccgcatgggcctgaggccccggacacagcttctgcaccctgcctgcagtctccagcagttcctgcagctgcggga

SEQ ID NO: 546476 - DNA, 201 bp, Homo sapiens
aaagtcccaatggggaaagggaagccacagaggggctctgacgggaaaccaagcagaaggggaagagcaggtggggaggaggaatcccagcacctcctggbgggggtgggtaggtgggggcggtggcaggagctgggaagggtcccaaggagccaaactgcctggacagcatggtggggggtggcatctgcccaagttcac

SEQ ID NO: 546477 - DNA, 201 bp, Homo sapiens
tgcttcccagcaccctgatgtctgcatctcccctaccccgcctggtacctccgctgccatcctctcatccaggaacaggctcagagagctgccctgcaagktcccgcggcagctgtcccaggagctcgagctaggctgtggagaggaggcgggaaggtcgcatgagccacacgcaggaagccagagctagggcctgtccac

SEQ ID NO: 546478 - DNA, 201 bp, Homo sapiens
ggcaggggcaaggcgaggaggaggtgccaagctcccagggctgtacctcatatttgagctgcatgacctccagggtgtcagcctggggctgcaccctttgragcagcactgtctgcttctccagccacaactggagctccccacaggaactgcagaaaccgaacagggccatggcctcctccaaccgggccctgcggagct

SEQ ID NO: 546479 - DNA, 201 bp, Homo sapiens
gacggctgcctccactgtggccaggctggctggcggggctctggcctggtctagcacctgctctgcatccttaaggaaactctcccggagggctgccttgygctggaagcgccgggccagggtttctagccgctgcagctgcagtagcctctgctgcagggcctggctccttgcagcctctgcccactccagccctgccca

SEQ ID NO: 546480 - DNA, 201 bp, Homo sapiens
gtgggggtgtggggcgggctgagcacttgtgggcaggtttttcccccatgcgtcctgcctcttaggaaactcctcacaggtgagttaagaaaggctgagcstttcttaggaggtgggaaattctggaatgtcgaacaactcaagatccctttgggctcctgggaagacagactcttgggaggagagtccaggggaaccagc

SEQ ID NO: 546481 - DNA, 201 bp, Homo sapiens
cggcaggcctccgtctgtagccgtgccacctccttctccatagcttccagctctctctgcaaccagagcatgagatcaggcctcagtccccccactgagcygatgcgtgctctgcattcaggagcaccaggcctctctgaggaaccacctccactctgctgcacaagctgggccaagtcctagggcccctcggggaaggat

SEQ ID NO: 546482 - DNA, 201 bp, Homo sapiens
ctggctgcagggcctccagctggaggagcacgtctcgcagctggacctgtgtgggtccacactcctgcagaaaactgcacacttccacactgtgtgccagmtgcacggccttctccctcttcagggcctccagctgcccccacctgggcagagggtacaaggttgtctccacaacagggacacctccccatccatccggga

SEQ ID NO: 546483 - DNA, 201 bp, Homo sapiens
tgctgcccagtgcttcgggccaggctgatgctgtctgtccaggagtccagctcggcctggaacaggactgggctcagatcactgggggctggaagcagccmagcaggcaggagagaggtggggaagcagctgaggagcgggaggctggaggagataggcagggcgggacactcaggaggcccaagagcaaggagatgagag

SEQ ID NO: 546484 - DNA, 201 bp, Homo sapiens
agagcctgaagccctctggtttggaagggaaggagatgtgggtgaggggggttgagcatcgaaatgatgctgggatctacaaggagggactgaggagccakgtaagagcctcctgcccctgcacatccaccttcgcatctcctccctggcctgcaggccgggacatgctggacctctccattgccatggagtggggattgg

SEQ ID NO: 546485 - DNA, 201 bp, Homo sapiens
gggctgccatggggcatgtgctcggctacccaagagagctccatgttgctcaggtggcagaactggtgcagctccactgaggcctgcagctgcaggcccckgatggccagatgcccctgcagaagctccagcctaggaggaggaggaagagattggagaggttgggaacagagtgagcacaaggctcctggttctttcctt

SEQ ID NO: 546486 - DNA, 201 bp, Homo sapiens
tacagagctcgctcatcagtgttcttcctccgaagagcacattctctgcacacgtctgcgtctacctgtgctcagagtcaccccttccaagcaaggaggargccacatgggcctggggtagccctggccttgcccacctgctctgccgtaacacgtctcctcttcacccagacaggaatgcagggggaggccaggcaatgg

SEQ ID NO: 546487 - DNA, 201 bp, Homo sapiens
cacttgatacatcacagactcatacaaatgtgaggcgctgagaccatctgttattactgctgagaagggccatgtcattctaggctcttggctgtacatgrcaagggctggtacagagctcgctcatcagtgttcttcctccgaagagcacattctctgcacacgtctgcgtctacctgtgctcagagtcaccccttccaa

SEQ ID NO: 546488 - DNA, 201 bp, Homo sapiens
cctcattccactgccctgcccacgccttcccatggtcctcactgcctcccaatgccaccactgcgctggccgtactttacgaccacactttggaggaagtrgaccctcctctccagcaccagggtcttcttctgggccagctgcagggcgtggcgggtgtcctctgagctccctggctgcagggcctccagctggaggagc

SEQ ID NO: 546489 - DNA, 201 bp, Homo sapiens
cgcgccgcctctgcccgcaggtgggccatggccttctccagctgctgcacccgggcggccacctcgtgggcggcaaagtgcccagcctgcaccagcttgtrcccagtgcccagcaccacccgggtcagagcctcgtggctgctcatctcactctccaggttctgcgggggaggaggcaggaggatgcggatgttgctgacc

SEQ ID NO: 546490 - DNA, 201 bp, Homo sapiens
tgttcctgtacttgcttcagcagcccctgcagtgtctccacctgtccttgcagaggctggctctctgcgtagcctggctcctcgaccctgggagacagggygcgctgcacagtcagtgccctgtcctgggcctggtgccccaggcacatgtcctctctccaaacctgcatcccccagggagagtggtgctgactctcaatg

SEQ ID NO: 546491 - DNA, 201 bp, Homo sapiens
gcccttgggggcaggagaccactgagtggaggagacgaaaggtgcccaggccaggagccccggagtgacctcccagccgcactcgccctgtgttccaggcytgcctgctgtgccctgcccatcactcccctcacctcagtcagaaactgctgggcctcctgagcctgctgcagcagaagccgcctccgcgccgcctctgcc

SEQ ID NO: 546492 - DNA, 201 bp, Homo sapiens
acctggagctcctgccacagagtggcttgagaggctgctgctcttaacccaggggcgtccggagcagagccatggatgtggctccaggccccaatcatggmaagacccccagggtcaaaatagctggggcagagatttggaaattgggatacccaggggtgagggcttagaggccaggacacctgagtaggggcagagggt

SEQ ID NO: 546493 - DNA, 201 bp, Homo sapiens
aggggcctcctgcccagcctggcttctggactcaaggggatgagctccctccagtgatggggagtgacagcctagctccacattcctgctccataccccarggttgtccaggtgcagccaggcctggtggttggcacaggtggcagtgaaaccatccacttctcggccaaacttctgcagctccagcccctcttgcagcca

SEQ ID NO: 546494 - DNA, 201 bp, Homo sapiens; identical to SEQ ID NO: 367684

SEQ ID NO: 546495 - DNA, 201 bp, Homo sapiens
agagaacgctaagattcttttggcctagaatcctgtgagtctctcttatgacagacagtgacattttccaccccagtagggacctggattgctactgccawggccagctgggtgctctccaagtcaggggtgctgtgcgaggagggcgtggcttctgctcctctgtgtcccagccactcctcctgtactcaggccccagct

SEQ ID NO: 546496 - DNA, 201 bp, Homo sapiens
gacctgggccaagatcagtggttcagctgcagggtttggaaatgaggggtcataacagtcaatgtgtgagcccaacagacaatagcaactgtctgcctccrtctcccagggtgtcctgggatcttcagggggtggctgggtccctgggctcacacccaaatctcagccctcttcttctgttccggctccaacagggccagc

SEQ ID NO: 546497 - DNA, 201 bp, Homo sapiens
cctccccccatttgctgaggcctcctccctccttctccaagacaggccctgctcctcttccccacctgccgtcttagtcccacatctgggctctgttggcyggttaaccatcgatcttgcctggtaaataattcagggcctctgtttcctcatctgtgaaatgaaaagcctaagagaacgctaagattcttttggcctaga

SEQ ID NO: 546498 - DNA, 201 bp, Homo sapiens
atctagaggaacaggcaggccagcctgagggggctgcaggggcctgggtcggagaggcagccagctgggctcacctgccgctcggtgcccacgagttctcrctccagcccctggtggcttctcagctgcgcctccagcccacacaggtcccgtgccacattgttggggaggctcgtggctttctcctgaggaagggagaat

SEQ ID NO: 546499 - DNA, 201 bp, Homo sapiens
cccaggtctgatacacctggtcccgctggtcctgcagggctcgaagctcttcctggacctggggatggacacatgaggagcctcagctggggagggtggtrtgggtgaggtgaggactggatcctgagggaagctcctgaggagaggccagcatggcacagtaggacggggcaccaggtggccaggcacaggcttggtcag

SEQ ID NO: 546500 - DNA, 201 bp, Homo sapiens
acatctgggctctgttggctggttaaccatcgatcttgcctggtaaataattcagggcctctgtttcctcatctgtgaaatgaaaagcctaagagaacgcyaagattcttttggcctagaatcctgtgagtctctcttatgacagacagtgacattttccaccccagtagggacctggattgctactgccatggccagctg

SEQ ID NO: 546501 - DNA, 201 bp, Homo sapiens
cacgggtggatctacctctgaagcagccgccgggcctgctcttccacatcttgggcaaggcagtggccttccctcacaaaggcctgggcctggcccagcartgcctcagcctgcctggccttcttgtccactgctgcctccagctccctctgtgtgcccaggagctcgcccaccccaggcagggcctggcccacagtgggg

SEQ ID NO: 546502 - DNA, 201 bp, Homo sapiens
gcttaccttggtgatgcctgggtcccacagagacggctctgctggacggatggagatggtagatagcaggggctgcttaccttggtgatgcctgggttccmcagaggcggcccagctggacggatggagatggcagatagcaggggctgtggagggagggagagggacatcaggagaggccaaggctggagcagggctgca

SEQ ID NO: 546503 - DNA, 201 bp, Homo sapiens
tgcaggaactccaggaagttccgcctgtcctccagctcctggcccctgagggccattgcctgcctcaggtcctcccagtgcttccgcaggccctgcagccrctgggagacctctccggctcgagggtgactctgtgccaggagagcctctcccttctggagggagagaggggacacaggacatcttgcctgctgcacttcc

SEQ ID NO: 546504 - DNA, 201 bp, Homo sapiens
ccagggcaggccttcctcagcctctgcccactccccgtgaggtttgctcaggagtaactcaccttgacaccctccaggtcctgcccgtagtcctgggactyggcggtggccgccttggtggtcagccaggcgtcgaggagcagggtctctcgctccagctggtgtagctgcagctgctcctgcaggccgtgccccctggcc

SEQ ID NO: 546505 - DNA, 201 bp, Homo sapiens
caaaggggtgctcctccccatcccagcccaccagcagagcccagggtcagggccagagggggtccctgcctcactgctgggccccacatcctctctcagakccctcttggcaccacctggagggagatggcaagggcttagggaagggtaaagggcactggcagtgtgctcctgtctggtcttgccctgctgaaacctctc

SEQ ID NO: 546506 - DNA, 201 bp, Homo sapiens
gggcaggccttcctcagcctctgcccactccccgtgaggtttgctcaggagtaactcaccttgacaccctccaggtcctgcccgtagtcctgggactcggyggtggccgccttggtggtcagccaggcgtcgaggagcagggtctctcgctccagctggtgtagctgcagctgctcctgcaggccgtgccccctggcctcc

SEQ ID NO: 546507 - DNA, 201 bp, Homo sapiens
acgtcagtagtgctgggtgtttcggataaccatgtccagaacagtatgctaagcctcttgtgctgacaggatggcacactcaagaacatcttgggcagcayaggtgagggggttagaggccaggctagcctcttgtaccgggcacctgcggtcatttctggttaagagctggagacttccctcaggaggtgaggcctgaag

SEQ ID NO: 546508 - DNA, 201 bp, Homo sapiens
taacaatactaatgatgagagtgatgagtgtctcccgtggccgtgtcctctctgaatctctgagcattttatctttcatctctgtgggagttgcggcttartaataataattagagtaccctgagcatcggtgctttgtagaacacagcattaagccctgtttctgcctccttggagtgtagtctgtatgaactggcagac

SEQ ID NO: 546509 - DNA, 201 bp, Homo sapiens; identical to SEQ ID NO: 367607

SEQ ID NO: 546510 - DNA, 201 bp, Homo sapiens
cgctgggttcagccaggtgtggaactgagcgttagatccatgctggatctgcggcagctggaaacactggccccaagcctgcaggaccctagccaggactygctggccatcatcccatctggtcccaggaagcatgggcaggaggcccttgagacttcactcactagccaggtgagcctgctttctcccagctctctagag

SEQ ID NO: 546511 - DNA, 201 bp, Homo sapiens
taagctagtatgtgtagtgtgccaggcacatagtaagggatatgtggatatttgttgatcttactgtgtggttgttgttactcctcccccaccccctaccycccaccaggcacaggagtccgtggggttcctggacccagctcctgcagccaacccaggacccagaagaagagggcgctgggttcagccaggtgtggaact

SEQ ID NO: 546512 - DNA, 201 bp, Homo sapiens; identical to SEQ ID NO: 367608

SEQ ID NO: 546513 - DNA, 201 bp, Homo sapiens; identical to SEQ ID NO: 367609

SEQ ID NO: 546514 - DNA, 201 bp, Homo sapiens
aaaaaaaaagaaaaggaaaaaaacagtggagcccttctgagctctttctacccagctccctctgccgggtgactggaagtcctgggtggcctggagggctyctgggggagctgtggtttgctgctgagcctgttgtctgctcatctcctcaggtgtgtggttgtgttgttcaatccccggaaacacaaacagcaccacatc

SEQ ID NO: 546515 - DNA, 201 bp, Homo sapiens
ggtggccgagctgcaggagcacaagtatggtgtggcttgtgtggccttctctcctagcgccaagtacattgtctctgtgggctaccagcatgacatgatcrtcaacgtgtgggcctggaaggtgagtggctgggtggggtggcctggcagcctcacaggggtcaagtgtcagctggggaggcaagagactgctgacctgca

SEQ ID NO: 546516 - DNA, 201 bp, Homo sapiens
ctttatcatatttcctctataccctgccctgacttttggctggggaagtgatggtatctagtagctgaggaggcgagggccccgctctggaagacgaagtrgggctgtatgcctgtggagaagtcaagaactcacttccagttcttgcctccctgcagagtgggcacatgcctgccgtgcgggtttgggacgtggcagagc

SEQ ID NO: 546517 - DNA, 201 bp, Homo sapiens
gtgcctagaagaatcctcggttcctaatccctggctggacagggctgaggggctcagaacagggcagctgggcggcttttcccttgcccctgccttggccrgtccctcctcttggcaggtggctgttgatgggtggggaggagagaagactgagtgggcaggtggccttgctgagctgagccactctgcccacagaccaca

SEQ ID NO: 546518 - DNA, 201 bp, Homo sapiens; identical to SEQ ID NO: 367616

SEQ ID NO: 546519 - DNA, 201 bp, Homo sapiens
caacatggtgaaacctcatctccccactaaaaatacaaaaattagccagacacgatggtgggtgcctgtaatcctagctactcgggaggctgaggcagcasaatcgcttgaaccctggaggcagagattgcagtgagctgagatcaccccactgcactccagcctgggtgacagagcaagacttgtctcaaaacagcaaca

SEQ ID NO: 546520 - DNA, 201 bp, Homo sapiens
tggggtcgaggtgagaggtgatgtggtattcagtgcccgtcagccaactgtgggccttcacctctacctgcacttcccctctcacaccagctgcactcccstggctgccagagcagggtggttttccccaatacctggagctcagaaaggcagagccatctggccctccagggtgtccccagccatcaggagacttgagtt

SEQ ID NO: 546521 - DNA, 201 bp, Homo sapiens
ctactaaaagtacaaaaattagctgggcgtggtggcgcacacctgtagtcccagctactcgggaggctgagggaggagaattgcttgaatccacaaggcaraggttgcagtgagccgagatggcgccactacactccagcctggcaatagagcgagactccgtctcaaaaaaaaaaaaaaaaaaaaaaattagctgggact

SEQ ID NO: 546522 - DNA, 201 bp, Homo sapiens
actcaggtatttataacttgaattgagtgggattgagaagtgggggaagggaaaagggggaagaaagtagctggtggcaacaaaacatagcaacaaaaacagatctttttcctcacagttgctggggtttctttaccagtatgaggtcagccaaatcctaggggaccctggccttttgtgactctggcctcttagttctct

SEQ ID NO: 546523 - DNA, 201 bp, Homo sapiens
tgtaacatgcaggcctacctccattaccctgacattcattggttggcttctgtttgagagggcacagtatctttgtatgccatgattgttttcatataacrtaataacctgctgctgacttttctcaacatgtcctttctgcttatgatgttctttctccaggctgctttgggttctcttgtaaggcccgtacagcagctg

SEQ ID NO: 546524 - DNA, 201 bp, Homo sapiens
ctcaggtatttataacttgaattgagtgggattgagaagtgggggaagggaaaagggggaagaaagtagctggtggcaacaaaacatagcaacaaaaacagatctttttcctcacagttgctggggtttctttaccagtatgaggtcagccaaatcctaggggaccctggccttttgtgactctggcctcttagttctcta

SEQ ID NO: 546525 - DNA, 201 bp, Homo sapiens
gttatttaagtttctaatgttgtgaccagagtaaaataatctattaaaaaatttttttttgcttaaaaaaataaagatacatgaagatgtgaagatatagrtgcaatcatacccttacactactggtgaaaacatacattaatccaactttcttagaggacaatttggtaatatctattagaaaattttgcatattcatac

SEQ ID NO: 546526 - DNA, 201 bp, Homo sapiens
aaaaaggtttgcaaaaatgtaaaacagtgccattcttctcactaattatttttgttttggaaaataaagttatatttaataagaacgctaatatgtgggcygggtgcagtcgctcacgcctgtaatcccagcactttgggaggccgagatgggtggatcatgaggtcaggagatcgagaccatactggctaacacggtgaa

SEQ ID NO: 546527 - DNA, 201 bp, Homo sapiens; identical to SEQ ID NO: 367638

SEQ ID NO: 546528 - DNA, 201 bp, Homo sapiens
tgatcagatccagggacttgagagagcagaaaagcttcgaaggccctgcccagtgtctaggattgtatgtttagggctctgggaccgcttgggatcttatrctgtgccacctctgttgaggatggctctggactctggagagttctgtccttgcctccttcatttctttcagcactcactattaatcacccctcccttctg

SEQ ID NO: 546529 - DNA, 201 bp, Homo sapiens
tagccagacacgatggtgggtgcctgtaatcctagctactcgggaggctgaggcagcagaatcgcttgaaccctggaggcagagattgcagtgagctgagrtcaccccactgcactccagcctgggtgacagagcaagacttgtctcaaaacagcaacaacaacaaaccagatgtttgagttcttcatactctttccctcc

SEQ ID NO: 546530 - DNA, 201 bp, Homo sapiens
ctaaggtgggaggattgcttgaacctgcaagttgaggctgcactgagccatgtttgcaccactgcactctggctgggatgacagagtaagatcctgtctcaaaaaaaaaaaaaaaaaaaaaagaaaaggaaaaaaacagtggagcccttctgagctctttctacccagctccctctgccgggtgactggaagtcctgggtg

SEQ ID NO: 546531 - DNA, 201 bp, Homo sapiens
agggtgggtgaggatgtactaggcactgtgctaagcattttacatatactatcttattcaagttttacagaagtctaccataaatactattaccaccccattttgtagttaagaaaactaatgataagagaggtcaggtgagtagctggtagttacatagccagtgagtggctaagcaagaattcaaatagaggctttctg

SEQ ID NO: 546532 - DNA, 201 bp, Homo sapiens
tactgtacataatcctaagacaatggtatttgtatatttaaacatagaaaaagtatggttaaaatatcatataaaatatattttaaaaaggcacacctgtrtaaggcacttaccatgaatggagtttccaggactggaagttgttctgggtgagtcagtgagtgagtggtgagtgagtgtgagtgccagaaacattactgt

SEQ ID NO: 546533 - DNA, 201 bp, Homo sapiens; identical to SEQ ID NO: 367651

SEQ ID NO: 546534 - DNA, 201 bp, Homo sapiens
gttttaccatgttggccagcctgatctcgaactcctgacctcaggtgatctgcctgtctcagcctcccgaagtgctgggattataggcataagccactgtrcccggcctgtcatactttttaaaaccctcctgactgtgacattctagaaggggaagcaggagactagaaagtggtataaaaagagaaaggagttcaagac

SEQ ID NO: 546535 - DNA, 201 bp, Homo sapiens
aatactttgtccccaacattccttataaaagtcaatttaatgaatttctcagactattattttagatccatcactcagtaacccttgtccatctatatccktactcctcttcccacctccagctccagatttcctgaacttttgtttctgctgcctgttcttgtcagaaactgtgcaaccttggttctgtgggtatgtgaa

SEQ ID NO: 546536 - DNA, 201 bp, Homo sapiens
agagtctcactctgtcacctaggctgaagtgcagtggcgtgatctcagctcactgcaacctccacctcccgggttcaagtgattctcttgcctcagcctcycgagcagctgggattacaggcatgtgccaccatgcctggctactttttgttttttcagtagagacaggatttcaacatgttggccaggctggtctcgaac

SEQ ID NO: 546537 - DNA, 201 bp, Homo sapiens
atggatgtggagcccagctggaagtacacggctatcggctgccaggaccgaaatattcggtgggcgtcccctcctcagactctgcccacattccttcatckccctacggggtcagctctgtgcagctaagttcccacatctgtcgttctgtacaggactttgtacccccttgagcctacagtactttgcttcacccaagag

SEQ ID NO: 546538 - DNA, 201 bp, Homo sapiens
ctgggagatgagtcgggtgagtcgccattgttaaaatgttcttccaaggttagaggaggcaaagggagctgtgagaacagggctctctgggcctggtaggrtactggggcatggggtctgcccacatgctgcactcgtgtgtccaaggaaggccttgtcggggaagttgaagcagctgggctggtcctgggtgcgggggtg

SEQ ID NO: 546539 - DNA, 201 bp, Homo sapiens
ggcttgctgggacctcactgcacttcctccatgctttgggcctgccattcagcaactctgtctcccaagaccttacctctcacacaaggatccatgatgtsagcctcttccccctgttgagtctcctctccccctattgagtctcatcttcccctcattgagtctcctcttccttcttcccccactgagcctcctctcccc

SEQ ID NO: 546540 - DNA, 201 bp, Homo sapiens
gaccacagtggcccactgcatctctgtgagccaagactacatcttctgtggctgtgctgatggcaccgtgcgccttttcaacccctctaacctgcacttcsttagcaccttgccccgaccccatgctctggggacagacattgctagcgtcaccgaggccaggtgagctatgtgggccccccttcctccatttgtagcctt

SEQ ID NO: 546541 - DNA, 201 bp, Homo sapiens
atcccagcactttgggaggcagatcacttgagttcaagagtttgggaccagcctgggcaacgtggcaagatcccgtgtctacaaaaaaaaaaaaaaaaatmcaaagattagcttgcatggtggcacatgcctgtggttccagctactagggaggctaaggtgggaggattgcttgaacctgcaagttgaggctgcactgag

SEQ ID NO: 546542 - DNA, 201 bp, Homo sapiens
catcggcgagccgggaccggctgatccatgtgctggatgccgggcgggagtacagcctacagcagacgctggacgaacactcatcctccatcactgctgtyaagtttgcaggtgcgggcagggtgaatgagacacatcctgccactctcacccctgctgccatctgcctcccacctccatgagaagggtctgcccattgtg

SEQ ID NO: 546543 - DNA, 201 bp, Homo sapiens
ccccaccccatcttactgagcctctctgctgtgtggcccctgcctcgcctcccacttccttccttattcaacacatggtgtggggggccagctcttgccargtacacacgtgggtgcacacgtgagaggccttacatcttaaggcacacatgcttgatacacgtgtggccccaagcctgtgaacgggctgtgcacccgagg

SEQ ID NO: 546544 - DNA, 201 bp, Homo sapiens
tctgaggcatccatgataccaggtgaaggctgagactaggggttcctgtgccagaggatgcggaatgcagctaagagcatgaactctggagccagactaayctgcaggccacttactgtctgtgggacgcagactgctcacttaagccccctgtgcttcagtctcctcatctgtaaaacaaggattatactagtgcccatt

SEQ ID NO: 546545 - DNA, 201 bp, Homo sapiens
tcctgctggtgaaggaagcgtgctttggaaaccactgccttaactattccttacccccgggggccccctgctgggctcaggaggaacgcttctgtcctggyggcgtagtcttactaggggcagaaatagacctgagtggtagtggctctcaatgccggctgcccatcagaaccattcagggagctttgaacaacctgaagt

SEQ ID NO: 546546 - DNA, 201 bp, Homo sapiens; identical to SEQ ID NO: 367665

SEQ ID NO: 546547 - DNA, 201 bp, Homo sapiens
tttgtgggtatggccagagatagagctggtatttaggggcctggctggggggacaggcttccagggaaccctttcaccctcatggggctacagagatagtwcctcttgggtggggaaaaggagcaagaacaggttgccaggagaaagcagtggaggctgggcacggtggcttatgcctgtaatcccagcactttgggaggc

SEQ ID NO: 546548 - DNA, 201 bp, Homo sapiens; identical to SEQ ID NO: 367669

SEQ ID NO: 546549 - DNA, 201 bp, Homo sapiens
ctcaagtgatctgcctgcctcggcctccaaaagtgtgcaatgctttttttggttgcttccctatttggtaaaacaatgctgtgggtttttttgtttttttkttttttcttgctgggattttaaagtttatatgccttatctctcctcctaaaactgtaatgaagctaaagatattttcctttccctgctatgccgggcatg

SEQ ID NO: 546550 - DNA, 201 bp, Homo sapiens
taaggtgggaggattgcttgaacctgcaagttgaggctgcactgagccatgtttgcaccactgcactctggctgggatgacagagtaagatcctgtctcaaaaaaaaaaaaaaaaaaaaaagaaaaggaaaaaaacagtggagcccttctgagctctttctacccagctccctctgccgggtgactggaagtcctgggtgg

SEQ ID NO: 546551 - DNA, 201 bp, Homo sapiens
gtggcctccaacaaggtgtccagtcgggtgacagcagtgtccttctctgaggattgcagctactttgtcactgcaggcaaccgacacatcaaattctggtmtctcgatgacagcaagacctcaaaggtgaggtgctgaagctgggagtagccaccaaggcccctggcagggcctgcccagcccaacccaggagactctgcc

SEQ ID NO: 546552 - DNA, 201 bp, Homo sapiens
agactgtggggtgagagcagtgtgagctgaggaaactgaggcatcactgtggccacacagggtatgggctgatggggccagggctccagggttgggtggcggggggggggcaggagacacttcctctgactgcctgtttctgtctagcctcggtccccagcccagctttgccccgaagcctgtcccactgggagatgagtc

SEQ ID NO: 546553 - DNA, 201 bp, Homo sapiens
tggctcaagcctgtaatcccagcactttgggaggccgaggcgggtggatcacctgaggttaggagttcgagatcagcctggccaacatggtgaaaccctgtctctactaaaaataaaaaaattagctgggcgtggtggtgggcgcctgtaatcccagctactcgggaggtttaggcaggagaatcgcttgaaccctggagg

SEQ ID NO: 546554 - DNA, 201 bp, Homo sapiens
ggctcaagcctgtaatcccagcactttgggaggccgaggcgggtggatcacctgaggttaggagttcgagatcagcctggccaacatggtgaaaccctgtctctactaaaaataaaaaaattagctgggcgtggtggtgggcgcctgtaatcccagctactcgggaggtttaggcaggagaatcgcttgaaccctggaggt

SEQ ID NO: 546555 - DNA, 201 bp, Homo sapiens
tctgtaacctccccaccaaccctctgagtctgaagttgggcttgatgctgttatcactgaccctttgtttggagaaaacagtccaaggtttgaaattgggkctatgtttattcaaactaagcttctctgagcacatggtctgtcccactcatcctcagagtatccgttggttttacttcatgttcagactgcagtgttgtt

SEQ ID NO: 546556 - DNA, 201 bp, Homo sapiens
tgctggtattttgaatgtctttcatttgtcacctgtgtattttcatttcttgactgatgaaaaaacaggtagaaatgaggcttcagcctgacatctgtaasctccccaccaaccctctgagtctgaagttgggcttgatgctgttatcactgaccctttgtttggagaaaacagtccaaggtttgaaattggggctatgtt

SEQ ID NO: 546557 - DNA, 201 bp, Homo sapiens
gcaggtaaagacctggagcagcaagtgaaagacccagagcagaggatgacatggagtgacagcaagaggttagagggaagtctcaatctcacttggcatcrtctagcagaaagaccaatgaattaatttgaggttagttcgtgtgggtcctgaggcctgcagacagtgtggggtaacaatactaatgatgagagtgatgag

SEQ ID NO: 546558 - DNA, 201 bp, Homo sapiens
gcatggccctggaactcccgcggcggcgggggcgggcccgtgcctgctgtgccccgacttcccacaccagccgcgcccaccgcaggtgggactcaggttcrccctctgggccaggtccttcacgaggagggagctacccttcgccagaagtttgtgagaatgtggccgcccttttcctgccctctgccccatgtgggtggg

SEQ ID NO: 546559 - DNA, 201 bp, Homo sapiens; identical to SEQ ID NO: 367678

SEQ ID NO: 546560 - DNA, 201 bp, Homo sapiens; identical to SEQ ID NO: 367679

SEQ ID NO: 546561 - DNA, 201 bp, Homo sapiens
ctggcctttaagggcatgtgcttatgcatgtttatgagcaggtctcagcccagtgcatgtgcctgggagtcatgatccttccagatggtgtgcaggctttyctgatggaacctctagtaggtttcctaagcgtgtatgcttggcttaggccatccctgggcagtgcccctaatctgttccctgaccttttgatttcttaga

SEQ ID NO: 546562 - DNA, 201 bp, Homo sapiens
gtgggcaaggtgtactcggctctgtatcattcttcctgcgtctggagtgtggaggtatgtgggctggctggctggctggagactggccaggttggctgggrtaccattttgaggacagaaaatagggatccccaagtataatcttagattcctgctgcctccctgtttctccagtgacttccctgggatagatcctgggga

SEQ ID NO: 546563 - DNA, 201 bp, Homo sapiens
tgagaatgggtttctcctggctcctatgccagaatggcctgggtgagtgccctgcgcacagctgctcctctcccgctgggatgggaagtgtcccagcaagrtgacggggtgtatctggcagctaagaagagacctcttggttgatttaagtggggaggagaagagggaacccctgctctcctgaggaggccctccatttcc

SEQ ID NO: 546564 - DNA, 201 bp, Homo sapiens
tcaagcaactacttccaaacctgcaggtccagggagggctcctcacacactgctccttccattgtggattggcttctcttttcattcccttcagtctgacyagtgtgccctgtcctctccctacagtcgcctcttctctggagtggcgaatgccaggtatccagacaccattgccttgacctttgatcctactaatcagtg

SEQ ID NO: 546565 - DNA, 201 bp, Homo sapiens
ttttgctgtgttctagaactccctgatgtgctgctgtgatgttgggggccaccagattctgtgtgagcacaagcaggttcttcacctccctccttgtctcmctgcttttcttatctgatcatccttacactgcccccagcccccacgctcttgttcctcctgtgcctgttgctttgggagccagctcaggtatcctagaaa

SEQ ID NO: 546566 - DNA, 201 bp, Homo sapiens
ccctgacagcagctgggctcccaagagagtggccacagccagccccttttctggactccagaaggcccagtctgtgcacagtctggtgccacagggtgagragcctgatgggttcagtgccagggtgcagggtgtatggaacacatgtacatgctggaggagggagggcctggtgtggccctgatgtgccactgtgctggc

SEQ ID NO: 546567 - DNA, 201 bp, Homo sapiens
gacagctctgtccttgctccatggttcacatggcttggggatatggggctcagttcccttggggctctttgccaggcccagataagggctgttcagggcaytcatgggctgatggagttctttcatccccaggtctgaaactgctagcatcggcgagccgggaccggctgatccatgtgctggatgccgggcgggagtaca

SEQ ID NO: 546568 - DNA, 201 bp, Homo sapiens
aactgtgtggctttaccccagctgcatatttgtgtggcgcctgagctctgagatgaccatcagcatgaggcagcgtctggccgagttgcgccagcgtcagyggggcggcaagcagcaaggaccatcctctccccaaagggcttctggacccaaccggtgagaacagaatgtgggcaagtgatgggtgggtgtgcagatggc

SEQ ID NO: 546569 - DNA, 201 bp, Homo sapiens; identical to SEQ ID NO: 367689

SEQ ID NO: 546570 - DNA, 201 bp, Homo sapiens
acctcagccacagatgagatcacacgcatgcacgtgcacacatgtacacacacacacctacctgcacagcacgctgttgagtgttggttgctagagtatcyggctggctgctgtgtgcctggtttcctcacatcctgcctcagcttcaccaccctggcttatgtggaacacctatcagggagcagaaaaggggtgcagtac

SEQ ID NO: 546571 - DNA, 201 bp, Homo sapiens
tctgaccagatggcactttgaactttgaagcaacaggaatgagttagcctgggcatgatacctgcccttcctccccattcccaggtctggtcactgggtcyctgccctactgtctaagtctctgcacaaagcctcctggccttggcttcttctgtggcttttgcgttaagtggcagttctcagaatctggtagagaatctg

SEQ ID NO: 546572 - DNA, 201 bp, Homo sapiens
actccaggcctggcctttaagggcatgtgcttatgcatgtttatgagcaggtctcagcccagtgcatgtgcctgggagtcatgatccttccagatggtgtrcaggctttcctgatggaacctctagtaggtttcctaagcgtgtatgcttggcttaggccatccctgggcagtgcccctaatctgttccctgaccttttga

SEQ ID NO: 546573 - DNA, 201 bp, Homo sapiens
ggtgtgctggatactggagtttgagaggagggaggtgctggggccaaaggagacactagaaaagtggtagatgggacaggtaagtggcagaggtgaggggrtaagttagaatgtaaaagggcagtaattaggggtgagggaaaggagataggggaccctaggaggtagagtgggaccatgtcgtgaggcagttgaagagtt

SEQ ID NO: 546574 - DNA, 201 bp, Homo sapiens
tttgtgaaaccatatggctgatttttttttttccactttgtcaaatgttcttttggagaaatcctgagaagaaagtttatttggtggttcaggatttgagygttgctccttatttatcacagttctcatcagcctttgagacccatcttcctttagtggctcttctggtcttttcttcataagtttggctgatgctgttac

SEQ ID NO: 546575 - DNA, 201 bp, Homo sapiens
ccgctcgaatgcccgggaggaagcgctggcctccctgcgtccctcggtaccccgacctcggcggcctccacgcctcatgggccccttccgcgccggaccaygtgcctcctggagcggcgcttccccggccctcccccatggagcctctccatggcatcccccgccctactctattcgcatccgcccgcccgtccccaagac

SEQ ID NO: 546576 - DNA, 201 bp, Homo sapiens
cagcaaccagaacttcatcattttcctggaataaaataagaagtttatttctggtgttggtggcgatcacaaaaatactttcatgtgaggaaactcccttkcatcagataaaaatgtgagggaggccaccccaacaacagaaggtacgatagagttgaaatactcacctcaataaagttcaagcaaccgtcattgggtaca

SEQ ID NO: 546577 - DNA, 201 bp, Homo sapiens; identical to SEQ ID NO: 115618

SEQ ID NO: 546578 - DNA, 201 bp, Homo sapiens
aataagaagtttatttctggtgttggtggcgatcacaaaaatactttcatgtgaggaaactcccttgcatcagataaaaatgtgagggaggccaccccaasaacagaaggtacgatagagttgaaatactcacctcaataaagttcaagcaaccgtcattgggtacaaaggctgtgattttcttgccattcttgatcagct

SEQ ID NO: 546579 - DNA, 201 bp, Homo sapiens
gtccccaagaccccaagtcccgcttgcagcgcccttaaaccggccacaacagctcacccatcctgtcggcgccacgggcctgagcgaaagagagaagcacygcaggaaggagccacaagccaccgcgagcaagccccgcccagccaaggaccccgcgccgctgtctgcgccgcgcctgacccgaggctggggtctctcctt

SEQ ID NO: 546580 - DNA, 201 bp, Homo sapiens
ccctgtcttattgtctcctaaaattggtacaggtcctgcgtttgctggtttaggataaaaaaaataagggggggtggtggtggtaatgaacatgatcttcrtggtgagaacaggggacagtaagatacaaacattttttggcatatgaaaatttattactacagtgttttcaccattaatatttatgatcttggtctttcc

SEQ ID NO: 546581 - DNA, 201 bp, Homo sapiens
aaaaaagaaagtatctcactagaatttcagtgagtttttgaagttcccttaaagttcttaaagtaatactacaatactgcacatttattccagatctatcycattttcttattccacaggatgagggaaactgtgccaggttacaaatgttattaactctagagaatcctgaaacaaccctgtcttattgtctcctaaaat

SEQ ID NO: 546582 - DNA, 201 bp, Homo sapiens
gcacaatttctgtcccttttaagggctcacaacactaaagatttcacatgaaagggtcgtgattgattgagcaatctaggggatatgtgacaggggtttcrtgcactggtacagaacacaacagggagtttcacaatttttttatacaatgcttggaatctacggataacatcaggttctaagtcgtaagttgatttttaa

SEQ ID NO: 546583 - DNA, 201 bp, Homo sapiens
tgtcttgacgtatcagagaaggcaggtaaccaggccacatccctgggcgcccgcgctgtcccactcccttcctggtgcgccccgcctcgcggtcacaaggrccccaccgcccggggagagctgcccaccccgcgcctgacgcccagggcctggaatcgcgctgcaaccgcggcctctttccctggttctggccaggtgagc

SEQ ID NO: 546584 - DNA, 201 bp, Homo sapiens
aatctgagctcctcaagtgcacaatttctgtcccttttaagggctcacaacactaaagatttcacatgaaagggtcgtgattgattgagcaatctaggggmtatgtgacaggggtttcatgcactggtacagaacacaacagggagtttcacaatttttttatacaatgcttggaatctacggataacatcaggttctaag

SEQ ID NO: 546585 - DNA, 201 bp, Homo sapiens
gagctggctttctgaaaaagattatcttttcatattaactagagaactaatgagaaactgtttctatcttttcaatctaacctcaaatggctgagctgaastcctgtgatgtcaacctagttttctgccagtcttaatttcattagcacaatgggggaaatttctagaccttttacagttataaaagtagactggagtggc

SEQ ID NO: 546586 - DNA, 201 bp, Homo sapiens
tgggattacaggcatgaaccacagcgcccagcttaacaggatttttcagagagaaaaagttttttaattttaatgaaatccaccaatttatctattttttyttttacggcatgtgcttttggtgtaatgtctaaaaactatacctacgcctaggttgtaaagatagtctgttttcagttttatagctttccattttacatt

SEQ ID NO: 546587 - DNA, 201 bp, Homo sapiens
gattttcttgccattcttgatcagctggacccttacacacttcctaatggcagaatttggctgtttggcttcaactcctctgaaatacaaaaggcacagcmctgtgagctggctttctgaaaaagattatcttttcatattaactagagaactaatgagaaactgtttctatcttttcaatctaacctcaaatggctgagc

SEQ ID NO: 546588 - DNA, 201 bp, Homo sapiens
acaggtcctgcgtttgctggtttaggataaaaaaaataagggggggtggtggtggtaatgaacatgatcttcatggtgagaacaggggacagtaagatacmaacattttttggcatatgaaaatttattactacagtgttttcaccattaatatttatgatcttggtctttccttcttgcctttgtatagggccaaaagag

SEQ ID NO: 546589 - DNA, 201 bp, Homo sapiens
gtacagaacacaacagggagtttcacaatttttttatacaatgcttggaatctacggataacatcaggttctaagtcgtaagttgatttttaactactagstttaggccaggcaggcccagggctggtttcaggcctggtgccgggctgcctgtctttgatttcacttccttgtttttttcttaaaacaggtactgagtat

SEQ ID NO: 546590 - DNA, 201 bp, Homo sapiens
ccagcggctgctcctggcggctctgcggccgtcaccatggtaaggaggatgcctcggacgctcgcgacacacagcgtctgagttagtgggacctgaggacyctggggcgctggggtagggggtgagcggtggtaggcggaaatgagaactgccaagagaaaaggatggtagacccgtggggtgggctctgaggagtggaaa

SEQ ID NO: 546591 - DNA, 201 bp, Homo sapiens
ttgaattacaccgtaaacgctatggataccgtttggattaccatgagaaaaagagaaagaaggaaagtcgagaggctcatgaacgttcaaagaaggcaaaraaaatgattggtctgaaggctaagctttaccataaacagcgtcatgctgagaaaatacaaatgaaaaagacgtaagtggtctcatttatttgtcataaca

SEQ ID NO: 546592 - DNA, 201 bp, Homo sapiens
gtgtaaagaagaatccctcatccccactgtatacaactttgggtgttattaccaaaggtactgtcattgaagtaaatgtgagcgaattgggccttgtgacrcaaggaggcaaagttatttggggtaagtgaatttttgaatacagggctgctgtgttctgcagtactaatagaaatactattcaagttgatgtattaataa

SEQ ID NO: 546593 - DNA, 201 bp, Homo sapiens
aaatgccgcctgccagcaacttccgtcctcctagctaaaagcggaaaacagaggctcggaaccgctgcgtggttcttgctcttcactcggccgttttaaarggtgactctttcctgtcccggcctgcgtggtgtgggcttgtgggtctttgagacccgaaaattgagagcgttttcgcactccagcggctgctcctggcgg

SEQ ID NO: 546594 - DNA, 201 bp, Homo sapiens
agagtacaaccaatgtgattaattgtgcctttaacaaagtcattcaatgtctaaacaaattcagtatctgaaacatcttcatgaggaaaactgaaggaaargaatttaaaaacacagaccaggaaacaatcacaaaatataggtttaattactacttttaaacttaaaaaaaaataaaaaccaagaaaacaaacataggta

SEQ ID NO: 546595 - DNA, 201 bp, Homo sapiens
ttcaatgtctaaacaaattcagtatctgaaacatcttcatgaggaaaactgaaggaaaggaatttaaaaacacagaccaggaaacaatcacaaaatatagstttaattactacttttaaacttaaaaaaaaataaaaaccaagaaaacaaacataggtactccagtaagacttgctactctgaataatgtaacattttttc

SEQ ID NO: 546596 - DNA, 201 bp, Homo sapiens
atgatgaaaagacaccacagggagcagtacctgcctatctgctggacagagagggacaatctcgagctaaagtactttccaatatgattaaacagaaaagraaagagaaggcggtaagcaataacaattgaagtctttgttttgtttaggagaattacttaaattcaaatttgaggttcttgtttctcggtttaatttcaa

SEQ ID NO: 546597 - DNA, 201 bp, Homo sapiens
ctatcatctggtcagcgggtaaacagtggtgtatccatacaatagcatactactcaacaataaaaaggattgaagttcctatacctgcagcaaattgggtraatcccaaaagcaagaaaccagattcaaaaggctatgtactactgttgatccctgtttcattctgggaaaggcaaaactgtagggataggtatcaaactg

SEQ ID NO: 546598 - DNA, 201 bp, Homo sapiens
ggctctgcggccgtcaccatggtaaggaggatgcctcggacgctcgcgacacacagcgtctgagttagtgggacctgaggactctggggcgctggggtagkgggtgagcggtggtaggcggaaatgagaactgccaagagaaaaggatggtagacccgtggggtgggctctgaggagtggaaacaacttcacattcgagac

SEQ ID NO: 546599 - DNA, 201 bp, Homo sapiens
ctgcttatagaagtcactatcggctgggcaccgtgactcacgcctgtaatcccagcactttgggaagccaaggcaggtggatcacctgaggtcaggagttsaagaccagcctgaccaatgtggtgaaaccccacctctactaaaaatacaaaaattagctgggtgtggtggtgtgtgtctgtagtcccagctactcgggag

SEQ ID NO: 546600 - DNA, 201 bp, Homo sapiens
tgtaaaagaaagcattttagaataattgtcagtactttaaaaaattaaaataatatttcttccatcattatagccacagaatgaatatattgaattacacygtaaacgctatggataccgtttggattaccatgagaaaaagagaaagaaggaaagtcgagaggctcatgaacgttcaaagaaggcaaagaaaatgattgg

SEQ ID NO: 546601 - DNA, 201 bp, Homo sapiens
gcactccagactgggagacagagcaaatctccatctcaaaaaaaatttttttaacctttttaataaaaattattataagggaagcagatgcaaagttatarctaagaaatattataagaaaatagaataaattaaccatgagcagaggaagggaggcatatatcaaacatattttaaaagtgaggtcagcttacatgaagt

SEQ ID NO: 546602 - DNA, 201 bp, Homo sapiens
gcgatgtctcacagctcggagcagtactcacctggcattaggccgcgtgccgcaggccagctctcaccgctgggctcttgaagcaggaggcgcgagccgcsccaaagtctgcaacggcctcaagtctcgacgccagcctaggcaaaaggcaatgtatctaaacgaaaagaaaataggctttctccgctctaccgcctcggg

SEQ ID NO: 546603 - DNA, 201 bp, Homo sapiens
ctcggccgttttaaagggtgactctttcctgtcccggcctgcgtggtgtgggcttgtgggtctttgagacccgaaaattgagagcgttttcgcactccagsggctgctcctggcggctctgcggccgtcaccatggtaaggaggatgcctcggacgctcgcgacacacagcgtctgagttagtgggacctgaggactctgg

SEQ ID NO: 546604 - DNA, 201 bp, Homo sapiens
ttttactgccttacactatttcagttttttcatagaatttgcactcaagggaggcataaaacatctggtgaggattttgtcttgctagtgatctacagatycatctcgggaagaaatacagagacatattaagaggtggaaacactcttccagtattatgctattaaacattagtaaacacatatactgcttatagaagtc

SEQ ID NO: 546605 - DNA, 201 bp, Homo sapiens
atttgcagcttatgagacaatacagacctctagaagacggttgagccaaaaatgtgttgatggtcaagcaaaaaaaatagatctattactttgtacaactraaacatatttgacttattctcattgtcctttaataacaatataaacttttaactgtggcatatttttagggaaaatgggaagtccctctgcctaaagtac

SEQ ID NO: 546606 - DNA, 201 bp, Homo sapiens
ccgcaggccagctctcaccgctgggctcttgaagcaggaggcgcgagccgcgccaaagtctgcaacggcctcaagtctcgacgccagcctaggcaaaaggyaatgtatctaaacgaaaagaaaataggctttctccgctctaccgcctcgggcagccacacctccacacttccggcggtgtaccggccaaatgccgcctgc

SEQ ID NO: 546607 - DNA, 201 bp, Homo sapiens
ccattcataagaaagtgttatatctaggtttttaaaactgaagttgaaattatctttgttagcagtagtagtatagaataaaagatccgtatgctggttcrtagattgatacgtgttagtcctgttatttggaggctttttggcatagttgttcgatcaggagcctgtttactaaaagtcttcatacagagtacaagtgca

SEQ ID NO: 546608 - DNA, 201 bp, Homo sapiens
actggatgttccgggttttggaggtggaccaaacaatttaagtgggccatcgggatttggagggggccctcagaattttggaaatggccctggtagcttargcggtcccccggggtttggaagtggccctcctggtcttggaagtgcccctgggcatttgggtgggccaccagcttttgggcctggccccggccccggccc

SEQ ID NO: 546609 - DNA, 201 bp, Homo sapiens
ctttcatcgtttttgccactgatgaagatgcaaggcttggtatgatgcgcacaggtggtacaattaaagggtcaaaagtaacactattgttgagtagtaaracggaaatgcagaatatgattgaactgagtcgtaggcgttttgaaactgccaacttagatataccaccagcaaatgccagtagatcaggaccaccaccta

SEQ ID NO: 546610 - DNA, 201 bp, Homo sapiens
tttccacccttgcaaaattgccacatttaaattgttttactggcagttctatagtagtccagactttagaaaccaaacacaacaaaatggcttgttgccartatggccacaacattgccagcaaatactgccttggcatcactcagcagaggtttttgtttataaagatgaagtcttgaatactgttcaataaacttgtca

SEQ ID NO: 546611 - DNA, 201 bp, Homo sapiens
tttgcctagaagctaacaggtacttacttgagcatcagtggaagccttgtttgcctccttgcagggtgcattttgccagagtccaccaagcccttttgttkagggccaaaccttttgactccccagtacccccaagggggcacaagctgaagtggaaaatctgacctgacctgatctgatctgggttttaaaattttaatt

SEQ ID NO: 546612 - DNA, 201 bp, Homo sapiens
ggatagtttggggtcacagttgtagatggaggctagtaccccttttcaatatcttcagaccagggttggttgtatctgccatcttctgtgccagtgagctyacctaggggtggaggggtttggaggctatgaggccttctcttccttgggtgtcacgggggtggacgtatgctcagccctgcctgggtgatgcctgctggc

SEQ ID NO: 546613 - DNA, 201 bp, Homo sapiens
tctgggagtttaccctttcacctttccctgatgtgagtagggttgaggcccaagggatgctcaccttttcctctaagcctgggatatggttgggttcttgrgcatgaaatacagactttgggcagctgttctgggccaccactgacttttcccttttcttggcaggcccctcgggaggcattggcacagaccgtgctcgca

SEQ ID NO: 546614 - DNA, 201 bp, Homo sapiens
ctcgcagaagtgcccacacaactggtctcatacttcagggcccagggttgggccccgctcaagccacttccaccctcagccaaggatcctgcacaggcccyccaggcctaggttcccttggaggctgtggcaagtcctcaatcctgtgtcccagaggtccctctgggccacaacccaacccttctcactctcctcagtgct

SEQ ID NO: 546615 - DNA, 201 bp, Homo sapiens
acccctgggattgggtgggctggggtaggagataatctcctggggcctgtgactagcaaggtttggaactcagaaagagactgcaggtgggtagagaagtrtggcagctcctcagggggccatgccagagctcactggaggccttggcctccaccttcaggtcatcaagaacaacctgaaccctacatggaagcgtttctc

SEQ ID NO: 546616 - DNA, 201 bp, Homo sapiens
gtcaactctgccaaagtctgtgcccacataacaaatattccattcagcattacaaagatggatgttcttcagttcctagaaggaatcccagtggatgaaartgctgtacatgttcttgttgataacaatgggcaaggtctaggacaggcattggttcagtttaaaaatgaagatgatgcacgtaagtctgaacgcttacac

SEQ ID NO: 546617 - DNA, 201 bp, Homo sapiens
agagacatcgagccaagatgtgctcggtgatgaaagagtgcacaaatatcacaaaaataaatgacaaattttttttattgactcaaatgtgatatttaatwtggttctggaagattttggtcctaaaaaggaggttgaaagtccatggcgttaattataatggcagtatatgaaaaatacatgagtctggtttaaagtagg

SEQ ID NO: 546618 - DNA, 201 bp, Homo sapiens
ccgctcaagccacttccaccctcagccaaggatcctgcacaggccccccaggcctaggttcccttggaggctgtggcaagtcctcaatcctgtgtcccagwggtccctctgggccacaacccaacccttctcactctcctcagtgctagcactttgtattttttgatacttttatacttgtttctgcttttgctgctcttg

SEQ ID NO: 546619 - DNA, 201 bp, Homo sapiens
ctgggccacaacccaacccttctcactctcctcagtgctagcactttgtattttttgatacttttatacttgtttctgcttttgctgctcttgatcccacmtttgctcctgacaaccctcattcaataaagaccagtgaagaccaatgctttgccaccactctcttgtgtgtttttaggtaggaggctgctatgagcaatg

SEQ ID NO: 546620 - DNA, 201 bp, Homo sapiens
atcaaggtaactcagattttagctgtcctattcagtagttcttttggcttcttagtatgtcttaaccttgtttataataaataattccatatgtagttttytgtaatgtacaaggcagattgaaaagttttaggatgaataaaataatggaaccagttctcatttaagacttgaatctacttttagtcttaagtattattt

SEQ ID NO: 546621 - DNA, 201 bp, Homo sapiens
actttagccctgtgtttaatttttgtgttcttgggactatatcaagtttctgtttgattgtcccagtgcaaactagtctctctctctctctcaagttgttytgagtacctggattgcccatgatgtttcccctatacaaagtgattaaccgttttttgaagttgaacaggaaatgctatcacattttgcatacagccacat

SEQ ID NO: 546622 - DNA, 201 bp, Homo sapiens
attaaaacatgacctttgaaaaaaaataaaaagcaaaaaatgacctttgaatatagttgtctagacatttggtcatatatgcttgtgacttgttaataacytcaccagtttggaagaaatgacagtgaaagatgagtgacctgtttttattttgggatatactcttaatatgtcaggcatttttagggtgtttttaaattt

SEQ ID NO: 546623 - DNA, 201 bp, Homo sapiens
aagaaggtgtgtctggaagtaggccctggtaatccaagagttaaggggccaaggatggtgtatgggggatgggggtgtggacagagggatggcataatggktgtttgttcctgagtcttgtaactggggtctcgcattggcaggacttcctgggaaaatcagatccatttctggagttcttccgccagggtgatgggaaat

SEQ ID NO: 546624 - DNA, 201 bp, Homo sapiens
aaatatgttttactttttggcgatgaatattaaggtcattagttgtattttggtcttggaagatactaatttaagatgagcatcatttggaaaagtagtcrtaggtaatcttaatactgaacagtggcaaatttcttctctctccgaattaaaacatgacctttgaaaaaaaataaaaagcaaaaaatgacctttgaatat

SEQ ID NO: 546625 - DNA, 201 bp, Homo sapiens
ggcgacagagcgataccctgtctcaaaaaaagaaaaaaaaaagaggctagatttctacaacatgtaaaagattaatacaatgctctagacttttgattgtrttgattacatatttgcatagctttttgtggtaaaaccatctcactattctttagcaacttgagtagttgactagacgatgaatagtttgtcctttagaaa

SEQ ID NO: 546626 - DNA, 201 bp, Homo sapiens
gtagtagcacaattctctgatgttacagtgacttttctgggaaaacccctgtctattcaacaacataagcaagttcatctcctgctcaggtaaatggtaatttttttttttttttgagatggagtctgtatctgttgcccaggctggagtgcagtggtgcgatctcggctcactgcaacctccacctcctgggttcaagcg

SEQ ID NO: 546627 - DNA, 201 bp, Homo sapiens
tatgttcaaatctgttagatgaaaaatgtgaagctttagaaataattgtgtggttacttgcaacgtattgttacatgctaataccagtactctttgggctkctttcaccttctttgacacgtcaaatgttttgatgattgagtattgagagtttgggagttgttagtacagtctttaggtgtgaaacttgatgttgtgggc

SEQ ID NO: 546628 - DNA, 201 bp, Homo sapiens; identical to SEQ ID NO: 375903

SEQ ID NO: 546629 - DNA, 201 bp, Homo sapiens
aaacttgtctaccttctccatgtcctttgatggggccaaaaaggaaaaagaagagtggtggtggttggtgtagtttgtcttttcagtcttacgggaaacartgttccatgggtggtcctttgtaagcctatggaggattttctgattggctttcaagacttgatcctgcatctgtgagctgatccagcatgccaaggtagg

SEQ ID NO: 546630 - DNA, 201 bp, Homo sapiens
agataagaaggtgtgtctggaagtaggccctggtaatccaagagttaaggggccaaggatggtgtatgggggatgggggtgtggacagagggatggcatartggttgtttgttcctgagtcttgtaactggggtctcgcattggcaggacttcctgggaaaatcagatccatttctggagttcttccgccagggtgatggg

SEQ ID NO: 546631 - DNA, 201 bp, Homo sapiens
taccagggggaggacctgtagttctccaattaaaaatttccctagctgggtgcggtggctcatgcctgtaatcccagcactttgggaggccaaggcgggcrgatcacctcaggtcaggagttcaataccagcctagccaacatggtgaaaccctgtctctacaaaaatatgaaaattagccgggcatgatggcaggtgcct

SEQ ID NO: 546632 - DNA, 201 bp, Homo sapiens
taagcaaacattacatttttaggtggaaatagtcagccttgcataaaaacaaggatgcgtgaaagccttaaattccagctcccttttactggagtctgtgkttgtgtacaggtatgggccaagtgtaaaatctcatcaattttaagaacactcgggaaatgagtaaagaaaatgtaaaattgctgctagtcaaatcttttg

SEQ ID NO: 546633 - DNA, 201 bp, Homo sapiens
ttctaatgtcacacttaaaactgtgtggaataagacttttgccataaaaataaactatggagtcctttatctaccagagcctttttggtttgaccgccacratttaggttagtcagtttaaaaattgttcatgttgtttggatggtatcgaaaaccagaaaccacttttaataatgtgtttaagatacttgatttgaagtc

SEQ ID NO: 546634 - DNA, 201 bp, Homo sapiens
actagcaaggtttggaactcagaaagagactgcaggtgggtagagaagtgtggcagctcctcagggggccatgccagagctcactggaggccttggcctcyaccttcaggtcatcaagaacaacctgaaccctacatggaagcgtttctcagtccccgttcagcatttctgtggtgggaaccccagcacacccatccaggt

SEQ ID NO: 546635 - DNA, 201 bp, Homo sapiens
ctcagcctcccgagtagctgggactacaggcgcccaccaccacgcccggctaattttttttttgtatttttagtagagacggggtttcactgtgttagctrggatggtctcaatctcctgaccttgtgatccgcccgcctcagcctcccaaagtgctgggattacaggcctgagccactgcgcccggccttagttttttta

SEQ ID NO: 546636 - DNA, 201 bp, Homo sapiens
ttggcctttaaacaaagaggggcccattcataagaaagtgttatatctaggtttttaaaactgaagttgaaattatctttgttagcagtagtagtatagawtaaaagatccgtatgctggttcgtagattgatacgtgttagtcctgttatttggaggctttttggcatagttgttcgatcaggagcctgtttactaaaag

SEQ ID NO: 546637 - DNA, 201 bp, Homo sapiens
cctctgagcttacagtcccctcactgccttttgcccaatacactgtcctcccacagagacaagctgttccctgcatttggatttggggcccaggttccccstgactggcaggtgagctccctctctttctgccactcctgttttcagtttcagggtcctgattttgggggatgtggtaaatttacttgctacttggcactc

SEQ ID NO: 546638 - DNA, 201 bp, Homo sapiens
atacactgtcctcccacagagacaagctgttccctgcatttggatttggggcccaggttccccctgactggcaggtgagctccctctctttctgccactcytgttttcagtttcagggtcctgattttgggggatgtggtaaatttacttgctacttggcactcagctttaagaggagatgcagggttggattcctgcagg

SEQ ID NO: 546639 - DNA, 201 bp, Homo sapiens
tttccctcagatggcccactgcgtgaccttggttcagctgtccatttcctgtgaccatctcattgacaaggacatcggctccaagtctgacccactctgcrtccttttacaggatgtgggagggggcagctgggctgaggtgaggcggattatggaggttaaggttgtggagggaggctaggattgtgttttggggtggag

SEQ ID NO: 546640 - DNA, 201 bp, Homo sapiens
gtccagccaggtactgactctccccttgatgctgaagcctggaaaacctgctgggcgggggaccatcacggtaaggaacccagcaagggttgaggagggasttaacatcaatgaattcatgaggtgatgtagtctcccctacctaggtctcagctcaggaattaaaggacaatcgtgtagtaaccatggaggtagaggcca

SEQ ID NO: 546641 - DNA, 201 bp, Homo sapiens
ctacatggaagcgtttctcagtccccgttcagcatttctgtggtgggaaccccagcacacccatccaggtgaggagcttgccccctaagtggactgcgctrgagaagagaacctggggagggacttattctcatctgccacctggcttgtttatgtccacacacacctttccctcaggtgcaatgctccgattatgacagt

SEQ ID NO: 546642 - DNA, 201 bp, Homo sapiens
aaccctacatggaagcgtttctcagtccccgttcagcatttctgtggtgggaaccccagcacacccatccaggtgaggagcttgccccctaagtggactgmgctggagaagagaacctggggagggacttattctcatctgccacctggcttgtttatgtccacacacacctttccctcaggtgcaatgctccgattatga

SEQ ID NO: 546643 - DNA, 201 bp, Homo sapiens
tctctacaaaaatatgaaaattagccgggcatgatggcaggtgcctgtaatcccagctactctggaggctgtagtgggagaatcgctggaacccaggaggyggaggttactatgagccgagatggtgccattgcactccagcctgggcaacagagtgagactctgtctaaaaaaaaaataatagtttccccaacattttat

SEQ ID NO: 546644 - DNA, 201 bp, Homo sapiens
tatctcattgtggttttatttttcatttccctgataattaacgctgtggatcactttgcttatttctgattcacatattttcctttatgaagtgcctgatmaaatcttttgcccattttaattgactatcatttaatattgagttgtaggagtcctgcatttaaatttcaaagttgaactatacaagatcaggatagggga

SEQ ID NO: 546645 - DNA, 201 bp, Homo sapiens
attctcctggctcccgagtagctgggactacaggtgtgcaccaccacacccagctgatatttgtatttttggtagagactgggtttcaccacgttggccaygctggtcttgaactgacctcaagtgatccgcctgcctcggcgtcccaaaacgctgggattacaacagtgagccactgcgcccggcctatttttgattttt

SEQ ID NO: 546646 - DNA, 201 bp, Homo sapiens
caagtgagccaccatatctggccaagtttggagtttttctaagctcagtaggaaatgggaagtactagagggttcaggcagaggcgtgatatgacctcacttttttttttttttttttgtgacagagtcaacctcggtcccccaggctggagtgcagtggcgccatctcggctcactgcaagctctgcctcccggattcac

SEQ ID NO: 546647 - DNA, 201 bp, Homo sapiens
atataattacagattttgttgcattagtatttatataatatttgacaatgaagttacagaattcttagagcttatagtagaaaatcttgccccttctaatrttcttgagaagtgataaaaccaaatctcttcattaatttataacctttctgagggtcatgagctgattttatgggcttatatttaaaagttgacttttca

SEQ ID NO: 546648 - DNA, 201 bp, Homo sapiens
tgaacccagggaggcggaggttgcaatgagcctaatgagcctagatcgcgccactgcactctagcctgggcgacagagcgataccctgtctcaaaaaaagraaaaaaaaagaggctagatttctacaacatgtaaaagattaatacaatgctctagacttttgattgtgttgattacatatttgcatagctttttgtggta

SEQ ID NO: 546649 - DNA, 201 bp, Homo sapiens
catcatttggaaaagtagtcgtaggtaatcttaatactgaacagtggcaaatttcttctctctccgaattaaaacatgacctttgaaaaaaaataaaaagyaaaaaatgacctttgaatatagttgtctagacatttggtcatatatgcttgtgacttgttaataacctcaccagtttggaagaaatgacagtgaaagatg

SEQ ID NO: 546650 - DNA, 201 bp, Homo sapiens
ccacctcctgggttcaagcgattctcctgcctcagcctctcagtagctgagactataggtgcgtgccgccaagcccagctaatttttttttttttttttttcatttttagtagagacggggttttgccatgttggccagcatagtccccacctcctgatctcatgatccgcccacctcggcctcccaaagtgctgggatta

SEQ ID NO: 546651 - DNA, 201 bp, Homo sapiens
tgcaccaccacacctggctaatttttgtatttttagtagagacagggtttcaccatgttggccaggctggtctcgaactcctgacctcaggtgatccagcytcccaaagtgctgggattacaggtgtgagccactgcaccctgcctgaacttattttgaagtactcacgtgaagactttgtgttggtgtgttcagagtctc

SEQ ID NO: 546652 - DNA, 201 bp, Homo sapiens
acttagttaaggtaagatctaccaggtttctccactatacaagtactattttctcctttctatttagtaagtatattctgggaagagactatacaaatacycatcacacacacatcaacattcccctctagtttttttttttttaatttattttttattttttattttttgagatggagtcttgctctgtcacccaggctg

SEQ ID NO: 546653 - DNA, 201 bp, Homo sapiens
gtgcatcatattcagaggaacatgatgttgatttgtcctattaccagtcatgttgactttggtcacttagttaaggtaagatctaccaggtttctccactrtacaagtactattttctcctttctatttagtaagtatattctgggaagagactatacaaatactcatcacacacacatcaacattcccctctagtttttt

SEQ ID NO: 546654 - DNA, 201 bp, Homo sapiens
atcggtaccttccacaccagcttggcccagctgcaggcagtcccggtgagtgctggtcttgccaggggtgtggaaatgggcctagatagctgaagcttgtkggagagaggaaggagaaggcagctcgagtccttgactgatgctctgagaatttcctaccctaatttttctgtcctcaccaggctgagtttgaatgcatcc

SEQ ID NO: 546655 - DNA, 201 bp, Homo sapiens
gctggagaagagaacctggggagggacttattctcatctgccacctggcttgtttatgtccacacacacctttccctcaggtgcaatgctccgattatgayagtgacgggtcacatgatctcatcggtaccttccacaccagcttggcccagctgcaggcagtcccggtgagtgctggtcttgccaggggtgtggaaatgg

SEQ ID NO: 546656 - DNA, 201 bp, Homo sapiens
tacctgagtccaacaggggtcaatgagtacctgatggcactgtggagtgtgggcagcgtggttcaggactatgactcgtgagtacctgcttctctgggctmtacccgctccctgcagatgcttcagcctctgagcttacagtcccctcactgccttttgcccaatacactgtcctcccacagagacaagctgttccctgca

SEQ ID NO: 546657 - DNA, 201 bp, Homo sapiens
ggcctttttatttattttgcttgttttgtttttgttttttatttcatataaggccttttaaaaaatacaaaacagtataaaatattgaaacaatacagaaktatggagttcacaaaattcttatcttccactcctttgagctacctaaaacatttgatgcatcttctatttttctgtgtgtgtatttatttatgtttgtat

SEQ ID NO: 546658 - DNA, 201 bp, Homo sapiens
gaaaacaaactataaagggtaactcctaagtggtagaaagcagaggcagaaaaatgttggagctatagactcagctgttccattcgcaacacccgactagycccaaatggaagggtcagggggtggggacctaacagagaagataaattggtgtttggtgttgggtgttcctagaaagcctacttctctcagtgtctcagt

SEQ ID NO: 546659 - DNA, 201 bp, Homo sapiens
gataatagtagcccactacacgtgtttggcccagaccaagggcatctcttttggggacatttgagaagtcgtggagtgagaagacagcagctccagttgtkgcctgtaatcttaccaccccaaataatcactgctaatgcttttgtcattcacaacaacctcttaccagggggaggacctgtagttctccaattaaaaatt

SEQ ID NO: 546660 - DNA, 201 bp, Homo sapiens
tgagtatgcctttcttaagggacactgagagaatgtgccctgctagggcacattgaggttggcagagggagtaaacagaagaaaacaaactataaagggtractcctaagtggtagaaagcagaggcagaaaaatgttggagctatagactcagctgttccattcgcaacacccgactagtcccaaatggaagggtcaggg

SEQ ID NO: 546661 - DNA, 201 bp, Homo sapiens
atatatgtggccttagccaaaccacatcttccctctatgccttggattgagggacttgaattagatggccactcagttcttttttatttctgacattttgwgaattttaagttataaaaatgggaatgagtatgcctttcttaagggacactgagagaatgtgccctgctagggcacattgaggttggcagagggagtaaa

SEQ ID NO: 546662 - DNA, 201 bp, Homo sapiens
cccctaagtggactgcgctggagaagagaacctggggagggacttattctcatctgccacctggcttgtttatgtccacacacacctttccctcaggtgcratgctccgattatgacagtgacgggtcacatgatctcatcggtaccttccacaccagcttggcccagctgcaggcagtcccggtgagtgctggtcttgcc

SEQ ID NO: 546663 - DNA, 201 bp, Homo sapiens
tttcctaccctaatttttctgtcctcaccaggctgagtttgaatgcatccaccctgagaagcagcagaaaaagaaaagctacaagaactctggaactatcygtgtcaagatttgtcgggtgagacaaaagcccatgtaaccaaggctctgattcctgagctccatgacaccaactgctatcaccccaggcatgaccctggt

SEQ ID NO: 546664 - DNA, 201 bp, Homo sapiens
agcccaggaatttgagactagcttgggaaacatggcaaaaccccatctctactaaaattacaaaaattagccgagcatgatggcaggcgcctgtagttctrgctactcaggaggctgaggtgggaggatcacctgagcccaggaggttgaggttgtggtgagccatgatcatgatcatgccactatactccagcctgggtg

SEQ ID NO: 546665 - DNA, 201 bp, Homo sapiens
cgcctgtagttctagctactcaggaggctgaggtgggaggatcacctgagcccaggaggttgaggttgtggtgagccatgatcatgatcatgccactatastccagcctgggtgatagagtgagaacctatctcaaaaaaaaaaaaaaatgatgccacatgacttggggcaggttgcttaatctctgtgtgctttggtttc

SEQ ID NO: 546666 - DNA, 201 bp, Homo sapiens
caagtaaagcagtaagcctggtacttactaagtgttctccgaaaaatggtatctgttatattatcgttattatctttgcctagaagctaacaggtacttayttgagcatcagtggaagccttgtttgcctccttgcagggtgcattttgccagagtccaccaagcccttttgtttagggccaaaccttttgactccccagt

SEQ ID NO: 546667 - DNA, 201 bp, Homo sapiens
aagtaaagcagtaagcctggtacttactaagtgttctccgaaaaatggtatctgttatattatcgttattatctttgcctagaagctaacaggtacttacytgagcatcagtggaagccttgtttgcctccttgcagggtgcattttgccagagtccaccaagcccttttgtttagggccaaaccttttgactccccagta

SEQ ID NO: 546668 - DNA, 201 bp, Homo sapiens
acaagggacttcttatgagtgtggggatgtgtggctggggtgtttgcaggggtttaggaggaggatctgcttcaggacatgaatgggcttgtccccagcartacttcatgctgttgctgctgactgatggtgctgtgacggatgtggaagccacacgtgaggctgtggtgcgtgcctcgaacctgcccatgtcagtgatca

SEQ ID NO: 546669 - DNA, 201 bp, Homo sapiens
tctcagtgtctcagtagcaggtcagagctagatttgggtcatttctgaggatccttgagtatcactcctttcctagcattcataaatttaacagatatcartagagcacctgctgtgttccaggcgttggcacagaagcaagactaatctggtccctctgcttgttgaagttacagtccaagaggagaaatacataataag

SEQ ID NO: 546670 - DNA, 201 bp, Homo sapiens
atactaggtacattcctataccacgggaaccaggtagtggctttcctggccatttgctaagttatggttagacaggaacaagtgtaaactagtctttgtcrtagtgtagtttcctgttgttgaaatattcctttgctttctcggcttccctaacatgtaaattctgaagacccatcttaaactctccccagtgtcccaaat

SEQ ID NO: 546671 - DNA, 201 bp, Homo sapiens
agaacataattcagtatgaacagtcaaaggtgttgagtgtatttaactcattttaggaatgagctgtactgtattcaaatgggctacttgatggttcattmcctccattctgctgctgttcatttcctccctttgcttgcttatatagtaaacctgctcgtaaccaggacttaaaactcttagactgaagccccttcactg

SEQ ID NO: 546672 - DNA, 201 bp, Homo sapiens
aacgtcatatagagaagtggtaaatggcacagctgagcattggaattggctccccagttgttccagacatctggatattgatcttagtaacttactagttycaagtcattttgcttaattaatggcttgccatttcatgataggagatgactatttcgttgtggggcaatgcccagcaagagaacataattcagtatgaac

SEQ ID NO: 546673 - DNA, 201 bp, Homo sapiens
aaggtgtgtctggaagtaggccctggtaatccaagagttaaggggccaaggatggtgtatgggggatgggggtgtggacagagggatggcataatggttgkttgttcctgagtcttgtaactggggtctcgcattggcaggacttcctgggaaaatcagatccatttctggagttcttccgccagggtgatgggaaatggc

SEQ ID NO: 546674 - DNA, 201 bp, Homo sapiens
gctgttggggcgcccacagatcccgcagggctccagccttggcaacgacatcgaccaataccccgtggttttcaggtgggtgctggggagagggcgggagyaggaaggccaggcctgccccacagttccatcagtttctgctccccttcccaagatgaagcaggccccaagtccagggctttgagatggacgtggggaacc

SEQ ID NO: 546675 - DNA, 201 bp, Homo sapiens
cccgtggttttcaggtgggtgctggggagagggcgggagcaggaaggccaggcctgccccacagttccatcagtttctgctccccttcccaagatgaagcrggccccaagtccagggctttgagatggacgtggggaaccaaaccacacacaatgcttcatctatcccaggaatgccagcgaccagggctcctggatgcag

SEQ ID NO: 546676 - DNA, 201 bp, Homo sapiens
ctatcccaggaatgccagcgaccagggctcctggatgcagctggagatgctactgcggaagctctctgacctggtgtggacttcagatgctctaagtgatraggtgatggaggtgtccccagacattctctgtgtgggggtgaggggaggtcactgcagggagtaacagcaggggctctgggaagaccttctattggctta

SEQ ID NO: 546677 - DNA, 201 bp, Homo sapiens
tcttgtatcttcttctcttaaaattcctgctcctcaatgccttcagcatggagtctaaagttttctgcctggctttcaagactctacatgtaggccaagcrtggtggctcatgcctgtatcccaacactttgggaggctgaggcgggtggatcatgaggtcaggagttcgagaccagcctggccaatatggtcaaactcca

SEQ ID NO: 546678 - DNA, 201 bp, Homo sapiens
aaccaaaccacacacaatgcttcatctatcccaggaatgccagcgaccagggctcctggatgcagctggagatgctactgcggaagctctctgacctggtrtggacttcagatgctctaagtgataaggtgatggaggtgtccccagacattctctgtgtgggggtgaggggaggtcactgcagggagtaacagcaggggc

SEQ ID NO: 546679 - DNA, 201 bp, Homo sapiens
gctgcctcatgccttctctcgcaccattccgtttgcctggaatgcccttctcttacgtcctgggggttcccctctcttcctccaataccatgaggaaaagygagttgacattctcttttttgggatcctcagtgactctaggagagtgtccagagtctgtttcctggaggtgagctccagtctcctcccagctcccaggga

SEQ ID NO: 546680 - DNA, 201 bp, Homo sapiens
tcagtagttcaagaccaacttgtgcagcatagcaagacctggtttctaaagatggaaatattgttgtggagttgggaaaggagtgagggtacagtatataytgctcaggtgacaggtacactaaaatctcagaattcaccattaaagaactcatctatgtaaccaaaacccacctgtacctgaaaacctgttgaactatat

SEQ ID NO: 546681 - DNA, 201 bp, Homo sapiens
gatcaatattttctatcttattttgctttgattttccccagagccctatctgtatcttttaacttttttttttttttgagacggagttacctaggctggcrtgcagggatttgatactggctcactgcaacctcagcctcctaggctcaagcgattctcctgcttcagcctcttgaatagctgggatttcaggcatctgcc

SEQ ID NO: 546682 - DNA, 201 bp, Homo sapiens
ggcggcaagaattcgaccaagggatttggaagagtttttctctacagtaggaaaggtaatcttaacctgtttagggaggtcaagtaggtagaaattgcaaragaaaacatgtaaacatcaaatacttcatttgatttagtagcagtatttgtttgtggtaatgtttccattttgcctcttgtagtattggagttgataaat

SEQ ID NO: 546683 - DNA, 201 bp, Homo sapiens
ttgtttactttttgctagctaatgctcctagaatatcttatccctatcatagtcccacttcatccacgactactccttttctagaggcagcccttacccgttttttttttgttttgttttgttttttatatccttccatagactttctgtggcttagcaaatactagcaaataaactttgtttcttttttaaaattttggt

SEQ ID NO: 546684 - DNA, 201 bp, Homo sapiens
acctatgaggctttatgtgggctcattacacttcaacataactgaagatatgcttcgtgggatctttgagccttttggaagagtaagtccaggttcttcartgaatcttcagtaggttgttgatctgagtataactacataatttctgtatgtcttgctttgttatctttctgtgagttaatattaagaggataagggctg

SEQ ID NO: 546685 - DNA, 201 bp, Homo sapiens
tcgggcctagccgtccttggaacccgatattcgggctgggcggttccgcggcctgggcctaggggcttaacagtagcaacagaagcggcggcggcggcagcagcagcagcagcagcagcaatctcttcccgaacacgagcaccacaggcgcccgaaggccggaacaggtacggggcgttgcggacccgcgtattatctcag

SEQ ID NO: 546686 - DNA, 201 bp, Homo sapiens
cgggcctagccgtccttggaacccgatattcgggctgggcggttccgcggcctgggcctaggggcttaacagtagcaacagaagcggcggcggcggcagcagcagcagcagcagcagcaatctcttcccgaacacgagcaccacaggcgcccgaaggccggaacaggtacggggcgttgcggacccgcgtattatctcagc

SEQ ID NO: 546687 - DNA, 201 bp, Homo sapiens
tcttgctctgtagcccaggctggagcgcagtggcgcagtctgggctcactgcaacctccgcctcctgggttcaagtgattctttgatttttttttttttctttgacatggagtctggcagtgtcgcccaggctggggtgcagtggttctatcacggctcactgcaaccactgcctcccagattcaagtgattcccctgcct

SEQ ID NO: 546688 - DNA, 201 bp, Homo sapiens
ctgttacagtatttgctaaatacatatttacttaaaattgtaaagttctgatgaatactaagttacacatgtataattagttaacagtaaataaaaagtctttgtcaccgtggctgttttcagctgaaatgtcaggccagttgtgaatttgttgtgtatgctcattgataaagatccttttttgggctcatctgtatttaa

SEQ ID NO: 546689 - DNA, 201 bp, Homo sapiens
ttatggttattaaataactatattaaccacctacaattctaaggattgcatctagcaatctttaatgctttatgaggttaattcctcttaataaacacagwgctgtaaactctgggatatattaaaaataacccttctaacttctaagatttgaatggttaaggatggaattcaaagacaaacagacccgaatcacttggg

SEQ ID NO: 546690 - DNA, 201 bp, Homo sapiens
tctactaaaaatacagaaaattagccaggcatggtggcacacacctgtagtcccagctactcgggaggctgaggcagaagaattgcttgaaccctggaggyggaggttgcagtgagccgagattgcgccactgcactccagcctgagtgacagtgagactccatctcaaaaacaaaaaaagaaaagaaaaattactttttt

SEQ ID NO: 546691 - DNA, 201 bp, Homo sapiens
tatttgtggtatcagaatgcatcttaagattgttgtcaagaatgtaggttcatgattcattttaggtgtgaaatgtagcctgcttactttttttttttttyttctcttgagacggagtctcgctctgtcgcccaggctgtagtgcagtggggcgatcttggctcactgcaagctccgtctcctgggttcacgccattctcc

SEQ ID NO: 546692 - DNA, 201 bp, Homo sapiens
ctgggactacaggtgcccaccaccgcacccggctaattttttctatatttggtagagatggtgtttcactgtgttagccagtatggtcttgatctcttgaygtcgtgatctggctgctttagcctactaaagtgctgggattacaggtgtgagccatcgtgcccagccaaaaactgtactcttgaagctgtaactccctaa

SEQ ID NO: 546693 - DNA, 201 bp, Homo sapiens
ttcaagcaattcttctacagcttccctagcagctgggattataggtgcatgccgccatgcctggctttttttttttttttttttttttgagatggagtatygctcttgttgcccaggctggagtgcaatggcatgatctcagctcaccataacccccatctcccaggttcaagcgattctcctgcctcagcctcccaagta

SEQ ID NO: 546694 - DNA, 201 bp, Homo sapiens
tagacttaaaaaagacttcttggtgatgaggttttgtgataagtcttctattttggaggatgaggagactggtagatttttaaaaccatgtctcagggaakaaagtagttttgtactctgcttttaagttatagtaattatgcttttcaattatagattgaaagtatccagctgatgatggacagtgaaactggtcgatcc

SEQ ID NO: 546695 - DNA, 201 bp, Homo sapiens
gtaatcccacctacttgtgaggctgaggcaggagaattgcttgaacccaggatatggagattgcagtgagccaagattgtgctattgcgctgcagtgctcyagcctgggcaacagagtaagactctgccttgaaaaaaaataaaactataaataaataaatataaaataatttaagaaaataggtttattaggttctgcag

SEQ ID NO: 546696 - DNA, 201 bp, Homo sapiens
aaaaaataaaactataaataaataaatataaaataatttaagaaaataggtttattaggttctgcaggccatgcaaacatgacactaacagctgctcagaktctgtggtggcctcaggaagctgttacttgtgcttcgcaaagcctttacttgttattgcttggaggagcaggtgtgtcacttggagagagggagaggaag

SEQ ID NO: 546697 - DNA, 201 bp, Homo sapiens
agggggatggagttactttttaccttgttccctaattgaatatatttaggacttttggttttagaaatctcagagttctatagttggaatagtgtcacagrgatagtgttaggtttcttaggcaacaaaattggagtgttacctattgcccatctgggcatggctttgatgagttctatataaataatgagtgtagcctaa

SEQ ID NO: 546698 - DNA, 201 bp, Homo sapiens
atttatagacaattttcttacaccctggatgctgtatcagatacgttgatttgctcttaatgtcttcagttaactgaagattatccactgttaaatatcakttctaccgttagcctttatttcttttattatggatgaatgtacctcttgggttctttctcatcgtgtagtatatattaagattgtttgaatgtagccagc

SEQ ID NO: 546699 - DNA, 201 bp, Homo sapiens
gtctttcaatttatattgaaatatctgaaggcacctctaaaatttgggtgatgacacagaggtatagattataagatttaattatgaatgggtggtatacygtgaagactacggaagtgagcagaaagatatgtttggcttttttggtttttagttagagattttaaaaaggtctgtgaaggtcaagttgatcattggttt

SEQ ID NO: 546700 - DNA, 201 bp, Homo sapiens
agactgcgtttccaaaaagaaaaaaaagcttttgtgacaaatcttacaggtggagcgaccaccccaacccccgtacatcctgagagtgtccaaaaaatggraaagatcgtgtttaggcttacatcttaaaggatgacttacaaccttaattgatattttgtaacagagatgatgttaatagacactgtatctaaatttgta

SEQ ID NO: 546701 - DNA, 201 bp, Homo sapiens
atacagttacgttttgatacatgtatacagtgtaatgatcaaatcgggtaattagcttattcgtgttaaatgtttctttgtgttggcaacgtagcagttayatcaaactttacacttaactttggaattaataaataatgagttatttgaaatagcctcgtggagaagtagttgtaacagtaagttttactatttggctgt

SEQ ID NO: 546702 - DNA, 201 bp, Homo sapiens
gggtgtggtggcgcatccctctaatcccagctacttaagaggctgaggcaggagagtcacttgaacccgggtggcagagattgcagtgagccgagatcacscctggataacagagccagagtgtctccgaaagaaaagaaaaagaataatcatggatatttgagaaatctgtgtaccatataaaaattaacatcaggaaac

SEQ ID NO: 546703 - DNA, 201 bp, Homo sapiens
caagtaggtagaaattgcaagagaaaacatgtaaacatcaaatacttcatttgatttagtagcagtatttgtttgtggtaatgtttccattttgcctcttrtagtattggagttgataaatgttactacaaatttgttcaaagataaagataggatataggaattgtcctacagatttacttttttaattaaatttttaaa

SEQ ID NO: 546704 - DNA, 201 bp, Homo sapiens
aaaattaaccgggcgtggtggcgggcgcctataatcctagcatctagggaggatgaggaagaattgcctaaacctaggaggcagaggttgcaatgagccgrgatggtgccactcatgtatatgaaactcatccatggtggaacttttttcagatgtgtgagctctgtaaccttttaaggtcctggaaacatagtattttta

SEQ ID NO: 546705 - DNA, 201 bp, Homo sapiens
aatgccgtagctatgggggagtttagggcaaaaggattgcttgagatcagtagttcaagaccaacttgtgcagcatagcaagacctggtttctaaagatgraaatattgttgtggagttgggaaaggagtgagggtacagtatatactgctcaggtgacaggtacactaaaatctcagaattcaccattaaagaactcatc

SEQ ID NO: 546706 - DNA, 201 bp, Homo sapiens
ttattttatagatgatgtgccttgtattaatgtatggaaatctatattatgtgttttgaatgccacagtataagttgcaagatttcttttcctttatgtartgtttatatgtcatacttaggaataaatttagttgcagctattataatgttacaagtttttctttttgtaatttcttattttttgatgcagggtctggct

SEQ ID NO: 546707 - DNA, 201 bp, Homo sapiens
ctgaagattatccactgttaaatatcagttctaccgttagcctttatttcttttattatggatgaatgtacctcttgggttctttctcatcgtgtagtatrtattaagattgtttgaatgtagccagctaaaatcctaaagctccatatggattcctgacaatagtgtccctaccctttatctatgtatctagttacattc

SEQ ID NO: 546708 - DNA, 201 bp, Homo sapiens
tgctttcttttgcacttccagtactttaaggtcaagtgaatttctactgagttttcagtagttttcactttaatttcatataattaaagcaacagttatawatttatttatttatttatttattttgagacggagtctcactcagtcacccaggatggagtgcagtagtgcagtcttggcttactgcaacctccgcctcct

SEQ ID NO: 546709 - DNA, 201 bp, Homo sapiens
atggtcctatcttcaagttccttcagtatacaccagttacatttcttcagctccctgagatgccaattttgagcacctaggacccaggtattttatcccartataacttgggctgcagatccctgtacatttttgcccatgttgcaagaaacccatatatgtggtaataaagtgttgcagttgaatcaaattttaatgaaa

SEQ ID NO: 546710 - DNA, 201 bp, Homo sapiens
gttactacaaatttgttcaaagataaagataggatataggaattgtcctacagatttacttttttaattaaatttttaaaaataccttcatccttcaacartgtctcttgaaataattctacatgtgttacaatggatgtttgcacaaacaactgtgttttctttctaggttcgagatgtgaggatgatttctgacagaaa

SEQ ID NO: 546711 - DNA, 201 bp, Homo sapiens
ttacttttttaattaaatttttaaaaataccttcatccttcaacagtgtctcttgaaataattctacatgtgttacaatggatgtttgcacaaacaactgygttttctttctaggttcgagatgtgaggatgatttctgacagaaattcaagacgttccaaaggaattgcttatgtggagttcgtcgatgttagctcagtg

SEQ ID NO: 546712 - DNA, 201 bp, Homo sapiens
tacaccagttacatttcttcagctccctgagatgccaattttgagcacctaggacccaggtattttatcccaatataacttgggctgcagatccctgtacrtttttgcccatgttgcaagaaacccatatatgtggtaataaagtgttgcagttgaatcaaattttaatgaaaatcaggttactgaatcaaaattttgatg

SEQ ID NO: 546713 - DNA, 201 bp, Homo sapiens
aatgtttactcacggaatcgtcttgttcttttcctaggcgtttagagaaaatgttagacgatataggcaacaagagtgaaacttgtttcacattgtaagaraaatgtttactcaagaaattgtcttgttctcttcctaggcgtttagagaaaatggcagacgatattgatattgaagcaatgcttgaggctccttacaaga

SEQ ID NO: 546714 - DNA, 201 bp, Homo sapiens
agcaacagaagcggcggcggcggcagcagcagcagcagcagcagcaatctcttcccgaacacgagcaccacaggcgcccgaaggccggaacaggtacgggkcgttgcggacccgcgtattatctcagctttctcgaggtttggctccattttgggctgaggggcgcttttggaggtctttagcgaccggggtggggggtgg

SEQ ID NO: 546715 - DNA, 201 bp, Homo sapiens
gggagggaggccgaggtgggcagattatgagatcaagaccatcctggccaacatggtaaaaccacgtctctgttaaaaatacaaaaattagctgggcgtgwtggtgcgtctctgtgttcccagctactcgggaggccgaggcagcagaatttctcccttgaatataggaggcagaggttgcagtgagctgggatggcacca

SEQ ID NO: 546716 - DNA, 201 bp, Homo sapiens
gctgggcgtgttggtgcgtctctgtgttcccagctactcgggaggccgaggcagcagaatttctcccttgaatataggaggcagaggttgcagtgagctgrgatggcaccactgcactccagcctggcctggcgagacccttacctttaaaaagacattactctgtctccctggttatgtgctcagttccaggccttggta

SEQ ID NO: 546717 - DNA, 201 bp, Homo sapiens
tccaactctctaacatgtttaaccctcaaacgtaagtaatggactttattcttgatatttcctatcaaggcgtcaatagagttgttttatatatttctctwttttttttttttttttttttttaagatggagtttcgctcttgttgtctaggctggagtgcaatggcgcgatcttggcttactgcaacctccgcctcctgg

SEQ ID NO: 546718 - DNA, 201 bp, Homo sapiens
gtagctgggattacaagtgcacaccaccacgcccaactacttttgtgtttttagtagagacagggttttgccgtgttggccaggctggtctcgaactcctsaccttaagtgatctgctcgcttcagcatccgaaagtgctgggattacaggcgtgtgccatgatgcctggctgatttttgtatttttatagtagagctggg

SEQ ID NO: 546719 - DNA, 201 bp, Homo sapiens
atttaagagtccttaatactttcttacagagaagaagaagttggatgggataccgagattaaggatgatgtgattgaagaatgtaataaacatggaggagytattcatatttatgttgacaaaaattcagctcaggtattttcatctttttttataaatgatgttaggttgttcgtctctaccttaatcttcgcacattat

SEQ ID NO: 546720 - DNA, 201 bp, Homo sapiens; identical to SEQ ID NO: 375907

SEQ ID NO: 546721 - DNA, 201 bp, Homo sapiens
catgcggcaccacaccctgctaattttgtatttttagtagagacagggtttttctccatgttggtcaggctggtctcaaactcctgacctctggtgattcsccctcctcggcctcccaaagtggtgggattacaggcatgagtcacggagcccaacctacttttttgtgttttagtagagacagggtttcaccgtggtgcc

SEQ ID NO: 546722 - DNA, 201 bp, Homo sapiens
taaagtgctcagaggacttaatggattcatgaaatgttttggcattacatgaattccgattctggctcttttatctttaaaataaaaagaattaaactccktgatgctggtttcctccaagctgcttatttcattaactttttaatagctgaaaatgggaccacaatgctattttaatttcgaatgctgtacaacattagg

SEQ ID NO: 546723 - DNA, 201 bp, Homo sapiens
tgacctgtctccttcgaggcctgggccggccgcgacctcccaacatggcgccagttgaacgctgccttggctcataacccctcccaatggagggagtttcyctttgcccctaaaatggcagcgcgggtttttgcccggaaagaggcgctctcgttcgggtctcccagtttctgtttttggagttgacagcagagttttaaa

SEQ ID NO: 546724 - DNA, 201 bp, Homo sapiens
tagttaacagtaaataaaaagtctttgtcaccgtggctgttttcagctgaaatgtcaggccagttgtgaatttgttgtgtatgctcattgataaagatccytttttgggctcatctgtatttaaggtttgttaataataataaaaggtattccaaactaaaagtgttttgaagattagatcactagaaatttggatgtgga

SEQ ID NO: 546725 - DNA, 201 bp, Homo sapiens
atgttaatgaaaaacgagagaaaaatagccatttatttgatttctttttggctcttttcctcctaagatccctaaatgcttcatagtaagtatgtcagtcwttctcactacaactgtgttaggtaggttgataaaatttcataaaacagatgagaaaatatataatgttattcagggcttgttaagccactattttttttt

SEQ ID NO: 546726 - DNA, 201 bp, Homo sapiens
ttagtatgtaactatagttatgattttggtttgagggttattctctgggtattcagatggcagtttaacttgagtgatttgaattgtgaaattttattttkttaatgattggttaaaaagtattgaattaaggatattggcattgaatactagtaaagtgaaaatacagtgcatagacaaataagtaaaaatttgctttta

SEQ ID NO: 546727 - DNA, 201 bp, Homo sapiens
agcctcctgttgcatggtatagtgctgttgtgttctgtgactgctgctcattacgttgagtcggatgttttcaggactttttttttttttttaactttgcrtttattaacattgatacagttttctcaagactgtcgtcctgtcgtttctccttgtgtttgaaatgtaatgattttgccttttttttgttttgtttttgag

SEQ ID NO: 546728 - DNA, 201 bp, Homo sapiens
acagaagtccttagtatgtaactatagttatgattttggtttgagggttattctctgggtattcagatggcagtttaacttgagtgatttgaattgtgaawttttatttttttaatgattggttaaaaagtattgaattaaggatattggcattgaatactagtaaagtgaaaatacagtgcatagacaaataagtaaaaa

SEQ ID NO: 546729 - DNA, 201 bp, Homo sapiens
gcagagttttaaatattggatattgaagtcttcattttcgtgtgtttcgtgtaagaggcgttttggatttacttacgtaagccaaacctggttaaagtgcrtgtcactttagtcattaattgtagggcttttggaggtttttcttaagttttcgagtgtgtcggctgagaagaaaaattcagtcgatttgaaaaacgttta

SEQ ID NO: 546730 - DNA, 201 bp, Homo sapiens
tatagtgctgttgtgttctgtgactgctgctcattacgttgagtcggatgttttcaggactttttttttttttttaactttgcgtttattaacattgatayagttttctcaagactgtcgtcctgtcgtttctccttgtgtttgaaatgtaatgattttgccttttttttgttttgtttttgagatggagtctctctcacc

SEQ ID NO: 546731 - DNA, 201 bp, Homo sapiens
actcattttctgaccggtgtgcttccctttccccatttcccattattcccagctgtatagtagtgtagtgaaaatcacttgagatgtggaagagtagtctrgtctaggaagagagagggaaaagtaagtttcccaggataagagggggaaaaaaggccccaaagccttctcaatgaggaatggggaaggaggttttgctgc

SEQ ID NO: 546732 - DNA, 201 bp, Homo sapiens
accgtcttccattatagtttttgtgtgtgtgtgcctgaaagtagctttaatatagtggctaaataaaccctccaaaataaaagaaaatcagtaacaatttkatcagggtatgagaggatttctagtaatgctcaaagcttgccatgaaatcttggcatcttgattcattcttaggctgcatacaaatcgtagagaaaagat

SEQ ID NO: 546733 - DNA, 201 bp, Homo sapiens
cagtttggtatagcaaaaaggtgaatgtagtggtttgggaaaaagcaggggtccaagaataacaaagcatgaccagtctgtggcaagttaaatcttctaayagtcttataagaagaaatgggtgagattttaaaatttatgtatctatgtaagactggtgatagtaaatcttaaaacagtccagtggcaatctgctgctca

SEQ ID NO: 546734 - DNA, 201 bp, Homo sapiens
ttctctcgggcctagccgtccttggaacccgatattcgggctgggcggttccgcggcctgggcctaggggcttaacagtagcaacagaagcggcggcggcrgcagcagcagcagcagcagcagcaatctcttcccgaacacgagcaccacaggcgcccgaaggccggaacaggtacggggcgttgcggacccgcgtattat

SEQ ID NO: 546735 - DNA, 201 bp, Homo sapiens
ttttttaactcttctcattggttttataaatcatatttataatatagtacatccaatcaaaatgtagatttttgtttcgatttcaataagttacatttcayataatgacaattgtatgactgtttcatccaaagagtcttgaattcttttgttttcccagtaccaaatttactttagttttatctatgaaatggtgataaa

SEQ ID NO: 546736 - DNA, 201 bp, Homo sapiens
tgttgagacagttatttttctttatagtacataaaaatttaagatcatgaattgggaggtggagcttttggaggcaacaggaaaagaagggtgaattgacrtttttacaattatgtataaagggatttagttcataaaacactcattcccctgtgccccccaaccccccgcccccttttttttttttttttttttttttgg

SEQ ID NO: 546737 - DNA, 201 bp, Homo sapiens
cacacccagctaatttttgtatttttagtagagacctgcctgccttgacctcccaaaatcctgggttacaggcatgagccccctcacctggctggtccttygaccttatatatatatacgaagtgagactgtaactgagaagatagattttagaccctggtagtaccacatctgaaagtacgaagaggtcctgtggttgct

SEQ ID NO: 546738 - DNA, 201 bp, Homo sapiens
tgacctcccaaaatcctgggttacaggcatgagccccctcacctggctggtcctttgaccttatatatatatacgaagtgagactgtaactgagaagatakattttagaccctggtagtaccacatctgaaagtacgaagaggtcctgtggttgcttcatgattttcttctaaattgaaagctcaatattcaattaaagta

SEQ ID NO: 546739 - DNA, 201 bp, Homo sapiens
tttcttgtttttagttatcactaaatctctgttgcttgacatgagcattttgctgttaatgtaagttctatatcttttgtaggagtatgcttaatgtttagggaaatgattatgagaaagatatgtcatgttccatcacagtcaagaattaaattttttcacaaacaagatgcttctaatcagtgctgttttgttaagaga

SEQ ID NO: 546740 - DNA, 201 bp, Homo sapiens
ttttatggaaattatatttaaccacttcaacattgtaaatctggataacttttaatatctaaactatataagaaagtaaaatttaacatgttaatatggawaatttttttatttttgtatcttgatgacttaaatgtaagcaacaaagtggttaaacacatacccatctaaatttttttatagccttccatgttaaactat

SEQ ID NO: 546741 - DNA, 201 bp, Homo sapiens
gcattttgctgttaatgtaagttctatatcttttgtaggagtatgcttaatgtttagggaaatgattatgagaaagatatgtcatgttccatcacagtcargaattaaattttttcacaaacaagatgcttctaatcagtgctgttttgttaagagatttttaaaagattttcctagatttactgtgttctgcattgatct

SEQ ID NO: 546742 - DNA, 201 bp, Homo sapiens
cagtatttgctaaatacatatttacttaaaattgtaaagttctgatgaatactaagttacacatgtataattagttaacagtaaataaaaagtctttgtcmccgtggctgttttcagctgaaatgtcaggccagttgtgaatttgttgtgtatgctcattgataaagatccttttttgggctcatctgtatttaaggtttg

SEQ ID NO: 546743 - DNA, 201 bp, Homo sapiens
ctcccaaatttctgaatgtctgtttcaagtattaggttacctcagttttctggcacctaaaagctactgataacatacattagtagcaatattaaataagktaaaataactccagtgacatcctagttacatgcttggggtgggtttttggtttcgttttaaagtatttatgagggatactttcatgcattttccatgaaa

SEQ ID NO: 546744 - DNA, 201 bp, Homo sapiens
aacaagcctaatttgcgttagctagcgtcgtcatcatgtatgttgtgtttgctacttacagcttgcagtttctaccttagtattcagaagtaattattgartatgctaaaaatataaatatatttttaagtatagtttgtattttaaaaattaaagcactgtctcctgtccttgcctcccctatcatgtagttttctgact

SEQ ID NO: 546745 - DNA, 201 bp, Homo sapiens
catggattattttactcttaaaaataagaattgtaggccaggcccggtggctcacgcgggtaatcccagcactttgggagactgaggtgggtggatccacraggtcaagagatcgagaccagcctggctaacatggtgaaaccctgcctctactaaaactacaaaaattaggccaggcgtggtggtggctcacgcctgtaa

SEQ ID NO: 546746 - DNA, 201 bp, Homo sapiens
agagtcttattctgctgcccaggctggagtgcagtggcacaatctcgcctcgctgcaaactcctcctctctgtgttcaagcgattctcttgctttagcctyccgagtagttgggtttacaggtgcctgccatcatgctcgactaatttttttttttttttttagagacagggctttaccatgttggccaagttggtctcat

SEQ ID NO: 546747 - DNA, 201 bp, Homo sapiens
cctgagtagctgggattacaggctctgaccacaacgcccagctaatttttggtgtgttggtcaggttggtctcgaactcttgacctcaggtgatctacccrcctcggtgtcccaaagtgttgtcattacaggcgtgagccactgcgcccagacccattttaggttttcagtgccatatggtcttgttgcaagtactcaact

SEQ ID NO: 546748 - DNA, 201 bp, Homo sapiens
tcggccctgtttcagtgaccgcgcccttattttccagtcgggtatagtctggattcttggggcggtagggacccccgagaggccgcggtagaatggtgacmtgtctccttcgaggcctgggccggccgcgacctcccaacatggcgccagttgaacgctgccttggctcataacccctcccaatggagggagtttctcttt

SEQ ID NO: 546749 - DNA, 201 bp, Homo sapiens
taaacaattacatatccagataatgatacagaattgtcaaaatgtttaatcattaagccactacaaatagacattttcgtggaataaactgattttgaaaygtctttcaatttatattgaaatatctgaaggcacctctaaaatttgggtgatgacacagaggtatagattataagatttaattatgaatgggtggtatac

SEQ ID NO: 546750 - DNA, 201 bp, Homo sapiens
tcccttgttcaatcaggactcttgattttctgaaggaactttatgtttcaaattaattttaaagttacctggaagaaaatttttgtatttaggaatagatrtaaaacatacagaacactctgctttaaacctttagtactaaattaaatttcttaaccaaaggaaagtgccgtgttgcatttttcattctaaaacttcatt

SEQ ID NO: 546751 - DNA, 201 bp, Homo sapiens
attaaggctacaagcttttacaaggaagctgagcatcaagttctccatgtgtgatattcggtggcctttgtctaatgtagagaaccacaggactaaatagragaatggacaattttctttaaccatgagattgtctaagggaagatcctttcaaaacactttggtaatcttaaaatactttccagtcagacttctcgtcaa

SEQ ID NO: 546752 - DNA, 201 bp, Homo sapiens
tttttatcctgtgtataagctgattaaggctacaagcttttacaaggaagctgagcatcaagttctccatgtgtgatattcggtggcctttgtctaatgtrgagaaccacaggactaaataggagaatggacaattttctttaaccatgagattgtctaagggaagatcctttcaaaacactttggtaatcttaaaatact

SEQ ID NO: 546753 - DNA, 201 bp, Homo sapiens
atgatataatttgtagaaaatgtgctccttttttctggtataagcttggatgggagtcatttatagttcctcaccaatcacaagaaattgtggggatcagkttgggtttagtcttgatgtgggatctgatgcaaccaaccagaggtatggtttatgtcatctggttttagactttctgccacagtaatggtttcctaatgt

SEQ ID NO: 546754 - DNA, 201 bp, Homo sapiens
caatagaactctgctatagactagtacagaaaacagtgtacgaaaagtcttaggtaacagatatgatgagatccactttttttttttcttttcttgtgagwcggagtcttgctctgtagcccaggctggagcgcagtggcgcagtctgggctcactgcaacctccgcctcctgggttcaagtgattctttgattttttttt

SEQ ID NO: 546755 - DNA, 201 bp, Homo sapiens
acatgtcggtgaggtttatatatttcttaatttagcattattcacgaaactactgctgaaatgtaaactaacctccccggagccctcttgatttatcttaycagagatgcattacgtgtaacttacaaaagtaaatatatgctattgatgtaataatattgtgcagtagtttcacttcagcgtgatgaataaatgcccatc

SEQ ID NO: 546756 - DNA, 201 bp, Homo sapiens
tttgtttcctcttcataactgaggtggaaaagcagtagcctaaacaatgttagtcttgctggagagcgcatgaatgcgatcttagcaagaccctaaacctrtaactagtgtaattttgtgtttcctttttagctccggaccaaaatttaacagtgccatccgaggaaagattgggttgcctcatagcatcaaattaaggtt

SEQ ID NO: 546757 - DNA, 201 bp, Homo sapiens
tctctgtatttagtatttgtggtatcagaatgcatcttaagattgttgtcaagaatgtaggttcatgattcattttaggtgtgaaatgtagcctgcttacttttttttttttttttctcttgagacggagtctcgctctgtcgcccaggctgtagtgcagtggggcgatcttggctcactgcaagctccgtctcctgggtt

SEQ ID NO: 546758 - DNA, 201 bp, Homo sapiens
ctaaaactacaaaaattaggccaggcgtggtggtggctcacgcctgtaatcccagcactctggaaggccgaggcaggcggatcacctgaggtcagaagttmaagaccagcctggccatggtgaaaccctgtctgtactaaaaaatacaaaaaattagctgggcgtggtggtgtgcacctgtcatcccagctactcgggagg

SEQ ID NO: 546759 - DNA, 201 bp, Homo sapiens
tagctgggattacaggcatgcggcaccacaccctgctaattttgtatttttagtagagacagggtttttctccatgttggtcaggctggtctcaaactccygacctctggtgattcgccctcctcggcctcccaaagtggtgggattacaggcatgagtcacggagcccaacctacttttttgtgttttagtagagacagg

SEQ ID NO: 546760 - DNA, 201 bp, Homo sapiens
taaagtaggatgggatcaatattttctatcttattttgctttgattttccccagagccctatctgtatcttttaacttttttttttttttgagacggagtyacctaggctggcatgcagggatttgatactggctcactgcaacctcagcctcctaggctcaagcgattctcctgcttcagcctcttgaatagctgggatt

SEQ ID NO: 546761 - DNA, 201 bp, Homo sapiens
tgttacagtatttgctaaatacatatttacttaaaattgtaaagttctgatgaatactaagttacacatgtataattagttaacagtaaataaaaagtctttgtcaccgtggctgttttcagctgaaatgtcaggccagttgtgaatttgttgtgtatgctcattgataaagatccttttttgggctcatctgtatttaag

SEQ ID NO: 546762 - DNA, 201 bp, Homo sapiens
ctgctcattacgttgagtcggatgttttcaggactttttttttttttttaactttgcgtttattaacattgatacagttttctcaagactgtcgtcctgtygtttctccttgtgtttgaaatgtaatgattttgccttttttttgttttgtttttgagatggagtctctctcaccaggctggagtgcaatggcatgatcgc

SEQ ID NO: 546763 - DNA, 201 bp, Homo sapiens
gaggctcagacaggagaaagatttataaaacaagtcaagctggagttggttcatggggtatatgtagtttgcttacctttgccccagaacaattagtatgyattaagtgcccaactccagtaaacataatgtagcagctttaataagaagccctttttaaaggtttattttattattttttttggagtctgagtcctgcgc

SEQ ID NO: 546764 - DNA, 201 bp, Homo sapiens
tctcgggcctagccgtccttggaacccgatattcgggctgggcggttccgcggcctgggcctaggggcttaacagtagcaacagaagcggcggcggcggcagcagcagcagcagcagcagcaatctcttcccgaacacgagcaccacaggcgcccgaaggccggaacaggtacggggcgttgcggacccgcgtattatctc

SEQ ID NO: 546765 - DNA, 201 bp, Homo sapiens
acaaaaattagctgggcgtggtggtgcacgcctgtagtcccagctactctcgggaggctgaggcaggagaatcgcttgaacctgggaggcagaggttgtartgagctgagattatgccattgtactccagcctggagacagagcgagactccgtctcaaacaaacataaaaatctgtcatacttacgaccttatgttaatg

SEQ ID NO: 546766 - DNA, 201 bp, Homo sapiens
gcattaagtgcccaactccagtaaacataatgtagcagctttaataagaagccctttttaaaggtttattttattattttttttggagtctgagtcctgcrctgtcacccaggctggagtgcgatagctcactgcaacctctgcctcccaggttcaagcaattcttctacagcttccctagcagctgggattataggtgca

SEQ ID NO: 546767 - DNA, 201 bp, Homo sapiens
aaggtttattttattattttttttggagtctgagtcctgcgctgtcacccaggctggagtgcgatagctcactgcaacctctgcctcccaggttcaagcarttcttctacagcttccctagcagctgggattataggtgcatgccgccatgcctggctttttttttttttttttttttttgagatggagtattgctcttgt

SEQ ID NO: 546768 - DNA, 201 bp, Homo sapiens
gtgggatctgatgcaaccaaccagaggtatggtttatgtcatctggttttagactttctgccacagtaatggtttcctaatgtttttgttttgcaattctytaatcaaaagaaaacccaggaaggtgtatccatataaattgacataaattatccaattaggtgtcaggccgagtggctaaagatttcgcttcaagtgcca

SEQ ID NO: 546769 - DNA, 201 bp, Homo sapiens
tatgagaggtaaataggttggttgcctctcttgctatagcccatctagagcagaacaaaaactttgtttttgagggggatggagttactttttaccttgtyccctaattgaatatatttaggacttttggttttagaaatctcagagttctatagttggaatagtgtcacagagatagtgttaggtttcttaggcaacaaa

SEQ ID NO: 546770 - DNA, 201 bp, Homo sapiens
cttgtgagtcggagtcttgctctgtagcccaggctggagcgcagtggcgcagtctgggctcactgcaacctccgcctcctgggttcaagtgattctttgatttttttttttttctttgacatggagtctggcagtgtcgcccaggctggggtgcagtggttctatcacggctcactgcaaccactgcctcccagattcaag

SEQ ID NO: 546771 - DNA, 201 bp, Homo sapiens
gttttggaatgaaatttggtcagataatatgattacggtgagttctgtaacagctactggtaatatttttgtaaatcacgtgaaagcattggagcaactgwcttggaaaatgctctttaaacttcaaaccccagtatgttttggtagtagtggatattacacatatatgctgctcttttcagtgttcttttattgtgcgaa

SEQ ID NO: 546772 - DNA, 201 bp, Homo sapiens
aaagtactaaattctacctcaggtggtctgcctgcctcggcctctccaagtgttgagattacaggtgtgagccactgcacccagccagttttcacattttytaaccacaatccccatgttctcaaatataaagctgtcattacttgtaatatcttttatttaaactaccacatcaacaagcctaatttgcgttagctagcg

SEQ ID NO: 546773 - DNA, 201 bp, Homo sapiens
atctgtttaacttactggtcattaggctgttacgtacgtcaatgaactggtgaaaggagaaaatttatgaaacatagctcaccaattttatttttttattytagtaactttagtgtggatattttccaccttttctttttctccagataagccattgtgggtatatgtgtaaaccaaaattttatatatatgtaatttata

SEQ ID NO: 546774 - DNA, 201 bp, Homo sapiens
tttagctccggaccaaaatttaacagtgccatccgaggaaagattgggttgcctcatagcatcaaattaaggtttttaaacatacttctgaattgtttaarttgtttttcaaggaactaacatgctgtacttgtttggataacttctgaaactttttaactttgcagcagacgacgttcccgaagcaaaagtccattcaga

SEQ ID NO: 546775 - DNA, 201 bp, Homo sapiens
gcagtagcatgctggaaccagcttgtcagagttatttccaaattttagaaagtttgacagctaaatatagccattctttcttactttttatttttatttawaaaaaaaatttaatggaggcaggtcttgttatggttcccaggctggtcttgaatgcctggcctcaagcaaatctcccacctcagcctcccagtgctggga

SEQ ID NO: 546776 - DNA, 201 bp, Homo sapiens
tttttgacacagggtcttgctcttttgaatggagttgctggctctacaaggactctttagcctatcttaactctatcacttctttggctagtggatagatmcacacacacacacacacacacacacacacacacacaccccatctctttgcccagattttaatggaggagtaagctagttcctctgcttgttctgcctgtt

SEQ ID NO: 546777 - DNA, 201 bp, Homo sapiens
tggctctacaaggactctttagcctatcttaactctatcacttctttggctagtggatagatacacacacacacacacacacacacacacacacacacacsccatctctttgcccagattttaatggaggagtaagctagttcctctgcttgttctgcctgttatcagagggctaggttgtgttggcaaccgtaacccaag

SEQ ID NO: 546778 - DNA, 201 bp, Homo sapiens
gacttcaggcgatccacctgccttggcctcccaaattgttgggattacaggtgtgagtcactgcaccacgccagtttcaacttttagatttagagggtacrtgtgcaggtttgctgcatgggtacactgcatggtgctggtgtttggggtatgactgatcccatcacccaggtagtgagcatggtaccaaatagtttttca

SEQ ID NO: 546779 - DNA, 201 bp, Homo sapiens
ttctcaaaagaaggcccacctttggggtcatctcaggtgtactgttcttccttctgtcttgaaagcatcatttaagattcagtgaaatgggtgcagctgtaaaaaaaaaaaaaaaaaaaaatgagatcatgtcctttgcagggacatggatgaagctggaagccatcattctcagcaaactaacacaggaacagaaaacca

SEQ ID NO: 546780 - DNA, 201 bp, Homo sapiens
ccagcttatgggctggagctggtccacaaatgtgttttatttggactttactatatttttcttttaaatttgagccaacacttaaaaatcacagaatttcscttgaaattctggatttgtggcttcgtttgaaaaatgggagctctggcaatattgtttccgctttgattcaaggtagctgagctgtggtcctttctaggt

SEQ ID NO: 546781 - DNA, 201 bp, Homo sapiens
ctttgtcacccaggctggagtgcggcggcgcaatctcggctcactgcaatctccacctcccaggttctcctgcctcagtctcctgagtagctgggactacrggcgcgcaccaccatgcctggctaatttttgtacttttagtagagatggggtttcaccatgttgaataggctggtctcaaactcctggcctccagtgatc

SEQ ID NO: 546782 - DNA, 201 bp, Homo sapiens
cggggcctgttggggggtcgggggcaagaggagggagagcattaggacaaatacctactgcatgaagggcttaaaacctagatgacaggttgacaggtgcagcaaaccaccatggcacatgtatacctaggtaacagacctgtatgttctgcacatgtatcccagaacttaaagcaaaataaaaattcagtgaaatgagaa

SEQ ID NO: 546783 - DNA, 201 bp, Homo sapiens
taaaaagtgaaaccacatgtttaggggggagacacagcggtcccttaagatgcgggtctgtgccaaggttgaagggtctcctttcatcccaaacaattaartcaggctgactgaccagagccttctggaaagtggcttcccagcaaaactgtgttacttaatatttgctttccttagatttgatttcattttctttccttt

SEQ ID NO: 546784 - DNA, 201 bp, Homo sapiens
ctaatttttgtacttttagtagagatggggtttcaccatgttgaataggctggtctcaaactcctggcctccagtgatccaccagcctcggcctcccaaartgctgggattataggcatgagccacctcacctggcctataagtgatttttaaaaacccacaagcattattgtgctgtaggaatttactagttgaatacaa

SEQ ID NO: 546785 - DNA, 201 bp, Homo sapiens
ggctgactgaccagagccttctggaaagtggcttcccagcaaaactgtgttacttaatatttgctttccttagatttgatttcattttctttccttttccrctctttccccttacccccaactccacacactctggtcacgctgatctatactcctggttccccaaataggccttgtaatatcagccatctgtgcctctgc

SEQ ID NO: 546786 - DNA, 201 bp, Homo sapiens
acattgcggattacaatttgatttgaggtttgttccccaccaaatctcacagatccaaactgtatcaaccagtgagtttgtcctcctagaagagggtttgsgggttctggggttcttctcagcagagagctcttgttccatttgaggacattttgaatagtaatgcttaggtgttctctctctttctctcctttgaaagcc

SEQ ID NO: 546787 - DNA, 201 bp, Homo sapiens
ggctcatagttctacgggctgtacaggaagtatagtagcttctgcttttggggagccttcaggaagcttccaatcatggcagaaggaaaaggcatctcacwtggcagaagcaagagcaagagagcaaggggggaggtgctagaaaccagatctaatgagagctcactatcatgaggacagtaccaaggggaatggtgctaa

SEQ ID NO: 546788 - DNA, 201 bp, Homo sapiens
ttgctgacattgtcttttgtgtttttttgagatggagtctctctgtcactcaggctggagtgcagtagcgtgatcttggctcactgcaacctccacctctygggtttgagcaattttcctgcctcagcctcctaagtagctgggtctacaggcgtgcactaccacgccgggctaatttttgtatttttagtagggacaggg

SEQ ID NO: 546789 - DNA, 201 bp, Homo sapiens
ggctggtctcgaactcctgacctcaggtgatttgcccacctcggcctcccaaagtgttgggattacaggtgtgagccaccgggcctggccacattttcttsagaataaattctccaaagtgaaatttctggatcaatttgcatttgtgttagtccatttgtactgctataacaaaataccttagattaggtaatttataaa

SEQ ID NO: 546790 - DNA, 201 bp, Homo sapiens
catgatggctcatgcctgtaatcccagctctttgggaggttgaggcaggaggattgcttgaggccaggagttcgagactagcctgggcaacatagcaagamcccatctctataaaaaataaataactaatttttaaaaaaactatagtcatcatgtgttacaatagatgtcttgtacttattcctcctgtctcactgaaat

SEQ ID NO: 546791 - DNA, 201 bp, Homo sapiens
agcagtagcatgctggaaccagcttgtcagagttatttccaaattttagaaagtttgacagctaaatatagccattctttcttactttttatttttatttwaaaaaaaaatttaatggaggcaggtcttgttatggttcccaggctggtcttgaatgcctggcctcaagcaaatctcccacctcagcctcccagtgctggg

SEQ ID NO: 546792 - DNA, 201 bp, Homo sapiens
tttccaaattttagaaagtttgacagctaaatatagccattctttcttactttttatttttatttaaaaaaaaaatttaatggaggcaggtcttgttatgkttcccaggctggtcttgaatgcctggcctcaagcaaatctcccacctcagcctcccagtgctgggattacaggcacgagccactgagcctagcctttttt

SEQ ID NO: 546793 - DNA, 201 bp, Homo sapiens
atataaacttataatttaacaaattatattaaaaagataacacgaaagtctcactttctacttattttaatacatttcactcttacctgtctcttaagatrattcatgtccattatatctacatgggggaaatagttgataatggtacgctactgtgtatctcttccaaactctgtccagtgatgttacattggtagcttg

SEQ ID NO: 546794 - DNA, 201 bp, Homo sapiens
agtatagtagcttctgcttttggggagccttcaggaagcttccaatcatggcagaaggaaaaggcatctcacttggcagaagcaagagcaagagagcaagsggggaggtgctagaaaccagatctaatgagagctcactatcatgaggacagtaccaaggggaatggtgctaaaccattcatgagaaattcgcccccacga

SEQ ID NO: 546795 - DNA, 201 bp, Homo sapiens
ctcgggtctggaatttaaagaactaaatttcgatgggtgaagacagtgggaaagggcggtggcatgatcctcgttttacagactaggaagtcgagcctcasgggagtgacggggcttctccgcaggctccgcgaagaaagcaaggctgggaggacccagacgaacggccacaacagcctcagcggccacgacagcctcagc

SEQ ID NO: 546796 - DNA, 201 bp, Homo sapiens
tctgttactgactcagtgaacctggctgagcccatggaacagaatcctcctcagcaacaaagactagcactccacaatcccctgccaaaagccaagcctgrcacacatcttcctcagggaccatcttcaaggacgcacccagaacctctagctggccgacacttcaatctggcccctctaggccgacgaagagttcagtcc

SEQ ID NO: 546797 - DNA, 201 bp, Homo sapiens
caccgtcacggttccctctgtggccgcccattggctccctcttaccgcccttttccggggcaagggaagctagtagcggagccggaagtgaggcaccctckggctcgagacagcggcgacgtttaaagctgagcgacccagtgccactggagacggtcagcttctccactcaggctcctccagcccgagccagaagacccc

SEQ ID NO: 546798 - DNA, 201 bp, Homo sapiens
aagccctgaatcaccactttccagaatctggacctatagtgcgggatcccaaggctgtgagtaatccccggaacaagccctgaccccagttacacttggtrcagcaaagttgctcctcctgtctactggatgttggtgctaacttctctgtcttctgtatcctcaacagacaaagcaggatctgaggaagattttggaggc

SEQ ID NO: 546799 - DNA, 201 bp, Homo sapiens
ctaccggcaccacgaacgcctttgtatgggcctaaaggccaaggtattggagcaagtaggacctggaaggggaaagaaagaaaggggcgggatgcgagcayctgacaagggcccacagcttggggatgagactagttggaaaaggtcagcttgccccgaagtggggattctgaattcagtaccgtacaggtggtggtggag

SEQ ID NO: 546800 - DNA, 201 bp, Homo sapiens
ctcagtgaacctggctgagcccatggaacagaatcctcctcagcaacaaagactagcactccacaatcccctgccaaaagccaagcctggcacacatcttyctcagggaccatcttcaaggacgcacccagaacctctagctggccgacacttcaatctggcccctctaggccgacgaagagttcagtcccaatgggcctc

SEQ ID NO: 546801 - DNA, 201 bp, Homo sapiens
ccagcaggtgaagcagctgtcagaggctcctgtggatttggcctcgaagctgcaggtgagactggtttgaaggctattatgtggctattttctctaacccwtttttttttttttttgaggaatcttgctctgtcgcccaggctggagtgcagtggcacaatctcggctcactgcaacctctgcctcccgggttcaagcgat

SEQ ID NO: 546802 - DNA, 201 bp, Homo sapiens
ggattggatcaacagcctcctctcttggggactctcaagagcctgtgttcatctagaagtagtagtttgattctggtttccctcctacagtgtgtcctccrtctctgtgcagctccgtcattaccataggggacttggttttagactctgatgaggaagaaaatggccagggggaaggaaaggtgagtgggaaggagcaga

SEQ ID NO: 546803 - DNA, 201 bp, Homo sapiens
cagcaggtgaagcagctgtcagaggctcctgtggatttggcctcgaagctgcaggtgagactggtttgaaggctattatgtggctattttctctaacccatttttttttttttttgaggaatcttgctctgtcgcccaggctggagtgcagtggcacaatctcggctcactgcaacctctgcctcccgggttcaagcgatt

SEQ ID NO: 546804 - DNA, 201 bp, Homo sapiens
ttctgcgatctctgcgcgctgttgcccctggcttggttcgctaccggcaccacgaacgcctttgtatgggcctaaaggccaaggtattggagcaagtaggmcctggaaggggaaagaaagaaaggggcgggatgcgagcacctgacaagggcccacagcttggggatgagactagttggaaaaggtcagcttgccccgaag

SEQ ID NO: 546805 - DNA, 201 bp, Homo sapiens
ctaggaatttggaggtgtagtgtttagcctgagaccttttgaggcagtccactggaatagttccatgggctccgggcataagaaaccagttattctgttaytatctgttctctttataaggggcctcattttctttttcagagtgctctgttactgactcagtgaacctggctgagcccatggaacagaatcctcctcagc

SEQ ID NO: 546806 - DNA, 201 bp, Homo sapiens; identical to SEQ ID NO: 125095

SEQ ID NO: 546807 - DNA, 201 bp, Homo sapiens
cagcccttgctttactcaactttgtgtgaggtattaactaagtttccctccctcccgtccccaggcggacacaaacccctggaccttgcaggtcctggagsaggtaaaaaggaataatggagtcccggaagcctcgaagtgtgtgtgaagtgccaaatgcctggggggtaggcggatggcagaaaaaaattgcccttaatg

SEQ ID NO: 546808 - DNA, 201 bp, Homo sapiens
catggcacagaaaccagaagggtcagaaacccctaggcctgttcacagacaccacctgcagagggaaaacactgctgcgggagacctttccggagacctcytggatcacacgccccctgcgcaggacttgttcctgtccattttgctctgagccctgtcctgctggaagcctgcttggagacagcccttgctttactcaac

SEQ ID NO: 546809 - DNA, 201 bp, Homo sapiens; identical to SEQ ID NO: 125097

SEQ ID NO: 546810 - DNA, 201 bp, Homo sapiens; identical to SEQ ID NO: 125098

SEQ ID NO: 546811 - DNA, 201 bp, Homo sapiens
agggtgttcaagaaccctctccctgctggctacatacagtggggcagagaacagccggcctgagatcctctgcatttattccattcatttctctcctccckccttccattgcccacccaaccctgccctcctcctgcagtcctccaaggctaggccagctccagctggcagcttttgagtggactcagggtgctatttgtg

SEQ ID NO: 546812 - DNA, 201 bp, Homo sapiens
acagtatcaatcctctccaccagtcgagtcctgttgtcatgttcatcccaaatggtctgagagagacagagccagatagagagggtgtcaaggggttgggsgctatccctttgcccacccagctgagttcccatccccaacctggttgttggtctcgttgcggagcacccgggcctcctggcggatctgatgggaagcatc

SEQ ID NO: 546813 - DNA, 201 bp, Homo sapiens; identical to SEQ ID NO: 125099

SEQ ID NO: 546814 - DNA, 201 bp, Homo sapiens
ctgcagccgggccaggtgcttgcacagggcgtccagtgcgtccctagggaaggacattgacaaccccccagcccccatgaggctgggaggcctgggctgcktgcatagccttcagtcaggaagacagccccagggagccagcagccagcaagaggccccatttgtgggcagcgtctcactgctccttccgcccactcccga

SEQ ID NO: 546815 - DNA, 201 bp, Homo sapiens
tccccactttagcagggggccagtgactcggatggacatgccactcatgaccccccatcaagggcttctcaacctagctgtggggaaggaggggaggtttyggcagcagcccccgggcacccagtcctggatccctgcctgtgtcagggcatcgatctcggcatctaaatctgtcagacacttgtccagcatctccttcca

SEQ ID NO: 546816 - DNA, 201 bp, Homo sapiens
ccccatgagccctatacacctgcggggcacacggatgtagctgcgctcacaaaggctcatacacacacactcacaggagctactcaggggtggtggcaaaygggtgtcacctctcatgcttccaatcagtggataccggctgcccagggcagggtcgtgagaagtattctgagcccatgtccaggcagtgggaagagtgct

SEQ ID NO: 546817 - DNA, 201 bp, Homo sapiens; identical to SEQ ID NO: 125102

SEQ ID NO: 546818 - DNA, 201 bp, Homo sapiens
atttccctctttgctcattcatccaaaaccattctgaggcacccctgcccacccacaggtgctctcaaggcacagctccctctgttccctctgtcaccatrgtagagaacataggtggctcccgaagcacagaaagcagacagcaactgcaccaagatgtaaatggggagcttgacccaggggaggcgtccaacgatgcac

SEQ ID NO: 546819 - DNA, 201 bp, Homo sapiens
tggggcactgttcaaggggataatgtccacgagtcacagaaggatttgcgtttccaccatcaccagacagacaaactggcatgcacatcccacgtgctctratgaccagaccccaccctcctcacctgagacgttaccacccacgtagatggctatcgtaacggccagagagccagccagaaacatggtgaagaagttgcc

SEQ ID NO: 546820 - DNA, 201 bp, Homo sapiens
acagcctgggccacagctccttgggtgaggagctgctgagaagaggagagatgaggaacagggagcccaggagaccaacagggagaaaggttgggaaggcyaggggagcagccaaggagatgaatgagcacagaagacaagcaagggaaggagaaaagcagaaggagggaagggaaaagaaatggggaaagtggaggaaga

SEQ ID NO: 546821 - DNA, 201 bp, Homo sapiens
ctccctgtccaggatccttcttagtttaggaggaagggatgccaaacagataaacagagaagcctcccaggttctggcacattaacaaagaggaagaatgwctgttgttcccaggcggggtcagtggctggctccagggtccatgagtgaagtgagggttgtcctaatcatagcttacactccagcatctgagctgaggca

SEQ ID NO: 546822 - DNA, 201 bp, Homo sapiens
acatggtgaaaccccgtttccactaaaaacacaaatattagccaggcgtggtagcaggtgcctgtaaaatcagctattcgggatgctgaggcaggagaatygcgtgaacccaggggcagaggttgcagtgaacagacatcacaccactgctctccagcctgggcaacagagtgaaactccatctcaaaaaaaaagaaaaaa

SEQ ID NO: 546823 - DNA, 201 bp, Homo sapiens
gggccaggatcagcatccccaccaccacaggctccagacccgcagggactcccttgttccgtctgtccaggatggccaagagccccacaatcagcatcccrgtgcccagaaccttggagtcaacagaggcagagggttccctgtcagctgccaggtgctccatctgccctctctcatccaaatattccatgtcatctggct

SEQ ID NO: 546824 - DNA, 201 bp, Homo sapiens
acactatgtctcaaggctccacccaagcacaccgatgcagtgtgtatctggggtacaaacaggagaggtcctgagtggagatgagcccccagaggacttcrggtgggggatacaagaggatagcagctgcccttcgtgccctgccattgatttctgtctaggtgagccaagcattagtgtgaggaagcaggatggagagat

SEQ ID NO: 546825 - DNA, 201 bp, Homo sapiens
gggagaaaggttgggaaggccaggggagcagccaaggagatgaatgagcacagaagacaagcaagggaaggagaaaagcagaaggagggaagggaaaagaratggggaaagtggaggaagaagaaagggaaagaatgtgggaaaaaagaaaagaatttacccaactcataggcatttgagggtacaaacccatggcagggc

SEQ ID NO: 546826 - DNA, 201 bp, Homo sapiens
atttctgtctaggtgagccaagcattagtgtgaggaagcaggatggagagatacagaaagaggaggggctggtggggccaaaggcttatttcagtctgggrcactgttcaaggggataatgtccacgagtcacagaaggatttgcgtttccaccatcaccagacagacaaactggcatgcacatcccacgtgctctgatga

SEQ ID NO: 546827 - DNA, 201 bp, Homo sapiens
ccaacccccttctttccttcccgcagtgatcctacctaccatgagtacaaacacacccagaaactctgccaggcactgccgggccaggaggctgcgtatcyggaggtggcccatgatttcagccggggcctgagtgaagaccatggtggaaacaccctattgctattcactgctccctctgtctgcataggcacactgtca

SEQ ID NO: 546828 - DNA, 201 bp, Homo sapiens
ggatttccctctttgctcattcatccaaaaccattctgaggcacccctgcccacccacaggtgctctcaaggcacagctccctctgttccctctgtcaccrtggtagagaacataggtggctcccgaagcacagaaagcagacagcaactgcaccaagatgtaaatggggagcttgacccaggggaggcgtccaacgatgc

SEQ ID NO: 546829 - DNA, 201 bp, Homo sapiens
cctgcctcagcctcccaaagtgctgggattacaggtgtgagccaccacgcccagcccctgtctatctatattctcttatatctcactgagtttccttaagygtactattttgaattctttttctggtatttcatatagttccttatgattggaatcttactggagaattactgtgttcttctgaaggtgtcctgtttgcct

SEQ ID NO: 546830 - DNA, 201 bp, Homo sapiens
ccttgcacttttatgttatggagatggtttctttccttaaacctcatgaaccaacctctgctagcttcaaacttttcttctgctgcttctttacctctctyggccttcatagaatttataagaattagggccttgctctggattaggctttggcttacagcaagcttgtccaaccctggcgcgtgggccgcatgcagccca

SEQ ID NO: 546831 - DNA, 201 bp, Homo sapiens
actgatacatctttcttgacctcaccatgcttagaacgaaactttaaaagagtataaattttatttaaccctcacattttgccagatcactgttcttacartaagcacacatggcaggatatggtgatgaaactatgggaacgtacctgctctcttaggtctacttctctttacctgagtttgtcttactgatttgtgtca

SEQ ID NO: 546832 - DNA, 201 bp, Homo sapiens
acagtgaaacacttctacaatggaaaggcccattaacatattatttataatatttaaacataattgtatatttattgaaattgttacttaaaggaaaaatkgacacatagcaatttctatgtatagatactttgtatatacaagtctatatgtatcataaaataataaactaagaaaaacatatatgtactttttgtttgt

SEQ ID NO: 546833 - DNA, 201 bp, Homo sapiens
gtctggcattcctcatccagcaagagactgtcctcttttttttaaaaggatggcaggccacttagtacacgtttattgatacgtggatggaaaaatagttyttaaagatcaaggctttcatttagagcaggggtccccacacccgggccacagaccagtaccagactgtggcctattaggaaccaggccacacagcaggtg

SEQ ID NO: 546834 - DNA, 201 bp, Homo sapiens
ttcccctgctatcttattgagttatgttactatttgtaggagttttttattttattcctttgggttttcaagatgtataatcatatcatctataaatagcwatagttttacttatctccttctaatggctgtgccttttatttctgtatcttgtctaattgtggttaggaccttcagtacaatattaaataataggggtag

SEQ ID NO: 546835 - DNA, 201 bp, Homo sapiens
ctcatttccttcagacttcatcccatgtatcttttccctttgtagtttttgctttgtatctttttgctgtaataaatcattactgtgggtaaaactatgtrttgagtccattgagtcttcctgggagttataatggaacttacccttatttttttcccttttgtttaattaaagacttttttggcctggtgcagtggctca

SEQ ID NO: 546836 - DNA, 201 bp, Homo sapiens
agccctgtggcagaggctgttagtgtccaataactatgtggtcctctgtgtttgagcctcacatacagttagactgggtctatgtgactgggttctggacrgtagagtatgggcaaaagggatgcaagccagtcacaagtctggccctgaaaaaccaactcctgaaaaactccagctctcatttttcctgccttagtgacc

SEQ ID NO: 546837 - DNA, 201 bp, Homo sapiens
caggttgagtatcctttatcctaaatgcttgagatcagaagtagttcagattttagacttttggattagggatattcaacttgtatgaactaacatcagtaaaaaaaaaaaaaaaaatccccaaagaaaaaaatgtattcattttgaatttacccagtatttttaaacccaccaacattatttctgctttcactaatctct

SEQ ID NO: 546838 - DNA, 201 bp, Homo sapiens
gctttgagacaggggtcttgctatgttgcccaggctggtctcaaactcctggcctcaagccatctacccacctcaacctcccaagtaactgagattacgcrctcagctgcatgccactgcacccagcactagactttttttttttttttttttttagatggagtttcgctctatcgccaaggctggagtgcagtggcacag

SEQ ID NO: 546839 - DNA, 201 bp, Homo sapiens
aaaattctgctccatttgcaactctgaacacgtaaattgaaggggtggctcccgtggccagtgcctgacctctgtgcacaccttggtctggcgtgacctcrcccacactgcacactgcagccatataaatcagatttttgacatgttataaaatgcaagtcacagctgctgttgtctgcggtattcaaaaacttttgaaac

SEQ ID NO: 546840 - DNA, 201 bp, Homo sapiens
aaagtgctgagattacaggtgtgagtcattgcacctggcccttttttttttttttttttaagagacggagtcttgctgtgttgcccaggctgaagtgcagkggcttgatcatagttcactgcaacctcaaactcctgggctcaagtgatcctcctgcctcagcctcccaagaagctgggactacaggcacacaacactgca

SEQ ID NO: 546841 - DNA, 201 bp, Homo sapiens
tttttagtagagacaagatttctccattttggtcaggctggtctcgaactcctgacctcaggtgatgtgcctgcctcagctccccaaagtgctgggattasaggtgtgagtcactgcacccggcctgtagtaaaatgtttaaattcctttctcatttccttttgtgtatattctataactattttctttgtgtttaccatg

SEQ ID NO: 546842 - DNA, 201 bp, Homo sapiens
aaagaaagcagtaagcccttatctaaacttccagtacttctttttgcaaattcaaggaaatacaaatgcgtattttaacctcccattcttagtagaatagytcttaatatataatagtcattcaataagtatttgtcaaatgaagcaaagaacaaacattgtatacttgtgtggtcccatatggtagccaggagccatgtg

SEQ ID NO: 546843 - DNA, 201 bp, Homo sapiens
ttcatgagggtgaagaaagccccaactccttatgccagcacaatggagattatgtttcatcatgaatttttagaggggatacatagcacctacccagtctkcccaacattatcagtttatagatcataattcccattataatgtcagccctgtgagggcagaaatttttatctatatgtttactgctagaacagtacctga

SEQ ID NO: 546844 - DNA, 201 bp, Homo sapiens
gcaagtcacagctgctgttgtctgcggtattcaaaaacttttgaaacactgcatgtccaacaaaatttattttttgtgtgaatgtaagtttttattgaggrtaagtcctgtttgtttggaaaaaagaaacagtatgagtcagtgctttttaaaaatcaaatagatttaatgttctccttcctgcctgttctcgctcgtgtg

SEQ ID NO: 546845 - DNA, 201 bp, Homo sapiens
gagggaaaaactatgaacccagaactttgtatcttgcaaaaatatccttcaaggatgaagacaataataaaagcattacccataatagctaaaaagtggtaaaaaaaaaaagtgtccatcaactcatgaatgtataaataaaatgtagtatatatacacaatggaatatttgtcaataaagtactgttatatattactaca

SEQ ID NO: 546846 - DNA, 201 bp, Homo sapiens
cagtgctttttaaaaatcaaatagatttaatgttctccttcctgcctgttctcgctcgtgtgtgtttctctcgattgcttgctcgctttctctgcctctcygcttgtctaagaaagagctgttggctttgagagaagaccttggtattacaactgtgttagtagattgagatttctgttagagtctttctgtttaggtcag

SEQ ID NO: 546847 - DNA, 201 bp, Homo sapiens
ccctgtggtcccagtcacaagtcgttttgcctgaatggggggctttgttatgtgatacctactattcccagcccattttgtaggtgagtgaaatggactarggggagatgttaactttattttttattgtctactaacttctttgagaagtgataaaaagtaaacaaaaagtgtaagatgaaaagatgtgaggcatattca

SEQ ID NO: 546848 - DNA, 201 bp, Homo sapiens
acaaaagggcgactgagaaaaaaggataaaaaaaatagtgactgcaggttcagtaacattgaatggcagatatatttaaaatcatattttataaaaataaytgttttccaattatcttaggagcacacctctaatgtagccctgtaggctgtaatagcaatagctaagagtgataagctcattttccatcccacttcatac

SEQ ID NO: 546849 - DNA, 201 bp, Homo sapiens
tcttttaagttcccactttattttcttcattatctcttgttatacctttctatattactctttgagtaattatcctagatattacagtatatattcttaayttattacagtctaccctcaattagtacgtttactcttcctgaacaatgcaagtatcttctaacagtttaaatccttagtcacttttttcccttggtacta

SEQ ID NO: 546850 - DNA, 201 bp, Homo sapiens
agttcctctatgtcttgtgactaaataccccaccccctgccctttttaaaaaaaaaaaaaaaagctaggccatatgttttttttttttttttttttttggkggtttaaaaatttactgtggcaaaatgtacgtaagatttaaattttaaccattttgaagttacagtttaaaggcattaaatacattcgttgtatgtacca

SEQ ID NO: 546851 - DNA, 201 bp, Homo sapiens
tcaaatggggagaagatcatgaaaaaaagccttaaaaatactattaaaataatttttctctcattgacacctacctcatcctttttacaaagtttctcaascaatatgtgttagaagagaattccaaatatagagctaattctggccatcaagtagtgatgtgtaatatggatatttatagatctttatgatataattcct

SEQ ID NO: 546852 - DNA, 201 bp, Homo sapiens
caaatggggagaagatcatgaaaaaaagccttaaaaatactattaaaataatttttctctcattgacacctacctcatcctttttacaaagtttctcaacsaatatgtgttagaagagaattccaaatatagagctaattctggccatcaagtagtgatgtgtaatatggatatttatagatctttatgatataattccta

SEQ ID NO: 546853 - DNA, 201 bp, Homo sapiens
ctggtctcaaactcctggcctcaagccatctacccacctcaacctcccaagtaactgagattacgcactcagctgcatgccactgcacccagcactagactttttttttttttttttttttagatggagtttcgctctatcgccaaggctggagtgcagtggcacagtcttggctcactgcaacctctgcctcctgggttc

SEQ ID NO: 546854 - DNA, 201 bp, Homo sapiens
gatcatagctcactgcaacctcaaagtcctaggcttaagcgatcttcccacctcagcctccagagtagctgggactacgggtacaaccatgcttggctaattttttttttttttttttttgagatggagtcttgctctgttgccaggctggatgtgcagtggcacgatctcagctcactgcaacctccgcctcccaggttc

SEQ ID NO: 546855 - DNA, 201 bp, Homo sapiens
cttattttaaaaccctagatgagactgttgttgttagatgtagggatttgtatttagatctatccagaaaaaaaaggttgagcctaaacttttctatgggttttttttttttttttggccaggtaccctttttcacataaaaatgaatttattatcagtatgacacaaatcacattttttcccaaagaaaacaatgttatc

SEQ ID NO: 546856 - DNA, 201 bp, Homo sapiens
atagattcaaaagtcaagtagaaacatggaagatatatttttaaaggacccaaaccaaacttccagagatgaaaactagtgtctgagatcaaaaaaaaaamaacaaaaaaacaaaaactggatggtattaacagcagattacacaccatagaaaatattggtgaacttgaagatatagcagtagaactaagaaaaaaagaa

SEQ ID NO: 546857 - DNA, 201 bp, Homo sapiens
agagtttgagaccagcctgggaaacatagtgagacctcatctctacaaaaaagaacaaaattagctgggcatgatggtgcatatctgtagtcccagctacytgggaggtgggagaattgcttgagcccaggaggtcaaggctgcggtgagccaagattgtgcccctgcactccagcctgagtaacagagtagtaatacacc

SEQ ID NO: 546858 - DNA, 201 bp, Homo sapiens
ttccatggcattcctgtttacaattaagcatttcttaagttgagaagccgtgtttgatactgaactcttggaaatcaaaaagaaccaaatcaaagaataarcaggaaaaaataagtgggaagcagctacttgaaacagatccaaatcttgacacatctgatatccagttcttggaggatgctggaaacaacggaggtaatt

SEQ ID NO: 546859 - DNA, 201 bp, Homo sapiens
atggatgacctggagctgggggatgaggaggatgatccagactccaatcctgctgacccagagagtgactccactgaccagagggactgtccccatctgtagagaggctcgactgccacagcatcctggctatgctcagagggttttgattttcctttccttttctccaagaagaaattattttcaggagaatattcttct

SEQ ID NO: 546860 - DNA, 201 bp, Homo sapiens
tggatgacctggagctgggggatgaggaggatgatccagactccaatcctgctgacccagagagtgactccactgaccagagggactgtccccatctgtagagaggctcgactgccacagcatcctggctatgctcagagggttttgattttcctttccttttctccaagaagaaattattttcaggagaatattcttctg

SEQ ID NO: 546861 - DNA, 201 bp, Homo sapiens
caggaggatcccccaaggccaggagtttgagatgcagtgagctgtgattatgccactgcactccaacctggaaagagaacaagacctctgtttcctatttwatatgaatagattaaatagataatatttatttatatatttatttacatatatttacaataagagacatataatatatccagctgtcaggaaatgcaattc

SEQ ID NO: 546862 - DNA, 201 bp, Homo sapiens
aatccactaattggagattttaacatccctctctcagtagttcatagaccaattagaccaaaaaaaaaaaaaattcactaaggacacagtgaatgaagaaycactgtcaaccacctcaacctaattgataatgatagaaaaacctatcctccaaaactgtatacattccattaaatgtacacgttatgttcaccaggacag

SEQ ID NO: 546863 - DNA, 201 bp, Homo sapiens
acgggaggggagctatagttttctgacagtcagtgacagcattttaactaggtacactttctttagaaaaagctttggcatagcttgcccagattgttatscactccattttccaccttagtagaactctacttaagatttgattgaaactattgagaagcatccagttataacgctaattaactctcagagtacgacaag

SEQ ID NO: 546864 - DNA, 201 bp, Homo sapiens
aagaacttctgggaagctcgaaggtgaacaaccccagagctcaggcagggctgcgatgtgtttacattctgactagctagagtgaagtgtccttggtgaasacctagggtattcgcttgagatccaaagagtcactcttgaggattagagcgaaagtcggcctaaatgctactccatttgtaccctgtcaaagcttaaaac

SEQ ID NO: 546865 - DNA, 201 bp, Homo sapiens
gctttggcgcagcgctttgcagtttccagagctctttcccagttgctccgtttcatccgcgcggggcgcccggtgagggagcggatggcacgcagtgcccsctgcgcttggaggccaccgaggggaaaacacctctttctgtgtggccggagtcatagcacggtcagagtgccttgactctcagttggctgcctgggagaa

SEQ ID NO: 546866 - DNA, 201 bp, Homo sapiens
ctactttgatatccaggataatgtctaggtaaatgtcaagtgtctgaaacttcttggtagtggagacactttgagaacattagaacacctgtctgtattgycatggctcttcaaacacgcttcctagatggcatctacagtgtatatcgaaaattcatgtgtaccttcctgcttttgattattgaagcatctagatagtgt

SEQ ID NO: 546867 - DNA, 201 bp, Homo sapiens
atatgtatgtcatattttagggtgtaagtgaatcccaagaatttggctgggtcaaagggtatatgcatattaattttggtagacattgccaaattgtcctkggtaggaatgtgaattcttaccagctgtatatgagagtatgtcatttcctagcagagtatgttgcctaactttgggtttttaccaatcagatagatgaaa

SEQ ID NO: 546868 - DNA, 201 bp, Homo sapiens
ttcttcctatagatattgggataacatttatattcataaattaatttagaatttatatgtttataaagttgaatctatttagcctagaatatgttttagawtttccctcatataggttttacatatttcttaaatttattcttagttatttcatcattttgtttgtattgtgactggggcttttcctgcctatcttctaat

SEQ ID NO: 546869 - DNA, 201 bp, Homo sapiens
tattttattcatgtgaaaggtctcctatgttgtaacaacttccttgaatgccacagaatcgaatgaatgtatttcatgtcaatgtactaaacgtagcttctgtgtttgggagcagataattggtggtattcagccagaaaaccaatttgtataacttagattctgaatttcagaatttctcacctagtggagtatttgtac

SEQ ID NO: 546870 - DNA, 201 bp, Homo sapiens
tgctgattcttattgtattttattgaggatttttgtgttgacattcgtgagaatgacctacggttttcttattggtacaatctttgttaggttttgggatygacaatatccttatttcattgaaggagtttgaatatttttctccttttctaagttttagaatagtttagcattagaattatctaatgtttaaagtctgga

SEQ ID NO: 546871 - DNA, 201 bp, Homo sapiens
tgtaaccttttcaataaaatgtaaacttttataacagattttaattttagctattttgaccttgacaaataataattaaagggggcaccaagataaaattwtcttgtttgtgtgtttctcttcaaaacccatgtgttcaaataaatgtttattaaaacagcccaactacagaaaaagagaggtcaaaatccacccaatgga

SEQ ID NO: 546872 - DNA, 201 bp, Homo sapiens
tgtggggaaaatgaagagaggttagtgaatgggtacaaaaatactgctagatttattgtatatttcaaaatagctagaagaggctgggcacggtagctcaygcctgtaatcccagcactttgggaggctgacgtgggcagatcacttgaggtcaggagttggagaccagcctggccaacatggtgaaatcccatctctact

SEQ ID NO: 546873 - DNA, 201 bp, Homo sapiens
atctagaactagaaatgccatttgacccagcaatcccattactgggtatatagccaaaggattataaatcattctactataaaggcacgtgcacacgtatrtttattgtggcactgttcacaattttactcttattatgaacttagattttttttaaatgtttcttagttttggtgagaagaatttgagtttagcaccttt

SEQ ID NO: 546874 - DNA, 201 bp, Homo sapiens
gggaggctgaggcaggcggatcacgaggtcaggagatcgagaccatcctggctaacatgatgaaaccccgtctctactaaaaatacaaaaaaaattagccrggcgtggtggcgggcacctgtagtcccagctacttgggaggctgaggcaggaaaatggcgtgaacccgggaggcggagcttgcagtgagctgagatcgtg

SEQ ID NO: 546875 - DNA, 201 bp, Homo sapiens
actttgggtaagaggcagtgagcaaagacagtgaggggcggggggtgtgggcaggcatgcagggaactttatatgtgagacttgaatggggaatctgacakaactcagtgttctgaggagtcttgtcaggctgctggaaatttttgatattctaggttagtttacctcaacacatcctatcacaaacagaaggggttggct

SEQ ID NO: 546876 - DNA, 201 bp, Homo sapiens
tactaaaaatacaaaaaaaattagccaggcgtggtggcgggcacctgtagtcccagctacttgggaggctgaggcaggaaaatggcgtgaacccgggaggyggagcttgcagtgagctgagatcgtgccactgcactccagcctgggcgacagagcgagacctcgtctcaaaaaaacaaaatcaaacaaaacaaacaaaaa

SEQ ID NO: 546877 - DNA, 201 bp, Homo sapiens
gctacttagtagccatctcattatcagagctcctgttgcagtatcacagtgcttgtgttcaaataacccttattttacttaataatggccccaaagtgcargagtagtgatgctgtcatattgttataattgttctactttattattagttattgctaatcttactgtgtccaatttataaactttatcataggtacagga

SEQ ID NO: 546878 - DNA, 201 bp, Homo sapiens
ttttttcttttccccagaatgttcagtgacatggtaaggacttattttttagaatccacacacatataaaacagcttgactttataaagacatacttgttaaaaaaaaaagtattaaaaaaagtattaaattactgttgtttttttgtaagaaaaagacatcataacaaaggttaaaaacaggggtaaggtattaggctca

SEQ ID NO: 546879 - DNA, 201 bp, Homo sapiens
tcctttttatggctgaataatattccattgtatggatataacacattttgtctatccattcatctgttgggtatttgggttgtttctaccttttgactackgtgaataatgctgcagtgaacactggtatacaaatataccctcaagcctccgctttcaattattttgtgtatatacccagaaatgcaattgctgaatcaa

SEQ ID NO: 546880 - DNA, 201 bp, Homo sapiens
gactggaatacaaattcgtatttttaatatatgccactttgatataattaaggtaacctgagctattgccttgatcttagtgccatataaagtaaaagctytttgggaaaattaactttctaagtggaagatagatcatatactactttttttcctcttctttcccacaaagactaccaccttattaaaatgacaagacat

SEQ ID NO: 546881 - DNA, 201 bp, Homo sapiens
actatcctttgaatagccttggcacccttgtcaaaaatcatttacctacatatgagagggtttatttctaggttctccagtctatcccattggtctatccrtctgcctttatgccagaatcacattgttttgattactgtagcattatagtaagttttaaactctgcaggtttaagtcctccaatttgttcttctttctca

SEQ ID NO: 546882 - DNA, 201 bp, Homo sapiens
tctactagaagtgactgatttcaaggatctgtctctcaaaggaagaaacaaaaacccaaaattttgactgcaaaagattgactaattctaggtgcaaatamctggaaatttaggattgttattgtactacacaggtcacaaagttccaaacctatttcccttgtaatttttagtgcatgatttttcagaatgcagtttcta

SEQ ID NO: 546883 - DNA, 201 bp, Homo sapiens
tcttgtaatttccttctcaggttgttcattgttagtgtataggaatgcaactgacttttgtgggttgactttgtatcctgctaccttactgaattaacagttttttttttttttggtgtggaatctttcgggttgtctaaagatcatatcatttgtgaacatataggattttacttcttactttccaacttagatgtcttt

SEQ ID NO: 546884 - DNA, 201 bp, Homo sapiens
acttcttcctttccagtttggattctctttatttctttttcctgtctaattgctccagccaggacttccagtattatgtcgaataacagtagtgagagtgracatccttatcttgttccagtccttagaggaaaggcatttgatttttccccattcagtaggagttaggtggtcatacactatttaagtttcccaattaag

SEQ ID NO: 546885 - DNA, 201 bp, Homo sapiens
ggtgcccgccaccatgcccagctaatttttttgtactttcagtagagatggggtttcactgtgttagccaggatggtctcgatctcctgacctcgtgatcygcccatctcggcctcccaaagtgctggaattacaggcgtgagccaccacgcccggcctcttttttttttttaatgttttgataggcaaacaaaagcttgc

SEQ ID NO: 546886 - DNA, 201 bp, Homo sapiens
gagttcagggagggcttttgctttcctgataaagaggacagaggtggctggtactttactctttctcctctctttgtgccttaaatggaatcatgaagccrggagctatagcaggcatcttgtaaccatgagatgacaagcatgaggctaaaatattctcacaagctgtggaccttggagtagatggacagaaagagactg

SEQ ID NO: 546887 - DNA, 201 bp, Homo sapiens
gggcttttgctttcctgataaagaggacagaggtggctggtactttactctttctcctctctttgtgccttaaatggaatcatgaagccgggagctatagyaggcatcttgtaaccatgagatgacaagcatgaggctaaaatattctcacaagctgtggaccttggagtagatggacagaaagagactggggcattgttg

SEQ ID NO: 546888 - DNA, 201 bp, Homo sapiens
ttgagcccaggagtttgagaccagcctgggcaagatcacaagaccctgtctctacaaaatgaaaaataaaaaaaattagcagggcatggtggtacacatcwgtattcccaactactcgggaagcagaagcaggaggatcccccaaggccaggagtttgagatgcagtgagctgtgattatgccactgcactccaacctgga

SEQ ID NO: 546889 - DNA, 201 bp, Homo sapiens
ggtaactcacaagagagacaaaaaaaaaaactacttgcatgaagcaattatgcactgaagattactttcattcgttttgattttcaattgtttttgaaatkttgtaaaagtaaatatagaatttagtaagtccaggagttatttggcataactctcatcattaattaatatttatgaaactcacactgtattctatcatag

SEQ ID NO: 546890 - DNA, 201 bp, Homo sapiens
aagaaacaaattattttcatctaatcttttttctcctcagcttatttaactgacttaaactatggaaaaattggtaatttatatttaaaatttataaattktgtttcccaccatatatattttttatttacatatatatgtatatatattttttgagacagggtcttgctctgtcacctaggctggactgcagtggcatga

SEQ ID NO: 546891 - DNA, 201 bp, Homo sapiens
ttattttattcatgtgaaaggtctcctatgttgtaacaacttccttgaatgccacagaatcgaatgaatgtatttcatgtcaatgtactaaacgtagcttmtgtgtttgggagcagataattggtggtattcagccagaaaaccaatttgtataacttagattctgaatttcagaatttctcacctagtggagtatttgta

SEQ ID NO: 546892 - DNA, 201 bp, Homo sapiens
ttagattgttaatccattttgagttgctttttttataaggttagagggtgggggactagtttcatccttctgcatattgctatctagttttcccagcactrtttattggagagattgtcctttccccaatgagagtccttgatgcctttgtgaaaaatcaggtggctgtagaagcataggttctttaattctgggttctgt

SEQ ID NO: 546893 - DNA, 201 bp, Homo sapiens
tcataaaataataaactaagaaaaacatatatgtactttttgtttgtagttttactttttcttctgattttttaatagacttttatttacttatttttgtytgctttgagacaggggtcttgctatgttgcccaggctggtctcaaactcctggcctcaagccatctacccacctcaacctcccaagtaactgagattacg

SEQ ID NO: 546894 - DNA, 201 bp, Homo sapiens
aaagataagtaaggagtctaaggaatgtggtttggtttttacctttaaaacgtggacagtaatttggaagtgcagcttagttcaactccttttctaaataraattctgctccatttgcaactctgaacacgtaaattgaaggggtggctcccgtggccagtgcctgacctctgtgcacaccttggtctggcgtgacctcgc

SEQ ID NO: 546895 - DNA, 201 bp, Homo sapiens
attacagacatgagccaccatgcctggcctgcagctttgttctttttgctcaggattgctttatctgttttgagtcttttaggatttcttttgctatttaygtgaagaatgtaattggtattttgatagggattgcattgaatctgtaggtttccttgggtagtatgattattttaaacaatgttaaaccttctgatccat

SEQ ID NO: 546896 - DNA, 201 bp, Homo sapiens
ctctacatattattaagaatctaatagaggctttaatgaagttacatttatagcactagctaataaaagatgcaaaggtcacaagctagtcttctctcacygtttctcggcctataaaaatctagtaggggtttcataggattttggcaacatttgtttgttgttatatggctgtagactttttttttttttttttttttt

SEQ ID NO: 546897 - DNA, 201 bp, Homo sapiens
atactgcttttgctgtgtcccataggttttagtatgttgtgtttctatttacatttgtctcatgggactttctgatttccttattttcttttttaatccaytggtcgttcagcagggtggtgtttaatttccatgtatttgtatagttttgaatgtttctcttattgatttgaagttttatccattgtggtaaaataagtt

SEQ ID NO: 546898 - DNA, 201 bp, Homo sapiens
aaggaaggagaggtaccaagggagaaagggaaggcagagagagaaagatagataaaggaaaggtcataaagaaggaagatgaggctgaggaaagaggaaasagagaaaagaagtcagagagaagtagaggtttattttcttaatattctgaaagatttggctgtatatcaagctatgacttagctttttaatttttctttg

SEQ ID NO: 546899 - DNA, 201 bp, Homo sapiens
ttttcttattctgattagatgattctgggtcatttcctagacagaaacaattaggaactaacaatgtacaagtttaaagcaatgtaatttcccctttaagsctggaagataagatattcaccaattttctcttcataaattactagtataatgactcaatgaatccttctgttattctaattttttctatacaatggcttt

SEQ ID NO: 546900 - DNA, 201 bp, Homo sapiens
aaagttaattatctaaatcctttaccagctgcaatttcagatattaatgtatttgagacctaatagggaaaacaagaatttaaataaattcttgggacagrgaaatgctaggtaatactgccaaatctctgtagtaagtgagaaaggccctgtttgttctaagatgctgatcacctccttttaatctaactaatatagata

SEQ ID NO: 546901 - DNA, 201 bp, Homo sapiens
catgcttggctaattttttttttttttttttttgagatggagtcttgctctgttgccaggctggatgtgcagtggcacgatctcagctcactgcaacctcygcctcccaggttcaagcaattctcttgcctcagcctcctgagtagctgtgactacaggcgtgcaccaccacacccagataatttttgtatttttagtaga

SEQ ID NO: 546902 - DNA, 201 bp, Homo sapiens
ttttgaagttacagtttaaaggcattaaatacattcgttgtatgtaccagtcaccactatgcacctccggaactttttcatgatcccacactaatctctgkgccccttaaacaataaattcccattccctcctgccccctgtgacaaaacgtaatctttgttctactttgtctctatgaatctcactagtctaggtacctc

SEQ ID NO: 546903 - DNA, 201 bp, Homo sapiens
gcaaaagaagggttaagtttttctaatggtggtagcaaataaaaaagaagggtatcttagccactattgttttaaaataatataattcactgtgggagtayagatacagccagtgacccataaaaaacttcaaaatagtacttctgtagcctgattcctatgagtttggttgaataggatttaaatgtatataataaacgt

SEQ ID NO: 546904 - DNA, 201 bp, Homo sapiens
attgaaaatctacaagataaaaacactgaatactctataatttatctggagttcctaagcagttggaaaactggaaaaagaagatagtaaaaaattgtttyattataacaaatttgcatttgttttattgtaactgtagatctgtgagcattataggaaaacctgtctactccatgttcacaatctgaaaattagtctcct

SEQ ID NO: 546905 - DNA, 201 bp, Homo sapiens
tcatctctctagtcctttctgttcttactatcaatatactagctcagagtttcttaactccttgctttgtctatagaaatagtccctaaccaattttcccrgaggctaattctcatcatctgtccagctaaaacaaaaaaaaccttcagtgacagccctcacacctatccatctaccactcatgaaataataccttacttt

SEQ ID NO: 546906 - DNA, 201 bp, Homo sapiens
gccgtaggtcattatgttaagggaaataatctacgcatgagaagacaaatactgcatgctctcactaatatgtgaaagccaaaaaatattgatctcagggwggtagagagttgaatatggttaccagaggctgggaagggtactgggtggatgtggggaaaatgaagagaggttagtgaatgggtacaaaaatactgctag

SEQ ID NO: 546907 - DNA, 201 bp, Homo sapiens
ggcaccttggtcaaagaggagttggcaataaatgtgtggatttacatctggattctccattctgttccattggtctatgtgtctgtttttatgccagtacyatgctgttttggttaccatagctttgtagtaaattttgaagtcaggtagtgtggtgccttcagctttgttctttttgctcaggattgctttgtctattcc

SEQ ID NO: 546908 - DNA, 201 bp, Homo sapiens
ctgtaagataatagaacaacctagtgttgcttggtttactttgtatgcctttttctatttgcataaaccctgatctgattacaaacttgtatttacaccaktcccttgactccttccaactcaaagtatttattgtccagttaaaacatttatggtcatataagctggcttatctttttttctttgatttttttttgagtc

SEQ ID NO: 546909 - DNA, 201 bp, Homo sapiens
aatttatctggagttcctaagcagttggaaaactggaaaaagaagatagtaaaaaattgttttattataacaaatttgcatttgttttattgtaactgtakatctgtgagcattataggaaaacctgtctactccatgttcacaatctgaaaattagtctccttttttcttcacgtcatctggaaactgtttttcttccaa

SEQ ID NO: 546910 - DNA, 201 bp, Homo sapiens
ttttggaactctcacaataggtatgttggtccatttgatggtgtcccatgggacccttaggctctgttcactttctttaatcttttttctttctggtagaygactcaacagttgtcattatcttatgttcatctattttaacataacgttttaaaattataaatttccctctgagaattaatttaatagcagctcacgatt

SEQ ID NO: 546911 - DNA, 201 bp, Homo sapiens
tttaaatatactaacattttgtgtcttgatcttgatgatggctgcatgggtataaagactatcctttctccattgaattgcctttgcccctttgtcaaaartcaattgatcatttatgtgcaggtctatttctggactattcttttctgttgatctatgtttcctgtcttttcaccaataccagtcttgataaacgtagct

SEQ ID NO: 546912 - DNA, 201 bp, Homo sapiens
aaatgtattacatagattcaaaagtcaagtagaaacatggaagatatatttttaaaggacccaaaccaaacttccagagatgaaaactagtgtctgagatmaaaaaaaaaaaaacaaaaaaacaaaaactggatggtattaacagcagattacacaccatagaaaatattggtgaacttgaagatatagcagtagaactaa

SEQ ID NO: 546913 - DNA, 201 bp, Homo sapiens
tccattttgagttaatttttgcaaatgagtgaggttgcaactttgttagccatgtggttatccagctttcccatcattatttgttgaaaaaactatccttkgaatagccttggcacccttgtcaaaaatcatttacctacatatgagagggtttatttctaggttctccagtctatcccattggtctatccatctgccttt

SEQ ID NO: 546914 - DNA, 201 bp, Homo sapiens
ctttcacttagcaatatacacttaaagttcctctatgtcttgtgactaaataccccaccccctgccctttttaaaaaaaaaaaaaaaagctaggccatatkttttttttttttttttttttttggtggtttaaaaatttactgtggcaaaatgtacgtaagatttaaattttaaccattttgaagttacagtttaaaggca

SEQ ID NO: 546915 - DNA, 201 bp, Homo sapiens
ttaacctatctgtatctttaaagtgtatgtttaataaacatatagacaggttttttaaaaattcaatccgatagtctcttttaattgtatgatttagtcartttagtccatctgcatttaatgaacttactgatatggctaggtttaagtctaccatcttgctgatattttctcattgtcccatttgctcgttgaccagca

SEQ ID NO: 546916 - DNA, 201 bp, Homo sapiens
cattatctcttgttatacctttctatattactctttgagtaattatcctagatattacagtatatattcttaatttattacagtctaccctcaattagtaygtttactcttcctgaacaatgcaagtatcttctaacagtttaaatccttagtcacttttttcccttggtactattgttgtgctgtcaaatatgtttagtg

SEQ ID NO: 546917 - DNA, 201 bp, Homo sapiens
ggaacagaagaaataagagtcaaaaatttttgcagatttaataaaagcaatcaattcacacatataaaaatttcaacaaaggcctggcactctggctcacrcctgtaatcccagcattctgggaggctgaggcaggaggatcacttgaaccgaagagtttgagaccagcctgggaaacatagtgagacctcatctctacaa

SEQ ID NO: 546918 - DNA, 201 bp, Homo sapiens
ctggctgggaggaggatacttgttatgtgtttgttgtaggctcctcctacaagtttaaaatagataatatgttcacatttttcaaagatcaaaaccaaaaratacgttgatgtatatttctctcatttctatgtctgttaacatttttcctccctgtgtactaaaagaaagcagtaagcccttatctaaacttccagtact

SEQ ID NO: 546919 - DNA, 201 bp, Homo sapiens
ttatctgggcatggtggcacgtgcctgtagtcccagctactcaggaggctgaggcaggagaattgcttgaagccggcaggcggaggatgaagtgagccgaratcacgagattccatctcaataaataaataaataaataaataaataaataaataaagtggatcaaagacctaaacgtaagagctaaaattactaagagaa

SEQ ID NO: 546920 - DNA, 201 bp, Homo sapiens
gtagaacaccagttctaaagagaacatcacaaaagcagaaaagaatggcagattatcgtcaaagatgcaacaattaaaccaacagctgacttctcagttgsaaagaagcaaaactagaagacagagcagtgatattttcaatatgctgagagaaaacagttaaccccaaatttctgtggcagtgaaaacatctctcaggaa

SEQ ID NO: 546921 - DNA, 201 bp, Homo sapiens
caaacacgaaaggtaagtattgtgtgattccacgtatacaaggcacctagaataggcaaattcactgagacagaaagtagaatggtggtcaccagggctgwcgggaggaatagggagttactgtttaatgggtagagtttcagtttacgatgatgaaaaagttctggagggccaggcgcggtggctcacgcctataatccc

SEQ ID NO: 546922 - DNA, 201 bp, Homo sapiens
ggagcaagtatgcttttagaaaatacacatcattttgcaatggtaaaagtgattttgaattcattttcattaatgtaagctaaaactgcatatagacataytgcaaaaaatgaaatcaactgtacattccaaaatctataacataaatcataacctatattaactgatcaaatgactgaaaaacctgatgtactgttacct

SEQ ID NO: 546923 - DNA, 201 bp, Homo sapiens
ataattgactaaaggcaccccatgtcacataagggtcccaactgataatgaaagctaacttctttaaaaagagcacaaaaattacattaagatacaacagstttgctgttgtcttaaaggaaaaagaccaggtggcatcatcagcatctggtccccacagatgatctatgtgtactaatggatttgttaaataatggggaa

SEQ ID NO: 546924 - DNA, 201 bp, Homo sapiens
gaccttccttcaccaaggatgtcctcctgccaccacaccatcaagccttacttcatcgataggtttattcatgtcgccttgtgtgcttctggaatgtaagsctccccgggcaatctttccaatgtattcctagcataaatccacagcctgaagtcttagcatgcatttatattgttgttagacaccatccctactgcaata

SEQ ID NO: 546925 - DNA, 201 bp, Homo sapiens
aaatatatggagcattaaaatttatgaagacaaaatatatgaagacattgctatcagtcatcaaaggaaccatgagccctgagagatggcaatagactagktaagccaatgattgccttagattactgcctggagagaatttccaggcttttgtgcaaggtgggggaccccaggctgagtttggctgactccgagttgaga

SEQ ID NO: 546926 - DNA, 201 bp, Homo sapiens
aatgtcatgtatccactattatagtattgtatacagtagtttcaccaccctaaaaatctctactccatgtatttacccctccctctctcccactgaacctytggcaaccagtctttactaactttgctttctccagaatgtcatatatttgaaatcatgtagtatgtagcctttcagactaacttctttcacttagcaata

SEQ ID NO: 546927 - DNA, 201 bp, Homo sapiens
caataaaatgtaaacttttataacagattttaattttagctattttgaccttgacaaataataattaaagggggcaccaagataaaattttcttgtttgtrtgtttctcttcaaaacccatgtgttcaaataaatgtttattaaaacagcccaactacagaaaaagagaggtcaaaatccacccaatggattggagataag

SEQ ID NO: 546928 - DNA, 201 bp, Homo sapiens
taccagtcaccactatgcacctccggaactttttcatgatcccacactaatctctgtgccccttaaacaataaattcccattccctcctgccccctgtgayaaaacgtaatctttgttctactttgtctctatgaatctcactagtctaggtacctcacatcagtggattcatatagtattgtccttttgtgatttactta

SEQ ID NO: 546929 - DNA, 201 bp, Homo sapiens
aaagctagtgatttctttatgttaatttcccctgctatcttattgagttatgttactatttgtaggagttttttattttattcctttgggttttcaagatrtataatcatatcatctataaatagcaatagttttacttatctccttctaatggctgtgccttttatttctgtatcttgtctaattgtggttaggaccttc

SEQ ID NO: 546930 - DNA, 201 bp, Homo sapiens
gatcaaaaccacaatgaaaccaagtgtggtggcatacttctgtagtcccagctattgggaggccgcagtggaggatcacttgagcccaggagtttgaggcyagcctgggtaacatagcaagaccccatctcttaaaaaaaaaaaaactttgaggagggcgaaaaaaaagaaaaaaaatgcacatgaatgttcgtagcacat

SEQ ID NO: 546931 - DNA, 201 bp, Homo sapiens
atgagatgtatttccgtttatttttatctttattgaagcaatgttttgtagttttcattgtacaagccatttaccaccttgggtaagctaatttctgtgcrttttattctttttgacgctatggtaaatgggactgttcttgtaatttccttctcaggttgttcattgttagtgtataggaatgcaactgacttttgtggg

SEQ ID NO: 546932 - DNA, 201 bp, Homo sapiens
ctctatgtcttgtgactaaataccccaccccctgccctttttaaaaaaaaaaaaaaaagctaggccatatgttttttttttttttttttttttggtggttwaaaaatttactgtggcaaaatgtacgtaagatttaaattttaaccattttgaagttacagtttaaaggcattaaatacattcgttgtatgtaccagtcac

SEQ ID NO: 546933 - DNA, 201 bp, Homo sapiens
taaagttcctctatgtcttgtgactaaataccccaccccctgccctttttaaaaaaaaaaaaaaaagctaggccatatgtttttttttttttttttttttkggtggtttaaaaatttactgtggcaaaatgtacgtaagatttaaattttaaccattttgaagttacagtttaaaggcattaaatacattcgttgtatgta

SEQ ID NO: 546934 - DNA, 201 bp, Homo sapiens
tctcccactgaacctctggcaaccagtctttactaactttgctttctccagaatgtcatatatttgaaatcatgtagtatgtagcctttcagactaacttytttcacttagcaatatacacttaaagttcctctatgtcttgtgactaaataccccaccccctgccctttttaaaaaaaaaaaaaaaagctaggccatatg

SEQ ID NO: 546935 - DNA, 201 bp, Homo sapiens
atacagtagtttcaccaccctaaaaatctctactccatgtatttacccctccctctctcccactgaacctctggcaaccagtctttactaactttgctttytccagaatgtcatatatttgaaatcatgtagtatgtagcctttcagactaacttctttcacttagcaatatacacttaaagttcctctatgtcttgtgac

SEQ ID NO: 546936 - DNA, 201 bp, Homo sapiens
tttgaccaatatataatgtcatgtatccactattatagtattgtatacagtagtttcaccaccctaaaaatctctactccatgtatttacccctccctctytcccactgaacctctggcaaccagtctttactaactttgctttctccagaatgtcatatatttgaaatcatgtagtatgtagcctttcagactaacttct

SEQ ID NO: 546937 - DNA, 201 bp, Homo sapiens
tctgtcatccaggctagctgaagcctgtaatttacatgaagggtcctctttttgttgtatgtctttatggattttgaccaatatataatgtcatgtatccmctattatagtattgtatacagtagtttcaccaccctaaaaatctctactccatgtatttacccctccctctctcccactgaacctctggcaaccagtctt

SEQ ID NO: 546938 - DNA, 201 bp, Homo sapiens
ctagacggaagaaatgtggactagaatagagaaagtggagatgggttaagaaaaattaatggaggatgcacgggaggggagctatagttttctgacagtcrgtgacagcattttaactaggtacactttctttagaaaaagctttggcatagcttgcccagattgttatccactccattttccaccttagtagaactctac

SEQ ID NO: 546939 - DNA, 201 bp, Homo sapiens
taccgccccgggaagctatcaccaatcacatcactgcctcacattgagtaggacttgaagttcatgaaacatctttaatatgctcatctaactcaaattgwtcctttgtgctatatcttgatgttcttttctcttatttgtttgtatactgctttattagactatcacattagttatcaaagctagtagttaattcacatg

SEQ ID NO: 546940 - DNA, 201 bp, Homo sapiens
ctattccctcctcctctctttttcagaatagtttgagtagtattggtattagttcttttttaaatgtttgataaaattcagcagtgaagtcagaggtctcyggctttcctttgttgggagacttcttaatatggcttctatcttattagttgttattagtctgtttaggttttggatttcttcatggttgaatcttggtag

SEQ ID NO: 546941 - DNA, 201 bp, Homo sapiens
taatagaatctaagccccttgggactgaataattctcttgtctttgaattttctacatctagtatatatcatagaatttaataaactactcaaaaatgttwctcgagtgaatttttgagaaaaaccaagatggaaaaggatttggaaatttcaatcactaaaaaataggggtatttaataccaagcaaagaagggtaagaa

SEQ ID NO: 546942 - DNA, 201 bp, Homo sapiens
attctatccctctaaacattctgtcagtctaatatgctaaggggaagaccaatacctacttccctcattaatcactcttgtgccagtttggagatatagtktccatctgttattgattggataatgaattgtgtttaattaatgaattatgtttaattcattatcattaataagtcaggatagtctaagtttggctgcagt

SEQ ID NO: 546943 - DNA, 201 bp, Homo sapiens
gaaaaagagggactcctccctaactcattttatgaggccagcatcatcctgataccaaagcctggcagagatacaacaagaaaacaaaacttcaggccaayatccctgatgaatatcgatgtgaaaatattcaataaaatattggcaaactgaatccaacagcatgtcaaaaagcttatccaccacgatcaagtcagcttc

SEQ ID NO: 546944 - DNA, 201 bp, Homo sapiens
attctgtgagtcataaattcagctgattagaaaaaaaaatcggattctggagcctcctttcaaacaccttgaaatctaatatcagggggttgacttgtgatttttttttttaactgccccaggtgattcttattgacaggagagggtgggggaatcctagagctataaatagtacaggtgctgcttcagtacactgcaggt

SEQ ID NO: 546945 - DNA, 201 bp, Homo sapiens
tattgaagcaatgttttgtagttttcattgtacaagccatttaccaccttgggtaagctaatttctgtgcattttattctttttgacgctatggtaaatgsgactgttcttgtaatttccttctcaggttgttcattgttagtgtataggaatgcaactgacttttgtgggttgactttgtatcctgctaccttactgaat

SEQ ID NO: 546946 - DNA, 201 bp, Homo sapiens
attcagctgattagaaaaaaaaatcggattctggagcctcctttcaaacaccttgaaatctaatatcagggggttgacttgtgatttttttttttaactgccccaggtgattcttattgacaggagagggtgggggaatcctagagctataaatagtacaggtgctgcttcagtacactgcaggtgactaatgagaggaat

SEQ ID NO: 546947 - DNA, 201 bp, Homo sapiens
tgcagtggctcacgcctgtaatcccagatcacttgaggtcaggagtttgagaccagcctggccaacatgatgaaaccctgtctctactaaaaatacaaaamttagctgggcgtcgtagtatacgctggtagtcccagctactcgggaggctgagacaggagaattgcttgaaccaggaggcggaggttgcagtgagccaag

SEQ ID NO: 546948 - DNA, 201 bp, Homo sapiens
tgcaactgacttttgtgggttgactttgtatcctgctaccttactgaattaacagttttttttttttttggtgtggaatctttcgggttgtctaaagatcrtatcatttgtgaacatataggattttacttcttactttccaacttagatgtcttttctttttctagctcaggctagaactcctagtactgtgttgaatag

SEQ ID NO: 546949 - DNA, 201 bp, Homo sapiens
ggacttaaaaagttgtgaaagggggaaaaattaaacatgtcaacaaagtgaaacttctgcttcttactaaaaagtcctttgaggtatcactaagtaaaagaaaaacattgatatgaaatttgcatatatattctactttccttctcttcgtgtattactaaaattgttatataaatattctgttcttgcttatttctttat

SEQ ID NO: 546950 - DNA, 201 bp, Homo sapiens
aaacattttttttggacacatggtctcactatgttgcccaggctggtcttgaactcctgggctcaggtgatcctcccacctcagcctcccaagtagctggsattgtagttgcaagccattgcgtctggctgcaactttaattcttgatgaattattaatttggggaatttgtgttatttcatatttagcatataaagtgaa

SEQ ID NO: 546951 - DNA, 201 bp, Homo sapiens
cactatgcccggctaattttttgtatttttagtagagacggggtttcaccgtgttagccaggatggtcttgatctcctgacctcatgatccacccacctcrgcctcccaaagtgctgggattacaggtgtgagccactgcacccggcctactcaagaaatctttgcccactccaatgtcctagagagtttccccaattttt

SEQ ID NO: 546952 - DNA, 201 bp, Homo sapiens
tatcattccattttttgtgtctttttcaatttcttgcattggtatagttttcattgtagagagctttcacttctttgattaagtgaattccttgatacttkatttgtagctattgtaaatgggattactttcttgatttcattttcagtttgttcacttttggcatatagaaatgctactaatgtttgtttgttgattttg

SEQ ID NO: 546953 - DNA, 201 bp, Homo sapiens
ttcatggttgaatcttggtaggttgtatatgtctaggaatttatccatttcttcttggcttttcaatttattggcatgtagttgctcacagtagcctctartgatcctttgaatttctgtagtattggttgtaatgtctcctttttcacctctgattttatttatttgtatctcctctccttttttcttagtctggctaaa

SEQ ID NO: 546954 - DNA, 201 bp, Homo sapiens
atactgattttgtttcatgaaaacattttgaaattcaaacaccatacactaaaatggtttagtgtgtgtgtatgtgtacaagcacacctctgagatattgyaggttttggtttcagactgctgcaataaagcaaatatcacaataaagtgagtcacacaaattttttggtttcccaatgcatataaaaggtatgtttatac

SEQ ID NO: 546955 - DNA, 201 bp, Homo sapiens
atgtctcctttttcacctctgattttatttatttgtatctcctctccttttttcttagtctggctaaagatttatcaattttgtttatcttttcaaaaaamcaactttttatttcattgatcttttgtattttattcatttcaattttatctctgctctttattcttctactgatttttgggtttggtttgcttttgcttt

SEQ ID NO: 546956 - DNA, 201 bp, Homo sapiens
cctctccttttttcttagtctggctaaagatttatcaattttgtttatcttttcaaaaaaccaactttttatttcattgatcttttgtattttattcattkcaattttatctctgctctttattcttctactgatttttgggtttggtttgcttttgcttttctatttcttttagatgcttcattaggttgtttatttgat

SEQ ID NO: 546957 - DNA, 201 bp, Homo sapiens
cagatgacctgaggtagaataatttcaacctgaaaccatccgccaccccagtccatggaaaaattgtcttccatgaaaccggtccctggtgccaaaaagaytggggaccactgacttagtgaaaagttagcttgaaaatctataggttttctactttggaatcacatggtcctaaaggttgcttatttgcatggtgcaaaa

SEQ ID NO: 546958 - DNA, 201 bp, Homo sapiens
tatggatttacataaagggaggaagagcaccagaaatgacaactatgtgggtaaatgtgtaagatctttctcgtattatttaaatctccttaagaaataaytgaccatttaatgaaatatcataacaacatagtatgggacttacaacatacataaaagcaaaatgtataataagaaaatacaaagattgggagggtagcg

SEQ ID NO: 546959 - DNA, 201 bp, Homo sapiens
tattgtgaactgcacatgtgagggatccagattgcgtgctctttatgggaatctaatgccagatgacctgaggtagaataatttcaacctgaaaccatccrccaccccagtccatggaaaaattgtcttccatgaaaccggtccctggtgccaaaaagactggggaccactgacttagtgaaaagttagcttgaaaatcta

SEQ ID NO: 546960 - DNA, 201 bp, Homo sapiens
gaaatgacaactatgtgggtaaatgtgtaagatctttctcgtattatttaaatctccttaagaaataactgaccatttaatgaaatatcataacaacatartatgggacttacaacatacataaaagcaaaatgtataataagaaaatacaaagattgggagggtagcgagggaaataccccactgtaaggttcttatgct

SEQ ID NO: 546961 - DNA, 201 bp, Homo sapiens
cgggcaaaggatttgaatagacatttctccaaagaagatacacagatggccaataagcacatgaaaaaagatactcaacatcacaaattattggggaaatrcagatcaaaaccacaatgaggtaccactttcaacctttaggatggtgactactattgatacaaacaaacaaaaaaccagaaaccatgtgttggtgagaac

SEQ ID NO: 546962 - DNA, 201 bp, Homo sapiens
ttcctgtatatcagtgacaattagatatggaaatttaaaaaaattattaatgatagaatctcaatgtattaagtacataagcatacatcagacaaaaataygaaaggcctatgtattgaaaactaaaaaaaaaattgctgagagaaatgaagacctaaataaatggagagttatattttgttcatagatttggaagattca

SEQ ID NO: 546963 - DNA, 201 bp, Homo sapiens
ctttctactagaagtgactgatttcaaggatctgtctctcaaaggaagaaacaaaaacccaaaattttgactgcaaaagattgactaattctaggtgcaartaactggaaatttaggattgttattgtactacacaggtcacaaagttccaaacctatttcccttgtaatttttagtgcatgatttttcagaatgcagttt

SEQ ID NO: 546964 - DNA, 201 bp, Homo sapiens
gaaggacttcaaaaccacctcttggaattgccccacggtcttggactaccttccctggattatacgggaatatctatacagggagtatctacttttggcamactgagaaaaaaatgtaaaatttcttcagatcctccttcgcctttcagcatttcctactcatctctaatctctaatggtggaatttcagaggaagaaaca

SEQ ID NO: 546965 - DNA, 201 bp, Homo sapiens
ccaagaagaaattattttcaggagaatattcttctgatagatttcatcattggacttaataaacttatcttaaaatttcaaaaaagtccattgtattcctrtatatcagtgacaattagatatggaaatttaaaaaaattattaatgatagaatctcaatgtattaagtacataagcatacatcagacaaaaatatgaaag

SEQ ID NO: 546966 - DNA, 201 bp, Homo sapiens
aacctaacagcctgtctctgaactatgtcctcgtcaaggctgggatgcacgctggcttctctacacagtctggcccagtgtaagtgctgtgaattcagtgkgtcactagtgtcaccaattcattcatcacccatcattcactcatttcacaaacacatgagggtaagacattgagacagagtacacaaaatgaaaagctct

SEQ ID NO: 546967 - DNA, 201 bp, Homo sapiens
tctaggacacggagtttcagaatggcttttggctctgcagataggtttgatttctgattcttgtacctcttctaaagtgtttttatttgattaggtccagytggcctcccaggaatgtcctttgtcttttcttcctgccgtagcttttttagtatggataaaatgaaaatggtagagttgaaggacttcaaaaccacctct

SEQ ID NO: 546968 - DNA, 201 bp, Homo sapiens
gactaaataccccaccccctgccctttttaaaaaaaaaaaaaaaagctaggccatatgttttttttttttttttttttttggtggtttaaaaatttactgkggcaaaatgtacgtaagatttaaattttaaccattttgaagttacagtttaaaggcattaaatacattcgttgtatgtaccagtcaccactatgcacctc

SEQ ID NO: 546969 - DNA, 201 bp, Homo sapiens
agaataggcaaattcactgagacagaaagtagaatggtggtcaccagggctgtcgggaggaatagggagttactgtttaatgggtagagtttcagtttacratgatgaaaaagttctggagggccaggcgcggtggctcacgcctataatcccagcactttgggaggctgaggcaggcggatcacgaggtcaggagatcga

SEQ ID NO: 546970 - DNA, 201 bp, Homo sapiens
cgttgtatgtaccagtcaccactatgcacctccggaactttttcatgatcccacactaatctctgtgccccttaaacaataaattcccattccctcctgcyccctgtgacaaaacgtaatctttgttctactttgtctctatgaatctcactagtctaggtacctcacatcagtggattcatatagtattgtccttttgtg

SEQ ID NO: 546971 - DNA, 201 bp, Homo sapiens
atctcactagtctaggtacctcacatcagtggattcatatagtattgtccttttgtgatttacttaatgtctgaaaggttcatccatgatgtagtatgtaraaggatttcctttttatggctgaataatattccattgtatggatataacacattttgtctatccattcatctgttgggtatttgggttgtttctaccttt

SEQ ID NO: 546972 - DNA, 201 bp, Homo sapiens
gctaaaattactaagagaagaaaacatagggggaatgcttcatgaaattggatttggcaatgattgctttatacaccaaaagcacaggcagccaaagaaawgttagacaaattggacatcaaaacttaaaattttggcacatcaaaagacactatcagcagagtgaaaaggcaatccatagaatgggagaaaaggttcaca

SEQ ID NO: 546973 - DNA, 201 bp, Homo sapiens
attcttctataacccttttcatttttctagaatctagagtgctgttcccattttcatttattttagcaattgagtcttcctttttttcttagtctatctasgcataggctttccaactttatggtcttttaaagaacttgtagtttcactgatttttctctagtgtttctaatctttattcaatttattatatctgttcta

SEQ ID NO: 546974 - DNA, 201 bp, Homo sapiens
tctatgtttggaaagctgaataatgatctattctatccctctaaacattctgtcagtctaatatgctaaggggaagaccaatacctacttccctcattaaycactcttgtgccagtttggagatatagtttccatctgttattgattggataatgaattgtgtttaattaatgaattatgtttaattcattatcattaata

SEQ ID NO: 546975 - DNA, 201 bp, Homo sapiens
atttttcttagttattttattccttgtaaacacacttgtatagtgtgtttcagtgttcaaagcactctagacattcttacttgattctgacaatagccctrtgtagttaaagcatgtgatgttattttgatttcacagtcttaagtgacttgcccaagatcacatagccaacaagcatggaaatagggtgaagaaaccagt

SEQ ID NO: 546976 - DNA, 201 bp, Homo sapiens
acttattaaagggatccaagcccatgttgttttcttgaacatttctaatagtttcatttttgatttgttttttccatttttcatgagttgcaaattgaacwttgattgacacagagtatcaggtggaagccagatttgacgtatgccagtattagactttctctttccaggatagaccagcccaagtgaagtggcactgac

SEQ ID NO: 546977 - DNA, 201 bp, Homo sapiens
gtcggtatccacagggcaatctgttttattatactggacaaaattcatttgcattagcataagttttctacaatttacagagttgtaaaatagctcgaagrcaatgaaaatcacaggtatttatagaatcagataacccagaaaggtgcatttgacaggacacctggtcatctttttctattgtctgcttcagtctttctc

SEQ ID NO: 546978 - DNA, 201 bp, Homo sapiens
tacaaatgtaatgacatgtatccaccattatactatcataccaggtattttcgctatcctaaaaatcctctgtgctctgcctgttcgtctctcccctgccrtgtattttttcaggaacttttatcatttttgtttttagatattggggtaacatttatattcataaattaacttaggatttagatgtttataagattgaat

SEQ ID NO: 546979 - DNA, 201 bp, Homo sapiens
agtccatagttcagggttcaccgatggtgttgtacattctatgggtctgtacaaatgtaatgacatgtatccaccattatactatcataccaggtattttygctatcctaaaaatcctctgtgctctgcctgttcgtctctcccctgccatgtattttttcaggaacttttatcatttttgtttttagatattggggtaac

SEQ ID NO: 546980 - DNA, 201 bp, Homo sapiens
tttgtgtatctgttgtatgttttttgatttgagattaccataaagcttgcaaatactatcttataacccattattttaagatgattacaacttaacactgmttgcatagacaaactaacaagcaaaaagaaaactaataaaaactttaacttcatcctcttgctttttaactttgtgtttctatttatatcttacagttct

SEQ ID NO: 546981 - DNA, 201 bp, Homo sapiens
caacacatcataatcaccaaagtccatagttcagggttcaccgatggtgttgtacattctatgggtctgtacaaatgtaatgacatgtatccaccattatrctatcataccaggtattttcgctatcctaaaaatcctctgtgctctgcctgttcgtctctcccctgccatgtattttttcaggaacttttatcatttttg

SEQ ID NO: 546982 - DNA, 201 bp, Homo sapiens
tattttccttctatacctaatttcatgagagtttttaattatgaagggatgttgaattttatcaaatgctcttttctgcacctgttgacatgatcgtatgktttttctccttcattctgttgattataatgtatcatattgattgatttgcatatgttgaaccatacttgcattcctgacataaatcccacttgatcaggt

SEQ ID NO: 546983 - DNA, 201 bp, Homo sapiens
attggaggatttatcctgtagtttctctttctgttgtgttcttgtctggttttgctatcacagttatgtgggatatcacagttatgatgtgctatcacagttttttttttttttttttttttttggaggaggagtctcactctgccacccaggctggagtgcagtggcacatctcagttcactgcaacctaccttcccctc

SEQ ID NO: 546984 - DNA, 201 bp, Homo sapiens
ttctctttctgttgtgttcttgtctggttttgctatcacagttatgtgggatatcacagttatgatgtgctatcacagttttttttttttttttttttttytggaggaggagtctcactctgccacccaggctggagtgcagtggcacatctcagttcactgcaacctaccttcccctcccgggttcaggcaattctcctg

SEQ ID NO: 546985 - DNA, 201 bp, Homo sapiens
tgggtgttgatgtccccaactattattgtattgaagtctgtctctcccttaaatctaataatatttgctttatatatctgggtgctctggtgcttggtgcatatatatatatatatatatttgactgttatattctcttgctgaatggatccattgaggattatatgtttcctttttctctttgtacagcttgctttatat

SEQ ID NO: 546986 - DNA, 201 bp, Homo sapiens
gggtgttgatgtccccaactattattgtattgaagtctgtctctcccttaaatctaataatatttgctttatatatctgggtgctctggtgcttggtgcatatatatatatatatatatttgactgttatattctcttgctgaatggatccattgaggattatatgtttcctttttctctttgtacagcttgctttatata

SEQ ID NO: 546987 - DNA, 201 bp, Homo sapiens
ccaccatgccccactatttttttgtgtttttagtagagatggggtttcaccatgttagccaggatggtctcaatctcctgacctcatgatccacccacctyggcctcacaaagtgctgggattacaggcgtgagccaccacacctggcctcttgtttttattttttatcctttcggccaatctatatcttttaaatggagt

SEQ ID NO: 546988 - DNA, 201 bp, Homo sapiens
ggactacaagcgcccgccaccacgcccagctaattttttgtatttttaatagagacggggtttcaccgtgttagccaggatggtctcgatctcctgacctygcgatccacctgcctcagcctcccaaagtgctgggattacaggtgtgagccaccacgcccagcccctgtctatctatattctcttatatctcactgagtt

SEQ ID NO: 546989 - DNA, 201 bp, Homo sapiens
atagtataatagccattgtagaaaatatttatatttataaatatttatattatgtatttataatataatagccattgtattgaaaattacatgctaataamgtttacgtgtgtcttaagtgttctgggttttgtccttttctgagtaatccgagttaatggaaattgtaggtgcaaccatttcatgttgtagtgtgaagtc

SEQ ID NO: 546990 - DNA, 201 bp, Homo sapiens
tccccactcccctactgcactccagcactctctgggcaacactccagtgaaatcttagctctttattcattgccttggtccttgcttgtgtgtgtgtgtgtgtgtgtgtgtgtgtgtgtgtgtgtgtgtgtgtgtgtggagtatgggtgccaggtgtctctagtgagctatcttgctgacatcacctcattgtggttttaa

SEQ ID NO: 546991 - DNA, 201 bp, Homo sapiens
aggtaagtcagattttcttttagttaaaaagactgccttttcaagagtaccaggatcacataaatggaaaatttgtacatgtatgtagctgcaagattatrggaggatagattagagatgatgttgatcctgtgaatgtctgaaaaagattggtagcagagttaaagcttttgttctcttgagatagttgcttgtgaaaat

SEQ ID NO: 546992 - DNA, 201 bp, Homo sapiens
gtacaggccgggtgcagtggctcacgcctgtaatcccagatcacttgaggtcaggagtttgagaccagcctggccaacatgatgaaaccctgtctctactraaaatacaaaacttagctgggcgtcgtagtatacgctggtagtcccagctactcgggaggctgagacaggagaattgcttgaaccaggaggcggaggttg

SEQ ID NO: 546993 - DNA, 201 bp, Homo sapiens
ttctattttatgtttacacccataacctcttgccccatgcacctgtggttctttgcagcttttgtaagcagtgcccaccctaccagttaggcaaaacaaasatgtgaccttgtgtcagtccttcaagtatccgcagacaggttagaaaaaaatgtacacagtaatttgcaaaaaaggtctagcatgttttctccagttcaa

SEQ ID NO: 546994 - DNA, 201 bp, Homo sapiens
ctggtatcacattctttatatcgtattcactttgttcatttaacaaggatattattactaatgcttattttattattttaggattttcattaagccaactyatacccagtttctacaaatgaaaaccaagtcaatcatctaaaatttcatgatttcttcccatcaagaggatctggagtcttctgttcccattaaaactga

SEQ ID NO: 546995 - DNA, 201 bp, Homo sapiens
cagagcagcaaagtttcagaaaggagaccttctaagctatagctgttctgcagacttgtgccagaacttagaaatatttctagtctgaagtaccctgtagyaggctaaacaataccttttgagtagaaagtataggtataatagaaggaaaagcgtatatatataagaacaagaagtggtgctgaatacaagagaaaagaa

SEQ ID NO: 546996 - DNA, 201 bp, Homo sapiens
gtttaagaccagcctggacaacatagcaagaccccgtctgtacaaaacaatttttttttttaattatccaggtgtggtaacacatgcatgtagtcctagcygcttgggaggctgagatgggaagatcgcttgagcccaggaatgagaggctgcagttaagccatgactgcactactgcactcctgcctgggtgagagagca

SEQ ID NO: 546997 - DNA, 201 bp, Homo sapiens
ccccactcccctactgcactccagcactctctgggcaacactccagtgaaatcttagctctttattcattgccttggtccttgcttgtgtgtgtgtgtgtgtgtgtgtgtgtgtgtgtgtgtgtgtgtgtgtgtgtggagtatgggtgccaggtgtctctagtgagctatcttgctgacatcacctcattgtggttttaat

SEQ ID NO: 546998 - DNA, 201 bp, Homo sapiens
ggttcaaataaaataataaaagatactgattttgtttcatgaaaacattttgaaattcaaacaccatacactaaaatggtttagtgtgtgtgtatgtgtasaagcacacctctgagatattgcaggttttggtttcagactgctgcaataaagcaaatatcacaataaagtgagtcacacaaattttttggtttcccaatg

SEQ ID NO: 546999 - DNA, 201 bp, Homo sapiens
cttttatttggaaatagtaacagtagtttttctgggacttaaaaagttgtgaaagggggaaaaattaaacatgtcaacaaagtgaaacttctgcttcttactaaaaagtcctttgaggtatcactaagtaaaagaaaaacattgatatgaaatttgcatatatattctactttccttctcttcgtgtattactaaaattgt

SEQ ID NO: 547000 - DNA, 201 bp, Homo sapiens
accgcagctcagcaaagccactgtagacagactgcctctctagatttcttctctctgggcaggggaatctctaaaaaaaaaaggcagcagccccagtcagrgggttatggataaaacccccatctccctggaacagaggacctgggggaaggggtggctgtgggcacagcttcggcacacttaaacatccctgcctgccag

SEQ ID NO: 547001 - DNA, 201 bp, Homo sapiens
gacatctgcagaactctccacccaaatcaacagaatatatattcttctcggcaccacattgcaattatcctaaaattgaccacataattggaagtaaaatrctcctcagcaaatgcaaaataatggaaatcataacagtctctccaaccacagtgcaatcaaattagaactcaggattaagaaactcactcaaaactgcac

SEQ ID NO: 547002 - DNA, 201 bp, Homo sapiens
catctgctgagaaaagcttatctaccacttatacacccatcattaggtcttctaaccttatgatgctatggtttactttgaaacgcagacagttatttatktctaaggctaacatgatatatttctaatgatagaataggtaaacttatagaactttaagactatggagaatgatagttattttaggagcacagaaatagt

SEQ ID NO: 547003 - DNA, 201 bp, Homo sapiens
acagaaatcaatacccgtaatccatcacataaacagaaccaatgacaaaaaccacgtgagtatctcaatagatgcagaaaaggcctttgataaaagtcaayacccctttatgctaaaaactaaaaacaataaactaggtatcgatggaatgcatgtcaaaaatcataagagctatttatgacaaacccacagccaatatca

SEQ ID NO: 547004 - DNA, 201 bp, Homo sapiens
ggtaaaaagggtttgtcctcaaagaaacagactttccagtagatattgttgatgaatagggaagaaggggaagaatgactgagatgttgaagaattgggtrtagagtgaatgtggttaggagggtttgagagtgaggatgggagggtcagaggtaaaaggaaaaagaggcttgtgcatatggggtgagcaaataaaatgga

SEQ ID NO: 547005 - DNA, 201 bp, Homo sapiens
ctcaatagatgcagaaaaggcctttgataaaagtcaatacccctttatgctaaaaactaaaaacaataaactaggtatcgatggaatgcatgtcaaaaatmataagagctatttatgacaaacccacagccaatatcatactgaatgggcaaaagctggaagcattccctttgaaaaccagcacaacacaaggatgccctc

SEQ ID NO: 547006 - DNA, 201 bp, Homo sapiens
cagatgacatgattgtatatttagaaaaccccatcatctcagccccaaaactccttaagctgatagcaacttcagcaaagtctcaggatacaaaatcagtrtgcaaaaatcacaagcattcctatacaccaataacagacaaagagagccaaatcatgagtgaactcccattcacaactgctactaagagaataaaatacc

SEQ ID NO: 547007 - DNA, 201 bp, Homo sapiens
tgacatccttttctttttcttttcttcatccttacttctgatagaagtactccctttagcatttcttgtaggacaggtctgatgttgatgaaatcccttarcttttgcttgtctgggagaatctttatttctccttcatgtttgaaggatatttttgctggatacattatactattctagggtaaactgtttttaaccttc

SEQ ID NO: 547008 - DNA, 201 bp, Homo sapiens
gagtctcactcggtcacccaggctggaatgcaatggcacgatcttggctcactgcaacctctgcctcctgggttcaagtgattcttctgcctcagcctccyaagtagctgggattacaggcatgtgccaccacatccagctaatctttggagagacggaatcttgctctgtcgcccaggctggagtgctggagtgcagtgg

SEQ ID NO: 547009 - DNA, 201 bp, Homo sapiens
ttttagccaggctggtcttgaactcctgacctcaggtgatccacccacctcggcttcccaaagtgctgagattacaggtgtgagtcattgcacctggcccttttttttttttttttttaagagacggagtcttgctgtgttgcccaggctgaagtgcagtggcttgatcatagttcactgcaacctcaaactcctgggctc

SEQ ID NO: 547010 - DNA, 201 bp, Homo sapiens
agtctcactcggtcacccaggctggaatgcaatggcacgatcttggctcactgcaacctctgcctcctgggttcaagtgattcttctgcctcagcctcccragtagctgggattacaggcatgtgccaccacatccagctaatctttggagagacggaatcttgctctgtcgcccaggctggagtgctggagtgcagtggt

SEQ ID NO: 547011 - DNA, 201 bp, Homo sapiens
tgggaggctgaggcaggagaatcacttgaacccaggaggcagaggttgcggtgagccaagatcacaccattgcattccagcctgggcaacaagagcgaaaytccatctcaaacaaaaagagagaatttagcagtttttagcctaattaattaattaatggccatttactaatgagcctataactcttattccaatgttgat

SEQ ID NO: 547012 - DNA, 201 bp, Homo sapiens
cccagcatgctgcctggtctgacacggccaacaacctgatgaactttgaggagatccaggggatgatgtaggaagatggtacaccactgccttttgccctygccactgaatgactggggccagctccctaatgaaggaactgaagtttgttttttattatcatcctttttaggctgggcgcagtggcttacgcctgtaatc

SEQ ID NO: 547013 - DNA, 201 bp, Homo sapiens
aattcaaagtagttacatttcacaaacatagcagccacatgtggctaatggctttgtattggatagtgcagatcgtgaatcctagtcaccaaagctaaatyagttccaagaccatcactctactaaaggaattattctgcttgctcagcactttctaaaactaaacaaccaaatggattcctgcttttccataagtttgaa

SEQ ID NO: 547014 - DNA, 201 bp, Homo sapiens
accaaggtagaagaatgaggaggaagaaagaatatcagatttctagctggtcctgaggaaacagcacctcgtagttgccaaacctcctggttattgaaacrtgtaatttctttctcttgattcagtagagcagagagcttaatcatttggctccattccaaagagtaggctaaggggataactgctcactaattatttata

SEQ ID NO: 547015 - DNA, 201 bp, Homo sapiens
aaatgacgtttggtgtagagcagcatccaatagaaacaatgtaagccaagagcataagtttttattttttattttatttttttttttgagacagagtctcrctctttcgcccaggctggagtgcagtggcgcgatctctgctcactgcaagctccgcctcccgggttcacgccattctcctgcctcagcctcccaagtagc

SEQ ID NO: 547016 - DNA, 201 bp, Homo sapiens
tactcactacatttattgctgccgtattaattatttaatgagtaacttcctgccagagacaaagaaatgataacaaatcagaaactgggcctatgtttctmctgctatatcttcagaacttggcacatgcctaaaacatatgagcaatcagtaaatctgcagagtgaaaaatatgtaacatatcctgggtgcttgctttgt

SEQ ID NO: 547017 - DNA, 201 bp, Homo sapiens
tttggtgtagagcagcatccaatagaaacaatgtaagccaagagcataagtttttattttttattttatttttttttttgagacagagtctcactctttcrcccaggctggagtgcagtggcgcgatctctgctcactgcaagctccgcctcccgggttcacgccattctcctgcctcagcctcccaagtagctgggatta

SEQ ID NO: 547018 - DNA, 201 bp, Homo sapiens
agagaaactgagactcaagtcacttgccccaggttacacagcaataagtggtagagctaagagttggatccctagttgtctgattccagaacctgtactcyttaagtgctacactttactgctctgcaggtcacatcttctcggggaccttctcactcattaatggggtaaatttcctttaagcacaagtttattctctaa

SEQ ID NO: 547019 - DNA, 201 bp, Homo sapiens
gatggtcttgatctcctgacctcgtgatccgcctgcctcggcctcccaaagtgctgggattacaggcgtgagccaccacgcccggcctagtttttattttmtagaaacatcattttaaaacgtaagaagaaagagatgaaatttatttatgtatttatttatttattttgagacggagtctcgctctgttgcccaggctgg

SEQ ID NO: 547020 - DNA, 201 bp, Homo sapiens
tcagagccttgtcacctctttggcccccagcggcatcagcacccactcagagcgcctctcagcgccccgtctccccctcagaccccagacctccatcgccyactcagcgccccgtcacccactcagcccctggcccatctcagcgccccgtcgccccttcggctcccctgtactctctttagtgtccccatcccctcagct

SEQ ID NO: 547021 - DNA, 201 bp, Homo sapiens
ctgcctcggcctcccaaagtgctgggattacaggcgtgagccaccacgcccggcctagtttttattttatagaaacatcattttaaaacgtaagaagaaasagatgaaatttatttatgtatttatttatttattttgagacggagtctcgctctgttgcccaggctggagtgcagtggtgcgatctcggttcactgcaac

SEQ ID NO: 547022 - DNA, 201 bp, Homo sapiens
caggctggagtgccatggcatgatcttggcttactgcagccccgacctcccgggctcaagcaatcatcccacctcagcctcccaagtagctgggaccacargcgtgcaccatcacgtgtggctcatttttgtatttttagtagagacagggtttctccatgttgcccaggctggtctgaaactcctgagctcaagcgatct

SEQ ID NO: 547023 - DNA, 201 bp, Homo sapiens
ctcgggagccgaggcaggagaatcacttgaacctaggaggcagaggttgcagtgagctgagatcgcaccactgcactccagcctgggagacagagcaagaytccgtctcaaaaaaaaaaaaaaagcagaaactgagacttagagaaattatacaacttggccaaggttatatagtaaggcagtggccaggccaatgtttga

SEQ ID NO: 547024 - DNA, 201 bp, Homo sapiens
gctaaattactctccgaaaggaagtaccaaaagaaaacaaaaccccaaacaggaagaagtctttaaaaaacaccaatgaagtaatggcaactcatgatttaaaaaaaaaaaaaaaaaaactttatgtaacaaagctggacgtcttgacgagtacctgtagtaccaagtacttgggaggctgagatgggaggatcccttgaa

SEQ ID NO: 547025 - DNA, 201 bp, Homo sapiens
tgggtgacagagtgagactgtctcaaagaaaaaaaaaaaagaaaaaagaaattcactcactttctcctgctgggtttgaaactccaacagtgaccaacacrgttttaatgttctggagaccacccagaacactataaggaccagctgtcgctgatgcaggttcagggaagatacagaagtggattcccagaggcccagtgg

SEQ ID NO: 547026 - DNA, 201 bp, Homo sapiens
taaggatccacttttagggctcacccacatttgtttctagatttacccctgcgctagagtaagcactttatctccagaactgagagcaaagttaacaaatstcaccccttctctcctgcaaattagtggacagactccctggaacatgtttggggcttccacctagggccacctagtggtatctctgggtctttacttggt

SEQ ID NO: 547027 - DNA, 201 bp, Homo sapiens
ttgaggaggaagaggtggtgaggccccagcggcggaagaaggaagagagtggagcagaccaggagttggctaaaatgcttctggccatgaggctagaccaytgtggcactgggacagcagctggacaggagcaagccacaggagagtggcaggtaaactcacttccttgggttgaaacaggcctgagagtgttctgaccgc

SEQ ID NO: 547028 - DNA, 201 bp, Homo sapiens
caagatgtagaatggtaaaaatagtctgttactattcatattttaaggagaaaaggggaagtctagaaaaagaatacacatttgtattgtttgtatatgcrtggatatactgtctctgtaaagttacaaaagaaactggtaacattggttgcttccacccagagaactgggtgacagagtgcaagagggacttttcacaat

SEQ ID NO: 547029 - DNA, 201 bp, Homo sapiens
ttccgtgcctgagtcagatttctgctgccaggagccttgctccaagtctctgagatgtgggcacagatgcagccacccatgtggtgaggactgtgtgcagytgtgttcagaaatggtcaccataaaactcaagtgtgggcacagtcaaccggtaaaatgtggtcatgtggaaggcctcctgtatggtggtctgctagtcaa

SEQ ID NO: 547030 - DNA, 201 bp, Homo sapiens
gagagttcgctgatagagatcgcagaggaagctgacctgattcaagcagaccgggtgattgaggaggaagaggtggtgaggccccagcggcggaagaaggragagagtggagcagaccaggagttggctaaaatgcttctggccatgaggctagaccattgtggcactgggacagcagctggacaggagcaagccacagga

SEQ ID NO: 547031 - DNA, 201 bp, Homo sapiens
aataatggctcctgccatatcccattactgtatggaaggaggtaatgtatataaagcagtcagcacagtggagtgctcagtaagttagctgctctgtcatyatcatcatcctcctcacagcactgcttgttctttcagctataatggttggattgtggatggctgttttattttctattttttttgagatggagtctcact

SEQ ID NO: 547032 - DNA, 201 bp, Homo sapiens
aggggggggtgggggggatgggattctcctatgtattgatagagaatgaccttcaagatacattaagtgaaaaaaaatcaagatgtagaatggtaaaaatwgtctgttactattcatattttaaggagaaaaggggaagtctagaaaaagaatacacatttgtattgtttgtatatgcatggatatactgtctctgtaaag

SEQ ID NO: 547033 - DNA, 201 bp, Homo sapiens
ccagcttttttaaatattaacatcaaacaagtatcttgaaaactgaaagagacataatcttttattttcataacttgctgtggccccaaaatgaagcacayaatgactaactaaagaactaaagatagtgatgttgagtggacaaaaagctttccaaggtctctctctggagcagagtaagtggccagtgcatgtcaagag

SEQ ID NO: 547034 - DNA, 201 bp, Homo sapiens
aaccatgcattggtgagtgcccaccctgccagcggacctgtcagaaccgctgtgtccacagccagtgcaagaagaaatgtggggagctgtgtagtccctgygtggaaccctgtgtctggcgctgccagcactaccagtgcaccaaactctgctctgagccctgcaaccgacccccatgctatgtgccttgtactaagctgc

SEQ ID NO: 547035 - DNA, 201 bp, Homo sapiens
ggagccgaggcaggagaatcacttgaacctaggaggcagaggttgcagtgagctgagatcgcaccactgcactccagcctgggagacagagcaagactccrtctcaaaaaaaaaaaaaaagcagaaactgagacttagagaaattatacaacttggccaaggttatatagtaaggcagtggccaggccaatgtttgaacca

SEQ ID NO: 547036 - DNA, 201 bp, Homo sapiens
ttacatgtgtaaattgcatgttgcagaggtttggtgtacagattattttgtcatccaggtaatgagcatagtacctgataggtagttttttgttgtcgtcrttgtttttggagacagagtcttactctgtcacccaggctggagtgcagtggcacgattccggctcactgcgacctctgcctcctgggttcaagcaattct

SEQ ID NO: 547037 - DNA, 201 bp, Homo sapiens
ttcccttctttgtgtccatgtgtattcaatgtttagctcccacttatgagtgagaacatgtggtatttaattttctgttcctgcattaatttgctttggakaatggcctccaactccatccactttgctgcaaaggacatgattttcttctttttcatagctgcatagtattccgtggtgtatatatgccacattttcttt

SEQ ID NO: 547038 - DNA, 201 bp, Homo sapiens
atcccagcactttgggaggctgaggcgggtggatcacaaggtcaggagatcaagaccatcctggctaacacgacgaaaccctgtctctactaaaaaatatwaaaaaattagccgggcatggtggcaggcgcctgtagtcccagctactcgggaggctgaggcaggagaatggcgtgaacccaggaggcggagcttgcagtg

SEQ ID NO: 547039 - DNA, 201 bp, Homo sapiens
ccccatctatactaaaaatacaaaaattagctgggcatggtggcatgcgcctgtggtcccagctacttgggaggctgaggcaggagaatcacttgaacccrggaggcagaggttgcggtgagccaagatcacaccattgcattccagcctgggcaacaagagcgaaactccatctcaaacaaaaagagagaatttagcagt

SEQ ID NO: 547040 - DNA, 201 bp, Homo sapiens
ttatattacatatttacattgtatgccctccattgtatatgtatttggtataagtaaaacctttatttatttattgtgtatttattttatttatttatttatttttttttttttttgagactgagtctcacagtctcactctgtccaccaggctgcagtgcaatggtgtgatctcggctcactgcaacctctgcctcctag

SEQ ID NO: 547041 - DNA, 201 bp, Homo sapiens
agcttcccaagtagctgggattacaggcacactcaccacacccagcttattttgtatttttagtaaagatggggtttccccatgttggccaggctggtctygagctcctgacctcaggtgatctgcccaccttggcctcccagagtgctgggattacaggcatgagccaccacgcccagccttatttatttatttttgaga

SEQ ID NO: 547042 - DNA, 201 bp, Homo sapiens
cattggtctctgtggggagccatgccccaagaaatgccggatctgccacatggatgaggtcacccaaatattctttggctttgaggatgagcctgatgccygctttgtgcagctggaagactgcagccacatctttgaggtgcaagccctagaccgctacatgaatgaacagaaggatgatgaagtcgccatcagattgaa

SEQ ID NO: 547043 - DNA, 201 bp, Homo sapiens
tcaccacacccagcttattttgtatttttagtaaagatggggtttccccatgttggccaggctggtctcgagctcctgacctcaggtgatctgcccacctyggcctcccagagtgctgggattacaggcatgagccaccacgcccagccttatttatttatttttgagatggagtctcactctgttgcccaggctggagtg

SEQ ID NO: 547044 - DNA, 201 bp, Homo sapiens
cttgaacccaggaggcagaggttgcaatgagccaagatcgcaccaccgcactccaccctgggcaaaagagcgagattccatatcaaaaaaaaaaaaaaaaagagttttcatctctctcctgcctgtttctctctcttagcccaggcagaaggggatgaggaggaagaaggggaggaggagagttcgctgatagagatcgca

SEQ ID NO: 547045 - DNA, 201 bp, Homo sapiens
acgcaacaagagtgaactctgtctcaaaaaaaaaaaattgtcagctgaggccaagagttcaaaaccaggctggggcacatagcaagactgtctcttttttwaaaataaataaataaattctgagtatcaggttcttctggacaataagaataatggctcctgccatatcccattactgtatggaaggaggtaatgtatata

SEQ ID NO: 547046 - DNA, 201 bp, Homo sapiens
agggaatgtactgcatcggaaacatgcagatgctggccaaggtgcccctgtggagcaagatcattcatacacttcgagagaacaatcaaataggccccatrctccggctctgctgccagaaccaccctgaaacccacaccttagtatccaaagcttctgacttccaaaaagtacccgaaggaggctgcagcctgccctgcg

SEQ ID NO: 547047 - DNA, 201 bp, Homo sapiens
gcaaccagaaaaagaaaatgaaaaaaagagtgaaggatgagcttcgcaaactgaacaccatgactgcagccgaggccaacgagatcgaggatgtttggcasctggacctcagttctcgctggcagctttataggtactgtgttccacatccagccaacccatgtagggagttcctcttctgttcctagaacattctccacc

SEQ ID NO: 547048 - DNA, 201 bp, Homo sapiens
tgctagtgtctactcagatgtcactgttcagaggcctagctagaaaaaacccaccatggggcactctgtcatatcacctttagttctactaatccttaacycttgtcattattaatccttaaactgtgagtatgtagaatagtgcctggcacatagtcaacacttgaaaaacatttgatggttggttggatggatggaagt

SEQ ID NO: 547049 - DNA, 201 bp, Homo sapiens
aagtaaacattccctttgtccgtctgaattaccaggtgagaagctgggcctctgttgttaccaaatgcccaggagaaagctcctgggaagctgccagttgycagcaaaagaggtctcatataaataaaaataatttaatactgaaatgactctgtcaaccttacattttctgttttaaaacaccacaagatcaccgtgttg

SEQ ID NO: 547050 - DNA, 201 bp, Homo sapiens
aggctcactttgtggtagagctgtgcaagtacttcctgtgccaggaatacctgccttcccagatcaccatcctcactacctataccgggcagctcttctgyctgcgcaaactgatgcctgccaagacatttgctggcgtcagggtccatgttgtggacaaataccaaggggaagagaatgacatcatcctcctctcgctag

SEQ ID NO: 547051 - DNA, 201 bp, Homo sapiens
tgcatgaagccatgccagaaggtcatctgtcaggaagggcaccggtgtccccttgtttgcttccaggagtgtcagccttgtcaggtgaaggtgcccaaaaycattcctcggtgcggccatgaacaaatggtcccttgttccgtgcctgagtcagatttctgctgccaggagccttgctccaagtctctgagatgtgggcac

SEQ ID NO: 547052 - DNA, 201 bp, Homo sapiens
tttctcaaagtctgcctgcctgcttatgtggtagggatgatcactgaacccatccctgacatccgaaaccagtatccagagcacataagcaacatcatctmcctcctccaggaccttgtaagtgtcttccctgccagctctgtgcaggaaacttccatgctggtttccctcctgccaacctctcttaatgctctgagagcc

SEQ ID NO: 547053 - DNA, 201 bp, Homo sapiens
tggtggtgggtgcatgtaatcccagctactcaggaggctgaggccggagaatcacttgaacccaggaggcagaggttgcaatgagccaagatcgcaccacygcactccaccctgggcaaaagagcgagattccatatcaaaaaaaaaaaaaaaaagagttttcatctctctcctgcctgtttctctctcttagcccaggca

SEQ ID NO: 547054 - DNA, 201 bp, Homo sapiens
tccaggaggtccaggaggaagatgttcccttccagaggaatatcgtggagtgtaactctcatgtgaaggagccaaggtacttgctaatggggggcagataygactttacccccttaatagagaatccttcagccactggggaatttctaagaaatgtcgagggtttgagacatcccagaattaatgtcttagatcctggcc

SEQ ID NO: 547055 - DNA, 201 bp, Homo sapiens
agctcttctgcctgcgcaaactgatgcctgccaagacatttgctggcgtcagggtccatgttgtggacaaataccaaggggaagagaatgacatcatcctyctctcgctagtgcggagcaaccaagaaggcaaggtgggttttctgcagatatccaaccgcatctgtgtggccttgtcccgagccaagaagggaatgtact

SEQ ID NO: 547056 - DNA, 201 bp, Homo sapiens
tttgtcactatgctccaaggttcacttcatacactgggcacactgaagggcgttcttccaccttctcaaagagcatgtggctttctttccttggttcttcscattctccaggctctggctacagttgtaccaggctgacacccgccggaagatcctcagctatgaacgccagtaccgcacatcagcagaaagaatggccga

SEQ ID NO: 547057 - DNA, 201 bp, Homo sapiens
ctctgttgttaccaaatgcccaggagaaagctcctgggaagctgccagttgccagcaaaagaggtctcatataaataaaaataatttaatactgaaatgamtctgtcaaccttacattttctgttttaaaacaccacaagatcaccgtgttgagtttttgttggacaaaggagctgtttatgttatgctttctccttattt

SEQ ID NO: 547058 - DNA, 201 bp, Homo sapiens
cctgattcaagcagaccgggtgattgaggaggaagaggtggtgaggccccagcggcggaagaaggaagagagtggagcagaccaggagttggctaaaatgsttctggccatgaggctagaccattgtggcactgggacagcagctggacaggagcaagccacaggagagtggcaggtaaactcacttccttgggttgaaac

SEQ ID NO: 547059 - DNA, 201 bp, Homo sapiens
ctgaacaccatgactgcagccgaggccaacgagatcgaggatgtttggcacctggacctcagttctcgctggcagctttataggtactgtgttccacatcyagccaacccatgtagggagttcctcttctgttcctagaacattctccacctccaagaccttcaacgatgttaactaattattgattgagcaccaccactg

SEQ ID NO: 547060 - DNA, 201 bp, Homo sapiens
ccggaagatcctcagctatgaacgccagtaccgcacatcagcagaaagaatggccgagctgagactccaggaagacctgcacattcttaaagatgcccagrttgtaggaatgacaaccacaggtaagaaactgtggagaaatttgcctgttgcatctaagttcacttctggtgccagattatctaaggacaggtaaagagg

SEQ ID NO: 547061 - DNA, 201 bp, Homo sapiens
gcaggcactgtgccaagtcctgtgtgaagcaccagttgctaggcactggttgtacagcattcaacaagaaagtaccacccccatgactttcatggcatgcrttttaggaacaagaaacaggctatggtcaaagatgtttaatgataactagtgctagtactagtataaatgctttccacgtatttactcctgacaagccaa

SEQ ID NO: 547062 - DNA, 201 bp, Homo sapiens
gacaggcggatcacaaggtcaggagattgagaccatcctggctaacacagtgaaaccccgtctctactaaaaacacaaaaaattagctgggcgtggtggcyggtgcctataatcccagctactcgggaggctgaggcaggagaatcgcttgaacccggaggtggaggttgtagtgagccaagatcacgccattgcactcca

SEQ ID NO: 547063 - DNA, 201 bp, Homo sapiens
cctataatcccagctactcgggaggctgaggcaggagaatcgcttgaacccggaggtggaggttgtagtgagccaagatcacgccattgcactccagcctrggtgacagagcaagactccgtcttttaaaaaaaaaaaaaaaaaaagtagtagaaagccgttggaaagttttacagcgattagtgacatcatcagttttac

SEQ ID NO: 547064 - DNA, 201 bp, Homo sapiens
gtggctcacgcctataatcccaacactttgggaggccaaggcaggtggatcacctgaggtcataagtttgcaatcagcctggccaacatggtgaaatctcrtctctactaaaaatacaaaaattagctgggtgtagtggtgggtgcctgtaatcctggctactcgggaggctggggcacaagaatcacttgaacctgggag

SEQ ID NO: 547065 - DNA, 201 bp, Homo sapiens
tcacacctgcaatcccagcactttgggaggccaaggtgggcagatcacctgaggtcaggagttcgagaccagcctggccaacatggtgaaagcctgtctcwactaaaaatgcaaaaattagccgggcatggtggtgggcacctgtaatcccagctactcaggaggctgaggcaggagaattgcttgaacctgggaggcggt

SEQ ID NO: 547066 - DNA, 201 bp, Homo sapiens
attaggttgctgatttacaggattacaaaccaaaagcttacagaggtcattcaggtcttacaaataagtgaagcaatctagatttgaaatattaagaagcrgagaggactgtggcaaactagaacagatgtggtagcaacccagctccagccatttgttgccattcagtaataaacagtcattgctgccatagctcctgat

SEQ ID NO: 547067 - DNA, 201 bp, Homo sapiens
tgcttgaacctgggaggcggtggttgcagtgagccgagatcatgccactgtactccagcctggcaatagagctagattctgtctcagaaaaaaaaaaaagraaagaaaaatagaggccaggtgtggtggctcacaccttaatcctagcactttgggaggccaaggcgggcggatcccttgagttcaggagctcgtgaccag

SEQ ID NO: 547068 - DNA, 201 bp, Homo sapiens
ttgtaaacttattaatttagtaactgtactataagtgtttgttaaatgaaatgaagaaaatcataaccagaggcaaactagcacagatagagaacttgggrgttgatagatatagtcatgcagactgactgtgtgacttgggttcatgtgatcctcagcaatcaaacatggataataataatgcctaccttcaaaagatat

SEQ ID NO: 547069 - DNA, 201 bp, Homo sapiens
tgggtgcggtggcatgtgcctggctgggtgtggtggctcatgcctataatctcagcactttcggaggccaagatgggtggatcacctgaggtcaggagttkgagactagcctggccaacatgatgaaaccccgtctctactaaaaatacaaaaattaactgggcatggtggtgggcgcctgtaatcccagctacttgggag

SEQ ID NO: 547070 - DNA, 201 bp, Homo sapiens
gctgggtgtggtggctcatgcctataatctcagcactttcggaggccaagatgggtggatcacctgaggtcaggagtttgagactagcctggccaacatgrtgaaaccccgtctctactaaaaatacaaaaattaactgggcatggtggtgggcgcctgtaatcccagctacttgggaggctgaggcgagaggatcgcttg

SEQ ID NO: 547071 - DNA, 201 bp, Homo sapiens
acggggtttcaccatgtgggccaggctggtctcaaactcctgacctcaggtgatccacccacctcggcctctcaaagtgctgggattacagacgtgagccwctgtacccagccagcttttttaaatattaacatcaaacaagtatcttgaaaactgaaagagacataatcttttattttcataacttgctgtggccccaaa

SEQ ID NO: 547072 - DNA, 201 bp, Homo sapiens
caaacccaggccagaagccagacccaggcctgctgcctgcatctgcattccctccttccagtgttccttagaacagacatttaggtatctcaggtcctttytaagtgtccctttcctatgtatgcatttcctttttttgtctttactatgcactttagcttataaagccaattaaaaacgatgattgagaaaatcagtggt

SEQ ID NO: 547073 - DNA, 201 bp, Homo sapiens
ttggttgcttccacccagagaactgggtgacagagtgcaagagggacttttcacaatatacaatgtacgcttcttagattttaaactatcttaatgtattwtattaaatttaaaaaaagattttgctctgagtaattactttatttagaaaatgtctaaattgttaaattcctttttccttattttctaggcaaaacctat

SEQ ID NO: 547074 - DNA, 201 bp, Homo sapiens
aggacaacttcgagacatttctttttgccaccgtatctaacagggagcaggaagatctctgccgaggaattgtccagctctgcttcaatgagcaaagccarcagctgctagcagaggtccagccctctgactctttcctcatggtagagacaactgcatactttgaggcctacaggcacgtcctggaaggactccaggagg

SEQ ID NO: 547075 - DNA, 201 bp, Homo sapiens
gttccacaggcatctacaattgtcagaagaccagcattgtgcgggtgggtggaaggagcaacagtgaaatcctgaagcagttcaccctaagggagctgagraacaagcgggaattccgccgcaacctccccatgcacctccgaagggcctacatgagtgtaagtcccagctctgaaatatctggggtagttcaagagggac

SEQ ID NO: 547076 - DNA, 201 bp, Homo sapiens
cctttgtaatattatttcacttgatgtctctgttggctgtgataattgtttagtggtagaaccagtggcccccttagaatcaataggatattcccaattaytgctactagtaataactaacatttattgagagtttttaatgtgtccagtactatactaagcactttataaacatttaatctttataaaatccccaccagg

SEQ ID NO: 547077 - DNA, 201 bp, Homo sapiens
ccagagtccttgtttagccactctacagtggaagagctgttgggagaatgtaagacacttgacattaatcagtgatgccagccctttttcttacgtgctgygacccctgccttgggcttaaaaccaagcctgcctctgctcagacagtaccctgcctggtattgatgtctgcagacccagcgcaaccagaaaaagaaaatg

SEQ ID NO: 547078 - DNA, 201 bp, Homo sapiens
gctcagacagtaccctgcctggtattgatgtctgcagacccagcgcaaccagaaaaagaaaatgaaaaaaagagtgaaggatgagcttcgcaaactgaacrccatgactgcagccgaggccaacgagatcgaggatgtttggcacctggacctcagttctcgctggcagctttataggtactgtgttccacatccagccaa

SEQ ID NO: 547079 - DNA, 201 bp, Homo sapiens
tcttccaagacatagagtcttctaatcagataaaaatattaaaagtagtactttcttctgattttggaggtagtttgaaaagtaaatatgtaagtaacaaytataaaaatttagagttcagttgtagatcatttatattttaccaaatattcctttatgttgtcacattaaagtctcggctgggcacggtggctgacacct

SEQ ID NO: 547080 - DNA, 201 bp, Homo sapiens
atgttatgctttctccttatttttttcaaatgataatctctatctctctagattttctttcctttttttttttaagaaaaatagaggccaggtgcggtggmtcacacctgcaatcccagcactttgggaggccaaggtgggcagatcacctgaggtcaggagttcgagaccagcctggccaacatggtgaaagcctgtctc

SEQ ID NO: 547081 - DNA, 201 bp, Homo sapiens
ccctgtcaaaaaaaaaaagaaagccttcagaagggagtagagccagctttttaaaagctggttactgggagaaaattgaaatacagaccagggttttttamtcccaactctgcctgttagccatgtaaccttaagcaagttatataagaattctggccaggcgcggtggcttacgcctgtaatcccagagctttgtgaggc

SEQ ID NO: 547082 - DNA, 201 bp, Homo sapiens
tttaggaattgaattcaggcagtctagctgtagaatcctggctcctatctgccacattgtacttgtcgtggaactataccttcccatacctttctccccakgtgccactctctaattctactctggggtcataactattattagaagtgggaatttacattaacagttaaaatagctactgctaaattactctccgaaagg

SEQ ID NO: 547083 - DNA, 201 bp, Homo sapiens
gagtctgagtttaaatattagattcttaaaaatagatccctaccccacccagactaggtaatgtcccctgctaccagtactcactacatttattgctgccrtattaattatttaatgagtaacttcctgccagagacaaagaaatgataacaaatcagaaactgggcctatgtttctcctgctatatcttcagaacttggc

SEQ ID NO: 547084 - DNA, 201 bp, Homo sapiens
ctgagacttagagaaattatacaacttggccaaggttatatagtaaggcagtggccaggccaatgtttgaaccaagtcagtttggcctttaaactcatgtyctgactgttatttggtactggcatgagattagaagcaatgagacatactgtatgtatttattctctaacacacatcaggtactcaataactgtttattcc

SEQ ID NO: 547085 - DNA, 201 bp, Homo sapiens
ggaggcggagcttgcagtgagctgagatcgctccactgcactctagcctgggcaacagagcaagactccacctcaaaaaaaaaaaacaaaactgttatacrgatgaagaaagctaaggcaaagaagggttaaataacctcttaagaggtgggaagtatgtactgaagctcacacaaatgttaagtgacaagtttaggaatt

SEQ ID NO: 547086 - DNA, 201 bp, Homo sapiens
tcacatttggtaccagcagcacctatcccaagtgtgatccttcatcccaacactccctcttggagctgttccctgggtagagctagcatgccagcagcttytgcaggctccaaacccaggccagaagccagacccaggcctgctgcctgcatctgcattccctccttccagtgttccttagaacagacatttaggtatctc

SEQ ID NO: 547087 - DNA, 201 bp, Homo sapiens
ctgtagaatcctggctcctatctgccacattgtacttgtcgtggaactataccttcccatacctttctccccatgtgccactctctaattctactctgggktcataactattattagaagtgggaatttacattaacagttaaaatagctactgctaaattactctccgaaaggaagtaccaaaagaaaacaaaaccccaa

SEQ ID NO: 547088 - DNA, 201 bp, Homo sapiens
atgcaaaacaaggaagagtgtgcataaatcaatttagtatctgatgtcaggaaatggtataatcatctcaaatataacatgcatttgaagcttttacaacttttttatcaaatcattgtatacagtcgtattttatttgtttttaaaatcttcatgtcattctgctaagttaggtcagccccagaatcagttttagcaaaa

SEQ ID NO: 547089 - DNA, 201 bp, Homo sapiens
gagagaagacctcatctggatgccaggcccaggaattcccataccaaccacagaggtaagcaaggtttcctacctaatgagaaggaaattctagtaataaragaaggaaatagggctctctataaatgagcaggcctacctaagattgtctgcatctctcaagtaaagaatgactatggctggatgcagtggctcaagcct

SEQ ID NO: 547090 - DNA, 201 bp, Homo sapiens
ctccttccagtgttccttagaacagacatttaggtatctcaggtcctttctaagtgtccctttcctatgtatgcatttcctttttttgtctttactatgcmctttagcttataaagccaattaaaaacgatgattgagaaaatcagtggtccacgtgtatcctcaattttcagaagcaactcagccaaagacagtgaagac

SEQ ID NO: 547091 - DNA, 201 bp, Homo sapiens
tttaggtatctcaggtcctttctaagtgtccctttcctatgtatgcatttcctttttttgtctttactatgcactttagcttataaagccaattaaaaacratgattgagaaaatcagtggtccacgtgtatcctcaattttcagaagcaactcagccaaagacagtgaagacgggcacagggaaggcactgtctacagtg

SEQ ID NO: 547092 - DNA, 201 bp, Homo sapiens
ctgccagaaccaccctgaaacccacaccttagtatccaaagcttctgacttccaaaaagtacccgaaggaggctgcagcctgccctgcgagttccgcctgrgctgtgggcatgtctgcacccgtgcctgccacccttatgactcttcacacaaggagttccaatgcatgaagccatgccagaaggtcatctgtcaggaagg

SEQ ID NO: 547093 - DNA, 201 bp, Homo sapiens
cagcactcgccggcggcagtgaaaggacgcgccggagccgggtgagtggccccgcaactgcccctgcccctgattcttccttgcctcgccgcgaaccccgrcgcccgcgccgacccgccactgcctctgcccgtaagacctgtcaccctctcaagcccccaacgcacccgtcacccgctcagagcccctggcccctcagcg

SEQ ID NO: 547094 - DNA, 201 bp, Homo sapiens
ccctgcccctgattcttccttgcctcgccgcgaaccccggcgcccgcgccgacccgccactgcctctgcccgtaagacctgtcaccctctcaagcccccarcgcacccgtcacccgctcagagcccctggcccctcagcgccccgtcgccccctcaatccccagacccccatcacccactcagagccttgtcacctctttg

SEQ ID NO: 547095 - DNA, 201 bp, Homo sapiens
ctccagcctgggcgacagagccagactccctctcaaaaaataaaaaataaaaaataaaattctctacaaaatgcaaaacaaggaagagtgtgcataaatcratttagtatctgatgtcaggaaatggtataatcatctcaaatataacatgcatttgaagcttttacaacttttttatcaaatcattgtatacagtcgtat

SEQ ID NO: 547096 - DNA, 201 bp, Homo sapiens
catcatcagttttactaataaaataaatactctatggagaattagaggaggggagggaaattaggcagggatgctgcagctgggagaattcttcccaaagwttttaaagtctcttattttcttcccatagttaacctttgttctttatctcacccctttccttagctcctgactactctgcacatctttttgttgggcatt

SEQ ID NO: 547097 - DNA, 201 bp, Homo sapiens
gagccagactccctctcaaaaaataaaaaataaaaaataaaattctctacaaaatgcaaaacaaggaagagtgtgcataaatcaatttagtatctgatgtmaggaaatggtataatcatctcaaatataacatgcatttgaagcttttacaacttttttatcaaatcattgtatacagtcgtattttatttgtttttaaaa

SEQ ID NO: 547098 - DNA, 201 bp, Homo sapiens
aaaaaaaaaaagaaagccttcagaagggagtagagccagctttttaaaagctggttactgggagaaaattgaaatacagaccagggttttttaatcccaaytctgcctgttagccatgtaaccttaagcaagttatataagaattctggccaggcgcggtggcttacgcctgtaatcccagagctttgtgaggccgaggcg

SEQ ID NO: 547099 - DNA, 201 bp, Homo sapiens
gccgagtgcttccgcatcttcgacaggtgcgctgggggcccgggagccgagggaggggcttagcagtcagaacccggccggcagcgctggaagcttccccrtgttgggagtgcggaagcggggcgtcgagtgtggtggccagggcagctcgccccggccctgagccctgccctgtccctcggacctgaaggaatgcagacg

SEQ ID NO: 547100 - DNA, 201 bp, Homo sapiens
gcgtcaaggagttgggcacggtgatgaggatgctgggccagacacccaccaaggaggagctggacgccatcatcgaggaggtggatgaggacggtgagcgrgtgtccctcggaggcaggggatggtggggagaggcggcagcggctgggctcaggctcagtctgccacctgctgcccgcaggcagcggcaccatcgacttc

SEQ ID NO: 547101 - DNA, 201 bp, Homo sapiens
cgtcaaggagttgggcacggtgatgaggatgctgggccagacacccaccaaggaggagctggacgccatcatcgaggaggtggatgaggacggtgagcggrtgtccctcggaggcaggggatggtggggagaggcggcagcggctgggctcaggctcagtctgccacctgctgcccgcaggcagcggcaccatcgacttcg

SEQ ID NO: 547102 - DNA, 201 bp, Homo sapiens
gatgaaagaggacgcgaaagggaagagcgaggaggagctggccgagtgcttccgcatcttcgacaggtgcgctgggggcccgggagccgagggaggggctyagcagtcagaacccggccggcagcgctggaagcttccccgtgttgggagtgcggaagcggggcgtcgagtgtggtggccagggcagctcgccccggccct

SEQ ID NO: 547103 - DNA, 201 bp, Homo sapiens
tgcgctgggggcccgggagccgagggaggggcttagcagtcagaacccggccggcagcgctggaagcttccccgtgttgggagtgcggaagcggggcgtcsagtgtggtggccagggcagctcgccccggccctgagccctgccctgtccctcggacctgaaggaatgcagacggctacatcgacccggaggagctggctg

SEQ ID NO: 547104 - DNA, 201 bp, Homo sapiens
gagggcgtgcagtaaggagtggacagtcgcctctaccaagatcgcgtgtccctagggtgtgggagactccgccctgccgggtccccaccagggaggcgcgrccccttgtgggtctttgtctggaaggaataaaagcaaatgttccaaaactcgtggcctgaatgaggggagagccgaggacagcaggtcgcaagggctgtg

SEQ ID NO: 547105 - DNA, 201 bp, Homo sapiens
gctggaagcttccccgtgttgggagtgcggaagcggggcgtcgagtgtggtggccagggcagctcgccccggccctgagccctgccctgtccctcggaccygaaggaatgcagacggctacatcgacccggaggagctggctgagattttcagggcctccggggagcacgtgacggacgaggagatcgaatctctgatgaa

SEQ ID NO: 547106 - DNA, 201 bp, Homo sapiens
acatagcaagtgctgagcactgggaaatgtgatgatctgtagaacatagaatgggttgtgagcataaggtatgctcagtgctatgattgaggaaactactrgagaccaccttggactccctggtctggacacagtgggggaaggatccccgaggaagtgatgttagagcttagaaagatgatagggaagtagacagatgaa

SEQ ID NO: 547107 - DNA, 201 bp, Homo sapiens
attctagcactttgggaaaccaaggtggaaggatcccctgagcctaggagttcgagaccagcctgggcaacatggtgaaaccccatctctataaaaatacaaaaaaaaaaaaagccaggggtggtggtgcacctctagtcccagctactcgggaggctgaagtgggaggatcacttgagcccaggagatagaggctgcagt

SEQ ID NO: 547108 - DNA, 201 bp, Homo sapiens
agcctgggcaacatggtgaaaccccatctctataaaaatacaaaaaaaaaaaaagccaggggtggtggtgcacctctagtcccagctactcgggaggctgaagtgggaggatcacttgagcccaggagatagaggctgcagtgagctataatagcaccactgcacatcagccttggtgacagagtgagtatagacctttat

SEQ ID NO: 547109 - DNA, 201 bp, Homo sapiens
ctgctgttgcccatgcctgactaaaaatagcctgccctcctggcatagggaaagaggaggagaggaaggagggggagaaggaggagcactggtggccagcyggctgaagagctccttggaagcctcaccctgtcctcactgccagcctcaatccaaagcctctgacccagatggcctggcttggatatgacgtggaaaccc

SEQ ID NO: 547110 - DNA, 201 bp, Homo sapiens
gtcaggattaataataagaatcatcaacatgggtgggcatggtgcctcatgactgtaattctagcactttgggaaaccaaggtggaaggatcccctgagcytaggagttcgagaccagcctgggcaacatggtgaaaccccatctctataaaaatacaaaaaaaaaaaaagccaggggtggtggtgcacctctagtcccag

SEQ ID NO: 547111 - DNA, 201 bp, Homo sapiens
cccctgcagaaatctcactttcatgtcaaggcctccatcacattcggccccccatgaggggccttttctccaatgactgaatcctaagaaggaagctgacrgcctccgactctgccagttctctgaggggcgggatgatgtgtcttttatctcttctttgtggttccagtgcctgatctgtggcctgacatgcagcaagta

SEQ ID NO: 547112 - DNA, 201 bp, Homo sapiens
actcaataactttgtgttgcattattatttatttgagaacaaacattttattgagcaactattaaagtaccgggcaccattaggagctgcagaaaactggmaaatagtgctggaatggtgctagccctttacaaagccctttcacacccctgatatctcatccctgaaaagctacagagaaaagatgaaggcacgctaatt

SEQ ID NO: 547113 - DNA, 201 bp, Homo sapiens
cgagaccagcctgggcaacatagtgagaccctgtctttacaaaaaataaaataaaataaaaaggcaggtgtggtggcacacctgtggtcccagttgctccsggggctgaggtaagaggatcgcttgagcctaggagatcaaggctgcaatgagttatgattgtgccactgcactctagcctgggtgacagaccttggcgac

SEQ ID NO: 547114 - DNA, 201 bp, Homo sapiens
gttagagcaggagggcccctcagaaatctggcctatcacctccattttacagataggtagtctgaggcttagtgaggggaagggcttatgctgggtcatawaaacagtcagaactaggagatctgaaggttgcgcattctccactattattatttcttcttctttttgcttccttcttcctcctcctgcttcttcttcctt

SEQ ID NO: 547115 - DNA, 201 bp, Homo sapiens
gggatggtggggagaggcggcagcggctgggctcaggctcagtctgccacctgctgcccgcaggcagcggcaccatcgacttcgaggagttcttggtcatkatggtgcgccagatgaaagaggacgcgaaagggaagagcgaggaggagctggccgagtgcttccgcatcttcgacaggtgcgctgggggcccgggagccg

SEQ ID NO: 547116 - DNA, 201 bp, Homo sapiens
ctgagccctgccctgtccctcggacctgaaggaatgcagacggctacatcgacccggaggagctggctgagattttcagggcctccggggagcacgtgackgacgaggagatcgaatctctgatgaaagacggcgacaagaacaacgacggccgcattgacttcgacggtgagggccaacgggagcttgggaagagcgggt

SEQ ID NO: 547117 - DNA, 201 bp, Homo sapiens
tcagaacccggccggcagcgctggaagcttccccgtgttgggagtgcggaagcggggcgtcgagtgtggtggccagggcagctcgccccggccctgagccytgccctgtccctcggacctgaaggaatgcagacggctacatcgacccggaggagctggctgagattttcagggcctccggggagcacgtgacggacgagg

SEQ ID NO: 547118 - DNA, 201 bp, Homo sapiens
gaaactgaggaccagagagggtgagttacttggcttaaccacacagcttgccagaggtttctttctttctttctctctctctctttctttctttctctctytctctttctttctttctttctcttttgagatggagtctcactctgtcacctaggctggagtgcagtggcaccatctctgcttactgcaacctccgcctcc

SEQ ID NO: 547119 - DNA, 201 bp, Homo sapiens
ctgctatcggttgtcttggtgctctttctgtccacgtagccactgtctacaagccttgcctactccccagtgcccagcctgcaccttgtggattctcaggytgggctccctctggacttggtctgcccacccctttactccccagatgaccagatttcttcactgagctctaggaaggggccagctgtccttttaccactt

SEQ ID NO: 547120 - DNA, 201 bp, Homo sapiens
ccaccatgcctggctagtattttattttttgtaaaggtggggttgcatgttgcccaggctgatcttgaactcttggcctgaagagatcctcctacctctgyctcccaatgtgctgggattacaagtatgagctaccacccaccattctttgttttattttaattttttaattggagacagcgtctcgccatgttgcccagg

SEQ ID NO: 547121 - DNA, 201 bp, Homo sapiens
ctgcagtgagctataatagcaccactgcacatcagccttggtgacagagtgagtatagacctttataatttacaaagctctgcagtcaagtggggataatmgttgctacctcataggaggagcactagatgagatcatgttaaaatgcttagcacagtgtgtggcacgtcatggggttcagtaaacagtggcctacctgtc

SEQ ID NO: 547122 - DNA, 201 bp, Homo sapiens
tctaggacgtcaaggcctgccacctgcttggaggcttaaatttctctgcaagggcccttggctaaattaggtaatgggttcagactgtgggaggggtgggrctcgctgaccccaggatctgattgggcagggtctccagtgctggggagcagggaggtgggaggggagggtgcccctacaaatcccgggggctagagcagg

SEQ ID NO: 547123 - DNA, 201 bp, Homo sapiens
tttgggaagctgaggcaggcagatcgcctaaggtagggggttcgagaccagcctgaccaacatggagaaacctcatctctactaaaaatacaaaattagcygggcgttgtggtgcatgcctgtaatcccagctactcgggaggctgagggagaagaatcgcttgaaccccggaggtgggggttgcggttgtggcgagctga

SEQ ID NO: 547124 - DNA, 201 bp, Homo sapiens
gtgagccactgcccccattcttaaattctgtatggatatctccctacagcctccctgagaaatggtcatctagctcctgtttgggtatactcagtgatacrgagctcattacctcctgaggccacctgttcccattattgttcaactatgactattaggaagttcccccttatattgaactaaataccatccagttcagtt

SEQ ID NO: 547125 - DNA, 201 bp, Homo sapiens
attccttggtgtccagcccccctttcctggccccagagcctgctatcggttgtcttggtgctctttctgtccacgtagccactgtctacaagccttgcctrctccccagtgcccagcctgcaccttgtggattctcaggttgggctccctctggacttggtctgcccacccctttactccccagatgaccagatttcttca

SEQ ID NO: 547126 - DNA, 201 bp, Homo sapiens
agctactcaggaggctgaagtgggacgattgcttgagcccaggaggttgaggctgcagtgagctatgatcacactactgcactccagcatgtgtgacagarcgagacaaaacaaaactgtgattgggtgctgtgcgggcacacaattatgtgacaagtttgaagttgttcttctggagaaccaagggcgctgacagagtgg

SEQ ID NO: 547127 - DNA, 201 bp, Homo sapiens
ctaagaccatagatcttaagtgtccacacacaaaatggtagtggtggatgtgttgattgatttcattgtggtaatcatttcactatgtatatctatgtcarttcatcacattgtacaccttgaatatataccatttctgtttatcaattatacatcaatagagctagaaaaaaatttttaaaagcaaagcaaaaaaaaaaa

SEQ ID NO: 547128 - DNA, 201 bp, Homo sapiens
actataattactcattaaagtgtatagacttttctgtataagtattatatttcataaaaacactttgggccgggcgcggtggctcacgcctgtaatcccarcactttgggaggctgaggtgggtggatcacctgaggtcgggacttccagaacagcctgaccaacatggagaaaccccgtctctactaaaaataacaaaaa

SEQ ID NO: 547129 - DNA, 201 bp, Homo sapiens
acagatgagaaaactgccactcagaggttcttggagttgctcatgccactatgtaagagcagagctagtgctagaatggcttctagtccagtgcttttttyccctttgttcctcctcttatgtgtcaccacgaaggaggatgtccagggctaaagtgagagtgtgtgaggaactcctaccaccaccagcaagctggcattt

SEQ ID NO: 547130 - DNA, 201 bp, Homo sapiens
ctgggcatggtggtgcacgcctataatcctagctgcttgggagccataggcacgagaatcgcttgaacctgggagacagaggttgcggtgagccgagatgrcaccactacactccagcctgggtgaaagagcaagattctgtctcaaaaacaaacaaaaaaagaaatgtgatcttgtcatcagtggtattttggggaatgc

SEQ ID NO: 547131 - DNA, 201 bp, Homo sapiens
ggttgttccccagaattctctccttggcccacttctccatctaaagtaactctctggataatctaaaacatatactcttatggtttcagggaccaccatgwtctaaaactcccatacctctttgtccatcccatgcctctttctactttaaaacttgtttatcctactatctgcttgaccactctgctggaagtttcatag

SEQ ID NO: 547132 - DNA, 201 bp, Homo sapiens
tccagcgtcgcgcttccgggcggacgagcagcgcgctccagtgacgtcacggcgccactttccggccggtgacagagtccagcggagttgtgggggccggrggcgccatgggagccactggcgacgccgagcagccgcggggacccagcggggccgagaggggcggcttggagctgggggatgcgggcgcagcggggcagc

SEQ ID NO: 547133 - DNA, 201 bp, Homo sapiens
gtatggggagtaaccacagggtcagacctctgacagctgttttttgtggcagaggaaaggacggcctcctggacacatcctgtcaagcgaccgggcagccrccggcatggtgtgagtagggaccaacagtgtggtgagagcataggggagcagacggagagaggggccctgaaggaaaagagtccagggttctgtgcctgt

SEQ ID NO: 547134 - DNA, 201 bp, Homo sapiens
atctcacctcttttttattgactgtactctggctgttctgaactcctttctgctcctccagcacaagcttaggccatttcacttgctgttcttagtacctrgggtactctacccttaactctataaagccggctccttcttttcttcagatcttagtttaaatatcagagaggtcttcccctcgcactcctacctctgcta

SEQ ID NO: 547135 - DNA, 201 bp, Homo sapiens
atgccccctcaccctgtctccctcctgaatgcagtttcacagatcctgccatctccatggatctcctccgagctgtcctgcagcccagcatcaacgaggaratccagactgtcttcaacaagtacatgaaggtgagagggacacaggataaaaaataacaggagaaagactcatgaggatcccagtccttgcctgcatcac

SEQ ID NO: 547136 - DNA, 201 bp, Homo sapiens
acatccgggaccttgcggccagtgatgattacaggtaaaaccagtgggtctcctgccccttctcctctccctgcctccaaatagcccctagaatgaggcasggcctacatcctcacttcccccaacttctctcttcaatgtctgttccagaggatgcctggatctgaagctagaggaattgaaatcctttgtcctaccctc

SEQ ID NO: 547137 - DNA, 201 bp, Homo sapiens
tggcagtagctggaggggagaagtggggggatgttaatcaaagggtacaaacttttagttataagatgaacaagttctgggcaatctgatgtacagcatgrtgactatagtttatctctattgtttacttgaaatttgctaagaccatagatcttaagtgtccacacacaaaatggtagtggtggatgtgttgattgattt

SEQ ID NO: 547138 - DNA, 201 bp, Homo sapiens
gaaaggacggcctcctggacacatcctgtcaagcgaccgggcagccgccggcatggtgtgagtagggaccaacagtgtggtgagagcataggggagcagayggagagaggggccctgaaggaaaagagtccagggttctgtgcctgtcaaaatcagatccatcagcttaagtcatcgtggaggggggttatcctggttgga

SEQ ID NO: 547139 - DNA, 201 bp, Homo sapiens
aagtgctgggattacaggtgtgagccaccgcgcccgtcctgattttttgcactatttacacctcaatctgttgggcacccccacgattatatccgtaagarggggaataaagggaggaggtcaagcctgaaatgtgaatctaaatctggctgatcccaaagccctgctcataatcacttttcccttctgtatgaagctagg

SEQ ID NO: 547140 - DNA, 201 bp, Homo sapiens
tgaatatctcttcctatatgttaagttcacaaaagggccctcacccactgtagaccgaggcattgtgacaaagcatttctacaggccccagtacaatacakgccaattactagacagcagagcagtttatcatgttttccattttgccacaaagttcaaaaccaagttatctttgtcctcagagggagcacatggtttcct

SEQ ID NO: 547141 - DNA, 201 bp, Homo sapiens
tttctcaacacagtacttgaggcagcaacccttgtcagtaggagttagcaatgaaatgtgtttgcacacttggcagccccttccagatttacctctacttraagagttctcagatcatatgaaacagcaaccttaggaaaatcatcattgcatgtgttcaaaaactattgttgagggctttgtccatcacacacaatgtcc

SEQ ID NO: 547142 - DNA, 201 bp, Homo sapiens
taaactgctcttttcagatggagaaaaagtaatacccagattgacccatgagcttccaggaataaaggtcagagtcactgtgttctcgggtattggagcgrgaggtccttcaggctgggaggcaagtgaaatatgtgggcccagggaggttccatgtacttccatttgtaggaccaggcccacacagcatcatgctggatg

SEQ ID NO: 547143 - DNA, 201 bp, Homo sapiens
ggatccccagtgcacaaggctatggagatctacagccggtagaaagagcacaggactgaggaagaggagactccgattctgtaactctgtgtgatcttgarctagtcaagtcacttccttctctgaactcacgtacaaaatggggaagggcacaggagatgggttgtggaataaacaatacctaagatccctcacattcac

SEQ ID NO: 547144 - DNA, 201 bp, Homo sapiens
tataacccaccttgggtcctttcgtatacttgatcttaaccaaaaggtgtaggagcaatggtggatccctttttttttctttttttcttttttttttttttcttaattttcaccacaccattcaagagagaaatgggtccttttttaaaagagaaggctataaataagtcaccagtccctactctcccatccatgaagcat

SEQ ID NO: 547145 - DNA, 201 bp, Homo sapiens
ttatttgggttgagcacagtagctcatacctgtaatcccaacactttgggagactgagtgggtggatcagttgaggccaggagttcaaaaccagcctggcyaacatggcaaaaccccatctctactaaaaatacaaaaatcagctgggtgtgttggcacgtgcctgtaatcccagctattcaaggctgaagcagaagaata

SEQ ID NO: 547146 - DNA, 201 bp, Homo sapiens
aaggcttggcacctcttgccagaactgcacagccctgtgggatcccagaatcacgggctttctctaccacattctgtgcaagttttcaagttctttgaaakgcatacctgctcacgcttcttctccagtctgatatcctcgagtcccaacacttaaacagtttgcccagtggctcctttgttttcctctcttaatgtcgtc

SEQ ID NO: 547147 - DNA, 201 bp, Homo sapiens
aaaatacaaaaatcagctgggtgtgttggcacgtgcctgtaatcccagctattcaaggctgaagcagaagaatagcttgaacccaggaggtggaggttgcrgtgagccaagatcatgccactgcactctagtctgaacaacagagcgagacgtcatctcaataaataaataaacagccaggcacggtggctcacacctgta

SEQ ID NO: 547148 - DNA, 201 bp, Homo sapiens
caacatggcaaaaccccatctctactaaaaatacaaaaatcagctgggtgtgttggcacgtgcctgtaatcccagctattcaaggctgaagcagaagaatmgcttgaacccaggaggtggaggttgcggtgagccaagatcatgccactgcactctagtctgaacaacagagcgagacgtcatctcaataaataaataaac

SEQ ID NO: 547149 - DNA, 201 bp, Homo sapiens
tcggagctgcctggagcaggtgagaccaaaggggacaagagatgcaggcacaaggtttagctctcgagcctctgataagaaatgcgatcttaagccggacrtggtggctcacacatgtaatcccagcactgtgggaggccaaggtgggcagatcactcaaggccaggagtttgagaccagcttgggcaacgtggctaaacc

SEQ ID NO: 547150 - DNA, 201 bp, Homo sapiens
tcatcacattgtacaccttgaatatataccatttctgtttatcaattatacatcaatagagctagaaaaaaatttttaaaagcaaagcaaaaaaaaaaaaagaaatggcttaagacacataataattagaatagctaagatctgtctcacccctgcaggtgcgtggtggatcaagttatcatggccccatttggtatcatg

SEQ ID NO: 547151 - DNA, 201 bp, Homo sapiens
gtcacggcgccactttccggccggtgacagagtccagcggagttgtgggggccggaggcgccatgggagccactggcgacgccgagcagccgcggggaccyagcggggccgagaggggcggcttggagctgggggatgcgggcgcagcggggcagctggttcttacggtgagggcgcccccggtgaggtctgggctcaggc

SEQ ID NO: 547152 - DNA, 201 bp, Homo sapiens
caagcgaccgggcagccgccggcatggtgtgagtagggaccaacagtgtggtgagagcataggggagcagacggagagaggggccctgaaggaaaagagtycagggttctgtgcctgtcaaaatcagatccatcagcttaagtcatcgtggaggggggttatcctggttggaggggtgaggaaggagggtagtgaggagga

SEQ ID NO: 547153 - DNA, 201 bp, Homo sapiens
aatcatctttgcctcctcctcctcttccttacctccctacacccagtcgagtcctggacaattcttcctcttaaatatattgcagttcctatttccttctsttcatccttactgctgccctagctcaggcccttagcagctttccaactgctttatcacagcggcctctaaactgctctccctgcctgtagtcttgcccct

SEQ ID NO: 547154 - DNA, 201 bp, Homo sapiens
tgatttcattgtggtaatcatttcactatgtatatctatgtcaattcatcacattgtacaccttgaatatataccatttctgtttatcaattatacatcawtagagctagaaaaaaatttttaaaagcaaagcaaaaaaaaaaaaagaaatggcttaagacacataataattagaatagctaagatctgtctcacccctgc

SEQ ID NO: 547155 - DNA, 201 bp, Homo sapiens
gcagcccagcatcaacgaggagatccagactgtcttcaacaagtacatgaaggtgagagggacacaggataaaaaataacaggagaaagactcatgaggakcccagtccttgcctgcatcaccagtctgtctctttcctacatacagatatctaaagttttcctttcttgttgtttttgttttgttttgttttgtgttttt

SEQ ID NO: 547156 - DNA, 201 bp, Homo sapiens
aaaggggcagggggcgaagggtgcatgcacaccattccagagccatctgcccctctccacctccagccacactggcctcagagaggatcctgtgtaggaaytggagttagaggcaaaacaaagagagggcttgagtctttgctgaagccttctccttataggagttagtggtcactaatactgattcaatacttagtatgt

SEQ ID NO: 547157 - DNA, 201 bp, Homo sapiens
gtgttcccacctttgagcttctgcactcctccctgctgctgaaacacttctgcccagctttttttacagcctccttcacatctcaactcagaggccacctyctgagcaaggccttccctggccattcccgcaaagtagcccttcccctctggtggttctctgtcacatctgcctgggtttttttctttttttctcacagca

SEQ ID NO: 547158 - DNA, 201 bp, Homo sapiens
tggcggatcacctgaagtcgggagttcgagaccagcctgaccaacatggagaaaccccgtctctactaaaaatacaaaaattagctgggcatgatggcgcrtgcctgttatcccagctattcaggaggctgaggcaggagaatcgcttaaacccaggaggcagaggttgcagtgagccaagatctcaccattgcactccag

SEQ ID NO: 547159 - DNA, 201 bp, Homo sapiens
tcccacttcagcgtggtttaaagtatggcttcaggcctggttccattattttactagctgcatgaacttgaacaaatggctccacatttgtttttcttttytctttttttttaactagctcaagtctgggaattgatccacatttctgagtctgtttttgtcctgtataaaatgagaatagtgatagaccaaccatttttt

SEQ ID NO: 547160 - DNA, 201 bp, Homo sapiens
ctataaagccggctccttcttttcttcagatcttagtttaaatatcagagaggtcttcccctcgcactcctacctctgctaaaatcttgagctttacaagrgttgaggcctaatcttgttcaccactgtattcccagccctggaatatgactcttagtatgtgtacagagtttgctgaattattgagtaaatgaaggaaca

SEQ ID NO: 547161 - DNA, 201 bp, Homo sapiens
atccgccaccacgcccagctaattttttgtatttttagtagagacggggtttcaccgtgttagccaggatggtctcgatctcctgacctcgtgatccgccyacctcggcctcgcaaagtgctgggattacaggtgtgagccaccgcgcccgtcctgattttttgcactatttacacctcaatctgttgggcacccccacga

SEQ ID NO: 547162 - DNA, 201 bp, Homo sapiens
gattataggtgtgagccagggcacctggtcagttttcaaatttttaatcccccaagaattttattccctccttgagggtaattcagataccttttttttawaaaatctgcccttgtcacgcacgtggttttttttgctgacctcttataaggatgaagtgacttaaatgtactgtgctgagcactgtgctccagacataac

SEQ ID NO: 547163 - DNA, 201 bp, Homo sapiens
tttaaaaaaaaatgccttaccatgacccacagagcctaccctcgactggcttctgcctgcttctttaacttcatttcatctcacctcttttttattgactrtactctggctgttctgaactcctttctgctcctccagcacaagcttaggccatttcacttgctgttcttagtacctggggtactctacccttaactctat

SEQ ID NO: 547164 - DNA, 201 bp, Homo sapiens
cctgtggcttggaagccaattcagccgctcataattcacacatttatatctcagtccagagttacattcaccgttacccagttccaatccactcttctcayagcagccagactgatctccgtaaagatgaattagatcatgtcactccccattttaaaaacgcttcagtgactttcctgttgcagggagaataaagtctta

SEQ ID NO: 547165 - DNA, 201 bp, Homo sapiens
ggattataggtgtgagccagggcacctggtcagttttcaaatttttaatcccccaagaattttattccctccttgagggtaattcagataccttttttttwaaaaatctgcccttgtcacgcacgtggttttttttgctgacctcttataaggatgaagtgacttaaatgtactgtgctgagcactgtgctccagacataa

SEQ ID NO: 547166 - DNA, 201 bp, Homo sapiens
gattaaatgagataatgcacataaaatacttaggatagtgcctgtaagtgttccataaaagcagctgtttgtactactgttacaactttccccctcttgcyatgttctcaaccaaaaacatttaaaaaaattacttaccactgtatcccaggaaagttacatagatataatagccaactgcaaccaaccataaggtatttc

SEQ ID NO: 547167 - DNA, 201 bp, Homo sapiens
gtaacatttgggtaaagacccaaggatagtgatggtgcctggcaggcctgaggaatggtgaaaagaccagtgtctgaaagaaaaggagcaagaaatgaagycagaaaagaaacagggttgggcccaacatcaagtcacacaggctccatgtcttacgaagcctgtggccgttttacaatctttggcttttattcctggtga

SEQ ID NO: 547168 - DNA, 201 bp, Homo sapiens
tcggtcactagaatgagattaaaaaaccaagaaaaactccgatccctagtgttttacatccggaatagttcagcagagggagcggtagcgtcggagtccartccaaccggtccgagctccggggaacgccggccactgcccggctgcccgtctcccctccacttcgcaggccccccagacgccggcagggtctggccgagc

SEQ ID NO: 547169 - DNA, 201 bp, Homo sapiens
aaagaaagattcacaagattcatttagggactctgctaggttctggaaatacaggacacatcccttgccctccagatgcccaggctagtgggagagacagrtctttaaacaaaactcccaagatgtgtgaacactaccttgggacacagcgtggccactgagagagttgaagtttcctgaggtgggcccttgccaggctga

SEQ ID NO: 547170 - DNA, 201 bp, Homo sapiens
catgttcttcccaaccctagagaaaggccaggagtcaaaagcaaatgcagttagttctgaggcgggtcttggggcttgggaaccgcagactgcaacctcargcaagggcaacagcccacccttctgaatcacctaataacacttatccaggggcagctaccattacagagacagggatgatgtgactgccccatgactccg

SEQ ID NO: 547171 - DNA, 201 bp, Homo sapiens
aaatttgcaaactttacacctttaagatatctacaaagatgatagtttatttacaagttttacaagaaatgatcacttcacaatactgttgacacagttaygattgaatcttcttctcactttttatttcactctgtacttatagaaagaacagagagtatgggtgaagttccatcccagtgccagggaaagcccgtagag

SEQ ID NO: 547172 - DNA, 201 bp, Homo sapiens
caaacatctcccctggactagagaaagcactccccaaacaaggcattacaatgaaggggttaagtgttccctgacaaaccagccaaggggggagagaaccrgggtgggaataactccggagccaggcatagtcagagccatctgtatttacagttaggccctaatcatctacagtaacaggaaaggaaggggtaagaaacg

SEQ ID NO: 547173 - DNA, 201 bp, Homo sapiens
aatttgcaaactttacacctttaagatatctacaaagatgatagtttatttacaagttttacaagaaatgatcacttcacaatactgttgacacagttackattgaatcttcttctcactttttatttcactctgtacttatagaaagaacagagagtatgggtgaagttccatcccagtgccagggaaagcccgtagagc

SEQ ID NO: 547174 - DNA, 201 bp, Homo sapiens
aggccgcaagctgtcgggattaaatggcccccggcgcgagcccgggccgcgggagggcagagtggtcctcaggcctcacctggagtcctgctacagcctcracccacgtccgaaccagcccaccacctcctcccagcagccgaccccagccgccaccgggcgggcttcccttccctcaacggagccggcccttggggcgcg

SEQ ID NO: 547175 - DNA, 201 bp, Homo sapiens
taccaaacaccagatttatcctcagtacactgctgttgctaaatcaaccaaagtcagactgagaacccttctgataaagcccgtgtgtgtgtgtggcggtsggggggcggggggggcggagggtgtgtgtgtatgagagaaagagagagaattttattctcagtaggaaggcatgagaagtttaaaaaaaaaatccttctt

SEQ ID NO: 547176 - DNA, 201 bp, Homo sapiens
tagatataatagccaactgcaaccaaccataaggtatttccaactaaatatccaataaatgtgtctgtcaggataacatctgccagaagagacgcagaccrtgagtccctttaccaatgcatgcaatgaagacttggataatactctaattaactgctacttacggttgatgaaaaaaagctggataaaatgcaaaatgac

SEQ ID NO: 547177 - DNA, 201 bp, Homo sapiens
acaatgatacacctatgtcagatggtattatggaaagagagaaagcagcagagaaatgtggagaatacaaacttgagatgcaattgtacatatgagggtcrtaaagtaacatttgggtaaagacccaaggatagtgatggtgcctggcaggcctgaggaatggtgaaaagaccagtgtctgaaagaaaaggagcaagaaat

SEQ ID NO: 547178 - DNA, 201 bp, Homo sapiens
caagactccgttcccctgcactaaggaattcactgaagtactcggtaacatcttcctagatggaagaaaaacatttcttttacacgtattctgaagaaacwtttggctaccgacactcctcttctgagttatttggcagggaggtcactttccatgttcttcccaaccctagagaaaggccaggagtcaaaagcaaatgca

SEQ ID NO: 547179 - DNA, 201 bp, Homo sapiens
ccgcaagctgtcgggattaaatggcccccggcgcgagcccgggccgcgggagggcagagtggtcctcaggcctcacctggagtcctgctacagcctcgacycacgtccgaaccagcccaccacctcctcccagcagccgaccccagccgccaccgggcgggcttcccttccctcaacggagccggcccttggggcgcgccg

SEQ ID NO: 547180 - DNA, 201 bp, Homo sapiens
aagcccgtagagcagaatcagaggtgcaaatggatacagaagaattactgtatttttcaaaaatggcaatgctggaaaagaaaggaatccaaactgatttwaaaaaaaaaaaaaaataaatgactaataaatgaacattttgaaagacagcttacttcaacatgtggggtggaagggaatgcatattttgaatcagtaaga

SEQ ID NO: 547181 - DNA, 201 bp, Homo sapiens
ctattctaagtggtataggtcgttaccaggagtgttcaaataaccacttagagaaaccacagtgctgcagtgttctcatcacaaaacactttcaaaattcrttagaaatgacacaaacatctcccctggactagagaaagcactccccaaacaaggcattacaatgaaggggttaagtgttccctgacaaaccagccaagg

SEQ ID NO: 547182 - DNA, 201 bp, Homo sapiens
acatttaattagttttaaggaatgtacctgaccacagtgttaatatatatttcttcaaatttgcaaactttacacctttaagatatctacaaagatgatartttatttacaagttttacaagaaatgatcacttcacaatactgttgacacagttacgattgaatcttcttctcactttttatttcactctgtacttatag

SEQ ID NO: 547183 - DNA, 201 bp, Homo sapiens
gctgttctatgacagtatactgtgataaagtggctgtctgtattcatcttaaatctttattatcaaattaaaatttaaaacaggtaaaacagaagttgctrgagaattttgaagcttctgaaatccctgcaactctgtgttcctccccacttaatccagtttgtaaaagctgtactgatctgatagttagacatactggaa

SEQ ID NO: 547184 - DNA, 201 bp, Homo sapiens
tgattgttatgtctcagtttgcaaagtgaatggaatgtctaaacacatacaagtcttggtgttgattccaagtacagcagcttatttgagagtctgagacyagagcagtagtcagttgattaagtctagggtgttattgggaccacccttcaggtaatccagcctacagtttcccctcaggcccatgcttttcatcttagt

SEQ ID NO: 547185 - DNA, 201 bp, Homo sapiens
ttctgcctggttctttttctctcctttctaatcatcttttggttactaggtttttaaatttttatttttttttcctttcatgagcttagcagttgtatacytttcaaacaactttttagtgattaagaaaatttttagcaagtacctttgaactaacaatgtctgatgttatcctctaacaatgcagggactttagagtac

SEQ ID NO: 547186 - DNA, 201 bp, Homo sapiens
ttttaaatttttatttttttttcctttcatgagcttagcagttgtatacctttcaaacaactttttagtgattaagaaaatttttagcaagtacctttgarctaacaatgtctgatgttatcctctaacaatgcagggactttagagtacttgaatgacatttacccaatactctatttagatatcattgctctcggccag

SEQ ID NO: 547187 - DNA, 201 bp, Homo sapiens
tcactcacctctcccttccccaacccttctctacttggctgctgttttaaagtttgcccttccccaaatttggatttttattacagatctaaagctctttygattttatactgattaaatcagtactgcagtatttgattaaccaagcttctgcagattttgtgattcttgggacttttttgacgtaagaaatacttcttt

SEQ ID NO: 547188 - DNA, 201 bp, Homo sapiens
ttatttcttattcatccttattcctagggtacagctcttcatgattgtaccccacagtaagggtgtaacccaatgtctgctcactgcaccccactgaattsttagtattttggtaggtctggactcccaatgcagcttagcctttcatctgcctcttcccgaatcaacaaatgaccataaggggaaagtggtactaaagac

SEQ ID NO: 547189 - DNA, 201 bp, Homo sapiens
tgttccacctccttgagttttgttctcccatggattctgtcttactaatactgacttcagtctggattactgccttaaggttttactgttaagtgacagayttcgttttagcatatagacaaacaccttgcgtttatgatgtatgaaaacaccatgttactgccttaaatacaagttgagcctctgaaattcaaaaatctg

SEQ ID NO: 547190 - DNA, 201 bp, Homo sapiens
tcccttaatatttatctaactcatttacatcttgcctgccactggtgcaagtcaggtgctcattgtttctcattacagttactacaaaagcttcctaactrgtctccttgcttcctgactagtcaggattcagccctgccactcattgtaccagatgtagcattctaaaatgcttttatatatatatatacagggttttac

SEQ ID NO: 547191 - DNA, 201 bp, Homo sapiens
gtccaggcattatctcctccccttactttaaagcaggcttgtccagtctgcagcctgtgggccacatgcagcccaggatggctttcaatgtggcctagcasaaatttgtaaactttcttaaaacgtgagacttttttttgtgatttttatttttaagctgatcagctattgttagtgttagtgtgttagtgtattttatgt

SEQ ID NO: 547192 - DNA, 201 bp, Homo sapiens
gttgctaatttcttattatttttgctgctatcttttccatgttcaaataccaatctgtatttgctgtcttctcatagctccgtcacacacatgtacaagayggtgaagcaggtggtatcacacaacaaattggggccaccaatgttcctcttgaagctattaatgaacagactaagatgattaaaaatgtaagtacattgt

SEQ ID NO: 547193 - DNA, 201 bp, Homo sapiens
agaagaaagggcttatgacaaagcaaaacggaggattgaggtatttattttaccgtttctctctacttttcttcccactcctctgtgatgattaaaacagyactctacaactaaaggctttgaacagcactttatgtattctcaagaatagaacaccgttcagtttttgtaatgttgaaatattactggcctttgatactg

SEQ ID NO: 547194 - DNA, 201 bp, Homo sapiens
tttttcccatgtatcacagaatttttgttgctgttaatgtaatcattcctccccctcctttttttttggtaaattgtaaaattttgtcttttttgtctccttttctccttcctttctgttgagagatggaatctcactctgtcacccaggctagagtgcaatggtgtgatcatcgctccctgtaaccttgaactcatggac

SEQ ID NO: 547195 - DNA, 201 bp, Homo sapiens
ggagaccccatctctaccccctaaaaaaaatagctgagtgtggtggtgtgtgcgtgtggtctcagctactcaggaggctgaggtgggaggattgctggagscttgggaggtcaaggctgcagtgagccatgtttgtgccactgcacttcagcctgggtgacagagctagaccctgtctcaaaaaaaaaaaaaaatgtggtg

SEQ ID NO: 547196 - DNA, 201 bp, Homo sapiens
aaaggacagagactaggataacagctccatatactcaccattcagaattaacatgtactattttgcctattttgctttagatcattctttttaaagaatamaacactacatattataggagctctcacattccatttccttccctccctctcccagaggcagccactattccacagttagtcatttgcctccatgctttaa

SEQ ID NO: 547197 - DNA, 201 bp, Homo sapiens
ggttcatttttgtgtgataggtgtccatttgctgtagcactgtttgttaaagaggctaccctctgcttttgcacctttgtcaaaaattaattggttgtacttttttttttttttttttttgagacagtgtttccgtctgtcacccaggccgtagtgcagtggtgctatctcagctcactgcaacttctgcctcctgggttc

SEQ ID NO: 547198 - DNA, 201 bp, Homo sapiens
gttctagaattctgttccagtttgtgaaaaatcttcttttttttttttgagatggagtcttgctctgtcaccccgggtggagtacagtggcgcgatctccrctcactgcaacctccgcctcctgggctcaagcgattctcctgcctcagcctctcaagtagctgggatgacaggcgcccaacacctggctaatttttgtgt

SEQ ID NO: 547199 - DNA, 201 bp, Homo sapiens
acttgtagttatggaaattacagtgtagaatggtggacttttagcatcagtctttagcattaggcttgtaagagatgctctctcaagtggcatccctgackctggtctcttactcttcatagtgttgtccagtgtttaccatcttattagttccctattgtctactaataagaatccaaattccttagcttgacattcaag

SEQ ID NO: 547200 - DNA, 201 bp, Homo sapiens
agagagtgtaggcatctgcaggtgtcttcatataattgctctgaaatgtgcagcaggttaacttttcagtcatcctttagcctgtgactactaagcatatmcacacacacatatatgagtactttatcaataatttgtaataaactcatttcaggcaaagagcttcttcaagaacttgattgttatgtctcagtttgcaaa

SEQ ID NO: 547201 - DNA, 201 bp, Homo sapiens
gggaatagggtgttggtggtgccagcctagtttaccaaaatgttacaccgtgagtgatgaaaggatcgcactgccatgacttttaaaacaggcttttgctstagttcttacttcagctatccagccatggcgcctgtgattggcatgaattcttctgcatgcattttaatttgttcttattttatagtttgttgacatcgg

SEQ ID NO: 547202 - DNA, 201 bp, Homo sapiens
gctctatcaggaaagcagcaccaacagagaaagctaggacttttaggtcccctcgtgcctgacatgcaaaccagatgtgattttggaattctactcccttmggcaggcaagccctgttttttatttctgcttaagctttttagtacagtgagagcgggcatctggggccacagctttctttggcacgtttgttatgttctg

SEQ ID NO: 547203 - DNA, 201 bp, Homo sapiens
tgattgtagaatctgatgggactggatcccccattagggcttgacctctagctgggccttgtctgttgaggaagttgctctatcaggaaagcagcaccaayagagaaagctaggacttttaggtcccctcgtgcctgacatgcaaaccagatgtgattttggaattctactcccttaggcaggcaagccctgttttttatt

SEQ ID NO: 547204 - DNA, 201 bp, Homo sapiens
ctttttggtagatgacaatgaaggagacaaaaagaagaaagataagaagaaaaagaaaggagaaaaggaagaaaaagagaaagagaagaaaaaaggacctrgcaaagccactgttaaagctatgcaagaagctctggctaagcttaaagaggaagaagaaagacagaagagagaagaggaagaacgtataaaacggcttga

SEQ ID NO: 547205 - DNA, 201 bp, Homo sapiens
gatcaggaatgggaaaagcctttacagaatactaagcctgatttacattggtgaattatattattgatagttcctttccttctttttctcttttctcttcygagcgaataggatcatctcacctgggtagacctcagcctagcactgatatgacgagattagagaaatttagattgatatgcttaatagcagtccactatt

SEQ ID NO: 547206 - DNA, 201 bp, Homo sapiens
cattttcattccttaagtatcttgtgtcccatttattctcgcataaagtattgctgttaagtttgatcatcagctgaatttcgtctttttataaggcctaygatcgttttacatcttgatgtcgcttctgagttttccagttatgtggtgttctattataatatgtagtagtgaatttttattttagaacagttttcttga

SEQ ID NO: 547207 - DNA, 201 bp, Homo sapiens
taacacagaaaacttggtcagtaaaattattagaaatattagttggttctaaaactagctcattccacttgaggtcaattcaagtgattggtagatgagcmtttggcaagttaagggctaatagtacttgaacaatttaatacatatactctattttgtttgggttttacagagaagtttaaaagtttaagaaaagtatta

SEQ ID NO: 547208 - DNA, 201 bp, Homo sapiens
ctttgaagttattattcccttgccctggctttcattgttcctgttgagaagtcaggtatcagcctaaatttttcatatggtcttgcttttcagcagttttrtcatgacgtacccagaataggctttttaaaaatatattctacttgtagagctttattaatatatggttttatgtttttatcagttttatgttaggagtca

SEQ ID NO: 547209 - DNA, 201 bp, Homo sapiens
tgcacacgtttgtctcttccccatttatttacttaatcatttctctctaatagtatgactagtggaattatttcatactttagcttataatttaatattgktacttaatttgttcttctaattaattaacatattaatttgttgctcccattgcccattgggagctctttcagttggctcatgtgtccctttgtcatagac

SEQ ID NO: 547210 - DNA, 201 bp, Homo sapiens
catttgctgtagcactgtttgttaaagaggctaccctctgcttttgcacctttgtcaaaaattaattggttgtacttttttttttttttttttttgagacrgtgtttccgtctgtcacccaggccgtagtgcagtggtgctatctcagctcactgcaacttctgcctcctgggttcaagagattctcctgcttcagcctcc

SEQ ID NO: 547211 - DNA, 201 bp, Homo sapiens
ttgatgggacagacttctttgctgtctcttttaagaaattgctacagccaccccagcctttatgagctaccatcctaatcagtcagtagccatcaacatcraggcaagaccctctaccagcaaaaagattatgacttgttgaagaatcaggtgctcgttagcatttttagcaatattttaaaattaaggtgtatacattgc

SEQ ID NO: 547212 - DNA, 201 bp, Homo sapiens
cagcctttatgagctaccatcctaatcagtcagtagccatcaacatcgaggcaagaccctctaccagcaaaaagattatgacttgttgaagaatcaggtgytcgttagcatttttagcaatattttaaaattaaggtgtatacattgctttttttaagaagatataatgctgtcacacacttaatagactacaatatagta

SEQ ID NO: 547213 - DNA, 201 bp, Homo sapiens
aagattatgacttgttgaagaatcaggtgctcgttagcatttttagcaatattttaaaattaaggtgtatacattgctttttttaagaagatataatgctrtcacacacttaatagactacaatatagtataagcatctcttttagaagcactactaggaaaccccaaaaattgtgtggcttgctttattgtagtattagc

SEQ ID NO: 547214 - DNA, 201 bp, Homo sapiens
tggactagttttgcctgttttatgatttcatataaatggaatcatatagtatgtaattttttaagtttggcattttttgttactcatgttattatgctttrttcatgttgtcattacatgtataaagggtttttcctttttatttttgaatagtagtccattatctgaataatactgcactttatccatttatctgttgag

SEQ ID NO: 547215 - DNA, 201 bp, Homo sapiens
aggttctgtgatgccttgctctatctaagccttagtttcatatttgcagatgagtacttaaccaaagagagaaacacaatttaattctagactgctgaggrtagaggtgtgttgacaaccttatcaaatctgatttcttttcaaggatgaattgatccatgagttaaagcagacactaaatgctatcaaattagaagaaaa

SEQ ID NO: 547216 - DNA, 201 bp, Homo sapiens
gtgatatgagtatgtagttttcttgtaatgtcttttatctggttttcatatcagagtaatgttggcctcctaagacgagttgagaagtgtttcctcctctrttttctgaaagaatgtgcaggaattggattatttcaaagaattagcttttggttttattgatattcttttctaatataagcatttaaaagtgttaatttc

SEQ ID NO: 547217 - DNA, 201 bp, Homo sapiens
tagttgtcatcatacaggaaggcctgtctgtcagagtagagatgtgtgaaagtacctgcttaccagactgggcctttgccagattctaaactacactgttwtggttctacactgctaaatacggttgactcttgaacaacatgagggctaggggcactgactccctggccagttgaaaatccacatatattttttgactcc

SEQ ID NO: 547218 - DNA, 201 bp, Homo sapiens
atatatatatacaaatatatacacaaatatatatatatacaaatatatatatatatatacattttttttttttttttgagacggagtttccctcttgttgyccagacaacaagaaacttagggcaatggcgcgatctcggctcactgcaacctccacctccctggttcaagcgattctcctgcctcagcctccgagtagct

SEQ ID NO: 547219 - DNA, 201 bp, Homo sapiens
taagaggtcttgatatagtctggatactagatccttatcagatatatgatttgcagatactttctctgatttctgtagtttgttttttccactgtcttttmaagtttctttttcacaaaagttttaaattttgttgaagtccagtttatttttgttgttgttgcttgcattttggtgttgtatctgagataatctgttgcc

SEQ ID NO: 547220 - DNA, 201 bp, Homo sapiens
ttgaacccgggaggtggaggttgcagtgagccaggattgcaccactgcgctccagcctgggcaatggagtgagactgtctcaaaaaaaaaaaaaaaaaaawtggaatgtctaacatgcctttctggttgccacttgtagaacataggtaggtgggcggggtgcggtggctcatgtctgtaatcccagcactttgggaggct

SEQ ID NO: 547221 - DNA, 201 bp, Homo sapiens
aagccactgttaaagctatgcaagaagctctggctaagcttaaagaggaagaagaaagacagaagagagaagaggaagaacgtataaaacggcttgaagarttagaagccaagcgtaaagaagaggtatgttttcatgaagttggtaacattgatattgtgtttaacttaaaatctattctctgtaaaatatctttactct

SEQ ID NO: 547222 - DNA, 201 bp, Homo sapiens
agaaatggtggttcagagtgtaaacagcttacccaaggccacagagctgaaatttaagctggtctgtgcaactttttcttacgcatatgttcagctaggarcattagatgtgaagaaacccagtacttagattttagaaagttttattcttaatggagaatatagcttttgtaaaattttaaatgaaattaggtacaaact

SEQ ID NO: 547223 - DNA, 201 bp, Homo sapiens
gtttgttaatattaatgatttattaatattagagtgccaggcactatacaagttaggtggggaaaatcctttaacagtgattaaggatcagagttaacttytatggagtacagagactgagtttgctttgagcacttaccatgtgattagttattttagaacataagttgtatctcttttttttttttttttttttttttt

SEQ ID NO: 547224 - DNA, 201 bp, Homo sapiens
tggtttgtttaatgtattcgtcttaccagtcatagctatggttttaccattctagccattcttcagtacatgcacaacacacatccatatacattcctackttagagataacatttttagtcattttcctttattagtgacttcattcaaaatcccatggtatacaatttctgttgtctttattctaaggcttctgcccat

SEQ ID NO: 547225 - DNA, 201 bp, Homo sapiens
taagtatggaaggaagaaaaataggtgtataaaatgttttccatgagaaaccaagaaacttacactggtttgacagtggtcagttacatgtccccacagtwccaatgtgcctgttcactcacctctcccttccccaacccttctctacttggctgctgttttaaagtttgcccttccccaaatttggatttttattacaga

SEQ ID NO: 547226 - DNA, 201 bp, Homo sapiens
tgcagtgagccgagatcacgccactgcactccagcctaggcgacagagtgagagtccgtctcaaaaaaaggaaaaaaaaaaagaaattttctttactgaamtaaagcatctcttacaaggtgtccattataaaggccacattacatgagttgttttcttactgtgccattcatttggattcatctgcctttgctacttgga

SEQ ID NO: 547227 - DNA, 201 bp, Homo sapiens
tgttttaaagtttgcccttccccaaatttggatttttattacagatctaaagctctttcgattttatactgattaaatcagtactgcagtatttgattaamcaagcttctgcagattttgtgattcttgggacttttttgacgtaagaaatacttctttatttatgcatattcttcccacagtgatttttccagcattctt

SEQ ID NO: 547228 - DNA, 201 bp, Homo sapiens
ctgacaactgtactttgctggttaactcactgtttctaaagccatttatatggaaaagggagtagtgatactttcagagttttatggcaaaaggattgttytgtaaagaagctttcatgtctgactttcttaaactttgaacttttccccattgtttctagtttgatagagagaatgtacggattccaggaatgctaatta

SEQ ID NO: 547229 - DNA, 201 bp, Homo sapiens
attacgtagatggttgcaaaattgtggatatacctgtccccccatttcttacaaagaacctcttcccactgacctttttattgagtcatagactcagtggktttttttttttttaatataatccattacctttattcttttgatactcagattttctattgtggtcagtaggagctcaactggctcctgtatccttgacac

SEQ ID NO: 547230 - DNA, 201 bp, Homo sapiens
ggatcgcactgccatgacttttaaaacaggcttttgctctagttcttacttcagctatccagccatggcgcctgtgattggcatgaattcttctgcatgcattttaatttgttcttattttatagtttgttgacatcggaatagtaacaagtattgaaataaaccataaacaagtggatgttgcaaaaaaaggacaagaag

SEQ ID NO: 547231 - DNA, 201 bp, Homo sapiens
agttttctttatattgttttggctattttaggtccttggatttcaatataaagttttcagtcagcttgttcgtttccacaaaaagccttttaggattttgrttgggattgcgtttcaatctgtagataaattttgagagaattggctcttttagcaatattgcatcttttgatcagtgagcatggtatctctgtacattta

SEQ ID NO: 547232 - DNA, 201 bp, Homo sapiens
aaatctgatttcttttcaaggatgaattgatccatgagttaaagcagacactaaatgctatcaaattagaagaaaaaggagtctatgtccaggcatctacrctgggttctttggaagctctactggaatttctgaaaacatcagaagtgcccgtaagtaactacaactcgctccacaagtgaatggtggttggtcgtggtt

SEQ ID NO: 547233 - DNA, 201 bp, Homo sapiens
gtttaatagaaattaagatactagaaaaagattatagatttgttcttatttttgtaacttataaaaatggataaaagggccaggcatggtggctcaccacygtaatcccagcactttgggaggccaaggcaggtggatcacttgagcccagtagtcactgtagttttcatgttttatttttggtcactgtagttttgcctt

SEQ ID NO: 547234 - DNA, 201 bp, Homo sapiens
gggagtagtgatactttcagagttttatggcaaaaggattgttctgtaaagaagctttcatgtctgactttcttaaactttgaacttttccccattgtttytagtttgatagagagaatgtacggattccaggaatgctaattattgatactcctgggcatgaatctttcaggtaagagcaatttgagtcttttctcatca

SEQ ID NO: 547235 - DNA, 201 bp, Homo sapiens
gacaaagcaaaacggaggattgaggtatttattttaccgtttctctctacttttcttcccactcctctgtgatgattaaaacagtactctacaactaaagrctttgaacagcactttatgtattctcaagaatagaacaccgttcagtttttgtaatgttgaaatattactggcctttgatactggtcttacccaaggacc

SEQ ID NO: 547236 - DNA, 201 bp, Homo sapiens
catacaaaagtagaatagtctaatgaacaaacatgtgtccatcacccaggttcaaattcattcataaatctcatttcatatgtattctgccccctcctttmttttctccattatcttgatacaacctcagacatttgtaaatatttcaagaaattatataatgtattataagaaacatttatatcttaaatataaattttt

SEQ ID NO: 547237 - DNA, 201 bp, Homo sapiens
gtgattaaggatcagagttaacttctatggagtacagagactgagtttgctttgagcacttaccatgtgattagttattttagaacataagttgtatctcttttttttttttttttttttttttttttgagaaggtgtctcaagcaatctcagctcactgcaagctccacctcccgggttgatgccattctcctgcctcag

SEQ ID NO: 547238 - DNA, 201 bp, Homo sapiens
ccagcctggccaatatggtgaaaccccgtctctacttaaaatacaaaaaaaaaaaaaatgaaccgggcatggtggcgggctcctgtagtcccagctactcrggaggctgaggcaggagaatcgcttgaacccaggaggtggaggttgcagtgagccgagatcacgccactgcactccagcctaggcgacagagtgagagtc

SEQ ID NO: 547239 - DNA, 201 bp, Homo sapiens
tagtagagacagggtttcaccatgttggccaggctggtctcgaacttctgacctcagatgatccacttgcctgggcgttccaaagtgctgggattacaggygtgaggcactgcacccggcctccctgctcagtttttaaaaaataaactttaatttgtagaagttttagattgtgaagataatacagagtctccatgtgcc

SEQ ID NO: 547240 - DNA, 201 bp, Homo sapiens
acatacaagtcttggtgttgattccaagtacagcagcttatttgagagtctgagactagagcagtagtcagttgattaagtctagggtgttattgggaccrcccttcaggtaatccagcctacagtttcccctcaggcccatgcttttcatcttagtaggtgtaggctgctaggcaaggaaaacttaaagtgatgatctct

SEQ ID NO: 547241 - DNA, 201 bp, Homo sapiens
accagcctggccaatatggtgaaaccccgtctctacttaaaatacaaaaaaaaaaaaaatgaaccgggcatggtggcgggctcctgtagtcccagctactygggaggctgaggcaggagaatcgcttgaacccaggaggtggaggttgcagtgagccgagatcacgccactgcactccagcctaggcgacagagtgagagt

SEQ ID NO: 547242 - DNA, 201 bp, Homo sapiens
ttcatttcaatgctttgcctttattctttttggtagatgacaatgaaggagacaaaaagaagaaagataagaagaaaaagaaaggagaaaaggaagaaaargagaaagagaagaaaaaaggacctagcaaagccactgttaaagctatgcaagaagctctggctaagcttaaagaggaagaagaaagacagaagagagaag

SEQ ID NO: 547243 - DNA, 201 bp, Homo sapiens
aatacaggttttgtctgacatgtactcttttataggaacgattggaacaagaaaaaagagaaaggaaaaagcaaaaagaaaaagaaagaaaagaacgcttraaaaaagaagggaaacttttaactaaatcccagagagaagccagagccagagccgaagctactcttaaactgctacaagctcagggtgagtggtactctt

SEQ ID NO: 547244 - DNA, 201 bp, Homo sapiens
tttaatgcttcagaagcaaattggaaggatttttaactagaactttttaagaaccataaaaattggcatttttagaccttcctaaaggtcggcttctattyacaataatcagagaattcaacttactcattgtggggtatctgtgtatatgttgaggagttggggaaaaatctctggttttaaaaaaaaaacattgttcta

SEQ ID NO: 547245 - DNA, 201 bp, Homo sapiens
aaataaggatagtgaggatttgaaataatatttaatttttgatttttttttttttttatttctagaaacggcgacttgaacatagtaaaaatgtaaacacygaaaagctaagagcccctattatctgcgtacttgggcatgtggacacagggaagacaaaaattctagataaggtaagaaagtattaaatgtattgataga

SEQ ID NO: 547246 - DNA, 201 bp, Homo sapiens
aaagtattaaatgtattgatagaactttgaaaataagtgaatggtaccttataaaaaaaaactttagagaccaataggacatataagcaattctgcttacrataaataagttgctaatttcttattatttttgctgctatcttttccatgttcaaataccaatctgtatttgctgtcttctcatagctccgtcacacacat

SEQ ID NO: 547247 - DNA, 201 bp, Homo sapiens
ctgttttttttgtcgtttctttgctctctagccttcccctaagaaaggaagggaagaagaagaaaccaaccaaccgaggtcgctcctttctaaccacctgmaatgctttggggagggaggataagggtatatgcgagttacttacctagagatttttgagacatttctgtgtgtcacattcgattgagttctgttactcat

SEQ ID NO: 547248 - DNA, 201 bp, Homo sapiens
gaaattatataatgtattataagaaacatttatatcttaaatataaatttttagaagtggtacatttcattcatttggaaaattcacatacaatggaatcsttgtctgtgttgtcagataaatgaaatgtcattgtactttttcagaggcatttaaactagcgtttcaatttattgcttcagaaaattccatttggaagtt

SEQ ID NO: 547249 - DNA, 201 bp, Homo sapiens
aaaaaaaaaaaaaaatggaatgtctaacatgcctttctggttgccacttgtagaacataggtaggtgggcggggtgcggtggctcatgtctgtaatcccascactttgggaggctgaagcagaaggattgcttgaggccaggagtttaagaccagcccgtgcaacgtggggagaccccatctctaccccctaaaaaaaata

SEQ ID NO: 547250 - DNA, 201 bp, Homo sapiens
tcaatccttgtgcattttagttttcccattggtaaaatgagataataggctaggtgactgatctctaaacttccttccaactctgaaatttctgctattcmaagtaaaaatgcacagggatccaaatatttaggtgttgttattgatcgtcgagaaataagacttgttttatgttttaagatctcccattttataaataac

SEQ ID NO: 547251 - DNA, 201 bp, Homo sapiens
aaaaaagtagtataattaacttacaagcatagctcattttattgtgcttcactatattgtgcttcacagatattgtgtgtgtgtgtgtatttgtgtatagttttttttttttaaatacaaattgtaagtttgtagcagccttgcatcaagcaagagtattaagtctgttggtgccatttttccaacagcttgtgttcactt

SEQ ID NO: 547252 - DNA, 201 bp, Homo sapiens
gaggccgaggcgggcggatcacgaggtcaggagatcgagaccaaggtgaaaccccgtctctactaaaaatacaaaaagttagccgggcgtagtggcgggcrcctgtagtcccagctactcgggaggctgaggcaggagaatggcgtgaacccgggaggcggagcttgcagtgagccgagatcgcgccactgcactccagcc

SEQ ID NO: 547253 - DNA, 201 bp, Homo sapiens
tacggctatagctgccatagatcgagattcctctgatggatttgggcaaaagttgaaaaccttttggaaaggattcacccttctggatgttatgaagaacrttcatgatccataagaggacaaaatataaacattgataggagtttggaagaagctgatttcaactctcatgtatgactttgaggaattcaagatttcagt

SEQ ID NO: 547254 - DNA, 201 bp, Homo sapiens
tttggtatctgtatacattgtgtaatgatcagatcaggatgattagcatatctatcacgtcaaacacttgtcatttctttgtgataagaacattccaaatkctcttttctagctgtttgaagtataatacattattgttaactatagtcatcctactgtgaagtagaacaccagaacttattctcctaactgtaacttgac

SEQ ID NO: 547255 - DNA, 201 bp, Homo sapiens
ctgatggatttgggcaaaagttgaaaaccttttggaaaggattcacccttctggatgttatgaagaacgttcatgatccataagaggacaaaatataaacrttgataggagtttggaagaagctgatttcaactctcatgtatgactttgaggaattcaagatttcagtagaggaagtcactgcggatgtggtagaaaaat

SEQ ID NO: 547256 - DNA, 201 bp, Homo sapiens
gtcttctactagggaactctgtattaaacttgactcaagcaaagaacttcttaatcgacagctggttgctaaagatcaagaaatagaaatggtatgtaatrtattttaaaaatctttaaaattgctattactgtaaagttagtataattttggaaaagtaagttcttttttatgtaatattacatgaatccatgtctttga

SEQ ID NO: 547257 - DNA, 201 bp, Homo sapiens
tattgttttatgggccctgtgagatttatgtcataaggagcttctattttgatgtattttgaggttttgtttcaagatttagaactcctttaaacagttcytgtagtgctggtttagtagtggcaaattctctcagcatgtctgaaaatgactttatctttccttcattatgtagcttagttttgctggatacaaaattct

SEQ ID NO: 547258 - DNA, 201 bp, Homo sapiens
cctagggaaatatagagaatgagaagaggatccaggactgagtaacaagaagccaaagaagtaggaagaagacccagaagtgagtgttattttggaagacsagaaagcgaagtgtttttaaaaggggaggatatgatcaattgtcagacacttttgagaagtgaaataagtgaggctaaagaaaaatattgattggatttg

SEQ ID NO: 547259 - DNA, 201 bp, Homo sapiens
gactttctgtattgatgacctgtctagtgctgtcagtggagtattgaagtctcccactattattgtgttgctgtgcatctcatttcctgggtctaatagtmattgttttctaaatttgagagctccagtgttaggtgcatatacatttagaattgcaatattttccttttggactattccttttatcattatataatgtcc

SEQ ID NO: 547260 - DNA, 201 bp, Homo sapiens
gcagaactcaatgaaaatgagacaaaaaaattacaaaagataagttaaaaaagaagatactttatataaatctgattttcttaaatttattgagacttgcwttgtgtcctatcatatgttcaatcttggagattgttccatgtgctgaagaaaagaatttatattctgcagttgttgggtagaatgttctgtaaatacctg

SEQ ID NO: 547261 - DNA, 201 bp, Homo sapiens
tggtcaaatgatatatctcaactagttttggggctggagacttttaagtgggaaaggtttttttttcctaagtacattaaaaagaatgaccagttgaccaycctgctcatgaattttatgtaaaaaaaaaaaagtcaaaacctgaatttatcttagactgttttgtacatattgttaccacctgtattatttaaacttcat

SEQ ID NO: 547262 - DNA, 201 bp, Homo sapiens
ggtgggtggatggaaggatggataaaaagttggcttggagaataagaaagagtgagtgaggaaggaagggaagagatagagagaaagtaggagtgaattayggccaaataacttataatgggagcaaattctagtgctttacacttgtaaaatcacttgtaaaaacacataaatttatttgcctctcagttctacttgtct

SEQ ID NO: 547263 - DNA, 201 bp, Homo sapiens
ttattttttcaattatttcttctggtcctttctatatcctctccttctactactatcattatatgtaggttggtgtgcttaatagtgtcctatatttttckgaggtttgttcatttttcttcattctgctttttttcttcatcaaattgcataatcttcatcaatcttttttaaattcattaattgtttcctctgccagtt

SEQ ID NO: 547264 - DNA, 201 bp, Homo sapiens
tctttttgttcattcaattttaacagaaataacagcttaagatttttttatttaatacttatattatttttcaaggaaaagaccatttcaggcatgaagartatcattgctgagatggaacaggcatcaaggtaaatcagtcgtgcaacaaatatatgagctcttactggggggccaagtaccatgttaggtacaaagata

SEQ ID NO: 547265 - DNA, 201 bp, Homo sapiens
cagcggcgggcacagctgccggccggaagctcggcagcacgagttgcccctgtttcttgggaggttaggtttgagcccagttcctatggtcactgcttcgygtcctcccgcagctctccgcttggttgttggggagactgttcagtttagaaacgctctggaagctctggtggagccgaggaatttggaagtcacagattt

SEQ ID NO: 547266 - DNA, 201 bp, Homo sapiens
ttgtgatgaatttcccaggtgttctttgagcttcttgtatttggatgtctaggtctctagcaaggctagggaagttttcttcaattattcccccaaatacrtttcccatgcttttagatttctcttcttccgcaggatgccagttatttttaggtttggttgtttaacataatccaaaacttcttggaagctttgttcatt

SEQ ID NO: 547267 - DNA, 201 bp, Homo sapiens
tgaattctttttctggcaagaagaaatctaaaagggatttcttcttggtttggatccattgctggtgagctagtgtgattttttgagggtgttaaagaacyttgttttgtcatattaccagaattgtttttcttgttccttctcatttgggtaggctatgtcagagggaagatctggggctcaggggctgctgttcagatt

SEQ ID NO: 547268 - DNA, 201 bp, Homo sapiens
caggcagtgggcaagcagggctgagaacttgccccaggctaccagcctcccagctgagaaagcaagcagggctttcaggttttgtgccacccctcctgccygcatctgcacttgagcttcacctctttccctgagttctgtccaagaaagttcacatttggttggaattgttacaaaattcagttggaagtttccttctcc

SEQ ID NO: 547269 - DNA, 201 bp, Homo sapiens
gagtgcctgtttgtgtgccatttatatatcttcttttgttaagtgtctgttcagttctattgctcatttttttgcttggtggtttttattgtttatttgtrggcattattgtagaagccgtttatctgaaatgtatgatttttttaaactagtctgtggcttgttttttgcttgtaattgctttgtttttgatgaacaaaa

SEQ ID NO: 547270 - DNA, 201 bp, Homo sapiens
ccccagtagctgggactacaggtgcccaccaccacacgtggctaattttttgtatttttagtagagacggggtttcactgtgttagccaggatggtctcartctcctgacctcgtgattcgccctccttggcctcccaaagtgctgggattacaggcatgagacactgcgcccggcccccaaattttttttttttttagac

SEQ ID NO: 547271 - DNA, 201 bp, Homo sapiens
ttatagagatgggggtcttcctatgttgcccaggctggtcttgatctcccagcctcaagtgatcctcccacattggcctcccaaagtgctaggattatagrcatgagccatcatgcctggcttctcctttcttttaaatttttttgggctaattacttttttggatgcattttttaaattaattaattaattaattttgag

SEQ ID NO: 547272 - DNA, 201 bp, Homo sapiens
ttgcccctactgggaggtgtccctgagttaggctactagggggtcagggactcacttgaggaggcagtctgtccgttctcagatctcaaactccatgctgkgagaaccactgctctcttcaaagctgtcagacagggacgtttaagtctgcagaagtttctgctgccttttgttcagctatgccctgtccccagaggtgaa

SEQ ID NO: 547273 - DNA, 201 bp, Homo sapiens
ataatctcagctactcagaaggctgaggcagagaattgcttgaacctgggaggtggaggttgcagtgagccaagatcgcaccactgcactccagcctgggygacagagtgagactctttctcaaaaaaaaaaaaaaagtttgttttatcagagactaggattgtaacccctgctttttgttgttgttgttttccatttgct

SEQ ID NO: 547274 - DNA, 201 bp, Homo sapiens
agtaccatgctgttttggttactgtagccttgtagtatagtttgaagtcaggtaacgtgatgcctccagctttgttcttttgacttaggattgccttggcratgcgggctcttttttggttccatatgaactttaaagtagttttttccaattctgtgaagaaagtcattggtagcttgatggggatggcattaaatctat

SEQ ID NO: 547275 - DNA, 201 bp, Homo sapiens
tcttgtaaattcgtttgagttcattgtagattctggatattagccctttgtcagatgagtagattgcaaaaatattctcccattctgttggttgcctgttmactctgatggtagtttcttttgctgtgcagaagctctttagtttaattagatcccatttgtcaattttggcttttgttgccattgcttttggtgttttag

SEQ ID NO: 547276 - DNA, 201 bp, Homo sapiens
atgtgtcttttggctgcataaatgtcttcttttgagaagtatctgttcatatccttcacccactttttgatggggttgtttgttttttttcttgtaaattygtttgagttcattgtagattctggatattagccctttgtcagatgagtagattgcaaaaatattctcccattctgttggttgcctgttcactctgatggt

SEQ ID NO: 547277 - DNA, 201 bp, Homo sapiens
acactcttttttattatttattcttatactttaagatctagggtgcatgtgcacaatgtgcaggtttgttacatatgtatacatgtgccatgttgctgtgytgcacccattaactcgtcatttacattaggtattcctcctaatgctatccctcccccctcctcccaccccacaacaggccccagtgtatgatgctcccct

SEQ ID NO: 547278 - DNA, 201 bp, Homo sapiens
gtgaggggcagcggcgggcacagctgccggccggaagctcggcagcacgagttgcccctgtttcttgggaggttaggtttgagcccagttcctatggtcastgcttcgcgtcctcccgcagctctccgcttggttgttggggagactgttcagtttagaaacgctctggaagctctggtggagccgaggaatttggaagtc

SEQ ID NO: 547279 - DNA, 201 bp, Homo sapiens
gagagacagccttgcgcatgcgcgttccatccaggtgcggcagcctcaggcagagattaagaaatgagtcgtggaaaagggggctagcggctggttactakgagacgggacgctcggctcgggcgtctaggcgctgcgtgggcgtgcgcctgcgcggcgcggatgggccaggaaggggtccctcctaggtgccctgtaagg

SEQ ID NO: 547280 - DNA, 201 bp, Homo sapiens
tttagaaacgctctggaagctctggtggagccgaggaatttggaagtcacagatttgggagttcagcctgactcccgatcgctcatttctgagcctctttmtagacttggggtggtgaaaggctgagattacataggcatttgcatgaaaatctcagataattttagtaaaaattatacacagtaaaggcagggaaagctg

SEQ ID NO: 547281 - DNA, 201 bp, Homo sapiens
cacagaaggtgggagggtgggagccaggttgttctggggtgatagaatggatggtaaggaaccattggcaatagttatagaccatgggactttttttttttaatgtgtcgcaggaagaagagacataggatggtaaattggtcagcaggatcaagtgacaggttttcaagataagggagcactgtacatgactgaaggcag

SEQ ID NO: 547282 - DNA, 201 bp, Homo sapiens
gccttgcgcatgcgcgttccatccaggtgcggcagcctcaggcagagattaagaaatgagtcgtggaaaagggggctagcggctggttactaggagacggsacgctcggctcgggcgtctaggcgctgcgtgggcgtgcgcctgcgcggcgcggatgggccaggaaggggtccctcctaggtgccctgtaaggcaggcagg

SEQ ID NO: 547283 - DNA, 201 bp, Homo sapiens
gtctgcgtataaatttattttttatgagaatgtgtcataccagatactctgttttgcagagtgaatttttatacttaatgtggaaatcttaacacattcaragtagacctgtatctttttagtgtctacttagtagtatacattaaaacattgaaaattgtctattcaaggctatacataaggttatccaaactctatgta

SEQ ID NO: 547284 - DNA, 201 bp, Homo sapiens
acctggtaagtctaaaagccatgctcctgaactcactctttccccccagggatcctgcatgcataaaggctaaagccttttttgccagaagccctttcttyttcctcactttccgcttccaaaccatgactacatcctgtcagacttcacctggactctatccccttctctccacttttatgaccatcaccatcattcact

SEQ ID NO: 547285 - DNA, 201 bp, Homo sapiens
atatgcattttaggtttatatttatgtgggagagattccttgcctaatttgtggggtggcacttgaaacaagatttctaattcgattgctgagaaaaaatrtttgggtttctagtgtttaagattatactctgggtatgcggaggtagagtctgaggctaaagctactgttagtttgtctggaattgagatagtattaaat

SEQ ID NO: 547286 - DNA, 201 bp, Homo sapiens
tgcctcaacctcccaagtagctgggaatacaggcatgcgtcacaatgccgggcttatttttatttttatttatttatttatttttttgagacagagtctcrctctgttgcccaggctggagtgcaatggcacaatctcggttcactgcaacctccatctcccaggttcaagcgattcttgtgcctcagactcccaagtagc

SEQ ID NO: 547287 - DNA, 201 bp, Homo sapiens
agtccaattgatgacctctaggattgtatgtatttttatgcagtaacctcattgagactgcttaatggatgagtttaaattagtggaaagtcaaataatasaacttttttgttgttgttgagacagagtttccgtctgtcacccaggctggagtgcagtggcgcgatctcggctcactgcaacctccacctcccgggttca

SEQ ID NO: 547288 - DNA, 201 bp, Homo sapiens
aaacatcagtaatgttgaggtaagaagccctgaactagtaatagcatcttgttttagtttatttgattactagtaagggtaaattttccccatacgtttayaatttacttgtatttctccttttgtaaattttctgatcattatcatttagctcatatttctcatcagtttatatgcgttctttatgttagtagagatata

SEQ ID NO: 547289 - DNA, 201 bp, Homo sapiens
tactttggctttgagtttgtctcttttcatttccttagtccaataaagctttgctcccacccacgttctttgtgcatttattggtaaatatattgtatttyatctgttataggaccaatagtacaattatatttgtatcatcttatgtaatattatataattgattttaaaatcagttcagatggaaaagagatgcagcta

SEQ ID NO: 547290 - DNA, 201 bp, Homo sapiens
ttggaccttcttattctgtcttttatgtctgttaacctctattttgtattttttcattgttttatttgtgctctaatataggacctctgatctgttttttyccccagtttaccagttatctctttcacagtgtctattctgtatttttaacttgtccactgagttttgtaatctttaaaattttgatgttagtttaatttt

SEQ ID NO: 547291 - DNA, 201 bp, Homo sapiens
ttttcctgagcctagcagcaattgacaaggtgtttttctctagtctgaccttctcactaatggtatatctctccatatttacatgggacaccttagttctrtttcctgtgttgcagacatctctatggcctcatcttgtttctgaattaaaacataaaaccctaggctattgagacagacaaaccccaaccagagctaaca

SEQ ID NO: 547292 - DNA, 201 bp, Homo sapiens
caccttagttctgtttcctgtgttgcagacatctctatggcctcatcttgtttctgaattaaaacataaaaccctaggctattgagacagacaaaccccarccagagctaacatagtagttcctaatctgattgctctgatttggcattaggggacctaaggaaggtattatgaccaaaatgctaatagtagcttatgttg

SEQ ID NO: 547293 - DNA, 201 bp, Homo sapiens
tctttgcagtatttattcctataaattcaaacgtgtttaaaatctcttcaaatgttttcatactaactgtccatcttctgtcttgtgagaatttgttgctstgtttcagtaaaatgtctcttcttatgtactctttgatttgtggaatagacagtgtactgaggccctaattgtgtgtgaacaagacgtttccagaatgcg

SEQ ID NO: 547294 - DNA, 201 bp, Homo sapiens
ctctactttgtctggtattagtgttgccactcctattttcttgttgtttctatttacatggtaaatatttttaacttttttgagtaactgcattttaaatmtatctcttatatacagtatggatttgagttttgctttatgagtcattgtgaatttttttgagaaatttacactcttttttattatttattcttatacttt

SEQ ID NO: 547295 - DNA, 201 bp, Homo sapiens
cttcttattctaaatgttttatagttttatttttcacatttaattccgtgacccattttgagttaattctgcgtaaagtgtgaggttgacatagaggttcyttttttttttttttttttttttttggcctatgagtatccaccttcttctgtaccatttgtttaaaaagctatctttctgccattgaattgattttgtacc

SEQ ID NO: 547296 - DNA, 201 bp, Homo sapiens
agcctcccagtgctgggattacagcagtttagttttgaatgtagccactttatctgccaacttgaacacagttgtcattctcccctgaagtgacagatagrgtttgttgagcaggctgtataggtcatacaagtaagcaagttttgagacccattctctgtcactaaaatgtgcttccagtggtgacattttctgaaagaa

SEQ ID NO: 547297 - DNA, 201 bp, Homo sapiens
aatactctgagattagtgaaaatgaatatgtactgtgtcaaaacatataggatgcagctaaagcagtacttagagggaaatttatagctataaatgcctawctatattaaaaaagaagaaaactcttaagtcactaacctagccttccacttagaacactggaaaaagggaacaaactaaacccacagcaagaagaatgaa

SEQ ID NO: 547298 - DNA, 201 bp, Homo sapiens
gctggagacttttaagtgggaaaggtttttttttcctaagtacattaaaaagaatgaccagttgaccaccctgctcatgaattttatgtaaaaaaaaaaaagtcaaaacctgaatttatcttagactgttttgtacatattgttaccacctgtattatttaaacttcatacaatctaagtgcactactcttagatttgccc

SEQ ID NO: 547299 - DNA, 201 bp, Homo sapiens
cattattttatgcccttctttgtctcttttgatctttgttggtttaaagtctgttttatcagagattaaaattgcaactcctgatttttttttttttttttgctttccatttgcttggtaaatattcctccatccctttattttgagcctatgtgtgttttcgtacgtgagatggatctcctgaatacagcacaccagtgg

SEQ ID NO: 547300 - DNA, 201 bp, Homo sapiens
catataatgtagtcatatgctaaatatatgactataggtacctatcttataagactgggtatgttcactgtcataaattgatacaaaaagtattttgtggrttgaattgaactaagcagttgagttcagaagagaaagcaatcttttctgaatggggtaatttgggtcaacttattttattctagtcattcttttattgct

SEQ ID NO: 547301 - DNA, 201 bp, Homo sapiens
gtaatggccttctttgtctcttttgatctttgtggtttaaagtctgttttatcagagaccaggattgcaactcctgccattttttgttttccatttgctcytcctccgtccgtttattttgagcctatgtatgtctctgcacatgagatgggtctcctgcatacagcacactgatgggtcttgactctatcaaatttgcca

SEQ ID NO: 547302 - DNA, 201 bp, Homo sapiens
aagtctctttgtagatctctaaggacttgctttattcatctgggtgctcctgtattgggtacatatatatttaggatagttggctcttcttgttgaattgrtccctttaccattatgtaatggccttctttgtctcttttgatctttgtggtttaaagtctgttttatcagagaccaggattgcaactcctgccatttttt

SEQ ID NO: 547303 - DNA, 201 bp, Homo sapiens
tagttgagtggttttgagtgagcttcttcatcctgagttttagttgattgcactgtggtctgagagacagtttgttataatttctgttcttttacatttgytaaggagtgctttacttccaactatgtggtcaattttggaataagtgtggtgtggtgctgagaagaatgtatattctgttgatttggggtggagtgttct

SEQ ID NO: 547304 - DNA, 201 bp, Homo sapiens
cttcgggaaagtttgcatagattatagtgtcccaacgttttccttcttccattccaggaccttatatcctaggagatttccttgtttaaaattttctgtastggtgttcagcatttcaagtatactttgtttacgtgtaaggacataagtagaataacaataggtttgtaagtagaaaaaaacaggttagttatagaagta

SEQ ID NO: 547305 - DNA, 201 bp, Homo sapiens
tatcctcagcataattagcacttgggaggtaatcaggcaaatgtggaataatttggaatgaagctgttttaaaaagatgtggtttttaaacttattttttrtaatttcctttcattatatagtcttattttcttaaatagaaattgggcactaccatcagtagcacctttctatcagtactatatatcaaagaagatttca

SEQ ID NO: 547306 - DNA, 201 bp, Homo sapiens
ctagaagatattataagaaacaaaagaagtgggcatttttagatatggtgatcaaggaaatctttattaaaagatacaaagtgtgagccctgaaaaatgartggagtttctattaccctgaaaggggctagaaggaacaatccaaactaaaggaatggtatgaggcaaaggataaaggtaggaaaatcagcagataaataa

SEQ ID NO: 547307 - DNA, 201 bp, Homo sapiens
ggatgttgtgagcagcaacagaccactgaaatatcaaggagaacaggaactgagaaaagaccattatatttggttaggtctttagttgaaattccacagarggtgggagggtgggagccaggttgttctggggtgatagaatggatggtaaggaaccattggcaatagttatagaccatgggactttttttttttaatgtg

SEQ ID NO: 547308 - DNA, 201 bp, Homo sapiens
gaccagggcttcatataaagctacaatgaagacataatgacacctcctttctttattatcacaccttttaccaaggtcactctgagtaagtctatcttgtrttatgcaggtgggaatgaattttgttcagagttaactgcactaggaattttcctagttattattaaaaacagtcacagaatattgttgctctttgcttat

SEQ ID NO: 547309 - DNA, 201 bp, Homo sapiens
ttaattgtggcaatcattctataatgtatgtgtgtatcaaaacatcatgttatattccttaagtatatataatttttatttgtcaatcgtacctcaacaaygcttgggttgggaagtagtacccctgcaaagggatcaaatgtaattggatcagactgtgaagcaaggtaacccacagttgattatcaaaataaatagaac

SEQ ID NO: 547310 - DNA, 201 bp, Homo sapiens
gcctcaaaactaccccttctgtgagtttgacagagagtagaatggtggtgatgaggggctgggggtgaggggagtaggggaagaagggagacgttggacarggggtgcaaattttcagttacaaggtgaataagtttgggagatctaatgtacagcatggtaactacagttaatatactgtatacttgaaacttgctgtga

SEQ ID NO: 547311 - DNA, 201 bp, Homo sapiens
ttgagagcagatgggagaaggccaaaagagaagagagtaggagacactggattaaaataatgactttaattatgcctcttggtgggctatttactgggtayaataaatggcattgtagcatatttaaaaataattcatgacttaggatatttttatgtagtgacaacttataaagtttttttgaagacaactttgttttta

SEQ ID NO: 547312 - DNA, 201 bp, Homo sapiens
ggggtttcaccatatttcccaggctggtctcgaactcctgacctcaagttatctgcctgcctcagcctcccaaagtgctgggattacaggcatgagccacygtgcccagccaacaattttaatttttgaatgtttatcttgtgtcctatgaacttgccaaatccacttactagttctaggagttttcctgcagattccatg

SEQ ID NO: 547313 - DNA, 201 bp, Homo sapiens
gaaaggagaagcaccaagaacatctcctggtgcagtgggaagttaacagacatttttagtgtgctcttgttgctgagaaacatggcataggaaaagccacgaacaaagatgaaaaacacaacttgaagtttatctgtttcacgtcctgtagtttgtctgtttgttttaaaagaaagtagctgaaataataagggtagggta

SEQ ID NO: 547314 - DNA, 201 bp, Homo sapiens
cgttctttgtgcatttattggtaaatatattgtatttcatctgttataggaccaatagtacaattatatttgtatcatcttatgtaatattatataattgrttttaaaatcagttcagatggaaaagagatgcagctatactgtcttttataattacataattatttttattgttgttctttgctttttgtgtgtggtttt

SEQ ID NO: 547315 - DNA, 201 bp, Homo sapiens
caacaacaaagccagcccagagttaaggcgtggggtaatggacttcacctcttgatgaaagaagcccaaagaatttgtggtcacctttttcaaccttgcayagaaattaatctctccttcagttaaaatagaaaccactaagacttgcctcttggagtaagaatcattcagtgttcagtttgctgatgctgatacggtaaa

SEQ ID NO: 547316 - DNA, 201 bp, Homo sapiens
accatgtcactgcaaaagctataaatgtcctcagaggctgctctatggagtagccattctgtttctttactttcttaatcaacttgctttcaaaaatgtcmtgagatacgctttcccatttcccacgttaaaatcaagtttatggcccagtgggaggatcacctgaggccaggagtttgagaccagtctgggtaacattgt

SEQ ID NO: 547317 - DNA, 201 bp, Homo sapiens
aagaggttccacctgattatgtagcagatcagaattggttaccctgttatgggaccatctattttttttaggaccacaaggcagatggttctcctcacacytctctgttagcaatcatttgaccaggcacatgtacatgacatcagatgactccaataagtgtggtgcatgtgtggcaactcaggaataaacaggcagctt

SEQ ID NO: 547318 - DNA, 201 bp, Homo sapiens
ctcatttgtcactttaaggtgaggggatttggaaaaggactggcatgtggagaaggaatatcggtcaggaatctggactttgttgctagatctgccacttyctgattcagccctgatcgtgcagagctgaccaaggccgtggtccccaggctcccctgactccaggctgcccacgctcaccgggacaggccggctcgctcc

SEQ ID NO: 547319 - DNA, 201 bp, Homo sapiens
gcacaactgaacctctgtatcctttgaacagcactccctatttccccctccagtcaatccttggcaactaccattttactttctgtttctgagtttaactrtttagagacatcttgtaagtggagtattgagtagtatttctctggttgtcttatttcacttagcataatttcagtgtttgtccacgttgtagcatatgac

SEQ ID NO: 547320 - DNA, 201 bp, Homo sapiens
ttccctctacacactgctttagctgtgtcccagagattctagtatgttgtgtctttgttctcattggtttcaaagaacatctttatttctgccttcatttygttatgtacccagtagtcattcaggagcaggttgttcagtttccatgtagttgagtggttttgagtgagcttcttcatcctgagttttagttgattgcac

SEQ ID NO: 547321 - DNA, 201 bp, Homo sapiens
tctttgaagcaattgtgaatgggagttcactcatgatttagccctcagtttgtctattattggtgtataagaattcttgtgatttttgcacattgattttstatcctgagactttgctgaagttgcttatcagcttaaggagattttgggctgagacaatggggttttctaaatatacaatcatgccatcttcaaacaggg

SEQ ID NO: 547322 - DNA, 201 bp, Homo sapiens
gtctttcttgtaatagccattccaacaggtgtgaggtggtttttactttgcatttctttaataattagcaatgttgccctaatgattaccaatgtcgagtkttttttaacatacctgttggccagttgtatgacttcttttgagaaatgtctattcaggctctttgcccatttttaaattgggttatttgttttcttccta

SEQ ID NO: 547323 - DNA, 201 bp, Homo sapiens
ttgtttatgtaacattctcaaaatgacaaaattgtacacattggtgggaagaattgagggcggggaaggagaatataaaggggcagcagaagaatggtctygttgtaatggaacagttctatatcttgaggtggtagttacagagatctgcacatgtgagaaaaatcatatagaacaccatgcacatggtgtatctgggta

SEQ ID NO: 547324 - DNA, 201 bp, Homo sapiens
ctaagccaactttgcatttttagataaatcccacttggtcatggtatgtaattattttttatgttgctggatttggctttctagtttttttttttttttttttgaaggattttgtgtatttctaggagcgtctgtaattttcttttcttgtaatgtgttgtctgtttttaatatcagagtgagactggcctcatagaatga

SEQ ID NO: 547325 - DNA, 201 bp, Homo sapiens
gcgcagggatcgcgcctagtctctccgcctgcggagccgtggggtcccggcagcccgcaggagtgctaagtaagggtccttcagggcgggaaccagattcsaggcagggacgcaggctacgttcgaataaaagtaccgaaggtcataaggccccagttcagatgggacttccccgcgtgacagcacagagataacggccag

SEQ ID NO: 547326 - DNA, 201 bp, Homo sapiens
ctgtcgccaggctggagtgcagtggcatgatctcggctcactgcaacctccgactccctggttcaagcgattctcctgcctcagcctcccgagtagctggrattacaggtgcccgccaccacacctggctgatttttgtatttttagtaagacagtatttcaccatgttggccaggctggtcttgaactcctcgactttaa

SEQ ID NO: 547327 - DNA, 201 bp, Homo sapiens
agttttccttaattggtgaatggttaaactgtggtattccataccatggaatattattcagcaataaataggaatgatcctatttggttcaaataacaacktgcgtggatctaaaggacgctgtgctgagtgaaagaaagcaatctcaaaagatcacatgctctatgattttgtttatgtaacattctcaaaatgacaaaa

SEQ ID NO: 547328 - DNA, 201 bp, Homo sapiens
atctcccttgtctgttagtaacattacctgaaattccaccattagggattataacttttagattctagaattatattttcagacatcacacatcaagcttyttaggctcaagtgatcctcccacctcggccttccgaagtgctggggattttagcatcctagtatgaatttgtttatgagattgcataacactggatggat

SEQ ID NO: 547329 - DNA, 201 bp, Homo sapiens
tacatgaaaaagatgctcaacatcatcaaccattaaagaaatgcaaatcaaaaccatgagataccacttcatacccattagggtggttgttataatggaarataacaagtgttggtgaggatgtgaagaaattggaacacttgcattgccgatgggaatgtaaaatggagccaccttggtgaaaatcatttgatggtttct

SEQ ID NO: 547330 - DNA, 201 bp, Homo sapiens
agcaaaactccatctcaaaaaaaaaaaaaaaaaaaaaaaaaaaaagaaaagaaacaggaacagaattggttggaaaatataggtttgggtttttaaaaatmtttttacttagttacttaaaatttgaaaattcaaatggcaaggtgaaatctagttattacttagtgaaataactttcttacttttttagggctaatgtta

SEQ ID NO: 547331 - DNA, 201 bp, Homo sapiens
atttgcttctggtgagggcacgagacagcttgccatcttggtggaaagcaaagggggagccagtgcatcacatgacaagggcaggagcaagagaaaagggraggtcccagatttctttgaacagccagatctcatgtgaactaactagcgagatctcacttatcaccaaggggatagtgttaaaccattcatgagggacct

SEQ ID NO: 547332 - DNA, 201 bp, Homo sapiens
aaacttttttttttttcatttttgaagcttagtttcactggagacaaaatcttggctgataattgttttgtttaaggaggtaaaagataggaccccaatcycttctagcttgtatggtttctgctaagaaatctgctattaatctgataggtttttctttataggttactggatgcttttgcctcacagatcttaagattc

SEQ ID NO: 547333 - DNA, 201 bp, Homo sapiens
catgatcttggctcactgcaagctctgcctcccgggttcacgccattctcttgcctcagcctccccagtagctgggactacaggtgcccaccaccacacgyggctaattttttgtatttttagtagagacggggtttcactgtgttagccaggatggtctcaatctcctgacctcgtgattcgccctccttggcctcccaa

SEQ ID NO: 547334 - DNA, 201 bp, Homo sapiens
tgttatttcttttcttctgcggggtttgagtttggtttgttcttgtttctctagttccttgaggtgtgaccttagattgtgctctttcagactttttgatktaggcatttaatagtatgaactttcctcttagtaccacttttgctgtatcccagaggttttgataagttgtggcactattattgttcagctcaaataatt

SEQ ID NO: 547335 - DNA, 201 bp, Homo sapiens
attatctttcagttaaaatatagcatacccagaaatcctggaaaagaaagatatctaactgctttttaaaaattactgatatataattttttaaatgttgyatttaaaaaataccaaattaaatgtttttaaggatcctgtttgttttcaatttcacttagaaaatgatgctatagtttagcttgaaataatggcctaatt

SEQ ID NO: 547336 - DNA, 201 bp, Homo sapiens
tgtattttataatgaaaattatttgttgagttcagtttctgagaggattattgaaaagcagttgtaggaacccttggcacacagtgaacaattttcctgasctcaatcacaggctggtaatgccacacttaactaggaatcacacttctagtaatcttactttacatttgtaaaaaacttcaacttttaactgaaatagct

SEQ ID NO: 547337 - DNA, 201 bp, Homo sapiens
agatccaagatatgtgcaatttcagctcttctaagtttttgtcaaattgctctctaaagtgtcattctgccataagaaatcctgagttattttctcaaatrtgaatcaatacttgatattgtcagacaattttttccatactttttgtcttgtgcttccttgattgcaagtgaaattgaggaccttttcatgtttctttgc

SEQ ID NO: 547338 - DNA, 201 bp, Homo sapiens
agtgccttttaaaaaattaccaaaattacaactaattttttagaatgaattcaccaaaccataataaaatatttttttaaatagcctaataatgattactsggtctattatattgtttgtggagctgaatttttttccctccttatttccctactagaaatcagaccctacttcagttactctgctcatgatagaattttg

SEQ ID NO: 547339 - DNA, 201 bp, Homo sapiens
tttttaaaaaaggcattgtaatccaaagaatcaggaagatttgagaaaagacaagagaagccaacactgaaatggaacggctgttacaattatctggcaargactttaaagcagtcatataaatgcttcagcaagcaattatgaacatgctggaaacgaatgaagaaaagttgtctcaggaaaaaataagagatgtaaaga

SEQ ID NO: 547340 - DNA, 201 bp, Homo sapiens
aatgatcatttccttatattctttccaaataatcttcagtaccgtctaggtggcatacataagtgcttaaacttttcttattctttctataagggaagtamtttcctacttcctatattaataatctccccacccccgaagtcttcaactccagctgatagttttaaacttagaacattctttcctatttgtttttaataa

SEQ ID NO: 547341 - DNA, 201 bp, Homo sapiens
cttacaatgctaggtctcaatttttaaaaaaggcattgtaatccaaagaatcaggaagatttgagaaaagacaagagaagccaacactgaaatggaacggmtgttacaattatctggcaaagactttaaagcagtcatataaatgcttcagcaagcaattatgaacatgctggaaacgaatgaagaaaagttgtctcagga

SEQ ID NO: 547342 - DNA, 201 bp, Homo sapiens
taaaccagaagggtaacaaaatcagaagtggagagagcagttagaagaggttgtaaccataatttaggcaagaaatgcaaaggattccagctgaggcctayggagtgttgcagtgagacttgtgggtggccagagggagctgtggatacaggggaggcaccatatagaagtaaagagatcctgaaagcaggaaatagagaa

SEQ ID NO: 547343 - DNA, 201 bp, Homo sapiens
ctttgtatcactttcagtgtgtttagtttgcatcctgaaagtctgtgttctttaactgttgaagattattaatttacttaaacagctataaagctgtaatrctttgttaatcataaaaaattatctgagatgttaaagtattttgtttaaaagtaaatgaataatgggatcctggaatagaaaaaggacattatgtaaaaa

SEQ ID NO: 547344 - DNA, 201 bp, Homo sapiens
agcttagtacttccttgctgaaggataaatatttgaataatcaaaaaatgagaataaaaaccttgagaaaccttaaagaaaagaataggtgttttttttttaaaaaaatggactacatattattctgttttaagtatgaatgtatggactgtgccttgttttttggttctcattagcactgtgattctttttaggaaagtt

SEQ ID NO: 547345 - DNA, 201 bp, Homo sapiens
tcctttctttattatcacaccttttaccaaggtcactctgagtaagtctatcttgtattatgcaggtgggaatgaattttgttcagagttaactgcactakgaattttcctagttattattaaaaacagtcacagaatattgttgctctttgcttatattacttccttctaaattccctttctctgaaatctgagatggta

SEQ ID NO: 547346 - DNA, 201 bp, Homo sapiens
gggcgcgcagggatcgcgcctagtctctccgcctgcggagccgtggggtcccggcagcccgcaggagtgctaagtaagggtccttcagggcgggaaccagrttcgaggcagggacgcaggctacgttcgaataaaagtaccgaaggtcataaggccccagttcagatgggacttccccgcgtgacagcacagagataacgg

SEQ ID NO: 547347 - DNA, 201 bp, Homo sapiens
ccagactgcgggaaaccaagttgactgaattccaacaatgagaatgccctgtttagaagtcatcacatcacttttaaagggttgttagggtttatgttctrgagagagtaagtactatgtcagggtaaattctctgctatcaaaaggaagaatttttggaatggaaaacatctaaaatataagagctaggatttacctaaa

SEQ ID NO: 547348 - DNA, 201 bp, Homo sapiens
cctggactctatccccttctctccacttttatgaccatcaccatcattcacttagacaaccatgtcactgcaaaagctataaatgtcctcagaggctgctmtatggagtagccattctgtttctttactttcttaatcaacttgctttcaaaaatgtcctgagatacgctttcccatttcccacgttaaaatcaagtttat

SEQ ID NO: 547349 - DNA, 201 bp, Homo sapiens
acagtaggtatgtgagtacacacgtatgttatccccatagccaaaaatcatacacatgtataaaaatagtcttatttttggaataagatatgaagaaaccrttaaatgataagttgttatgagttcaaggtaaaaagatcaaatcctgacctttttaccttgaacttgccacaccttatcacatcactttaggaactttta

SEQ ID NO: 547350 - DNA, 201 bp, Homo sapiens
gatcctgcatgcataaaggctaaagccttttttgccagaagccctttcttcttcctcactttccgcttccaaaccatgactacatcctgtcagacttcacstggactctatccccttctctccacttttatgaccatcaccatcattcacttagacaaccatgtcactgcaaaagctataaatgtcctcagaggctgctct

SEQ ID NO: 547351 - DNA, 201 bp, Homo sapiens
caaatgcaaaagaatggaaatgataacagtctcgcagaccacagtgcaatcaaattagaactcaggattaagaaactcactcaaaatcacgcaactgtatrgaaactgctcctgaatgataatgggtacataacgaaattaaggcagaattaagttctttgaaaccaatgagaacaaagacacaacataccagaatctctg

SEQ ID NO: 547352 - DNA, 201 bp, Homo sapiens
taaacctggtaagtctaaaagccatgctcctgaactcactctttccccccagggatcctgcatgcataaaggctaaagccttttttgccagaagccctttyttcttcctcactttccgcttccaaaccatgactacatcctgtcagacttcacctggactctatccccttctctccacttttatgaccatcaccatcattc

SEQ ID NO: 547353 - DNA, 201 bp, Homo sapiens
tcccagactgcgggaaaccaagttgactgaattccaacaatgagaatgccctgtttagaagtcatcacatcacttttaaagggttgttagggtttatgttstagagagagtaagtactatgtcagggtaaattctctgctatcaaaaggaagaatttttggaatggaaaacatctaaaatataagagctaggatttaccta

SEQ ID NO: 547354 - DNA, 201 bp, Homo sapiens
cccacaaagggaagcctatcagactaacattgggtctctctgcagaaaccctacaagccagaagagagtgggggtcagtattcaacattcttaaagaaaakaattttcaacccagaatttcatatccagccaaactaagcttcataaacaaaggagaaataaaatcttttacagataagcaaatgctgagatattttgtca

SEQ ID NO: 547355 - DNA, 201 bp, Homo sapiens
agacaagatcttccttctttatgaacaggtaaacttacaaaaaacaaattatataagtaataacattgagttctagagttatgtaattcttctttgagttytatgagactgcttaaacctgcaaatcaagttaatctaacatttggggattacatatgtttttaagatattcttaatgaaatgtaatacatttccaataca

SEQ ID NO: 547356 - DNA, 201 bp, Homo sapiens
taaaaaaggtgttgagttcttgatttgattttctgcatgattgctgttggtgtatagcagtgctactgatttgtgtacattgattttgtatcctgaaacttctgaattcatttatcagttctaggagctttttggaggagtctttaggattttctaggtctacgatcatatcatcagcaaacagtgacagtttgaattcct

SEQ ID NO: 547357 - DNA, 201 bp, Homo sapiens
tttttataatttcctttcattatatagtcttattttcttaaatagaaattgggcactaccatcagtagcacctttctatcagtactatatatcaaagaagatttcaaattccttatataattatagggtgcaaactgtgatgtagaacttttgaagacaacaacaagagatcgtgaagaacttaaatgcatgctggaaaaa

SEQ ID NO: 547358 - DNA, 201 bp, Homo sapiens
agcctgaactcccattcttgcctagcagtatctaggaacaccaccctttccagatatcaacagatgccaagtagaggaactggacttctactttgatctarcagaaataaggcaatgtcccttctttttagttggagcattgtcacaggaggcctgctaaaacataagatccagagtcttacaatgctaggtctcaatttt

SEQ ID NO: 547359 - DNA, 201 bp, Homo sapiens
tctcactaatagtctatcagctttgtttatcttctcaaccagctttttgtttcttttatcttttgtagtggtttttttttttttggttgtttccattttarttctgctctgatctttgttatttcttttcttctgcggggtttgagtttggtttgttcttgtttctctagttccttgaggtgtgaccttagattgtgctct

SEQ ID NO: 547360 - DNA, 201 bp, Homo sapiens
aaattacaggttgcgtttagttacaacatattttcctgacttaatttggggtgggagcctattttgaaacaagaagatagagaataaataactactaattyagagctcatttaaatgttatgggtctaaaatcattcaatttttatcttaaccattttgataaacatagagtcagagtcagtgagtgcaaactacgtgtca

SEQ ID NO: 547361 - DNA, 201 bp, Homo sapiens
tcaccaaattagtaaattgtgtctgtaacagagtaatttcccaaagctaattgttattacgtgttatttcttaaacattcttttaatgtaacaggactcttatagcaaataataaagcaattaaattatcaggtgaaacgttattgaagtcactgttaaagtaatttgaaatatgagtccaattgatgacctctaggattg

SEQ ID NO: 547362 - DNA, 201 bp, Homo sapiens
aaagtttaattttgtaggctttatcacactgcttcattatcaacctcaacaaattttttgacactttttattacgtaaataactgtgcaggttaatggggatagagagagtttttggacattgcttgttcttaagagtctaataaatgtgtgaggaagacatccagaaaaatttagaacataaattcttctatatatataa

SEQ ID NO: 547363 - DNA, 201 bp, Homo sapiens
atcaccaaattagtaaattgtgtctgtaacagagtaatttcccaaagctaattgttattacgtgttatttcttaaacattcttttaatgtaacaggactcttatagcaaataataaagcaattaaattatcaggtgaaacgttattgaagtcactgttaaagtaatttgaaatatgagtccaattgatgacctctaggatt

SEQ ID NO: 547364 - DNA, 201 bp, Homo sapiens
ttgtatcagtttactctcccaccggtgatacgtaaggacgctatatccatgttactgatctttgccatgtgatggttaaaagggggtatctcagtgttgttttaatttgtgtcactaaaggttgagattgaacatcttaatatttaggagccgtttctgtaaatgttcacattctttgccaatttttctattagagtactt

SEQ ID NO: 547365 - DNA, 201 bp, Homo sapiens
attgtatcagtttactctcccaccggtgatacgtaaggacgctatatccatgttactgatctttgccatgtgatggttaaaagggggtatctcagtgttgttttaatttgtgtcactaaaggttgagattgaacatcttaatatttaggagccgtttctgtaaatgttcacattctttgccaatttttctattagagtact

SEQ ID NO: 547366 - DNA, 201 bp, Homo sapiens
tgtcatcatatcttcctttacttcattaaccatgcatcattaggtccttgaacatatttttaatgcctactttgaagttttgcttgttaattatgacatcwggttgcttgaaaatgtgttctcctcaatcttacaaaataaagaatggggccaggcatggtggcctcatccctgtaatcccagcactttgggaggctgagg

SEQ ID NO: 547367 - DNA, 201 bp, Homo sapiens
tattgtatcagtttactctcccaccggtgatacgtaaggacgctatatccatgttactgatctttgccatgtgatggttaaaagggggtatctcagtgttgttttaatttgtgtcactaaaggttgagattgaacatcttaatatttaggagccgtttctgtaaatgttcacattctttgccaatttttctattagagtac

SEQ ID NO: 547368 - DNA, 201 bp, Homo sapiens
ggttgacaagaattcttggtattttgggttgttttgttttttgagctctttgaatatgttagatcactgctttctggattccattgtttctgcttagaagycagttgttaatattattggagttcctgtgcaattgacaagccatttttcccttgctgctttcaagatattttccttgctttcagcatttttataatgatg

SEQ ID NO: 547369 - DNA, 201 bp, Homo sapiens
tgttgaaataagggtccaatctcattcttctccataggcagtgttcccattatcatttgcagagatcgtcctttctccactgcatcttcttgacacctttrtcaaaggtcaattgactgtaaatgaatggatttatttctgggctgtctattctgttccattggtctctatgtctgctttttatggcactaccattctgtt

SEQ ID NO: 547370 - DNA, 201 bp, Homo sapiens
gctgtattccagacaacttaagactgtaacagaaactcttcctttgagcatgtaatttgcatttacttttagccagcagaatcataaaacacattgacatmgcgatcagcaaagaaccatgaggttgaggtttatttagctaaattgtaactttaatgatattcttttaagctaaatttatttactaattggccgggttct

SEQ ID NO: 547371 - DNA, 201 bp, Homo sapiens
acaagcctcttgacctacaagtgggtgagtgttgttgaaacctagagtgtaaggggagaagtgaagggaggagactaaataggcaggcagaggcttgtgtwacagacaaatgagtattggttatatcctttgggcaataagaaatcattaaagaattctgaggagaattttgtgttagaaagatacctaagcagaagaggt

SEQ ID NO: 547372 - DNA, 201 bp, Homo sapiens
attaaaggcattaagatattcaaacccatttctgccttgactgactccactacttctactccctcatcacgcctttgaaaaaggaaaatatagtttatttytcttacctttgctcgaggcctaatgcttaccttcttattagctctcacctaaatatcagtagtatacttctataagtaattggattggaacagctttttg

SEQ ID NO: 547373 - DNA, 201 bp, Homo sapiens
aagaggaaatgttctctataatgatacctcagagctgaactaacaaaggctactcagtgaaaactaatactgttcatatagagattacagaaataaattakcatggaaaagtctacattatagtgaataaagtgatttttttctagtatccatggtttaaaaagatgttttactacttgctaccaattaaaattagaaaac

SEQ ID NO: 547374 - DNA, 201 bp, Homo sapiens
gatattgacattagcacagtgtgattaactagtctaaaggccttattcagatttcactagtttttagatgcactcatttgtttgtatgtgtatatatatawtttttacaatccacacacagcacaactatgatcaagatgtgaagttgttccatcagcaccaaagaattcactccctcattatgcctatttatagttgtag

SEQ ID NO: 547375 - DNA, 201 bp, Homo sapiens
aagtgaattcccaatgacttggataataatgtttaatttttatcatatgttcagcattttaaagtaatagctaaagtttgcttttcaggaatctgagaacyggcaaatgatggaacaacttcgaaaagccaatgaagatgctgaaaactgggaaaataaagcccgtcaatcagaggcagataacaataccctcaaactgga

SEQ ID NO: 547376 - DNA, 201 bp, Homo sapiens
cgcgatctcggctcactgcaagctccgcctcccaggttcacgccattctcctgccacagcctcctgagtagctgggactacaggcacctgccacaatgccyggctaattttttgtatttttagtagagacggggttttcaccgtgttagccaggatggtctcgatctcctgaacaggccaactttttaaaagctcagaatc

SEQ ID NO: 547377 - DNA, 201 bp, Homo sapiens
tcttgctatttttaattcctagctgggcctgataggtaattttgcaaaagccccactttatttggtttaccaaagaggaggaagaaagtttaattttgtakgctttatcacactgcttcattatcaacctcaacaaattttttgacactttttattacgtaaataactgtgcaggttaatggggatagagagagtttttgg

SEQ ID NO: 547378 - DNA, 201 bp, Homo sapiens
agcatgattggttaggattgtcaggtggacttgtggtctcttgctatttttaattcctagctgggcctgataggtaattttgcaaaagccccactttattyggtttaccaaagaggaggaagaaagtttaattttgtaggctttatcacactgcttcattatcaacctcaacaaattttttgacactttttattacgtaaa

SEQ ID NO: 547379 - DNA, 201 bp, Homo sapiens
gaagacaagattagagaaaaaaggatgagaagaaacaaacaaagcctccaagaaatatgggactatgtgaaaagaccagacctacctttgattggtgtacyctgaaagtgacgagaatggaaccaagttggaaatatcctcaggatattatccaggaggacttccccaaccaagcaaggcaggccaacattccaattcagg

SEQ ID NO: 547380 - DNA, 201 bp, Homo sapiens
gcatgaagacaagattagagaaaaaaggatgagaagaaacaaacaaagcctccaagaaatatgggactatgtgaaaagaccagacctacctttgattggtrtaccctgaaagtgacgagaatggaaccaagttggaaatatcctcaggatattatccaggaggacttccccaaccaagcaaggcaggccaacattccaatt

SEQ ID NO: 547381 - DNA, 201 bp, Homo sapiens
tggaaggtctctgagaaggcggctgcaagcgggcaggagtggcgggtgcggggccgtggcgggcggagttgggcgctagcagcgggagcggctgtgagggrcagcggcgggcacagctgccggccggaagctcggcagcacgagttgcccctgtttcttgggaggttaggtttgagcccagttcctatggtcactgcttcg

SEQ ID NO: 547382 - DNA, 201 bp, Homo sapiens
catccagagcctggtcaatctcatcaaacaagtaaaatggagccgggtcacatttctgaatggcaaaaatcagagcaagggctaccaaggatttctgtccmcctgaaagctgttgcatttctctcatttcaccttgttttcctgtaaatgacaccctaattccaactccagtaaactgctcaactgatgggacactgcttt

SEQ ID NO: 547383 - DNA, 201 bp, Homo sapiens
ctccattttcttctagcagttttaccgtttcaggtcttatatttaagtctttaatccattaagagttgatttttgtatatgttgaaataagggtccaatckcattcttctccataggcagtgttcccattatcatttgcagagatcgtcctttctccactgcatcttcttgacacctttgtcaaaggtcaattgactgtaa

SEQ ID NO: 547384 - DNA, 201 bp, Homo sapiens
gctactggactggaaggtctctgagaaggcggctgcaagcgggcaggagtggcgggtgcggggccgtggcgggcggagttgggcgctagcagcgggagcgkctgtgaggggcagcggcgggcacagctgccggccggaagctcggcagcacgagttgcccctgtttcttgggaggttaggtttgagcccagttcctatggt

SEQ ID NO: 547385 - DNA, 201 bp, Homo sapiens
tactctctgcttctatgagctcaacttttttagattccacatataaacgagatcagtgtttgtcttactgtgcctggcttatctcacttagcataatgaamctctagggtcatccatgtggtcacaaatggcaggatttctttgtttttaaggctgaatagtatttcattgtatatctatataccacaagtttgctatcca

SEQ ID NO: 547386 - DNA, 201 bp, Homo sapiens
ggggagagtgctgctactggactggaaggtctctgagaaggcggctgcaagcgggcaggagtggcgggtgcggggccgtggcgggcggagttgggcgctarcagcgggagcggctgtgaggggcagcggcgggcacagctgccggccggaagctcggcagcacgagttgcccctgtttcttgggaggttaggtttgagccc

SEQ ID NO: 547387 - DNA, 201 bp, Homo sapiens
tgtgttgtctgtttttaatatcagagtgagactggcctcatagaatgagttagaaaatgtttcctcctcttctgtatttcaaaacagtttgtatggaattkgcattgattcttctttaaaggtttggtaaaaatttaccagtaaagccatctggtagagaagttttatgggaagttttaaaattacctctttatgggcagt

SEQ ID NO: 547388 - DNA, 201 bp, Homo sapiens
atcacatgatttttgtttttaagtttgtttatgtgatctgtcacattttttgacttgcatatgttaaaccattgctgcatacctggtatgcaactcacttsgtcatggtgtattatctttttgatatgctgttggattcagttagcaaatttgatgtttaggacttctgcatctatgttcatcagggatattggtctatag

SEQ ID NO: 547389 - DNA, 201 bp, Homo sapiens
tggaaaagggggctagcggctggttactaggagacgggacgctcggctcgggcgtctaggcgctgcgtgggcgtgcgcctgcgcggcgcggatgggccagraaggggtccctcctaggtgccctgtaaggcaggcaggtagacgtacgcgtcgctccgtgcgtaggagcgcgcgcacggcttgtagaccccgcgagaagga

SEQ ID NO: 547390 - DNA, 201 bp, Homo sapiens
ccatccaggtgcggcagcctcaggcagagattaagaaatgagtcgtggaaaagggggctagcggctggttactaggagacgggacgctcggctcgggcgtmtaggcgctgcgtgggcgtgcgcctgcgcggcgcggatgggccaggaaggggtccctcctaggtgccctgtaaggcaggcaggtagacgtacgcgtcgctc

SEQ ID NO: 547391 - DNA, 201 bp, Homo sapiens
cgggcggatcatgaggtcaggagatcaagaccatcctggctaacacagtgaaaccctgtctctactaaaaatacaaaaaacaaaaaacaaacaaaaaaaaagctgggcgtagtagtgggcgcctgtagtcctagctacttgggaggctgaggcaggagaatggcatgaacccgggaggcggaggttgcagtgagccgagat

SEQ ID NO: 547392 - DNA, 201 bp, Homo sapiens
ctaaatccattgcatcctagcgggaggggctagaatgactgtgtaaatgcccatgggaagggatcggggtaactatgtgcataccctgaggagcaacatcrgaggctatataccgcaagggaaacagacatcatagaaacaatccagacaaataaataaggaaataagccaaccataacaagccccaagatggggaggatc

SEQ ID NO: 547393 - DNA, 201 bp, Homo sapiens
atctgccatactccatctgccccataaattgtattttaagagtttgatttcctttttatttctacattaacttctttcatttaattacaaaacattggttrttatagcaccacaaaatttatatgttctaggaaagtaatcagcttgttttttagaggaaaatattttagatatatttctatgtatcacaaatttcataaa

SEQ ID NO: 547394 - DNA, 201 bp, Homo sapiens
tggttttcctggtatattcctacagtgaatcttggagcaaaagatcacaatatgagtctctaacactgttctgtccttccatgtgggagctgcacgttagrcctgtctcctatctgccatactccatctgccccataaattgtattttaagagtttgatttcctttttatttctacattaacttctttcatttaattacaa

SEQ ID NO: 547395 - DNA, 201 bp, Homo sapiens
gatctgagatgacttataaaaacaaaaatgtatatggctctttctatccatgcagtgatagtgagtgtaaaatctgcttacttcactattgaacactattmtgttcactatctggagtaaataaagaagcttattaaaacagggaaaagtgtttttacaaaactgctttcctttcctttcttggtatctcaaataattggt

SEQ ID NO: 547396 - DNA, 201 bp, Homo sapiens
tgtcctttgactgacacctattatctagacaacagacatcacattgaatttactttcctctaaccactgctctgtttcctgcctctctagttttgcctttyccaggttgtcatgtaaatggaatcatacagtatgcagcctctagtggttgactttcacccagcataatatatttcagatttatccaggttgttgcatgta

SEQ ID NO: 547397 - DNA, 201 bp, Homo sapiens
tagttggcaaggccagcctcgctcctgcagtgccttgctcagattttgccccaggccgtgagctaccccactgaaaaagcaagcacagcatttgaacctgrcccttccctgtctggctattcttgccctggctcctatctgcagcagcttccactcgtcccctggactctgctcaagaaaatttgtgcccagtcaaaacca

SEQ ID NO: 547398 - DNA, 201 bp, Homo sapiens
gtggggaatagccagtagcaagaggccttgcccagctcccatgtagttggcaaggccagcctcgctcctgcagtgccttgctcagattttgccccaggccrtgagctaccccactgaaaaagcaagcacagcatttgaacctggcccttccctgtctggctattcttgccctggctcctatctgcagcagcttccactcgt

SEQ ID NO: 547399 - DNA, 201 bp, Homo sapiens
caccgggacaggccggctcgctccctgcaggctgcagcgggagggctggacctggaagcctctcttaaaacgggccctggctgcagcaggagctgcgcccsaaagcagctctgagagtaaccggttcaccgaacatgggtccagaatgatgcccaagccctgggaaaagtggcacaaagccaccgccgcgaagcagcaggt

SEQ ID NO: 547400 - DNA, 201 bp, Homo sapiens
agtcgtggaaaagggggctagcggctggttactaggagacgggacgctcggctcgggcgtctaggcgctgcgtgggcgtgcgcctgcgcggcgcggatggsccaggaaggggtccctcctaggtgccctgtaaggcaggcaggtagacgtacgcgtcgctccgtgcgtaggagcgcgcgcacggcttgtagaccccgcgag

SEQ ID NO: 547401 - DNA, 201 bp, Homo sapiens
ggtcttgaactcctgacctcaagtgatccacctgccttggcctcccaaaatgctgggattataggtgtgagtcaccgcacctgccacacaagagtctttaraagtgaaagagggaggtagaatgtgttagccatgatgcaatgtgaggaggacttgactggccatttttggcgttgaatatagactgggatcacaagccaa

SEQ ID NO: 547402 - DNA, 201 bp, Homo sapiens
atgccctttcctcttttaaaatgaatattaaagagatttccaactaccagatattttcataactgatatacaaaacaaggtttttaaacaggttgttttttctcatattaaatattggtgacataaaatggtaccatctgcaagacaaactattaacacttggaaagaacacttttctaactctaaaatggattctatgtg

SEQ ID NO: 547403 - DNA, 201 bp, Homo sapiens
agacataatgacacctcctttctttattatcacaccttttaccaaggtcactctgagtaagtctatcttgtattatgcaggtgggaatgaattttgttcasagttaactgcactaggaattttcctagttattattaaaaacagtcacagaatattgttgctctttgcttatattacttccttctaaattccctttctctg

SEQ ID NO: 547404 - DNA, 201 bp, Homo sapiens
cttcatataaagctacaatgaagacataatgacacctcctttctttattatcacaccttttaccaaggtcactctgagtaagtctatcttgtattatgcasgtgggaatgaattttgttcagagttaactgcactaggaattttcctagttattattaaaaacagtcacagaatattgttgctctttgcttatattacttc

SEQ ID NO: 547405 - DNA, 201 bp, Homo sapiens
gcagttttaaaggcacgatttaaaatgtgaaatccttctgaagatatgcaatttattggtcttttgcagtttattggcagtgatcttttacagaacaaaartgcaaaatgtaagaaagtaaagtatcataaagcagaatcccaaaatggaaatgtaacatacaaaactgatacaccagaaatattgtgaaatacggatgtc

SEQ ID NO: 547406 - DNA, 201 bp, Homo sapiens
gaattacgttctgtaaataataaaaagcattgtctttttggcttatgtcccattcaacaattgtttttcactctcaatattccctacaaacacatttgttyagtatttttctgattaataaaatatagcttccccccggaaaagatgccctttcctcttttaaaatgaatattaaagagatttccaactaccagatatttt

SEQ ID NO: 547407 - DNA, 201 bp, Homo sapiens
aaatggtaccatctgcaagacaaactattaacacttggaaagaacacttttctaactctaaaatggattctatgtggggggaaaaagcagttttaaaggcrcgatttaaaatgtgaaatccttctgaagatatgcaatttattggtcttttgcagtttattggcagtgatcttttacagaacaaaaatgcaaaatgtaaga

SEQ ID NO: 547408 - DNA, 201 bp, Homo sapiens
attatcatctctcttagattcataggagtctagaattgtactagctttgggctatccttgagagaattgagaaaatagtcactgaattaattttatctagytctttctcccacagaaccccatgtgagaaaggttgtataagagtttactttgttccatccatatccttagcaacatttagtgttttcagtctctaatttt

SEQ ID NO: 547409 - DNA, 201 bp, Homo sapiens
tggcctcccaaagtgctgggattacagacatgagccaccgctcccggcctggatgcacttattctaatataccagcttctgcttgattttgtaatcagtgkgttttgtttcgtttttaaatgactggccatctcaaatgtcttataattttggccctgggacacattttgccatggagatataagttattgtgtaaaacaa

SEQ ID NO: 547410 - DNA, 201 bp, Homo sapiens
tgtttcgtttttaaatgactggccatctcaaatgtcttataattttggccctgggacacattttgccatggagatataagttattgtgtaaaacaatgctyttgggtgactaacaatatcagcctctttgagttcatggtatggggggatgggagagacgctgatgccataaaaccactatcactttctgcctcatataca

SEQ ID NO: 547411 - DNA, 201 bp, Homo sapiens
cttggctcactgcaacctccacctcccaggttgaagtgattctcctgcctcaacctcccgagtagctgggattacaggcatgtgccaacacacccagctartttttgtgtatttagtagagacggggtttcaccatatttcccaggctggtctcgaactcctgacctcaagttatctgcctgcctcagcctcccaaagtgc

SEQ ID NO: 547412 - DNA, 201 bp, Homo sapiens
ttttacttccaattatatggtcaattttagaataagtgtgatgaggtgctgagaagaatgtatattctgttgatttggagtggagagttctgttgtctgcytggtccgcttggtccagagctgagttcaagtcctgaatacctttgttaattttctgtctcattgatttgtctaatattgacattggggtgttaaaatctc

SEQ ID NO: 547413 - DNA, 201 bp, Homo sapiens
aaatgaatattaaagagatttccaactaccagatattttcataactgatatacaaaacaaggtttttaaacaggttgttttttctcatattaaatattggkgacataaaatggtaccatctgcaagacaaactattaacacttggaaagaacacttttctaactctaaaatggattctatgtggggggaaaaagcagtttt

SEQ ID NO: 547414 - DNA, 201 bp, Homo sapiens
ctctttgagttcatggtatggggggatgggagagacgctgatgccataaaaccactatcactttctgcctcatatacacctgctttgtcagtttttcaccytttgctaccctagatgaagagacatcaggaggctctattagtctattcttgtgttgccataaagaaatacctgagtgtgggtcattttaaaagaaaggaa

SEQ ID NO: 547415 - DNA, 201 bp, Homo sapiens
catgtttcttcacagacacacacacacttgcacacacacatacttgcagaggcacatttaaaggtcagggaggaggtccagcaaggtcagggaggctttcytcaattattccctcaaataagttttctaaacttttagatttcttttcttcctcaggaacactagttattcttaggtttggccatttaacataatcccaaa

SEQ ID NO: 547416 - DNA, 201 bp, Homo sapiens
gtggtgatgaggggctgggggtgaggggagtaggggaagaagggagacgttggacaaggggtgcaaattttcagttacaaggtgaataagtttgggagatstaatgtacagcatggtaactacagttaatatactgtatacttgaaacttgctgtgaatagatctcatgtgttcttaacacacacatacaacagtaactag

SEQ ID NO: 547417 - DNA, 201 bp, Homo sapiens
ttagactgttttgtacatattgttaccacctgtattatttaaacttcatacaatctaagtgcactactcttagatttgccccacttcatttttccatgttrtagtttccttccagtttaatatatatgtatacatacatatatataattttattcttacagcacttaaatgcagaaaggtcttacaagtcccagatttcta

SEQ ID NO: 547418 - DNA, 201 bp, Homo sapiens
gaggaaaacaggtgagtttgattactcataattgagaatttctattcaatgaaaaaaatataaacaaaaagatagataagagactggaaggagatattttstgtgtccaaagctgatggtatttaatggctggaataaaaagagaacacctagaaattagcaaggaaaaagaaaacccaatagaaaaatgggcaaaggata

SEQ ID NO: 547419 - DNA, 201 bp, Homo sapiens
cggctggttactaggagacgggacgctcggctcgggcgtctaggcgctgcgtgggcgtgcgcctgcgcggcgcggatgggccaggaaggggtccctcctakgtgccctgtaaggcaggcaggtagacgtacgcgtcgctccgtgcgtaggagcgcgcgcacggcttgtagaccccgcgagaaggaaggtcgagccaggtac

SEQ ID NO: 547420 - DNA, 201 bp, Homo sapiens
gaggagcccggggagggacccggagctccaggtagaagctgcggaggtgcgcggggtggggagagtgctgctactggactggaaggtctctgagaaggcgkctgcaagcgggcaggagtggcgggtgcggggccgtggcgggcggagttgggcgctagcagcgggagcggctgtgaggggcagcggcgggcacagctgccg

SEQ ID NO: 547421 - DNA, 201 bp, Homo sapiens
ggagcggctgtgaggggcagcggcgggcacagctgccggccggaagctcggcagcacgagttgcccctgtttcttgggaggttaggtttgagcccagttcmtatggtcactgcttcgcgtcctcccgcagctctccgcttggttgttggggagactgttcagtttagaaacgctctggaagctctggtggagccgaggaat

SEQ ID NO: 547422 - DNA, 201 bp, Homo sapiens
ccaccatgcctggactggtttgaaccttttataacaaaacccagatcacagcagtcctctgctcaacacactctagttgcttcccatatcagagaaaaaaattatctacatatctggtccccagctgtggtaggcagaataatagtcttcaaagatgtctttgtcctaatccccagaagctgggactatgttatgttatgt

SEQ ID NO: 547423 - DNA, 201 bp, Homo sapiens
attagatttcatttcagagtgaatcacagattatcaggtttctttttaattattatttatttatttatttatttatttattgtagagttgggttcccactrtgttgttcaggctggtctcaaactcttaggctcaagtgatcctcccaaagtgccaggattacaggaaaaacacccagctgaggtttcttttttaaattaa

SEQ ID NO: 547424 - DNA, 201 bp, Homo sapiens
cacaaaagccctggggtgggcaagcatccggtatgttcagggggaaaagcaaaggggccactgtggctgaagggcagggagcaggggagggacagcagctsggatccgggaccagaccacagacggcctggcagatcaagtgttgaccttggttttcactgggcgtgattcatggagccactgtcaagttttgaggtaaag

SEQ ID NO: 547425 - DNA, 201 bp, Homo sapiens
ctgtgttcacgacgatgattccctgcactcccttctggctctgcagtcgcttcagtgtctcctccacctctgcctgccagaaaacaagaccaaggttaggwgaggccgataggcaggattaacttcctcataccccaggcagatgaatcatacgtttgtcttccaacaacaaacaagtaatactcaggcacctggcacacc

SEQ ID NO: 547426 - DNA, 201 bp, Homo sapiens
attgtatctacctcacagagctgggaggaggcggaggaaatacaagatacataaagtgcttggcagagcctgccacaaactgagctcccgggaaacgttgscagggttgccatcgcgcaccaaggccccaaaactctaggctgcagggccgccgcccacccctcgcccatcatctcttcctggccgaggctgggctcccgc

SEQ ID NO: 547427 - DNA, 201 bp, Homo sapiens
tccgtgccttcaggatgaagctgtgcatgaggctggcatactgggtggtggtggggttgtccatggtgctcttgatgggaatgcctgaggggagagcagayggagactgagaggatgtggagccccttctgccgagctcccacccacacccctaattggggagaactggaatagcagttctcagtcaatgccaccatccgc

SEQ ID NO: 547428 - DNA, 201 bp, Homo sapiens
ggagctctgagatcccctcatcctcggaagactgaaggcctggcgtggggtggtgggcggccgccagccacaagaccccggcgcacgctcaccatttccgwccgatccggtagccccgcgtagcgaacacttagcgagtcctgtgcctttctgcgcctgcgcaaaggtttctgtcaaaacggacagctctagctgcctatc

SEQ ID NO: 547429 - DNA, 201 bp, Homo sapiens
agactagaagtcatatgactactgtaagtggttgcctctaggtgatgacacggtttcttttttcaatttttttattacaagctctagatttctaaataagrtttttgaaaaagtaatatattcacatggcttaaaatttgaaactttttcaaattttgcccaagctgtgaggattacaaacacaaaacctgtaacggcgtt

SEQ ID NO: 547430 - DNA, 201 bp, Homo sapiens
atgtaaacgagacactgatgtgggggccctgagaatgggacgcaagttaaagacacacacacactaactgagacattcataggcatttcatgccaggcacyattctaaaagcttcccctagaggaaggcagaattatgacccacattttacaaatgagaaaacttaacagagaaagtggcttatgcccaaaaccacatagc

SEQ ID NO: 547431 - DNA, 201 bp, Homo sapiens
gacgggtaagcattttggttatttttagttaaagaaaaacagctttctccaagggcgacaaagtgaactgaaggtcagaaggaagctgggtgcgggcttcmtgcaagctcttgctccaaaacctggaagtgaggagagggcgctccggagctctggggaaggttggtgcacacaggggttccgttggtgggggagaagagc

SEQ ID NO: 547432 - DNA, 201 bp, Homo sapiens
tgatgagccacagagaatgtgccatgaggtctgttcctacatggggaggtagaagaccccttacctggtgcaaccataatttcatttttcttggagcgaawtcgaaggaaggtgagatcgttctgggggtcgatgtcacgcacggtgctccgtgccttcaggatgaagctgtgcatgaggctggcatactgggtggtggtg

SEQ ID NO: 547433 - DNA, 201 bp, Homo sapiens
cgcaggaggcttctctgacatcagcccctctactgggcaccgaggcccccagccttcgcagcactgaccacaatgcagtgcaactgtttaggtcacgttcrtctcctcctccagacgcaaggcaccctggaatcaggaaaccacaccagactttatagccccagtacctcgcataggataggctcaataaatactgaagga

SEQ ID NO: 547434 - DNA, 201 bp, Homo sapiens
gtggtcactgctggacagtactcactggacagtactcattctaccctgctcgccctcctggaaattcatcatggaccaaagtacagtgacatttgcaatascagaatgcagaaagaactaaaaatgcctaacaattagggaaaaggccaagtagattatggaacatccactaataggaatacacatattaaccatggtgat

SEQ ID NO: 547435 - DNA, 201 bp, Homo sapiens
gaggactgtttccttgagatgaaccattaagtggacttattcactggacggtgcctactgtcacagaggtgaggcatgcggctcacactgagccaccgcaggtcatgattgggccagcaggtgcctgtgaattgcctgtgacatatgagcagaagactccatccatgggaccccaagagcccgccagctgacaggcacttg

SEQ ID NO: 547436 - DNA, 201 bp, Homo sapiens
taatttgtttatgtaaaccatgaagcaatattttaaaaagctcaagtgtaaacatatgcccaagggtaacaactatgattatggtcctctggaactgtgcyggacgaggctgagtaagcatggaagactgaagtgtgatctgtcagggtggtgggattgagcggattttccctttgtgaggacactggaggtggctggtct

SEQ ID NO: 547437 - DNA, 201 bp, Homo sapiens
aaaaactaacaaaatcaggtttttatttttttgtccaaaaaaagagagactctcattcatagtgcttagaattgaaaccaggaagcgcttttacaaatttsttttttttgagacggagtcttgctctgttgcccaggctggagtgcagtggctcactgcaacctctgcctcccgggttcaagtgattctcctgcctcagtt

SEQ ID NO: 547438 - DNA, 201 bp, Homo sapiens
taaatccacttatttacggccaactgattttcgacaaaggcatcgaaaaaacaaaacaaaacaaaaacaacaacaaaaacgaaaaaaaaaacctaccatamatcagcaataccactactgggtatttattcaaaggaacggaaattagtacatcaaaggcatccctacatcctcatgttcatattgcagcactattcataa

SEQ ID NO: 547439 - DNA, 201 bp, Homo sapiens
aaaaaaaaaaagaacactggaggtgttaaaaattaaaaaggcctaaaattagatcagattcatgaagggcttagtgaacagcaagtgctatgctgtgttayggctgcttctgggcctgcctgggtgcgggtcatggcgggagggagggcgtaccttctgtgttcacgacgatgattccctgcactcccttctggctctgca

SEQ ID NO: 547440 - DNA, 201 bp, Homo sapiens
caaccataatttcatttttcttggagcgaattcgaaggaaggtgagatcgttctgggggtcgatgtcacgcacggtgctccgtgccttcaggatgaagctrtgcatgaggctggcatactgggtggtggtggggttgtccatggtgctcttgatgggaatgcctgaggggagagcagacggagactgagaggatgtggagc

SEQ ID NO: 547441 - DNA, 201 bp, Homo sapiens
aaaggaacggaaattagtacatcaaaggcatccctacatcctcatgttcatattgcagcactattcataatagctaaattatggaattagcgtccatcaayaggtaaatggataaagaaaatgtgggccaggcgtggtggctcacgcctgtaatcccagcactttgggaggctgaggcgagcagatcacgaggtcaggaga

SEQ ID NO: 547442 - DNA, 201 bp, Homo sapiens
ggcccccagccttcgcagcactgaccacaatgcagtgcaactgtttaggtcacgttcgtctcctcctccagacgcaaggcaccctggaatcaggaaaccasaccagactttatagccccagtacctcgcataggataggctcaataaatactgaaggaacaaataaaaagcatttctgcaactatgtttcacgaaatcaac

SEQ ID NO: 547443 - DNA, 201 bp, Homo sapiens
agtcctgtgcctttctgcgcctgcgcaaaggtttctgtcaaaacggacagctctagctgcctatcaggagccagcgtgaggcgggggcgggcgagccgatmttggctccgccaggattcttggaaaatctgctttccactgtggcaaagcgaaaagctaaggagcagtgcgctaagctgtggaaaattcccaactccagcc

SEQ ID NO: 547444 - DNA, 201 bp, Homo sapiens
tgctttacattttggagaagaatcactgaatattcttccaaacgtggctttccgcccctccgccttgctcacactgcttcctggtgcccttaagattcagytccagtgtcccctcttctgggaagcttttgcagacagccccagacaggcctggccacaccctcctctatgtcccaaatgcctttgagttttctcctatca

SEQ ID NO: 547445 - DNA, 201 bp, Homo sapiens
cgccaaattatcgaactggcaaggttcaaatttgcccctgattgggccctgtcatctttaacccattttttatccaagagagactttactgacaggagggyctctaacccagttccatcctttactcaagtaaaatgtaccccataacttatccaaagtcagccaattggtactgcagtctatttcctttggatctggata

SEQ ID NO: 547446 - DNA, 201 bp, Homo sapiens
gacctctgtgggtgaaagggtggctgggctttaagcatgtgcagcagtgggcaaagaatggaggtgagggaagaggcatcagacattaggaagggatcctyccggagaagtggaggtgggtggttagattttgtgggtgccaatggcaagatgagtcctattagaaagtctcattgataagaaaaaattgttttcaaggca

SEQ ID NO: 547447 - DNA, 201 bp, Homo sapiens
agcaggcacagctggaaggcaaaaacagatccccaaaattaagggtcccatttttatgggtcccctgaaagagggagatactattggaaaagacagtgcawtgcttttactgtgcatttaattgtatggcatcccaaaaccaatcagcccatttgtaattagcccaccccctataggagtcttatctttcagtggggttgg

SEQ ID NO: 547448 - DNA, 201 bp, Homo sapiens
atatattaacattcactaaaatataacttgaaagagttaaacataattttttattttgacaattcttcacatgtaacttaacatgtcaaataatcctgtgyttacctctcttttggatgcttcaggggccctctgtagtatcccaaagttagaagttagaaaagacaattttgaagctgaaatttgattttcggaagccta

SEQ ID NO: 547449 - DNA, 201 bp, Homo sapiens
aagcaattaactggaaatgactttaaatagttatagttaaagacacagatgacaaggaaatgtggttatttccatggtctataacaacataataactgtarttatggatagcatatacacagacatattaattttagaaatccaatacaattttggaatatatattaacattcactaaaatataacttgaaagagttaaac

SEQ ID NO: 547450 - DNA, 201 bp, Homo sapiens
gtgatgtgctgaggtggacagtgtccattctgtcgttttcctgtgcgaaagtacttaacgtgaatctcctcttgaggaaacaatcagacaaacccaagttragagatgtccttccaagtagccagcctgcatgctgccctcctccaccatagaatgctgagaagcacttctagagaaaagcagactagagagacaggaaaa

SEQ ID NO: 547451 - DNA, 201 bp, Homo sapiens
tcaaggtaggctttacagagcaggtggcaattgaacaaaggcttccaggaggcgaagcagttggccatgtaggtatctggagaatgacttgttccaaggasagggaactgcaaaaagtcttaaagcaggcaccttttcagcctatgggcagagctgcaagcccagtgtggctggagcagagtgagcaagaacactgagaga

SEQ ID NO: 547452 - DNA, 201 bp, Homo sapiens
tactcttgggggaccataagtagtaaacataataaataagtaaattatataagaagttagaagataagtggtgtaggaaaaatgaaaccaatagagcaagrtaaggaagactgggatattggggccagaaatgagtggtgctatagttttaaataagatggtcaaggtaggctttacagagcaggtggcaattgaacaaag

SEQ ID NO: 547453 - DNA, 201 bp, Homo sapiens
caagccttagttttaggcacctgggatgcaatgaaaaaaacagtgaaaaagctctactcttgggggaccataagtagtaaacataataaataagtaaattrtataagaagttagaagataagtggtgtaggaaaaatgaaaccaatagagcaaggtaaggaagactgggatattggggccagaaatgagtggtgctatagt

SEQ ID NO: 547454 - DNA, 201 bp, Homo sapiens
taaagaagccagggctcaggaatgttaataatcaggaaaccggaaataaagaagccagggctcaggaatgttaataatcaggaaactggaaatgaagtcgsggctcaggaatgttaataatcaggaaactggaaataagtcggggctcaggaatgttaataatcaggaaactggaaataagtcgcggctcaggaatgttaa

SEQ ID NO: 547455 - DNA, 201 bp, Homo sapiens
tcaggaaactggaaataaagaagtcggggctcaggaatgttaataatcaggaaactggaaatcaagaagccggggcttaggaatgttaataatcaggaaaytggaaataaagaagtcggggttcaggaatgttaataatcaggaaactggaaatgaagtcggggctcaggaatgttaataatcaggaaactggaaatgaag

SEQ ID NO: 547456 - DNA, 201 bp, Homo sapiens
actgaagatagaagatagaagaaatgagattggactcgtagtttattttttaattcatctctttaaacttcccttaagttgttctggtttcctctgacttytgatgataagtaattttaatagtcctttcttgaggatgatcagccatatctaccgagggtgctccctgactgcttagtattatggtgaagtcacagagta

SEQ ID NO: 547457 - DNA, 201 bp, Homo sapiens
cgttttcctgtgcgaaagtacttaacgtgaatctcctcttgaggaaacaatcagacaaacccaagttgagagatgtccttccaagtagccagcctgcatgytgccctcctccaccatagaatgctgagaagcacttctagagaaaagcagactagagagacaggaaaaatagccataaaggacatactgggacaatttagg

SEQ ID NO: 547458 - DNA, 201 bp, Homo sapiens
gggctcaggaatgttaataatcaggaaactggaaatcaagaagccggggcttaggaatgttaataatcaggaaattggaaataaagaagtcggggttcagraatgttaataatcaggaaactggaaatgaagtcggggctcaggaatgttaataatcaggaaactggaaatgaagtcggggctcaggaatgttaataatca

SEQ ID NO: 547459 - DNA, 201 bp, Homo sapiens
taataatcaggaaactggaaatcaagaagccggggcttaggaatgttaataatcaggaaattggaaataaagaagtcggggttcaggaatgttaataatcmggaaactggaaatgaagtcggggctcaggaatgttaataatcaggaaactggaaatgaagtcggggctcaggaatgttaataatcaggaaactggaaatg

SEQ ID NO: 547460 - DNA, 201 bp, Homo sapiens
cctcccgagtagctggaattacaggcacacaccaccgttcccggctaatttttgtatttttagtagagacagggttttgccatgttggccaggctggtctsgaactcctgacctcaagcgatccgcctgcctcagactcccaaaattctgggattacaggcgtgggccacctcacctggcttattttattttatttttctg

SEQ ID NO: 547461 - DNA, 201 bp, Homo sapiens
aactggaaatgaagtcggggctcaggaatgttaataatcaggaaactggaaatgaagtcggggctcaggaatgttaataatcaggaaactggaaatgaagycggggttcaggaatgttaataatcaggaaactggaaataaagaagtcggggctcaggaatgttaataatcaggaaactggaaatgaagtcggggctcagg

SEQ ID NO: 547462 - DNA, 201 bp, Homo sapiens
ccctcccgactgagcctcccaaagtgctgggattataggcgtgagccattgtacctgccaacacctatgttttttgttttgttttgttttgagaggtagcktcactcttgtcgcccaggctggagcgcaatggtacaatctcggttcgctgcaacctctgccaccgggttcaagcgattctcctgcctcagcttctcaaat

SEQ ID NO: 547463 - DNA, 201 bp, Homo sapiens
attgagaggacctggaagcagggatctgattatgttaatagagtctttacaaatacagtttttctccaccaaaaaaaaaaaaaaatggctttgcagggtcmtttcaaaatatggcagagaaacgtgttttggggtaagatattttgatttccttctctatctgtcatgtgatgttatgccagagtcaagttggaaagtagc

SEQ ID NO: 547464 - DNA, 201 bp, Homo sapiens
tagggccttagtgccactctcagttaccattattttgggtttcgagattcagcatgtcatttataggttatggtgtcctcatggctgcacatttctttcarctcttgtcattccagttgaagagagaccatgtgacgttttagagatggctacatgaaaacatttaaaacctctgagagaatacagcacaccagggagact

SEQ ID NO: 547465 - DNA, 201 bp, Homo sapiens
gggcctctcagtttccttccaactcttaacattctgtagttctaatgcagacaactatgactaaacctaaggttgctgcttttatacagttgtactcaggktctgtgtggccttccatttttgtagtccctgtaacaaagactttgagaaggtaaaaataatccttactcatgcagtgggaaggtttcttaaggagagtag

SEQ ID NO: 547466 - DNA, 201 bp, Homo sapiens
ctgctcggtataccgtgactttgggaggaacatctgtcactgtgaagtatctgcgcagtcatggctacatgtccacgccgccacccgtcaaggagtatctkcaggacaggatggaagagacaaaggagcttatcacagagaaaatggaagaaacaaaagatagactcactgaaaagttacaagaaaccaaagaaaaagttt

SEQ ID NO: 547467 - DNA, 201 bp, Homo sapiens
cccaaccaggagtccttcgccataagcaagggaagcaacatgtttcattcaggagggttttttcatccagtgccacagctcagggaactccggaaaaaaargaagagcctgatcctttgcaagacaaatctattagtctttatcaacgattcaagaagacatttagacagtatggaaaagttctgattccagtgcatctaa

SEQ ID NO: 547468 - DNA, 201 bp, Homo sapiens
accacggactgtatctcgactggcacgcaggacatgcttggaaccacataatgctggtctctttggacactgtcaaaatgtaaagggacctttacttttawacaatgctgaatccaaagtggttttggtacaaggccctcaaaaacaatggttgcatttatctgctgcccagtgtgttgcaaaggaaaggaggccattgga

SEQ ID NO: 547469 - DNA, 201 bp, Homo sapiens
ataaatatttatgtataagattatatatatatgtacattatataactaggttattggacatgtgcatatatatatatatccagtaaccaatatatcttcamtaacctagtaatactactcctaggaatttcttgaagaacttaaaatatggacaaaaatgttatacatgaggacgctattcatagtgcattaaaactgggg

SEQ ID NO: 547470 - DNA, 201 bp, Homo sapiens
ctccgtgccaggccaaggctgttgttttaagacacttcgctggtaacaggaagaagaaaaattgggcaaacatcacataaagacctactttcttgatggcrtatctatacaacaatgaaggaaagaagccagtagtgtaattgcccagtgggttcttcctgcccactgcatggaaaacagtttcctgagactgtgctattt

SEQ ID NO: 547471 - DNA, 201 bp, Homo sapiens
aagcagaagaaaggagctggagttatagaaaggaaagtccgaaagactttgaacaagtaggatgcaagtagtgagggtaattatgtgtaacagaatgaaargcccaaaaggtatcaatagaagctccttgctgattttaataggagcattttggtatgggaggtagtgaaaaagagaaggctggtttttttgttttgttta

SEQ ID NO: 547472 - DNA, 201 bp, Homo sapiens
tttgtgtcccagatacaaaagatgttgagcaatccaggtggatgctgagagtcagaaaaaaatctggacaggaaacataaattggggttcatcacctaatrgatataaaagttattgcccagataaaatgtatagagcctgcattcagatttaagagaaaaaggagtctattaccaagaccaggaaggaagctccatgata

SEQ ID NO: 547473 - DNA, 201 bp, Homo sapiens
gagtccttctatcgatggaatttctcaggaaggatatgtggtgtctgagtccgttcaggctgctgtagcaaaatactgtaaactgggtggctcatgaacartggaaatttatttttcatggttctggaggcaggaaagtctaagagcaaggtactggcagataaaggtgtttggtgtgggcccacttgctggctcacagac

SEQ ID NO: 547474 - DNA, 201 bp, Homo sapiens
gttttgagtccttctatcgatggaatttctcaggaaggatatgtggtgtctgagtccgttcaggctgctgtagcaaaatactgtaaactgggtggctcatraacaatggaaatttatttttcatggttctggaggcaggaaagtctaagagcaaggtactggcagataaaggtgtttggtgtgggcccacttgctggctca

SEQ ID NO: 547475 - DNA, 201 bp, Homo sapiens
ttttgaagtacttagttttgagtccttctatcgatggaatttctcaggaaggatatgtggtgtctgagtccgttcaggctgctgtagcaaaatactgtaarctgggtggctcatgaacaatggaaatttatttttcatggttctggaggcaggaaagtctaagagcaaggtactggcagataaaggtgtttggtgtgggcc

SEQ ID NO: 547476 - DNA, 201 bp, Homo sapiens
actgtagttcagttagccttttctttattcccctaatacatagtatgtttataaacttgtaactcatgtctgacatgtctcctatcttggaatatttaatyacccgtttataactagattgtaaactacttaaagacagtgaaaacacatattatactaatttgttctaggtgccaaaagggttacagttctgtgtaatgt

SEQ ID NO: 547477 - DNA, 201 bp, Homo sapiens
ttacatgtaatacagaaagcagtaatccaggatctaaattaagttcctgtagttctcaactggctcctgtgtacaaaatccaaggtcaaagaagactgaayagccagataattgttttgagcagatttctctataaagtaaaatacagtttcagaagcaactgagttcactttatgcatcttgctgtatattaacctgctt

SEQ ID NO: 547478 - DNA, 201 bp, Homo sapiens
cctttcttttcacagtctgtcatgcagctgaccaacgtaagtccaaagtgctttagaattcgagtaattctgcaaaccctgctttgtagttagcggtgcagtggtgaagttcaaaacttagacttgggctgggcacagtgggtcacacctgtaatcccagcactttgggaggctagggtgggaagatcacttgagcccagg

SEQ ID NO: 547479 - DNA, 201 bp, Homo sapiens
gccatatctaccgagggtgctccctgactgcttagtattatggtgaagtcacagagtaggacatcttttccctaattaatattaaaaattaagagtttacygctaccgttatcataatagatctaggcaatgctctttcttaatgacatagggaaagctgcttttacagtggaggtctaccgaccctgccttcaccaagag

SEQ ID NO: 547480 - DNA, 201 bp, Homo sapiens
tcaggaattctcactggtttacagacgtagcattgagttattggctatacgttaagctatagattgtgaattatagcattattaggttaattcatagttacttatggcaataacaagcagtttcaagaggtgaatacacagctcagaggaggtgggttggtgaggggaggtggggcgtgatttcggtctcattttaatgtc

SEQ ID NO: 547481 - DNA, 201 bp, Homo sapiens
ggaatgttaataatcaggaaactggaaataaagaagtcggggctcaggaatgttaataatcaggaaactggaaataggtcaggggctcaggaaggttaatmaggaaactggaaataagtcatggctcaagacttaataatcagaaaattggaaataaagaagtcggggctcaggaatgtaactggaaataagccagggctc

SEQ ID NO: 547482 - DNA, 201 bp, Homo sapiens
gttgtttactgagtgacctaaaatactgctagttttgagtggatcccagaacaaaaggcgcctctacaacaggtacaggctgctgtgcaaactgctctgcyactcaggccatatgacccagcagatcttctggtgcttgaaatgtcagtggcagattgaaatgctgttaggaaccttttgcaggccctataggagatacag

SEQ ID NO: 547483 - DNA, 201 bp, Homo sapiens
ttcgaaggtatcctgcagccttcaactgaccactgtagttcagttagccttttctttattcccctaatacatagtatgtttataaacttgtaactcatgtytgacatgtctcctatcttggaatatttaattacccgtttataactagattgtaaactacttaaagacagtgaaaacacatattatactaatttgttctag

SEQ ID NO: 547484 - DNA, 201 bp, Homo sapiens
gctcactcaccaggcattaccttcagaaactgcaaatatatttttgttaattcacatgtttaaatgtattcaggattatttatgtatgtgtacacatgggrtgattttagtattggtgtgaattttacctagtttaagaagtactctgaaggttgagagattttaaatcagtagtaaggaagaggaggactaagaatagaa

SEQ ID NO: 547485 - DNA, 201 bp, Homo sapiens
gaaatatatcatgctaacttggacaaaaggccataaaggatgagagtggcagaacataaaatcttatctcaggtatggaaattgtaagttatgttgttaakttatgttgaatttgtgtatcaacatacaaacatacattctagacttaggcaagaacagcaaaagttaatttatgctttaaggagaaggtaatggttttaa

SEQ ID NO: 547486 - DNA, 201 bp, Homo sapiens
ttcctttcttttcacagtctgtcatgcagctgaccaacgtaagtccaaagtgctttagaattcgagtaattctgcaaaccctgctttgtagttagcggtgmagtggtgaagttcaaaacttagacttgggctgggcacagtgggtcacacctgtaatcccagcactttgggaggctagggtgggaagatcacttgagccca

SEQ ID NO: 547487 - DNA, 201 bp, Homo sapiens
ccctgactgaggggaggctggatccttttgaggaaggaccccattgcgctgctaagaatttataccgttaatttttttctcaggtttcccaaagggacctrtggcttatcagggtaagtgtgcactggagaagaggaaataattagacttctcacagattactgaactcttaagtctgaactgacactaattccaggacac

SEQ ID NO: 547488 - DNA, 201 bp, Homo sapiens
tgcgatttacttggtgtaaaatatatgtataatttctcatatgtctttttttggtttaacaaacatagtccttattcatcaagtaaattcctattgctaarcatgttttagttaactagtaacaataaatttatgttaaaactgattttcatgatagaagatagaaatgaaatttatatagtttggctctcaatcctttat

SEQ ID NO: 547489 - DNA, 201 bp, Homo sapiens
tccccatttttacttacttcttctacattgcctttgtaacttcttggacgtgataaattgaattaaacgtggtattttatttggatttcttgatttttaaygtaagcatgaattatagtaactcttccttgctatctgaaatactgcaattcttgttctagtttgagctgattagtaagctgcattgtaatttgactcatt

SEQ ID NO: 547490 - DNA, 201 bp, Homo sapiens
tgcctttgtaacttcttggacgtgataaattgaattaaacgtggtattttatttggatttcttgatttttaacgtaagcatgaattatagtaactcttccwtgctatctgaaatactgcaattcttgttctagtttgagctgattagtaagctgcattgtaatttgactcatttcttaaaattagaggaattagataaaca

SEQ ID NO: 547491 - DNA, 201 bp, Homo sapiens
tcagatttaagagaaaaaggagtctattaccaagaccaggaaggaagctccatgataagaaaagcagaagaaaggagctggagttatagaaaggaaagtcygaaagactttgaacaagtaggatgcaagtagtgagggtaattatgtgtaacagaatgaaaggcccaaaaggtatcaatagaagctccttgctgattttaa

SEQ ID NO: 547492 - DNA, 201 bp, Homo sapiens
gaatccgtgaagagctctggggttgcttttctcttcaggtcagagattgcagtgggagctgttgccactgactgggggtccttagctgcagcagggatggytggatctaggatggcaggggctatgtgatcaccaaagagtaagtaggtgtgttgccatcatgggggacagcggagtcaaagcaacaatctgaacagcctg

SEQ ID NO: 547493 - DNA, 201 bp, Homo sapiens
aagctggggatgttaaactcctaaatttgactcactcttttttgccagtagaagcagttcttccacctctgaggaggttaactctgctttgcctgaagaayctgtaatgacctcccttgaggtagttaccttgcaagacattgccggttttcctcaggaatccgtgaagagctctggggttgcttttctcttcaggtcaga

SEQ ID NO: 547494 - DNA, 201 bp, Homo sapiens
aactggaaataagccagggctcaggaatgttaataatcaggaaactggaaataaaagaagtcgggtctcaggaatgttaataatcaggaagctggaaacgragaagttgcggctcaagttggagactttctctgccttctctcctgtctccagaaatttgtcgcggtatatgttaattgctccttcacctgccttaagtct

SEQ ID NO: 547495 - DNA, 201 bp, Homo sapiens
aggaatgttaataatcaggaagctggaaacgaagaagttgcggctcaagttggagactttctctgccttctctcctgtctccagaaatttgtcgcggtatrtgttaattgctccttcacctgccttaagtcttttaatagaatagaagcatccttttagagtaattgaagttttcatcaaacccatagtgtcgtttattct

SEQ ID NO: 547496 - DNA, 201 bp, Homo sapiens
tatttattccctcaacaaacatttattgagtgcctcctgtgtgccagcaagccttagttttaggcacctgggatgcaatgaaaaaaacagtgaaaaagctytactcttgggggaccataagtagtaaacataataaataagtaaattatataagaagttagaagataagtggtgtaggaaaaatgaaaccaatagagcaag

SEQ ID NO: 547497 - DNA, 201 bp, Homo sapiens
tcccccatgcttgtctcagagctgctaaaaccattgggaatttcctgagtgataggagtacgttttattaataacaatccccgtaacaggttatgctaatragctaacttagggtagggcttctgtagcttcagaatggggcgactcactagaaatacagaggattagagtggtggaactttgagactcaccccaccatcc

SEQ ID NO: 547498 - DNA, 201 bp, Homo sapiens
atgtaaaggagtttaactgagcaatgaactattcgcaaattgggcagcccccagaatcccagcagattcagagagactcctgcgcagccatgtggtggaaraagatttatagacaaaaaaaaaaagggaaatgatgtacaggaatcggaagtgagatatagaaacagctggattggttacaggtcggcgtttgccttattt

SEQ ID NO: 547499 - DNA, 201 bp, Homo sapiens
ccgccgtgtttgggaagccacaagaggccattcttacctgttagattctgagaaaagggaccgcctatacctcttcttgacaaatacctaaggatgcattrgtctgcgttggctgaacttggcatggtgtggtttgggggagacaacacactttttttggccatcaccccagatttctactggggagtgaaagcgcctact

SEQ ID NO: 547500 - DNA, 201 bp, Homo sapiens
tgggagataacaagataacaaaataaagtggaagtaaaaatgtggttttaggaagaaatgccttaaaaattggtagatcattcataacttcctgtggtcarataattgttagacttatgtgattttccatggtagtagtcatctgtttgacattgctcccgttgataaatggagatataattattttaagtataattatat

SEQ ID NO: 547501 - DNA, 201 bp, Homo sapiens
aaatatttatgagggtctgtgaaacttctacctaaggaagttgaaaacacagaaactagatgttttattttacttctgttgtataagaatatctaagaatyacagttttacagcattactcaaaagtagcattgtttcattctgtcatcctcattagcatcctctgaaatcttggtagatttcctcttttattataatttt

SEQ ID NO: 547502 - DNA, 201 bp, Homo sapiens
tagagatagagcagacagctctttcaaagttttgttatacaacacacctatgcattttgttttgtttcgtttgagacaggatcttgctgtttcccaggctrgagtgcagtcgtgcaatcacagctccctgcagcctcgaactcctagactcgagcagtcctcctgcatcagcctcccaagtagctgggactacaggcacat

SEQ ID NO: 547503 - DNA, 201 bp, Homo sapiens
atgaagccagggctcaggaatgttaataatcaggaaactggaaataaagaagccagggctcaggaatgttaataatcaggaaaccggaaataaagaagccrgggctcaggaatgttaataatcaggaaactggaaatgaagtcggggctcaggaatgttaataatcaggaaactggaaataagtcggggctcaggaatgtt

SEQ ID NO: 547504 - DNA, 201 bp, Homo sapiens
ttggtattttcagataatttttgaaaatatcattaaaagtttgtacatatgaaaattacttttttttttttgtagaggagtgaatgtcgttccttttctaraactcattgggttacctgacagtgtggtaagcatcctgaaaaactcccagagtggaaatgccctcacagcatatgccttgtttaaggtgggtactgtaac

SEQ ID NO: 547505 - DNA, 201 bp, Homo sapiens
agttattttactttgggaaaagaatttaccatacaagattgtttctcctataaaatctcttttttaaaagtcaaagaagtggtttatgaccttaaagcatktaggaaacctaatatctgacctgcacaatttagaccaaatgtttttattttaccaataaccttccaagctgtttttatttcccaaagatcactaaagtta

SEQ ID NO: 547506 - DNA, 201 bp, Homo sapiens
attgttggcatttaaactttatcaaaagtaacctcacaggtgctcttagaaaggagaattccgcagttcctggaggggaagagaatcaacaaatggtaacrgttatgaagatatcaaacaggaaagaactcattccctaagccaggtattggacccggatcaccactatgaaagagaaaacatgagctactgagctacagc

SEQ ID NO: 547507 - DNA, 201 bp, Homo sapiens
gcctacccaggggcaggatcatcagtatcactgtcttctacctccaccatcatcaccacaaacacgtgaatatgatgtcattaagcaataggaatttttcygctcttttatcttatggcaccgtctttcatgctgtccatcactggctgaaactgaagctctgtgatacatgactgtattggatacaagtcctttatcata

SEQ ID NO: 547508 - DNA, 201 bp, Homo sapiens
tatctgtcaaaccagaattagggctaaagaattattatattaagtatcttaaaaatagttatgtccccctgtagtctcagctagtgggaaggtgggaggaycacttgagcccaggagttctgggctgtagtgtgcagtgctgatcaggcgtctgcactaagttcggtatcaatatggtgacctccctggagcagaggacca

SEQ ID NO: 547509 - DNA, 201 bp, Homo sapiens
gggaggtagtgaaaaagagaaggctggtttttttgttttgtttattttgttttttgattgggggggttgttttttgtttgtttttgttttatttttgagaytgagcctgtctgttccccaggccggagtgcagtggcacaatcctggctcactgcaacttctgcctcctgggttcaagggattctcctgcctcagcctccc

SEQ ID NO: 547510 - DNA, 201 bp, Homo sapiens
tggagctgttcctatttggccgtcttggaaccacagccaattaattacttctaggagtcttttaatagattcttttggatattctacaaaaacaatcataycatatgcaataaaaagttttacatcttcctttccaatcggtatactttttaaattttttttcttgccttgttgcactagctgggaattgcagtatgatgt

SEQ ID NO: 547511 - DNA, 201 bp, Homo sapiens
gcagtggcacaatcctggctcactgcaacttctgcctcctgggttcaagggattctcctgcctcagcctcccaagaagctgggattacaggcacccaccaygatgcccggctaatttttgtatttttagtagagacagggtttcatcatgttggtagactggtctcgaactcctgacctcaggtgatctgcctgccttggc

SEQ ID NO: 547512 - DNA, 201 bp, Homo sapiens
cattagggaagtcacacatcttgtgaccgctggccccgtgactgctgaaccccatgactcatgaagtaagggattatagaaactatgcctacatttaggcygggcacggtagctcatgcctgtaatcccggcactctgagaggctgaggtgagcagatcacctgagctcaggagttcaagaccagcctgggcaacatggtg

SEQ ID NO: 547513 - DNA, 201 bp, Homo sapiens
gtgtattaaatttaaaaattatcaagtttctaattatggtgggtataattttaacccgagtaagtcaaactatcatgctgatgtaaaccttccctaatttrattgctccttatcccactcccatagcatgacagttgatagcacagtgtgtgctaggtgttaagtgtttgttttatttgattaggagctcccaggaactca

SEQ ID NO: 547514 - DNA, 201 bp, Homo sapiens
cgtgttttatctatgaaggtataaggttatccatatataaggctggctgcaaaatcattttcaaataaaagtataccccataagttcacacaacagacgacccccccccattttcatttctgttgttcatagaggcataaacaagggaaaagtatttaaagataagagtctcatggtagtagaactcttcatctgtgatct

SEQ ID NO: 547515 - DNA, 201 bp, Homo sapiens
acctaacatatgtttcattttaaaagttgataatctttgtaactattctccggattcagacaacttttttgagacggagtttcactcttgtttcccaggcwggagtacaatggcgcgatctcggctcaccgcaacctctgcctcccgggttcaagcaattctcctgctttagcctcccaagtagctgggattacaggcatg

SEQ ID NO: 547516 - DNA, 201 bp, Homo sapiens
tgccagacgggtcgtccacactcgccgaccccacagaccccggcggccgagagaggtccccccgcccttccgggtcgagccagtgtcctggcaaatcttgytttgggactgtttttcagcctcctttgctgtaacccttcaccgtgttctccccccttcttccgaagccagttgaagaggggcccggaagcgcccgcgttc

SEQ ID NO: 547517 - DNA, 201 bp, Homo sapiens
ggaggatcacctgaggtcaggagttcgaaaccatcctggccaacatggtgaaaccctgtctctactaaaaagacaaaaattagctgggcatggtggcacaygcctgtagtcccagccactcgggaggctgaggcaggagaattgcttgaacccggaaggcagaggttgcagtgggccgagatcatgccactgcactccagc

SEQ ID NO: 547518 - DNA, 201 bp, Homo sapiens
gaatagaaactacctatttttgggaacacaggaccacatagatttcttgacaaaatttctaaaaggattttttttcaccttgtgtaattgatgctgttctrtttcactttgtatctttacattatgttcctcttatttaattatatccttcttcattgcatatccttttctttaagaattgtatctttccttgcagaagat

SEQ ID NO: 547519 - DNA, 201 bp, Homo sapiens
tcctttgctgtaacccttcaccgtgttctccccccttcttccgaagccagttgaagaggggcccggaagcgcccgcgttcggaatggtttttaaaattagyaatttcttattagggactggcagactggtccttaccgccgtgtttgggaagccacaagaggccattcttacctgttagattctgagaaaagggaccgcct

SEQ ID NO: 547520 - DNA, 201 bp, Homo sapiens
ttttatttcctagtttctaagtttcttaattggattactggctttagggtggagtctttggaagaactggctagggaaacatgcagtttctagtgcctaayaagcaggcacagctggaaggcaaaaacagatccccaaaattaagggtcccatttttatgggtcccctgaaagagggagatactattggaaaagacagtgc

SEQ ID NO: 547521 - DNA, 201 bp, Homo sapiens
gtctctggtgcctcctgtttttcccaaggggtcccatgctgttagagcttgaatatctgcttgtaattaagctgacttttaaccacagtggtctttttttwaaaaaagtccttttaaatttcctattacccaacgttagccaggccaaatggctgatattgttggcatttaaactttatcaaaagtaacctcacaggtgct

SEQ ID NO: 547522 - DNA, 201 bp, Homo sapiens
ctgttactcaaagaaaaatgggaaagttttaaaaagaggagagtcatgatctgacctagatgccatatatatggtcagcttatatatgaggcttgaagagrtttggaaaggtatggaatagtttctgagcagaatgtgagaggaatctgatcagaaattgtcatggactgtcacggagcagacagagccagtctgagatat

SEQ ID NO: 547523 - DNA, 201 bp, Homo sapiens
agataggtagagaaaataagaggtccagggatcgaatgttgtcacaccacgttcagaggtgggtgaaaggggaggaattggcaaaaatgagaagccgccaygaactagaaggaagcccagcaagttgagggcctggagccaagtgaagggaaggtgaaagctgtgtgggatggttccagtggttcaggggctggttccaaa

SEQ ID NO: 547524 - DNA, 201 bp, Homo sapiens
agagagtgagataggtagagaaaataagaggtccagggatcgaatgttgtcacaccacgttcagaggtgggtgaaaggggaggaattggcaaaaatgagargccgccatgaactagaaggaagcccagcaagttgagggcctggagccaagtgaagggaaggtgaaagctgtgtgggatggttccagtggttcaggggctg

SEQ ID NO: 547525 - DNA, 201 bp, Homo sapiens
catcagtgctatgattctgttatctgggtcaggattgtgtagaggacaaacattcataaaatgagtttacagaagaaatatctcttgttaggagggaaaamcatataggatattactacattagctttgtgaaacaatgaggcaatttattctgatgggttattaccaagaattttaattttaacttgtttttgcttaaga

SEQ ID NO: 547526 - DNA, 201 bp, Homo sapiens
ctcaccatttgaagacattcagttctagtttagctccagatagaaagcatttggcaggatggcagggcttttaaggaatagaaacatgtgttcctctgttrtttttactggtactgagtcctctttctgatttccaggttgacctgtcccccaagtttactagcatgcgattagggacatcagtgctatgattctgttatc

SEQ ID NO: 547527 - DNA, 201 bp, Homo sapiens
atactttttaaattttttttcttgccttgttgcactagctgggaattgcagtatgatgttgaatcacggtggcagtagaggttgtctgtcatctttgcctygttcccagccacgggggcgagcgtccagcctcccaccattaagtatggatgagtttagcaataggtttgttgtacatgttctttatcaggttgaagaagt

SEQ ID NO: 547528 - DNA, 201 bp, Homo sapiens
ggtttagtgacaggaatacttgcatatttgtgaggttttagttagtgcccagtagatgtacgttttacacaagataaggtgaacctctgaaggaaaagggracagaggaagcagatgcctcagggagggatgaaggaagtgatgcaggatattttcttgaccccttcacaggactcgcgacaggggtgccctgtttactcg

SEQ ID NO: 547529 - DNA, 201 bp, Homo sapiens
gaacagaggaagcagatgcctcagggagggatgaaggaagtgatgcaggatattttcttgaccccttcacaggactcgcgacaggggtgccctgtttactyggcctgccccgctcaacccctcacgggagggagcatgtgagcaaatgagcatgggaactggccagccactttggtgccagcaggagcaaactctgctcac

SEQ ID NO: 547530 - DNA, 201 bp, Homo sapiens
acagctttgaaaatgtgctttaccagccttccttcttgtcagtaggcacaggtatattaatgaatagacctggctttggggaaggcagcatttgcagcgtygtgctttccaatctaatcacttctaaattgtgggcattagcccatttgaggttacaaactttgaaccaagaatgaggcctatttttcacaaataaggatg

SEQ ID NO: 547531 - DNA, 201 bp, Homo sapiens
caacctgagtgacagagtgagactgtctcaaaaaaaaaaaaaagaagaggaaagaaaaggggagcttaaggcttcaaattcccgattgaagctccacatargtgacctgaaaagtttctgtgtctgccctaaagaaacccgtatctcttgtagctacagagctgaggttggtgaaaaccaaatccagagtcttatcctgta

SEQ ID NO: 547532 - DNA, 201 bp, Homo sapiens
gggtctgaggcagtctcaagaagttctgagaacaagtgcctaaggtagttgggttacagcttggctttaaacgttttagggaggcataagacatcagtcaktatatgtagggtatacacagacattggttccacctagaaaagcaggacaattcaaagtgggggcatatgggtcataactggattaaaagattttctgatt

SEQ ID NO: 547533 - DNA, 201 bp, Homo sapiens
atgagaaggtagcataggtttagaaaagtcaaaggaaagggatttggaagtgaagctaacctaaatcccaacagagagtggtttcatgctctgcctctcamcatttgaagacattcagttctagtttagctccagatagaaagcatttggcaggatggcagggcttttaaggaatagaaacatgtgttcctctgttgtttt

SEQ ID NO: 547534 - DNA, 201 bp, Homo sapiens
gcaggacaattcaaagtgggggcatatgggtcataactggattaaaagattttctgattggcaattggttggaagagttattatctaaagacctggaatcmatagaaaagagtgtctgaattaagataaggggttgtggataccaaggttcttaatacatagatgaagtctcaaaggtggccgtccttagagacaatagat

SEQ ID NO: 547535 - DNA, 201 bp, Homo sapiens
gaaaaccatataggatattactacattagctttgtgaaacaatgaggcaatttattctgatgggttattaccaagaattttaattttaacttgtttttgcytaagatgacagtaataaccaggttttgatttgcctctgtttgctttttgcttaagattgcaacacctgctcggtataccgtgactttgggaggaacatct

SEQ ID NO: 547536 - DNA, 201 bp, Homo sapiens
tttttttggccatcaccccagatttctactggggagtgaaagcgcctactgtactgaaactcgaaagctccatagttgaggactttcaacctgagatcagkgtcaaaactacctgtggatagattattgaagcgtgtgcatattaacgtcgtgcgtcaagtccccaccttccaaggttgtaaaactgatcagatttacaat

SEQ ID NO: 547537 - DNA, 201 bp, Homo sapiens
cagtttaatgccagtgctcactgccgcttacaggctggagtacttataggtatcggggggaggggtctgggcggtatgccttgctgccccggaggatatcgataagatgtttctgtggtctggcggtttggccaaggatgttccttgtgccctttgcccagcaagatatgatagggatgttccttcagttgggcctttacc

SEQ ID NO: 547538 - DNA, 201 bp, Homo sapiens
cagtattaagcagtggttaatgtcttagaagtcagacttctttttcaaggtcttcagaaccacacttgatttctgttttgttgcagctgtaattgacacayactaggcagctgactccttgaatatccagtgtgacccataaaatagtctgttaataccggatcttaatttttatgttattcattaagattttaactatat

SEQ ID NO: 547539 - DNA, 201 bp, Homo sapiens
ggacttgctttatgaatctgagtgctcctgtattgggtgcatatatatttaggagagttagctcttcttgttgaattgatccctttaccattatgtaatgyccttctttgtctcttttgatctttgttggtttaaagtcaatcagagactaggattgcaacccctgccttttttttgttttccatttgcttagtatatctt

SEQ ID NO: 547540 - DNA, 201 bp, Homo sapiens
gtcccgattttccacgtaccgtctgtcacggcttccctttgctaggaaagggaattccctgacccgttgcacttcccaggtgaggtgatgccctgccctgytccgtgggctgcacccactgtctgacaagccccagtgagatgaacccggtacctcagttggaaatgcagaaatcacccgtcttctgcgtcactcatgctg

SEQ ID NO: 547541 - DNA, 201 bp, Homo sapiens
ttgtcaggaattctcactggtttacagacgtagcattgagttattggctatacgttaagctatagattgtgaattatagcattattaggttaattcatagttacttatggcaataacaagcagtttcaagaggtgaatacacagctcagaggaggtgggttggtgaggggaggtggggcgtgatttcggtctcattttaat

SEQ ID NO: 547542 - DNA, 201 bp, Homo sapiens
tgtcaggaattctcactggtttacagacgtagcattgagttattggctatacgttaagctatagattgtgaattatagcattattaggttaattcatagttacttatggcaataacaagcagtttcaagaggtgaatacacagctcagaggaggtgggttggtgaggggaggtggggcgtgatttcggtctcattttaatg

SEQ ID NO: 547543 - DNA, 201 bp, Homo sapiens
ctaattgcagctgctgttccagatgtcatttcattacttgagaacctatcccctagtaactggcatgcagttattgatctgctgagtgctttgtcttagtrtctgttagtaaagatcaccaaaagcagttttctttcaactaacaaagccaaaaatacaccttcactgtcctacctcgggaatgtcaactttccaacacta

SEQ ID NO: 547544 - DNA, 201 bp, Homo sapiens
gtcaggaattctcactggtttacagacgtagcattgagttattggctatacgttaagctatagattgtgaattatagcattattaggttaattcatagttacttatggcaataacaagcagtttcaagaggtgaatacacagctcagaggaggtgggttggtgaggggaggtggggcgtgatttcggtctcattttaatgt

SEQ ID NO: 547545 - DNA, 201 bp, Homo sapiens
aatctccagtatcacttttttttttctttttttgagacgagtctcactctgttgcccaggctggagtgcagtggcgcgacctcgggtcactgcagcctccrcctctggggttcaaatgattctcctgcctcagcctcccaaatagctgggattacaggcgtgcaccaccatgcccggctaatttttttttatatttttagg

SEQ ID NO: 547546 - DNA, 201 bp, Homo sapiens
aaaacattattccccatggtgtcagctggactagtttaccatatcatatttaaatggtgtgttttatgagatttttattattttattttatttttgaaacrgagtcttgctctgtcccccaggctggagtacagtggcatgatctcaactcactgcaatctccacctcctgggttcaagcaattctcatgcctcagcctcc

SEQ ID NO: 547547 - DNA, 201 bp, Homo sapiens
gttcgtttgtttgttttaactggaaaaagttctgtgttatttgcttgttgcctacttactattaaaagaaagggagaaaaatagtttgtagctggaaagawgggcatttgacatcatgcctcattactgaccagtgtttgtcttggttaccctgatagctcgcattactgcctttctaggcatcgtagagcaaaatgtcat

SEQ ID NO: 547548 - DNA, 201 bp, Homo sapiens
aagtggggccgggcacagtggctcacgcctgtaatcccagcactttgggaggctgaggcaggcggatcgtctgaggtcaggagttcgagaccagcctaacyaacatggagaaaccccatctctactaaaaatacaaaaattagccaggcatggtggtgcattacactacagaattacagagcctgtaatcccagctacttg

SEQ ID NO: 547549 - DNA, 201 bp, Homo sapiens
tatcaacaattcatcagattttaacatttgtaatcataaataacatttatgatgctcattagtttacaaaagtgtctttacatcagaaattttatgtaatycctggtgacaatcctgtaaagtcatcttcattttagtagtggacatgggcttggttcctgaaagggaattatgtggaattatatccccaaagcatcagaa

SEQ ID NO: 547550 - DNA, 201 bp, Homo sapiens
tttctgttctgtagttttcacctcatttattttgatcctctcgttaggtatatacgtgtttaggattgttatgtcttcttttcattcttgttattatacartgcccctctttaactcttataatcaaagaatgtttgcagtctgctttgtctgaaattaatctccagtatcacttttttttttctttttttgagacgagtc

SEQ ID NO: 547551 - DNA, 201 bp, Homo sapiens
tttcaattacttcaaaatatttttaaatttctttttagaagtttgaagatttttttttagaagtatgttgtttaaattccacataattgggagtggggggrgttcccggctatctttatgttaatggtttctagtatctcttttagtttgagaacataactttgcatgattttcattttttagaatttgttacagtatatt

SEQ ID NO: 547552 - DNA, 201 bp, Homo sapiens
tggtttacagacgtagcattgagttattggctatacgttaagctatagattgtgaattatagcattattaggttaattcatagttacttatggcaataacragcagtttcaagaggtgaatacacagctcagaggaggtgggttggtgaggggaggtggggcgtgatttcggtctcattttaatgtctctttgggcctgat

SEQ ID NO: 547553 - DNA, 201 bp, Homo sapiens
attcactaatcaatctcagcctgggatctttttttgtttgtttgtttttggaaaggatattaatttttgattccatttctttaatgaataatgaatatagrgttagtaaagtcttttatttctccttgtgtgggttttggcagtttgtctttttgaggacttggtccatttcatctaagtttgataatttgtgggtgtcaa

SEQ ID NO: 547554 - DNA, 201 bp, Homo sapiens
gggccacttttggcctcatggaatgagttagtcttctctgcctctgttttctgaattgtattattttttccttaaatgtttggtagaattcactaatcaayctcagcctgggatctttttttgtttgtttgtttttggaaaggatattaatttttgattccatttctttaatgaataatgaatatagagttagtaaagtct

SEQ ID NO: 547555 - DNA, 201 bp, Homo sapiens
ttgattcttaaatatacctttaagttgattcttagatatacctttgcatatctggattaaatcccactgggtctgggtgtatgatagtttttagacattgytggatttgacttgctaatattttgttgaggatttttactttctatgttgataagaagtattagtctgtagttttcctttcttggattatatgtagctggt

SEQ ID NO: 547556 - DNA, 201 bp, Homo sapiens
tgtgacctgaactcagcttccaaggtttcaccagggtccccttggccaagagaggtccattcagtcatttgggagattacaatttcatttttattcccagytgattcttaaatatacctttaagttgattcttagatatacctttgcatatctggattaaatcccactgggtctgggtgtatgatagtttttagacattgt

SEQ ID NO: 547557 - DNA, 201 bp, Homo sapiens
ggaagttgtatgcacgtccatctgaggcttttttcccttttcttgtggagtgcccctggaaggtcatactctgccattttgtctcttaatgcatgtgcccrgctcactcgtccaatacctgagattttgttggaagccctttttgcttctccctggtgccttcattcaattaacactttagtgtaacaggtgtgggccatc

SEQ ID NO: 547558 - DNA, 201 bp, Homo sapiens
gaagggcagcctgaaattaagttgcctctctgcctcatgcagccatcgtctctgaagtcaaggtgcctctcttgatgtccagctgttttttcctgacgtcyagccacttctcccctctgtcagctgagtctgagtctttgtaggcacaggatggggccgagctgtaggtagttttggaaaagacaacattcgattggtaaa

SEQ ID NO: 547559 - DNA, 201 bp, Homo sapiens
ctcgtcacgtggggtggctgctctccgccagtgagggcaaagagccagagtgacaacctttttgggcacccacacttggcacctcctgaattcttgtccaktgcccaagaggaatgaggtcatgcagacgattgaaggataatgaatatggagaattttattgagtgatgaaagctgctttcagtggggagaggagctgga

SEQ ID NO: 547560 - DNA, 201 bp, Homo sapiens
tttattttgatcctctcgttaggtatatacgtgtttaggattgttatgtcttcttttcattcttgttattatacaatgcccctctttaactcttataatcmaagaatgtttgcagtctgctttgtctgaaattaatctccagtatcacttttttttttctttttttgagacgagtctcactctgttgcccaggctggagtg

SEQ ID NO: 547561 - DNA, 201 bp, Homo sapiens
atgtttttggattttaggcattgtaataagtttgtagtagtgtcttagtgtttttaatttgcaattttctaatgatgcggcattgaacatctttttctgtkttttttgccatctgtagatcttaatgagggctctgttcagatctttttcccattttgtaaatgggttgttttcttattgttgagttttaagagttctttg

SEQ ID NO: 547562 - DNA, 201 bp, Homo sapiens
aagtccggctaatttgtttgcattgatattacccaagtccagtaagtgtcaaggaaaggtcttttgttctgatcagaaattaatctagtaggtctagcctmccagtgttttgaaacatacaatttaaagtgcatctctcttgttaatactatgccttccccttaaggtaagttatttgcttcacactgctttaggcttagg

SEQ ID NO: 547563 - DNA, 201 bp, Homo sapiens
aattgctgaagaagctaggtatagtataatatgaaatatatttggtctttttcccccatgcttgtctcagagctgctaaaaccattgggaatttcctgagygataggagtacgttttattaataacaatccccgtaacaggttatgctaatgagctaacttagggtagggcttctgtagcttcagaatggggcgactcact

SEQ ID NO: 547564 - DNA, 201 bp, Homo sapiens
ccgccccctgggttcaagcaattcttccgcctcagcctcccgagtagctaggattgcagcacccgccaccatgcccagctaatttttgtatttttagtaasgacagggttttaccatgttgggcaggctggtctcgaactcctgacctcaggtgagccacctgcctcagcctcccaaagtgctgggattacaggcgtgagc

SEQ ID NO: 547565 - DNA, 201 bp, Homo sapiens
gcctcccagtgttttgaaacatacaatttaaagtgcatctctcttgttaatactatgccttccccttaaggtaagttatttgcttcacactgctttaggcktaggaggaccagtgatttcccatttctgccactagtcggccgagtgcccattcctcagtgtccgggcctggtgtgcgtgaaggacttagacacttcagta

SEQ ID NO: 547566 - DNA, 201 bp, Homo sapiens
ggagtttgagaccagcctgggcaacatagcgagtccctgttgttaggatttgaagggaagacgagagttaaagacacacacacagagaaagagggcggctstacagcaactgcaggcatttatgtccagcataaacctgagaggttggggaccagtttaatgccagtgctcactgccgcttacaggctggagtacttatag

SEQ ID NO: 547567 - DNA, 201 bp, Homo sapiens
cgtacagtttttttgtttgtgtgagggacctgcagcaaagttcgttactgaccagcttgctgggccgtcttgagcagcgggcttatggggtttcaagcccrtgttctgttctaagttagctgtctttatgacagaaggatacaggaagacatagcaagcataccaaattggctgcagcttaagactagcctcataaatcct

SEQ ID NO: 547568 - DNA, 201 bp, Homo sapiens
gtgtattagtggtgatcacctcaaacataaacctctgttgtgaatcatttgtgtccttttcaactgtctttcagaggaaaggtaaaaaatcattaaacctkaaattcattgttaaaatcaaatatttgtcagcagtaactcaagctcatggttctcaagcagaaaaaggtttgggagactaaaaatggagtcaggttgtca

SEQ ID NO: 547569 - DNA, 201 bp, Homo sapiens
cctcccagtgttttgaaacatacaatttaaagtgcatctctcttgttaatactatgccttccccttaaggtaagttatttgcttcacactgctttaggctyaggaggaccagtgatttcccatttctgccactagtcggccgagtgcccattcctcagtgtccgggcctggtgtgcgtgaaggacttagacacttcagtaa

SEQ ID NO: 547570 - DNA, 201 bp, Homo sapiens
gtcaggagttcgagaccagcctaaccaacatggagaaaccccatctctactaaaaatacaaaaattagccaggcatggtggtgcattacactacagaattrcagagcctgtaatcccagctacttgggaggctgaggcaggagaatcgcttgaacccaggaggcagaggttgccatgagccgagatctcaccattgcactc

SEQ ID NO: 547571 - DNA, 201 bp, Homo sapiens
tcactctttagaagcagcctattgcagactaagctataagtagctcttccaggatgatggaatagaaactacctatttttgggaacacaggaccacatagrtttcttgacaaaatttctaaaaggattttttttcaccttgtgtaattgatgctgttctatttcactttgtatctttacattatgttcctcttatttaatt

SEQ ID NO: 547572 - DNA, 201 bp, Homo sapiens
acaaaaattagccaggcatggtggtgcattacactacagaattacagagcctgtaatcccagctacttgggaggctgaggcaggagaatcgcttgaacccmggaggcagaggttgccatgagccgagatctcaccattgcactccagcctggagcgaaactccatctaaaaaaaaaaaaatattggaactagatgcttgct

SEQ ID NO: 547573 - DNA, 201 bp, Homo sapiens
tacactacagaattacagagcctgtaatcccagctacttgggaggctgaggcaggagaatcgcttgaacccaggaggcagaggttgccatgagccgagatytcaccattgcactccagcctggagcgaaactccatctaaaaaaaaaaaaatattggaactagatgcttgcttctttatctgacaaaggatgcaggccagt

SEQ ID NO: 547574 - DNA, 201 bp, Homo sapiens
gtaggtgaatgtcttcgttctgatttaggggcgaagggtcacagtgtccaaagagagcaagagccatcatggcaaaatgttaataatcaggaaacgaaatmaagaagccagggctcaggaatgttaataatcaggaaactggaaataaagaggtcaggggctcaggactgttaataatcaggaaactggaaataaagaagc

SEQ ID NO: 547575 - DNA, 201 bp, Homo sapiens
catggcaaaatgttaataatcaggaaacgaaataaagaagccagggctcaggaatgttaataatcaggaaactggaaataaagaggtcaggggctcaggamtgttaataatcaggaaactggaaataaagaagccagggctcaggagtgttaataatcaggaaactggaaataaagaggtcaggggctcaggaatgttaat

SEQ ID NO: 547576 - DNA, 201 bp, Homo sapiens
taataatcaggaaactggaaataaagaggtcaggggctcaggactgttaataatcaggaaactggaaataaagaagccagggctcaggagtgttaataatsaggaaactggaaataaagaggtcaggggctcaggaatgttaataatcaggaaactggaaataaagaagccagggctcaggaatgttaataatcaggaaac

SEQ ID NO: 547577 - DNA, 201 bp, Homo sapiens
aaactggaaataagtcacggctcaggaatgttaataatccaggaaactggaaataaagaagtcggggctcaggaatgttaataatcaggaaactggaaatmaagaagccagggctcaggaatgttaataatcaggaaactggaaatgaagtcggggctcaggaatgttaataatcagaaaactggaaataaagtcggggct

SEQ ID NO: 547578 - DNA, 201 bp, Homo sapiens
ggaaataaagaagccagggctcaggaatgttaataatcaggaaactggaaatgaagtcggggctcaggaatgttaatagtcaggaaactggaaataaagargtcggggctcaggaatgttaataatcaggaaactggaaatgaagccagggctcaggaatgttaataatcaggaaactggaaataaagaagccagggctca

SEQ ID NO: 547579 - DNA, 201 bp, Homo sapiens
aatcaggaaactggaaatgaagccagggctcaggaatgttaataatcaggaaactggaaataaagaagccagggctcaggaatgttaataatcaggaaacmggaaataaagaagccagggctcaggaatgttaataatcaggaaactggaaatgaagtcggggctcaggaatgttaataatcaggaaactggaaataagtc

SEQ ID NO: 547580 - DNA, 201 bp, Homo sapiens
ataaagaagccagggctcaggaatgttaataatcaggaaaccggaaataaagaagccagggctcaggaatgttaataatcaggaaactggaaatgaagtcrgggctcaggaatgttaataatcaggaaactggaaataagtcggggctcaggaatgttaataatcaggaaactggaaataagtcgcggctcaggaatgtta

SEQ ID NO: 547581 - DNA, 201 bp, Homo sapiens
tttaattcatgtaaaccagagcagaagtttgaaatagtgaacagtcttgtaggcattatgtgctttcaggttctgagtttattacttctgagaattaaccwtagtagcagtggtctatgacctctgtgggtgaaagggtggctgggctttaagcatgtgcagcagtgggcaaagaatggaggtgagggaagaggcatcaga

SEQ ID NO: 547582 - DNA, 201 bp, Homo sapiens
aaactaatgaagctaattggtgtgaaaaacgtgaagctctcagaatatgaaatgagtgttgctgcccaccagtagaccatcttttcttttcttttcttttyttttttgagacagagtcttgctctgtcaccaggctggagtgcaatggcatgatctcggctcactgcaacctctgcctcccgggttcaagcgattctcctg

SEQ ID NO: 547583 - DNA, 201 bp, Homo sapiens
ctttgaaccaggtgttttaatgctgtgagctgctaaagatggaaatcagcaaagaaggaaacaagctaggccactactcactccttctccttagcccatgkagatatattccacaaagccagctattgattgctaccattagtcggccaggcaaaccagcaataattgctttagcaattttgttcatgaacatttcctgtt

SEQ ID NO: 547584 - DNA, 201 bp, Homo sapiens
gagcatggctatatgccaataaaactttatttttggacacgaatttaaatttcatatatttctcatgtattatattactccccttctgatttattttcaartatttaaaaatgtaaaaaccatgtctgggcaaggtggctcacacctgtaatcctagcactttgggaggccaaggtgagtggatcacctgaggtcaggagt

SEQ ID NO: 547585 - DNA, 201 bp, Homo sapiens
caagttattaagtggcagagtgagaacttgaacccaggcggttccactcaaggggaatatggtcttaaatttaagcagaaaaaattctcccagatttaaawagaagcttgcacccctttgtacataaaagagtaaaagctttgaccttcctctccacttctctctcactcatggaaggaatgattcatctgcaaaaagtaa

SEQ ID NO: 547586 - DNA, 201 bp, Homo sapiens
tcagtaactgtcaccataagagaactgagatcatatttcataaatatcccagagactccatggctgcctgcagcatggttaatgatacgttcctaaaaggraggcaaaaggaaggggagaaataggaggaagagagaaacagaattcatgtcatctggttacttacatacattcaatattaagccctgaagccctactgta

SEQ ID NO: 547587 - DNA, 201 bp, Homo sapiens
ttcctaaccacctcgtgaattttttactcctcttccctttttgcacatgaggaagcaggagctcaaaaagttacaaactttccaaaatcacagatagtaartaacaaccaatacacaaattcagctctgtcagatttcttactttcccaccttttaaaaattcttcttgtctttaaatagtaactaaatgcaatagaaata

SEQ ID NO: 547588 - DNA, 201 bp, Homo sapiens
catgccctttctcatatcataggcaatctcctttattttgttcagagccgtttgccctaacacttattacctaaagatctaattccctataggaacgtgcrctctatgaagggcagggactatgtctaccttgtttatccaaatctgtactgcattaaagatgttaattgttaagtaactcctgcaatacttctggagaac

SEQ ID NO: 547589 - DNA, 201 bp, Homo sapiens
acaaaccttcacatgtactccatgaatctaaactaaaagttgaaaaaacagtccctcttcaaaatgataaacaaaaataaggtaagaatggcagaaaattwaaaaaaaaaaacaaagttaaagttaaataagtattcttaagatagtataaaatgtaatacaaatattaaaatatctaataataatcacttagatcaaaat

SEQ ID NO: 547590 - DNA, 201 bp, Homo sapiens
taactcataaaatatttttcatgcaaaagcattcttatttttgaaaacagtattgattcaaacattcactatctggcatattagcatttttccacttctaytagtataaccaagtgagtccagtgacgaaaaaagaaaagggtaacctatcaccattaacttaaaataactggatctgtatttttaaacgcaagagtaaac

SEQ ID NO: 547591 - DNA, 201 bp, Homo sapiens
tccctaacctcagcaactcagagccatgaccaaatacaaatgcagattaaagtaaatcaatttaaaaatttattttttcctttggatgaatatgttttcaraacagctcactttcaactacactatatctgcacttttaaaaataatattttttcaagtacatctttactgaaaaaaagtcagaatctgcttacattcatg

SEQ ID NO: 547592 - DNA, 201 bp, Homo sapiens
aagaatgcatttggcctattgactgagcagacaagtctactcatctcagcaatgcaataaactgctggaggttggcaaacatttttggcaaagagccagayagtaaatactttaggctttgtggaccatgatgcaaaatcaagtatattatgtagttacataatgagaaaaagcaaattttcacaaacttttcattgatat

SEQ ID NO: 547593 - DNA, 201 bp, Homo sapiens
aatgattggtagtttggtctcgtaaattcttctgtgttcacagtcaagtgtattacctcaagcttactactaaaaagaaagtctactgtcataaattattmctagctccaatcatattgtcagtctaacagtgttcctactattattttcaaacaaacaacaaagtttttctgaataaccaaattacaatactacacgttg

SEQ ID NO: 547594 - DNA, 201 bp, Homo sapiens
ctcctaataatacatacaacctattcaacactcctcccttgaaagtctagctggaatatatcatgtggctccctacccatctctagcttcctccatccctrttttccaggggatatcactctagaatggagcacctcgcccctcagctactccaccagtcccattcctgaaagctcagcactaacctacctccaagaaatt

SEQ ID NO: 547595 - DNA, 201 bp, Homo sapiens
cagtggtgtgacctgcccaaggttacacagcaatttacaaatgttgactaatttaattctcataaacctcttgaggaagatactataattgctgtctgtastttacaaaaaaggaaactgaagcatatacaggtgcagatttagtaaattccctaaaattatgtaaatggcaaacctggattgtaattgaaaactaaatgt

SEQ ID NO: 547596 - DNA, 201 bp, Homo sapiens
ttctttattctgttctatggctcatttttgaatattcaaatttcatccactactaggacaaattctcttcacatacatctcaatcaccaaccacttaaagrttatctttacacagtagttaggaagacattaaaaatgtattaatattcaggttataagcaaaattttctacatgtaaaatccaacaataattattaaata

SEQ ID NO: 547597 - DNA, 201 bp, Homo sapiens
tgatttcctttgagagatctttcaaacttgatatatttttatgatttgtaccaggaagccattataacacgcaactgtatactaaagttcaccatcatttaaaaaaaaaaaaaatcctcctctctctatccatccctgcaccgccaacccccaccctcccaaaaaatcagaatttttttcctcatgttttccactagaact

SEQ ID NO: 547598 - DNA, 201 bp, Homo sapiens
tagaacacaatctaatacagaatcaatcatattcaggacaccctgaatgcaaatacttcataatacagttttatagtttaatggacaatgtttaacatggyacctctcaaatctgatatatcttgtggtgcttacaatttgccttacactttcatttaaagttaccctgttctccactcaccacatgtataaaatatccta

SEQ ID NO: 547599 - DNA, 201 bp, Homo sapiens
gcactgggtctaagcattttatgaaaatattaatagtatagtaacccctaggaggtaaatactagtatgatccctatttcatggaagaaactaagacagayagatttgaataacttcctcaaggtcacatatttaggaaagggcagcaaagcagaaacattggtttaatgtattaatgttttaataaacactgccaaaggc

SEQ ID NO: 547600 - DNA, 201 bp, Homo sapiens
taaaggaaagaagctctgaccaggagcactatttatcagtccagcagggagctactactctacagtagagttgaaagcattaatacattgatttcctctgmcattaaaatcaaccaactaaacttcccttgctggttccacactcacaaagcagccttcgaattatgatttttttcccatgcacttagtattcgaaagaaa

SEQ ID NO: 547601 - DNA, 201 bp, Homo sapiens
gccttcgaattatgatttttttcccatgcacttagtattcgaaagaaaaaaatagatgtcatagacaaaacagatgacagttttctgacccccacgtcagktataaaactggtattcccatcgataaattaagcttctgaatgtttgttatgtatatgccatgcccgctaaacttgtttagctctgataatcaaatttatt

SEQ ID NO: 547602 - DNA, 201 bp, Homo sapiens
taagcttaacagcgcttctcctcctgtgacctccatcttaattctatggaaagccacccatgagcaaggtcaacccttaaaactgttccacctctaaaatycaaaacacatttacctccccaagtaggaactacccttcaagctctttcctaagataaatctgctcttcattttcactggtgttctcaaatcctttaaatc

SEQ ID NO: 547603 - DNA, 201 bp, Homo sapiens
agcaaagatttgtaggatatttgagatttagttgttaaagtctttgaggaaagtgggagagtatgtgaggttagttgacaatctcctgaagttaggatggmataaactgataagactaaaagttaagagagactatagagtgataacagaataaccttaaaagtgcctagtagcaatgtgaagcaaggacaagtataatcc

SEQ ID NO: 547604 - DNA, 201 bp, Homo sapiens
taatgaaaagaaagaagtctgtaagtattcagtacagacacaatacttgttcagtaggcatgcaatttttccttcttgaatattttcaatctgcaactggktgagtccacagatgcagaatccacagatatggaggggtgactgtattttgaaaaacttcctaagacataagagactccctttcaggttggaacacagaca

SEQ ID NO: 547605 - DNA, 201 bp, Homo sapiens
ataaaacagtgaattacatttctaaaagtttatataaatgttatatttgtataatgagctttctaaatgctcttttaatttatatataagcataaagatayggcaagcagttagttttacaaatctcctaataatacatacaacctattcaacactcctcccttgaaagtctagctggaatatatcatgtggctccctacc

SEQ ID NO: 547606 - DNA, 201 bp, Homo sapiens
gatgctcaacctatacattttacttcaatgatctctctcaccacccaggattttactctgagaggaacagagagctgttttaaataatatttccttcttcttttttttttttgttaacaggtgtattcattttatgaagtaacagcataagtgagcatcttcttcaaaaaattaaatttaaaaatcaaattaaatcaccct

SEQ ID NO: 547607 - DNA, 201 bp, Homo sapiens
agtattcatggtttacattcaacttctataagtcaaattaaaattttaatgtgctatctttactgaaaaatagcataaagaaattttctaatcacaaataytttcctgttacagttatcgacatttacaggaatatatgcaagttgacaatttatcatatgtacaaaatggtatcctagggcttaaaatcatttaaatgat

SEQ ID NO: 547608 - DNA, 201 bp, Homo sapiens
tgaaagatcaaatactgtctgaaatgaaagaaaacataatcactagcattgtcaaattctcttggcttttacatcataatttaaaattttttctttgagcwggaaacataaacttaagtgttgttaaaaacaagtattcatggtttacattcaacttctataagtcaaattaaaattttaatgtgctatctttactgaaaa

SEQ ID NO: 547609 - DNA, 201 bp, Homo sapiens
ttagcagagaaattatattattcaaaattacttggtacagactggtttacatccttatctattctcaaatgaaaatgtttaaaatcttcaaggataataayacagtattttaagccacaatactttgagaaaaataaatgtaaatatatgcgaattaaatgtataaaataaattctgacaaaatgctatatctcaaattta

SEQ ID NO: 547610 - DNA, 201 bp, Homo sapiens
aatatatgcaagttgacaatttatcatatgtacaaaatggtatcctagggcttaaaatcatttaaatgatgctagcatgaaattcacaagtattagggtasaaaaatacagagttatattcaagcatccaaagcccaaattcttgctggtaaaatacaataataaaatcaacaatttttgaaatgagtttaaaaatagcac

SEQ ID NO: 547611 - DNA, 201 bp, Homo sapiens
tcaaatttcatccactactaggacaaattctcttcacatacatctcaatcaccaaccacttaaaggttatctttacacagtagttaggaagacattaaaartgtattaatattcaggttataagcaaaattttctacatgtaaaatccaacaataattattaaatacttacgatctatagcaattttttcagttccatcta

SEQ ID NO: 547612 - DNA, 201 bp, Homo sapiens
taaatttattacaaagaatatggattacttttgaaataaaagaattatactaaaaactatttcagacaaaactaaaagcaactatctgtcttcaagcgtaygattcctcaacccgtgtatttcaaaaaaccatgtgaatcaaacttactggttcataaactaaaccatctgcagatgcaaccattgtttctgctaaatcca

SEQ ID NO: 547613 - DNA, 201 bp, Homo sapiens
tctcaggaaccttcggaaaggcatccaactcttttaccaaacttaaagtttttttccgattcagtcgcctcatcttcaggaaaaccttcctcttccttcayatagtcatgctaaggaataaataaattaatgaataaatgaatcctttaaagagataaaaaggtttctttaaatttaggataactgacaaatgtccttaaa

SEQ ID NO: 547614 - DNA, 201 bp, Homo sapiens
attgacatatagatggccatgaattctgcatgcatttggagactgtgatgaatcatcttctctgttaaaataagatatattatttaaagcacattcaatayagttaccattttatgatgagaaaaatgtgtatagaaaaaaaaatccctaaagatcattttttaggtaatattctaaatgttaaaaatagaatagtttcct

SEQ ID NO: 547615 - DNA, 201 bp, Homo sapiens
gttaaaataagatatattatttaaagcacattcaatacagttaccattttatgatgagaaaaatgtgtatagaaaaaaaaatccctaaagatcattttttmggtaatattctaaatgttaaaaatagaatagtttcctgaagtctagacatttataaaaattatacatctataaaatgggaaaaaagtatttaatatctat

SEQ ID NO: 547616 - DNA, 201 bp, Homo sapiens
agaacgaactctaatgtaaactatggtgatgatgatgtgtcaacataggttcactgattataacaactatatccaatctgatgcaagttgttgataatggrggaacctgtagcgggacgggtatataggaacactactttctgctcaattttgctgtgagcctaactactctaaaagaaaaatacatacatgtaacttgga

SEQ ID NO: 547617 - DNA, 201 bp, Homo sapiens
taatttaaaaataattcttctaagaaaactaaccaagcaaaataggcacataggcaaacattttcacaaaaaaatacaaataaggaaaaaaacctcacaaytgattcataaagaaatgttaattaataaaagcatagtaccaattttcacccatcaaactggcatacatttaaaaaaattctaggcattcctgttgttggt

SEQ ID NO: 547618 - DNA, 201 bp, Homo sapiens
cagtggcattagtttacagaaagagaagggggcttttacatttactttgtatctgggtgcccaatcttttggcttccctgggccacactgtaagaagaatkatcttgggccacacataaaacacactaactatagctgatcagttaaaaaaaaaagaaaatcacaaaaaaatctcataactttttcagaaagtttacaaat

SEQ ID NO: 547619 - DNA, 201 bp, Homo sapiens
aaaatcacaaaaaaatctcataactttttcagaaagtttacaaatttgtggccgggcacagtggctcatgcctgtaatcccagccctctgggaggccaacrtgggcggatcacttcagttcaggagttcaagaccagcctagtcaacatggtgaaaccctatctctactaaaaatacaaaaaattagctgggcatggtggt

SEQ ID NO: 547620 - DNA, 201 bp, Homo sapiens
cttgtatactttaaatgatctttagactacttataaaacctaatataatgtaaatgctatgtaaatagttgtactgtttaggaaataatgaaaagaaagargtctgtaagtattcagtacagacacaatacttgttcagtaggcatgcaatttttccttcttgaatattttcaatctgcaactggttgagtccacagatgc

SEQ ID NO: 547621 - DNA, 201 bp, Homo sapiens
ctctactaaaaatacaaaaaattagctgggcatggtggtgtgtgcctgtagtgtgcgccagctactcaggaggctgaggcaggagaatcgcttcaacctgkgaggtgggggttgcagtgagccaagattgcgccactgtactccagcctggcaacagagtgagactctgtctcaaaaaaaaaagaagtttacaaatttgtg

SEQ ID NO: 547622 - DNA, 201 bp, Homo sapiens
caacttctataagtcaaattaaaattttaatgtgctatctttactgaaaaatagcataaagaaattttctaatcacaaatattttcctgttacagttatcgacatttacaggaatatatgcaagttgacaatttatcatatgtacaaaatggtatcctagggcttaaaatcatttaaatgatgctagcatgaaattcacaa

SEQ ID NO: 547623 - DNA, 201 bp, Homo sapiens
aaccagtgatttttatttttgcttggcaattgtttgaaccataacctacatgtggattcagcaagttgaaggtgtacttacattgacacttcatggcaacrgtaatatctatattaattcttaatttgctgaaagacaaaatattaaacattagtacctaccaattaattagcaaaacatgagaaatataaatcaactgac

SEQ ID NO: 547624 - DNA, 201 bp, Homo sapiens
caaaacttaatcacaagtggatcagaaatagtaagcaacttattacccattttaccaaataaaatgtcaaccttaagtgaaatacattattttactacctyttcatagggaaagaaattatactgaatattgttatagtcacacatttttcttatatatttcattatttattttacttaactgatacttttatctgtacca

SEQ ID NO: 547625 - DNA, 201 bp, Homo sapiens
ggccgggtgcggtggctcacgcctgtaatcccagcactttgggaagccaaggcaggtggatcacgaagtcaggagatcgagaccatcctggctaacacggygaaaccccgtctctactaaaaaatacaaaaaaattagccgggcatggtggcgggtgcctgtagtcccagctactcgggaggctgaggcaggagaatggtg

SEQ ID NO: 547626 - DNA, 201 bp, Homo sapiens
tgggttcaagtgattctcctgcctcagcctcccaagtagcagggattacaggcgcacaccaccatgcccagctaattttttgtatttttagtagagacagrgtttcaccatgatggccaagctggttttgaactcctgacctcaagtaatccacccgcctcagcctcccaaagtgctaggattacaggcgtgagccaccgc

SEQ ID NO: 547627 - DNA, 201 bp, Homo sapiens
gtactaatccccaagaatatttagaaaacattaaagacaattttgacaatcctttccttggaatgctgtgaaacacaacccattttttaatgtaataaaartagctcttaagcttttgtatactttaggacacatcaaggataagtaagggcacattcccaatacgatggtagcagttaattcccacacaattccaccaaa

SEQ ID NO: 547628 - DNA, 201 bp, Homo sapiens
tttaggtgaccattacttgttatgttgctacacaaagaagaccacttgtctaacccacttgcacacaaggcaatgaaatgggcctcagacacttgtggcawtaagtgtctaccatgtaggcagtagcaaacaaacgtgtatactgcaagcatttaaaaatggaagtttcacagaacatcacaatccaaggattttcttacc

SEQ ID NO: 547629 - DNA, 201 bp, Homo sapiens
ttggacatgtccgacccctgtaggtgtcgactggatgccctccaggttcggatggcgaaggattgggagtcctgaactcaagtcttgcagacaggcccgcrattcttaccttgcaagatgggaaagagaattaaggtcccggcttccggtctataagcaatcatgggaagtgcgagtctcacttccttccggatctggggc

SEQ ID NO: 547630 - DNA, 201 bp, Homo sapiens
ctgacctcaggtgatccacccaccttggcctcccaaagtgctgggattacaggtgtaagccaccgcacttggccacagttaattgtatttttagtagagaygagggttcaccatgttggccagactggcctcaaactcctgacctcaggtgatccacctgccttggcctcccaaagtgctgggattacaggcatgagctac

SEQ ID NO: 547631 - DNA, 201 bp, Homo sapiens
gatctcggctttcagcagcctcgaccttccaggctcaagcaatcctctcacctcagcctcccgagtagctgggactacaggcgcgcgccaccacgcccggstaatttttgtattttttgtagagatgggatttcactattttgcccgggctggttcccaactcctggactcaagcgattcgcccgcctcagcctcccaaag

SEQ ID NO: 547632 - DNA, 201 bp, Homo sapiens
accacccgggtaccgccgttcttgtcaccaccaactggttttgtaacagttgcgagaaccttctccttctttttcttttcaacctacaaggacacaaatgyatcaacagtaagagaatgccaattaaggttaagacataatggtccgtggtcctcttcccttaccttggatttagcggctgagtacttcctcttgtacatg

SEQ ID NO: 547633 - DNA, 201 bp, Homo sapiens
tgaactcctgacctcaggtgatctgctcgcctcagcctcccaaagtgctgggattacaggcattagccaccacactcagcctcattcccatattatatgcwaaggaacaaagcacagacgagtaatttaaattacttaagattaacagtaaatgttgaagccaagttacaaacccagagccctttattttctatcagaaat

SEQ ID NO: 547634 - DNA, 201 bp, Homo sapiens
tccccgcttcctctaacacccaccagtctgctacgggtccccgaaagggcctcgttcccccagcccaagagagtggcgaagaaccggagggagccactacrgcattctacctcaccctctttgtgccctgccgcaaacccaaacaacaaaaatgaagcgtctggaaggcctctcagttagccttggacatgtccgacccct

SEQ ID NO: 547635 - DNA, 201 bp, Homo sapiens
cccttgtaatcctagtgctttgggaagccacggtgggaagattgcttgcgtccaggagtttgagaccagcctgggcaacatgatgagaccctgtctctttwaaaaaaaaaaaaaaaagtggggggtgggcaattgtggcagctcacgcctataatcccagcactttgggataatgttgagataatgttgagaaatgcagaa

SEQ ID NO: 547636 - DNA, 201 bp, Homo sapiens
aaaaaaaaaaaatcaggcattgtggcagtgtttaatgaacttagaacctagtgatttttctgtaattttaaataattcataataatttctctgggtctacrttttaggaatccaatggaaagaccaggacattgagaatctgtaccaaaacctggggattaagctaaggtaatctccactcacaagaggaagcagtgtctc

SEQ ID NO: 547637 - DNA, 201 bp, Homo sapiens
tgattgtcacctgaacaagaaaagtcaaactggagtgaaaccatgcaaatgcagcgtgtgtgggaaagtcttcctccgtcattcattcctggacaggcacmtgagagctcatgctggacacaaacgatctgagtgtggtggggaatggagagagacgccccgtaaacagaaacaacatgggaaagcctccatttcccccag

SEQ ID NO: 547638 - DNA, 201 bp, Homo sapiens
gcacatgagagctcatgctggacacaaacgatctgagtgtggtggggaatggagagagacgccccgtaaacagaaacaacatgggaaagcctccatttccyccagtagtggtgcacggcgcacagtaacaccaactcgaaagagaccttatgaatgcaaggtgtgcgggaaagcctttaattctcccaatttatttcaaat

SEQ ID NO: 547639 - DNA, 201 bp, Homo sapiens
tgactccctggacccaccacagagagggtggtcctcctctgtggctggctctctgagtaggtcagttctcacactggaactgctgcgagggaggaagtgcrtgtagatagagaggaggaggccgatgactcaatcatggagtgagtgtttggagagcccggcgtcatgggatcactcatgtattgagtagagatccccagt

SEQ ID NO: 547640 - DNA, 201 bp, Homo sapiens
cgcaggttaccttcggacacatgaaatcagatctcacgcgctggagaaatcccaccaatgtcaggaatgtgggaaaaaactcagttgttccagttcccttyacagacatgaaagaactcatagtggaggaaaactctacgaatgtcaaaaatgtgccaaagtctttagatgtcccacgtcccttcaagcacatgaaagagc

SEQ ID NO: 547641 - DNA, 201 bp, Homo sapiens
agccctatatgcattttagaacgggctttttttttggcggggggggtctctgttgcccaggctggagtgcggtggcacgatctcagctcattgcaacctcygcctcccaggttcaaacgattttcctgcctcagcctcccaagtacctgggattacaggcacctgccaccacgcccagccaattttttgtatttttagtag

SEQ ID NO: 547642 - DNA, 201 bp, Homo sapiens
agtgcggtggcacgatctcagctcattgcaacctctgcctcccaggttcaaacgattttcctgcctcagcctcccaagtacctgggattacaggcacctgycaccacgcccagccaattttttgtatttttagtagacacggggtttcaacatgttggctaggccagtctgaaactcctgagctcaggcaatcctcccact

SEQ ID NO: 547643 - DNA, 201 bp, Homo sapiens
tgagtagagatccccagtgctgagtctcacccctcctcctccacacctgtgggatgtttcaggactcagtggcctttgaggatgtggctgtgaacttcacscaggaggagtgggctttgctgagtccttcccagaagaatctctacagagatgtgacgctggaaaccttcaggaacctggcctcggtcggtaagaaggaca

SEQ ID NO: 547644 - DNA, 201 bp, Homo sapiens
agtttccagtttctttcgaaaacatggaaaaatgcatactggagaaaaacgctatgaatgtaaatactgtggaaaacctatcgattatcccagtttatttyaaattcatgttagaactcacactggagaaaaaccttacaaatgtaaacaatgtggtaaagccttcatttccgcaggttaccttcggacacatgaaatcag

SEQ ID NO: 547645 - DNA, 201 bp, Homo sapiens
ccagactggagtacaatggtgtgatctcagctcactgcaacctctgcctcctgggttcaagtgattctcctgccttagcctctcgagtagctgggactacrggtgtgggctaccacacctggctgattgtgtatttttagtagagatggggtttcaccatgctggtcaggctggtcttgaacttctcacctcaagtgatct

SEQ ID NO: 547646 - DNA, 201 bp, Homo sapiens
tagatgttaattcctgcacaccaggtggtgggaggtttggaaaagtagcttttgtttacctaaaatgtctgttttggggatttttttttttttttgagacrgcgtctcgctctgttgcccaggctggagtgcagtggcatgatctcagctgactgtaatctccgcttcctgggttcaagtgattcttctgtctcagcctcc

SEQ ID NO: 547647 - DNA, 201 bp, Homo sapiens
gagggtggtcctcctctgtggctggctctctgagtaggtcagttctcacactggaactgctgcgagggaggaagtgcgtgtagatagagaggaggaggccratgactcaatcatggagtgagtgtttggagagcccggcgtcatgggatcactcatgtattgagtagagatccccagtgctgagtctcacccctcctcctc

SEQ ID NO: 547648 - DNA, 201 bp, Homo sapiens
ctcctgtcctcaagtgatccacctgcctcggcctcccaaagtgctgggattacaggtgtgagtcaccacacccagctgtattgggtatttatgaaattttrtaaggatatcatttggaagaagggacatcttattgagttttttctaggaacacatgttatctttccacttactccatactgctttgacattacctgacag

SEQ ID NO: 547649 - DNA, 201 bp, Homo sapiens
agaatctgtaccaaaacctggggattaagctaaggtaatctccactcacaagaggaagcagtgtctcttgagggaatcttagtaggtcaggaaaatttttwaaaaaatacaagacaaataagtacaatgttaggtttttaactgattattagaagattgctaccaaaaatctatccttcaatgtaatgtagatgttgagtg

SEQ ID NO: 547650 - DNA, 201 bp, Homo sapiens
atccctctcgtagtctaagttgaccccgatagtagcaaaggtcgaacttggtaaacaggcctttctaaggatacccagactcaggactgctgaaatgagcrctgtctgcacaccaggtggtgggagtttgttgtgacaggtactagagattcactctgcaaagagcatttggggcaacgcagcagcacaactgactccctg

SEQ ID NO: 547651 - DNA, 201 bp, Homo sapiens
aaaaaatacaaaaattagctgggtgtggtggtgcccacctgtagtagggaacaaggtgggatgatcacttgagcctgggaggttaagactgcaggggccatgattgtaccactgcactctagtctggacaacagagtgagatcctatctcaaaaaatattatatcaatctttatttatttatttatttggagacaaagtgt

SEQ ID NO: 547652 - DNA, 201 bp, Homo sapiens
tgggttttgtattcgttgaggtttttaaaattattattattattattttgagatggagtctcgttttgtcgcccaggatggagtgcagtggcgccatctcrgctcactgcaacctctgcctcccaggttcatgccattgtcctgcctcaacctccccagtagctgggactacaggtgcctgcctccatgccagcctacttt

SEQ ID NO: 547653 - DNA, 201 bp, Homo sapiens
ccagttcctcctcccttaggcggtccccgtttccttcggagtcttccaaaggtgtgggaagctgggtttcaaacccacgaccccgtcccccagcttcgctsctcccagggctgcagtaaatccctaaatttccccgcattccccaaccctaagttctccctccagtacatccacttcacattattattattatcattattt

SEQ ID NO: 547654 - DNA, 201 bp, Homo sapiens
acttccaaagcccgaagcggtctcatttcccgccggccccccattcgggtccgggttttagttcctcggggagcccctggtgccccggatacggctgattytgtcgtgtgggacctgttctggctgctccagccccaggaaggacccaggacacccggaagccggaaatggtgagcgtgcggagccgggcgtccggagacc

SEQ ID NO: 547655 - DNA, 201 bp, Homo sapiens
ggtcagttctcacactggaactgctgcgagggaggaagtgcgtgtagatagagaggaggaggccgatgactcaatcatggagtgagtgtttggagagcccrgcgtcatgggatcactcatgtattgagtagagatccccagtgctgagtctcacccctcctcctccacacctgtgggatgtttcaggactcagtggccttt

SEQ ID NO: 547656 - DNA, 201 bp, Homo sapiens
tttccgtttgtgaacatttcacatgcgagcaaagcagaaaataaccccctgacactccgatgttaaaaaaaaaaaatcactgtgcctgccctctttttacsttccctaggcgcggccaccttatcagacagtctttgggtggaggcttctcttgggaacttcacagggtattgggtcctcagcccaccctcctatctttct

SEQ ID NO: 547657 - DNA, 201 bp, Homo sapiens
ggtacttgagaggctgaggcgggagaatcgatttagcccaggagttcaagtccagcctgggcaatatagtgagacccccatcttaaaaaatgtgtgtgtgwatatatatatatatataaattatatgtatgattatatatatatttataagttgtatgattatatatatttataaattttatgtatgattatatatatatt

SEQ ID NO: 547658 - DNA, 201 bp, Homo sapiens
agagaaactttcagccagattcctgattgtcacctgaacaagaaaagtcaaactggagtgaaaccatgcaaatgcagcgtgtgtgggaaagtcttcctccrtcattcattcctggacaggcacatgagagctcatgctggacacaaacgatctgagtgtggtggggaatggagagagacgccccgtaaacagaaacaacat

SEQ ID NO: 547659 - DNA, 201 bp, Homo sapiens
ttcaatttgtctttaatttcattcagcaacattttgttgtttttagtgtacaagtagtctttcgacttcttggttttgtaatttctaagcgttcaattctttttttttttttttttttttttgagacagagtctcactctgtcgcccagtctgggctatttggtgtcctgggttttatatttgttgaggctttttaaatta

SEQ ID NO: 547660 - DNA, 201 bp, Homo sapiens
aaaagtcaaactggagtgaaaccatgcaaatgcagcgtgtgtgggaaagtcttcctccgtcattcattcctggacaggcacatgagagctcatgctggacrcaaacgatctgagtgtggtggggaatggagagagacgccccgtaaacagaaacaacatgggaaagcctccatttcccccagtagtggtgcacggcgcaca

SEQ ID NO: 547661 - DNA, 201 bp, Homo sapiens
aagaatctctacagagatgtgacgctggaaaccttcaggaacctggcctcggtcggtaagaaggacatttccttccttagtcaattagaagacaagtgtgytttggtcaccagtgtggttgcacagtttggaatgtggaaagagaatacgttggtgaataaatggggcatcgtgggccaggtacagtggcttacccttgta

SEQ ID NO: 547662 - DNA, 201 bp, Homo sapiens
ggtcaaagatagttaaagattgagggtcagagcttggccaggggctggaggatggtcacaggtggagtgtgggtcaggaccaggtcctatccctacctggrctggaagtgggtgagtccagggaccgagactcgctgccgccacccacgctgtccacatcgctgcccggagtggggcctggagtccctaggtggcacaggt

SEQ ID NO: 547663 - DNA, 201 bp, Homo sapiens
ggcattttggagggtcccatcctagacttctctggttattaggtatgtaggtccagatgttacaggttccaaatgggactgcaaggcacctaaatggttargggcttggggcatcttggcaggatttgggggtgatccaggctcagactcacacgttccccagtgagatttcgaggttgtccaggctccggaagatgtcac

SEQ ID NO: 547664 - DNA, 201 bp, Homo sapiens
ggcagagcctggggcagaaacacacatggagagactgaagccgtgagggacataaagaccgaatgacactccacatacacaacacagacacaaagacggcyggaaacaccaagtcggaccccgccacatttctactgctgcccccctgccccctctcctaaggggcctagaccagcactgccgactccccagggctacaga

SEQ ID NO: 547665 - DNA, 201 bp, Homo sapiens
cctcccaagggcctggctcagctgaattctcatccagccttggaggaagaggcccagagagcttctttctgatgtccagaggggagctgagaagacagaartttgaaggtttgaatcccaggaaactggcctggggtgatggcacccaggcatcatgtctaggtaccaactccaagcacttgggtctgcaaaccctgacac

SEQ ID NO: 547666 - DNA, 201 bp, Homo sapiens
gaggctgaggcaggagaatcgcttgaatccaggaggtggaggttacggtgaacagagatcacgccatcgcactccaacctgggcaacaagaatgaaactcygtctaaaaaaataaaggattccaactgcggccgggtgtggtggctcacgcctataatcccagcactttgggaggctgaggtgggtgggttacttgaggta

SEQ ID NO: 547667 - DNA, 201 bp, Homo sapiens
ggaaggtcacagggacagggaggtcattagggaccagtaggggaagagaaggttacaaggatcctcaaggaatgggggctcatgggagacatcaggttagrgtgggtcccaggggcagaaaggctgtaggaatctcaggtcagggagatgatcaagggtcagcaaaggtcatttggtcattaacccaggccacacctcctc

SEQ ID NO: 547668 - DNA, 201 bp, Homo sapiens
ggatggggctgcgtcctaacacaccaggcacgatcctacctcagggcctttgcactggctgttccctttgcctggaacacccttcacctgatctccatgtkgccagctcactccttcatgtccttccagtctttgctcaagtccgtctgctctctaagacgtgcccccaccatcctacttagtgatacaaactccacctcc

SEQ ID NO: 547669 - DNA, 201 bp, Homo sapiens
agtccgtctgctctctaagacgtgcccccaccatcctacttagtgatacaaactccacctcccaccgtgctgctccctggtgtcatgtgtcttactccactttttttttttttttttgaaacaaagtcttgctctattgtccaggctggagtgcagtggcatgctctcggctcactaaaacctctgcttcctgggctcaag

SEQ ID NO: 547670 - DNA, 201 bp, Homo sapiens
agggtcttcagcgagcggataacctcagggctggggctgggggtcccagggtcgtccccagggtctgcatgcaaggtcttagccagagagatgaaggcgtygtagaggtggaaggggatcacgggctcggtgagctgggggtggaacggagggcgcaacacgagtgtgggtgggctgtggagggctcctgcccgcgtcccc

SEQ ID NO: 547671 - DNA, 201 bp, Homo sapiens
aacgctcggccattctcgaaagcctggcacagccgctccacacggacccgggacccgctgacccggtaaatgccctgcagggtgagggtgaaaaacagacrcctggttcgtgataggccatcgattcggtcaggtcacttctggggatgatgaagggtcagggcagcacctgcacatccagggcacggtgttctatctcag

SEQ ID NO: 547672 - DNA, 201 bp, Homo sapiens
acttctggggatgatgaagggtcagggcagcacctgcacatccagggcacggtgttctatctcagccgtgcacttcgtgaccacaaagggtacctcctccrggaagtccctgggtagctgcaggaagtcaaccccaaaaaggggtgtccgggctgggagccgcctgtgtccacagaggatcaggagagtctccaggcagcg

SEQ ID NO: 547673 - DNA, 201 bp, Homo sapiens
atcttttagcaagccaccctggggccagggcacccccagaactcctgagcctctctctaacatactcaccttcccctcccccatctttggtgtcttcagcyacgtcctctctctggtcactctgtggagttggaatctgcagggagaaacccaagaatgagaccccaacactaaaatcccagttctttgagattcctggag

SEQ ID NO: 547674 - DNA, 201 bp, Homo sapiens
agtttttccttataggaaccctctggacctctcccagcattgaactcctggcggggtgtttggccactaggtggtgggaggtagggatatatgggtccgtsttcacaatctgggcctcttccttatttaaggtgccagggtggtcagagatggtcctcggcttcctcaggctggacgtccgggcagcaggtggccctgggc

SEQ ID NO: 547675 - DNA, 201 bp, Homo sapiens
gagacagtattcagaagcaaacagggcaggggcctggccttcctaaggccccctctgcttgaggtcttcctccctgttcccctactccccactcacaacartggctgtaggggtcttgtcaggttctgggtcttctgagagtagagggtctccagccagcatctcaagggtcctgggggataaaggtgtgtcaggatgcca

SEQ ID NO: 547676 - DNA, 201 bp, Homo sapiens
gtaaccttgggcaagttcccaagcatccccgggcctcagcttcctcatcaatgaaatggcgacgttggtagtggtgccttcctcccagcttgctgggaaaygaggggatcaggcctgaaggacagcaggatagcagggtgacctctgtaacattccaccctgcccccctcacctggtagtagtctcttttctgctgggcca

SEQ ID NO: 547677 - DNA, 201 bp, Homo sapiens
cgattcgctgcttggcgatctccaggtcctgctgccgcgcgttggcctcgcggacacaggcctggtacagcgcctcggcctcctgcgcctggggaaacggsaggccaggagcggggtggggcgcgtgtgggcgagagtggagggcagggggcgccacagcgctacaggggctcggggccgggtgcccaccttggcctgggc

SEQ ID NO: 547678 - DNA, 201 bp, Homo sapiens
ctgggtaatctcaaaatgcttgggcagcggggtgcggcgcagggggctgccctcaggggaggcagctgcagggctgggcccccgcccccgcaaactccctytgggcactgatgtgatgggggtctcctcgcacagcttggaagccaccagggccagactggacagctggtgggttacaggcctcacaccgccccggggata

SEQ ID NO: 547679 - DNA, 201 bp, Homo sapiens
gccgggtgtggtggcgggtgcctgtagtcccagctacttgggaggctgaggcaggagaatgacgtgaacctgggaggcagagcttgcagtgagccaagatsgcaccactgcactctagcctgggtgacagagcgagactccatctcaaaaaaaaaaaaaagattctaggccgggtgcagtggctcatgcctgtaatcccag

SEQ ID NO: 547680 - DNA, 201 bp, Homo sapiens
aatcacttgaacccgggaggcagaggttgcagtgagctgagatcatgccactgcactccagcctggatgataaagtgagactctgtctcaaaaaaaaaaawaaataaataaattttttttggtagataaagacagggatctcactatgttgcccaggttagtctcgaactcctggcctcaagcaatcctccaccctcagcc

SEQ ID NO: 547681 - DNA, 201 bp, Homo sapiens
caaaaatcagaagcagaagcagtcacttccccttcctgggccccctcccccaggcgtctggggtgagggatcaaaagggggagggggagtgaagggctggsgtcctgaacccatccgggcacagggctccccacaatggaggatccctgggtccttcccattcaggaactcctctcctggctctcaggacggagcgggaca

SEQ ID NO: 547682 - DNA, 201 bp, Homo sapiens
tgcctcagcctcctgagtagctgggattacaggtacacaccaccacacctggctaatttttgtatttttagtagagacaggtttctccttattggttggaytagtctcgaactcctgacctcaggtgatttgcctgccccagcatcccaaagtgctgggattacaggcgtgtgccaccgcgcccagccattactctacctt

SEQ ID NO: 547683 - DNA, 201 bp, Homo sapiens
gtcattagggaccagtaggggaagagaaggttacaaggatcctcaaggaatgggggctcatgggagacatcaggttagggtgggtcccaggggcagaaagkctgtaggaatctcaggtcagggagatgatcaagggtcagcaaaggtcatttggtcattaacccaggccacacctcctcacactccgtcccgctgaccatg

SEQ ID NO: 547684 - DNA, 201 bp, Homo sapiens
cccgggcctcagcttcctcatcaatgaaatggcgacgttggtagtggtgccttcctcccagcttgctgggaaacgaggggatcaggcctgaaggacagcasgatagcagggtgacctctgtaacattccaccctgcccccctcacctggtagtagtctcttttctgctgggccactgtctccatggccagggttcccaggc

SEQ ID NO: 547685 - DNA, 201 bp, Homo sapiens
tctgggcactgatgtgatgggggtctcctcgcacagcttggaagccaccagggccagactggacagctggtgggttacaggcctcacaccgccccggggawacttcactggctggcggctgaagtggccacgagactgtgtccccaggagtgagtcctctgggccttggctggacactgtgtacggggtgggtggtcagtg

SEQ ID NO: 547686 - DNA, 201 bp, Homo sapiens
gagacatcaggttagggtgggtcccaggggcagaaaggctgtaggaatctcaggtcagggagatgatcaagggtcagcaaaggtcatttggtcattaaccsaggccacacctcctcacactccgtcccgctgaccatgaaggcttcgcactcgcggcacttggctgggccccgcagtcgccgcagctggtgggtctgagcc

SEQ ID NO: 547687 - DNA, 201 bp, Homo sapiens
atgagccgcaagtccagttcctcccctggggaagatggatggacctctgacctttgcaccctagtctgctatggatgtcttccctaagcccccagaccagmccagtggcacctgtcctacagcctcacagctccccaaacactactttgggatcacttgtcctggttgcaattttacagattcactgttttttgtttttta

SEQ ID NO: 547688 - DNA, 201 bp, Homo sapiens
tttcatacgacctccctttgagcaggccttggggtgggaccggggtcgggtgggtggagggtggggagtgtgtggagaggtgaggccacagtcaggctggrcaaacagattgggcagcggctgtgagcacagagcgcccattgtgtacccagagctctgctttcaataatcttctcggaagaatgtttcattgagcgccag

SEQ ID NO: 547689 - DNA, 201 bp, Homo sapiens
cagtgcctgccctcccccaccctgcagctggctccatctcattgatgcttacagccctcgttagtgtttgttaacacatccagttgtgttttgtgacactrgagagaggcaaagtttctcttgtgactcacttgcaggtgggctttggtgactcttagctggcccatccgctttacaagccagcgctccacagcaccccac

SEQ ID NO: 547690 - DNA, 201 bp, Homo sapiens
cttctcagcagagtggctattaccctcaggaaggtggggggtgcctgtccgaggcagtgcccacaccgctgagctaggctctggaaggctcagaggggtgygtgtgtgtgctcatgtgtaagactttcagaggggacttcttcctcttctccctcctcttcttctctcttccgcctctccagccatctctctgctatctgg

SEQ ID NO: 547691 - DNA, 201 bp, Homo sapiens
ctcaggaaccagaagccttagtctccctgtttcttagtctcactatttcttggatgggagaaattgaggcaaggactcagggagggcctagtttggtgccygtgcccaacttcagggtctgtgggagataggattgagaggccaggtgtttggcgggggtcccggagctgggcatcaaatggcgtcctttgttccttcgat

SEQ ID NO: 547692 - DNA, 201 bp, Homo sapiens
gtgacttttggtttaagtagcggaatgagcagacagcaggagggcagtgctccagtcccctgatctgcgaagctaactgaaggtggccggccagtgcctgycctcccccaccctgcagctggctccatctcattgatgcttacagccctcgttagtgtttgttaacacatccagttgtgttttgtgacactggagagaggc

SEQ ID NO: 547693 - DNA, 201 bp, Homo sapiens
attgaggcaaggactcagggagggcctagtttggtgcccgtgcccaacttcagggtctgtgggagataggattgagaggccaggtgtttggcgggggtccyggagctgggcatcaaatggcgtcctttgttccttcgatctggcacccagcgtttagatccaggaatcagaaggagaacagaagaaagaaggaggggtgtg

SEQ ID NO: 547694 - DNA, 201 bp, Homo sapiens
cgggagaaatccagggcaagaaggaagaggggagtcagaggatggtagagagcactttttggaagctgccacgccgcgtctcaggctggccgggctgagcyggggaagagggagcaaaggcggcgcagggcctgcgcttaggcagcgggaggcagctcggcgcgggcctgacctccccagagcgccccgctgcggccgagc

SEQ ID NO: 547695 - DNA, 201 bp, Homo sapiens
ttccagggtggcatggagccaaggcttccctgccactccgggcttgcacgagttgtatggaggcctctcctgtgcctgctgagtcagccctgcccgaggcytaccctccagctccagcccccacttctctcccggggcccctgccctttggcaccgcaagtgcaggaccgtgaatggccctttctgctgtcccctaatcac

SEQ ID NO: 547696 - DNA, 201 bp, Homo sapiens
agacaatgactataaggccctcatcacaatatgtgacacacaataagtctcttatcatcttgattatcaagagaaacacataagaaagatctctgaaagargaaagaaaacgtatttgccaaatgtctaatagggaccatatatgttattttattttaatcctcaaaccaatgaagtacggagaaagaaacagcctgaaac

SEQ ID NO: 547697 - DNA, 201 bp, Homo sapiens
gctgaggtgggaggatcgcttgagcccaggagttcgaggttacagtgagctataatcacttcactacactccagcctgggcaaccccgtctcagaaaaaamaaaaagttattaattctagagtctatctcacagagttattttaagaattaaatgagacaatgactataaggccctcatcacaatatgtgacacacaataa

SEQ ID NO: 547698 - DNA, 201 bp, Homo sapiens
ttttacaactgtatataaagaaataaatgctatttacatagtaatttatattaaaaagaataattgaatttaagtactttgtactaatattattctatctraacatttctgtgcaaaacactggataaatttaatttcaataggcaatattagctaaatactcttcaacatataaagtgcccacttaagtaaagatcaaaa

SEQ ID NO: 547699 - DNA, 201 bp, Homo sapiens
aattgctattttcgtagtctaagcaggtatagatcattttcagtctcattaaattagatttttcaaagtactagagagtgagttaatctacatttgtcttmaaagtctgaaacacaaaacatgttagcacaatatgaattactgaggctcggtcctatagaacattattggtttcatgtagcaaatactggttacctagta

SEQ ID NO: 547700 - DNA, 201 bp, Homo sapiens
aactaaaagtcaggtaacactagatactgaccatttgcatccctgttgttcctacagatagaatttcttggaagtgggaaaacctttttgtgaaaaaaaawatatatatatatatactttttttaaaaaagaattctagtgttagcatcataaggcttttgtttaagatagaatctctgatgttaagaatggcttaagcag

SEQ ID NO: 547701 - DNA, 201 bp, Homo sapiens
aaggaaaacagatatttgacagacaggaggaagagttagctaaagaaattgtgaaaggatgagttaagaagtaatgcaattaaaatgatgtaagaataacrtttcaaaaatggtcaaggacaactattttttaagaaaaacaaactggctgttatgaatagtgctgcaataaacatggaaatgcagatcttcaacatactg

SEQ ID NO: 547702 - DNA, 201 bp, Homo sapiens
ttcggaagaggtatttggtatgcagaaaatgaattgtgacctagatctgccactgaaattagcaccaagaaagaactgcgttgattgtaacacattttctrtattactatcaactttccagtggtatttctaacttggtcaagtctctgtgggtttcacttatacgagtttcacaaaattcacttatatgaaaaccattca

SEQ ID NO: 547703 - DNA, 201 bp, Homo sapiens
caatttgaagcacctttattaccataaatttgttatcaaaaatgtgctggtatgtgctgtgcgacagaaagaggttaattctgtttagaatcgtatttactaaataatttttaacaacaatttttatcttacctgagtgtgaaaatttgaaatggtggttgtttcaatatctttcttgcccagaatttccattttcactgg

SEQ ID NO: 547704 - DNA, 201 bp, Homo sapiens
aacacacaacgagggaataacattttttgtttttctctggaaccgtagacactaaaattatacacgccaatgctacagaacattatcattttatagagtamtaaaagtaatataagaaataaaactacctaaagttaaaaagctttgattctcagtgaaacctcaaaattatatatgaaaatttttgaaaaagatacttaa

SEQ ID NO: 547705 - DNA, 201 bp, Homo sapiens
aatttgaagcacctttattaccataaatttgttatcaaaaatgtgctggtatgtgctgtgcgacagaaagaggttaattctgtttagaatcgtatttactaaataatttttaacaacaatttttatcttacctgagtgtgaaaatttgaaatggtggttgtttcaatatctttcttgcccagaatttccattttcactgga

SEQ ID NO: 547706 - DNA, 201 bp, Homo sapiens
atttgaagcacctttattaccataaatttgttatcaaaaatgtgctggtatgtgctgtgcgacagaaagaggttaattctgtttagaatcgtatttactaaataatttttaacaacaatttttatcttacctgagtgtgaaaatttgaaatggtggttgtttcaatatctttcttgcccagaatttccattttcactggag

SEQ ID NO: 547707 - DNA, 201 bp, Homo sapiens
ttaaaatctgcttgagtcagtgagacccttccacttacattctaccttcctatcccatgctcctttttcctcaccttatttgtggtaaaagtgaactaaaygactacagacacaaggatacaaggcacaagcaagggagagaaccattacactggaagcagggaattaagcaaaatcccagttatttaacaatgcaatcgc

SEQ ID NO: 547708 - DNA, 201 bp, Homo sapiens
tttgaagcacctttattaccataaatttgttatcaaaaatgtgctggtatgtgctgtgcgacagaaagaggttaattctgtttagaatcgtatttactaaataatttttaacaacaatttttatcttacctgagtgtgaaaatttgaaatggtggttgtttcaatatctttcttgcccagaatttccattttcactggagt

SEQ ID NO: 547709 - DNA, 201 bp, Homo sapiens
ccataatattataaaactgtaaacaacctcaatgtccaagaataggagaataaatagtgagtgtgatattgtgcaatatgtatctggtcttcatccctatwtcctgaggtagggctcctaaactccttgttatctccaaatagctctatttttgtatgctaatattgactaacagctttagggcggggctggtcacctgaa

SEQ ID NO: 547710 - DNA, 201 bp, Homo sapiens
gtgtatgggggttgagagcgggtgtggattattccacagaactcacgtttcaggaagaagcctattcaagctgactttttaaaacacagaaaggaaaaaaytagccagcgatcttcctaaccttgtgccttgtgaatagaaaggcattcctactttaaaatatatagtgaaaaaacagtgtgactgggtcaaagtgagtac

SEQ ID NO: 547711 - DNA, 201 bp, Homo sapiens
gaggaagagttagctaaagaaattgtgaaaggatgagttaagaagtaatgcaattaaaatgatgtaagaataacgtttcaaaaatggtcaaggacaactawtttttaagaaaaacaaactggctgttatgaatagtgctgcaataaacatggaaatgcagatcttcaacatactgattaaatttccttgagttggacatat

SEQ ID NO: 547712 - DNA, 201 bp, Homo sapiens
agcaaccactgatcttttaactttcttgatagttttgccttttccagagtgtcatataattggaatcataaaatgtgcagccttttcaggatggcttcttycacttggtaatatgcatttaaggttcctccatgtctttttatggcttgatagctcatttctttttagcactgaataatattctactgtctggatgtacca

SEQ ID NO: 547713 - DNA, 201 bp, Homo sapiens
tgtttgtgatacatttaaataattaacagcataacaatgaacagcagttatgaccacaaattcaacatgcaccaactttcaacctgaaaaggctgacaagaaaaaaaaaaagagagaaaaaaatagataaaacaaaaaaacattcaccaactgtaggaaactaatgccaaacaagcaaagtattccttctttttagtaaga

SEQ ID NO: 547714 - DNA, 201 bp, Homo sapiens
taaaatccctgctttttgacatgagagaaaatttccattaaacatctggctcaggaacacttacactcggtgatagcagttaggcaactggtcaagagtaaaaaaaaaaaaaaaaaatgagataagaaagatgactcacaagagcatacatatgagcaatccggtcatgtaatgacattggagaagacagcctatgggggc

SEQ ID NO: 547715 - DNA, 201 bp, Homo sapiens
agggtaatcagaaactgcaggaaaaacagaacacttttttatgttcctacctcaaaaaacagggcaatcagaaactgcaggaaaaacaagacttttttttwaaagaagttatggtaccaaatataaaactttcaaaaaatgtgacatggttttaagtacgtaggtgaaatatagaaaagaaagatgcttttgcatattctt

SEQ ID NO: 547716 - DNA, 201 bp, Homo sapiens
ttgactcttgtaataacacatagtttaaaacacattgtacagctatacaaaaatactttctttacgtccttattctgtaaggtattttctacttaaaaacttttttttttactttttttaaaccttttttgttaaaaacaaagatacaaatgcacacattggcctatgcctacaacagggttggaatgattaatatcactg

SEQ ID NO: 547717 - DNA, 201 bp, Homo sapiens
acataggtaacctccagtttagttacactcaagcttattccctataagaaataaaaacagcatttaaatatctctgttaaataatcaaccccagtgtgcayagcagaaagagaggtcaactgggccatgagggaaaaaaattgagttctgtattcagctctatcaccaactaaaaaattttaagcatttcacttcatctct

SEQ ID NO: 547718 - DNA, 201 bp, Homo sapiens
gtctgtaatcccaacactttggtaggccaaggcgggaggatcacttaagcccaggagtttgagaccagcctggacaacacagagagaccctgcctctatcaaaaaaaaaaaaaaaaaaaaaacattagccaggtgtggtggtgcacacgtgtggtctcagctactcaggaggttgaggtgggaggatcacttgagccccag

SEQ ID NO: 547719 - DNA, 201 bp, Homo sapiens
cttggtggtccatttactagcaacatcagcatcaccagaaaatgcagactataagcaaagctagtgctcacacctgtaatccgaacatgctaggaggccaragcaggagaatccgttgagaccaggtgctcaagactagcctagacgacatagtgagactctggctctataaaaaaatttttaaattagccaattgtaata

SEQ ID NO: 547720 - DNA, 201 bp, Homo sapiens
acctcataatttcgccaagaccaacatgtttattttcatatatacacaaagaaaagcttctcatcttacgaggatcttcaggttcacacctttgtgtgagyaccaatgttgtatccatgagtgacaaagaattaacaatgttcaatttttatttcctggcagaagagccatcaagtaaacaactatgctacaaaatactag

SEQ ID NO: 547721 - DNA, 201 bp, Homo sapiens
caataatgaatgagatagcatatctttttgcaagttaattctttgcactgcttctcattggtaaaaccggaggaaagaacagtatctcattataaaattaktgtgcagagtaaatgaaaaacgcatgtgaagtacttataatagtcctagaacataataaatactcaatacatcataactactattattgccaaaaacagt

SEQ ID NO: 547722 - DNA, 201 bp, Homo sapiens
agctactcaggaggctgaggcataagattcccatgaacccaggaggtggaggttgcactgagctgagatcacaccactgcactccagcctggcacagagcragactctgtctcaaaaaaaaaaaaaaaatcattgttacattacaggttgtactgatttttgaaaaaagtgcaaaagcaattcaatggaagattaatcttt

SEQ ID NO: 547723 - DNA, 201 bp, Homo sapiens
gcctttacttttttttttttagagcagtttcaggttcctagaactataaccacacctggctcccacaaatgcatagtctgtctccctgattatcatcaccyccagccagagtggaatacttgttacaactgataagtctacattgatgcatcattattcgcctgcccgcagtccatggtttacattcaggttcactcttgt

SEQ ID NO: 547724 - DNA, 201 bp, Homo sapiens
gaagggcaatttcatgatacatgttaaaagtcttaaaaaatatttctaatcctcagacccagaaattccacttccaagtaaaagttatctaagaaaataaytgaagattatataaagatatccattacagtattatttaaaacgacacaacagggaatgctcctaaatgtctaataacaggggactgattaaactctggta

SEQ ID NO: 547725 - DNA, 201 bp, Homo sapiens
gggcagcgacagcgggcccggcgggtgccagcgaaggtggcggcggaggcggcaggagaagaggctcaacagggcctgggacagttggggctgcattcgtyggcggcagcggcccaggatgttggcggctgcgacgccgccggtgagggggagcgagagggggctcctggctcggccgcccccgcttctcctgagaccccc

SEQ ID NO: 547726 - DNA, 201 bp, Homo sapiens
actaaagttatcctgagactaacagatctcaatcacatcctccatactaacattacccgatttgtgaaagaccaggtaagttttcaagctagttttccatraagatttgtaatgatgtataacatgtataaagcattccctccagtaaagaagaagccccacccgaactcagtaattaagatttttcaattagaggaagag

SEQ ID NO: 547727 - DNA, 201 bp, Homo sapiens
aaaaaatgatagagcatgttgattctgctctcagcaatatctttccttgttaaatagggaacttatggggattatggactatattaggagaaatgttttcrgtctcatctgcaatatttataaaaataggattccttgaccttcaaagggcaaaacttaaaaaaaaaatgaaaatgaaaaaagaaaatctactacaaaagt

SEQ ID NO: 547728 - DNA, 201 bp, Homo sapiens
tcttctctaatgactgaaaattcataaataaaattaagttccaggaccaccagagcacaggactcattcaacagtcctcaatattcttatgtggttgaagygtttaatatctaatttaatcataatctgaaatgttcttaaaaagtggttattttttaaatctcaaagtaagtatcaaggtaagttgttggtacagtcatt

SEQ ID NO: 547729 - DNA, 201 bp, Homo sapiens
gtacagctttcaaaactccaacagcagccgtactctgccagtcaaacccctgaccgacatgatcagcatgagctctagtcctatcttcaaagagaacttcrcggggttcactggtccgaggtaggtactggagattttttatttcattcattgatctagagttgatttggttgttaaacaaagggtaagcaaggaagaaag

SEQ ID NO: 547730 - DNA, 201 bp, Homo sapiens
aaaaaaaaattaattaatagcagtaaggcaaaaaagtctgctaaaataccagatttaaataagatgaggactgagaagggttcaatgattatgatcattascatttaacacactatattataatgcttaatgtaattaccttcctctccctgtgtgccataataaagctgaaaatatatcttagattaggctcaaatgtag

SEQ ID NO: 547731 - DNA, 201 bp, Homo sapiens
tagaaatgtagacagacatttagccccacatggagtagactatggctacccacccagcatccattcctcccctttaattccctgacagaaccctaattttyattaggcatctcattctgccctgtatgtgacctcattcacaagctccagagttaatttctgatgagtactggtaaattatggtaagctcatttcccctga

SEQ ID NO: 547732 - DNA, 201 bp, Homo sapiens
gcgccgccaccgcccgtactacgcgcaccgctccgacctgcgcagccatttcacccacaaacacacatttaaatggcccgaccgcccccccgtccgcgcakcgcgcaagcgccgcccgcgcactgcccgctgggcattggagtctctcctccgccctccacttgtcggccgttcttcgtccagagatgaacatgccggaag

SEQ ID NO: 547733 - DNA, 201 bp, Homo sapiens
actgcaggaaaaacaagactttttttttaaagaagttatggtaccaaatataaaactttcaaaaaatgtgacatggttttaagtacgtaggtgaaatataraaaagaaagatgcttttgcatattcttcctttgagtgatgatataacattgaaaccttagaatatgaattaataacttaatagctgggtctgcagtaaac

SEQ ID NO: 547734 - DNA, 201 bp, Homo sapiens
atgtctcttaagtgaactcaagggtggcaaacttctctaaagagccgaacagcaggctttgcaggtcttatggtctctgtctcaattactgtattctgctrctgtagtgcaaaaactaccatagacaatatatatgaatgaacagagctatattccaataaagctttatttctggacacagtttaaatttcgtatgatttc

SEQ ID NO: 547735 - DNA, 201 bp, Homo sapiens
aaaaaattatatatatatatatatgtatatgtatacacacacacacacacacacacacacaaaattcaattagaaaataggcaaaaggtataaagagacaytttactgaccaggatatatagacagcaaatgatgatatgaaaagatgtgtattatcactagccatttgggaaatgcaaattaagatcatgatgatgtatc

SEQ ID NO: 547736 - DNA, 201 bp, Homo sapiens
tggataactgaaataagccttctataggcagaacacagagttccaaaagatatccacataaaaaaactgatatgttacagcagacagtatgaaaaaaattytaaaaggcatgaggatatgataaaagaacagaatgctaggtaactaccaacaccaatgtcctctcaaaaaaaaaaaaaaaggttataaaagaaagccata

SEQ ID NO: 547737 - DNA, 201 bp, Homo sapiens
cattttgtactccctagcttcaaagtcttcactttagcccagataccaggatacgaggctcactgttaccaagacaggccaatcttttttttttttttttycttttttttgagatggagtttcactctttgtcccacaggctggagtgcaatggcatgatctcagctcactgcaacctccacctcccaattcaagcaattc

SEQ ID NO: 547738 - DNA, 201 bp, Homo sapiens
cgcactgaagaaagaaaaaagttacgtgagactttaaaatatgtaataatttagtcaagtgaaataattagcaaaggaaaacagtagaaacaaaatgtgtyataacaataatcaaattaaaattaagcaacactaaatgataggtaactctctaaaaattcttgtaatgcctgggaaattattttcctcctattttactac

SEQ ID NO: 547739 - DNA, 201 bp, Homo sapiens
atttcatactggctaacaaatctccatgagtaaacaaaatttattattgaattaccgtggtggcaactaattgagaatggcatatgtataaacaagttatyaaaggttattatcaaacactggccactgttgctttatgagaaaaataacaattgccctgccttgaatttaaaacgttatttgaaagtcagtgtccaaagt

SEQ ID NO: 547740 - DNA, 201 bp, Homo sapiens
gtaaaatcctcagcatgaaaacaaatcacatctttggttatgcgaggttggtcactcctaagattaacaaaattaagtttcagagacaaacatctcacaaygaaaaatgatgacaaatttcagttcttttgttcttggaaatgcttctaccagcagagaaatagatgcatagtttctaaggactaggtatacaattttttt

SEQ ID NO: 547741 - DNA, 201 bp, Homo sapiens
ctcacatttttattccaccattttccacaagttttcactaacacaaaaagatggacattagtatttacattttgattcattcaattctaattcaaaatgcttctgaatgcctcacttaagaatatttaataccaacagaaataaaatttgatggcacctcagatgcattattaaataaatgatgttggtacagctgcctaa

SEQ ID NO: 547742 - DNA, 201 bp, Homo sapiens
tgaacaggcctctttactactttgggcctcagtttccttttctacaatacaaatttaagccagaggatcactaattccctctagttctgtacagttaaaamacacacacacacacacacacacacacacaagaaatgagaaagtagggaataaaagtaaaaataaaaagagagcaagatcattgcatattggtggtgaaaa

SEQ ID NO: 547743 - DNA, 201 bp, Homo sapiens
acagagtgagaccctatctcaaaaaaaaaaaaaaaaaaaaaatagtgcaaaagcaaagagttatgatagactatggtttggaaagtgaattcggtatggcyggagaagactaaacacagatacatctagaagaggtacagttgacctgattattaatgtaaaccacactaaggggtttgatcttttatcctgcaggcagtt

SEQ ID NO: 547744 - DNA, 201 bp, Homo sapiens
cctggtatgtagtcataaatatttgttgaatttctgtatgttaaggctagaaatgaagtaatcaaccacaaactctggcaaaaagaaaaaaaaggggtggrgggggagaagaagaactgctgattaccagtctatcacttgcatttaaaaatttaataaatgcaaatgtttgtgatacatttaaataattaacagcataac

SEQ ID NO: 547745 - DNA, 201 bp, Homo sapiens
gtattttaaagagaaaaaaccctcacttaattcttacaacaaccctgtgacttaggtattattatctctgctttacagataaactaagggaggcatagatygattaaggaatttgcccaaggtcactctgttattatgtgagtgatctaggaggccctagattcctagctagtttgtttctttgacgtttatatattcaag

SEQ ID NO: 547746 - DNA, 201 bp, Homo sapiens
attgcccatgtggctgttggcaggaggtctcagccccttgctgcatggacctctccttgaatatcctcataacataatggttggttttccccagagcgagwgatctgaaagagagaatgagcaagaagccagttttttatgtcctaatcttggactcaggtattgtcactttgccacattctgtttattagaagcaagtca

SEQ ID NO: 547747 - DNA, 201 bp, Homo sapiens
ttaataatctcataggcagttgcagtcacttctttgtggacatttttccattgctcaggatctttatcagttcctatatcagagttcagatccttcaaagrgacaccagctatgttcactccactccacacaggaacacttgagtctccatgctctccgaggatccatccatggcagctttcagaatggataccaagcttt

SEQ ID NO: 547748 - DNA, 201 bp, Homo sapiens
aacattctgtccagttgctaatctgtgcattccacttggggtttagaaatctgtccttatgcctattgtttacagcactgaagccaggggaattacgtggyccctcccctggtgtttggagtttgagttgttgtttctgcacagatggatctgtgaggagagaagttgagtggcaggagaggataggtctgtctcccaagc

SEQ ID NO: 547749 - DNA, 201 bp, Homo sapiens
ccctaaacacctgctctccatagcccatcactgcccggttcatttcctgcagagcactaagcaggtagaaaaaggggcatcagagagtggctccttcctcrctgactgtctcgctcctctctagctgctacactcctggagggcagggactctttgttccatatgtgtttatatacccaaagcctcacacagaaaatgctc

SEQ ID NO: 547750 - DNA, 201 bp, Homo sapiens
caccagttaggcaggggcaccattgccctgtgcaacctgttcccatgagtatatcctagagaaagagagtggcctgggtacacttggtaggagaacatgtrttgttggtttatgccctggtctccagtgcgataccaaaggatggggtgaggatgtatcaggcttcatggaagcaaaggaagccccaggcaattcccatgt

SEQ ID NO: 547751 - DNA, 201 bp, Homo sapiens
gcagatattaccaaaacctatctatacttttccagtttgagttttccacaaaaccagcagaaatttttttctgtcttcacagtgttacagatagaagatayattgttactgaatttacttaaaggaagcgctttcacttaaaggaagcgcttaatggcttctctttggcatacccaaattgccagcttcctggggccatta

SEQ ID NO: 547752 - DNA, 201 bp, Homo sapiens
tcagcttttaagacacaggatgctgctttatggaaataggagtttacaggtctaaccccaccaccactacccagctccggccaaataccactacagcagcmcccccttatcctcgggggatgcattccaagacgcccagtgggggcttgaaaatgcagatattaccaaaacctatctatacttttccagtttgagttttcc

SEQ ID NO: 547753 - DNA, 201 bp, Homo sapiens
gatttcattacctcgaaatattactcccttaggaaaggcttctgacagagagaaaggagttccttgtccgtaacaaccagactgttgtcagcttttaagayacaggatgctgctttatggaaataggagtttacaggtctaaccccaccaccactacccagctccggccaaataccactacagcagcacccccttatcctc

SEQ ID NO: 547754 - DNA, 201 bp, Homo sapiens
tagagtttaccctaagcatcctacatgttatcatgactcatgccagattaaattctacttagttaccagcttttggcaccttgttccaggtttctttagggaggagggagaaaagggtatgtcttagcatacacagctcttatcagactgttagcattgcttgtttacttctgtgtttgccttattggactgtaagctcta

SEQ ID NO: 547755 - DNA, 201 bp, Homo sapiens
atggctctgaatcctggctgggtttaagtcaagcttgtccaacctgtgggctgcaggccatgggccacatgcggcctaggacagctttcagtgtggcccawagcaaattcgtaaactttcttaaaacattatgagatttttttgcaattttttttaagctcttcagctatcgtttgtgttagtgtattttatgtgtggccc

SEQ ID NO: 547756 - DNA, 201 bp, Homo sapiens
ttatttataactctatataatagagctccatatcataaaacttttgagcttccatgggattgcagtaagtataataaacatgttttcactgtttagtcagrtgaattccttttctgtaggtccctattttttcattcccttcataatttagtagttcatgtttgaacatttttggtgaactttgtcatttgcattgaattt

SEQ ID NO: 547757 - DNA, 201 bp, Homo sapiens
tattggacagtaagggcagctatagaacctaggttcatgtggttcagtccacttgcttttctctattcctgtgattgtactggatcctgagagggttgacmtggagacaagaatccaggatgctgttttgctgccttttttttttttttttttttttttagacggagtctcgctctgtcgccaggctggagtgcagtggtg

SEQ ID NO: 547758 - DNA, 201 bp, Homo sapiens
ttacttagatgcatagtggaagctcaaaaaatatttactgaactcactcttgtggtttagctttcaactataaacataggaataaagggagaaaaaagcawgaaaaactagaagctgaaagccaggcaggaagagaatggatctagaaagaagtaggaagtccatttgctcagaggaaggatacccactcaccaatgggaa

SEQ ID NO: 547759 - DNA, 201 bp, Homo sapiens
ccacacccagctaattaaatttgtgtgtgtgtgtggagactagactccaagtcctagggttaaacaactcttctgcctcagcctaccaagtagcttggagkgattacaggctaggagtgttctttctccatatatactcaacaaagtatttctctttttagtaatttttgaggttgtggtaaaggtaggtgtcaagaaatt

SEQ ID NO: 547760 - DNA, 201 bp, Homo sapiens
ttgtatttttagtagagacgggggtttcactatgttggccagtctggtctcgaactcctgacctcaggtgatctgccctcctcggcctcccaaagtgctgkgattaaggaatagcatattttaaggtagatgtgcctaatatataatgaactcctacaaatcaataaaaagatcagcagcccaaaaggaaaataaacaaag

SEQ ID NO: 547761 - DNA, 201 bp, Homo sapiens
aaagcatgaaaaactagaagctgaaagccaggcaggaagagaatggatctagaaagaagtaggaagtccatttgctcagaggaaggatacccactcaccartgggaaataggtccagtgttgtgtggtagggttgtgggtagtagtagtaatttcacaatgggtgtgggaggttggtgagtagatggactagattcaaaag

SEQ ID NO: 547762 - DNA, 201 bp, Homo sapiens
tcttagtatttttggagtggtagagtgctgtgtctacatacctttgtaataaaaaacaatttggggctggtgttgataatcaagttgattgcgatctctasgagaggagagtctatctgatctttttcttgccgtttgtatatattgttctacctctcccatctcatctgaaatatggggcagtttcttggttctcagttg

SEQ ID NO: 547763 - DNA, 201 bp, Homo sapiens
caaaatttcgttatataatcctgtatctatgatctcttcaataatttcggaatggtagttttaggcaactttaaagcttaagcttattctgaatttcccaragtgtttttgcactttttttcagatgggcctcttcttcaggggtcagctttatctttataaggttggtaataccgttctctcccaggatacaaggaatac

SEQ ID NO: 547764 - DNA, 201 bp, Homo sapiens
tgcatggaggtgtgcactctgtggaagagtcaagtgagaaaacgccttacccataaagggagatggtatcattacctcttcagttctctttccctactgcraccccacccgaaaagccccacctaggttccagttcctctgggtgcaggtgcctgattgcctgaagcctggtgctcaggattgtcctacattctccccact

SEQ ID NO: 547765 - DNA, 201 bp, Homo sapiens
atttatgtaggaatacatcatctttaattaaagcatagctataaattatgcaagtagcagtacatattttaacacaaaagcaaggttcatagacaaaaatrgaatggtaaaatcatgaaaatgtaaatctcttggttaggagacatttaggctcaaaataataattaaaaaatcaacagttatcacgtgtcgatacgacat

SEQ ID NO: 547766 - DNA, 201 bp, Homo sapiens
tggggtttcaccatgttggccaggatggtctcgatctcctgacctcgtcttctgcctgcctcggcctcccaaagtgctggaattacgggcgtgagccaccrtgcccgtcccacccaattctactgtgcgcttttccagagaagtgtgaattatttgtgtcttcagggaaatacatagctgtctgggttttttttttttctg

SEQ ID NO: 547767 - DNA, 201 bp, Homo sapiens
atccaataagtcagtcattcatgtatgagactgtgaagaaaccacgtttggatgcgtccatagtcatcgaatcttcggttcacatcttggcttttgctacytactagtcgggagatctcagtttcctcctatatggcatgggaatgttaacccctctctcctaggattgcttgcagtagtaagtagaacaccctccacaaa

SEQ ID NO: 547768 - DNA, 201 bp, Homo sapiens
atggtctcgatctcctgacctcgtcttctgcctgcctcggcctcccaaagtgctggaattacgggcgtgagccaccatgcccgtcccacccaattctactrtgcgcttttccagagaagtgtgaattatttgtgtcttcagggaaatacatagctgtctgggttttttttttttctgttttgtttttcctttaagcatctg

SEQ ID NO: 547769 - DNA, 201 bp, Homo sapiens
cttcctattcccattactttaaatgtcgtagctgttgctttttgtgctttgggaagattcttgatgcctccacattctgattcactggacagccctgattrtaggccatgggggttagagctggaagggtctgtgggagtcaatccatgtcccgcatttgacaggtcagacactgaaaaacagatattgagagctcaagga

SEQ ID NO: 547770 - DNA, 201 bp, Homo sapiens
gtattcccccagcctgggccagtggatggaggaattaatggtttaatcttaactaatttaattttaaaaagataatgaagaaatgctaaattaatttttamaaatcttagtattccttcatggaaaaaagctaacaaaatgattggacatgtatacattttagtgtttattgtttaaaagatgtgttattggattgcacta

SEQ ID NO: 547771 - DNA, 201 bp, Homo sapiens
tttagtgtttattgtttaaaagatgtgttattggattgcactatcaaactccataaaatctggagttgaaataaataaataatctcaacctgtggtgcagwtaggtgctggtcagctgatgtcacagcctactgactgggactcattgtgcacgaatttaagtcctttagtcaagctgtgatcacttccacgaaatccctg

SEQ ID NO: 547772 - DNA, 201 bp, Homo sapiens
aggctgaacccaaagacccagcattgtgactggaagggcctgcgaaagaaagcccttgccaagtgatctctgtataatcgtctttcagagacttaataagstttggagaatatttggatgaagttggcagttttattgataccatctgattctactttggtcctgtagcagtttctgccactttgtcaccagtggggggaa

SEQ ID NO: 547773 - DNA, 201 bp, Homo sapiens
agtaaccctacacatgctaaatactcaataaacatgggattggttgtaattattagttcagtaatatcaggtgcttcaaaaatgatgctatgaaaacattktactaaaaaggaagaaaacaatatttggagccaaagaaatgtttcttgattgagttccttcctggctgtcgtgctggaagcttggagagatgtccatttt

SEQ ID NO: 547774 - DNA, 201 bp, Homo sapiens
agattagcatggctcctgagcaaggatgtcatgcaaattcatgaagtgtattttaaatgttattgaaaaaaaaaatctagtgtttgctagcacaacagaamgactatagtcaataataatttgtgcatttaaaaataactaaaagagtattactggattttttgaaacacaaaggataaatccttgagggtgtggataccc

SEQ ID NO: 547775 - DNA, 201 bp, Homo sapiens
tatcataaggcctttaacaaaattcttttatcagataattttggtaaagcattatgcagaaaaagaaaactcagccaagttcaaaattttcattgcatctrtaaaaatctttcattcatattggaaaaatctgagcattctttcatgtcaaagaatggtgtcatttatttatatgagaacgttctgcccagaaatcaagaa

SEQ ID NO: 547776 - DNA, 201 bp, Homo sapiens
ttagttcttctgtgaagatatttccttttccacaacaggcctcaaagtgctccaaatatccacttgcagattctacaaaaagagtgtttcagaactgctcmatcaaaagaaatgttcaactctgtgagatgaatgcacgtttagttcactggaagacatatccagattcctagacatgtgttaacagtaaaactaaactaa

SEQ ID NO: 547777 - DNA, 201 bp, Homo sapiens
tatgtgatgaaaggaatgtaagctattattgccatctgtccaaaattatcacaggcaccagttaggcaggggcaccattgccctgtgcaacctgttcccaygagtatatcctagagaaagagagtggcctgggtacacttggtaggagaacatgtgttgttggtttatgccctggtctccagtgcgataccaaaggatggg

SEQ ID NO: 547778 - DNA, 201 bp, Homo sapiens
tgaagtgagaggattgcttgagcctgggaggtcgaggctggcactgcactccagcctgggtgatagagtgagaccccatctctgaaataaaaaaaaaaaaagaaaaatgtacaaagtgccttttaaaaagcaggtatatggagatgtaagcaggcatcaaggctagcagtgcccagcggtgagccacggctgcactggtgg

SEQ ID NO: 547779 - DNA, 201 bp, Homo sapiens
caaataaccagcaggctatgtttgtgcggcgggcccccgaggggaaattgcccaataggtgttggattctatcttatttggggtggcgagagtggcctaggtactgggagggaagcgtccagcaggccacactgggtttgccccgatcccacgtggtcggttctcccaggccctagagctgcagctcctttgctgtgtttg

SEQ ID NO: 547780 - DNA, 201 bp, Homo sapiens
cagaggcctggctgtccacaggactcagaccccagggcacagagccgggcaaagaaaggctgcaaataaccagcaggctatgtttgtgcggcgggcccccraggggaaattgcccaataggtgttggattctatcttatttggggtggcgagagtggcctaggtactgggagggaagcgtccagcaggccacactgggttt

SEQ ID NO: 547781 - DNA, 201 bp, Homo sapiens
tgtcctcaagcccagtaacaaagtgctgcaggtcagcatcggacctggactgcccaagaactcccgtaagtgctccacgggccctgcaggcagaactgccrccgctcccccgagtctcccgagcaaatgctgcaaacatgtgcacagatgtgggggctgagaatcagtacaccttctgcttgctggggctcacgctttctt

SEQ ID NO: 547782 - DNA, 201 bp, Homo sapiens
gagttgtcaacccaaatgtccatcaatgatagacaggataaagaaaacgtggcacatatatactgtggaatactatgcagccataaaaaaggatgagttcmtgtcctttgcagggacatggatgaagctggaaaccgtcattctcagcaaaccagcctaggagcagaaaaccaaacaccgcatgttctcactgacaagtgg

SEQ ID NO: 547783 - DNA, 201 bp, Homo sapiens
caaggcgcttgacgtaggcaggtgtgcagtcagtgccagaacgggcttcatgccaaccccgttgatccgcagcattagtgaacctgctcagccacttagcrtttagaacatgaatgcaaatgtttaaatgttccatctgtctcttttaaaagtctgtaaaaatagaaacacctttgtaagatgaccaatccttctttaaga

SEQ ID NO: 547784 - DNA, 201 bp, Homo sapiens
ctcatgatctgtccacctcagcctcccaaagtgctgggattacaggcgtgagccactgcgcccagcagcttcatttaattgaattgtacaaaaacagttaygttcagttgcaggtttttattttatttggtcaaaatactgaaatatgcttactttatccggacttaacaccgtcaaaaaatgttaatcacttttacgtgc

SEQ ID NO: 547785 - DNA, 201 bp, Homo sapiens
tttgaaaactaatgaattaaaacaagtttctctagtctctggcttgaccaaagcctttgttaatattttgtggtagttccagtcttttttttaagaaaaamaaattgtaatcatgttttgtatataacttgaatgacttatttcacttaacatgatttcatttgcttgtttcctgtgtttacagtcttcatgtcagttgta

SEQ ID NO: 547786 - DNA, 201 bp, Homo sapiens
gtcaaaatactgaaatatgcttactttatccggacttaacaccgtcaaaaaatgttaatcacttttacgtgcagcacccacagcacatgaaaactggcagwtaattgattagaaggagctgggtggcaggatgtggatctggactgtctggcttcaaaccttgctctgcatagatttggtgaccgaaacgttttgtgacct

SEQ ID NO: 547787 - DNA, 201 bp, Homo sapiens
ttatcaattcagggggattttgtaggaagaatggggattttgaagagcagactatatattattaacaaaaggctctccccatgcaggaaggctacccagcrgaaggtggcctttgttactccggatgtgattaatattgcttcaaggtttaattttagaacttctaaaataaggaagcttgcatcaattcaaggcacatgg

SEQ ID NO: 547788 - DNA, 201 bp, Homo sapiens
ttaatgcctttgaatcgatgactgactaatcgtgtgttctaccaaggaaatgagttacttgaccactaatgactttatgttttagaaatctctacccactsaatatatgggaagcccagcataaatgtgctttctatcattagcacagagtagctttcagctttgagggagcttgatggatgtttgtgaaataatacaggg

SEQ ID NO: 547789 - DNA, 201 bp, Homo sapiens
gagtaactcagcaatcgataacaattaatttgggctggatattcatagaagaacatttgctctgcgccctaaaattttttatcgcgaagcgcgaacaaaaatattgtcctatgaacttgtagcagtctgcatttttcatactaactcccaccatcattttatatgatatggggttctttaattctatcctggtaacacaaa

SEQ ID NO: 547790 - DNA, 201 bp, Homo sapiens
taggtggttttgggaaattcactgactattcaaatagattttaaccggctgggcacagtggctcatgcctgtaatcccagcactttgggaggctgaggcargtggatcatgaggtcaggagattgagaccatcttggccaacatggtgaaaccccgtctctactataaatacaaaaattagccgggcgtagtggcgcatgc

SEQ ID NO: 547791 - DNA, 201 bp, Homo sapiens
ggctgaggcaggagaatcgcttgaacccaggaggtggaggttgcagtgagctgagattgtgccactgcactccagcctggcgatagagcgagattctgtcycagaaataaaaaaaaaaaagaaaaggaaattgaattcatttaaattgttaaaccctactgaagggaagatagttcttcagtcaaaaggcttttttttttt

SEQ ID NO: 547792 - DNA, 201 bp, Homo sapiens
ttgcttcaaaggacatgatttcgctcttctttatggctgcatagtactccatggtatatatgtaccacatttcctttatccaattcactgttgatgggcayctaggttgattccatgtctttgctattgtgaatagtgctgtggtaaacatacaagtacatgtgtcgttttggtagaacaatttattttcttttcgatgta

SEQ ID NO: 547793 - DNA, 201 bp, Homo sapiens
atatctttatgcagtttgaaaattaaccttaggccacaccttcaccaccaaggattatgtgggtaaagacaatgatccgaacggcttttcccagaggcacmcctgaattatgcaacaggagtgggagtgagcattgttggaattacctggagttcccaaagcagcaggagagcacaggtgtccggaaaatagctaaggtct

SEQ ID NO: 547794 - DNA, 201 bp, Homo sapiens
tttattaacagcaacagcagcagcattggggcattatttccaaaggcaaagaattcaaggaagaggttaatgtgatcattttaactaatcattgcacatamaagagctcattcaatcttcctcacagtctgatgaagtgatataagtatcatgtctgttttacaaatgaggaaactgaggcacagagaggttaagtaactt

SEQ ID NO: 547795 - DNA, 201 bp, Homo sapiens
gctgggactacatgtgaagaccaccatgcctggcaattttttttttttttttttttttttttaaggagatggggtctcagtatattgcccaggctggtctygaactcctggactcaagcaatcatcccacttgtcctcccacagtgttgtgattatagcacccaaccagaaacagccattttaaaccaaactttatttttt

SEQ ID NO: 547796 - DNA, 201 bp, Homo sapiens
ccagcatgcattagctatttttcctaatactctcccccgcccaccctaactagtagacctttcgtaagaccccttccagttctgagattaaaatgttttaygtggatggggatggcaatcaggtcaaaacatgtagccaaagaagtgagtgggagagaaacaggtaggagttgtgtactagttaaggcttttgggggcaca

SEQ ID NO: 547797 - DNA, 201 bp, Homo sapiens
tttatatagcaaattaacagtttttaaaatgttggtcactttaggagctcatatgcaactgaattcatatttattgagtaaccaagggattggtggggagktggtacctttgtctgttgtcctgagggcagccctttattctttgtgtgcagtgatcaatttgtctaggacaaggcggcagtaaccacattccctttacaa

SEQ ID NO: 547798 - DNA, 201 bp, Homo sapiens
cagatagcttcaaaaagctcaagtaaaggagactttgggtctcctctccccatcagaagctgtaagctggtggcccccaggctccatgaggcctggagatrtatttatttggcccatacgtttattaaaaattgagctggtgcttaaaaatcaaaaggttactcatggaaatccagatttccagcttctctagaaaaatca

SEQ ID NO: 547799 - DNA, 201 bp, Homo sapiens
cctctacctccagcagtcacctaagccagggttttacaacattgacactgctgacattttaggccagagagttatttgttgtggaggtttgtcctgtgcayaggaggatgtttagctacatccctggtatccactcactagataccagtagtaccccctcctcagtctgaccaccaagaatgaatccatattctgccaaat

SEQ ID NO: 547800 - DNA, 201 bp, Homo sapiens
gggaaggagggatgcaaaagacactgtgtgaaaacaagagagtccaggaataactatcaatagtataacaatcttcacttcccagaagttctttgaatctrttttctcaagtttattctctccagcattgtgtgaaatagttaaggcacagagttgtcattcatattcaggggatggggaaactagggtgcacagaatggt

SEQ ID NO: 547801 - DNA, 201 bp, Homo sapiens
tgtggtacagaaagtcccaagccaaaaataccatccttggttcctacttttagacttccagggaacttccccctccctctctccctataattcactttgaytccttctatttttctcttcgtgaatgcattggccagacacagagtcctagtttacttaacaaggggctacagagccaacacaaatcaaaataaatccagc

SEQ ID NO: 547802 - DNA, 201 bp, Homo sapiens
tgctctgtcaccaggctggagtgcaatggcgtgatctcagctcactgcaacctctgcctcccaggtccaagtgattttcttgcctcagccttctgagtagytgggactacaggcacctgccaccacacccagctaattttttttgtatttttagtagagactgggtttcaccatgttggccagggtggtcttgatctcttg

SEQ ID NO: 547803 - DNA, 201 bp, Homo sapiens
ttacaggcgtgagccaccgcgcctggccacaaagtggattttgaaagaaataaatcaaggaaggagacgtgctgctttctcaagcacagggctccatggamgcctaggtccatctacaaacttgatttgtcaaaacagctggagttgagcagccttgggtagactgacttgccaagcaaactcacaaggaagtgtgaatca

SEQ ID NO: 547804 - DNA, 201 bp, Homo sapiens
ctgtactcattcataaggtaggttttcttacaaaactcacaccaggtacttaaagatgtgctctgcttttttccaactacggagtgtcactgctttctagstcagtccctgcagactcttctcaactctttccctataggaaacttactccgcgtcctgcccccacctcctaaataaataaaggaatcggcgaacaccttc

SEQ ID NO: 547805 - DNA, 201 bp, Homo sapiens
cgctgacaagtgcctttagttgaagagcacatttctttcatctctcttgtccatacctgatagacacattcctctctgccaccttccttcagggaggaccygccctctgcagactgggcttagcgtgagcaggcacttcccatgtacgtgccaagggtaagctggcctgctgagcccagggcgacagaggggcactggttt

SEQ ID NO: 547806 - DNA, 201 bp, Homo sapiens
tagccatgtgtccatccctgaaccaacttcagtagcaagacaaaggctgtaccctgagaggatgagacctggtaggggctgtccccagaaacggggaggtstgtcccacccacacttcctggcttcttcataatgaaagtggatggagtggaagccaggaagacaaccttgaatatccattattaaagcagtccatgggct

SEQ ID NO: 547807 - DNA, 201 bp, Homo sapiens
gagggcagaaaagcctgtagagtaataaggaaggggtaggagggccgtctgcagagtaataatgagggatgggagggaagtttgacaagaaataatgagarggtgagacggaagtctgaggagtaataatgagggggtaggagggatgtctgcagagtaataagggggtgggaaagaagtctgcagagtaatgagcgggtg

SEQ ID NO: 547808 - DNA, 201 bp, Homo sapiens
atctaaatcttataaaaatggacttgaccaaatttaactctttatttaccttttcccctgtcttggattccttggagaccagaaaaaaaaaacaattaaaytgatattttcattgatttttgcaatataaattattcattatatttggaggatatatcagtttctgtaaataacaaaaacactcaacatttattatttttc

SEQ ID NO: 547809 - DNA, 201 bp, Homo sapiens
ctgtcatggtgaaagaataaatcctccagaaaccccaccagtgacacacgggtgtggggcccctcaccttaatgcattcagaaaccaggtccttagagaargtttggcgtacactgtgtggtaggtgttcacaccttcctaacctccggtctatttgctgggacagcacgtgaaggacattatcctgcagtccaacccgct

SEQ ID NO: 547810 - DNA, 201 bp, Homo sapiens
ccctggacccccaagccttcccagatagtcaccttcctcttccatatgtccatggcacctagtttgaaatgttcttacctcatgcatcatgttctgccttktgttagaccctttaagcttttgtgtctcattaagatattgaactcggctgcgtgcggtggctcacgcctataatcccagcactttgggaggcctaggtgg

SEQ ID NO: 547811 - DNA, 201 bp, Homo sapiens
ctacctggttttccttttagaattcccccaggcatctatgctggagacagtagtgtctttgtctgttgttcccatccctgccttgctcctgccatttccaacgtcctgtgagtatatcttcacaggactcccccttccttttcacagtggccaccctagtttggatgtgcattgtcttacactgggaacattataagcgtt

SEQ ID NO: 547812 - DNA, 201 bp, Homo sapiens
gcaccgttttctcactgcgtccttcgacctgttaaccccactgtgctttttgcaggcttgaactgaagttgaaaaaggaaaactggggcccctggagtgcrgggggctcccggcaagtgcagttccaccaagggtttggggacctggctgtcctcaagcccagtaacaaagtgctgcaggtcagcatcggacctggactgc

SEQ ID NO: 547813 - DNA, 201 bp, Homo sapiens
gggcattgaaaagagcccagccttcagaacactccagtcctggcgctggagaactgcaccttaccttttactcctacctggttttccttttagaattcccmcaggcatctatgctggagacagtagtgtctttgtctgttgttcccatccctgccttgctcctgccatttccaacgtcctgtgagtatatcttcacaggac

SEQ ID NO: 547814 - DNA, 201 bp, Homo sapiens
aggaaatcatgtggtcgatcttaacgttataaatcactcagacaaatacaggataatgctgttttcggaagtgcttgtgattgtacaggattacatggtgrtaaagagttttcaatggctcctccagtttctgagggagttctgtgctttgctttcttggtaattccttctgcagaccttagagcctttgaggggggctgg

SEQ ID NO: 547815 - DNA, 201 bp, Homo sapiens
tacctccctcaccacctggtgtctcacggtaccgggccccagatgctcctttttctggctcattgtcatgcagcgacagtgccaccccatggatgcggtgygcatcctcagggccctgctcctggtgtagattgtccgttctcgcctcatgtttatgcttttccagcagcagaactccgtggcgggatctctgagcaccgt

SEQ ID NO: 547816 - DNA, 201 bp, Homo sapiens
gattttggttgctagtgtgtgtctttttccatccctgggtgggctgtgatggtgcaagaatagtacaggactaaacaaagccaggttctatgctagagtcytcaagctggcctgtgtctggcatctctcagtcctccacaagcacagaatcagggacaacagctggaagcacaatgacagcacagcggtatgacctggaaa

SEQ ID NO: 547817 - DNA, 201 bp, Homo sapiens
tttctaagaggaaatggctttaaacagaacctggaagaatttatgttaaactgtcagagaaatatggttcggagccatgttttggatactgttgacagttkaccaggccaggcccaaaaacctgccagttatggaacgttacttgccagaaattctacttggtcttttaggggcaatttatgcatccctcctcactgggtc

SEQ ID NO: 547818 - DNA, 201 bp, Homo sapiens
catggcctattattttgtaaacacacttgatgtcaaaatctgtagttgtatctggtcaagttaaaagtagactgctggggagacttcctggaaaattcaaratgcccaaaaagtcattgaggaggaagtgagtttgagtttgaatgtcagattgctaatttacatggatcccgtcattcacccagtcagcaaatacatatt

SEQ ID NO: 547819 - DNA, 201 bp, Homo sapiens
ggatgtgtctgtacgttctagtagctcctggcctacagtgtccacagagcactgtttgccagaaggttcttaataagtaccttgaagtccaggatattggyttccctcttgagaaccgagcttatgattcttcaagttcaaatttactacaatagctataaccatatcataaattatactaacttggaacttaaatgtaga

SEQ ID NO: 547820 - DNA, 201 bp, Homo sapiens
tgtccattctggccttcgcatctctgaacttggatgtgtctgtacgttctagtagctcctggcctacagtgtccacagagcactgtttgccagaaggttcytaataagtaccttgaagtccaggatattggtttccctcttgagaaccgagcttatgattcttcaagttcaaatttactacaatagctataaccatatcat

SEQ ID NO: 547821 - DNA, 201 bp, Homo sapiens
aagctactacttttttacagcatataaatgaacataggtataaaccagcaagaatgaaagaaatagcatatatctaatgaaaagagtcggaatttctagarcacaataaatacctacatcctactttttgggaaccaaatgccaactacatatatataacatggcaagtgctgctacatcagaggtaccaaaaatacttag

SEQ ID NO: 547822 - DNA, 201 bp, Homo sapiens
ggcttgttcccagctggctatacaagaactagggagtttgttagaaattcctattcctagactctgtccctggagactgggatccagcaggtcagaagacrggcccagacatgggcaattaaaaagtactctgacgattctgatagactgccagatttgggaaccactgggatattttcctaatttctagagtatttgtgt

SEQ ID NO: 547823 - DNA, 201 bp, Homo sapiens
ttatgactttgatttaaaattgcttggcttgttcccagctggctatacaagaactagggagtttgttagaaattcctattcctagactctgtccctggagrctgggatccagcaggtcagaagacgggcccagacatgggcaattaaaaagtactctgacgattctgatagactgccagatttgggaaccactgggatatt

SEQ ID NO: 547824 - DNA, 201 bp, Homo sapiens
ttgattcagccagttacaagggaacaccagttcctgtggtacagagccaggagagagatttttagatcagaaatgggggatgggggtgcattggtgagtcrtccaacagtggtaacagcggatcctacttattttagggaatatctcaaaaaatcaaaataaaaaagaactgaaatatttttacatttgctgaataagttg

SEQ ID NO: 547825 - DNA, 201 bp, Homo sapiens
cctaatcccagcactttgggaggctgaggcaggaggatcgcttgagcccaggagtttgaagctgcagggagctatgatgccattgtaacagccagggtgayggagcaagattctgtctcttaaaaaacaaagaatggtgctctaaacgcaaggtttttcacagcagtagtgacagctgctcctttatgcttctgtttcttc

SEQ ID NO: 547826 - DNA, 201 bp, Homo sapiens
ttgtgttgtccctggaaagtccccctcgtcccagtggctgagtcctctgcttcctccaggctcggcccaagttcctgttcctccacggaacctttcctgaytagtgcacacgatcttttctcttctctgaactctttcagttgtaaaaatgaaaccctaaaatttcttttgttgccttgtagtatgctcagattgatgcat

SEQ ID NO: 547827 - DNA, 201 bp, Homo sapiens
atctagtgagggccttcttgctgcttcaacacggcagaaagcaacatatggcaagtgcgtgcacgagaaagagtgagaaagtgtgtgagagatagcaagasagggccacactcacttttaaaacaaacccactcccacaataacagcatccatttatttatgagggcagagtcctcatgacctagtcacttcttaaaggtt

SEQ ID NO: 547828 - DNA, 201 bp, Homo sapiens
ttatttatgagggcagagtcctcatgacctagtcacttcttaaaggttccccctttttctaccttcagcactgtcgcattggggattgagttttcagcacmtgaactttggaagacacgtttaaatcataacgttgcctataacaccaactgggcttgcctgatatatagtgccagagatacccaccaaattaagctttat

SEQ ID NO: 547829 - DNA, 201 bp, Homo sapiens
gcctgatatatagtgccagagatacccaccaaattaagctttatggttcttatatggtaaactcatgtgatttctgtgcccaaagctgcaggtccttctgyctgcttcagaactgcccaaacttctggtcttctagagcaggggtccccaacccctgggcaatacggtccgtggcctgttaggaactgggatgcacagcag

SEQ ID NO: 547830 - DNA, 201 bp, Homo sapiens
tattttccaacgcagtggatacggtgacaggatggacaggcacctgaccatttcaagactagaaatgagtgtaacaaatcggattttttttttttttttttgagacagagtcttgctctgtcaccaggctggagtgcaatggcgtgatctcagctcactgcaacctctgcctcccaggtccaagtgattttcttgcctcag

SEQ ID NO: 547831 - DNA, 201 bp, Homo sapiens
gtggaggtttttaacaaaatcacatttgttctttagaaccataattctgagaccactagcttcttacagagtatatatacgaaactaccaaaggcaacttkgtgaagcagaggaatttgggcacgaaggcttgtttcatcttggtggtcagcccttcccacctttctttagatactataattcatttcctagggctgcctt

SEQ ID NO: 547832 - DNA, 201 bp, Homo sapiens
aaaagtgagcgatgacctaatttctatggtggtgttttagacttccacctcccagtttccctggtgtgactttgtctaaatgacactttagatggcataawgcagcccataaaggcggcgtttctagtttcctgtcagtcttactcatattttccaacgcagtggatacggtgacaggatggacaggcacctgaccatttc

SEQ ID NO: 547833 - DNA, 201 bp, Homo sapiens
gccttaacaaattgctatgaactggtggcttaaaacaacagaaatgtgttctcacaattccgaaggctaggattcaaaatcagcatgggcatcaggaccaygctccttccgaaggttggggagattctgttccatgcttttgctcagcttctagtgttgctggccagccttggcattccttggcttgtggctgtgtcgccc

SEQ ID NO: 547834 - DNA, 201 bp, Homo sapiens
ccgagttgaatggtgccttttaaaatgtgtttgtgagcagaaaacaaacgaaaaaaccattttcttggaggctggaagagaagcctgctcctcatgctaarggattctggcatggctggaaagactaggaatctttagtgtcatttaattaggaaataaaaagtgagcgatgacctaatttctatggtggtgttttagact

SEQ ID NO: 547835 - DNA, 201 bp, Homo sapiens
acacttcgctgcaccttatcattttaggactcaagggggcagtgggtttgctgccacactcaagctggtcaacttggcagtgtcatgtgttcttggtgagsgctaggaagctgcctggacctagagtaagtaatactagcagctcacttaagtaattatgaagggaaggtgcacaggacctaagcagcaggctgtggagaa

SEQ ID NO: 547836 - DNA, 201 bp, Homo sapiens
ctagctggaatttaatgagggtccaggatgagttttctgatagagtcctctgccctttctctttcctcacattttccctcttctgggtgtgtgccaaaacragtgggatgggaatggtcttcttacatgagcttgccagtctggaggccccctcagtcttctgcagcccacgtgtctccctccacctgcactgcaaggtcc

SEQ ID NO: 547837 - DNA, 201 bp, Homo sapiens
gcacaggacctaagcagcaggctgtggagaactgaccaaaaagacgagttagggcgctattgcaggtgagaaataaggggaccttaagtaaggcagtggcygtgagaacagagaggaaaggggagtagtcgaggggtgggtctgaaggagaaccactaagatctgatgtagtgggaggaaggatcaagggtgattcttagc

SEQ ID NO: 547838 - DNA, 201 bp, Homo sapiens
gttttagttgcttttttgggggttgtagtattgtgaggagacacttaacttatggaagcttcattttgttttcagtaaatggagcagcaacaccattcttrtagcattactctgaggatagacatcagttaatgtatgtaaggtgccgggctcagagctagtgcatagtacacagtcatcccttttctccctccccatcaa

SEQ ID NO: 547839 - DNA, 201 bp, Homo sapiens
gttcaagcgattcccctgcctcagcctcccgagtagccaggactacaggcgcctgccaccatgcccggctaatttgtgtgtgtgtgtgtgtgtgtgtgtgkatttttgtagagacaagagtttcactgtgttggccaggatggtcttgatctcctgacctcgtgatccacccgccttggcctcccaaagtgctggaattaa

SEQ ID NO: 547840 - DNA, 201 bp, Homo sapiens
ctcctgggttcaagcgattctcctgcctcagcctcctgagtggctggggttaaggcatgcaccaccatgcctggctaattctttcgcttttttttttttttgagacagagtctcactctgtcgcccaggctggagtgcagtggcacgatcttggctcattgcaacctccgcctcctgggttcaagcagttctcctgcctca

SEQ ID NO: 547841 - DNA, 201 bp, Homo sapiens
aggtggatggggatcaccaggcaggagtgttcagagtagtgttgtcaaatggtagataaggggaaagagaggcctctctaacactggacctgctgtttgcyctctctgagcttcagtttccttgtctaagcactaatgtaatgccatcaaacttgcagcaaacttgttgggaggactagaaattatatacataaaatctct

SEQ ID NO: 547842 - DNA, 201 bp, Homo sapiens
acacaccgcacctggttgctgtgtctcttaggtgtctcggtctttaacaattttcccttcccctttttgttttcttggctttgttaaaaaaaaaaaaaaaaggttgtttgtcctgtagatcttactatacagtctggcattgcctaattgtatcctatgatgttgcttaagtattccattgtcccctacattttctgtaaa

SEQ ID NO: 547843 - DNA, 201 bp, Homo sapiens
agcacattgggaagccaaggtgggaggatcactggagcccaggagttcaagaccagcctgggcaacatggtgagaccctgtctctatttaaaaacaaaaamaaaaaaaaacaagagaggggaattgttaaattaagtttagcctaaagctgcctccttacatattttaagttggatctaaatgttttcttctttttttttt

SEQ ID NO: 547844 - DNA, 201 bp, Homo sapiens
aatcccagcacattgggaagccaaggtgggaggatcactggagcccaggagttcaagaccagcctgggcaacatggtgagaccctgtctctatttaaaaamaaaaacaaaaaaaaacaagagaggggaattgttaaattaagtttagcctaaagctgcctccttacatattttaagttggatctaaatgttttcttctttt

SEQ ID NO: 547845 - DNA, 201 bp, Homo sapiens
ccaggcctaagtgatcctcccacctcagcctcccaagtagctgggactacatgtgaagaccaccatgcctggcaattttttttttttttttttttttttttaaggagatggggtctcagtatattgcccaggctggtctcgaactcctggactcaagcaatcatcccacttgtcctcccacagtgttgtgattatagcacc

SEQ ID NO: 547846 - DNA, 201 bp, Homo sapiens
tctcgttaggcctgcctcctgtacttcatgctttggtgctctccttcattttcctgccaggaagactttcccagtgcctctttctatatgcttgcatcccrttctcaagtctctgaccagcggttccactttgaagtccatcccacagaagtattagctcaaggctgcaaagatacaggaatgagaacgcttgctgcaacg

SEQ ID NO: 547847 - DNA, 201 bp, Homo sapiens
tgttgctttctaccaagcctagccaggcttgaagatggaactttgtctcatcaacctcccctgaccagcaagcgtttcctcggagctgggtctgcctcagygtctctctgccatcaccctatagcttgtaacacctgctcccctccaggcataaatttctccacaatcccaccctgtccaaacatgcagttcccgcaaagg

SEQ ID NO: 547848 - DNA, 201 bp, Homo sapiens
tggtcaattcactgaagcaggtttgcctaatttgtttctaatgcctgggaaaatgcttacaatccctaacgaaatctcattcttcaaagggttgtctttgrtatttggcagtggtacttggagatactcgtaaacttatatattatagtctttggggtggtggccccattcacctgagtgataaatctaacagggaatgca

SEQ ID NO: 547849 - DNA, 201 bp, Homo sapiens
tgatgctgcagggctctggatatacaaagaaccgtgtctgtggcacttggagagaataaaatgttaccatggtcaattcactgaagcaggtttgcctaatytgtttctaatgcctgggaaaatgcttacaatccctaacgaaatctcattcttcaaagggttgtctttgatatttggcagtggtacttggagatactcgta

SEQ ID NO: 547850 - DNA, 201 bp, Homo sapiens
aaaccctgtcatttgtcatttgcaagaatatgaatggaactggaggtcattatgttaagtgaaataagctaggcacagaaagacagatttcatattttctyacttatttgtgggagctaaaaattaaaagtattgaactcatagagatagggaatagaatgatggttaccagaggctgggaaggagaactggggagacagg

SEQ ID NO: 547851 - DNA, 201 bp, Homo sapiens
ttgagcagctgggactacaggcgcatgccaccacacctggctaatttttttgtgtttttagtagagacggggttttaccatgtcggccaggctgctcttgytgctcttgaactcctgacttaaggtgatccacccgccttggcctcccaaagtgctgggattataggcgtgagccactgcacccagccaattgtttttatt

SEQ ID NO: 547852 - DNA, 201 bp, Homo sapiens
aagtaaataatatatcagttgttctgtataggtaaaggcaagttcgtcggtatgctgccttgagaaaatggaagtctagagtctatataaaatgtagcacraaatggcacaggccagaacccttggtgcatccccaaacctgaacccaaggtcactgtcttggatctctgcactgccttccagttccactccctacccctc

SEQ ID NO: 547853 - DNA, 201 bp, Homo sapiens
caaatggtgatatatctgtttccatcattccttccacatttattagttggtattccactgtgaggaagagctttcctttctctcctatttactgattgacycgtttactttcgtatggcactatggaattatggcttcctattttattcaaaggatcgtaatccattattatcattacttattttgatttggccagtggga

SEQ ID NO: 547854 - DNA, 201 bp, Homo sapiens
agaccaggaaaataacccaaagggccattcacacaccaggtttttgagatgaatgacatcatgagcaactcatgagcatgagcaccaggcgtgcctcaccmtcttggctccttgttgataacgtgtcagtccctaatatccagcctgactccaaggactgagatgatgagtgtgaaagtactttgtaaattgcaaatggtt

SEQ ID NO: 547855 - DNA, 201 bp, Homo sapiens
tacaacagattttttcccttattttggattctgagaagtgagcactaacatattgcaaagggatttaattgcaaatgatttgtgtaaacctggtgccataraaaaacttctggggttgaatttaattttatcgcatttaaatagaaaaatgcccacctgagaatatgcagctgtaattacgagggagttttattggttgtt

SEQ ID NO: 547856 - DNA, 201 bp, Homo sapiens
ctcagggtttatctcatctgctggggagttcaaggggcagtttaatactggctgtatttttcgtttctctaagtagaagtttcatttaagttactgtggartaggctgggcgtggtggctcatggctgtaatcctagcactttgggaggctgaggtgggcggatcacttgagctcaggagttcgagaccagcctgggcaac

SEQ ID NO: 547857 - DNA, 201 bp, Homo sapiens
tgagcccccacacctggctaatttttgtatttttagtagagacggggttttgctatgttggccaggctggtttcgaactgctgacctcaggtgatccaccygccttggcctcccaaagtgctgggattacaggcgtgagccattgtgcccagcctaatgtttgtatttttagtagagatgaggtttcaccatgttggccat

SEQ ID NO: 547858 - DNA, 201 bp, Homo sapiens
tggtgtgtgcttgtagtcccaactactcagaaggccgaggtgggaggattgcttgatcccgggaggcagaggttgcagtgagctgagatcatgccactgcmctccaacctgggcgacagagtgaaaccccatctcgatagataaataaataataaataaattgtggaatgatcttctttgacattctgctagatatgaagg

SEQ ID NO: 547859 - DNA, 201 bp, Homo sapiens
atagagacaaagcaaagccacttcatatttttttctgagcacagacacaaaaaagtttcctgtaggacccataattttgattatgacagggtaaagacaakttccattttctaggatttgatttgagccaaggtcaatgaatagcttattttgtagcttaattgacaacagtaaatacttttgcagtcttaggtcccgctt

SEQ ID NO: 547860 - DNA, 201 bp, Homo sapiens
tacaggaatgagaacgcttgctgcaacgctgctcataacagggagaccaggaaaataacccaaagggccattcacacaccaggtttttgagatgaatgacmtcatgagcaactcatgagcatgagcaccaggcgtgcctcaccatcttggctccttgttgataacgtgtcagtccctaatatccagcctgactccaaggac

SEQ ID NO: 547861 - DNA, 201 bp, Homo sapiens
cagaggttgcagtgagccaagattgcgccgttgcactccagcctgggtgacaagagcgaaactccctctaaaaaaaaaaaaaaaaaagaaagaaaagaaawtgaaaatagagacgcctgcctgatactcctccaggcatcactttaatgtgtatggaaactcttaactgtgaaaggccatatatccaggaaacgggccatt

SEQ ID NO: 547862 - DNA, 201 bp, Homo sapiens
cccaggcctaagtgatcctcccacctcagcctcccaagtagctgggactacatgtgaagaccaccatgcctggcaattttttttttttttttttttttttttaaggagatggggtctcagtatattgcccaggctggtctcgaactcctggactcaagcaatcatcccacttgtcctcccacagtgttgtgattatagcac

SEQ ID NO: 547863 - DNA, 201 bp, Homo sapiens
cacagtgatgtaggctatttattatttgttagttccaactctgcgtgaggtaataaatgttgttggcagaaggcttgcttaaatgggtgtgtatcagtaargactcaggagtagctaaaagtttgctgatactatgaactgtgctgttcatggggttcctttgtgaaaccttgttgatttttattgactagtcaacccata

SEQ ID NO: 547864 - DNA, 201 bp, Homo sapiens
tgtggaagtggtggttcttgtataacaaagtcatctgaggtaatatttccacacaataatttttagcaaaaagaaaatgtttaatggttatcccaggtggmagcagattcccttgtggaaacaagaatggcgggaatcaaaggttgggcatagagaagaactttcctctttgtgattcaaggacagatgttggcaacctct

SEQ ID NO: 547865 - DNA, 201 bp, Homo sapiens
tcccaggcctaagtgatcctcccacctcagcctcccaagtagctgggactacatgtgaagaccaccatgcctggcaattttttttttttttttttttttttttaaggagatggggtctcagtatattgcccaggctggtctcgaactcctggactcaagcaatcatcccacttgtcctcccacagtgttgtgattatagca

SEQ ID NO: 547866 - DNA, 201 bp, Homo sapiens
gcacagaaatatacaatcaggtaatctataataatgtacatgtaataatctacaacagattttttcccttattttggattctgagaagtgagcactaacayattgcaaagggatttaattgcaaatgatttgtgtaaacctggtgccatagaaaaacttctggggttgaatttaattttatcgcatttaaatagaaaaatg

SEQ ID NO: 547867 - DNA, 201 bp, Homo sapiens
gtgctgtctgggccattaagaatcaccttgactcatagttctggttttcagttcagcttctaggaatgcatgatttcacaccttgtggaggtagaacgcaktatcactgatcagggcacagctatcgggcaacctcagcctctctggaactcagcgggctgtgaggaagtcatgtatctaagaagcccaaacacatactcc

SEQ ID NO: 547868 - DNA, 201 bp, Homo sapiens
gtgtgaacctgggaggcggagcttgcaatgagccaatatcacaccactgcactccatccgggtgacagactgagactccgtctcaaaaaaaaaaaaaaaaagaacagcaaaacaaaaaacaaaatttgaaagttgtactgccatcacatttcataaaagaaaatatttttacaccaaaaacgtaggaaggacataatctaa

SEQ ID NO: 547869 - DNA, 201 bp, Homo sapiens
taggaaaaattacgcagtggggaagttggaaaatacttaaccaaatgatgaaagtgaatatcacctacaaatatcatgtacctctggacatcatgccctcrgaaggacacaaaattatttgcctagaattctagtcaaaaatgtaaaagatgaatctaagtatgacaaatatcaggcaaactcaaatggagggaaattcta

SEQ ID NO: 547870 - DNA, 201 bp, Homo sapiens
aaagattgggcactcccatgccccaggcaccaccctggtggggacatggcagggggcagacatcatcccaaggctgactccagggcacggaacttcctctscattatgcaaggctgtgcagagccaggctgctccgtgagctcctagcttgcagggctttgtaccaggtattctgtttaccacgtggtacttctttttctt

SEQ ID NO: 547871 - DNA, 201 bp, Homo sapiens
cttaaccaaatgatgaaagtgaatatcacctacaaatatcatgtacctctggacatcatgccctcagaaggacacaaaattatttgcctagaattctagtyaaaaatgtaaaagatgaatctaagtatgacaaatatcaggcaaactcaaatggagggaaattctataaaataacttgcctgaactgtttaaaatgtcacc

SEQ ID NO: 547872 - DNA, 201 bp, Homo sapiens
aaaaaaaaaagattttaaaagttcaactcttagcattgcctaataagactattaaaaacaaacatttgaggctgggcacggtggctcacgcctgtaatccyagcactttgggaggccaaggcgggcggatcacaaggtcaggagatcgagatcatcctggctaacaaggtgaaactccgtctctactaaaaatgtaaaaaa

SEQ ID NO: 547873 - DNA, 201 bp, Homo sapiens
tagctaatacaaaaattgtattagctaaatacaaaaattagccaggcatggtggcacgcacctgtagtcccagctactctggaggctgaggtgggaggatygcttgagcctgggaggttgaggatgtggtgagctgagattgtgccactgcactctagcctgggtgacagagcaaggcaagaccatgtctcaaaaaaaaaa

SEQ ID NO: 547874 - DNA, 201 bp, Homo sapiens
tttgcaggtgtatcttgaggtagtttcctaaaaaatacagttgctggctcaaagaggatgaggctttgatgttttttttttttttttttttttttttttttgtggggggatggagtcttgctctgttgccaggctggagtgcagtggcccgatctcagctcactgcaacctccgcctcctgggttcaagcaattctcctgc

SEQ ID NO: 547875 - DNA, 201 bp, Homo sapiens
aacagaagttatttaaattccctatggctggacttgaaattgacaagaaaaggcccaatagggaatgccagtgtgtccccaggtgtggaacatggcaccarggtagaccttaacatcggtatgtacaaccccacactggtgtattttacaatatttctctttttcttttccttttttttttttgaacagggtcttgctttg

SEQ ID NO: 547876 - DNA, 201 bp, Homo sapiens
tactgacatgtcccacctgtggctgggagggttttctgaggtgggaggtctagacagagcagggggcttgggagccctgatggaaagtgcagggaattcakaacacaaacatagggtaggttctacttgtgagaacacaacctagactctcgcctgcaaactaaaagggaaatctggtcttaccatgtgagattttccaca

SEQ ID NO: 547877 - DNA, 201 bp, Homo sapiens
gttagagtgagatcctatctcccaaaaaaaaaaaaaaaaaaaaaaggtaaaacgactgagggttttgtgttcctgttctggctccttcctttcacccattrccttacttcactttctctcactctgtgattactgaatcctgcttttccttctagaactgcccaccaagataccttagctaaatctaatgtggtaacaagt

SEQ ID NO: 547878 - DNA, 201 bp, Homo sapiens
gaaactggccttgcccaaggcacagaggcatgtgagaggtagagcttgtacccaagtctgttgattttaatcagtttgctagattaggaagaaaagttacrttcctgaatcgtattaccgaatgtctaagagctttgcacttaaaaacaagagtggtgatgtgggagctctcttaagggactgttaagtgcttgatgtatg

SEQ ID NO: 547879 - DNA, 201 bp, Homo sapiens
tcaaaggtggccaactattcaaactgtgttcaaataaggcaaattctaaactaatctgtaactaatctggctgtttctgtacctcacttccattttctagwtatatatttttttgtttgtttgttttgttttgagacggagtctcgctcttcaccagactggagtgcaatactgcaatctcagctcactgcaacctccacc

SEQ ID NO: 547880 - DNA, 201 bp, Homo sapiens
cagttttagcttttcctgcatatctgctagggataaaccaggaccggttgaaagaaaagctaacaagccggcagatggatagcaagtggggaggcaaatcygaatccatccacgtgaccctcaacgtagagcaggcctgttacacccgggatgcgctcgccaaggccctgcacgcccgggtctttgatttcttggtagatg

SEQ ID NO: 547881 - DNA, 201 bp, Homo sapiens
tagtgagccaagattgtgccactgcactccagcctgggcgacagagccagactccgtctcaaaaaaaaaaaaaaaaaaaaaaaaagagacagtgtcttgctgtgttgcccaggctgttctcaaactcctggccttacgtgatctttctgtctcagcctccactgagatgaaggacatgaaccgccacaccttgcaagattg

SEQ ID NO: 547882 - DNA, 201 bp, Homo sapiens
ctgtggctacagctactggctccatcagctctgggtcactagctccctgtctcagtctggagagaaggttcctgacaagcctgagatagtcccccaagatyctctgcccaagggagccctgtcattccaagaagggcccaacccctaccttgacctgtgaatggggctgaacagggataccacaggagtttccttctaaat

SEQ ID NO: 547883 - DNA, 201 bp, Homo sapiens
ggctatgatgtgtggatgtctgaaaacaaacatctgaggtaatgataatgaccaagtgttccacccaaatggctattatttgtccaaaaaacactgtaaarggttctgactttacgtccaagggaaactctttggctgctcttcagtaagctggccatgaaaggaccaagctcctttcccctgacactggcctcttgcttc

SEQ ID NO: 547884 - DNA, 201 bp, Homo sapiens
ctcttctcatttctagattcatgctgataattgaccttgaagttttggcccgcttgcttttttcgttataatagtaatgaaactcctaataaatctaagcmcattaaaccactcaaggtgacttgtgttgggctcatttagccctgttgaataatcaccatcctgccacagttcagccaggccaccaggcatgaccagaca

SEQ ID NO: 547885 - DNA, 201 bp, Homo sapiens
cagcaccggcctttgacctcgccatccccctggcctggctttgggaggccctgtcagcccatacctctgactatgacggggttgcatggggctgccgctgsctgtaaatctgaagagcaagggcctagattgaccctgttccccaagctttctgcaaatcttacattctagtctggttgctaaaattcctttatcatcagc

SEQ ID NO: 547886 - DNA, 201 bp, Homo sapiens
agagcttaaaaattctatcctaaatccatttgttaacttcacagagagatctagagaggttaaattacttccaaagtctcatagctagtttttagctgagytggtgccagaatccaagttagatctgatccagtgcagatctaaccttattagatcccagtctaataaggtttttcttaccaaacagtggtgggaataatt

SEQ ID NO: 547887 - DNA, 201 bp, Homo sapiens
gaaaccccatctctactaaaaatataaaaattagctgggtgtggtggcaggcacctgtaatcccagctacttggaaagctgaggcaggagaatcagttgarcccaggaggcagaggttgcagtgagccaagatggcaccactgcactccagcctggatgacagagcaagactctatctcaaaaaataaaaaaagattaaaa

SEQ ID NO: 547888 - DNA, 201 bp, Homo sapiens
atggtgaaaccccatctctactaaaaatataaaaattagctgggtgtggtggcaggcacctgtaatcccagctacttggaaagctgaggcaggagaatcasttgaacccaggaggcagaggttgcagtgagccaagatggcaccactgcactccagcctggatgacagagcaagactctatctcaaaaaataaaaaaagat

SEQ ID NO: 547889 - DNA, 201 bp, Homo sapiens
gtgcattgctaagctgacaggcttttaggctggaattgctaccttttagtatgcttagaaattgtgtttttaaagagctgtttgttttttctctgtctctrggttaaaagcagtctagctccactgctggttctggttccctcctcctgccccctctttaggtctaagtaggcgagattgagcacacagagggactcacag

SEQ ID NO: 547890 - DNA, 201 bp, Homo sapiens
aagtaacctagcactttcctttgcttagatctcaaatgggaatattgggaagaagtgataaatctacatgtcctctgtggcaaacagaatggcttcacgasagaccagacctcttctatgcacctgtccctgtccttacccccagcctttccaagtcccacaccatcgattattaatggaatcgtttcaatttatcattaa

SEQ ID NO: 547891 - DNA, 201 bp, Homo sapiens
gtgaacccgggaggcggagcttgcagtgagccgacatcatgccactgcacttcagcctgggcgacagagcgagattccatctcaaaaaaaaaaaaaaaaaagaaaaaagtatgtgaattctttgtatatttgtgtaactgttgtattgaatttaaaaatagatggtttaaacagccctaccttcattgtcctgcactcaaa

SEQ ID NO: 547892 - DNA, 201 bp, Homo sapiens
ctccctgcagatccttctggctggtggacgggtcgactacgaggcaagcagggcctgttccccaacaactatgtgaccaagatctgaggtgcccgtgactstgacacatggggcagaggagctccaggcacagaccaggggaggggatatttaggggctccccttacaatccacaatgagcaattgcttctccaaggcctg

SEQ ID NO: 547893 - DNA, 201 bp, Homo sapiens
agatcacctgaggtcaggagtttgagactggcctggccaacatggcaaaaaccccatccctactaaaaaaaaaaaaaaaaaaaaaaaaaaaaaaaaattakctgggtgtggtggtgcgtacctgaaatcccagctactcaggaggctgaggcaggagaatcatttgaaccaggaggcggaggttgcagtgagctgaaatcg

SEQ ID NO: 547894 - DNA, 201 bp, Homo sapiens
tgggtggatttagtcagcatacacatttttatgttattaaatgtgaatgcgatgaggctgggcatcttctccagtttgaccatagaccacaccactccctyttttcctttatccgtatttacccttctggcctctgagggtgcttaagtttctaagcacaggagacaaattaagttctagtgagaaaaaaaaaccaattta

SEQ ID NO: 547895 - DNA, 201 bp, Homo sapiens
atgatgaaagtgaatatcacctacaaatatcatgtacctctggacatcatgccctcagaaggacacaaaattatttgcctagaattctagtcaaaaatgtraaagatgaatctaagtatgacaaatatcaggcaaactcaaatggagggaaattctataaaataacttgcctgaactgtttaaaatgtcaccatcataaaa

SEQ ID NO: 547896 - DNA, 201 bp, Homo sapiens
cctgtggtaacaattggctggagctagatggaagctgcctcctcctcagcccctctacctccagcagtcacctaagccagggttttacaacattgacactrctgacattttaggccagagagttatttgttgtggaggtttgtcctgtgcataggaggatgtttagctacatccctggtatccactcactagataccagta

SEQ ID NO: 547897 - DNA, 201 bp, Homo sapiens
tgaacatgggaggcagaggttgcaatgagctggcatggtgccagtgcactctagcctgggcaacagagcaatactctgtctcaaaaaaaaaaaaaaaaaaagaaaaaaaaggaaaaaaagaaagatatacaataagctccctcctccaagagtttgttatgattgtgattttatcgtttggctagcttcttagagctagcc

SEQ ID NO: 547898 - DNA, 201 bp, Homo sapiens
cttgaggcctcattccccctgccaccccgcctgtggtaacaattggctggagctagatggaagctgcctcctcctcagcccctctacctccagcagtcacytaagccagggttttacaacattgacactgctgacattttaggccagagagttatttgttgtggaggtttgtcctgtgcataggaggatgtttagctacat

SEQ ID NO: 547899 - DNA, 201 bp, Homo sapiens
tccaataatacagatgagtcctagacacagaacttttcctcctggcctcatgagttagattgtggcacccttgtcatggatgaggaaagtgagactaagcrgccttaagtgactgcagtggtcacccagctaaggtgttctgacttctaaatactggccttgtctacccagcacactgccccgcgtctcaccttgtcagca

SEQ ID NO: 547900 - DNA, 201 bp, Homo sapiens
gtgaatgaaggagaaatgttaaaatatgattacattatagagtctttaaatgctcattaaaacatatattcgttcagtatcttttatgctttcattaatgygccctaggctattgagaaagaaagagtaagacaaaaaggtgaaaactagaaatattctatgtaatggaaaagaccataaatatactcataaaacaattag

SEQ ID NO: 547901 - DNA, 201 bp, Homo sapiens
atgcatgataattgttttcccaactagactgaactgatttgatttgtgaacacgatcatcccttagatgctcttatgtgtgttcttgaacttagcacagakccaagcacaggactcaattatttattttgtgatgaaagttcaaagtgaattaagagagaaaatatattgctgagtgttgtagtccatttggtttgctata

SEQ ID NO: 547902 - DNA, 201 bp, Homo sapiens
tcaagcgactctcctgcctcagcttcctgattagctgtgactacaggtggcatgccaccatgcccggctaattttttgtattattattattattattattwtttttagtagagtcggggtttcattgtgttagccagatggtctcgatctccagacctcatgatctacctgcctcggcttcccaaagtgctgggattacaa

SEQ ID NO: 547903 - DNA, 201 bp, Homo sapiens
tagaaacggcagttatttgcaaaggcaattgtaaacatgtcatttgatgctactgttatttgatactacacatggtaaaaacacagtgagtgacgtcataraaaaccaactcaagtattactttttcctgacaattttcctcctccttccaatagtccatagaaattagactgtctagagaaagtaaaacaaaaacacagc

SEQ ID NO: 547904 - DNA, 201 bp, Homo sapiens
taactttgtaatgtgctaggacagtagtttttaatgcaggtgggatccaacttttgagaaagggaaatgtgaaggttgaagaaacttaaaaatcaactgcygttggctagatctaggtgtgctgacttccttagaaaagaaatgcttcctttccctgcaaaccggagtttgggaaatttagagctaggaaatcatgtggtc

SEQ ID NO: 547905 - DNA, 201 bp, Homo sapiens
gtggcagctttggccttggaggagttgtctttatgccctagagaaaagaccttctttcccagaccaagaaataactagagtagaggggtatcccaggtatsatttcccactggcagtggttttgcttcttagaacttggtccatagactctgaagggtgcacagagttagactgatctggcaccttggagagaaacttcct

SEQ ID NO: 547906 - DNA, 201 bp, Homo sapiens
taatttgatcaggaaaaatccttatttaaataaaaattaggctgggtgtggtggctcacacctgtaatcccagcactttgggaggccgaggcgagccgatygcttgaggtcaggcgttcaagaccagcctggccaacatgatgaaaccccctctctactaaaaatacaaaaaaattagttgagcatggtggtgtgtgcctg

SEQ ID NO: 547907 - DNA, 201 bp, Homo sapiens
ccagactactgaacatgcgtgtgtgttctcaaaatacttcagtactggcatagagaaagattttaacagttggcttgtacttcaggaaaaaagctgcaacrtctgtatgtgtttttaagaatttctgagattgaccagttgactattggctggaatgatatcaacatatggcctcctagttacgatttatcaaagtatccc

SEQ ID NO: 547908 - DNA, 201 bp, Homo sapiens
cctcagacccctggtggagtgctcatgactgggaccataaattatcctaattgagctacatttgtgtggttgttttgttttgttttgttttgttttgtttkagacagagtctcgctctgtcacccaggctggagtgcagtggcgtgatctcagctcactgcaacttctgcctccctggtccaagtggttctcctgcctcag

SEQ ID NO: 547909 - DNA, 201 bp, Homo sapiens
gcctgacctgagttagaaaggcgaggaggaagccgacgtatgactttcagtaagcctgtaaagaaataaaggaatgggcaagtgtgaaggtagactctggkcagtgccaacagaaaaatgcaacagcaatagctacattagcatcattaagaatgatagtgaagctgggcatggtggctcacgcctgtaatcccagcaggt

SEQ ID NO: 547910 - DNA, 201 bp, Homo sapiens
agggaggggattttggagttgttggttaaagtcaaagtgtccaaacacatctcttctcatttctagattcatgctgataattgaccttgaagttttggccygcttgcttttttcgttataatagtaatgaaactcctaataaatctaagcccattaaaccactcaaggtgacttgtgttgggctcatttagccctgttgaa

SEQ ID NO: 547911 - DNA, 201 bp, Homo sapiens
gccctgtctgacttcaaaccttatgcactttctttatacctattagcagtgatgtctctctaggtctcaaatttcccatattttaatggagatgtaatagytaccatataccataggacagaggtcaggacaggttcgccaggttagttacccctggacttgagctcctaggattaaagtctctcactctgtccccacaaa

SEQ ID NO: 547912 - DNA, 201 bp, Homo sapiens
ccaattaactagatatttgtctggggttgggaagaaataacagctgttggtcttattcacactttcctcaatctgttaaggaatgaatttgtcttatttarccagtggtttcagcatggctgtttgtttttgtcttttataccattagccatggcatgtatttgagaattagttttttagtgtaattctaaagtccgatgg

SEQ ID NO: 547913 - DNA, 201 bp, Homo sapiens
aaacagcaccctgcttgctcaccaggcctagagaatggctgtaggtggccgctgacaagtgcctttagttgaagagcacatttctttcatctctcttgtcyatacctgatagacacattcctctctgccaccttccttcagggaggacccgccctctgcagactgggcttagcgtgagcaggcacttcccatgtacgtgcc

SEQ ID NO: 547914 - DNA, 201 bp, Homo sapiens
caaactgcagtaaaacaaaaacatcttcctcttttgtaacttccaaatgtctatgactggcaatgcaagtcttctagactaataattttgaaatctttttygttttttggttttaatctcttgtatgattttcatgtctgatcagttatcaagtctaccatcctttagtcctccagttctcatgaccacttgctttgacaa

SEQ ID NO: 547915 - DNA, 201 bp, Homo sapiens
gcctcagcatcacggtccgctgttccaaacagccaggaggaaggccgggctgggcttcccagctgtcaaaatcatgatcaagagaatggaatttccctttstcccaaagggaagactccctagtctcagcaagtcttgatatgtcaggaagaaggtaccaagaaaaggttgcctccggacagctcctctaatcaaggggga

SEQ ID NO: 547916 - DNA, 201 bp, Homo sapiens
ttttttcaagctcccccagctcactctgcttaaaagccagggctaaggctcttgaaatcctgatttcaggtcacctcttgctgttagcaccatcagacccygcaagatagacttcctgagtgcctgccctctgctggttgctttcgtataggttgtctcttaatccttaccactctgttggcattgttttttgaagctgca

SEQ ID NO: 547917 - DNA, 201 bp, Homo sapiens
ttgcccctcatcttctggagattgcctttttcctttctgtctgtcttgtttctagatttcaagccaatgccttaactcttactttcttcccataagcagasacctgtgtcttgggtggatgacaaggggttctgggaaagagatctccaaagtggggtctatgcacttttatgtgcaaggaaactcactggaaagaaaata

SEQ ID NO: 547918 - DNA, 201 bp, Homo sapiens
aagcggaaaatcgagatagaacggatcttgtctgtgtccctcaggtgagtagtggaggtgcagaggcaggactgccccttctcgcctcagcatcacggtcygctgttccaaacagccaggaggaaggccgggctgggcttcccagctgtcaaaatcatgatcaagagaatggaatttccctttgtcccaaagggaagactc

SEQ ID NO: 547919 - DNA, 201 bp, Homo sapiens
attttatttttattttattattattattttttttgagacagaattttgctcttgttgcccaggctgggcatgatctccgctcactgcaacctccgccttcygggttcaaacaattctcctgcctcagcctcccaagtagctgagattacaggcatgcaccaccacacctggctaattttgtatttttagtagagacggtat

SEQ ID NO: 547920 - DNA, 201 bp, Homo sapiens
agctctgcctcctgggttcacaccattctcctgcctcagcctcctgagtagctgggactacaggtgcccaccaccataccaggctatttttttttttttttgtatttttagtagagacggagtttcaccgtgttagccaggatggtcttgatctcctgacctcgtgatccgcccacctcgtcctcccaaagtgctggaatt

SEQ ID NO: 547921 - DNA, 201 bp, Homo sapiens
tgttctattttattaactgtactgaaaatgcctagttgcttttgaagattgaatttcaaacccatttaggagtgataaaatcatcataaaagtcggcaaasctttcggaaagtttagtagacctgagttatgcttaacgagcaaattgtcatgaagattaattcctagctatgtatttctacaagagagttttacaagtct

SEQ ID NO: 547922 - DNA, 201 bp, Homo sapiens
tcactaatctatcattggcctcatctgactttggcaattgggaatacattttccatggcccttcttccataactcttcagtaattttcagttatggctcamtcactgtctcatcagcattttctcttagcactatggcctgcccttagaccagaactgggcactgctgaagtggtcttaaaaccacttcatcttccctaat

SEQ ID NO: 547923 - DNA, 201 bp, Homo sapiens
aactcagaaagtttgctcagcacagatctgggagtcaggaacgtactatgtgctgtggaagacatttcaactcctctttcaagcaaaaaaaaaaaaaaaaagtcaatactgatctagtttatatagctattataaaaaattatattaatgaaaatagaaattcatttgtaagtagagacagctaccaaattcctaagcaat

SEQ ID NO: 547924 - DNA, 201 bp, Homo sapiens
actggccatgtgacatcccgagggcatgtcacactcctaagatgcccctctccttttgttgggaccctaggcagcaagcagggtccttctaccctccccawccccagaccctgtgggagcccattcagctctcactcactgagggaatgaggtaagatgaagagcagctgtttgccccaaatgtctagttctgatctggtc

SEQ ID NO: 547925 - DNA, 201 bp, Homo sapiens
ttttcaaggaccttgctcctcctgcctgtgggaagtggttacaggttagcaatagttgaaactcccctactgtttttcccagcttagcagggtggttggasaccagccccaatactcctgagagcccatagagacagtcctggctcagcactgaggacatcttgcaggcagggttggctgagtgttttatggagcgagctt

SEQ ID NO: 547926 - DNA, 201 bp, Homo sapiens
aattgcttgaacccagaaggcagaggttgcagtaagccgggattgtgccaccgcattccaggctaggcgacagagcaagactctgtcaaaaaaaaaaaaaacaaaaaaaagtatgtatatataaaattttgtagagaaggtatctcgctatattgtctaggctggtctttaactcctgggctcaagcagtcttcaggcctt

SEQ ID NO: 547927 - DNA, 201 bp, Homo sapiens
atattaacgcaacagtacctgcttatcttagacattctagcttttgattaagagtatgggcgtgggatccagactgcctgagtttgaatcctagctctgcmacttatagtgtgtgaccttaagcaacttttaaaaatttctccgtgcctcagtttccctgtacaggctgagtatccttaatctgaaaattccaaatttgaa

SEQ ID NO: 547928 - DNA, 201 bp, Homo sapiens
agagaaagtaaaacaaaaacacagcacatcacggaaatagaacctcaaaaaaaaaaaggttaatgtgaaaagtttgccttatttaatttaacgatcaggckgggtttaaaaaattgctattttttttgagacaaggtgtcgcttgtcatcctggctggagttcagtggcacgatcatggctcactgcagcctcgatctcct

SEQ ID NO: 547929 - DNA, 201 bp, Homo sapiens
ggcttaagcaatcctcccacctcagcaggaactacaggcacgtaccaaccaacatgcttggctaattttaaaaaaattttttgtagagatgaggtctcacyagattgcccaggctggtttcgaactcctgagctcaaggggtccacccaccttattctcccgaagtgctaggactacaggcttgagccaccacaacctgct

SEQ ID NO: 547930 - DNA, 201 bp, Homo sapiens
gtctagagaaagtaaaacaaaaacacagcacatcacggaaatagaacctcaaaaaaaaaaaggttaatgtgaaaagtttgccttatttaatttaacgatcmggcggggtttaaaaaattgctattttttttgagacaaggtgtcgcttgtcatcctggctggagttcagtggcacgatcatggctcactgcagcctcgatc

SEQ ID NO: 547931 - DNA, 201 bp, Homo sapiens
ctgaccttatcgtggacaaggggatctcgagcagcatgtggagcagcccctgtggggaccccacttttatcactggccatgtgacatcccgagggcatgtsacactcctaagatgcccctctccttttgttgggaccctaggcagcaagcagggtccttctaccctccccatccccagaccctgtgggagcccattcagct

SEQ ID NO: 547932 - DNA, 201 bp, Homo sapiens
aagccttccctcccttcctggtctaagtgggtccttccctaaacacctgctctccatagcccatcactgcccggttcatttcctgcagagcactaagcagrtagaaaaaggggcatcagagagtggctccttcctcactgactgtctcgctcctctctagctgctacactcctggagggcagggactctttgttccatatg

SEQ ID NO: 547933 - DNA, 201 bp, Homo sapiens
tcctgaataaaaaccaaatattataaagttagttttactttggacattaaatgtccaagcaaattagaaataaaaaatagtaagaggagtaatgaacttaraaacggcagttatttgcaaaggcaattgtaaacatgtcatttgatgctactgttatttgatactacacatggtaaaaacacagtgagtgacgtcatagaa

SEQ ID NO: 547934 - DNA, 201 bp, Homo sapiens
aaggttcccttctcccttggctgtcataaatcagtctaatcgtgacagtagtttctgggaacaaaggagggccctggcttcgctcaaggcctgggggcctrttgcctgggccctggatgtgctctcacgtgggccacgccctccaacttcacacccacacatacccatgatgattctatccatatttgacaaactgtaatg

SEQ ID NO: 547935 - DNA, 201 bp, Homo sapiens
tttttagtagaaacggggtttctccatgttagccagatggtcttgaactcctgacctcaggtaatccacccgcctcagcctcccaaagtgctgagattacrggtgtgagccaccgcacctggcctgtttcttcacctttgacaaagaatccagtataagactattctggttcgtgttgtaaatggatttttttttcttttt

SEQ ID NO: 547936 - DNA, 201 bp, Homo sapiens
cagaaacatccttaatctcaagtgccagcagctgggagtccctggggtcccagctgcatttcctctgagaaggaaacatgggatcagtgatccaagagatmacaagagcagggaacagatttccaggcagaaagaggagctggcacaaaggccttgagaggaaatattagcatatttgagtcttaaactgaaaatatgtga

SEQ ID NO: 547937 - DNA, 201 bp, Homo sapiens
gcttaatagtcagcagatgataatcagctactttctaagaggaaatggctttaaacagaacctggaagaatttatgttaaactgtcagagaaatatggttsggagccatgttttggatactgttgacagtttaccaggccaggcccaaaaacctgccagttatggaacgttacttgccagaaattctacttggtcttttag

SEQ ID NO: 547938 - DNA, 201 bp, Homo sapiens
cccagcactcttgggtgggcagattacgaggtcaggagatcaagaccatcctggccaacatggtgaaaccccatctctactaaaatacaaaaaattagccrggcatggtggcgcatgcctgtagtcccagctacttgggaggctgaggcagggaaatcgcttgaacccaggaagcagagttttcagtgagctgagattgcg

SEQ ID NO: 547939 - DNA, 201 bp, Homo sapiens
tggacagattgcccggcccgagccgagactcagccagaggagtacggattaagtggccgaagaaagaggagtgaggcaggggagcgaggcggacgctccgrgcgcatcggactcacctgggccggcggcgagcggcgagtacgagtggactcttgccctccgcagcatgcgccccgcctgctaagtcgccgccgtctcgcc

SEQ ID NO: 547940 - DNA, 201 bp, Homo sapiens
ggaagtgaaacgctcaataagctcactcttcacagtcgccatcttgctcacgggtgtgaagagccaggtgccgttgagcgggatgcgcgttgcttgacgcrgacacagggccatccccaggcataggaaattcgctcccaccgagctcattctctggctggcccgcacaacaggcacagtccaactcatggctgctcactg

SEQ ID NO: 547941 - DNA, 201 bp, Homo sapiens
caggggtcagctttatctttataaggttggtaataccgttctctcccaggatacaaggaatactgaggaatacttcttcatctattccatagaggcccttrattatggtggaaactggatgtattctcctaagattcttcaaaatactttctgttaaatcggccacagataggccaatggcccaagaagtataacctttca

SEQ ID NO: 547942 - DNA, 201 bp, Homo sapiens
tgatgtgtcagcagtagctattaatattaaaatcacgaacctacacacatacctttaagaaatggactccaggcttgtaaaacatgtggccgtaatattgrcagagcaagaatctttggcctctgaataagctcactggccttcatgtctgtgataatttgccatagagaccaggctttttttctgaggatctatcccagt

SEQ ID NO: 547943 - DNA, 201 bp, Homo sapiens
atctgatgctcatggtgcctgggactttcctgagaattggccagaccccatgttcttattacctccaacagaggctttagttctgccaggcaggggacgarcctacctttacgtaggtgttctgtttgcattagtttgaaaatgggtttgagggcaggggaaggtaagttatttgagtgcatagcaattaggatgagggta

SEQ ID NO: 547944 - DNA, 201 bp, Homo sapiens
ttgtaactcgtctgtacttgtcacatccttatttagagcagctgctgtgccttggcttcttcctaaggtgcttttaaagctggtgaccagcttctctggakagtttctcttttctcttccagcacgccatgaatgtgattgggatctttgcagaagagcaaacgctggtgttgcagatagtggcgggtattctccacctgg

SEQ ID NO: 547945 - DNA, 201 bp, Homo sapiens
gtgcagtggcatgatcatggctcactgcaacctcgacctgcgtggcttaagcaatcctcccacctcagcaggaactacaggcacgtaccaaccaacatgcytggctaattttaaaaaaattttttgtagagatgaggtctcactagattgcccaggctggtttcgaactcctgagctcaaggggtccacccaccttattct

SEQ ID NO: 547946 - DNA, 201 bp, Homo sapiens
ctgggattacaggcgtgcgccaccacacccggctatttttttgtatttttagtagaaacggggtttctccatgttagccagatggtcttgaactcctgacytcaggtaatccacccgcctcagcctcccaaagtgctgagattacaggtgtgagccaccgcacctggcctgtttcttcacctttgacaaagaatccagtat

SEQ ID NO: 547947 - DNA, 201 bp, Homo sapiens
tcttgggtgggcagattacgaggtcaggagatcaagaccatcctggccaacatggtgaaaccccatctctactaaaatacaaaaaattagccgggcatggyggcgcatgcctgtagtcccagctacttgggaggctgaggcagggaaatcgcttgaacccaggaagcagagttttcagtgagctgagattgcgccactgca

SEQ ID NO: 547948 - DNA, 201 bp, Homo sapiens
tattctcacaattctagggcggtagtttgtgtcttagaacaactttcagcctctgctccctagagcgtaggatagtgcgtggtaacaatgccccaccacaycgcccatgtaactcctggcattcagcggctgtgtgcagaggctgtgtgcctctggacaagtcacactagtagcaaattctgttgtcccctacccagcaac

SEQ ID NO: 547949 - DNA, 201 bp, Homo sapiens
gtcgcttgattgatgatgttgatgcttctgactgaagtctagtatcccacaggaaatgggagcctttcacatatcatcaggaggccacctcttcgatcttkccttcattttctatagcagcatgccgccaagctgcagtttgcctttttttgcgccccggggatacaaacaagataattttgaaaatcattttccacatca

SEQ ID NO: 547950 - DNA, 201 bp, Homo sapiens
gatctgagagtgtctgcactcaatctctatctaatggaaatttctccgtcataatttgtaggaagtgtcagggataagagtaacttttcattattgttatyattacgttcatgtcgtagctggcacgcccgccactgccctcctccctttgtacagtgtgctgcgctcaccaggagctgctgtaaaatgcaataccttgct

SEQ ID NO: 547951 - DNA, 201 bp, Homo sapiens
tttgagcaattgtactagttttctgtatgtgtgaaaagagaacagtacggctttattctggcagtaaatatgaacatgtggatatgagtaaaatgtcaatktacaaatggaagttgttattgaattctaagagaagacaggatcacatgatgacttagcatggaaagagccataaaattggccctgtgttctagtccaact

SEQ ID NO: 547952 - DNA, 201 bp, Homo sapiens
aaacggaatgtggatctgagagtgtctgcactcaatctctatctaatggaaatttctccgtcataatttgtaggaagtgtcagggataagagtaacttttyattattgttattattacgttcatgtcgtagctggcacgcccgccactgccctcctccctttgtacagtgtgctgcgctcaccaggagctgctgtaaaatg

SEQ ID NO: 547953 - DNA, 201 bp, Homo sapiens
tgaacctgggaggcggagcttgcagtgagccgagatcgtgccactgcattccagcctgggtgacacagcgagactccgtctcaaaaaaaaaaaaaaaaaaagaaagtcatactagaaggctctctaatcttaactaggattaaaaaaaatagaaaataggaaaatgtgagaacaacagagatttagttgtttaattcttaa

SEQ ID NO: 547954 - DNA, 201 bp, Homo sapiens
tggtctcgaactcctgaccttgtgatccgcccacctcggcctcccaaagtgctgggattacagatgtgagccaccgcgcccagtcctatgttaaattttargagttttgtgatttttttgtaactggatttatcagttcggtgctactaaattgtagttttctttggccagaaacagttgtgtggcaataatttcataggg

SEQ ID NO: 547955 - DNA, 201 bp, Homo sapiens
ctttcaggagagaataatccttcctgtgtatgctgactcacctttgctcttcctggtccccaccctggtaaacagacaccagtcagtgaggttccaccttygaaaaaatcagtcagggaatcacccatctgaggttcccagcctcaaggccgagttcttcctgtgtgtgagggactctggtgtttgggttccacctcttaa

SEQ ID NO: 547956 - DNA, 201 bp, Homo sapiens
gtgaacctgggaggcggagcttgcagtgagccgagatcgtgccactgcattccagcctgggtgacacagcgagactccgtctcaaaaaaaaaaaaaaaaaaagaaagtcatactagaaggctctctaatcttaactaggattaaaaaaaatagaaaataggaaaatgtgagaacaacagagatttagttgtttaattctta

SEQ ID NO: 547957 - DNA, 201 bp, Homo sapiens
gaagtctgtcctgtgtattgtgggatgtttagcagccttcttggcctccacccactagatgccagtagtgtaccttcctctgagttgtgacatccaaaagygtatccaggcattgactaatgttccccctacagggcacagtcagttgaggaactttggcttagataatcatttttaaattttatttatttatttatttta

SEQ ID NO: 547958 - DNA, 201 bp, Homo sapiens
ttacaggttttaaagagcaagcaatataatatatgtaaatatgggaagctcacagcttcacagtttgttccatggattggattacattggatttctgaacmcagaaaaagatggacattgactgttgtgttgacatttctgatgatcacttttaatgatcacatctgtatacctggagcctcaacacctaaatggtcgttt

SEQ ID NO: 547959 - DNA, 201 bp, Homo sapiens
aataccgatttctaaattgctacctaaaaatactgtgcagtttactctttgtagaagtttgtaagagtattgatggtcacctcctccccactgccctgtayggggtgggggaccttgttgtatttacacaacacacttaattgtctcccttttctgggcatttgaaggcatttgaagatagtggttaccaagtatatgggt

SEQ ID NO: 547960 - DNA, 201 bp, Homo sapiens
actgaagaagaagttaattactgtctttggaatctagtatttctaataagacagttcttatttagggctgttgtttcttctgctatgagattaggacagcygactcaccatttagaggttttaaaaaagagctaatgattttgtataataaagcgtcagaaactcagtcccccacatttgagtttcctaataaccgtggag

SEQ ID NO: 547961 - DNA, 201 bp, Homo sapiens
aagtgcaaggtattataagcttcatggtaggatatataggaattatgtacagtcatggttttccaagtttgagtcatctcttttttttttttttttttttktgaaaatgcagcaacttgtgtttttaccaatctgtgattaaaatgtttcttaatggtgagtttttaaaaactttttttttctttttctcaccatgctgaa

SEQ ID NO: 547962 - DNA, 201 bp, Homo sapiens
gcacgagcgaccacaccgcgtcaaactgagcattttaatcagaaacaattacatcttcctgatatattatgcaggggctggatataatgtttttttttttwaaattcagattgtatataactgaagaagaagttaattactgtctttggaatctagtatttctaataagacagttcttatttagggctgttgtttcttctg

SEQ ID NO: 547963 - DNA, 201 bp, Homo sapiens
atttccttgaaggaatagggaaacaaaaaagaagtaagccaaatgtagtgttttatttatttatttagagacaaagtcttgctctattactcaggagtgcmgtggtgcaatcataactcactgcatctttgaactcctgggctcaagccattctctcccacctcagtctgcaagtagctagtactacaggcatgcatcacc

SEQ ID NO: 547964 - DNA, 201 bp, Homo sapiens
tctgtttagtgtaacacataagtgcaagaattcttgataattgtgccacaggaagagcggaggtttaacttgactgaataaattaacagtatgaagacaawttcaggaaaatgtttaacccacttaagacaataagcttaaaatatttaacctcaaaaattttgtacaatccatgtataaatttaaacttatttttatata

SEQ ID NO: 547965 - DNA, 201 bp, Homo sapiens
tcgccaggctgaagtgcagttggcgaaatcttggctcactgcaaccttcgcctcccagattcactccttcctcagcctcccgagtagctgggactacaggygtgcaccaccacgcccagctaatttttgtatttttagtagaggtggggtttcattcaccatgttggccgggatggtctcaatctcttcacctcatgatct

SEQ ID NO: 547966 - DNA, 201 bp, Homo sapiens
cctctggatgaagccggcaagctccatctccatcattcaaaacaagggttcagagattcctgtgggctgtcaatacacaggattctaaggtttagttttcyacctcagtgctatatgccaggacccaaggctgtggggctgtggctggttatttgtaaaggtacagtcacattaatagcacacaattcatttcattctcca

SEQ ID NO: 547967 - DNA, 201 bp, Homo sapiens
aagggagtgtcactggtatccagtgggtagaggccagggatcctacagggcataggacagcctcccgcacccacccccatacacacacacacacacacacaacagagaattcccagccgcaaatgtcagtagtgcagatgttgagaaactgctctggataaactcttgtataagaatatttacagcaacatttttggaggg

SEQ ID NO: 547968 - DNA, 201 bp, Homo sapiens
agttcagaccgagtgtcacagacgccagagagcctggatttcctcaaggtcccggaccagggagctgcagggtaagattctcacatcctctggatgaagcyggcaagctccatctccatcattcaaaacaagggttcagagattcctgtgggctgtcaatacacaggattctaaggtttagttttccacctcagtgctata

SEQ ID NO: 547969 - DNA, 201 bp, Homo sapiens
ggctttattcttttttgcttaggattgcttttgtatttgggcccttttttggtttcataggaattttggaatagttttttttagttatgtgaaaaatgacrttggttgtttgatagaaatagcatagaatctgtagattgctttgggcagtatggccattttaacgatattgattcttccaatggatgagcatggaatgtt

SEQ ID NO: 547970 - DNA, 201 bp, Homo sapiens
gaagggagtgtcactggtatccagtgggtagaggccagggatcctacagggcataggacagcctcccgcacccacccccatacacacacacacacacacacaacagagaattcccagccgcaaatgtcagtagtgcagatgttgagaaactgctctggataaactcttgtataagaatatttacagcaacatttttggagg

SEQ ID NO: 547971 - DNA, 201 bp, Homo sapiens
gtgcccatgggttccacatctgtggattcaaccaaacttggaatgaaaatattcagaaaaaatatggatagatgcctctgtagtgaacatgtacagacttwaaaaaaaaatttttttttttttgggatggagtctcactccgtttcccaggctggagtgcagtggcacgctctcggctcactgcaagctccgcctccctgg

SEQ ID NO: 547972 - DNA, 201 bp, Homo sapiens
atttgtgtgtgtgtgtgtgtgtgtgtgtgtatttttgtagagacaagagtttcactgtgttggccaggatggtcttgatctcctgacctcgtgatccaccygccttggcctcccaaagtgctggaattaagatgtgagccaccgcacccagcctaatttttttacttttagtagagacagggtttcgccatgttggccagg

SEQ ID NO: 547973 - DNA, 201 bp, Homo sapiens
ttataatttggtatcttatcaccagaaagaatccgttccatgagacttacgatctctagtttaaaacaatctagacgccttttttttttttttttttttttgcacctaattaccctggctagagtttccaggataatattggacagaagtggtgagtgctgacatccctgttttgttcctgatcttatggggaaatcattg

SEQ ID NO: 547974 - DNA, 201 bp, Homo sapiens
cccaaagtgctgggattacaggcgtgagccactgtgcctggcctcattcatctttatgccctattatttgatgtttttcctgccttggcagcttccttctmaagaccacagagctcttaagagctttaccatgttctctcctagcagcattccttttgccctggcaagtcttatctcacttcatttgggctacaaatatga

SEQ ID NO: 547975 - DNA, 201 bp, Homo sapiens
tttataatttggtatcttatcaccagaaagaatccgttccatgagacttacgatctctagtttaaaacaatctagacgccttttttttttttttttttttttgcacctaattaccctggctagagtttccaggataatattggacagaagtggtgagtgctgacatccctgttttgttcctgatcttatggggaaatcatt

SEQ ID NO: 547976 - DNA, 201 bp, Homo sapiens
ttggcaagcaaaaccatctttccagcctactttgcaagttgcaaacttgcacatcagccagctgggagcatctgtcagccaaaagtaggcaatttaggaayactgtgtcttaaccaaggctgctcccttccagccctctgccatgtggttccctatttaagtcttatggcaccctttgccaccctccagcctaaagactgg

SEQ ID NO: 547977 - DNA, 201 bp, Homo sapiens
agtctgaaagaagcaggtgcagcacttgagcattcatccaaccaataattctcaggctctgctgtatgctgccctctgtggggggggggcttgggatgggrataaatacggcgagacacagctctttctcccacctgggtttcagggagaagaatgtcaccttgaacttgaggagctctatctggcagcatctctgaggtg

SEQ ID NO: 547978 - DNA, 201 bp, Homo sapiens
gctacatcagaggtaccaaaaatacttaggaattgtaaataagtatcgtccagcacgtggatgctcaataaaagagctggaggactaaataaataggaaartcactctacctactttcctgtttccatcttttaggaattcaagtttattcaaaatttcgttatataatcctgtatctatgatctcttcaataatttcgga

SEQ ID NO: 547979 - DNA, 201 bp, Homo sapiens
gctgcttgttacaaggttccaggatgcaagctgaatttgacttggctgtaccgaaaccttaaatggatattaagtacctcatagcttaatagtcagcagaygataatcagctactttctaagaggaaatggctttaaacagaacctggaagaatttatgttaaactgtcagagaaatatggttcggagccatgttttggat

SEQ ID NO: 547980 - DNA, 201 bp, Homo sapiens
tgagatgtttaggtaagccacaagtcctggcttgtgggttttatggcagtcaggtgcagacttgcttccagagattgtttttaaaaaattattaaaattcstgccaagtttaagagctattattgcttccacataaactgctgtcatacggacatggcctattattttgtaaacacacttgatgtcaaaatctgtagttgt

SEQ ID NO: 547981 - DNA, 201 bp, Homo sapiens
aagcaaagattttttggacaaatgggatcacatcaagttaaaaagcttccttccacacagcaaaagaaaaaatcaacaaaatgaagagacaacccacagartgggagaaaatatttgcaaactttccatctcacaagggtttaatcaccagaatacagaaggaactcaaataactctgtaggaaaaaatctaatctgattt

SEQ ID NO: 547982 - DNA, 201 bp, Homo sapiens
tgcaatcaaaagacatagaatagctgaatggataaaaagcaagacccaaggatctgttgcctacaagcaacacacttcaccaaatcaaatgaaaatggatkaatgacctaaatctaagacttcaaactatgaaactactaaaagaaaacattgggaagactccaggacattggtctaagcaaagattttttggacaaatgg

SEQ ID NO: 547983 - DNA, 201 bp, Homo sapiens
gtgccactgcactccagccttggcgacagagcgagacttcgtctcaaaataataataataataataataataataataataataataataataaataaatagttcagtgcagtttccattgtttcctgatagcatattgtttaggattcctggggccaccataacaaagcaccacaaactgagtgacttaaaacagtagca

SEQ ID NO: 547984 - DNA, 201 bp, Homo sapiens
cgtgccactgcactccagccttggcgacagagcgagacttcgtctcaaaataataataataataataataataataataataataataataataaataaatagttcagtgcagtttccattgtttcctgatagcatattgtttaggattcctggggccaccataacaaagcaccacaaactgagtgacttaaaacagtagc

SEQ ID NO: 547985 - DNA, 201 bp, Homo sapiens
tttctcaatgatatttgagaacaagtaagtacatttttacaatggtgacagagtgacatcagtgcctaaagttttggtcagtgtctcaaaattgagaggaygaccaaaagagggaaattggactgggcatggtggctcatgcctataatcccagcacattgggaagccaaggtgggaggatcactggagcccaggagttca

SEQ ID NO: 547986 - DNA, 201 bp, Homo sapiens
ggtatatgcttcaaagtgcaattgcttggtcatatggtaactctgcatttaacctttgagaggaactgcctgattgttttctgaagtggctgcaccacttyacattttgtaccaccagcagtatttgaggcttccaatttatctaaatccttgccaacataagttattttctaaccatcctagtgagtgtggagtggtatt

SEQ ID NO: 547987 - DNA, 201 bp, Homo sapiens
tcgtgccactgcactccagccttggcgacagagcgagacttcgtctcaaaataataataataataataataataataataataataataataataaataaatagttcagtgcagtttccattgtttcctgatagcatattgtttaggattcctggggccaccataacaaagcaccacaaactgagtgacttaaaacagtag

SEQ ID NO: 547988 - DNA, 201 bp, Homo sapiens
gataaacgtcagttgtttccacttcttggctattatgaataatgctgctatgaaaatctgtgtacaagtttttatgtggtcatatttcatttctttcgggyatatgcttcaaagtgcaattgcttggtcatatggtaactctgcatttaacctttgagaggaactgcctgattgttttctgaagtggctgcaccacttcac

SEQ ID NO: 547989 - DNA, 201 bp, Homo sapiens
atcgtgccactgcactccagccttggcgacagagcgagacttcgtctcaaaataataataataataataataataataataataataataataataaataaatagttcagtgcagtttccattgtttcctgatagcatattgtttaggattcctggggccaccataacaaagcaccacaaactgagtgacttaaaacagta

SEQ ID NO: 547990 - DNA, 201 bp, Homo sapiens
gagatcgtgccactgcactccagccttggcgacagagcgagacttcgtctcaaaataataataataataataataataataataataataataataataaataaatagttcagtgcagtttccattgtttcctgatagcatattgtttaggattcctggggccaccataacaaagcaccacaaactgagtgacttaaaaca

SEQ ID NO: 547991 - DNA, 201 bp, Homo sapiens
tggcttttttttttttttttctttgtaactcgtctgtacttgtcacatccttatttagagcagctgctgtgccttggcttcttcctaaggtgcttttaaarctggtgaccagcttctctggatagtttctcttttctcttccagcacgccatgaatgtgattgggatctttgcagaagagcaaacgctggtgttgcagata

SEQ ID NO: 547992 - DNA, 201 bp, Homo sapiens
agggtcttaaaggtttaccgtcctctgagcagtagagctcttgcccctgacacagactctctcacctccttttctagctcttccactcactagctaagtgkccttcagcaagtttcttaccttttctcacttcaaataatggagattataaaagcacctaccacacaggactcttatgtggaccaagtgattgacacatgt

SEQ ID NO: 547993 - DNA, 201 bp, Homo sapiens
gctgagatcgtgccactgcactccagccttggcgacagagcgagacttcgtctcaaaataataataataataataataataataataataataataataataaataaatagttcagtgcagtttccattgtttcctgatagcatattgtttaggattcctggggccaccataacaaagcaccacaaactgagtgacttaaa

SEQ ID NO: 547994 - DNA, 201 bp, Homo sapiens
aatcttatgttttggcttttttttttttttttctttgtaactcgtctgtacttgtcacatccttatttagagcagctgctgtgccttggcttcttcctaasgtgcttttaaagctggtgaccagcttctctggatagtttctcttttctcttccagcacgccatgaatgtgattgggatctttgcagaagagcaaacgctg

SEQ ID NO: 547995 - DNA, 201 bp, Homo sapiens
agctgagatcgtgccactgcactccagccttggcgacagagcgagacttcgtctcaaaataataataataataataataataataataataataataataataaataaatagttcagtgcagtttccattgtttcctgatagcatattgtttaggattcctggggccaccataacaaagcaccacaaactgagtgacttaa

SEQ ID NO: 547996 - DNA, 201 bp, Homo sapiens
gcagtgaccatgttgtacaagaacgtcctgctgtcatcacaagctaagccacatgtgactgcacaacccaatcttatgttttggcttttttttttttttttctttgtaactcgtctgtacttgtcacatccttatttagagcagctgctgtgccttggcttcttcctaaggtgcttttaaagctggtgaccagcttctctg

SEQ ID NO: 547997 - DNA, 201 bp, Homo sapiens
ggccaatggcccaagaagtataacctttcattttaataatctcataggcagttgcagtcacttctttgtggacatttttccattgctcaggatctttatcmgttcctatatcagagttcagatccttcaaagggacaccagctatgttcactccactccacacaggaacacttgagtctccatgctctccgaggatccatc

SEQ ID NO: 547998 - DNA, 201 bp, Homo sapiens
cttgttctttctgttattgcccaggtatgtcttcagtccctcagacccctggtggagtgctcatgactgggaccataaattatcctaattgagctacattkgtgtggttgttttgttttgttttgttttgttttgttttagacagagtctcgctctgtcacccaggctggagtgcagtggcgtgatctcagctcactgcaa

SEQ ID NO: 547999 - DNA, 201 bp, Homo sapiens
tgagctgagatcgtgccactgcactccagccttggcgacagagcgagacttcgtctcaaaataataataataataataataataataataataataataataataaataaatagttcagtgcagtttccattgtttcctgatagcatattgtttaggattcctggggccaccataacaaagcaccacaaactgagtgactt

SEQ ID NO: 548000 - DNA, 201 bp, Homo sapiens
gtgagctgagatcgtgccactgcactccagccttggcgacagagcgagacttcgtctcaaaataataataataataataataataataataataataataataataaataaatagttcagtgcagtttccattgtttcctgatagcatattgtttaggattcctggggccaccataacaaagcaccacaaactgagtgact

SEQ ID NO: 548001 - DNA, 201 bp, Homo sapiens
cagtgagctgagatcgtgccactgcactccagccttggcgacagagcgagacttcgtctcaaaataataataataataataataataataataataataataataataaataaatagttcagtgcagtttccattgtttcctgatagcatattgtttaggattcctggggccaccataacaaagcaccacaaactgagtga

SEQ ID NO: 548002 - DNA, 201 bp, Homo sapiens
agaggtaaccaagattcccagtctcttgtgttccctttaaaggatgtgtgttccaaaacaactacacacaaccactcctttttctcacttttgtgcaatawtgggggcttatactgcaatgttctacagttgctttttcacttaacatgtgtcttaggccaggcatggtggctcatgcctgtaatcccagcacttcaggag

SEQ ID NO: 548003 - DNA, 201 bp, Homo sapiens
gcttgaacccaggaggtggaggttgcggtgagccgagatcgtaccattgcactccagcctgggcaacaagagtgaaactccgtctcaaaacaaaacaaaaagtcattctttcttctcattaatgacacaggattgccacctagtgacgcagaggagattgcctgggttttcgaggctgttggagtctgggaaaatggctgt

SEQ ID NO: 548004 - DNA, 201 bp, Homo sapiens
tcattaccattattcattggctggtcttgcaaggaaattttaatgctctaccagggttgaaaggtgatgtttcctggcccagtggctttattctcaagaaytcaaatctctggcctgcctagagctgtggactccatgaaggtctacgcttcaggcattgttggctgtaatgcggggaatgggcagcctagggaagccaag

SEQ ID NO: 548005 - DNA, 201 bp, Homo sapiens
cgcttgaacccaggaggtggaggttgcggtgagccgagatcgtaccattgcactccagcctgggcaacaagagtgaaactccgtctcaaaacaaaacaaaaagtcattctttcttctcattaatgacacaggattgccacctagtgacgcagaggagattgcctgggttttcgaggctgttggagtctgggaaaatggctg

SEQ ID NO: 548006 - DNA, 201 bp, Homo sapiens
tcgcttgaacccaggaggtggaggttgcggtgagccgagatcgtaccattgcactccagcctgggcaacaagagtgaaactccgtctcaaaacaaaacaaaaagtcattctttcttctcattaatgacacaggattgccacctagtgacgcagaggagattgcctgggttttcgaggctgttggagtctgggaaaatggct

SEQ ID NO: 548007 - DNA, 201 bp, Homo sapiens
atcgcttgaacccaggaggtggaggttgcggtgagccgagatcgtaccattgcactccagcctgggcaacaagagtgaaactccgtctcaaaacaaaacaaaaagtcattctttcttctcattaatgacacaggattgccacctagtgacgcagaggagattgcctgggttttcgaggctgttggagtctgggaaaatggc

SEQ ID NO: 548008 - DNA, 201 bp, Homo sapiens
aatggcgtgaacccaggaggcagagcttgcagtgagctgagattgggccactgcactccagcctgggcgacagagcaagactctgtctcaaaaaaaaaaamaaaaaaaaaacaaaaaaaaaaaaacagttcatccacccacctttgctctgatctcactatccagtgtgctttgtaattttccctcctataactgaaatgt

SEQ ID NO: 548009 - DNA, 201 bp, Homo sapiens
cccagctgaaagcaccttagttttatcacacagacagccatcagtagagtggatgccgcccttatgtagacctctctctaagtgcacgtgcgcgcgcgcgygtgtgtgtgtgtgtgtgtgtgtgtgtgtgtgtgtgtgtgtccctctcctcttcccttccactaccccccagtcttgggtaagtagctatatcccaccagc

SEQ ID NO: 548010 - DNA, 201 bp, Homo sapiens
caggatggtcttgatctcctgacctcgtgatccacccgccttggcctcccaaagtgctggaattaagatgtgagccaccgcacccagcctaatttttttayttttagtagagacagggtttcgccatgttggccaggctggtctcaaactcctgacctcaagtaatccacccgccttggcctcccaaagtgctgggattac

SEQ ID NO: 548011 - DNA, 201 bp, Homo sapiens
cctgggctctagtgatcctccaaaagtgctgggattacagtcgtgagacaccatgcccagccatcttccccatttcttaagtttattactggcattttatwacccttgttactgatttgaatgggatatttcctaaaacattgtcttttgaaaatattaataattttatccatagttcttataatttaatggatatcatgt

SEQ ID NO: 548012 - DNA, 201 bp, Homo sapiens
tcattcttaagtgaattttttcctgggaaaaagattcataaatccccaatgtggttcatggtctccccaagtgaccctttaaggtccagggaactgtggtrgcctgacctaggtctctcagttacttggcaagttaatagcagagttgtccctagaatacaagtctcttaacccacagttcaggaattatggtcgtaaacc

SEQ ID NO: 548013 - DNA, 201 bp, Homo sapiens
ataggtgtcacaagggtagtgtttggtaaagaagcaagttgtagaaagacgcatatctgaaaccatgtaagaaaaatgtcaaaaacacaaaataagactgytatttgggggtctatacatttatttgtgtatgtgtacatatatgtatttgtgtggatattattttaaaaaatataggctgggcgtggtggctcatgcttg

SEQ ID NO: 548014 - DNA, 201 bp, Homo sapiens
tgatgaagggaaagatctcgagtccactttgagtaggtggaaaggtcagcagcgaccttcgaggggaagctggcaacaagaacacatcaaaggatgaagayaggacttggagactttgtgtacaactaccactcttccgagtctctttcctcctggagtattctcttattcctggaggatggcatgctatgcttagagaca

SEQ ID NO: 548015 - DNA, 201 bp, Homo sapiens
aatgtggtacatgatcctgcaccaggggaaaaaataagtaataaaggacatgattgggataataaaattagaatattgacttgtataaaaagtattctatygatgttaaatttcctggccgggtgcggtggctcgcgcccgtaatcccaacactttgggaggccgaggcgagtggatcatgaggtcaggagatcgagacca

SEQ ID NO: 548016 - DNA, 201 bp, Homo sapiens
taggagatgtttctcttaagatttagacattttagcggtatttattgcatttaagggacctcagaaactggacttttaaatgatgcttttattggatttcytggagatttttcattaagatccttttgcaagtacaatatattcttatccctcctgatgaagggaaagatctcgagtccactttgagtaggtggaaaggtc

SEQ ID NO: 548017 - DNA, 201 bp, Homo sapiens
tactctattcgtgagctatttccttagaaaagctaagcaaaccgcacgtctatggactgaataggtttagacattttggaacgtctttagtcttttctcttatttcttttctggttttgaagactctcttcccctctgtattgtttagggcagaggaccctttttctgtgccatgcccttcacattgcatgtatgttatgg

SEQ ID NO: 548018 - DNA, 201 bp, Homo sapiens
tttctcttatttcttttctggttttgaagactctcttcccctctgtattgtttagggcagaggaccctttttctgtgccatgcccttcacattgcatgtaygttatggtccaagctgtgaaactaggtagattatggaggggttccatcctgggggcaataatgtagaactttctggaggtaggctgaacacccacttggc

SEQ ID NO: 548019 - DNA, 201 bp, Homo sapiens
tccagggctgaggtgggaggatcacttgagcccaggaggtcgaggtggcagtgagccctcatcgcaccactgtactccagcccaggccacaagagcacgamcctgtctcaaaaaattataaaaattttaaaagccagacatggtggctttttatcccagcactttgggaggctgaggcaggcagatcacctgaggtcagga

SEQ ID NO: 548020 - DNA, 201 bp, Homo sapiens
ctactctattcgtgagctatttccttagaaaagctaagcaaaccgcacgtctatggactgaataggtttagacattttggaacgtctttagtcttttctcttatttcttttctggttttgaagactctcttcccctctgtattgtttagggcagaggaccctttttctgtgccatgcccttcacattgcatgtatgttatg

SEQ ID NO: 548021 - DNA, 201 bp, Homo sapiens
ctgcctcaccctcccaagtagctgggactataggcacatgccaccacacctggctaatttttgtatttttcgtagaggtggggtttcaccatgttacccargttggtctctaactctcggactcaagtgacccacccacctcagcctcccaaagtgctaggattacaggcgtgagccattgcacctggccctgattcaggt

SEQ ID NO: 548022 - DNA, 201 bp, Homo sapiens
tgagctatttccttagaaaagctaagcaaaccgcacgtctatggactgaataggtttagacattttggaacgtctttagtcttttctcttatttcttttcyggttttgaagactctcttcccctctgtattgtttagggcagaggaccctttttctgtgccatgcccttcacattgcatgtatgttatggtccaagctgtg

SEQ ID NO: 548023 - DNA, 201 bp, Homo sapiens
cagcatggactattattactacctgagcctctcgggctcatacaaggttgatgacattgacgacaggcgggagtttcaggaaactctggtaagtgctggcrcagggccaggcaggatctgctctcccaactggccatttcctgtggccaaaagggcagtgaaggttaataaagcaaagagctgcatgaaatgtccgcctct

SEQ ID NO: 548024 - DNA, 201 bp, Homo sapiens
aatcctagcactttgggaggccgagtcgggagaattgcttgagcccgggagttcaagaccagcctgcgggacaaaatgagaccccatccatacaaaaaaaataaaataattagctggacgtggtggcataagcctatagtcccagctactctggaggctgaggtgaaaggattgcttgagcccaggaggtcgaggcttata

SEQ ID NO: 548025 - DNA, 201 bp, Homo sapiens
attatccacaccatgttaatccggctcacacgggtcacatgggcgacctaatcctgctgtaacttgcctttctctactggtattgtacttaaaaaaaaaaattcttttctgcctgttttttttgtttttttgtttgtttgtttgttttgtgtgatgggggagacaaggaagggagctggtcgcaatccacttctcaggtgg

SEQ ID NO: 548026 - DNA, 201 bp, Homo sapiens
aagccatagcaagttgggcaggaactaagtaattaaaatctgttttgctttccactcttccgagggtggcagtccagttcctttcagtggacaatggaaartcctcagctcttgcaggtctttccagagttaggaatcaaaatttgcagagatgacctggggctactacaagtacatatttgggggccaggactgcctgta

SEQ ID NO: 548027 - DNA, 201 bp, Homo sapiens
cacagctaggatttagggaagtggcctgggcaggaagaaatggcggcattgaggaggagcctgttaaggtggtggctagagggtatgaattttgtggccckctgggagacccagacacacattgttcagaggcctgatcccactgtccatagaagcatgggaaggagggagagacttaaactacagagaggaccctagcca

SEQ ID NO: 548028 - DNA, 201 bp, Homo sapiens
gaaattgatcagtggtgattattgtgaggtgtgatccctcccttttctctggaaaagctgttttaaaaaatctgaaatacacaaattttaaaaaataaaawacacacatatatatatattttttgacacagtttcattcttgttgcccaggatggagtgcagtggcacaatcttggctcaatgcaacctctgcctcccggg

SEQ ID NO: 548029 - DNA, 201 bp, Homo sapiens
cgtgtccctgggcctctgaggctaacactactttaatcaggaaaagctttgggcctttgcattaaagatgttctgctctcacatgaacatggaattgggaygcctgtcaaactcttactccacacagaaggcaaaactggtgcgctcaggaaaaagcaggggttttatgtgctcaggcgtctgatgtaccaagctggaaat

SEQ ID NO: 548030 - DNA, 201 bp, Homo sapiens
gtaatgaaattgatcagtggtgattattgtgaggtgtgatccctcccttttctctggaaaagctgttttaaaaaatctgaaatacacaaattttaaaaaawaaaaaacacacatatatatatattttttgacacagtttcattcttgttgcccaggatggagtgcagtggcacaatcttggctcaatgcaacctctgcctc

SEQ ID NO: 548031 - DNA, 201 bp, Homo sapiens
acctggtcactgttttttgttttgttttgtttcgtttcgtgtttagtttgtggatcactggattagaaggacattaaactgtggaagtagctcacattcartcttttcaattacacacacatcttaggcaatgccaaataattcttttagtttgtacctgttggttgaaaaagtatataaatgattaaaacttctgtgaat

SEQ ID NO: 548032 - DNA, 201 bp, Homo sapiens
cgcctcagcatcacggtccgctgttccaaacagccaggaggaaggccgggctgggcttcccagctgtcaaaatcatgatcaagagaatggaatttcccttygtcccaaagggaagactccctagtctcagcaagtcttgatatgtcaggaagaaggtaccaagaaaaggttgcctccggacagctcctctaatcaaggggg

SEQ ID NO: 548033 - DNA, 201 bp, Homo sapiens
atgaggtgtagggtttttcttttcctgttgcaaatgcgtttttgtttggcttctggcaaggttgcttgccctgcattctgaattgctgccttgcagagttstctagccctgatcaatttgagtaaacggccagggacagtcttggaaaaagactccctctgcaagatggagttggcatagcctagggaacaactgggcatt

SEQ ID NO: 548034 - DNA, 201 bp, Homo sapiens
taataatgtaatgaaattgatcagtggtgattattgtgaggtgtgatccctcccttttctctggaaaagctgttttaaaaaatctgaaatacacaaatttwaaaaaataaaaaacacacatatatatatattttttgacacagtttcattcttgttgcccaggatggagtgcagtggcacaatcttggctcaatgcaacct

SEQ ID NO: 548035 - DNA, 201 bp, Homo sapiens
cccctttatatatattattttataattcttatagggtttgctcacgcttgctctctctctctttcccagcttgttctagtaaagtttaaatgtgacagtgyaaacttaaggaaaatatacatacttatggtgatatgtaggaagttgaataataataatgtaatgaaattgatcagtggtgattattgtgaggtgtgatcc

SEQ ID NO: 548036 - DNA, 201 bp, Homo sapiens
aggatcaagggtgattcttagcctatttacaaatgtggtgggtggggtatataatccctatcagtatatacgaaggcctatccagacaagcttctctttgwctctacccacttaagttatgctttatgtgctgccaagaagggtaaaaaggtgaaaatgatatggaagaaaccgaagggcaaccttagaaatgcatgtgaa

SEQ ID NO: 548037 - DNA, 201 bp, Homo sapiens
agatacacacttcgctgcaccttatcattttaggactcaagggggcagtgggtttgctgccacactcaagctggtcaacttggcagtgtcatgtgttcttsgtgagcgctaggaagctgcctggacctagagtaagtaatactagcagctcacttaagtaattatgaagggaaggtgcacaggacctaagcagcaggctgt

SEQ ID NO: 548038 - DNA, 201 bp, Homo sapiens
gaatcgcttgaacccaggaggtggaggttgcggtgagccgagatcgtaccattgcactccagcctgggcaacaagagtgaaactccgtctcaaaacaaaacaaaaagtcattctttcttctcattaatgacacaggattgccacctagtgacgcagaggagattgcctgggttttcgaggctgttggagtctgggaaaatg

SEQ ID NO: 548039 - DNA, 201 bp, Homo sapiens
cagagcaagaccctgcctcattaaaaaaaagaagatgaaaaagaaataaaacaccatacacacacacacacacacacacacacacacacacacacacacamgcactacctcaaaccccagtctaactccttccctggcctttatttttgtatttataattgatatttataaacttatatctatagcacacagcatagaata

SEQ ID NO: 548040 - DNA, 201 bp, Homo sapiens
cgtgccaactcaggatgtggtaaagttgctaagcagatgagtccgcagtgtccattttgcagccccacctcaggtaggtttcaaggctattgttttttttkttttttttttaaagctctaggcgctgactgattttctgaaggccttcctaaacattcagctcactggctgggtcccaacctgagcggggcagtgcctgct

SEQ ID NO: 548041 - DNA, 201 bp, Homo sapiens
cattgcatgcctgtatcaaaacatctcatgcaaaaagtaaaaaagaaaaaaaatctcatgcaacccataaatatgtatacctactatgtatccaccccccmaaaaaaacttatcagtccaggtgcagtggctcatgcctgtaatcccagaacactgggaggctgaggcaggaggattactcgagcccaggaggtcaaggcc

SEQ ID NO: 548042 - DNA, 201 bp, Homo sapiens
cgagcgaccacaccgcgtcaaactgagcattttaatcagaaacaattacatcttcctgatatattatgcaggggctggatataatgtttttttttttaaaattcagattgtatataactgaagaagaagttaattactgtctttggaatctagtatttctaataagacagttcttatttagggctgttgtttcttctgcta

SEQ ID NO: 548043 - DNA, 201 bp, Homo sapiens
agcaagactctgtctcaagaaagaaagaaaagaaagaaagtttgccactgcactccagcctggatgacaaagtgagactctgactcaagaaagaaagaaaraaaagaaaaagaaaggaaagaaagtttgccactccactccagcctggatgacaaagcgagactctgtctcgaaagaaagaaaggaaagggaaagggaaag

SEQ ID NO: 548044 - DNA, 201 bp, Homo sapiens
gtgatgcattccctgcctcgaaagcttggcgtgaagccagtgtttatgaaaagtactttaaaatgagcagaacctttaaatgcatttttcatgcatttttytcactagagaaaaggccagtggcgagttttagatttggagggtgagagaaaggaaaattaattatttttcaatttaattacctttttaattgacatgaca

SEQ ID NO: 548045 - DNA, 201 bp, Homo sapiens
tcttttttttttttttaaatgattcccctttgaattgcagcaaagaattttatgacatgcattcaaataaactggttttaagaagttcaaggtattagttggtcgagcgttgatttataattccagtaagaccgctttctgggattccacccttaatcctggtttgggtttattgtgtaacaaatggtttcactccatcca

SEQ ID NO: 548046 - DNA, 201 bp, Homo sapiens
ttcttttttttttttttaaatgattcccctttgaattgcagcaaagaattttatgacatgcattcaaataaactggttttaagaagttcaaggtattagttggtcgagcgttgatttataattccagtaagaccgctttctgggattccacccttaatcctggtttgggtttattgtgtaacaaatggtttcactccatcc

SEQ ID NO: 548047 - DNA, 201 bp, Homo sapiens
tttcttttttttttttttaaatgattcccctttgaattgcagcaaagaattttatgacatgcattcaaataaactggttttaagaagttcaaggtattagttggtcgagcgttgatttataattccagtaagaccgctttctgggattccacccttaatcctggtttgggtttattgtgtaacaaatggtttcactccatc

SEQ ID NO: 548048 - DNA, 201 bp, Homo sapiens
taactgagaggggtgctaagggctaagttttggtgacactctcacctaagtgagaacctgacctaaagaggggaatttttaaacaaaattatgagagtccrttgttttggactgatctcatgcagtagcccctaacagaccagaccaaaccaaaccaacatggaatcactcatgttacatgtgacataatcgaaactttaa

SEQ ID NO: 548049 - DNA, 201 bp, Homo sapiens
atgtggctggcccatattggtttgtgtttaaatgctgtacttactacaagaaggatcttttttcaagctgtacatttataaaaacagatcatatactgtayatataaaaatcttgagatggtagaaacatgtatgaatgtactaagtagtattccactgtactcattcataaggtaggttttcttacaaaactcacaccag

SEQ ID NO: 548050 - DNA, 201 bp, Homo sapiens
accaccgttcggtgctgctgccccctgttggggcccagtctcatctgctccactctctccacagggtcaggagacaaacaaccagtcggcctcccccagcwgggggcagacccaagccccagcccaagcccaagcctcaggtgccacagtgcaaggctttgtatgcctatgacgctcaggacacagacgaactcagcttta

SEQ ID NO: 548051 - DNA, 201 bp, Homo sapiens
tttgggaagctgaggcaggtggatcagttgaggtcaggagttcaagaccagcctgaccaacatggagaaaccccatctctactaaaaatacaagattagcygggcatggtggtgcatgcctgtagtcccaactacttaggaggctgaggcaggagaatcgcttgaacccaggaggtggaggttgcggtgagccgagatcgt

SEQ ID NO: 548052 - DNA, 201 bp, Homo sapiens
cgcccagctgaaagcaccttagttttatcacacagacagccatcagtagagtggatgccgcccttatgtagacctctctctaagtgcacgtgcgcgcgcgygcgtgtgtgtgtgtgtgtgtgtgtgtgtgtgtgtgtgtgtgtccctctcctcttcccttccactaccccccagtcttgggtaagtagctatatcccacca

SEQ ID NO: 548053 - DNA, 201 bp, Homo sapiens
aattcagaatgtgtattttattaatgaatttccttgaattatatactgtattcaaagcctgtttgggacatcatgttttgttcaccaaccattgaaggaawtccctaactttcttgcagggaaaatactttgaaatccagttcagtccaggtggggaaccagatggtggaaagatctccaacttccttctggaaaaatcta

SEQ ID NO: 548054 - DNA, 201 bp, Homo sapiens
ctgtgataatcactaggttggagtttgctgtgacaaagtaatctttgctacaaacaatatttggcattttcgtgaaagggctgccatgttgaagatccatygtctcacccttcagtttgtcttcatcaagatccacaagggcaagttcatcactcaagccttttaataagatgctgatagcgcaggccatgcccaccgatc

SEQ ID NO: 548055 - DNA, 201 bp, Homo sapiens
aaccctggcaaaggtgaatgtttaatagacgtaagctgcttctattatcaattcaaaaataatgactattgttactatctgcagatagctcaccctctctwtaagcgcctaggaacaagggttgtcttgtccttagcatccctggcatattgtgttgggtcatcattaaatgactggtgaatggaagacactggaaatgac

SEQ ID NO: 548056 - DNA, 201 bp, Homo sapiens
agtcccagaccctgcttcttacatagaacaaccttaagcaagccttggtgtatccatgtggaaaattgggaaaataatggtatcactgccattttgagaamtgaaatgggaattaagtgaaacaacacattgagagcacttagcaaaccctggcaaaggtgaatgtttaatagacgtaagctgcttctattatcaattcaa

SEQ ID NO: 548057 - DNA, 201 bp, Homo sapiens
atctcttttctctttgttcagagcaccttccagcgctgggcttcctacctacctttctacctgtcacctgtcagttttttttgtgaatagtaccagtacaygaatactcatataagtgatcctaatttgaggtgggatttactgggcactgactgtgtgttgtgtatgattactcattcgctcacaaaagatgatatttca

SEQ ID NO: 548058 - DNA, 201 bp, Homo sapiens
cttttcttttttttttttttaaatgattcccctttgaattgcagcaaagaattttatgacatgcattcaaataaactggttttaagaagttcaaggtattagttggtcgagcgttgatttataattccagtaagaccgctttctgggattccacccttaatcctggtttgggtttattgtgtaacaaatggtttcactcca

SEQ ID NO: 548059 - DNA, 201 bp, Homo sapiens
ccatcttgaccaggctggttttgaactcctgacttcgtgatccaactgcctcggcctcccaaagtgctgggattacaggtgtgagccaccacccctgaccscttaaggcatcttttctattgaatctctgaaatttttcaatttaatgtagtcagattccttctacaatattgtccgttaatgatattcaggcccggatga

SEQ ID NO: 548060 - DNA, 201 bp, Homo sapiens
ttcttaaggattttttttttttttggagacaagagtctcgctctgtcacccaggctggagtgcagcggcatgatcttggttcactgcaacctctgcctccyggtttccagtgattctcctgcctcagcctcctgagtagttgagattacaggtgcccaccatcatgcctggctacttctatatttttagtagagatggggt

SEQ ID NO: 548061 - DNA, 201 bp, Homo sapiens
agccaggctgcttggatgtaagagctgccatcttttcaggccactatgttctgaataatctcatccatagatgcatattcttaaggattttttttttttttggagacaagagtctcgctctgtcacccaggctggagtgcagcggcatgatcttggttcactgcaacctctgcctcccggtttccagtgattctcctgcct

SEQ ID NO: 548062 - DNA, 201 bp, Homo sapiens
cctgatcgggacccacaggatgtggcctagaatgcttagcttggggtggaaagtggagggcgtaagagctgatggaaatacaatccagcatttgctgtgcstcgtgaagacactggggacaagctggaggctctggcattccccctaagcaccgtattgatgagaagaacgactctgggaggaaagatgtcaaagggaaat

SEQ ID NO: 548063 - DNA, 201 bp, Homo sapiens
ccagctaatttttgtattttcagtagagacggggtttcaccatgttggtcaggctggtctcgaactcctgacctcaggtgattcacccgcctcggcctccraaagtactgggattacaggtgtgagccaccatgcctggcctgtccagcttcttaaagctcctctccttacagggtgtaaagcgagacctgctccttaccc

SEQ ID NO: 548064 - DNA, 201 bp, Homo sapiens
tctattagattattgagaattatcattcaaatgacaatatatcagtattttagaatgaaaattttatgaactcccaagaaaatatatgcagacactgcccyctgtttagaaacatgctgtagtgcatccttgctaagttcaccacaggtgttggtgactttccctttacacctgctgtcctgatatgtgaagtgactccat

SEQ ID NO: 548065 - DNA, 201 bp, Homo sapiens
atgcttacacccaggagtttgaggctgcagagagccatgattgagccactgcactccagcccagctgttagagtgagaccccaagtcaatcaatcaatcartcatacagaaaacatcttgttttgctctcttacattggttcccatacttgagcctgcctcaggatccccaggaggccttgttaaagctgagattgctggg

SEQ ID NO: 548066 - DNA, 201 bp, Homo sapiens
gatgtaaaatgcttacacccaggagtttgaggctgcagagagccatgattgagccactgcactccagcccagctgttagagtgagaccccaagtcaatcartcaatcaatcatacagaaaacatcttgttttgctctcttacattggttcccatacttgagcctgcctcaggatccccaggaggccttgttaaagctgaga

SEQ ID NO: 548067 - DNA, 201 bp, Homo sapiens
cctgtaatcccagcactttgagaggctgaggcgggtggatcacctgaggtcaggagctcgagaccagcctgaccaacatggtgaaaccccatctctactawaattacaaaaattagttgggcctggtggcatacgcctgtagtcccagctactcgggaggcggaggcaggcgaatcgcttgaactcgggaggcagaggttg

SEQ ID NO: 548068 - DNA, 201 bp, Homo sapiens
aatcttagttcctgattacattagcaattatttgcattgcattgtatgcgttttagacagatagaataagtttgttaatgctgttaaagtaacaataccartattattagtagcaatactgaattcattttaaaatttcttttctggtttttgtccaaatatccaatatttgcagtcaaaatactgggtttcataaaagtc

SEQ ID NO: 548069 - DNA, 201 bp, Homo sapiens
tgcagtcagtgccagaacgggcttcatgccaaccccgttgatccgcagcattagtgaacctgctcagccacttagcatttagaacatgaatgcaaatgttwaaatgttccatctgtctcttttaaaagtctgtaaaaatagaaacacctttgtaagatgaccaatccttctttaagaaccactgtctctaacatttcaaaa

SEQ ID NO: 548070 - DNA, 201 bp, Homo sapiens
agaaactggaaaattctgtttagaggctgcatgcagaagtgccgcgccaaacaacagcaacagcctccacccactcacttgatctgacttcctaataatayactctttggatcaaggtggggaataagtggagaagcattgaatcgctcattcgattctcacagagactgtagcaaggcaggacaaggtctaactgaatac

SEQ ID NO: 548071 - DNA, 201 bp, Homo sapiens
acatcagacaccatagggtttgtttttgttttgttaaatgtatccatgtcttttggcttttctcatttaaggttgttttgtgtgttttcctgttgttgttktttggtttggtttggtttttattctctccttatctgtgttatcaaggttttttcttgaacctccctaatttctaaccccctgggcttttaaaaagaaatc

SEQ ID NO: 548072 - DNA, 201 bp, Homo sapiens
gatgataaagggatgcctcatcagcaaaggcgttccacttcacgggcaagagagaaggaggaataggaagcccaggaaagcacggagtggtggagagcgtyctcctggctgccaggatgtttgtgtcctccgaggtcagaaacatccttaatctcaagtgccagcagctgggagtccctggggtcccagctgcatttcctc

SEQ ID NO: 548073 - DNA, 201 bp, Homo sapiens
agaataaatcctccagaaaccccaccagtgacacacgggtgtggggcccctcaccttaatgcattcagaaaccaggtccttagagaaagtttggcgtacaytgtgtggtaggtgttcacaccttcctaacctccggtctatttgctgggacagcacgtgaaggacattatcctgcagtccaacccgctgctggaggccttc

SEQ ID NO: 548074 - DNA, 201 bp, Homo sapiens
ctgcatcaagccatgggaattggaagacccaaatacacaaacaggttgaggtctgtcatggtgaaagaataaatcctccagaaaccccaccagtgacacaygggtgtggggcccctcaccttaatgcattcagaaaccaggtccttagagaaagtttggcgtacactgtgtggtaggtgttcacaccttcctaacctccgg

SEQ ID NO: 548075 - DNA, 201 bp, Homo sapiens
cccttcttttcatggttctctatggcctatttctatattatagcaggcctctgagcagagacatgatagcactgacacctggttcaaaaagataaggttaytggtagaaaagagatgggatgttgagggaatatggaaatctattgcagcagtgagggcctgacctgagttagaaaggcgaggaggaagccgacgtatgac

SEQ ID NO: 548076 - DNA, 201 bp, Homo sapiens
actgggtttcaccatgttggccagggtggtcttgatctcttgatctcgtgatccacccgcctcagcctcccaaagtgctgggattacaggcgtgagccacygcgcctggccacaaagtggattttgaaagaaataaatcaaggaaggagacgtgctgctttctcaagcacagggctccatggacgcctaggtccatctaca

SEQ ID NO: 548077 - DNA, 201 bp, Homo sapiens
agaccagcctgaccaacatggtgaaaccccatctctactataattacaaaaattagttgggcctggtggcatacgcctgtagtcccagctactcgggaggyggaggcaggcgaatcgcttgaactcgggaggcagaggttgcaatgagcagagatcacgccactgcactccagcctgggcctcagagtgagactccatctc

SEQ ID NO: 548078 - DNA, 201 bp, Homo sapiens
atgttttcttatgctgaggtgaaaaagaaggaatgctgttaaatacttaggacaaaagagtttgcaaagttattcttggaaattaaaagttgtaggctggrcacagtggctcacgcctgtaatcccagcactttgagaggctgaggcgggtggatcacctgaggtcaggagctcgagaccagcctgaccaacatggtgaaa

SEQ ID NO: 548079 - DNA, 201 bp, Homo sapiens
tggtcagctgtagactttcaaaagacacataaaattctctttattgtggttcccttttttttttttttttttttgagatggggtctcactctgtcacccargctgaagtgcagtggcatgatctcagctcactgtagcctcctgctcctgggcttatgcattcccttccacctcaacctcccaagtagctgggaccacagg

SEQ ID NO: 548080 - DNA, 201 bp, Homo sapiens
ttaagatattagtgtctatcttaagagattactgtgatgattcagcttcataattcattggaagcatgtaacgcagtgcctgaggcatactgaacacaagrtgtatatgtatgctctgactacattctttcccattagcccctttcctgtatcgccgttgttggtctctgcttaattgttgtttttttcttttttgtaaag

SEQ ID NO: 548081 - DNA, 201 bp, Homo sapiens
tgagccatgattgctccagcctgggggacagaacgagaccctgtctccaaaaaaaaaaaaaaatagtttttgtcattgtgtcacacacaatcatgtaactstaagaaatactcactgagctattttttaaaatcatactggttaagaataattttttttaaaattataccagctgaatacttcctcagttttacaatcaaa

SEQ ID NO: 548082 - DNA, 201 bp, Homo sapiens
attctcatcacctagaatttgacagttcacaatcttatcatacgtatttgtgttcatcttttttagttaatttttctgagacatttttgggaaaaaaaaaaccttttattgtggataattacaaatatacacaaaatgagaaagaatagtagaatgtgtccctgtatatctattatccattttgcactgttgtcagtatat

SEQ ID NO: 548083 - DNA, 201 bp, Homo sapiens
aaggaggatcgctttagtcaaggaagtcaaagctgcagtgagccatgattgctccagcctgggggacagaacgagaccctgtctccaaaaaaaaaaaaaaatagtttttgtcattgtgtcacacacaatcatgtaactctaagaaatactcactgagctattttttaaaatcatactggttaagaataattttttttaaaa

SEQ ID NO: 548084 - DNA, 201 bp, Homo sapiens
atttccccaagtcacatcttgatggcccgcgctgtgagtcagatggcttttctgtagccaaggttatgtgcctggggacggcccttcaccccatcctctaraaaggcaggctttcagccccagaggtacttacagattgttaattcattctctttctccttttccaggcctttcataaagtctttatttccggaaaatctg

SEQ ID NO: 548085 - DNA, 201 bp, Homo sapiens
aaacacatgctggccaggcgcagtgcctcatgcctgtagtcccaacacttcaggaggctgaggcaggagcacctcttgagtccagttgtttgagaccagcytgggaaacatggcgaaaccccatctctaaagaaaatacaagaattagctggacgtggtggcgtctgcctatatatagtgccagctactcaggaggcggag

SEQ ID NO: 548086 - DNA, 201 bp, Homo sapiens
cagattgctaatttacatggatcccgtcattcacccagtcagcaaatacatattatggaccaactgtgcaccatgctatgcttcagacaccagggacactragatgagtaaggcattgtccctgccctgttgctagtgaggcagacgtataaacacatgcagctcaaatagcaccactaatgaaagtatcttcaggctggg

SEQ ID NO: 548087 - DNA, 201 bp, Homo sapiens
cttttttactatcgtaacttcagtgagcatcttttcacacatctttgtgtatctatctgtctcctaatatttttagaagaaattgataggagtgaaatcgytgaatcaaaggattcagagtatcaagtaatattgcagagtatcctcatccattttcccagagtggctgataagtaaggcttttccagccacaggaggaac

SEQ ID NO: 548088 - DNA, 201 bp, Homo sapiens
agcaattttgtttcattgattttaataaatctgaagagtaaattggagcttaagtgaagttttaagttccattttattttgcatataatgtcacgctaaamatattgcatcatttagagtttctttgtatatttccacagtattttcctcccttttctgactgacttatccttcttccatcttgaccctcttgggaattgt

SEQ ID NO: 548089 - DNA, 201 bp, Homo sapiens
gtgcctggcatgttaagtaagcacccaattcaaattagttgattgttgaatgaataattggaaatatttttcatgtgatcataagtcttcatttattttcrtatattaaaatgtgtaaaatttttaaggcccagcataagcatagcctctctgagaggccatcttgtattccccaagcagaaataataccttctttcccta

SEQ ID NO: 548090 - DNA, 201 bp, Homo sapiens
gtccctaaacagccccagcctttctgggcaaatgcaagtcctcattaacacacctcacgtccagctccagtcactgtggttattatcctctgctccgctgstccttggtgaatcctgagattggtgaatcctgagacaggaagtctatattttcttggaactgaaagtagggcagccctccttccacagcagcacaagccc

SEQ ID NO: 548091 - DNA, 201 bp, Homo sapiens
ggggttccactatgttggccaggctggtctcaaagtcctgacctcgtgatcctcctgcctcggcctcccaaagtgctgggattacaggtgcctgccacaaygcccagctaatattttgtattttttagtggagacggggttccactatgttggccaggctggtctcaaagtcctgacctcgtgatcctcctgcctcggcct

SEQ ID NO: 548092 - DNA, 201 bp, Homo sapiens
taagtgttcccagcgtgatttaaaggatattcctgggacacaagagaggagagtgggtctttgcatctgcgggtcaggtgaagcttctttgagctggacaygtcactgctgaggcctgcatctgcgtccgggctttctcagagaagttaagaaggttctgaaactggtgccactggtttctctgagtggtagaattctggg

SEQ ID NO: 548093 - DNA, 201 bp, Homo sapiens
agctgggtctgcctcagcgtctctctgccatcaccctatagcttgtaacacctgctcccctccaggcataaatttctccacaatcccaccctgtccaaacwtgcagttcccgcaaaggtgtgttctttccttgtctgacaaaattcattagcttgaaggtgatgatttttgcttgtttgctgtttgtccattctggccttc

SEQ ID NO: 548094 - DNA, 201 bp, Homo sapiens
ggcctggctgagttgaggggagtttatccagacttcacacagctaccggcagtttcccagaagacatcctgtctgctagccctcacaagaagggtgtagacatgtgcaggctggccagggagaatggctctcactgtggctcgctttgggaatatgccgccccagcaaagcagctgtgcctctttgtggtcacaagacaga

SEQ ID NO: 548095 - DNA, 201 bp, Homo sapiens
ggccatccccaggcataggaaattcgctcccaccgagctcattctctggctggcccgcacaacaggcacagtccaactcatggctgctcactgaagaagtrgagagagagaatggaaaaaagctgctgatccgaacgttgagacgccaagagagccgttggcaggaccttcagcactctacggcaggtgcgcgtgccccgc

SEQ ID NO: 548096 - DNA, 201 bp, Homo sapiens
agctcttacaattaatgtcagtgcacagtgggcctacagctccctattcaaaccaaccaaccattcagtaacagttacaagacaacatgtgagcatgactraatatttggtatgaagaatttattgtttatttctgtaggtatgataatgttttgtggttaattttaatataaagagactttatcttttaatgatatgtac

SEQ ID NO: 548097 - DNA, 201 bp, Homo sapiens
gtgatcctctggccttgcctcagaaagtgctgggattacaggcattagccatcacacccagcgctaaatgtttctctgtgcacagtgaactgtagcctaascagatgtataaacaaactataacctacttttctgccagtcactgagttttggccaatcaaaggtggccaactattcaaactgtgttcaaataaggcaaat

SEQ ID NO: 548098 - DNA, 201 bp, Homo sapiens
gagggtagccatgacagctttggttttttgtttggtgaaattagattttttgttcaataaatgattttgttcaattaattacattttgttcaatgaaattmgatttctttccattcttggccaggtatcctatgacatggatggcttttgtgaaaggaaccgggatgtgctttttatggatctcatcgagcttatgcagag

SEQ ID NO: 548099 - DNA, 201 bp, Homo sapiens
gaaagagccataaaattggccctgtgttctagtccaacttctaggactttagccttaatgactgattcaggctggtcatggtggctcgtgcctgtaatccsagtactttgggaggctgaggcaggtggatcgcttgagcacaggggttcaagaccagccccagcaacatggtgaaaccctatttctaaacacaaaatttag

SEQ ID NO: 548100 - DNA, 201 bp, Homo sapiens
tataaaaatctttcattcatattggaaaaatctgagcattctttcatgtcaaagaatggtgtcatttatttatatgagaacgttctgcccagaaatcaagraaaccccatttatatcactagccctccttggtaagtttcatggtctgaaacaagatgttgagctatggaagtctccgtttttctatccaaagaccacaga

SEQ ID NO: 548101 - DNA, 201 bp, Homo sapiens
gtaatacattaacgtggcttgagggggtatgcagtgaaagttctcccttctataccttttctagtccacttgttcccctcgtcagaggtaaccaagattcycagtctcttgtgttccctttaaaggatgtgtgttccaaaacaactacacacaaccactcctttttctcacttttgtgcaataatgggggcttatactgca

SEQ ID NO: 548102 - DNA, 201 bp, Homo sapiens
ctccctacccctcctcaccctctgctctccatccctgcgcttccttgcagccacaccaccatttctgagattttgcatttctttttattcaaaacatacawaatcaatttgttcttctctgagatgtttaggtaagccacaagtcctggcttgtgggttttatggcagtcaggtgcagacttgcttccagagattgttttt

SEQ ID NO: 548103 - DNA, 201 bp, Homo sapiens
tctccctgtagctccctacccctcctcaccctctgctctccatccctgcgcttccttgcagccacaccaccatttctgagattttgcatttctttttattmaaaacatacataatcaatttgttcttctctgagatgtttaggtaagccacaagtcctggcttgtgggttttatggcagtcaggtgcagacttgcttccag

SEQ ID NO: 548104 - DNA, 201 bp, Homo sapiens
taagatgaaatcacaaacccaggagaatatcttagcgtggtaggatttttttttccaatagagatgaaacaaactggccaaactagcttatccctttaaakaaccacaccttcttgccctcttcttatggaaagatttaagtattttttctgatccatagataatctcacctaattccctctgaggccccagaatctacaa

SEQ ID NO: 548105 - DNA, 201 bp, Homo sapiens
acatgagcaagtccatcatgcttgcgaggcaaggcccatgcatgccagatcttacaatttctagagcttctttcaagtaagagctgcccttttgctctctrttagttaagctgtcacaatagcaaggccagcttctctgatcaacagcagcgagcctgataatttcctattaaagggctgactgcaatgaaagcaaagcaa

SEQ ID NO: 548106 - DNA, 201 bp, Homo sapiens
gaaatggcttgagaactctgggagggacaactaaagaaggagtgactaagagatccattttaactcccaagaccctgtttcagctgtaggggtagaagagkgagggtatcccccttgcacgctgctagaactctcaagaccacctctgccttcctccccttttccctgaaaaggttctcaagatcctggataacacataag

SEQ ID NO: 548107 - DNA, 201 bp, Homo sapiens
ggcaggaggatcacttgatcctaggagtttgaggctgcactgagctgtgatcactcctgtcaatagccactgccctccagccaggcaacataggaacactrtgtctctaataaagaaaaaaacaaaaacaaaacaaaacacctgtgatgtttagtggttagcattttgttccttcatgctattgggtctggattatcattt

SEQ ID NO: 548108 - DNA, 201 bp, Homo sapiens
gcgcagctgtcagcattcattggtaaaatggccggactctcaagacctgctagaggctgatgtggtccctaaacagccccagcctttctgggcaaatgcargtcctcattaacacacctcacgtccagctccagtcactgtggttattatcctctgctccgctgctccttggtgaatcctgagattggtgaatcctgagac

SEQ ID NO: 548109 - DNA, 201 bp, Homo sapiens
acaaacttatgagctgggtgtggtggtgtgttcctatagtcccagctactcaggaggctaaggcaggaggatcacttgatcctaggagtttgaggctgcastgagctgtgatcactcctgtcaatagccactgccctccagccaggcaacataggaacactgtgtctctaataaagaaaaaaacaaaaacaaaacaaaaca

SEQ ID NO: 548110 - DNA, 201 bp, Homo sapiens
ttgtctccccatgcctactggtagtataaatcaaggcccagagtgcacttttggtgttcttataaagcccatcagtattgggtgcctactggatgccaggytgtgtggggctgctgatgataaaaaagttaagttgaggtcgtggtcttggggacttcctagtgctatggaaatcccctggtctcatccatcatcccagct

SEQ ID NO: 548111 - DNA, 201 bp, Homo sapiens
ggaaatcatctagggtgacttctgccccatagtgggcactcggctcactacagctgtttgctgtcacctttatcattccaaggcctggttgaggcgcagcygtcagcattcattggtaaaatggccggactctcaagacctgctagaggctgatgtggtccctaaacagccccagcctttctgggcaaatgcaagtcctca

SEQ ID NO: 548112 - DNA, 201 bp, Homo sapiens
gctttctggtctatggcgctggaggcctattttgaaaggattccactgccttggtgccagtcctggccaggacccaccctgggacagtcggctggggcttsagcagggtaggggccggctgggagtcactccagcactaaatctcagcatactactgcatatttttggaaaatgaatcaccctgctacatgtattagctgc

SEQ ID NO: 548113 - DNA, 201 bp, Homo sapiens
cagatttacagagaaagctttgcgtgtctaaatgaggaggagcctggcagagcctgaaagacctaggttcactttctagccccacccagtcttagttccartgttctcatctgtaaaatagagatgacagagtatgcggctcatgtagctgtggaggcgttgaatgaaactgtgtggaaatcatctagggtgacttctgcc

SEQ ID NO: 548114 - DNA, 201 bp, Homo sapiens
attgggcgcctgctttctggtctatggcgctggaggcctattttgaaaggattccactgccttggtgccagtcctggccaggacccaccctgggacagtcrgctggggcttcagcagggtaggggccggctgggagtcactccagcactaaatctcagcatactactgcatatttttggaaaatgaatcaccctgctacat

SEQ ID NO: 548115 - DNA, 201 bp, Homo sapiens
cttgatgagggtctgaagctgaagactttatttgcagcatggaactcacctgccaagctggcttctcaaaataccagccaggcattacattttcttctgtrtgggaaccagttaatatgtaggtggcttggagtgattctgaggggtattctcaccagacaacaactgaaagtttcctttctccactctagagatgccttg

SEQ ID NO: 548116 - DNA, 201 bp, Homo sapiens
tgaatgctgaggaaacatgcttctgttaactacagatgaaaataaggttacgttttctgaaccgtgaccctgccaggaaggatagggctctatgctttgcrtactggtggctgcctgcaccatctcccagtgtcccagaattgggcgcctgctttctggtctatggcgctggaggcctattttgaaaggattccactgcct

SEQ ID NO: 548117 - DNA, 201 bp, Homo sapiens
tctcctgcctcagcttcctgattagctgtgactacaggtggcatgccaccatgcccggctaattttttgtattattattattattattattatttttagtrgagtcggggtttcattgtgttagccagatggtctcgatctccagacctcatgatctacctgcctcggcttcccaaagtgctgggattacaaggcatgagc

SEQ ID NO: 548118 - DNA, 201 bp, Homo sapiens
acgcctgctgtcctagctactcaggaggctgaggttggaggatcacttgagcccaggagttcaaggttacagtgagctatgattgtaccactgcagtccascctgggcaacagatcaagaaagaccctttctctaaaaaaaagaaaaaaaaaaaaaaaggaaaaagaaaacctaccatgtggtttcaccttaatagtaaat

SEQ ID NO: 548119 - DNA, 201 bp, Homo sapiens
ttttttagcattatcataaggcctttaacaaaattcttttatcagataattttggtaaagcattatgcagaaaaagaaaactcagccaagttcaaaatttkcattgcatctataaaaatctttcattcatattggaaaaatctgagcattctttcatgtcaaagaatggtgtcatttatttatatgagaacgttctgccca

SEQ ID NO: 548120 - DNA, 201 bp, Homo sapiens
cctctaatctcaatactttgggaggctgagttgggaagatgacttgaggccaggagttcaagactgggcaagtcagttagacctcttctctacaaaaaaakttaaaattagctgggtgtggtggtacacgcctgctgtcctagctactcaggaggctgaggttggaggatcacttgagcccaggagttcaaggttacagtg

SEQ ID NO: 548121 - DNA, 201 bp, Homo sapiens
taatgaaactcctaataaatctaagcccattaaaccactcaaggtgacttgtgttgggctcatttagccctgttgaataatcaccatcctgccacagttcwgccaggccaccaggcatgaccagacatgccaaagaaagctttgagcaaacaaccaaaacaggaaggcgtttcattcctcaccccaaaggccaaaaagtgg

SEQ ID NO: 548122 - DNA, 201 bp, Homo sapiens
ctcctctctagctgctacactcctggagggcagggactctttgttccatatgtgtttatatacccaaagcctcacacagaaaatgctcaatagttacttartctctaagagtgtctaagctaaagagggacttcagtgtcccacccatggttagttgacaccaagtcagttacgcatagtctcaggattcctcctggaagg

SEQ ID NO: 548123 - DNA, 201 bp, Homo sapiens
catttgaccagcacttctcaaactgtctgtggtgaaagaccaggagttttcagggggttttaaaaaatttccagtccgtcacaaaccatgtatttgtatgwtacaataaaaatgaattagtagaagaatggaattttcaaaacatataaaatataagccaaaatgtcttattataagatgcaacaggcatgaaatagatct

SEQ ID NO: 548124 - DNA, 201 bp, Homo sapiens
gggaccagatccatttgaccagcacttctcaaactgtctgtggtgaaagaccaggagttttcagggggttttaaaaaatttccagtccgtcacaaaccatrtatttgtatgttacaataaaaatgaattagtagaagaatggaattttcaaaacatataaaatataagccaaaatgtcttattataagatgcaacaggcat

SEQ ID NO: 548125 - DNA, 201 bp, Homo sapiens
tcttagatttttacccaaaaagcttggggaagaatagttttcacatcagtggcttattatgattacttaaactggttttttgactattagctaaaagcacrggaacctttgcagtaataacttttgcagcggctgcctatcccatcactggtaagtcgtggggggtcgggttcaacttatcaggtatttaacaaacaatac

SEQ ID NO: 548126 - DNA, 201 bp, Homo sapiens
tcagctgggccatccaggcagccagatactcatcagcatctgcaggccttccccactaagtcagctaacaagtaagacgtgcacagccttcctgtgacagkgcacaatgaaatcccaaatgcaacatctggaaatccacatgttgtggtgagggtagccatgacagctttggttttttgtttggtgaaattagattttttg

SEQ ID NO: 548127 - DNA, 201 bp, Homo sapiens
acgggtgtgaagagccaggtgccgttgagcgggatgcgcgttgcttgacgcagacacagggccatccccaggcataggaaattcgctcccaccgagctcaytctctggctggcccgcacaacaggcacagtccaactcatggctgctcactgaagaagtggagagagagaatggaaaaaagctgctgatccgaacgttgag

SEQ ID NO: 548128 - DNA, 201 bp, Homo sapiens
gatgaacgggcttctcggaagtgaaacgctcaataagctcactcttcacagtcgccatcttgctcacgggtgtgaagagccaggtgccgttgagcgggatkcgcgttgcttgacgcagacacagggccatccccaggcataggaaattcgctcccaccgagctcattctctggctggcccgcacaacaggcacagtccaac

SEQ ID NO: 548129 - DNA, 201 bp, Homo sapiens
cagattgctagtagtctcctagtcaaaacaacacaatacaacaaaacaaaaccagaaaggaatgggatcaagcacaaaaaaagttttgatggaggcaaagsgttggggaaatacctagagtccgggacattatctagggacaagtgtgagtgggccatcctagtgggaaatatttgacagcccaggcatctccttggagag

SEQ ID NO: 548130 - DNA, 201 bp, Homo sapiens
atccagttcctatgatggagaccttactgtgatgaacgggcttctcggaagtgaaacgctcaataagctcactcttcacagtcgccatcttgctcacgggkgtgaagagccaggtgccgttgagcgggatgcgcgttgcttgacgcagacacagggccatccccaggcataggaaattcgctcccaccgagctcattctct

SEQ ID NO: 548131 - DNA, 201 bp, Homo sapiens
aggggtcagctttatctttataaggttggtaataccgttctctcccaggatacaaggaatactgaggaatacttcttcatctattccatagaggcccttarttatggtggaaactggatgtattctcctaagattcttcaaaatactttctgttaaatcggccacagataggccaatggcccaagaagtataacctttcat

SEQ ID NO: 548132 - DNA, 201 bp, Homo sapiens
taaaatagtaagtgtgaagaatgtgtaaaacatgaggaatgcttataaaatagtgctatgtgaaaaaggaaatgcattatagaatgtgtacactaaataastaccgaaatgatgcctatatgggtaacacgctgaaagagaacattaagaaatagattaggtcaaaggaaaatgtttttacttttggattcttaagcaagt

SEQ ID NO: 548133 - DNA, 201 bp, Homo sapiens
cttccttcagggaggacccgccctctgcagactgggcttagcgtgagcaggcacttcccatgtacgtgccaagggtaagctggcctgctgagcccagggcracagaggggcactggtttacactttgccgggaccatcagggccgccaagcaggtcaggggctgggggctgggggctgggctgctggctttgctttctctg

SEQ ID NO: 548134 - DNA, 201 bp, Homo sapiens
gcccaccaccacacctggctaatttttgtatttttagtagagagggggtttcaccatgttggccaggctggtctcgaactcctgacctcgtgatccacccscctcggcctcctaaattgctgggattacaggcatgagccaccatgcccggccagacaacttagttattaaacaaactatagcatatcagaacagagaagt

SEQ ID NO: 548135 - DNA, 201 bp, Homo sapiens
tgttccccaacaactatgtgaccaagatctgaggtgcccgtgactctgacacatggggcagaggagctccaggcacagaccaggggaggggatatttaggkgctccccttacaatccacaatgagcaattgcttctccaaggcctggagctattctggtaccttccccatggaggacactgaaaaggctgggttggggaca

SEQ ID NO: 548136 - DNA, 201 bp, Homo sapiens
agtgcaaggtattataagcttcatggtaggatatataggaattatgtacagtcatggttttccaagtttgagtcatctcttttttttttttttttttttgkgaaaatgcagcaacttgtgtttttaccaatctgtgattaaaatgtttcttaatggtgagtttttaaaaactttttttttctttttctcaccatgctgaaa

SEQ ID NO: 548137 - DNA, 201 bp, Homo sapiens
caaacattgtggggcacacttcttgatgtgggttgcccttttgatgccatattatatttcacagatacaatgagaagtaagtattcttggagaaggaaatscaaaaatttccttggattttctagggagttgtgagttttaaactggtgtgacccaaccatgtccataatcacatcagacatggtcagtttgtgttttgct

SEQ ID NO: 548138 - DNA, 201 bp, Homo sapiens
ggattcagctgattattttatggtaagcatccaaaatagtgccttatttttcttcccagaaacaaaaaacttttggtacagatttgctcaggagggactgraagcagagagctgcacagtgctgggctgggagtcagaggacccgagttctagtcctggttccagtccaggatggccccgtggacacatcctttcacctct

SEQ ID NO: 548139 - DNA, 201 bp, Homo sapiens
gatgctcaataaaagagctggaggactaaataaataggaaaatcactctacctactttcctgtttccatcttttaggaattcaagtttattcaaaatttcrttatataatcctgtatctatgatctcttcaataatttcggaatggtagttttaggcaactttaaagcttaagcttattctgaatttcccagagtgttttt

SEQ ID NO: 548140 - DNA, 201 bp, Homo sapiens
atgtatcttctctgcagctactgtctgtcgtcttcttttctgtggcggatccctattctcagaatcccatattcaaattgactcacatttatagtgtccarttatacatcacttgagcatcatgaaactttaaaagttctatattttttatttgaatcctgtccctcctattatcttattagccagatgagatgacagtac

SEQ ID NO: 548141 - DNA, 201 bp, Homo sapiens
aatggtaataatcactagacatgagagcctcatttggacaatttgaagatgaaaagtcacaaactccttctggctctgcaccgttccacagtctcttcctrtcttttttttgtattgtttttttttttttttttttgagacagagtctcactctgtcacccaggctggagtgcaatggcgcgatcctggctcactgcagct

SEQ ID NO: 548142 - DNA, 201 bp, Homo sapiens
tttggtgagtcggtgagtgacagtggtagtagtagtggggtttgagttaaggaataattgtttgcaaagtgagaactgtaaggagtgcctctgtgcaccaygcagttcaaaacccatcaggaacatggcaggctcgctgagcgccttcgctgcacattgttgattgtcatgtatttgtatgactatcatctactttaaaag

SEQ ID NO: 548143 - DNA, 201 bp, Homo sapiens
aaacgattctcctgcctcagcctcccaagcagctgggattacaggtgcctgccacaacgcccagctaatattttgtattttttagtggagacggggttccrctatgttggccaggctggtctcaaagtcctgacctcgtgatcctcctgcctcggcctcccaaagtgctgggattacaggtgcctgccacaacgcccagct

SEQ ID NO: 548144 - DNA, 201 bp, Homo sapiens
ttggggctggggaggtggcagcaactgcaggtagccctcagaaagtctgtcgggaaggacacatcaatagaagataaggctcccgtctctgcatgctgcaktgcttgccttctgcaaactgggcttgcgatttgggtgtgggttccgagagacaagcccctagcaggcccattagaagacagtgcctcccttcatgtctat

SEQ ID NO: 548145 - DNA, 201 bp, Homo sapiens
ttcaacccttcaactccttcctccactgaaaatgccatggcctccaatgtcacatgatggacttcttgtttttcactcctttttcagttgaatctcatgaattggcggtctgtctcaggcgttttcctgagggttagataatgagcagcggcgtgcattctgataacttagaatacaacattttgcctctgtgcctagtgt

SEQ ID NO: 548146 - DNA, 201 bp, Homo sapiens
taaccatgccagaaacaggcattcctcacttctgcatttggttcagcgttggctagtggttgttcagggaatgctccttgcccctgagcttggcttgtttycctggactccgtatccctatagcaaacccacaacaaaggctgtgcccacatcaagacacccctgatcacatccagacccttcccccgcttagcacgtcca

SEQ ID NO: 548147 - DNA, 201 bp, Homo sapiens
ttcttttctttttcttaaaaatttttttcacttttatttttaaaattcatttcagctaattaattaattgattttattattttttttaaagacagtgtctrgtcgggcgtggtggctcacgcctgtaatcccagcacttgaggaggccaaggtgggtggatcacttgacgtcaggagttcaagatcaggagttctctacta

SEQ ID NO: 548148 - DNA, 201 bp, Homo sapiens
gccaggctggtctcgaactcctgacttcaattgatccgcctgcctcagcctcccgaagtgctgagattacaggagtgagccgttgcacccagcctgattgwttgttttttaatatgtatttcaatctctagattaaattagaggtcttctagttcaacctacttagtttacagatagagaactgaggaccagagaaatcta

SEQ ID NO: 548149 - DNA, 201 bp, Homo sapiens
gtggctcacgcctgtaatcccagcacttgaggaggccaaggtgggtggatcacttgacgtcaggagttcaagatcaggagttctctactaaaaacacacamaaaaaagaattagctgggcgtggcggtgggcaccttctgtaagcccagccactcggggggctgaggcaggagaatggcgtgaagccggggggcagaggtt

SEQ ID NO: 548150 - DNA, 201 bp, Homo sapiens
ctatttttttgccgggtgtggtcgttcaggcctttaccaaaaaaaattttaaaaattagccacgtgtggtgtcatgcactatagtcccagctacttgggargctgaggtgggaggatttcttgaactgaggagttcaagtatgcagtgagctgtaactgtggcactgcagcctgggtgagagtgagagagagagagagaaa

SEQ ID NO: 548151 - DNA, 201 bp, Homo sapiens
gttctctactaaaaacacacacaaaaaagaattagctgggcgtggcggtgggcaccttctgtaagcccagccactcggggggctgaggcaggagaatggcrtgaagccggggggcagaggttatagtgagccaagattgtgccactgcactccagcctgggcgacagagccagactccgtctcaaaaaaaaaaaaaaaaaa

SEQ ID NO: 548152 - DNA, 201 bp, Homo sapiens
tggcaggcacctgtaatctcagctacttgggaggctgaggcaggagaactgcttgaacctgggaggccgaggttgcagtgagccgagatcacaccattgcmctacagcctggggcacatctcaaaaaagaaaaaaaaaaagaaaaagaaatttagaataattcacccaaagtacccccacaccctaacacagtaattattt

SEQ ID NO: 548153 - DNA, 201 bp, Homo sapiens
tacagccgcttccaataatacggtttttgggaaatgcactcaacttccaagctacataagttaagatatccactggattggaaacaataatcagtttgcartgggggctgtactggacaatactggaaatcattaacttgaagatggccacatttcgctggactaaattaaggcgcgtttctcccttttcttggcgtgcac

SEQ ID NO: 548154 - DNA, 201 bp, Homo sapiens
cgaggcaagcagggcctgttccccaacaactatgtgaccaagatctgaggtgcccgtgactctgacacatggggcagaggagctccaggcacagaccaggkgaggggatatttaggggctccccttacaatccacaatgagcaattgcttctccaaggcctggagctattctggtaccttccccatggaggacactgaaaa

SEQ ID NO: 548155 - DNA, 201 bp, Homo sapiens
atctgctccactctctccacagggtcaggagacaaacaaccagtcggcctcccccagcagggggcagacccaagccccagcccaagcccaagcctcaggtkccacagtgcaaggctttgtatgcctatgacgctcaggacacagacgaactcagctttaatgccaatgacattattgatattatcaaagaaggtaagtgtg

SEQ ID NO: 548156 - DNA, 201 bp, Homo sapiens
ctcagcaagtcttgatatgtcaggaagaaggtaccaagaaaaggttgcctccggacagctcctctaatcaagggggacccagatctcttgtaaccgaaacrtgttagaaatgaacccggtatatggaacacctcagagaataatttctcttgttgcagtagagccaaggattcagagccctgtcccccagtccacctcacc

SEQ ID NO: 548157 - DNA, 201 bp, Homo sapiens
aggaaactctggtaagtgctggcgcagggccaggcaggatctgctctcccaactggccatttcctgtggccaaaagggcagtgaaggttaataaagcaaasagctgcatgaaatgtccgcctctttctctgtgagcactctgtatgctcatacatgtttcagtatccttaaacagccatgtgccagttgcctgaggaccac

SEQ ID NO: 548158 - DNA, 201 bp, Homo sapiens
aaatactatcatacgttcaatcaaaacaaaattggggctccttaccatcccttgttattttcaacaaacctttttttccctcccccttctaacccactcarccaatgttgctggcttggtgtgcaccttccatgcactggatcatgtcatcatgtaaaaccagctctacccctaaaaggattgggggtggtttgatggtca

SEQ ID NO: 548159 - DNA, 201 bp, Homo sapiens
cagagcgagctgcctgcccaccgcagccctctggctttgtgcatctgtcttatgccctactcatgtaacctaacgacatcccaaagtgactggacctggcytcacaggttgcctcttaactggcttacctaactggtaatgaaaatgtcaaccaagtgcattgttatgaatgctcatttagtcatgtttctgtctgggtgt

SEQ ID NO: 548160 - DNA, 201 bp, Homo sapiens
ctccctttgtacagtgtgctgcgctcaccaggagctgctgtaaaatgcaataccttgctgagtatccacctgtttaaaatggtaccatttttagtgggggragcaaaagggaattactcaaaaatgaagctcgcctgagagtcatgaagtagtagcccaataaacaatgcctttgccctctgaagagaatggctgccctca

SEQ ID NO: 548161 - DNA, 201 bp, Homo sapiens
acgttcaatcaaaacaaaattggggctccttaccatcccttgttattttcaacaaacctttttttccctcccccttctaacccactcagccaatgttgctrgcttggtgtgcaccttccatgcactggatcatgtcatcatgtaaaaccagctctacccctaaaaggattgggggtggtttgatggtcagtcttatttgat

SEQ ID NO: 548162 - DNA, 201 bp, Homo sapiens
caaacaagataattttgaaaatcattttccacatcagttgccttactaaggaaaataaatgatgaaagtggcagctttggccttggaggagttgtctttawgccctagagaaaagaccttctttcccagaccaagaaataactagagtagaggggtatcccaggtatcatttcccactggcagtggttttgcttcttagaa

SEQ ID NO: 548163 - DNA, 201 bp, Homo sapiens
ggcttccattttggttagcctgctgaactccctatgtatcttctctgcagctactgtctgtcgtcttcttttctgtggcggatccctattctcagaatccmatattcaaattgactcacatttatagtgtccagttatacatcacttgagcatcatgaaactttaaaagttctatattttttatttgaatcctgtccctcc

SEQ ID NO: 548164 - DNA, 201 bp, Homo sapiens
acaaataatgaatctgtggtatggtcacatatatttaaatggatgaaactttatgaataagcacatactccatattcattgagtattcccttccccgagcytcacgtgccaccccctcagtgcacttttccacccactccaagcagaggcaacatggtacattatgaccccaagcttcagtttctccatttgtaaaatagt

SEQ ID NO: 548165 - DNA, 201 bp, Homo sapiens
gtcttctgggttcaagcgattctcctgcctcagcctcccgagtagctgggactacaggcgtgcaccactatgcccagctaatttttgtatttttagtagasatggggtttcaccatgctggccaggatggtcttgatctgttgacctcatgatccgcccgccttggcttcccaaagtgctgggattacaggcgtgagccac

SEQ ID NO: 548166 - DNA, 201 bp, Homo sapiens
cacttgaacctgggagccggaggttgcagtgaactgtgatcgtgccattgccctccagcttgggcaacagagtgagactccatctcaaaaaaaaaaaaaatgatattgaactccaaggagcagaagttgtttctgacatatagccaatggtctttatccagctaaaattcacccgtagtgctttttaaaaatgacaaccct

SEQ ID NO: 548167 - DNA, 201 bp, Homo sapiens
cagagacacatcttcccatcaccaaaatattaggggtttaaatttcataaagttgaaataaagtgcaagcccaatgctggtttgtagaccagtttgcaagyccagtgccttgtatgtagcagacagacaaatatttttggttgatttttcatcatttgcagtggaagtaaatgtttcagtccagtaaaatggcagaaatgt

SEQ ID NO: 548168 - DNA, 201 bp, Homo sapiens
gaagacagcttttctgcagcctggggtgtggagtggggatggttttgggagaaaactgttccacctcagataatcggtattagattctcattagaagcgcrcagcctggatcctgcgtatattcggttcacaatgggctttgtgcttctatgggaatctagtgctgctttgatcttacaggaggcggagctcaggcggtaa

SEQ ID NO: 548169 - DNA, 201 bp, Homo sapiens
gttgatttttcatcatttgcagtggaagtaaatgtttcagtccagtaaaatggcagaaatgtaaaaggtggaattccagaatgtcttaaaattaaaatagrtagtccctttcctgttattactcacggagacagaaaaatcccattacaaaacaagctcagtttgactgcaggccagagtgttacccattgtccattgttc

SEQ ID NO: 548170 - DNA, 201 bp, Homo sapiens
gtcccagtgcactcttcttcattaatagagtggcctgggctatggggccgtcattcgtaggctctttggcagggttgcagaaggagctgagtctgggctgratgtgatccatggtgggacacagcctgcagttcgtgcttctgaataggtccctggtcgggggctggatgttcagtgatgcacctcgtcatcctgaggtca

SEQ ID NO: 548171 - DNA, 201 bp, Homo sapiens
tgtgtgccaccacgcccagctgatttttgtatttttagtagagatggggtttcaccatgttggccaggctggtcttgaactgctgacctcgtgatcctccygcctcagcctcccaaagtgctgggattacaggcatgagccaccatgcctggctgaagatttttcttaaatccttcctgattttattcctgaataaaaacc

SEQ ID NO: 548172 - DNA, 201 bp, Homo sapiens
acttaaaaattattcaatagaaatttagagtgtggagccctggtttgaatcctggctcttgtcatcttaatcagttccctccatttttacatctgtaaaayggaaatattcataataataaaacacctccataagaatcaaatgaaataaagtagaagtgctttgtaaaagataaacaattcaataactgtacaattcagt

SEQ ID NO: 548173 - DNA, 201 bp, Homo sapiens
tctgaggttatttttatgtatttatcatggggggatattttatgaataattttaaccttacatgttaaactggtcatatgcagttgaaaaatgtcaaaacsaaagcttgtacttgttttcttttcaacatgcagtttagcaataatggttaagagcatggactctcagaagtcaaactgccggagtttgaatactggttcc

SEQ ID NO: 548174 - DNA, 201 bp, Homo sapiens
cagttgaaaaatgtcaaaaccaaagcttgtacttgttttcttttcaacatgcagtttagcaataatggttaagagcatggactctcagaagtcaaactgcyggagtttgaatactggttcctcctctccctttccgcctggttttcagaatgttgcttaaacattctacctttgtttccttgtctgtaaagtggagataat

SEQ ID NO: 548175 - DNA, 201 bp, Homo sapiens
ttattatcatttatgactaggttgtagatttaattttttctccccccatccatcctgtggtcaaagactaaattatttaacagtcatttacatcccccataaaaaaaaaatcgaggccaggcacagtggctcactcctgtaatcccagcactttgggaggctcaggaaggaggattgcttgagcccaggagttcaagacca

SEQ ID NO: 548176 - DNA, 201 bp, Homo sapiens
acccaacctgagatgctggctacaatatatgagcattctggcatttatcatttagaaatagtgtattactttaaaacctaaatttcttttgaagtttatcrccattttattcgaattattttaatccaaaagtaaatttagcagaatactttggagtgatttctttgtttatataatgcttatttttgttttttgacctgt

SEQ ID NO: 548177 - DNA, 201 bp, Homo sapiens
tcgcagaggaaccggtcggtcaggaagccgcacagcagccgtggcttttaaagatgctggaaaaacacccatggagccggagatagcaattcactgaattygaatcactctctatgagccacagcataaaatccctggagaaggtgtgtgctgacttgatcagaggagcaaagaaaaagaatctcaaagtgaaaggaccag

SEQ ID NO: 548178 - DNA, 201 bp, Homo sapiens
tactggatatgatttcgttttttcatgtatttagggctatacaatttcctattaaatttatttaagtaaaaaattatttttaattaaattaattaaatttrataaaagacaagtagagcagagttggagcagattgtgaagatggtacataaaagacagaagtttgagaaatgttggctgatactgttgtttcccaaagtg

SEQ ID NO: 548179 - DNA, 201 bp, Homo sapiens
tttttttgagacagagtcttgctttgtcgcccaggctggagtgcagtggcatgatcttggctcactgcagcctccgcctcccaggttcaagcaattctgcytcagcctcctcagtagctgggattacaggcgcctgccaccatgcccggctaatttttgtatttagtagagatggggttttaccatgttggccaggctggt

SEQ ID NO: 548180 - DNA, 201 bp, Homo sapiens
ttcctaaagaactctacctcagttcttcactaaaagaccttaataagaagacagaagttaaaccagagaaaataagcactaagaggtatgatgtatccttygctagtttgattgaatcaaatattaatttttagttcgtttccatattaaagttagatgaatgttaaagtttatttgaaaaataacaccatcacacgaata

SEQ ID NO: 548181 - DNA, 201 bp, Homo sapiens
tgcatattatctactctccagacagatcatacagatatgatctctaggtcataaagtttaagaggcaaagattatgaggcttctaaaaaaaaattcagccrgaagtcattgtcttttcataaaacgatacaaaaataattcctttttggccgggtgcggtggctcacgcttgtaatcccagcactttgggaggccaaggtg

SEQ ID NO: 548182 - DNA, 201 bp, Homo sapiens
aactcctggcctcaagcattcctcccaccttggccacccaaagtgttgggattacaggcgtgcaccactgtgttgggcatctaagtatatatatatatatwtttttttaatttaatttaattttatttatttcgagatggagtctcactctgtcacccaggctggagtgcagtggtgcaatcttggcccactgcaacctct

SEQ ID NO: 548183 - DNA, 201 bp, Homo sapiens
tggcattccataaaagggcaggcatttcaaatagtcttttcaggggtgatagaatgtactgatctatccacatttgctcatctattctcctttgaggccartgccatacatttatgaaatgattggttgggaatgaaattgctttttgtatattacatctataaaatgcaatatatttcaaataattgagataaatagcta

SEQ ID NO: 548184 - DNA, 201 bp, Homo sapiens
atcgttccaccaagccagtagttttttctccaactctcatgttaacagatgaagaaaaggctcgtattcatgcagaaactgctcttctaatggaaaaaaamaaacaagaaaaagaacttcgggaaaggcagcaagaggaacagaaagagaaactgaggaaggaagaacaagaacaaaaagccaaaaagaaacaagaagctg

SEQ ID NO: 548185 - DNA, 201 bp, Homo sapiens
gcgggatagggaaccttccaaactgaagcgctcctactcctccccagatataacccaggctattcaagaggaagagaagaggaagccaacagtaactccarcagttaatcgggaaaacaagtatgtttatcttaactcctagaactaaaataatgtgctgtatttcaaagtttctactctgaatctgtcagtatgttagtg

SEQ ID NO: 548186 - DNA, 201 bp, Homo sapiens
tatcataccagagaggattattttaagtgttaatgtagatataaaatcattgttatgttttacagtttcatgccagagtaccctcacgtttttcatagacygcctgtggtcccggaatctccctttgaggaccataattttcagcaatattgagcttgccttgttgcagcactcaagttccaaactttttttccccttagc

SEQ ID NO: 548187 - DNA, 201 bp, Homo sapiens
atactagaggcatgcagtctttagaacttaaatcattcatatttgtggagtcatttagtatataggtgccaaatattcctacacatctaagattgcattcyttgtgtgctccttttaaaagtaggagaaatatgtaatttattctagaataaattttgttaaaattatcactaattttaaaaagtttttagtagagttatt

SEQ ID NO: 548188 - DNA, 201 bp, Homo sapiens
cagccttggcaacatagcaagaccccatttctccacagaaagagggggaaaaaagggtatggttgctcctgcctgtaattccagcactttgggaggctgargcaggtggatcgcttgagccccaggagttcaagaccagcctgggcaacatggcaaaaccctgtctctagaaaaaaatattaaaaaattagctgggtttgg

SEQ ID NO: 548189 - DNA, 201 bp, Homo sapiens
aaaattatatatgtccagttgtagccctaattcccagctatatgtgggatatcttttctaaaaaccaaactttttagctttttctttttttagtagagatkggaggggggggtctcactatgttgcacaagttggtctcgaactcctggccccaagcagtcctcctgccttggcttcccagaatgctgggattacaagcat

SEQ ID NO: 548190 - DNA, 201 bp, Homo sapiens
aaattatatatgtccagttgtagccctaattcccagctatatgtgggatatcttttctaaaaaccaaactttttagctttttctttttttagtagagattggaggggggggtctcactatgttgcacaagttggtctcgaactcctggccccaagcagtcctcctgccttggcttcccagaatgctgggattacaagcatg

SEQ ID NO: 548191 - DNA, 201 bp, Homo sapiens
attatatatgtccagttgtagccctaattcccagctatatgtgggatatcttttctaaaaaccaaactttttagctttttctttttttagtagagattggrggggggggtctcactatgttgcacaagttggtctcgaactcctggccccaagcagtcctcctgccttggcttcccagaatgctgggattacaagcatgaa

SEQ ID NO: 548192 - DNA, 201 bp, Homo sapiens
cccatctctactaaaaatacaaaaaattagccgggcgtggtggtgggcacctgtagtccccgctactcaggaggctgaggcaggagaatggcgtgaaccckggaggcggagtttacagtgagctgagatctcgccactgcactccagcctaggggacagaacaagactccgtcttaaaaaaaaaaaaaaaaaaaacctttt

SEQ ID NO: 548193 - DNA, 201 bp, Homo sapiens
aatttggaaagttgtctgttgactaacttaggcctacttttcataagcatttgctttacatggggatatcaaataaatatcctgttttccatgtatcaacaatgtttcttatataaaagcttgttgatacctttagtcttaaagtacctccagaatgtcatttcctccaacagggtttctctgattgaccaggttaggggc

SEQ ID NO: 548194 - DNA, 201 bp, Homo sapiens
atttggaaagttgtctgttgactaacttaggcctacttttcataagcatttgctttacatggggatatcaaataaatatcctgttttccatgtatcaacaatgtttcttatataaaagcttgttgatacctttagtcttaaagtacctccagaatgtcatttcctccaacagggtttctctgattgaccaggttaggggct

SEQ ID NO: 548195 - DNA, 201 bp, Homo sapiens
gagctgagctgtgatttattatatctgcattctggtcctatgtcaaaacttttttaaccactctgggactcagttttcttgtttcccaaattatagtcttraaatagacaatttttaagtttcttctttctaatcatgtaatttacattaaaagatttagtatactactttgtttggtaccaagccttttatctgtttctg

SEQ ID NO: 548196 - DNA, 201 bp, Homo sapiens
atagtcaccatttctattgtatagttttatctgtttatttagaaatttttcattttggaatattcactcaaaagagcatataagaccaggtgcggtggctyacacacctgtaatctcagccttttgggaggccgaggcaggtggatcacctgaggtcaggagttcgagaccagcctggccaacatagtgaaaccccacctc

SEQ ID NO: 548197 - DNA, 201 bp, Homo sapiens
aggaacttaggtagtttattacacaacctgaaggaaactagttagtattttacctcatgtaaaagtttttagggaagattgcatttgttccctcagtaacrtagttactaactgtgccaggcacagtctttatccttttagagcttatattctaggagggaagaaaaattttaaataagtaattatagttatttgatcaga

SEQ ID NO: 548198 - DNA, 201 bp, Homo sapiens
cttagtcgtatgactaatgttaacctaaatattaaatgtcctggaaggcccagcatcttatgagttaacatattaactgtttacaagatgcctgtggtacrggtgctacagtttgctgccatttatagtatagaaccttaatttcatatgctcagcattttaagacatcttgtatcctttttcttcctcaggccaacatgt

SEQ ID NO: 548199 - DNA, 201 bp, Homo sapiens
tggcgcgatctcagctcactgcagactccgcccctggggttcacgccattctcctgcctcagcctcccgagtagctgggactacaggcgcccgccacctcrcccggctaattttttgtatttttagtagagacggggtttcactgtgttagccaggatggtctcgagctcctgacctcaagtgatccgcccgcctcagcct

SEQ ID NO: 548200 - DNA, 201 bp, Homo sapiens
ttttttttttgagacagagtctcgctcttcacccaggctggagtgcagtggcgtgatctcggctcactgcaacccccacctcccaggttcaagctattctyctgcctcagcctcctgagtagctgagactccagtcatgcaccaccacttccagctaatttttgtatttttaattagagacagggtttcgccatgttggcc

SEQ ID NO: 548201 - DNA, 201 bp, Homo sapiens
ccaggttcaagctattcttctgcctcagcctcctgagtagctgagactccagtcatgcaccaccacttccagctaatttttgtatttttaattagagacasggtttcgccatgttggccaggctggtctcgaactcctgacctcaagggatcagccagccttggcctcccaaagggctgggattacaggtgtgagccaccg

SEQ ID NO: 548202 - DNA, 201 bp, Homo sapiens
aaacctcgtctctgctaaaaacaaaaaattagtcgggcatggtggtgtgcacctgtaatcccagctactcagaaggctgaggtaggagaatcgattgaacycgggaggtggaggttgcggtcagccaagatcacaccattgcactccagcctgggcagcaagagcagaactgtgtcttacacacacacaaaaaaagattac

SEQ ID NO: 548203 - DNA, 201 bp, Homo sapiens
ttgcttgagcccaggagttcaagaccagcctaggtaacatggtgaaacccctgtctctacaaaaaatacaaaaattagctgggtgtggtggtggatgcccktagtcccatctgctcaggaggttgaggtgggagaattgttcgagcccgggaggttgaggctgcagtgagccacgatcacaccactgtactgcagcctatg

SEQ ID NO: 548204 - DNA, 201 bp, Homo sapiens
ctgccctgggaaaaatactgtttaatatttttggccatacttatctgcaggtaagagacagaggccttcctaaattcaaacaagtttttgcacgctctgtraaatatgttaaagtggaattgcttaaaacgcagtgtaagtggtgctcactaaagtaaatatttttgaaagtcttaaaatttggataactttggtagtttt

SEQ ID NO: 548205 - DNA, 201 bp, Homo sapiens
ctaatttttgtgtttttagtagagatgggctttcaccatattggccaggctggtcttgaactcctgacctcatgatccgcctgcctctgccttccaaagtkctgggattccaggcttgagccatcatgcctggccaattactaggttttaaatctgtctttgaagagggggccccttgcatttggaggttcattcatctgt

SEQ ID NO: 548206 - DNA, 201 bp, Homo sapiens
ggagtttcactcttgttgtccaggctggagtgcagtggcgtgatatcggctcactgcaacctgtctcctgggttcaagcaattctcctgcctcagcctccygagtaactgggattacaggcatgtgccaccaagcctggctaattttgtatttttggtagagatggggtttctccatgttggtcaggctggtctcaaactc

SEQ ID NO: 548207 - DNA, 201 bp, Homo sapiens
catataagaccaggtgcggtggctcacacacctgtaatctcagccttttgggaggccgaggcaggtggatcacctgaggtcaggagttcgagaccagcctkgccaacatagtgaaaccccacctctactaaaaatacaaaaattaggtgggtatggtggcacacaccggtagtcccagctacttgggaggttgaggcagga

SEQ ID NO: 548208 - DNA, 201 bp, Homo sapiens
ggctgtttcttttgcagaaaaaattaggatttttcctttgaaaagcaaattgcagcagatttgaatcaatataaaaggttgaaattagtaggagagaaagrgcaaaaagcactaaataatttcaacttgagaacatacagtttctttttaatagttctgggcaatttgaagtaaatctacagatggcctcaggtggcagat

SEQ ID NO: 548209 - DNA, 201 bp, Homo sapiens
gccccgcccctgccgtgacgtctggagacgcgacgcgtcgcctcgcaatgcaaatcgggaaaagggggtgagctgggctggcttccgtcctggtagccaasgctaattctccctcgagttcttgggagatgggcatttggcgagaaggctggcgttagtgaagcgcgcccggcgtcacggtgagtgcgggtcttgggccct

SEQ ID NO: 548210 - DNA, 201 bp, Homo sapiens
gagttcgataccagcctcggcaacatggtgaaaccccgtctctactaaaaatacaaaaattaacttggcatggtggcataggcctataatcccagctagtkgggggctgagggatccctgagtccaggaagtggaggttgcagtgagtcaagattgcaccgttgcactccagcctgggtgacagagtgagactctgcctca

SEQ ID NO: 548211 - DNA, 201 bp, Homo sapiens
tttggaaagttgtctgttgactaacttaggcctacttttcataagcatttgctttacatggggatatcaaataaatatcctgttttccatgtatcaacaatgtttcttatataaaagcttgttgatacctttagtcttaaagtacctccagaatgtcatttcctccaacagggtttctctgattgaccaggttaggggctt

SEQ ID NO: 548212 - DNA, 201 bp, Homo sapiens
ggttccgagaatacatgtttgaggagtcaggaagtagaagctgccagtctcccaaaaagcctgagcccagaaattcgcacaacattacttccaacatactstgttggttagagcaaagaccagcgtacaaccctcacctttgaaaggaaaaatgtcaaagaatttgtggccgtgctttgcctactataattttgatgacaa

SEQ ID NO: 548213 - DNA, 201 bp, Homo sapiens
aagtaaggcctgcaacagttccataatattaaatttattagtactgaatgatgaaatattatattaaacttatttggaattctacatttatagccgtactmatttttttttttttttttttttgagacggagtcttgctctgtcttctaggctggagtgcagtggtgagttctcggctcactgaaatgtccgcctcctggg

SEQ ID NO: 548214 - DNA, 201 bp, Homo sapiens
accgtgcccagcctaatttttgcatttttagtggagacagggtttcaccatgttgctcaggctggtgtcaaactcctgacatcagatagatgatccagccrccccagcctcccaaagtgctgggattacagatgtgagccaccgcacatggcctactgttagttttgatctgcctagttacagaagttatgtttgtttatt

SEQ ID NO: 548215 - DNA, 201 bp, Homo sapiens
cggcctcccaaagttctgggattacaggtttgagccactgcacccggcctagattatactattaattatttattttctatcatttggtttttagttgcttmgagtttcctaatgtgtaaaacttgttttatgtatcaaaagtgttttgactccagttgggatgtgagtagctattctaaagtacaggtggaagcaaaaata

SEQ ID NO: 548216 - DNA, 201 bp, Homo sapiens
aaatgccacgatatactaagtgctttgctaagaataatatggagctccttacccagaggtgtaaatctgtattattcactcattcaattattaaatccaatttttttttttttttttttgagacagagtctcgctcttcacccaggctggagtgcagtggcgtgatctcggctcactgcaacccccacctcccaggttcaa

SEQ ID NO: 548217 - DNA, 201 bp, Homo sapiens
ggaaagtctaaaaagagcttctctatgttattgcatttcctttcaacttaatctatttaaacgctaatccttttgtgtcccaacataactttatgagataygtacaattttcagacatattttgaagatcttctatataaaaaacagcatgagggctgggtgccatggctcgtgcctgtaatcccaacactttaggaggcg

SEQ ID NO: 548218 - DNA, 201 bp, Homo sapiens
tattctaggagggaagaaaaattttaaataagtaattatagttatttgatcagaattccggtagagaagaataaagtattataagagcatgtatcaggggwcttggctagttctaggaaccagggaagtcttttcagagggagagatgtgtaagccaagacctaatgtgggcattatctagatgaacagctgatagaccta

SEQ ID NO: 548219 - DNA, 201 bp, Homo sapiens
atcccagctactcagaaggctgaggtaggagaatcgattgaacccgggaggtggaggttgcggtcagccaagatcacaccattgcactccagcctgggcarcaagagcagaactgtgtcttacacacacacaaaaaaagattacaaggcagaagacaggcagaaatatttacaacacatatggcagtggtttaaaatacct

SEQ ID NO: 548220 - DNA, 201 bp, Homo sapiens
ttaattttaatttttatttttttaagagacaaggtttttctcagtcacctagacttgagtgcagtggcacaatcatagctcactgcagccttgaactcctrgctcaagtgatcctactgcctcagcctcctgagtagctgggactacaggtacgcaccatgcctggctaattttttaaaattttctagtagagacaaggta

SEQ ID NO: 548221 - DNA, 201 bp, Homo sapiens
attagctgggtgtggtggtggatgcccttagtcccatctgctcaggaggttgaggtgggagaattgttcgagcccgggaggttgaggctgcagtgagccaygatcacaccactgtactgcagcctatgacagtgagaccctgtctcaaatccaaaccagtaatatggaaattatccataggtggcgttgatgctctagtga

SEQ ID NO: 548222 - DNA, 201 bp, Homo sapiens
ttagctttacttagtttcctttttgttagccttcttagaaaacaaaataatcttttttccttctggctgggagctaacaaatgaacatcaagtagaatgasaattggcaaatttttcttaaagggatagatggtaaacattttaggcttggggaaccttatgggcttggagagtcctgtggtctctgacacaactattgat

SEQ ID NO: 548223 - DNA, 201 bp, Homo sapiens
taaaaacacaaggtcaggtatgtggtggctcacgcctgtaatcccaacactttgggacgccaaggtgggcagatcgcttgaggtcaggagttccagaccarcctagtcaacatggtgaaaccccatctctactaaaaatacaaaaattagccaggcgtggtaacagcctgtgttcccagctactcaggaggctgaggcagg

SEQ ID NO: 548224 - DNA, 201 bp, Homo sapiens
ctgcctcagcctcctgagtagctgggactacaggtgcccgccaccgtgcccggctaattttttgtctttttagtagagacggggtttcaccgtgttagccrggatggtcttgatctcctgacctcgtgatccgcccgccttggcctcccaaagtgctgggattacaggcgtgagccactgtgcacggctgcattttctctt

SEQ ID NO: 548225 - DNA, 201 bp, Homo sapiens
ttatatcatatacacatgtacataactgaaacaattttacgaagcagtacctaaccttactatgtgtgacatagtctgatgtttgctatttttttaatgctgatcatgaccttctaatggattttaaaaacactgccctcaagcatttagcacagtgctagagacatagtagttgctcagaaaataccatacattttagca

SEQ ID NO: 548226 - DNA, 201 bp, Homo sapiens
gttgcgtttaacattttctgctttctttatagttttacctcatttatatctttaagcaatatattgttcaattcaatttgatttttaaactttatatagartatcgtattacacatattcttggtttttcattcaacattgcgggggatgggcagaagatgatgaggtgagaaggcgggcagggtatgttttctggttaaa

SEQ ID NO: 548227 - DNA, 201 bp, Homo sapiens
tgcatcagtagtcaggacatggtgtgctaactgaaattattgtaatgttcaattgatacgatattgaacaaactgtacacttttattggaattacatagtraagggtccttctagtatatttaggctttagaagaatcagccaaacaaagcatgatctacttttaggctagatagacatatgataactcttatcaacagac

SEQ ID NO: 548228 - DNA, 201 bp, Homo sapiens
gagaaagagcaaaaagcactaaataatttcaacttgagaacatacagtttctttttaatagttctgggcaatttgaagtaaatctacagatggcctcaggyggcagatgtgtgaattgtggtggagggagaaagcatatagccatgaaatacctcaaggcaggatactaattttacagaactgaaactcctttaatttcca

SEQ ID NO: 548229 - DNA, 201 bp, Homo sapiens
atcagtagtcaggacatggtgtgctaactgaaattattgtaatgttcaattgatacgatattgaacaaactgtacacttttattggaattacatagtgaarggtccttctagtatatttaggctttagaagaatcagccaaacaaagcatgatctacttttaggctagatagacatatgataactcttatcaacagacttt

SEQ ID NO: 548230 - DNA, 201 bp, Homo sapiens
cactcatatttatggaagtgaaaggaaaaaaatgtcttcaggtatgtgttgctaataaaattagatataattaaggaaacatttaaaaaataccttgttgytgtcccagttacctattgctgcataacaaatcactccaaaacatagtgacttaaaactgtaatttagtatctctcctgtttctctggcctgcctggactt

SEQ ID NO: 548231 - DNA, 201 bp, Homo sapiens
cctgagtagctgggattacaggcacataccaccacacccagctggtttttctatttttagtagacatggggtttcaccatgttggccgggctggtcttgamctcctgtcctcaagtgatgtgcccgcctcggcctcccaaagttctgggattacaggtttgagccactgcacccggcctagattatactattaattattta

SEQ ID NO: 548232 - DNA, 201 bp, Homo sapiens
gattgaaatgaatggtttggggacaactgcccagccagtaaataaaagagaatggatccctaccttatttcttagaccaagctacatctcaaatgaatagmcgatataaatgtatagattgaaacagcgaactattaggagaaagcattggtattttttagtaccttgatgtcaaatcaagatgtcataaaggaaaatgaa

SEQ ID NO: 548233 - DNA, 201 bp, Homo sapiens
ggcgtggtggtgcacgcctgtagtcccagctactctggaggctgaggcaggagaatcgcttgaacctggaaagcgaaggttgcagtgagccgagattgcgycattgcactccagcctgggtgacaagagcaaaactccgtctcaaaaaataaaaaataaaaagcgtggacataatggaaaataatcaaaatgacttttggg

SEQ ID NO: 548234 - DNA, 201 bp, Homo sapiens
tatattcattcttatattgatggttcccagtcttgactggtgttagaattcatttgggaagctttttaaaaatacctatgtgggcaaggcgaggttggctyatgcctgtaatcccagcactttgggagacctaggcaggaggatcacttgagcccaagagtttgagactatcctggacaacatagtgagactctgtatttt

SEQ ID NO: 548235 - DNA, 201 bp, Homo sapiens
ttccaccaagccagtagttttttctccaactctcatgttaacagatgaagaaaaggctcgtattcatgcagaaactgctcttctaatggaaaaaaacaaamaagaaaaagaacttcgggaaaggcagcaagaggaacagaaagagaaactgaggaaggaagaacaagaacaaaaagccaaaaagaaacaagaagctgaaga

SEQ ID NO: 548236 - DNA, 201 bp, Homo sapiens
atgggttcatcattcacttttgttccatttattttattttaacacactgattttcataaatctattgttttcccagtagaactttataatttattttgaartattttctaatttccctttcttccttgacccatgggtcatttagaaatgtgttgtttaatttccacatatgtgggattcttcttatatcttattgatttc

SEQ ID NO: 548237 - DNA, 201 bp, Homo sapiens
tctattgtttacctaattgaagccagtttagacagtcactctttagaactagggctagttcagctccttgggaggctgaggcaagagaatcgcttgaacckgggaggtggaggttttggtgagccgagattgcgccactgctctccagcctggacagcagagtgagacgtcatctcaaaaaaataaagaactagggctagt

SEQ ID NO: 548238 - DNA, 201 bp, Homo sapiens
tgaaacatctgtttttgtaaaattctatctgaagttactctgtttttcttttctcctctcacatctattgatgggttcatcattcacttttgttccatttrttttattttaacacactgattttcataaatctattgttttcccagtagaactttataatttattttgaaatattttctaatttccctttcttccttgacc

SEQ ID NO: 548239 - DNA, 201 bp, Homo sapiens
ttacctctcttggtcttggtttaaaattatatatttttaaaattaggtaataaaatctgtatagttcttggcatattgcagatgcttgataaatgtttgamctgaagcgtagagtgctttgtaaataagctatttaaaaattagagctcttaggccgggcacactggctcacacctgtaatcccagcacttggggaagcca

SEQ ID NO: 548240 - DNA, 201 bp, Homo sapiens
aggctggtcttgaactcctgacctccgatgatctgcctgcctcggcctcccaaagtgctgggattatagccatgagccactgtacccggccattagtcatkctttaaaatttaaattgtttcccttatcaacaacataatgctgttatgtagatcctagtagataaatttctgcctgtatctgtagcataaaaaatgttaa

SEQ ID NO: 548241 - DNA, 201 bp, Homo sapiens
tccttaaggaggtgactaggtatgtgcatgtataaggatcttttgtgtttatttcagcattgcttataattaaatggggaaaaaacccaaatgttcaaacrattgactcagttttggggtctgtgtataaagtagaataggccatgtgcagcggctcacgcctataaatcccagcactttgggctgagccaggtcgatcac

SEQ ID NO: 548242 - DNA, 201 bp, Homo sapiens
tgaggcaggagaatggcgtgaaccctggaggcggagtttacagtgagctgagatctcgccactgcactccagcctaggggacagaacaagactccgtcttaaaaaaaaaaaaaaaaaaaaccttttatcagtaaaactcaatataaattctgttttataattaggcctatgtagattagaaagaattagaaatttcttttt

SEQ ID NO: 548243 - DNA, 201 bp, Homo sapiens
ttgtcaatcagtcaaccagtagtcgaatattacctagcattgcaaatgatgatatagctctatagtgatgaaagatgttcatagaaaagcaacatcataarggttttattgaaaactctctataagagtaaactccagaatgtaaagtggtattggggtggtgaggttatgggtcatttttgttttatatttagtaattta

SEQ ID NO: 548244 - DNA, 201 bp, Homo sapiens
acgccaaggtgggcagatcgcttgaggtcaggagttccagaccagcctagtcaacatggtgaaaccccatctctactaaaaatacaaaaattagccaggcrtggtaacagcctgtgttcccagctactcaggaggctgaggcaggagaatcacttgaacctgggaggtggaggttgcagtgagctgagatcatgccactgc

SEQ ID NO: 548245 - DNA, 201 bp, Homo sapiens
ctatagtgatgaaagatgttcatagaaaagcaacatcataaaggttttattgaaaactctctataagagtaaactccagaatgtaaagtggtattggggtggtgaggttatgggtcatttttgttttatatttagtaatttattttctaatttttcttctaagatcattgattatttgtatggtttttaaaacctcaccta

SEQ ID NO: 548246 - DNA, 201 bp, Homo sapiens
cctattattttctgtttataagcatgtgaatcgtatgtaccaaattgattaaaataatgaactaattgaattgttttacatactgaaattccctatatttwctgtgatacacgctacacaaatactttgtgtgtgcttaagttaaaagagtatagtctctgatgccagactctattcaaataactgtcacttactagttgc

SEQ ID NO: 548247 - DNA, 201 bp, Homo sapiens
tagattataactttaaagtgaaagcccttaacatcttggggtagattttctgctaaattctgcctaatcatctgatgtcatggtctatgaccacggaggcrtgtgtgccgagtggggtccgtggcctgctggcccctgtcctaggggtggccgcatggtcccaggtgcggccgctatagacatagccccagattctgaaaa

SEQ ID NO: 548248 - DNA, 201 bp, Homo sapiens
tacttcttagggcagacagttcacatactgttccagcatagagcactactagagaagaaatatagagcagtaggtaagtgtacggagccagactccctggktatggatcccagtttttttcttattaattgtgtgagcttgggcaaattacttagcctccctctgcctcagtttcctcatctgtaactaggataatcataa

SEQ ID NO: 548249 - DNA, 201 bp, Homo sapiens
aaacagttgcataattttgctcttgttccaaatctttcacttctgtttctaacagtgaaatgatgctagcatatgagataggcaggaaagtggtgttgatrtttccatagagataataggaatacatgcttgctattctgtgaccaagttcttaacacagtgcagtagagaagtgggggaagtgagcataccagtaagcaa

SEQ ID NO: 548250 - DNA, 201 bp, Homo sapiens
caccaagccagtagttttttctccaactctcatgttaacagatgaagaaaaggctcgtattcatgcagaaactgctcttctaatggaaaaaaacaaacaaraaaaagaacttcgggaaaggcagcaagaggaacagaaagagaaactgaggaaggaagaacaagaacaaaaagccaaaaagaaacaagaagctgaagaaaa

SEQ ID NO: 548251 - DNA, 201 bp, Homo sapiens
cgataccgaaagaaataaagtaagtagtttattgcaggaaaaaactggaaaaaaaagccaaacatggattataactatgtgattatcttaccacactgctrtcttttatcatgagatctacagtgtaaggggatcgttgccatctttggtagctggtgttttgcttgtttttgcatgatcaatccatttatatgctaaagg

SEQ ID NO: 548252 - DNA, 201 bp, Homo sapiens
actgtgtatggggtttgctattctaaaaaacatttttatttttggaattttagtggattttacttatccctcattggaagaatcaattccttctaaacctrctgcccagacgccacctgcatctatagaagtagatgaaaatatagaattgataagtggtcaaaatgagagaatgggaccactgaatatatcaactccagt

SEQ ID NO: 548253 - DNA, 201 bp, Homo sapiens
cctggaggcggagtttacagtgagctgagatctcgccactgcactccagcctaggggacagaacaagactccgtcttaaaaaaaaaaaaaaaaaaaacctkttatcagtaaaactcaatataaattctgttttataattaggcctatgtagattagaaagaattagaaatttcttttttaaagatacctttattaaatatt

SEQ ID NO: 548254 - DNA, 201 bp, Homo sapiens
aaggcaggcggatcacttgaggtcaggagttccagaccagcctggccaacatggtgaaaccccatctttactaaaaatacttcagccaggtgaggtggcgyatgcctataatcccagctactcgggaggctgaggcaggagagtggcatgaacccgggaggcggaggttgcagtgagccgagatcacggcactgcactcca

SEQ ID NO: 548255 - DNA, 201 bp, Homo sapiens
atgatgttagggtcacttctctagtgttaacatgctgttaaattgaggtaataaacatttaactcattaaatcaggaacttaggtagtttattacacaacytgaaggaaactagttagtattttacctcatgtaaaagtttttagggaagattgcatttgttccctcagtaacatagttactaactgtgccaggcacagtc

SEQ ID NO: 548256 - DNA, 201 bp, Homo sapiens
gctgaggcatgagaattgtctgaacccaggaagcggaggttgcagtgagtcgagattgcaccactgcaccccagcctgggtgacagcaagactctgtctcaaaaaaaaaaaaaagaattaaatacatagtatagaaacgaagtttaatatataacctttaacatcttagaaaaaagtatcgatgagaacagtctgtatgtt

SEQ ID NO: 548257 - DNA, 201 bp, Homo sapiens
taaaaatttttcatcataattcagcattaccgccacgcctatattagagtagataattaaggggtttccaagccagttggcgatccatttgctacaaacartgccaatgaaagattgcattatcacagtgaattagaatagcccttttgggattttttgtattataatttgacccatattattttcataaatagcttggct

SEQ ID NO: 548258 - DNA, 201 bp, Homo sapiens
aggagcaaagaaaaagaatctcaaagtgaaaggaccagttcaaatgcctactaagactttgagaatcgctacaagaaaaactccttttggtgacggttctragacatgggatcatttccatatgagaatccacaaacaactcattgacttgcacatcctttctgagattgttaagcagattacttccatcagtactgagcc

SEQ ID NO: 548259 - DNA, 201 bp, Homo sapiens
gttaaaaatatatatattagagtactcagtctaattaaacatgtgaatatattcccaggatttgaacagacgaagttataattagtctttgggtagtctartctgtattaatagagagctggtggtcgttattactgagtttacatggaagtttcccaaaatgtgagatttggactactatgaaactcaagatgattttag

SEQ ID NO: 548260 - DNA, 201 bp, Homo sapiens
attactgtattttttcattatctatttttatttatttatttttgagacagggtctcactctgtgcctgggttggagtgcagtggcatgattacagctcacygcagccttgacctcctgggtttagatgatcctctcacctcagcctcctgggtagctgggaatacaggcacatgccaccatgcccagctgatttttgtatt

SEQ ID NO: 548261 - DNA, 201 bp, Homo sapiens
gaatgacttatcaaaaatgtaacatgttaaattcacatagattgaggttggatacacagtcagccttctgtatctgtgaattcaaccaatggccgattggraatattttaaaaaaataattggatctgtactgaaccatgtacagagttttttcttgtctttattccctaaccaatacaatgtaacaactgtttatataac

SEQ ID NO: 548262 - DNA, 201 bp, Homo sapiens
acatttttaactcttttgtatacaaaacactcaggaagaattgaaagtgttgaatcaagaggatgtaagttccagtgatgtttgaatatctaccattcaarttctgttttatgagaaatcttgacactgagtaattaacaaatagatgtgctgatagatgttgtctccacaaagtgacacttcttttatcacaacttgatc

SEQ ID NO: 548263 - DNA, 201 bp, Homo sapiens
atttttaatagagatgaggtttcaccatgttggccaggctggtctcaaactcccaacctcaaggaatccacctgcctcggcctcccaaagtgctaggattrcaggtgtgagccactgcacccggccacataagataatttcaatgtgttgtatcttatggtttgtcctagatctaaacaaataaattctgcaaattatttg

SEQ ID NO: 548264 - DNA, 201 bp, Homo sapiens
attgggtaggcatttggatacctggaagtggaacttaagtctaagtatgcccaggtctaggttttatgttttagaataaagacatttttaactcttttgtrtacaaaacactcaggaagaattgaaagtgttgaatcaagaggatgtaagttccagtgatgtttgaatatctaccattcaagttctgttttatgagaaatc

SEQ ID NO: 548265 - DNA, 201 bp, Homo sapiens
gagaattaaagttttctttcacttctgtaattttaataattttacagccatttaagattaaaggacaaccagaaagtggaattctaaggacaggaactttyagagaggatacagacgataccgaaagaaataaagtaagtagtttattgcaggaaaaaactggaaaaaaaagccaaacatggattataactatgtgattat

SEQ ID NO: 548266 - DNA, 201 bp, Homo sapiens
ccagcctggacagcagagtgagacgtcatctcaaaaaaataaagaactagggctagtttattcttttcttttctttttttctcatggcattctaagactcycccaattagacagggtctccctctattgctcaggctggagtgcaatggtgtaatcatggttcattgcaagctcaacctcccaggctcaaggaaggcctca

SEQ ID NO: 548267 - DNA, 201 bp, Homo sapiens
cctttggcatacactcaacattttccacatcgaattacctactttgctgtaaaccagtggttcttgttgggggtaattttgccttccaggacacattcggyaatgactgtagacagttttggttgttacaactggaagggaaggatgatagtaaactggcgtctagtagaggttagggatgctgctaaacatcctgcagtg

SEQ ID NO: 548268 - DNA, 201 bp, Homo sapiens
atatgaagggcagccaaggcaaggttttttgattctttggtacaagtagcttaagtttttatatgacaaaatttaattgaaaaatcagatttaaaaaaaawttttttttaattttttttattttattttaattaggctcaacgagaacctttgacaagagcacgaagtgaagaaatggggaggatcgtaccaggactgcct

SEQ ID NO: 548269 - DNA, 201 bp, Homo sapiens
aatatgaagggcagccaaggcaaggttttttgattctttggtacaagtagcttaagtttttatatgacaaaatttaattgaaaaatcagatttaaaaaaawattttttttaattttttttattttattttaattaggctcaacgagaacctttgacaagagcacgaagtgaagaaatggggaggatcgtaccaggactgcc

SEQ ID NO: 548270 - DNA, 201 bp, Homo sapiens
atgttgcgtccttttaaatgtattcttgttttatggctcagcatatggtctcttggtgaacgtaccatgtgcacttgcaaagaaaatgtggttgttgaatrtactgttctctatatgtcatttaggtcagaatggctgataatgttcagatcttctttatctttactgactgtgggatgggggttcaagttgtaacaatta

SEQ ID NO: 548271 - DNA, 201 bp, Homo sapiens
ggcgatccatttgctacaaacaatgccaatgaaagattgcattatcacagtgaattagaatagcccttttgggattttttgtattataatttgacccataktattttcataaatagcttggcttacatatgataggtatgtgatgtcagtattttggttttaaaacagtgctttagtttcatttccttagaatttgacacg

SEQ ID NO: 548272 - DNA, 201 bp, Homo sapiens
gaattcctcttcatctgctagagacgttttcctctctcagaaaaggtttaccttgtctacagccataccacctaacgcgcccgatctcgggagcgaagcasggtcaggcctggttagtacttggatcagagaaaaggttgaacttaaacataattataggtaacagtaaaataaattctctacttaaaatattgccataca

SEQ ID NO: 548273 - DNA, 201 bp, Homo sapiens
aaacaaattgttgccttcatattattttgttgctcctagcagcatgtttatattcattcttatattgatggttcccagtcttgactggtgttagaattcatttgggaagctttttaaaaatacctatgtgggcaaggcgaggttggctcatgcctgtaatcccagcactttgggagacctaggcaggaggatcacttgagc

SEQ ID NO: 548274 - DNA, 201 bp, Homo sapiens
tgcccagcctatttcttttttaaacttttattttaggtttggtggtacatgtgaaggtttgttacataggtaaacgttttcacgggggtttgttgtacatrcatattttatcaccgaggtattaagctcagtacccaatagttatcttttctgctcctctccctcctcttacactcccccctcaagtagaccccagtgtct

SEQ ID NO: 548275 - DNA, 201 bp, Homo sapiens
cctgtcacaacacactgtaggtagcactcaccacactctgtgctgtcattgttcacttgtctatgcttctcactagatcacaagctttgggaaggcaggawctcttttgtgtagattgctgttgaatcactggtgcctgcagagtgactaactaaataggtgctctctgacattattgaagaatcgaattaacgagtatct

SEQ ID NO: 548276 - DNA, 201 bp, Homo sapiens
aacgctgctgtaaactgatcagttttaaactgcagtattactttttttgttaatagcactactgctcttcatattttgcagggtacagtgtgtgtgcctctgtgtgtgtgtgtgtgtgtgtgtgtgtgtgtgtgtgtgtgtgtaagcaagagaaaatactgtttcgatcaaccagttaccaaagcatgtttctaccatttt

SEQ ID NO: 548277 - DNA, 201 bp, Homo sapiens
atttatatagcagatgaagaatcaggtacacttccaatttccagtttctttctttcttcttcttctttttttttttttgagatggagtcttgctctgttgycagcctggagtgcagtgtacgatctcagctcactgcaacctctgcctcctgggttcacgccattctcctgcctcagcctcccgagtagcatgtcaccaag

SEQ ID NO: 548278 - DNA, 201 bp, Homo sapiens
tgcatatcttaaactcctgaaatagatattctaaacaatttaaaattaaccctgttagcaaaggatatggtttaggaatttttttttttaaactgctcacktgttttattgtgaatgaggaaaattagtataattatttgtatttgtttcaggaaagaagcacttgtaaggaaatatagcatccattgtgaaagtggaaaa

SEQ ID NO: 548279 - DNA, 201 bp, Homo sapiens
gtggagggagaaagcatatagccatgaaatacctcaaggcaggatactaattttacagaactgaaactcctttaatttccacgattaacgccaataaaagrcaatcttgacttattttttcaactagatatgaagaagctgaagtccggaaaaaacttgaggaaaaagacaggcaggaggaagcacagcggctacaacaaa

SEQ ID NO: 548280 - DNA, 201 bp, Homo sapiens
agtttgtttcttcttgtagctgagacctcagatgtgcaccactacgcccagctaatttttaaattttttgtaaaattttttgtctttactttgttgcccastttgttggctacctaccatttctccctatctctgccctttaggcaacaacaatactcaacataaatatctgttcttgaactcctgggctcaagcagtcct

SEQ ID NO: 548281 - DNA, 201 bp, Homo sapiens
aagtcttgctgctactttaaaaaggtcagtgtgcttaattgatctacattctgtcacaaacttcttattttatcacaaactgataacaaacagttccccartcagcactggtcattggaccatacttggagttacattgctgtagtgtgagactttcatactttttttaaaattgtcacctgtattaagaaatacatttta

SEQ ID NO: 548282 - DNA, 201 bp, Homo sapiens
ggtttctctgattgaccaggttaggggctttcctgtgtcctgtcacaacacactgtaggtagcactcaccacactctgtgctgtcattgttcacttgtctrtgcttctcactagatcacaagctttgggaaggcaggaactcttttgtgtagattgctgttgaatcactggtgcctgcagagtgactaactaaataggtgc

SEQ ID NO: 548283 - DNA, 201 bp, Homo sapiens
actgataacaaacagttccccaatcagcactggtcattggaccatacttggagttacattgctgtagtgtgagactttcatactttttttaaaattgtcayctgtattaagaaatacattttacattttcatccagtgttatatcatatacacatgtacataactgaaacaattttacgaagcagtacctaaccttactat

SEQ ID NO: 548284 - DNA, 201 bp, Homo sapiens
ttgctttcctttcaatattgccaaagaccttaggagtggctggtgtgaatccctgcttaaaatcaggaccagtttgaatgactgcaaacctcatttttcastttttaccttttagtcttcactttgtggttccagtcatcaaatccctactctttgtcttagaaaggagcagaaggatgtcagagaaagaacattttctct

SEQ ID NO: 548285 - DNA, 201 bp, Homo sapiens
tttgaatttagaacttttccagaattttagaaccatagatatttctttcttccagttagcatttttctaatgtcttaatttttgaaaacatactattttcmtgagacacatatattaatgttctttattttatgttggtaacagagtcaataccaggtgtagctgtaaactcaacagaaagttttgatttttaagtctttg

SEQ ID NO: 548286 - DNA, 201 bp, Homo sapiens
taatgaccaagcaaaactctaccaccagatgctgactgcttgttttgcagtgttcaggaaacaccattttcctggctcttaacgcttttgtattggtatgraaaagggctggcagctatagaacaggagatccatagcattttgaacagaagtatctggaatctcactgactcgtgtgttatcaaagctatatcaggcctg

SEQ ID NO: 548287 - DNA, 201 bp, Homo sapiens
cagataacaacagattttactgcagtcattgcagagctcgacgggattctctaaaaaagatagaaatctggaagttaccacctgtgcttttagtgcatctraaacggtaaaggggaaagtttgtcctcctgttcagtgaaattaaatgagggaattttaagttctgtgtaatttatacttgttgtactgcctgccatgggc

SEQ ID NO: 548288 - DNA, 201 bp, Homo sapiens
aaaaataatttataaccctgtgggtgttctgtctttaatattgtattatcaaatataggacagtaaaaccatagattttatatacacacgtgctatataayaacacccagagtcattctttcaagactagtattctcacatattgagaatattcattctaaatattaaagtaaaaatgccgggagtcaggcatgattgcaa

SEQ ID NO: 548289 - DNA, 201 bp, Homo sapiens
attctagctgagaagatcaaggacgtcttcatggaggagacagtattttatctgggctttaagagtaggattggaggatagaagaaacaagtagaaaattstatgaccaaaggcatagggcatgctctggggccagtgaacagttttggcatatgtgggcgctagtctctgttggagagaggaagttatgatagtagataa

SEQ ID NO: 548290 - DNA, 201 bp, Homo sapiens
taccatgttggccaggctggtcttgaattcctgacttcaggtgatccgcctgccttggcctcccaaagtgctgcgatcacaggcgtgagctaccacacccygccctcatcttcattcttaagggattttaactagatacaggattctaggttggcaggttttaattttcccttttgtcacttcagagctgctattccactg

SEQ ID NO: 548291 - DNA, 201 bp, Homo sapiens
gtgatcacagctcactgcagcctcgacttcctgggttcaagcaatcctcccacctcagcctcctgagtagctgggattataggcacatgccaccacgcccrgctaatttttgtattttttttgtagagatggggttttgccatgttgcccaggctggtctcgaactcctggcctcaagtgatctatccggctcggcctccc

SEQ ID NO: 548292 - DNA, 201 bp, Homo sapiens
tcccacctcagcctcctgagtagctgggattataggcacatgccaccacgcccggctaatttttgtattttttttgtagagatggggttttgccatgttgyccaggctggtctcgaactcctggcctcaagtgatctatccggctcggcctcccaaagtgctggtattacaggcgtgagtcactgcgcctggcaacttctt

SEQ ID NO: 548293 - DNA, 201 bp, Homo sapiens
acgctgctgtaaactgatcagttttaaactgcagtattactttttttgttaatagcactactgctcttcatattttgcagggtacagtgtgtgtgcctctgtgtgtgtgtgtgtgtgtgtgtgtgtgtgtgtgtgtgtgtgtaagcaagagaaaatactgtttcgatcaaccagttaccaaagcatgtttctaccattttg

SEQ ID NO: 548294 - DNA, 201 bp, Homo sapiens
aattttttgtctttttagtagagacggggtttcaccgtgttagccaggatggtcttgatctcctgacctcgtgatccgcccgccttggcctcccaaagtgytgggattacaggcgtgagccactgtgcacggctgcattttctctttgttaactcattttcaacacttttgggtttcacttttggagcactgctgtttgac

SEQ ID NO: 548295 - DNA, 201 bp, Homo sapiens
ttcttgaagcataaggttttttgttttgttttgttttgttttgttttgttttaaaagacagagtcttgctctgtcgcccagactccgctcactgcaatctycacctcctgggttcaagcgatttttctgcctcagcctcctgaatagctgggattacaggtgtgcgccaccacgtccggctaatttttgtatttttagtag

SEQ ID NO: 548296 - DNA, 201 bp, Homo sapiens
agtgatctgtccactttggcctcccaaagtgctgggattacaggtgtgagccaccatgcccagccccaatgttccaagtcttttttttttaaatcaatatgtttttttaaatgtgtattttttgttacttgcttgtttaacccataacttcctaacttttacatctctctggatactctcttcatatttatgtatgttgca

SEQ ID NO: 548297 - DNA, 201 bp, Homo sapiens
tccaagtcttttttttttaaatcaatatgtttttttaaatgtgtattttttgttacttgcttgtttaacccataacttcctaacttttacatctctctggrtactctcttcatatttatgtatgttgcattgctttactcacgtttgcgttgttatgctcatattatttctttccttccttaaaactttaagtacatttca

SEQ ID NO: 548298 - DNA, 201 bp, Homo sapiens
ggcaagagaattgcttgaacccgggaggcggaggtttcggtgagccgagattgtgcgattgcactgcagcttgggcaataagagcgaaactctgtctcaataataataataataataataataataataataattttttttttccactttgggaggccaaggtgggcggatcacctgaggtcaggagttcgataccagcct

SEQ ID NO: 548299 - DNA, 201 bp, Homo sapiens
tgaggcaggagaatcacttgaatccgggaggcagaggttgcagtgagccaagatagcccattgcactccagcctgggcaagaagagctagaccccatctcaaaaaaaaaaaaaaggagtgcacaacctagatccctcacatgtgcagttcacaatagggttcgtgctcctatgggaatctaatgccaccatgatctgacag

SEQ ID NO: 548300 - DNA, 201 bp, Homo sapiens
agagataaataattgacaggaaatctcactaatattaggggaatgtctgatagtgtgtaacagacatgcccaaccataaacaattttttgtgtttaaataggtttaagctgggcttacaggctggctttttggtgagttcatgtgtaaaaatgaataaaacaagttatagcatttttggttttactttgtattttgtattt

SEQ ID NO: 548301 - DNA, 201 bp, Homo sapiens
accagtaagcaaggtcctgctggagatttgagaatccattatccctggttattgcctaagcagatggaatatgatgaaacatctgtttttgtaaaattctrtctgaagttactctgtttttcttttctcctctcacatctattgatgggttcatcattcacttttgttccatttattttattttaacacactgattttcat

SEQ ID NO: 548302 - DNA, 201 bp, Homo sapiens
tttttttctaaaaattttaagtaataatgaaatgtagctcaaattatatgcagcatgatctcatgtagatagaaaaagggaactaaagatacagtgttatwatttacaaatgtgtataatgtgtgaactcgtacacattcttggatttgccatggattagtacaagtttatagcaacatacagattcataatttttttctg

SEQ ID NO: 548303 - DNA, 201 bp, Homo sapiens
tcacgggggtttgttgtacatacatattttatcaccgaggtattaagctcagtacccaatagttatcttttctgctcctctccctcctcttacactccccsctcaagtagaccccagtgtctgttgtttccttctttgtgttcataagttcttaccgtttagctcccatattcttaacttttaatacattatagtatatat

SEQ ID NO: 548304 - DNA, 201 bp, Homo sapiens
gtagtttgttcattctcattgccatatgatgttctgttgtgtgaatatagcgcaatttacttaaatattttatttatcttcagacataccttttacttacyggatatgatttcgttttttcatgtatttagggctatacaatttcctattaaatttatttaagtaaaaaattatttttaattaaattaattaaatttaata

SEQ ID NO: 548305 - DNA, 201 bp, Homo sapiens
agaaataataatgttcgtcttacaggattgttgtgaagactcaatgagttcaatgagaataaagcatttagaacagtatctggcacatggtaaatgctatmtgtgtttgttgaataaacatcctggtatatggtggactattaattatataggtataagagaactgaaatatgaataatactacccaggtgattccccagt

SEQ ID NO: 548306 - DNA, 201 bp, Homo sapiens
aagtgagtgagttttttttggtatttttggctagaattattttttgccacactcagtgagatcagaactcctttatgagaactacaggtgtttctaaatcyggcaagtgtttgtattcacttttattctttcaatttaaatgttttctttgagatattaatatagagcttaaatcattttatttccaggctgataatcgga

SEQ ID NO: 548307 - DNA, 201 bp, Homo sapiens
taaagtgagtgagttttttttggtatttttggctagaattattttttgccacactcagtgagatcagaactcctttatgagaactacaggtgtttctaaayctggcaagtgtttgtattcacttttattctttcaatttaaatgttttctttgagatattaatatagagcttaaatcattttatttccaggctgataatcg

SEQ ID NO: 548308 - DNA, 201 bp, Homo sapiens
gtttaacattttctgctttctttatagttttacctcatttatatctttaagcaatatattgttcaattcaatttgatttttaaactttatatagagtatcrtattacacatattcttggtttttcattcaacattgcgggggatgggcagaagatgatgaggtgagaaggcgggcagggtatgttttctggttaaactatt

SEQ ID NO: 548309 - DNA, 201 bp, Homo sapiens
tgctttctttatagttttacctcatttatatctttaagcaatatattgttcaattcaatttgatttttaaactttatatagagtatcgtattacacatatycttggtttttcattcaacattgcgggggatgggcagaagatgatgaggtgagaaggcgggcagggtatgttttctggttaaactatttattcttggagaa

SEQ ID NO: 548310 - DNA, 201 bp, Homo sapiens
aaaggatatggtttaggaatttttttttttaaactgctcacttgttttattgtgaatgaggaaaattagtataattatttgtatttgtttcaggaaagaascacttgtaaggaaatatagcatccattgtgaaagtggaaaagtaaagataattcatcatgcctgctgtggcttcagttcctaaagaactctacctcagtt

SEQ ID NO: 548311 - DNA, 201 bp, Homo sapiens
tcctgagtagctgggattataggcacatgccaccacgcccggctaatttttgtattttttttgtagagatggggttttgccatgttgcccaggctggtctygaactcctggcctcaagtgatctatccggctcggcctcccaaagtgctggtattacaggcgtgagtcactgcgcctggcaacttcttttattttctagta

SEQ ID NO: 548312 - DNA, 201 bp, Homo sapiens
aaaaaacagccagccacggtggctcacacctataatcccagcactttggaaggctgaggcaggtgggtcacctgaggttaggagtttgagacaagcctggycacatggtgaaccctgtctctactaaaaatacacaaattagccaggcatggtggtgtgtgcctctagtcccagctactcaggaggctgagtcaggagaat

SEQ ID NO: 548313 - DNA, 201 bp, Homo sapiens
actaaaaaaccagcagtcaaattgcctgaagagcatagaataaaatctgaaagtacaaaccatgagcaacaatctcctcagagtggaaaagttattcctgrtcgttccaccaagccagtagttttttctccaactctcatgttaacagatgaagaaaaggctcgtattcatgcagaaactgctcttctaatggaaaaaaac

SEQ ID NO: 548314 - DNA, 201 bp, Homo sapiens
gatggagtctcactctgttacctaggctggagtgcagtcacgtgatctcggctcactgcatcctccgccttcccagttcaagtgattctcctgcctcagcytcccaagtagctgggattacagacatgcaccaccacgcccagctaattttgtatatttagtagagatgggatttcaccatgttggtcaggctggtctcga

SEQ ID NO: 548315 - DNA, 201 bp, Homo sapiens
tactttgtttggtaccaagccttttatctgtttctgaggtctcattctttttcctttgctttctccttctttttctcccccagttcccccacccccccccytttttttttttttttttgagacagagtctcattcttgtcgcccaggctggaatgcaatggcgtgatctcggctcactgcaacctctgcctcccaggttca

SEQ ID NO: 548316 - DNA, 201 bp, Homo sapiens
ctgaggcaggagaattgcttgaacctgagaggcagaggttgcagtgtgccaagatggcaccattgcaatccagcctggccacggagcaagactccgtctcaaaaaaaaaaaaaaaatgtaaactacataagcaatactttgtattagttcattttgctttaattatgtggtggaggacactgaatgggatagccagaattt

SEQ ID NO: 548317 - DNA, 201 bp, Homo sapiens
agtcaatttataagattaataactgccttatcaatttacatgtaaaaaaccagctgacaaagaacaccttattttcactagaggttataaaacaaaataakaactattaacctgattgaattacagtgaaattgaattacacaatgccaaaaaaatgtgaaagtacactaagaaatttgtgggtttaaataaaactctgct

SEQ ID NO: 548318 - DNA, 201 bp, Homo sapiens
tgtaggacagtatacataatcaaaatatggctaggagcaagatatttaccgtttgacaactcgagctgccatcagtctttgctcagaatccaaatatgcasatggttcatcaattaaatagacatcagcaggtttgcccaagcaaagggctaaagctactcgctgtagttcaccaccagataatgtctgcacctaattgga

SEQ ID NO: 548319 - DNA, 201 bp, Homo sapiens; identical to SEQ ID NO: 379526

SEQ ID NO: 548320 - DNA, 201 bp, Homo sapiens
acagttgatttgggactaattttctgtggcttataactgacatttagaactggtacttctcctgcaaaataatgaaatacataagacactaaaaactgccsagatctttaaagtttactgtgtaaaacagagtaaaaagactcaacagttacaaatgtacctccttcatcaggtttaagtcttccagcaagcattctgata

SEQ ID NO: 548321 - DNA, 201 bp, Homo sapiens; identical to SEQ ID NO: 379500

SEQ ID NO: 548322 - DNA, 201 bp, Homo sapiens
tataaaacaaaataagaactattaacctgattgaattacagtgaaattgaattacacaatgccaaaaaaatgtgaaagtacactaagaaatttgtgggttkaaataaaactctgcttctagccctataacatatgattcaaatttttccacaaaacagttaaaactaatttactagataaacaggaagatttttacttatc

SEQ ID NO: 548323 - DNA, 201 bp, Homo sapiens
tacatcctaaaaaagaaaacagaagccacaaaaatcagcaacacgattctactataggtaaaagtagactttcactcatggtattacttagctgtgcttamaacagtgcctgtacaacctgttctgcacataccatctgtttctggatattcctgggtccactgctcaaaggaaagataactacctctgccccatccctaa

SEQ ID NO: 548324 - DNA, 201 bp, Homo sapiens
tcatgggtcaactgtaacttgatattccctttagtgttgggtataatcctatacatttaaagagtgcttaatacttattgaaaaaccttgtagaacttgargttttttgtttggttttgttaaaacatattagatgaggggaggctaagaggcaagtcaacaaaaaagtcactgaatatatggctttatattctttccaaa

SEQ ID NO: 548325 - DNA, 201 bp, Homo sapiens
aaatagtgataaattgtaatgcatttaagaaaaatgaacatggattctttgtagaactgttaattaactgtgtgaacacttttaattcaatttctgtatcrgtttcaataattggggcaaggggattccctacttgtttttcaatagaaaacctaggcacagtaaagcttggagaggaagattatagttaacaggctcctg

SEQ ID NO: 548326 - DNA, 201 bp, Homo sapiens
aaaaaaatataaattttgacaaatgtaaaaattgtaaaataatctataatctagtaaggttgggaaaatcaaattttacatatatactttaatcagaagayttatataaggaaagaaaaaaatgtcatttacaatagcgacaaaaagaaaatatctaggaatatactcaacaagatatatacacaagaaaactttaaaaca

SEQ ID NO: 548327 - DNA, 201 bp, Homo sapiens
tcgttaacttgtctgccataactgggcgaaagaatatccagctcttctatgaaagaaaaatcaacaaatttaatgccattagttaagggaactaatttgcrtacatgaaagacaggaaaacataaatgatcattatatggagatgaaatgattatctgcaaaaaaaaaatataaattttgacaaatgtaaaaattgtaaaa

SEQ ID NO: 548328 - DNA, 201 bp, Homo sapiens
tttttcattatccaaggatatgatctccaaaatctttttatggcattaaagactgaatgtatgccttgacccatcaaatttcagaatggagatatactttytatgactctttatcatcaatctatcactacatagagatcttaactttatacctgtaaataagaccagcccacttgtgaaatgtcttaaaaattttctcta

SEQ ID NO: 548329 - DNA, 201 bp, Homo sapiens
gcacagactggggattaatgtctttccattatgacttttatctatcttatatgaataagatacttgaattctcggagtcaattcacattaaaaaacaaaayaaaacacataggcttattcaaataacattcaactataagatgactgtccaaggaacaagaacagcaaaaacaggaaggtcatttaagaatggtaatatgg

SEQ ID NO: 548330 - DNA, 201 bp, Homo sapiens
cattatatggagatgaaatgattatctgcaaaaaaaaaatataaattttgacaaatgtaaaaattgtaaaataatctataatctagtaaggttgggaaaaycaaattttacatatatactttaatcagaagatttatataaggaaagaaaaaaatgtcatttacaatagcgacaaaaagaaaatatctaggaatatactca

SEQ ID NO: 548331 - DNA, 201 bp, Homo sapiens; identical to SEQ ID NO: 379545

SEQ ID NO: 548332 - DNA, 201 bp, Homo sapiens
cttattaggattaaggtatgacaatcttaagatgagtaggcatacagaaatgataactcatggtgactgaaccataagtctgtctaagaaaatgacaatayaaagtgtccttaatgcttccaaagaaattcttcttttctacccaatatgcttttcaaaactgagaaaactcttcaattttatgtgagaacttaaccattt

SEQ ID NO: 548333 - DNA, 201 bp, Homo sapiens
aatttctcagcattaattccataaataattttgaaaataagaatattttaaaaatatacatatcatccccccaaaatctcataaaactgactcatgatatyaatttttacaaggtgataatacatacatcgtactttccaaggtttggcttttgttttcctgctaaaatttttaaagcagttgactttccaataccattag

SEQ ID NO: 548334 - DNA, 201 bp, Homo sapiens
ttcaccaccagataatgtctgcacctaattggaggagtttagcaaaccatgtaaaggcatccaaaattcaaaataataaaaaaataaaaaaaattatgttmaagtacctcttgatcaatgatgttttcaatttgcagaggcttcattacatcggtcacaaattgtgggtgagtataagcatctcttatcttttcatgtagt

SEQ ID NO: 548335 - DNA, 201 bp, Homo sapiens
gaacctctgttctaggtaaagaaaggtaaatttaggtggcagctataaacaaccaagataaaaaatatgtacatcacattgacagtcccagtgtttaatcyttagaaatctgtaaaaatctccaaacaaaacaacacagtaatatgccagatctctacttacctatctggatttattagagatcgtatagtaatagcagcc

SEQ ID NO: 548336 - DNA, 201 bp, Homo sapiens
tttctttataaattactcagtctcaattagccaggcgtggtggcgggcacctgtaatttcagctactcgggaggctgaggcagcagaatcgcttgaacccrggaggcagaggttgcagtgagccgagatcaggccattgcactccagcctgggcaacaagagcgaaactctgtctcaaaataaataaataaataaaaagtc

SEQ ID NO: 548337 - DNA, 201 bp, Homo sapiens
tgaggcaggagaatcacttgaacccaggaggcggaggttgcagtgagctgagattgcgccactgcactccagcctgggtgacagagtgagactccatctcaaaaaataaataaataaataaataataactataaggtaataagttagtgctttaaaaagccattgaattggtgacaatttgttaaagcagacattggaaac

SEQ ID NO: 548338 - DNA, 201 bp, Homo sapiens
ttcacttgggactggccagagtgtgggaaggggtaggtgtgtcgggggtggttagccaggatcccaggatacactggtcatcaatgctgttcagtgtgaarcgggtgttggagaatcgggcaaagccatcccggtagagccaggcccgcagcgggatgtactaaggcagaggtgggaagagagagagagaagggaaaggga

SEQ ID NO: 548339 - DNA, 201 bp, Homo sapiens
agagaaagcaaagcatgacacggatcagtaactaggaaagagtggagtagaggggagagacgaggtttccaaacctgtttggtcttgtttcctttttcacmgatgtggaaacatagccctaatgaagggagtagagacaagggttcctactctgtcaactgttccatgataatagtaatgccaatggtaataataataata

SEQ ID NO: 548340 - DNA, 201 bp, Homo sapiens
ccaatcaatttacaatcccgccagcaacgtatgtattctcccagcctcgccaggacactgtgttatcaaatttttggtctctgccaatcggatgggtgaamatagcattgtacttgaatgaatgagtgagccaatgactaggcactgaagaaagaggcacataaaaggatgcaaatgttctccaaaggggctaaaactgtc

SEQ ID NO: 548341 - DNA, 201 bp, Homo sapiens
ccagcctggccaacatggtgaaaccccatttctaccaaaaacacaaaaaattagccaggagtggtggcatgcacctgtagtcccagctactcaggaggctsaggtgggagaatcacttgagcaggggggtggaggttgtggtgagccaagatcatgccactgcactccagcgtgtgtgacagagtgagaccccatctcaaa

SEQ ID NO: 548342 - DNA, 201 bp, Homo sapiens
tcaagtgatcctcccacctcacttgagtgggtagctgggagtacaggcatgtgacaccacatctggctaatttatttttatttttatttttttcatagagrcaggatctcactatgttgcccaggctggtcttgaactcctggcctcaagtgatccttctgcctcagcctccaaagtgctggaattacaggtgtgagccac

SEQ ID NO: 548343 - DNA, 201 bp, Homo sapiens
aaagagctgtgatcccaccactgtactcgatcgggggcaacagagaaggaaactgtcaatcaatcaatcactaagatagactggtgaatcacgaacatccwttcatactttttcttaaacataaacattcttccttaaaggcaaaaatgggaacatgaatataccaggttctccatcttacattttgtttttcacttaatc

SEQ ID NO: 548344 - DNA, 201 bp, Homo sapiens
tatcctttcaatgttttattattttattattagagtaaggcctatccattgtagaaacaattcataatagacatgtataaagtttaaaataaatgtttccygacctggttctaattctctgcagttttcagagttaatagattagtgaggctgggcacggtggctcacgcctgtaatcccagcaccttggaagatcaaggt

SEQ ID NO: 548345 - DNA, 201 bp, Homo sapiens
gaaacatagccctaatgaagggagtagagacaagggttcctactctgtcaactgttccatgataatagtaatgccaatggtaataataataataatgtacygtgttccagtctttctactaggtatttgaaacatgtcctctcatttattcttactacagacctacagagggttttttttcctccctatttcatagatgat

SEQ ID NO: 548346 - DNA, 201 bp, Homo sapiens
gtgccgccctgtgggaatgtgagtccagaattgcgagatcatctgatttttccagaaaagccaaaaatagactttttttttttttaaagagtcagaatccrgttctgtcactcaggctagagagcagtggtgcaatcttagctccctgcagccttgaacccctggcctcaagtcatcctcctgcctcagcctcctgagtag

SEQ ID NO: 548347 - DNA, 201 bp, Homo sapiens
aaacaatctaaccactatcccaagctgcctcctagactacctggtacctcccatgaccccatcccttgtgcccactccccacctggccctacataccgagrtgtgtgttggtcacaaagtttcccattcccgacaggtcaggagccccctcctctctgctaacagggccatcattccacatgaggtcaaagcccccgactc

SEQ ID NO: 548348 - DNA, 201 bp, Homo sapiens
gttggaacacgcggtattctgacctctggccttctctaggcatattttcgtgagggtacacaaagtatatcctggcatgttctcttaaggctgacatgaaygttcctgctcaaataagttcatactcctatttcccctgggtcatttgaaagaaaccacaaagtcctaagtcaatatacaggagacctttctttccctttc

SEQ ID NO: 548349 - DNA, 201 bp, Homo sapiens
cctcatttccccttagccctctggagagttcccagcacaactcagagctgaggtcttggcgaccataaccttgaggagatggggtcaaaggttggaacacrcggtattctgacctctggccttctctaggcatattttcgtgagggtacacaaagtatatcctggcatgttctcttaaggctgacatgaacgttcctgctc

SEQ ID NO: 548350 - DNA, 201 bp, Homo sapiens
ggcccagagcctggcacatggtaagtgctcaataatggtttagcattactccttctactatcattttcattataattgttgaagtagaaaagggagagagrgattgaaaaggggagggagggagagaagttggttgcgctgtgattgttggattggatgggaccactcaccgctcttttccctttgacaatccatggccct

SEQ ID NO: 548351 - DNA, 201 bp, Homo sapiens
taggtgtgtcgggggtggttagccaggatcccaggatacactggtcatcaatgctgttcagtgtgaagcgggtgttggagaatcgggcaaagccatcccgrtagagccaggcccgcagcgggatgtactaaggcagaggtgggaagagagagagagaagggaaagggaatatatacaggcactctcacaccgcctagctct

SEQ ID NO: 548352 - DNA, 201 bp, Homo sapiens
gaggcaggagaatcacttgaacccaggaggcggaggttgcagtgagctgagattgcgccactgcactccagcctgggtgacagagtgagactccatctcaaaaaataaataaataaataaataataactataaggtaataagttagtgctttaaaaagccattgaattggtgacaatttgttaaagcagacattggaaact

SEQ ID NO: 548353 - DNA, 201 bp, Homo sapiens
aggcaggagaatcacttgaacccaggaggcggaggttgcagtgagctgagattgcgccactgcactccagcctgggtgacagagtgagactccatctcaaaaaataaataaataaataaataataactataaggtaataagttagtgctttaaaaagccattgaattggtgacaatttgttaaagcagacattggaaactg

SEQ ID NO: 548354 - DNA, 201 bp, Homo sapiens
ggcaggagaatcacttgaacccaggaggcggaggttgcagtgagctgagattgcgccactgcactccagcctgggtgacagagtgagactccatctcaaaaaataaataaataaataaataataactataaggtaataagttagtgctttaaaaagccattgaattggtgacaatttgttaaagcagacattggaaactga

SEQ ID NO: 548355 - DNA, 201 bp, Homo sapiens
ggctcacccgcctaggatcgcagagctgctaaggccagggccatggtaaggagctagtcttcaggctcgtttatcagtgttttctttctctttctttctttctttctttctttctttctttctttctttctttctttctttctttctttcttccttccttccttccttccttccttcctttctttctttttctttctttct

SEQ ID NO: 548356 - DNA, 201 bp, Homo sapiens
gctcacccgcctaggatcgcagagctgctaaggccagggccatggtaaggagctagtcttcaggctcgtttatcagtgttttctttctctttctttctttctttctttctttctttctttctttctttctttctttctttctttctttcttccttccttccttccttccttccttcctttctttctttttctttctttctt

SEQ ID NO: 548357 - DNA, 201 bp, Homo sapiens
cactgctctaaacacttcacaaatattcattcacggatcctcagtgcaacctgaagtgttaggttctgttattatacccattttacagatgagaaaatggrggcaggcacacagagaaactcacctagttcatgcagttagtaagtggcagagcaggatttgaactcaggcctcaggctccagagtccaagctctgtggtt

SEQ ID NO: 548358 - DNA, 201 bp, Homo sapiens
ggagagacgaggtttccaaacctgtttggtcttgtttcctttttcacagatgtggaaacatagccctaatgaagggagtagagacaagggttcctactctrtcaactgttccatgataatagtaatgccaatggtaataataataataatgtactgtgttccagtctttctactaggtatttgaaacatgtcctctcattt

SEQ ID NO: 548359 - DNA, 201 bp, Homo sapiens
ctcacccgcctaggatcgcagagctgctaaggccagggccatggtaaggagctagtcttcaggctcgtttatcagtgttttctttctctttctttctttctttctttctttctttctttctttctttctttctttctttctttctttcttccttccttccttccttccttccttcctttctttctttttctttctttcttt

SEQ ID NO: 548360 - DNA, 201 bp, Homo sapiens
tcacccgcctaggatcgcagagctgctaaggccagggccatggtaaggagctagtcttcaggctcgtttatcagtgttttctttctctttctttctttctttctttctttctttctttctttctttctttctttctttctttctttcttccttccttccttccttccttccttcctttctttctttttctttctttctttc

SEQ ID NO: 548361 - DNA, 201 bp, Homo sapiens
atggtaaggagctagtcttcaggctcgtttatcagtgttttctttctctttctttctttctttctttctttctttctttctttctttctttctttctttctttctttcttccttccttccttccttccttccttcctttctttctttttctttctttctttctctttctttctttctttcttccttccttcctttttcttt

SEQ ID NO: 548362 - DNA, 201 bp, Homo sapiens
ggtaaggagctagtcttcaggctcgtttatcagtgttttctttctctttctttctttctttctttctttctttctttctttctttctttctttctttcttyctttcttccttccttccttccttccttccttcctttctttctttttctttctttctttctctttctttctttctttcttccttccttcctttttctttct

SEQ ID NO: 548363 - DNA, 201 bp, Homo sapiens
aaggagctagtcttcaggctcgtttatcagtgttttctttctctttctttctttctttctttctttctttctttctttctttctttctttctttctttctttcttccttccttccttccttccttccttcctttctttctttttctttctttctttctctttctttctttctttcttccttccttcctttttctttctttc

SEQ ID NO: 548364 - DNA, 201 bp, Homo sapiens
tggttgcgctgtgattgttggattggatgggaccactcaccgctcttttccctttgacaatccatggcccttgtaattttggttctgcaatgaggaaaggraaaggatgtaactggttttgtatatctgccctgttttcccaggttaacttactgcagatattaaaatgcccaaaccgtcagactcaacaatgcctaggtt

SEQ ID NO: 548365 - DNA, 201 bp, Homo sapiens
tgaggcaggagaatcgcttgaacccgggagatggaagttgcagtgtgccgagactgtgccactgcactccagcctgggcaagagagcgagaccctgtctcwataaataaataaataaataaataaataaataaataaatacatgaataaccttactgttccagaaggcagagggactgaaatgggttggcatggctgcatt

SEQ ID NO: 548366 - DNA, 201 bp, Homo sapiens
taagctactattatgagttttctcttactggtagtggaacacatatctatatgtgccctcaataaggcacataaataaaaaatattttatggtaaatatakgtgtgtgtgtgtgtgtgtgtgtgtgtgcctttataaaataagtagatggggccttgatatggtttggatgtttgtcccctccaaatctcaagttaaaatg

SEQ ID NO: 548367 - DNA, 201 bp, Homo sapiens
acttcgtaagtgcctttccacaggaagatgggtaaataacttgcgatacacaatgaaacagaggtagcagttaaaatgcattcagagctacaggtgccaaygtggataaacaccaaacatatcattttgtgtgacaaaagcagggtgcagaatagtaataacagtacaacaacacttacataacttgtattcctagctact

SEQ ID NO: 548368 - DNA, 201 bp, Homo sapiens
acagtaaatgtaagtgtgcacaaggttatacaactaggaattggcagagctgggattcaaacctgggcagtctgggtgccgagtatgcaaactatgacctsctggctctcccacccacccacttacggcttgaggtcctggtcgatgaggatgtcatagccgtacagctcgaagcagtgcttgtcactgatgatcaccttc

SEQ ID NO: 548369 - DNA, 201 bp, Homo sapiens
ccatgcagagtgaagcagaagatcagagcacagctgacatgcaagtcatcaagtcatcacagggttgttgaaggaggcaggagagaccaaagttagacagygggccctggagtccaactagctctgcccctaactgatcatgtgatcttgagcaagtcacttagcctttttgagcttccgtttctccatctgtaaaatgga

SEQ ID NO: 548370 - DNA, 201 bp, Homo sapiens
ataaaaaggactatacaccataaccaagcggagtttattccagtaggcaaggctggttcaatattcaaaaattaatccatgagccaggcatggtgtctcaygcctgtaatcctaaccctttgggaggctgagacaggcagattacttgaggtcaggagttcaagaccagcctggccaacattgtgaaatcccatttctact

SEQ ID NO: 548371 - DNA, 201 bp, Homo sapiens
tggaattagatagtggttttgacacagcaggtatgtgggggaaaaaaaaagtggtgatgattacacaactttgtgaatatgctaaaagacacgaaattctmtatatatacattttttggacttatcaaaattaaaaagattttatatattttttcttccaacatgtatgtgttgaggttatctctgtgtcagagaccatgt

SEQ ID NO: 548372 - DNA, 201 bp, Homo sapiens
aaatgtaagtgtgcacaaggttatacaactaggaattggcagagctgggattcaaacctgggcagtctgggtgccgagtatgcaaactatgacctcctggstctcccacccacccacttacggcttgaggtcctggtcgatgaggatgtcatagccgtacagctcgaagcagtgcttgtcactgatgatcaccttctgcac

SEQ ID NO: 548373 - DNA, 201 bp, Homo sapiens
acggtggctcaagccagtaatcccagcacattgggaggtcaaggcaagagaatcacttgagcccaggagttcgagatcagcctggtcaacgtggttaaacytcatctctacaaaaaatacaaaaattagccaggcatggtggcatgggcctgtagtcccaactactcagggggccgaggtggcaggatcacttgagcccag

SEQ ID NO: 548374 - DNA, 201 bp, Homo sapiens
cttttcacaacatgcttttttcccaccaaacttttgttctggagatcgatccttttgatacataggggtcgagttattctaactgccatttcccattccaytgggtgaacacgccacagtatatccattttcctattaaaaggtgtttggggctgggtgtgctggctcacacctgtaatcccagtattttgggaggccaag

SEQ ID NO: 548375 - DNA, 201 bp, Homo sapiens
attttgtaatcgcttgtgtggtggccatgacaatgcaccttgcaggcctccaacagagtaactgactgagagtgccagcggcttccagttgaggtctagcwgtgtttgccagggcgtcttgctagggctgctcccagtcagtgactaagccccaggggatatgaagaccggccattcctgagagacaggggactcctgaca

SEQ ID NO: 548376 - DNA, 201 bp, Homo sapiens
gggggcagaaagccagctcttagctctgcgtggttccttgttggcccccgtggctgggggctctccccagcatatctgtctctttttccttatgaaccccmaactctccccagaggaaggctagctgaaggggctggaacagagaaggtgctaaccctggcagagggagagagggaagggaggggaagggggagactgact

SEQ ID NO: 548377 - DNA, 201 bp, Homo sapiens
ggtatttatgagaactctgggcttttatgagagctgagacgggcagccccatgtatgctatgaacttgagggaggaagaaacagttttatttttctccaaycactgtatttcaaagggctctgtggattctctctgtcctgctctctatccacaatccccagtcacctactactatagattgaggggtgggggtgatggct

SEQ ID NO: 548378 - DNA, 201 bp, Homo sapiens
ctagatgctcagtaagtatttactgaataatttggtatttatgagaactctgggcttttatgagagctgagacgggcagccccatgtatgctatgaacttragggaggaagaaacagttttatttttctccaatcactgtatttcaaagggctctgtggattctctctgtcctgctctctatccacaatccccagtcacct

SEQ ID NO: 548379 - DNA, 201 bp, Homo sapiens
tgtaaaagcagggtctccctatgtttcccaggctggtctcaaactcctgggctcacacagtcctcctgccttggcctcccaaagttctgggattacagacmtgagccatcatacccagccaaatttattttagagatggggttttagtatattgcttaagctggtctcaaactcctgggctcaattgatcctcccacctca

SEQ ID NO: 548380 - DNA, 201 bp, Homo sapiens
cccacatccagtcaatctgcaagtcctttcagctgccctgtgaaaatattcatatatgctgagtccatccccttctttccagcttctcgggtcccactctrtcccaggtcactgtcacctcttacctgagctgctgcagtggcccccataaaggaaagggtcagtgaggggtcgaagtatttgacttaaataaatcagatg

SEQ ID NO: 548381 - DNA, 201 bp, Homo sapiens
catttttaagtgggagaggaggaccactaacatttactgagaggtcactctgggccagccactgttctaactgctttacatgtattatttaactttagttaaaaaaaaaaaaaagtaggtggcaattaaactaaactcgatgacttgcatatgataaatgcttgttagaattacaaaataaaatgaacgtactggaagtgc

SEQ ID NO: 548382 - DNA, 201 bp, Homo sapiens
tgaggcagaagaatcccttgaacctgggaggtggaggttgcagtgagccgagattgcaccattgcactccagcctaggtgacagagcaagactctgtctcaaaaaaaaaaaaaaaaagaaaaagaacagctgacttcacatcagaaacaacataagcctgaagacaaaggaatatcatctttcaagtgcttaaagaaaaaa

SEQ ID NO: 548383 - DNA, 201 bp, Homo sapiens
agaccatgttggatgccagtgatacaggaggaaacagaataccttgccaggtggtgcgcacagtcttgtggggaagattaacaataaacaaggaaacaacyctataataaagaattgtgaagtgagccgccacgtgatccagtagaggccatgaggcggggtagttgagggacctacgctgggtggagtcaccctgtggaa

SEQ ID NO: 548384 - DNA, 201 bp, Homo sapiens
aggagctagtcttcaggctcgtttatcagtgttttctttctctttctttctttctttctttctttctttctttctttctttctttctttctttctttctttcttccttccttccttccttccttccttcctttctttctttttctttctttctttctctttctttctttctttcttccttccttcctttttctttctttct

SEQ ID NO: 548385 - DNA, 201 bp, Homo sapiens
ggagctagtcttcaggctcgtttatcagtgttttctttctctttctttctttctttctttctttctttctttctttctttctttctttctttctttctttcttccttccttccttccttccttccttcctttctttctttttctttctttctttctctttctttctttctttcttccttccttcctttttctttctttctt

SEQ ID NO: 548386 - DNA, 201 bp, Homo sapiens
gactcagtaaatggcactgagaatttactttccatagggttgaaaaatagatgcctaattaaatggattaaataaatataacaaatatttaagacatatayatgttatatttattatcttggggtgggaaaggacttcttagataaacaataataataaagcactattcataaaggaaaaagatgatcagtttaaatctga

SEQ ID NO: 548387 - DNA, 201 bp, Homo sapiens
gctagtcttcaggctcgtttatcagtgttttctttctctttctttctttctttctttctttctttctttctttctttctttctttctttctttctttcttccttccttccttccttccttccttcctttctttctttttctttctttctttctctttctttctttctttcttccttccttcctttttctttctttctttct

SEQ ID NO: 548388 - DNA, 201 bp, Homo sapiens
ctttctttctttcttccttccttccttccttccttccttcctttctttctttttctttctttctttctctttctttctttctttcttccttccttcctttttctttctttctttctttctttctttctttctttctttctttctttctctctctctctttctttctttcttttgtctttttttttgacagggtctcactct

SEQ ID NO: 548389 - DNA, 201 bp, Homo sapiens
aattgaacatttatttatggaacatttcctgtgtactaggtattctgttagacactactttgggtagctcactgaatctttaaatcaaccctgtcaggtamgtactaatgttatttccatttcacagattagaaactgaagcacagagagggagagtaacttgtccaaggtcacacagccagttagtggtgttgctgggat

SEQ ID NO: 548390 - DNA, 201 bp, Homo sapiens
tttctttctttcttccttccttccttccttccttccttcctttctttctttttctttctttctttctctttctttctttctttcttccttccttcctttttctttctttctttctttctttctttctttctttctttctttctttctctctctctctttctttctttcttttgtctttttttttgacagggtctcactctg

SEQ ID NO: 548391 - DNA, 201 bp, Homo sapiens
cctgtcccttctagacctccttcccatctttagaccccaaacttctcaacttgcctccaccctgaaatcaccataatcattcatgcatcctctcccttcaraccctgcaccctcaaaccatcttgctcctcaaatcttggtgctgaaactccaaccagcctgtgacctccagtcctcaggccttggatccctataccctga

SEQ ID NO: 548392 - DNA, 201 bp, Homo sapiens
ttctttctttcttccttccttccttccttccttccttcctttctttctttttctttctttctttctctttctttctttctttcttccttccttcctttttctttctttctttctttctttctttctttctttctttctttctttctctctctctctttctttctttcttttgtctttttttttgacagggtctcactctgt

SEQ ID NO: 548393 - DNA, 201 bp, Homo sapiens
atcatgcccggctaatttttgtatttttagtaaagatgggggtttcaccatgtaggccaggctggtctcgaactcctgacctcaggtgatccacctgcctyggactctcaaagtgctaggattataagcatgagccaccatgctcggccccactcagatttttgagccccaataggctgcctcctgataccaagcctttgc

SEQ ID NO: 548394 - DNA, 201 bp, Homo sapiens
tctttctttcttccttccttccttccttccttccttcctttctttctttttctttctttctttctctttctttctttctttcttccttccttcctttttctttctttctttctttctttctttctttctttctttctttctttctctctctctctttctttctttcttttgtctttttttttgacagggtctcactctgtc

SEQ ID NO: 548395 - DNA, 201 bp, Homo sapiens
ccttcctgggacctgggcccagccctacctccactcacgtggctgccagagggactgaccgtgctccaggcaggctgggcctccaggctgctgagctcttkcctgtagtgccctgacagtttcatgggaggagtcaagacattgagcactgctgtgcgcctcctggtacagcaggggctggtcctataggatttcagccat

SEQ ID NO: 548396 - DNA, 201 bp, Homo sapiens
attcccctaaaagctccaagatgggctggggctctggcctggtaggaagagggtccccacagggtggtgtagacggaatgatgctgcctgctcccttctgrgtcctgggctgctctgctgccactgatgaggaagatgaaggctcggcagacaccaggaaaacaatgcagaggagatgcccgagggctgccctgtgactgg

SEQ ID NO: 548397 - DNA, 201 bp, Homo sapiens
ctttctttcttccttccttccttccttccttccttcctttctttctttttctttctttctttctctttctttctttctttcttccttccttcctttttctytctttctttctttctttctttctttctttctttctttctttctctctctctctttctttctttcttttgtctttttttttgacagggtctcactctgtca

SEQ ID NO: 548398 - DNA, 201 bp, Homo sapiens
gttaaaaatattagggaaggagctggggagaaaggggatcgggaagaaatatcccgggctccttccttctttctttgaatgctacagtctgcggagatgaygcctgtgactgcagcagccatgtcacatccatgaggtgacaagtctgatgacaaaaagccagcacacaggatgcagagtcgatggagagaaggagcctgg

SEQ ID NO: 548399 - DNA, 201 bp, Homo sapiens
gggcatgcagggctgccaggtgtggttgtacaggttgtctactgcacaaagagcccctgctctgcctgccatgctgtgcaccatggttcagggttgtgtgkgcccagaagactgggtgccaaaaactctatggagcactggtggtggctcaggggcagccaaatgtgcacagcaattttagaaagcaactaataagtgtgc

SEQ ID NO: 548400 - DNA, 201 bp, Homo sapiens
ggagtcaagacattgagcactgctgtgcgcctcctggtacagcaggggctggtcctataggatttcagccatcctgctcctcccacccaccctgcaccatygtcaccgctcaggttcagagggcttcggtcattttcccaagaccacacagctgctgagtgggagaggcaggatttgaaccaggatttctactgtactgtg

SEQ ID NO: 548401 - DNA, 201 bp, Homo sapiens
gtcagttaggctggcagaggtcaggtcccatgcagttttggggttttgtctcacaatccatgggaagccatggaagggtgtctcctctctggctgccacgytggggtggagtgaagtgggcagagcagcggcaggcaccagtgagggggcgggcgtggttgtctaggaggaagaggatggtggccaggcccggggtggagg

SEQ ID NO: 548402 - DNA, 201 bp, Homo sapiens
gccatctcatctcactgcaacctccgcctcctgggttcaaacgattctcctgcctaagcctcccaagtaggtgggactacaggcaagcaccatcatgcccrgctagtttttgtatttttagtagaaacagggtctcaccatgttggccaggctggtctggaactcctgacctcaggcgatccacctgcctcagcctcccaa

SEQ ID NO: 548403 - DNA, 201 bp, Homo sapiens
gtagctcactgaatctttaaatcaaccctgtcaggtaagtactaatgttatttccatttcacagattagaaactgaagcacagagagggagagtaacttgyccaaggtcacacagccagttagtggtgttgctgggatgtgaacctacatggtctaggcccagagcctgagtgtttaaactctagactggtgctgcccagt

SEQ ID NO: 548404 - DNA, 201 bp, Homo sapiens
ggtggtggttgcacaacaatgtgaatgcacttagtgtgataaagccacacacttaaaagaagttacaatggtaaatttcatgttacagattttaccacaatttttttttttttttgagaatgagtcttgctctgttgtccaggctggagtgcagtggcatcatcttggctcactgcaacctccacctctcgggttcaagca

SEQ ID NO: 548405 - DNA, 201 bp, Homo sapiens
ggccaggctggtctcgaactcctgacctcaaatgatctgcccacctcagcctcccaaagtgctgggattacaggtgtgagccaccacgcccgacccacaatttttttttattatactttaagttctagggtacatgtgcacaacgtgcagttttgttacatatgtatacatgtgccatgttggtgtgctgcacccattaac

SEQ ID NO: 548406 - DNA, 201 bp, Homo sapiens
ccaccatgcctgagtaatttttgtatttttagtaaagacagggtttcaccatgttggccaggctggtctcgaactcctgacctcatgatccacctgcctcracctccaaaagtgctgggattacaggcgtgagccactgcacccggccagctcattgaagttttaaaagtactgaggggttgactgggaaggacatgaagg

SEQ ID NO: 548407 - DNA, 201 bp, Homo sapiens
tcacaacaaacaaagtgacttaaaacaacacaaatgtagtatcttagagttcttgaggtcagagatgtgaaatgggtctcactgggctaaaatgaaggtgwcggcagggttgagtttctttcgtaaactctaggataatctgtttccttgccttttccacttgcatcccttggctgtgggcccccttcgatctgcaaaccc

SEQ ID NO: 548408 - DNA, 201 bp, Homo sapiens
gacctccagatctggactcttcccagctgatgcccccaatgtcacagagacaagccagtcccactgtgtcctgtaagagtccctgactcaggagccccgcrcctaatgcaatgctgtcttaagcagctaagttttgggatttgttacacagccatagcaactggaacaatggccaagcagttgggccttgtgttgtaaatg

SEQ ID NO: 548409 - DNA, 201 bp, Homo sapiens
ttttttttttttttggagagggagttttgctcttgtcgcccaggctggagtgcaatggcatgatctcagctcactgcaacctctgcctcccaggttcaagygattctcctgcctcagcctcccgaatagctgggattacaggtgcctgccaccacgcccagccaatttctttgtatttttagtagagatggggtttcacca

SEQ ID NO: 548410 - DNA, 201 bp, Homo sapiens
attggctgtctcctggtgcaaagatgcctggggatgggctggaggtatccaaggggcccaattcaggtagtaagctgcagctgctaagccagcaaagctgrtgccaggctggaggtggggaggcgaatgctgtgaggtgctgtgctgggatctgggagtgggggggaggcctgggtggcacctgctaaggctgatttcctc

SEQ ID NO: 548411 - DNA, 201 bp, Homo sapiens
gcagccagtattcagggcagtgctgccaccaagtaggtgctttataatatttgttggataaacgcatgaataagttggtttttaaaggaggagaatttttytgaaccaagaagggagtggaatggacatgccgggcagagggaactgtacaggcaatggctaggaggtgggagactgcagaacccatctctttccatgcat

SEQ ID NO: 548412 - DNA, 201 bp, Homo sapiens
gccagaaatgactagaagcacagaagcgcccactctccacccgagacagggtgcctcgcaatttgggaaagaggacacacacacacacacacacacacacrcacacacacacacgcacagacacaccgagccaagatgcctcctctaaattacagctgtagctgccgttgtgtctgctgctaacaaaggctgtgggctggg

SEQ ID NO: 548413 - DNA, 201 bp, Homo sapiens
aaatgactagaagcacagaagcgcccactctccacccgagacagggtgcctcgcaatttgggaaagaggacacacacacacacacacacacacacacacasacacacacgcacagacacaccgagccaagatgcctcctctaaattacagctgtagctgccgttgtgtctgctgctaacaaaggctgtgggctgggaatgg

SEQ ID NO: 548414 - DNA, 201 bp, Homo sapiens
cgcttgaacccaggaggcagaggttgcagtgagctgagatggcacctttgcactccagcctggccgacaagggcaaaactctgtctcaaaaaaaaaaaaaagagagagaagaatgaaatcctatcatttgcagtaacatggatggaactggaggacattatgtttagtgaaataagccaggaacagaaagttgaacaccac

SEQ ID NO: 548415 - DNA, 201 bp, Homo sapiens
cttgataaaatgcaagtatattaagaaataagtatactgtgatgaattaatctatatatatgaacaaacctggtataaaatgaatgtaatctatgaacctktagagcttagactgtatttcacacaaataattgtcatgttttgttgctattgtgaattataaaaatgcagcatttaaaatttttaaggcaaaatttaata

SEQ ID NO: 548416 - DNA, 201 bp, Homo sapiens
caaacacactttaaagctaatccacccaaagctggagtaccagttgcttttggctaagaaagtgcagttaattgatgctttaaaagtaagtacatgtgtcrtcgtggactggtgattattatttgaagtcataggatttctaaaattatcaatactttaacattacattggattgaattttgaatattaaggtgcttctgt

SEQ ID NO: 548417 - DNA, 201 bp, Homo sapiens
gaaatgaacagttaggaaatgaacagtttgtaaaaaatttttgtaatgttttccaagtatattgcattaaatatactctttaaagttgtaattaatagttycctgataaaccactcagaaagtgagaatgtgcgtgtttctattggataagtaaaacattcttctgcaagtcaggtgatttccagtgttttgtgttcagta

SEQ ID NO: 548418 - DNA, 201 bp, Homo sapiens
tttaaatgatttgaaattgaaatgtttgagttttatattttatattaccatcctttttatttctttgattatttaataaaaatagagaaatagcagtctcraaaattacatataaattatcttatgttgctgtgtctctttttgtaatccatgaacctagctacatttctctatttctagtagtttaatattcaatttcaa

SEQ ID NO: 548419 - DNA, 201 bp, Homo sapiens
ggaggctgaagcacaagaatcactcgaacccaggaggcggaggttgcggtgagctgaaattgcatcactgcactccagcctgggcaacagagggagactcyatctcaaaaaaaaaaaaaaaaaagaaaagaaaaaaggttcattttagagttatgaatgattaatttcccccatagcctatgcttttaaatatgaattgtt

SEQ ID NO: 548420 - DNA, 201 bp, Homo sapiens
ttataggctaatatcattttatgctaaaatccaattttaattggattttaattgtctgaggtaatttagttgtttgaggtacagaattaattggaatctgrgagtctttgttatgaggcaaagaagaagtgcagtgggtcagagaatattcctgttttctaaggaatttatacctttctaaggagaatttataactgatta

SEQ ID NO: 548421 - DNA, 201 bp, Homo sapiens
cattagtcaccacatatcctttcctgcttaatgttgccatgtatccccactcatgtcaacaatagagattgctaaatagtactttggccaatataatgcaratataatacagattggtttcaaaatggaatttaaaattttgaaaaacatagagaatttcatgaaattgataaaaatagtaagaggactattcaatcatat

SEQ ID NO: 548422 - DNA, 201 bp, Homo sapiens
tggaaatagatgaatgtggatggacaagagaagagcacttgattttggtcaaagtttttttgctcaccattctgagtcggtatgtgtgtttttttcattcytacttggcatatacttgaccataactattagtcttcttaataacttatcacatatctctttttaaaggtattttgtgtattgacagctttgacattgtgg

SEQ ID NO: 548423 - DNA, 201 bp, Homo sapiens
tgtatttttgttacactacactgcctttcagaatttctttcagacctaaaattctctctaccccaattcctcatcatatttttaggccacctcattttagytaatggtacaaatgtttgcccagtcaattttctaggggtttatgctatgtacttccatatccaactggtcaccacatcttactgcttttaactcccaaat

SEQ ID NO: 548424 - DNA, 201 bp, Homo sapiens
atgtggtcttccgttgcatttttaataactataatctattttcaaagttcttgaatcactttgctgaacaactgtatgcagttggaaaagaaggcttctaragatattttttagtaaagcatcttgccagtcatcttacacaactatttttggcttgacaactttataggataaattttactattttggttgtttcctata

SEQ ID NO: 548425 - DNA, 201 bp, Homo sapiens
ggaacagagtgggacaggagaaagaagctggacagctttccaactcctcttaaattaggtcttcacatattagtgaattttaagtacttgataacttatgytgaacattctaaagatatgttttgttgctaaatattcttattttatttcctcttttgtgttgaatcagattcgctcaattgaaggccagtatggcacact

SEQ ID NO: 548426 - DNA, 201 bp, Homo sapiens; identical to SEQ ID NO: 379953

SEQ ID NO: 548427 - DNA, 201 bp, Homo sapiens
aaaatagctaacaaacaaaaaagttctacctcatctttagccagagaaattcaaattcaaataacaaaaagcagtttcttcttatccaacagattggcaaraaatgttaaagaacaacatcactagggggcaaggatgaagaaaatgacactgtcagtcatagctggtggaaatataagttgttacagccacttaggaaaa

SEQ ID NO: 548428 - DNA, 201 bp, Homo sapiens
tggtccgaacttttcatttcataaactgcattttcttaactctttataattatccatctgatttattttaaattagatttattttacagtttttttaatgytactttagggtgtgcttttgcaagatagaaagtatgatcccatatttcaggaagatagaaggtattattctataagttgtccaatggcacagagctagta

SEQ ID NO: 548429 - DNA, 201 bp, Homo sapiens
aaacctgtcaggtccgccagtaccacatcaaacctctttcactccatcaaagaactcactttattgatcatgacaggtaggacaaaggaaagagcaaattmtttttaggatattacacaattcaaatagacctgttttttatttttatagtgtaaattctgttagcaatttctacttttaaaaattaaataaacagtttaa

SEQ ID NO: 548430 - DNA, 201 bp, Homo sapiens
ttacagtttttttaatgttactttagggtgtgcttttgcaagatagaaagtatgatcccatatttcaggaagatagaaggtattattctataagttgtccratggcacagagctagtaaataatggaacaacccatgcctgtcttactcaaaagcccaattctttgccttcacactatactgattatttccctaatgagat

SEQ ID NO: 548431 - DNA, 201 bp, Homo sapiens
cataacattttctattgtaaaggaaaaaatgctcacaataaagtaatttgtgtacttttttcctgaatgatttttttcaggcagtgttcaagactttaccygggccgaagattgcaaggctggaactgggaggggttatcaacacacctcaggagaaaatttttattgctgcagcatctgagattagaggcttcacaaaaa

SEQ ID NO: 548432 - DNA, 201 bp, Homo sapiens
tcagtccccttggggttaataccatagtatattcctttcattatcttcctaaaataggaaaaattctgaaatacatcttgcatcaagctttttggataaargattgacagcttgaattattcctgttttacatatgagaaaactcaaggtgaaatgatttgcccagatctttgaacctaggactatttgccttcaagtcaa

SEQ ID NO: 548433 - DNA, 201 bp, Homo sapiens
cgataggaatttgaattccagtttcatcacttaatggcttttatttaactcctcataacctcagtttcttcatctgttaaaatttaattagtaaaacttartgcatagagtttttgtaagtgtaagttagaacatgtttgaaaagtgctgagcaccaatgacaggtgcttaagcaaatggtaaccattattattattgatg

SEQ ID NO: 548434 - DNA, 201 bp, Homo sapiens
tttttttttagatggagtcttgctctgtcgcccagactggaatgcagtggcacaatcttgactcactgcaacctccacctccctggtacaagtgattttcrtgcctcagcctccctagtagctgggattacaggcgtgtaccaccatgcctggctaatttttgtattttagtagagacagggtttcaccatgttggacagg

SEQ ID NO: 548435 - DNA, 201 bp, Homo sapiens
gttcaagtgattctcctgcctcagcctcctgagtagctgggattacaggtgcccaccaccacacctggctaatttttgtactttttttttttttagggacrgggttttgccacgttggccaggctggtcctgacagtcatcttctaaattaacttagttattaaagtatctgggcattcaccatatattttcctaccatct

SEQ ID NO: 548436 - DNA, 201 bp, Homo sapiens
gtggcatgatctgggttcactgcatcctccacttcccaggttcaagtgattctcctgcctcagcctcctgagtagctgggattacaggtgcccaccaccayacctggctaatttttgtactttttttttttttagggacggggttttgccacgttggccaggctggtcctgacagtcatcttctaaattaacttagttatt

SEQ ID NO: 548437 - DNA, 201 bp, Homo sapiens
cttgtttaatccagtcatcttttttttttttttgagatggagtctcgctcttgtgctcttgtcacccaggctggagtgcagtggcatgatctgggttcacygcatcctccacttcccaggttcaagtgattctcctgcctcagcctcctgagtagctgggattacaggtgcccaccaccacacctggctaatttttgtact

SEQ ID NO: 548438 - DNA, 201 bp, Homo sapiens
taactcctcataacctcagtttcttcatctgttaaaatttaattagtaaaacttagtgcatagagtttttgtaagtgtaagttagaacatgtttgaaaagygctgagcaccaatgacaggtgcttaagcaaatggtaaccattattattattgatgtcttttttttgttgctaaaaacatggattcattcttttcctccac

SEQ ID NO: 548439 - DNA, 201 bp, Homo sapiens
cgtatggaggtttcaagtatacacaaaagtagaaagactagtataataacttgcatgtacccatcactaattttcaacatatggttagtcttttttttttwaaaaagatgggggtcttactgtgtcacccaggctggagtgcagtggcgtgatcatagcttattgcagcctgaaacttctgggcttaagcttatcttcttg

SEQ ID NO: 548440 - DNA, 201 bp, Homo sapiens
tatatagattattatctaaaattatttctatatagtggaactataatattttgcaaatttaacatcataacattttctattgtaaaggaaaaaatgctcayaataaagtaatttgtgtacttttttcctgaatgatttttttcaggcagtgttcaagactttacccgggccgaagattgcaaggctggaactgggaggggt

SEQ ID NO: 548441 - DNA, 201 bp, Homo sapiens
gttctacctccatggctttcatacttccacttggcttcattcctacccctgttaacttagtccaggcccttatcatgtcttgcttgaactactttataagkttctctgcctctagtcttgcctctgacttctaggatatgctgtatgtacactaccaccagagacgtcttccttcctaaaacacgaacatcactgtatctt

SEQ ID NO: 548442 - DNA, 201 bp, Homo sapiens
attggaggaagaaaaggtttaaaaagatgtaatggagagatcagattattaaaaaaaaaaacctaaaggcagaaaactctcttaagtaatgctagctcacrggctgttgcattgaacaactctaggaatgccattcacataggacagtgcaacagctttgtcctacaaactgcctctccagaggagaccaaaaattatctt

SEQ ID NO: 548443 - DNA, 201 bp, Homo sapiens
tatgcttttcatgtagttcagattctgaggtgtcaatgattattaagtatcttaaattatataatttattctattttatctatttatactacatagcagayttagcaattcacaccttgatttatctactatttgtttatttgtcaggtctattatactattggcataattttttaaaagtaagaaatgctgatagtaatt

SEQ ID NO: 548444 - DNA, 201 bp, Homo sapiens
tggttgttgctttttattacttatagatgcagtatattttattggaaggaattatgtaattaattagtttatcaccttttaaaatggaagtttacagtttygagaaaattagcgtaagtgctgattaatattttggagatagaaatatacttttttgtgtgccttattctatattgacattttcttaggtcaagggttgtg

SEQ ID NO: 548445 - DNA, 201 bp, Homo sapiens
ctgatttctccactattccctagcagtgacagaggagaggctcctatttccttctttattattaagttattctcttaaaaatgctaatgttaaaatggaartgaattttttaatttgaacagaaactggaataccaagggacatttatagacaataattttcttggacattaaaattattatataccattagtaaacagtg

SEQ ID NO: 548446 - DNA, 201 bp, Homo sapiens; identical to SEQ ID NO: 379945

SEQ ID NO: 548447 - DNA, 201 bp, Homo sapiens
attatataatggggaaatgtcttatctcttatagctataaaattgtgtgaatatataaccattctcaacaattaagttttatatctttttatagtactttytaaaatgatatttttacataacaacattttaattttaaagagattactaattgtaggataaatataatatgttgactttaattataagtaggtgactctg

SEQ ID NO: 548448 - DNA, 201 bp, Homo sapiens
gttcattaaaaaagactatatgcttattatttgtcaaattattatagagatgacagatggtttgaattttattaagtgaaaatatattaaaatcttgtgtktggtttaaaatattgctattttgatgttatcagaatcttctctagacttctcttgtgtttgaataatagactcttgcctttaagcaggataacaaattac

SEQ ID NO: 548449 - DNA, 201 bp, Homo sapiens
tgagccactgcatgtggtcttccgttgcatttttaataactataatctattttcaaagttcttgaatcactttgctgaacaactgtatgcagttggaaaaraaggcttctagagatattttttagtaaagcatcttgccagtcatcttacacaactatttttggcttgacaactttataggataaattttactattttggt

SEQ ID NO: 548450 - DNA, 201 bp, Homo sapiens
agtacataagataaatgaatttcattaaaatgttctattagcaaaaaagggtatagaaatgaacagttaggaaatgaacagtttgtaaaaaatttttgtartgttttccaagtatattgcattaaatatactctttaaagttgtaattaatagttccctgataaaccactcagaaagtgagaatgtgcgtgtttctattgg

SEQ ID NO: 548451 - DNA, 201 bp, Homo sapiens
ttggaaatattagtgaaaaatgaagataaaagttgttttaaatgaagtttttatataaattgtcacatctttaggaggcatatatcttgtttagttttacragtatattcagaagctgaattaatataacagtaaaggattacatgtttaaatttgctttatattaatgatatatgtatacagaagaaatctacagtcaaa

SEQ ID NO: 548452 - DNA, 201 bp, Homo sapiens
ataaattagtggttactgttttaagggcttttataaacatgtggaaacaatttttaaataatttgacatattaatttttttaacttgagtcaaatgtgttsttttgtaagtttttaagagaagcatatttggaagaaaaaggattttttttgcctcaccatacacaatttctgagctattatcagaatggagtactttgac

SEQ ID NO: 548453 - DNA, 201 bp, Homo sapiens
gaaaagttaagtaacttgctgataaaaggactaaagctatgaattgaagccaaaacccatattctttatattgctgcctataatttaaaatatataatttmaataagatgtaagacagactattcctaaagaagattttttggaaacatttaagagaacagactctttctgtcttgcttaaaagtcaaggttgtactaatg

SEQ ID NO: 548454 - DNA, 201 bp, Homo sapiens
tagataagcttttttaaaatgagggctggacgtggtggctcacacctgtaatcccagcactttgggaagctgaaagaaaaattgcttgagccctggagttygagaccagcctgggcaacatagtaagacctcgtctctataaaaataaaaaaataaaaaaataaactttttaaaaatgaaatatacccaaataaatgaaat

SEQ ID NO: 548455 - DNA, 201 bp, Homo sapiens
atgatggggtagttatgtgctttggcatgaagaaaggagaagcagcagtaagtatagctttgtgaaggggaaaaatggttttctaaaagagaatgcactakttattgaataatactaggttaaaaatttcctaaaatacaggtaatggaaaatgggttctgaggtaagtagttatgtgagatatgagtctgcgggtagcac

SEQ ID NO: 548456 - DNA, 201 bp, Homo sapiens
aaggggcgggccttcatcttcttccaggagcccctcgcagcagcgtactgacgtcacgcaggacgccactgccctgtcgccccgcctgtgcagcccaggasctaggcgcggtagctggggctggcttttgaggggcgcgggcagccttctgactgggtcggaggcctgcgggcccgaagcctctgtccctcctgttcttgt

SEQ ID NO: 548457 - DNA, 201 bp, Homo sapiens
agataggattgatttgcaactgatattccttttgcttggtagtgttttatgactctgctgcagtttgtggaaatgctggacttggctcagtgctataaatygtagccaggaaataagaagagcttacacagagtcgggggatcttaattagacatgctgtaaccagtggagctattcagcgtgcttcaagtgaagagtgca

SEQ ID NO: 548458 - DNA, 201 bp, Homo sapiens
aaaggtactgtatagattctgatttctccactattccctagcagtgacagaggagaggctcctatttccttctttattattaagttattctcttaaaaatsctaatgttaaaatggaaatgaattttttaatttgaacagaaactggaataccaagggacatttatagacaataattttcttggacattaaaattattata

SEQ ID NO: 548459 - DNA, 201 bp, Homo sapiens
ttacaaggtacataaacacataaacatgtagaccgctttataggcttcaaaatgtatttttatatattaccttatttgatcttcacaactgttgtaaaatwtgtcaaatcatataagaaaactgattctcagtgaaattttgtgattaagaggacatgctaatattttgtaaagctgggaccagaacccaagtactggtac

SEQ ID NO: 548460 - DNA, 201 bp, Homo sapiens
ctttctcacaaactgtagctatatttaatgtcttaacctttattacatgacaagcacatgatctcttttatccttataataacttatgagattggctgtayataatatcactgattgcaaaatccagacagctttgtaaaccaaagtttttttcataaataatttgacagcaaaatcttgacttaatctgaattaatttaa

SEQ ID NO: 548461 - DNA, 201 bp, Homo sapiens
gaggcatatatcttgtttagttttacgagtatattcagaagctgaattaatataacagtaaaggattacatgtttaaatttgctttatattaatgatataygtatacagaagaaatctacagtcaaatgaaatctatactctaagtactaatcataaaatatatatgtactggacaatttccttctacagctattctttta

SEQ ID NO: 548462 - DNA, 201 bp, Homo sapiens
tcttctagatctctttttatcatatatgacattaaggctacagaagttttgtgcattaatcttaattcatatttattaatttcaagggaatattgaaaggytttaaaatggcatacagataatggaaaataagctttatgtttcaagaagggcagactcacgaattttttagaaaacagtgcttcttaatgatatgctatt

SEQ ID NO: 548463 - DNA, 201 bp, Homo sapiens
cctatatgtattctgactaatatgacatatctcattagaaaataaattaattactgataatagttatatcactaatttcagtttaacaaaaaggttcactrtaacttattttaatctctgtaataacttcaaattaaattcactaggcatctggtgtttttctttaggtgggagtaacatctcagaagactatgaagctaa

SEQ ID NO: 548464 - DNA, 201 bp, Homo sapiens
ctgagcgcccaccaagctggagacaggagagagcttgccaggaaggccagcagggcgggttgggttggagactcctcttgccccgatgtcccttctcctcycatgatgtcctggtggcagagggcccaggccccagggtcagacctggcagcaggtggacttcgagctctgaggtctaggttctttctgtgtactccctgc

SEQ ID NO: 548465 - DNA, 201 bp, Homo sapiens
aggctcaggccccggtggccctggtggctcagcctgagcccctgccggccacagctggtgtgaagagggagagcgtgggcatggaggtggcagtgctgacygatgacccgctgcccgttgtggaccagcagcaggtgctggcccggtaagcagcagagcatggggctggcgggaccccacggtgaggtgggaaggggctgc

SEQ ID NO: 548466 - DNA, 201 bp, Homo sapiens
cgccactgcactccagcctgggcgacagagtgagactctgactcaaaaaaaaaattaaaaattaaaaaaagaatggagattggtggtgctgtgcacatgcrtgtgtgtgtgcgtgtgtgtgtgcgtgtgtgtatgcgtgtgcgtgcatgtgcatgtgtgcctgagggtgcatgtgtgtctgtgggtgcatgtgtatgcatg

SEQ ID NO: 548467 - DNA, 201 bp, Homo sapiens
agaaggtttggattccagttctaatgatcacaaatgtacctgtgagctgaggatagcaacgcattgcctattctatgaacatgtcgtgatagatttggggyttgtgtatcaccccggcccccctgttggagctggcaggacaccctgttttgagctttgtaggacagaataaggcacttcccatctcaaggaaggggaggc

SEQ ID NO: 548468 - DNA, 201 bp, Homo sapiens
gagtgcagtggcgccatctcagctcactgcaacctccgcccatctggttcaagcaatcctcctgcctcagcctcctgagtagctgggattacaggctcccrccaccatgcctagctaatttttgtatttttttggtagagacggggttttactatgttggctgttggctgggcttttcttgaactcctgacctcaagtgat

SEQ ID NO: 548469 - DNA, 201 bp, Homo sapiens
atattagccaggcgtagtggcgcacacctgtagtcgcagctactcgggaggctgaggcaggagaatcacttgaacctgggagagggaggttgcagtgagcygagatcacacgattgcatctagcctaggcgacagagcaaagaccccgtctcaaaaaacaaaacaaaacaaaacaaaaactggctacagccagttcactgc

SEQ ID NO: 548470 - DNA, 201 bp, Homo sapiens
ctagagcttgattggcagcttcataaaaaagggaaagttgctgccaggaaaaaagacattcttaatctgggaccacaaagaggttatgtcagaatgctttyagctccaagcgatagataccaaagcaaacaaccataagaaaaataaggaattttttagttcatgtaagtggaccagtttcaggcacggctggatctaggg

SEQ ID NO: 548471 - DNA, 201 bp, Homo sapiens
tcccaaatgcaccctgcagcctggccatgcaatttgtgtttgtgtctttttttttgagacggagtcttgctctgccgcccaggctggagtgcagtggcgcratctccgctcactgcaacctccacctcccgggttcaagcgattctcctgcctcagcctcccaagtagctgggactacaggcacgcaccaccatgcccagc

SEQ ID NO: 548472 - DNA, 201 bp, Homo sapiens
gacttcccaaatgcaccctgcagcctggccatgcaatttgtgtttgtgtctttttttttgagacggagtcttgctctgccgcccaggctggagtgcagtgkcgcgatctccgctcactgcaacctccacctcccgggttcaagcgattctcctgcctcagcctcccaagtagctgggactacaggcacgcaccaccatgcc

SEQ ID NO: 548473 - DNA, 201 bp, Homo sapiens
cgaggctgtattgagctaggattgcaccactgcactccagcctgggcgacagagtgagaccctgtcccaaaggcaaaaaaaaaaaaaaaaaaaaaaaaaargagacatcctactgaggattatagactgaggcctacagcccagagcggctctgtcagtatttcagttcacagtttatatacaggtggtgaagactcagca

SEQ ID NO: 548474 - DNA, 201 bp, Homo sapiens
agcctgctcagctgcagggagcaccagcgtgggaagtccacgggtcaggggtgggttagctgagcccacaggaagattcccgccctgacctgccactgtgrtcaagtgcacaggcagggagttgggcaggaatcctggttgtgaccctgagcaagcagcgtcctgtcgccgagcctcggtttccctccctgtgaagtgggg

SEQ ID NO: 548475 - DNA, 201 bp, Homo sapiens
tggtctcgaactcctggggtcaagcaatcctcccatctcccaaagtgctgggattacaggtgtgagctactgcccctggcctgttgttgttgttgttgttgagacagaatcttgctctgtcgcccaggctgaagtgcagtgttgcaatctcggctcactgcaacctttgtctcccaggttcaagcaattcttgtgcctcag

SEQ ID NO: 548476 - DNA, 201 bp, Homo sapiens
tgccagtggccttagacacagaactagcctgctcagctgcagggagcaccagcgtgggaagtccacgggtcaggggtgggttagctgagcccacaggaagwttcccgccctgacctgccactgtggtcaagtgcacaggcagggagttgggcaggaatcctggttgtgaccctgagcaagcagcgtcctgtcgccgagcct

SEQ ID NO: 548477 - DNA, 201 bp, Homo sapiens
ctggtctcgaactcctggggtcaagcaatcctcccatctcccaaagtgctgggattacaggtgtgagctactgcccctggcctgttgttgttgttgttgttgagacagaatcttgctctgtcgcccaggctgaagtgcagtgttgcaatctcggctcactgcaacctttgtctcccaggttcaagcaattcttgtgcctca

SEQ ID NO: 548478 - DNA, 201 bp, Homo sapiens
gtgcctcagcctcccaagtagctgggattacaggtgtgcaccatcacgcccggctaatttttgtatttttagtagagatggggtttaaccatgttggtcargctagtctcaaactcctgacctcaaatgatttgcctgcctaggcctcccaaagtgctgggattacaggcgtgagccactgcacccagccaaaaatttgta

SEQ ID NO: 548479 - DNA, 201 bp, Homo sapiens
ggctttcctcacttgccgtgtggctttgttaggttacttaacttttctgagcctcggttctcacttccgttaatgatgatgtcagcccgacctccatgtcrtggtcatccaggggttcaacaggcggagacccagtcccagaggccacagttcaaacactgagcgacccctgagtgctgggcccaggacacaaggatgagc

SEQ ID NO: 548480 - DNA, 201 bp, Homo sapiens
gctggtctcgaactcctggggtcaagcaatcctcccatctcccaaagtgctgggattacaggtgtgagctactgcccctggcctgttgttgttgttgttgttgagacagaatcttgctctgtcgcccaggctgaagtgcagtgttgcaatctcggctcactgcaacctttgtctcccaggttcaagcaattcttgtgcctc

SEQ ID NO: 548481 - DNA, 201 bp, Homo sapiens
tcgcgatgcaaggttatgccaggtgggctcccgttctgcagatggagggacagctgtacagggcgtttgcccagttgccatggttacagtgagtgtccagkcctgacggagccctgggcgacgctcactggctcgtgagctctgtagtgagctgggtggggggtctgtgggaatccagccacctttcagtgaccacgaggc

SEQ ID NO: 548482 - DNA, 201 bp, Homo sapiens
ggagctcactgtgcacacactgttcacacacatggcctccgacactcaggccgtggctccactgtgtctgctgcggctctggcactggtggctggctcagkggcactggtgtccaggggttagggaaggagaagctctgtctcatgctctgtaattcaataagaaagttggggtcgcgatgcaaggttatgccaggtgggc

SEQ ID NO: 548483 - DNA, 201 bp, Homo sapiens
ccagattcaagcaattctcctgcctcagcttcccgagtagctgggattacaggcgcccatcaccacacctggctaatttttgtacttttagtagagatggrgtttcgccatgttggccaggttggtcttgaactcctggtctcaggtgattcattggcctcggcctcccaaagtgttgggattacaggtgtcagccaccgc

SEQ ID NO: 548484 - DNA, 201 bp, Homo sapiens
gcaaagggaaaaatcaagaccctcttacaggagtctgggacataacgataaagaaatgggtgggaggtatgagaggcgccgggagccccctgaactggagyactaaggggcccatgtgaatgcagccctgtctccgctgcaagggagacgcgctcctggaggagacccaggggaaggggagggagcagattctagcatttt

SEQ ID NO: 548485 - DNA, 201 bp, Homo sapiens
catggtggcctgcctgtcgcctgcggacaacaactacgatgagacactcagcacgctgcgctacgccaaccgggccaagaacatcaggaacaagccgcgcrtcaatgaggaccccaaggatgcgctgcttcgcgagtaccaggaggagatcaagaagctcaaggccatcctgacacagcagatgagccccagcagcctgtc

SEQ ID NO: 548486 - DNA, 201 bp, Homo sapiens
ttttttaaaaaaaatttctttgttttgagatggagtcttgctccatcgcccaggctggagtgcagtggcatgaccttggcttactgcaacctccccatccmggatttaagcaattctcgtgcctcagtctcctgagtagctgggattacaggtgcacactaccacacccggctaatttttgtgttttcagtagagacggga

SEQ ID NO: 548487 - DNA, 201 bp, Homo sapiens
cgctcatggtggcctgcctgtcgcctgcggacaacaactacgatgagacactcagcacgctgcgctacgccaaccgggccaagaacatcaggaacaagccrcgcatcaatgaggaccccaaggatgcgctgcttcgcgagtaccaggaggagatcaagaagctcaaggccatcctgacacagcagatgagccccagcagcc

SEQ ID NO: 548488 - DNA, 201 bp, Homo sapiens
attccagttctaatgatcacaaatgtacctgtgagctgaggatagcaacgcattgcctattctatgaacatgtcgtgatagatttggggcttgtgtatcamcccggcccccctgttggagctggcaggacaccctgttttgagctttgtaggacagaataaggcacttcccatctcaaggaaggggaggccgggtgcaggc

SEQ ID NO: 548489 - DNA, 201 bp, Homo sapiens
acggtgtagggtacaccagagtgggcagtgcctgctccagccctgtgacaacttgggggaagctcggggcggcccccactgccccaggataccagaggctktggagccctgtgccaggggcacaaacaaggggacgtgaccacgggcatctgcatctcggcaggaggaggaccgctacaggctcatgctcagtcggagcaa

SEQ ID NO: 548490 - DNA, 201 bp, Homo sapiens
tcctggccccgagctgcctgggatcccacccccgagtccaggatctacggtgtagggtacaccagagtgggcagtgcctgctccagccctgtgacaacttsggggaagctcggggcggcccccactgccccaggataccagaggctgtggagccctgtgccaggggcacaaacaaggggacgtgaccacgggcatctgcat

SEQ ID NO: 548491 - DNA, 201 bp, Homo sapiens; identical to SEQ ID NO: 380510

SEQ ID NO: 548492 - DNA, 201 bp, Homo sapiens
gtgagtgtccctcccctgtccccaccctctccacacaactgggagaggcgtgaaggggatagttttgaagtcagacaggcctgggttcaaaaactcctttmcctctcggagcctcagtttccttagctacaaaatgaggggggtaacaccaacttcttaggattaggtgatacgaggtgaggaaacggcccagcccgggcg

SEQ ID NO: 548493 - DNA, 201 bp, Homo sapiens
tcccagtggaaaactcagcgtgggtgtggagtttttgtctttgttcaatgccgcatcctcagagtctggaacatcgaggtgctccataaatatttgttggrtgactaacagccttttacatggagatgtgtttgaaataagctgaatactttaaagtcttcttgaatgaccatgaggtcgtctttttatagatttctgctt

SEQ ID NO: 548494 - DNA, 201 bp, Homo sapiens
gcaacatgtagggccttggagagctgccagggaccagcccagagccagtgcttggcccaggccttccctgtggcctcaggtgtttttttttttttttttttgagacggagtcttgctctgtcacccaggctggagtacaatggcatgaccttggctcactgcaacctctgcctcccagattcaagcaattctcctgcctca

SEQ ID NO: 548495 - DNA, 201 bp, Homo sapiens
tcaccgtgttgccaaggctggttttgaactcctgacctcaggtaatctgcccacctcagccttccaaagtgctgggattacaggcatgagccaccccgccyggcccaaggtgtttttcttatcatcttatcaatttgcctcagtaaggccagcccaagggcacacggtcagtaaagtggagatggatgtgagcccaggggg

SEQ ID NO: 548496 - DNA, 201 bp, Homo sapiens
cctgtgcccatgcacgaaagaagccctgtatgcaccctgtgagagccccgcaggtgctgctcttaccctttaagatattgattttttttttttttttttttgagacggagtctcgcgctgtcgcccaggctggggtgcagtggcacgacctcggctcactgcaatctcctgggttcaataaattctcctgcctcagcctcc

SEQ ID NO: 548497 - DNA, 201 bp, Homo sapiens
cgctcaaaccctggagtcagaagttgtagtgagctgagatcatgccaccgcactccagcctgggcgacagagtgaatctgtctcaaaaaaaaaaaaaaaaatggagcaggctgggccactgtagctcacacctgtaatcccagcacttcagaaagctgagatgggagaactgcttgagtccaggagtttgagaccagcctg

SEQ ID NO: 548498 - DNA, 201 bp, Homo sapiens
tcctgtgcccatgcacgaaagaagccctgtatgcaccctgtgagagccccgcaggtgctgctcttaccctttaagatattgattttttttttttttttttttgagacggagtctcgcgctgtcgcccaggctggggtgcagtggcacgacctcggctcactgcaatctcctgggttcaataaattctcctgcctcagcctc

SEQ ID NO: 548499 - DNA, 201 bp, Homo sapiens
ttcctgtgcccatgcacgaaagaagccctgtatgcaccctgtgagagccccgcaggtgctgctcttaccctttaagatattgattttttttttttttttttttgagacggagtctcgcgctgtcgcccaggctggggtgcagtggcacgacctcggctcactgcaatctcctgggttcaataaattctcctgcctcagcct

SEQ ID NO: 548500 - DNA, 201 bp, Homo sapiens
ttggaagaaaacgtaggtgtaaatctttgctaccttggattaggcagtggtttcttaggtatgacaccaaaagcacaagttacttaaaaaaaaaaaaaaaagagggataaattggatggtgcagtggctcatgcctataatcccagcactttgggaggccgaagtgggaggatcgcttgaacccaggagttcaagaccagc

SEQ ID NO: 548501 - DNA, 201 bp, Homo sapiens
tgagatgggagaactgcttgagtccaggagtttgagaccagcctggtcaacaaagtgagcctcgtatctatttaaaacaaacaaacaaacaaacaaacaaaagaaatggaacattgttaatccagttgaaacccctgtgcaccagcctctctgtggctgtcctgcccacccatgtcctgccagctgttctcaaatgggtat

SEQ ID NO: 548502 - DNA, 201 bp, Homo sapiens
ctgagatgggagaactgcttgagtccaggagtttgagaccagcctggtcaacaaagtgagcctcgtatctatttaaaacaaacaaacaaacaaacaaacaaaagaaatggaacattgttaatccagttgaaacccctgtgcaccagcctctctgtggctgtcctgcccacccatgtcctgccagctgttctcaaatgggta

SEQ ID NO: 548503 - DNA, 201 bp, Homo sapiens
tcctcttgccccgatgtcccttctcctcccatgatgtcctggtggcagagggcccaggccccagggtcagacctggcagcaggtggacttcgagctctgakgtctaggttctttctgtgtactccctgcagtgtgcagagaacactaagttcctggtccgggcctcctacctggagatctacaatgaagatgtccgggacc

SEQ ID NO: 548504 - DNA, 201 bp, Homo sapiens
tgtggctggagaaagggagtgaggcctgagtcagggagagcgtgattctgcccacggtgagggtcatgtgcactgcctttggagctttctctgtgctgtcygggtctcctgatcctcatgatggctccttggccatctgcagggtcctccccaccccctcgcccccaccaccgtcctggcatcctaaggatcttgccaagc

SEQ ID NO: 548505 - DNA, 201 bp, Homo sapiens
ctcacccacagcactgcactgggatggcttagccatggactgggccccagctcaaggctgactgtgagctgtgaagtgccaccctttctttagaggccagyccctgccccgaattgctgtgttttccggtctcctcttacttttgagcctctctgttagcaaagcaaacacattccataataaggatttaatccttagcca

SEQ ID NO: 548506 - DNA, 201 bp, Homo sapiens
cctctccatctattcattctacacacacccattcacctacccgctcatccacccatctgtccatcctcccacttacccattcatccacccaccttttcttycacctacccaccttcccacccaccccattacttatccatctgcacactcatccatccatccacccactcacccacctatacatctatccatccatccatc

SEQ ID NO: 548507 - DNA, 201 bp, Homo sapiens
caactaaagaaaaatcaacaagtctgggcacagtggctcatgcctgtaatcccagcacgttgggaggccaaggcaggatgatcacttgaggccagcagttygagaccagcctgggcaacatagggacaccgtatctctaaaaagaaagaaattagccaggcgtggtgatgtacgccttcagtcccagctactcgggagact

SEQ ID NO: 548508 - DNA, 201 bp, Homo sapiens
tgttaaaaaatgcactgagcaggctgggcatggtggctcatgcctgtaatcccagcactttgggaggctgaggctggtggatcacctgaggtcaggagttygagaccagcctagccaacatggtgaaactccgtctctactaaaaaaaaaaaatagccagacgtggtggtggacaactgaactgtaatcccagctacttgg

SEQ ID NO: 548509 - DNA, 201 bp, Homo sapiens
aaaatacgaaaattagccaggcatggtggcatgcacatgtaataggctacttgggaggcagaggcaggagaatcaggagaatcacttgaacctgggaagtrgaggttgcagtgagctgaaattgagccactgcactccagcccaggtgacagagcgatactctgtctccagaggaaaaaaaaaaagcaatagaggaaggga

SEQ ID NO: 548510 - DNA, 201 bp, Homo sapiens
gggggcagtggaggagagggctgcagggctctgaggagctgcctggtcatggaacctccctgggcctcagtaacactgtgggcattgctttgaggttcaartgtatctaaaaatgtactaaagaatgcatggttacatctgaattattctccgtccccttctctccctccctaggagcctaaatcagtgctgtccatgcca

SEQ ID NO: 548511 - DNA, 201 bp, Homo sapiens
gctttttctcatctgagagtcatttcctcagactcggttccctgcaatggagtcctggagcaaagataacaaacgtggttaaggcttctggtccgttctgsaaagagcttcccaaagaggcagcaccaagttccttcctgtccttttttgagaggcagagtctcactctgccacctaggctggagtgcagtggtgcaatca

SEQ ID NO: 548512 - DNA, 201 bp, Homo sapiens
gagaacagtttggaaaggtcttcaccggcaagtaattatcacagtgttgtaccattggattctcttggcttacttataggttctgtattgtttgaataacmaaaaaggaatactgaaagctgggtttcaaaatgatgataaaatgctgcctgccctctggtccctcccacccccccaggagtatgaagagcgcctggcccg

SEQ ID NO: 548513 - DNA, 201 bp, Homo sapiens
gctgagatgggagaactgcttgagtccaggagtttgagaccagcctggtcaacaaagtgagcctcgtatctatttaaaacaaacaaacaaacaaacaaacaaaagaaatggaacattgttaatccagttgaaacccctgtgcaccagcctctctgtggctgtcctgcccacccatgtcctgccagctgttctcaaatgggt

SEQ ID NO: 548514 - DNA, 201 bp, Homo sapiens
ggaacaagccgcgcatcaatgaggaccccaaggatgcgctgcttcgcgagtaccaggaggagatcaagaagctcaaggccatcctgacacagcagatgagmcccagcagcctgtcaggtgggaccacgttggggtagtggcgggagggccaggtccccaggagaaagcttccttccctctgtcttctcgcctccaacttcc

SEQ ID NO: 548515 - DNA, 201 bp, Homo sapiens
agctgagatgggagaactgcttgagtccaggagtttgagaccagcctggtcaacaaagtgagcctcgtatctatttaaaacaaacaaacaaacaaacaaacaaaagaaatggaacattgttaatccagttgaaacccctgtgcaccagcctctctgtggctgtcctgcccacccatgtcctgccagctgttctcaaatggg

SEQ ID NO: 548516 - DNA, 201 bp, Homo sapiens
tcgagaccagcctggccaacatggtgaaaccctgtctctaaaaaaaaaaaatagaaaaattagccaggcatggcagcatgtacctgtagtcccagctactwtgggggctgaggcgagaggatcgcttgagcctgggaagtcaaggctgcagtgagccaagatcgtgccactgcactccagcctgggtaacaaagtgcgacc

SEQ ID NO: 548517 - DNA, 201 bp, Homo sapiens
acaagttacttaaaaaaaaaaaaaaaagagggataaattggatggtgcagtggctcatgcctataatcccagcactttgggaggccgaagtgggaggatcrcttgaacccaggagttcaagaccagcctggacaacatgggggaaaccctgcctctacaacaaattttaaaaatattagccagatgtggtggcatgcacct

SEQ ID NO: 548518 - DNA, 201 bp, Homo sapiens
gcttcgcgagtaccaggaggagatcaagaagctcaaggccatcctgacacagcagatgagccccagcagcctgtcaggtgggaccacgttggggtagtggygggagggccaggtccccaggagaaagcttccttccctctgtcttctcgcctccaacttcccacctaaaagacagtgggagcagcatcctcccacccctca

SEQ ID NO: 548519 - DNA, 201 bp, Homo sapiens
tgagttcaaatgatctgccggcctcagcctcccaaagtgccgggattacaggcatcagccactgcacctggctgcaaagtcctttttttttttttttttttgccaaggaagataccatattcacaggcacaaaaacagggggcaaaaatcttgggggtgaaagcttatttttttggtggtggttgtcttttgtggttttct

SEQ ID NO: 548520 - DNA, 201 bp, Homo sapiens
atatttattgagcacctgctatgctcctgggaccgtgtttccctttgtattccagaaccattcagggaaagggaggagccccctctgtgtagggaagaggrcacgggccaggagccgggttccggtccccagtctgaaccaggggtttggaccagaagattcctagggtccgtccagccttctgcaagtccatccttatgg

SEQ ID NO: 548521 - DNA, 201 bp, Homo sapiens
gtcacagcccggggggctctggtcacagatggaggggtggggcgggctgtgcaggacggggacggaggcttccttcccgggaagcctggtggggccggcgscccccgctgtccagtaagtagggcactgcctccccctggtggtcaccagggagtagcgacgccgttcctggcgggtccctggagtgccacggatgggggt

SEQ ID NO: 548522 - DNA, 201 bp, Homo sapiens
aggaggagatcaagaagctcaaggccatcctgacacagcagatgagccccagcagcctgtcaggtgggaccacgttggggtagtggcgggagggccaggtmcccaggagaaagcttccttccctctgtcttctcgcctccaacttcccacctaaaagacagtgggagcagcatcctcccacccctcagccccatgtgagcg

SEQ ID NO: 548523 - DNA, 201 bp, Homo sapiens
gagtcacacacggagtcacagcccggggggctctggtcacagatggaggggtggggcgggctgtgcaggacggggacggaggcttccttcccgggaagccyggtggggccggcgccccccgctgtccagtaagtagggcactgcctccccctggtggtcaccagggagtagcgacgccgttcctggcgggtccctggagtg

SEQ ID NO: 548524 - DNA, 201 bp, Homo sapiens
gcttttcctgatgtgaaacctgatgccaggcaggacgagctatcccggggctaggcctggatgtatccgctgctggacccctgccactcacctaccacctyccactggggtccgtcctcaggccccagaagcccctgttgggctgtgggtacctggggcccagcctctggggcagacaggagaaggactgtggggatctct

SEQ ID NO: 548525 - DNA, 201 bp, Homo sapiens
attacaggcgtgagccactgtgccgggcctgatagtccctttagaaccctggcttttcctgatgtgaaacctgatgccaggcaggacgagctatcccgggkctaggcctggatgtatccgctgctggacccctgccactcacctaccacctcccactggggtccgtcctcaggccccagaagcccctgttgggctgtgggt

SEQ ID NO: 548526 - DNA, 201 bp, Homo sapiens
cgggcaagctgaacctggtggacctggcgggcagcgagcggcagtccaagaccggggccacgggcgagcggctcaaggaggccaccaagatcaacctgtcrctctcggcactgggcaatgtcatctcggcgctggtggacgggcgctgtaagcacgtcccctaccgtgactcgaagctgacgcggctgctgcaggactcac

SEQ ID NO: 548527 - DNA, 201 bp, Homo sapiens
gaatttgaggcctcagtgagttataatcccaccactgcactccggcttgggtggcagagcaagaccctgtctcgataaatatataagtaaaaaaattgcawcccttctaactgcttctgactcccaagcaccctccctacttgctttttcttctcagtacacatcgccttgtaacgtgttacccattttgcttatttattt

SEQ ID NO: 548528 - DNA, 201 bp, Homo sapiens
actgagcagttatcaccagctccctcccagctcctcagacaagcaactcagccactgagaacctcagtctcttcatctgtaaaggggacatcatagcgacmcctgccttgtgtgtgctgtgaggcaactgggaaaattgcctgaggtcatgcatgtgtgggctcagcacgaggcctggcacggtgggctccagagacaatg

SEQ ID NO: 548529 - DNA, 201 bp, Homo sapiens
cacggtcagtaaagtggagatggatgtgagcccagggggccaagcccacagctcaggctcttccccatccacacacagggacagctcctaccccaccagasagtcaactccttgaggacagagctgcgccttgtttatctccacagtccagtgccattgttggtggggggaccaggaagggccctgagtctgtgggttagg

SEQ ID NO: 548530 - DNA, 201 bp, Homo sapiens
aaacccaacatatcccactgtcaactcgatgggcccccaaatctgctaggctgcagctccccccaacagctgacagaggcaactcaggtgttcaaaccagrcacttggggtcgcccctggcttctcacgttctctcaaatctacatccagttggtcagcagatcctgccatctccaccttcaaaactggctacagcctggc

SEQ ID NO: 548531 - DNA, 201 bp, Homo sapiens
tcagacaagcaactcagccactgagaacctcagtctcttcatctgtaaaggggacatcatagcgacccctgccttgtgtgtgctgtgaggcaactgggaarattgcctgaggtcatgcatgtgtgggctcagcacgaggcctggcacggtgggctccagagacaatgcatgcggccttcactttggagctgggccttcaga

SEQ ID NO: 548532 - DNA, 201 bp, Homo sapiens
aagcgggccagccagatcctcagcacagacgccaggaagagcctcagtgagtgtccctcccctgtccccaccctctccacacaactgggagaggcgtgaargggatagttttgaagtcagacaggcctgggttcaaaaactcctttacctctcggagcctcagtttccttagctacaaaatgaggggggtaacaccaactt

SEQ ID NO: 548533 - DNA, 201 bp, Homo sapiens
acaggcacgcaccaccatgcccagctaattttttgtatttttagtagagatggggttttaccgtgttagccaggatggtctcaatcaggacctcgtgattsgcccgcctcagcctcccaaagtgctgagattacaggcatgagccacctcgcctggcctcgtgtcttaatttataaaggtgactgggtgacagcacagaga

SEQ ID NO: 548534 - DNA, 201 bp, Homo sapiens
accgcgggagagggagtggggtgtcgggggctgggagggctttgcccccagtgctgtgggtcagtgttactgtggagagctggttttccactttcctcccrcctaaggattaaagaaggggccaaggctggatccttttcatgcccctccattggcacctagaccctcaaccccctctggccctcattcaaaggtactcac

SEQ ID NO: 548535 - DNA, 201 bp, Homo sapiens
ccacccatgcccggctaatttttgtattttttagtagagatgaggtttcactgtggtggccaggctggtcttgaactcctgatctcaggtgatccacccayctcggcctctcaaagtgctgggattacagacgtgagccactacgcctggcctcctcattctttgacaactacatagctctccattgtgaggctggatcat

SEQ ID NO: 548536 - DNA, 201 bp, Homo sapiens
gattcaggcttagatggatgttttcatcctcaggtacctaggatgctgtttattttattttatttttaaattttttttgtataaggaaatatgtacgtatktgtgtatacacactgttatggtttggctgtgtccccacccaaatcttatcttgaattatagctcccataattctcatgtgttgtgggagggacccagtgg

SEQ ID NO: 548537 - DNA, 201 bp, Homo sapiens
tgggcattgcctgcagcgtggcagccccgcgctgggcacgcagtaaacacttggcacatgtcctggctgttttcacagtgtggtgtggagggaaggctggrgggccttcacagaagtggagacagctgaaaaaggtttgctgcaggggtggcatcctagagaaagggcacagcacctgcaaaggtgtggaggtgggacccg

SEQ ID NO: 548538 - DNA, 201 bp, Homo sapiens
ggcggaatggccccgtctgggattgagccacctgggagctgtcggcgggggttggggcggccttcccacctccacctgggtttctcttcacactcaggagrtagatctggcctcggaagtggccttagaggtggtgcggacagcagagcctggcgtgtggttggaggctcaggccccggtggccctggtggctcagcctga

SEQ ID NO: 548539 - DNA, 201 bp, Homo sapiens
aaggaggccacggtggcgggggaggccgtggaggcagggagccggcagggaggaaagtggactttcctgcgaacgtgacgggaagtcacatggggctcatygggaacgggatgtgatcggtttctattttaagatggccctggctgcctgtggagactggattgtgggaggtgagagaggaagctgggagccttcctccta

SEQ ID NO: 548540 - DNA, 201 bp, Homo sapiens
cagtccagtgccattgttggtggggggaccaggaagggccctgagtctgtgggttagggagccctgtcccgagccctgctgtgcctgctccactgagcacrgggtcctgccttcctcccatgcagggcgtcactgagggctacaatggcaccatctttgcctacggccagacaggcagcgggaagtccttcaccatgcagg

SEQ ID NO: 548541 - DNA, 201 bp, Homo sapiens
ggatggttctggcccaaatcagccttctttctcctccatcccctctttcctcccaggtccctgcgccgacagacctgctggagcccagtgatgccaggccygaagccgaggcggctgatgacttcccgcccaggcctgtgagtacctccccgggcctccatgtgggggacggggttctcttcaacttcctgggaaactcca

SEQ ID NO: 548542 - DNA, 201 bp, Homo sapiens
aggtccagacttcctagcactcatgaatagtgtagaatccaggcctggaatgatgatgatactgatcgcaccgtcggtaccgcttgttggcacattaccaygtgccgggtactgtgtgggtgctttacctgcacctcctcactgagcctctggtctccccagtccagcgaggtaggactccctgaatcctcccataactgt

SEQ ID NO: 548543 - DNA, 201 bp, Homo sapiens
ccccagaccctgtgcaggtggaggagaagctgttgccccaacctgtgatccagcatgacatggaggccgagaagcagctgatccgggaggtgagacccaakcgggtgggaacatggagaagggacaggcaggtggggcccagcgggaagggcagggctgccgctggggtccaacgcgatatcaccgtaccttcaccgtggg

SEQ ID NO: 548544 - DNA, 201 bp, Homo sapiens
taaagaaatgggtgggaggtatgagaggcgccgggagccccctgaactggagcactaaggggcccatgtgaatgcagccctgtctccgctgcaagggagaygcgctcctggaggagacccaggggaaggggagggagcagattctagcattttatgccctttggagtgttccctccagtccagattgaatatgaggcctcc

SEQ ID NO: 548545 - DNA, 201 bp, Homo sapiens
gtgcagtggcatgaccttggcttactgcaacctccccatcccggatttaagcaattctcgtgcctcagtctcctgagtagctgggattacaggtgcacacyaccacacccggctaatttttgtgttttcagtagagacgggatttcgtcatgttggccaggctggtctcgaactcctgggctcaagcgatccacctgcctt

SEQ ID NO: 548546 - DNA, 201 bp, Homo sapiens
gttggagactcctcttgccccgatgtcccttctcctcccatgatgtcctggtggcagagggcccaggccccagggtcagacctggcagcaggtggacttcragctctgaggtctaggttctttctgtgtactccctgcagtgtgcagagaacactaagttcctggtccgggcctcctacctggagatctacaatgaagatg

SEQ ID NO: 548547 - DNA, 201 bp, Homo sapiens
ctctgttagcaaagcaaacacattccataataaggatttaatccttagccacagctgtttacctatctggaggtttttgtgttctttttttttaaaaaaaatttctttgttttgagatggagtcttgctccatcgcccaggctggagtgcagtggcatgaccttggcttactgcaacctccccatcccggatttaagcaat

SEQ ID NO: 548548 - DNA, 201 bp, Homo sapiens
ccgaggatcaggtctgttttatcctcacaatggtccagtaaggtaggtaccacaattatgctcgctatatagatgaggaaactgaggcacagagagggtargtaacttgcccatggtcacacagctggtaaaggagagccaggatttgaacccaagcagtctggccccagagccagtgttctcacccacagcactgcactg

SEQ ID NO: 548549 - DNA, 201 bp, Homo sapiens
ttatcaccacctctgcattcctgacttcccaaatgcaccctgcagcctggccatgcaatttgtgtttgtgtctttttttttgagacggagtcttgctctgycgcccaggctggagtgcagtggcgcgatctccgctcactgcaacctccacctcccgggttcaagcgattctcctgcctcagcctcccaagtagctgggac

SEQ ID NO: 548550 - DNA, 201 bp, Homo sapiens
tcagcagatcccctcccttcatgagacctttgcttcctacatgccctctgccctggctcccttcctgcctccccacccacctctcctcagttcccaagggygagtcgtccctgctccctggcctcttaaccctgggctgtcccaggctggtcctctgctgtcctctctctgcactcgctgctcaggtggcttcgcctgggt

SEQ ID NO: 548551 - DNA, 201 bp, Homo sapiens
ttaagtgatgtggtgactcagcgacagacatgggggaccgtagactccatcctgttttgtcttcaaagcgtgtctgtggagctctgcacagttctgcgcgycggcacagaggcagcggctttgtgagctgattatgctggcaagcggaaaagagcaaatgtggcttctaacatctgccgctttgtctcacaaaccctaatg

SEQ ID NO: 548552 - DNA, 201 bp, Homo sapiens
tggagatcaaagatctgcagtccgagtttcagctggagaagatcgattacttggccaccatccgccggcaggagcgtgactccatgctcttgcagcagctyctggagcaggtgcagcccctgattcgcagggactgtaactacagcaacctggagaagattctgcgtgagtcctgctgggacgaagataacggcttctgga

SEQ ID NO: 548553 - DNA, 201 bp, Homo sapiens
ccagctgtttttggtggtgtttttgtttgtttgttttcttttacttttctttctttttttttttgagacaggattttattttgctgcccaggctagaatgyggtggcatgatcacagctcactgcaaccttaacctcctaggctcaggtgatcatcccacctcagcctctgaagtagctgagaccacaggcatgcaccacc

SEQ ID NO: 548554 - DNA, 201 bp, Homo sapiens
ttctgcactttactgtcaccgtgtcttcatgaccatgtgtggtggcctggctcatgccattttccaaccggtccttgacaattggtttccagtttcccagygctgcaagtcatgccacgatggacatctgtgtgcacaaagctttttctcatctgagagtcatttcctcagactcggttccctgcaatggagtcctggagc

SEQ ID NO: 548555 - DNA, 201 bp, Homo sapiens
tctcacgacagtcttagagacaggcactagaatcctcattttatagacgaggaaacagaggctctgagaggtaaagtgatttgcttgttcaaggtctcacygccgctaattggtggagctgggatttgaacccgggtctccgtgatgtctgggttttcccatgaatgctgcagctgcctccaagctgtggtccatcatgac

SEQ ID NO: 548556 - DNA, 201 bp, Homo sapiens
gatccgcctgccttggcctcccaaagtgctgggattacaggcgtgagccactgctcctggcctatgtcttcacctcttgttcctgcttcccttggtatgcwaactgaaggctttctccacatggccggaaggatggctgctggccattggtgatccaaaaggaagagaggcctggtctgttaaagcaactgtccccagtct

SEQ ID NO: 548557 - DNA, 201 bp, Homo sapiens
catccatgaacatgggataccattagcagatcctaagcaggggagacacctgggtgggcactatggctgtgtcagagagaggttggggccagagtgagaayagaggtgagaaccaggtggctgtttggacgagagctggcagtgatagcaaagatggagagaagtgggtgaataaaaacatattttgtcattgatgggttg

SEQ ID NO: 548558 - DNA, 201 bp, Homo sapiens
atcacttgggtctcaggtcaagttgaggagcttagatttcatccatgaacatgggataccattagcagatcctaagcaggggagacacctgggtgggcacyatggctgtgtcagagagaggttggggccagagtgagaatagaggtgagaaccaggtggctgtttggacgagagctggcagtgatagcaaagatggagaga

SEQ ID NO: 548559 - DNA, 201 bp, Homo sapiens
agggccaaatcacttgggtctcaggtcaagttgaggagcttagatttcatccatgaacatgggataccattagcagatcctaagcaggggagacacctggrtgggcactatggctgtgtcagagagaggttggggccagagtgagaatagaggtgagaaccaggtggctgtttggacgagagctggcagtgatagcaaaga

SEQ ID NO: 548560 - DNA, 201 bp, Homo sapiens
tggttgaaaacccccaaaagaagcaaaagccaaagccccaggggtctcctcaggagaataaaatgggagactcgtctctccaaacccaagaagaagaaatmtttcccaaggaggagcaggctagtggtgatcctggggagacagctggcagcatgtcttcccaaggtggaggctgggtgcggtggctcactcctgtaatcc

SEQ ID NO: 548561 - DNA, 201 bp, Homo sapiens
agcaactggcggcccttgccctggtgtcagaagacagcagctgtagagggctgtgaggaaggagggtgctgctgagagagctcacacaccattcacacccrttcacacccattcacacccttccctgggcaagtgtgtcctgcccttggctgtctcccaggagtcctcatcctggagtagtgaaatggttgaaaaccccca

SEQ ID NO: 548562 - DNA, 201 bp, Homo sapiens
gctgggattacaggcgtgagccactgcacccagccaaaaatttgtacctctaaaggacaaaactctaaacgtttttgagcattttggacataaatagtctyaacaatgtattgtgcatgtccctgcctgattaaatattgtgcgctgagtgtattgaacatttttcacaacccagggttcttctcatcatgccagtggcct

SEQ ID NO: 548563 - DNA, 201 bp, Homo sapiens
gctcttagcagctgtgtgaccttggacaagttccatgccctctctgaacctcagtctacccatctgtaagatgaacccaataatagcacctgcttcctggkgctcctgtgcagctgaggggaaccctcggtgggtgggcattgagcacccagtgcctggcactgattgccctcgatacatagggctcacccgaggccctcg

SEQ ID NO: 548564 - DNA, 201 bp, Homo sapiens
ctctgaggagctgcctggtcatggaacctccctgggcctcagtaacactgtgggcattgctttgaggttcaagtgtatctaaaaatgtactaaagaatgcrtggttacatctgaattattctccgtccccttctctccctccctaggagcctaaatcagtgctgtccatgccagtttctatttgccaaagggatctggaga

SEQ ID NO: 548565 - DNA, 201 bp, Homo sapiens
tgtgtgtgcgtgtgtgtgtgcgtgtgtgtatgcgtgtgcgtgcatgtgcatgtgtgcctgagggtgcatgtgtgtctgtgggtgcatgtgtatgcatgtgygcacatgtgtgcctgcatgtgtgtgcctgcatgtgtgtgtgcgcatatatgtgtgtttccatccacgtattgctaaggtgaggcctgggtttaaccaggg

SEQ ID NO: 548566 - DNA, 201 bp, Homo sapiens
attccagaaccattcagggaaagggaggagccccctctgtgtagggaagagggcacgggccaggagccgggttccggtccccagtctgaaccaggggtttrgaccagaagattcctagggtccgtccagccttctgcaagtccatccttatgggctctgtgaccttgggcaggttgtttgagctctctgagcctctgtctc

SEQ ID NO: 548567 - DNA, 201 bp, Homo sapiens
accacctcccactggggtccgtcctcaggccccagaagcccctgttgggctgtgggtacctggggcccagcctctggggcagacaggagaaggactgtggrgatctctgtcctgtgggccggaggcgtgggagaaatccatccaagagcctcgggcgctgcacgtgacgggcggggcctgtgctgtttggggagaggctcg

SEQ ID NO: 548568 - DNA, 201 bp, Homo sapiens
cagagcaaagaccccgtctcaaaaaacaaaacaaaacaaaacaaaaactggctacagccagttcactgctgccctccagactgagtttctgcacgcccccscaacgggtctcctcgtgcctaaccctggttcccctcagtgcactctccacgcagcagccagggagagcctgttcaaatgcaaggcctgtgactgccctgt

SEQ ID NO: 548569 - DNA, 201 bp, Homo sapiens
ttggcggctggaggttccgcccctgactgttcctcctccctcagctgaaggagcacccagagaagggcgtgtacgtgaaggggctgtccatgcacacggtrcacagcgtggcccagtgtgagcacatcatggagactggctggaagaaccgttcggtcggctacacgctgatgaacaaggattcctcacgctcgcactcca

SEQ ID NO: 548570 - DNA, 201 bp, Homo sapiens
gaggctgagatgggagggtcactggaggtcaggagttcaagaccagcctggccaacatggtgaaatgccgtctctactaaaaaaaatacaaaaattagtcyggcgtggtggcgcatgctgtaatcccagctactcaggaggctgaggcaggagaatcccttgaacctgggaggtggaggttgcagtgagctgacatcacgc

SEQ ID NO: 548571 - DNA, 201 bp, Homo sapiens
gggaggcagaggttgcagtgagctgacacagtgccactgcactccagcctgggtgacagagtaagactttttctaaaaaaaaaaaaaaaaaaaaaaaaaaagagcaaatttgagttctatatattgaggttatttaagagacagaatgggtggggcggggggaataggattaattgagtgcctggcattgtgcccatgttg

SEQ ID NO: 548572 - DNA, 201 bp, Homo sapiens
gggattacaggcgcccatcaccacacctggctaatttttgtacttttagtagagatggggtttcgccatgttggccaggttggtcttgaactcctggtctyaggtgattcattggcctcggcctcccaaagtgttgggattacaggtgtcagccaccgcactttttctttgtttgtttttgtttttgtttttgagacggag

SEQ ID NO: 548573 - DNA, 201 bp, Homo sapiens
cgggaggcagaggttgcagtgagctgacacagtgccactgcactccagcctgggtgacagagtaagactttttctaaaaaaaaaaaaaaaaaaaaaaaaaaagagcaaatttgagttctatatattgaggttatttaagagacagaatgggtggggcggggggaataggattaattgagtgcctggcattgtgcccatgtt

SEQ ID NO: 548574 - DNA, 201 bp, Homo sapiens
tcctgcctcagcttcccgagtagctgggattacaggcgcccatcaccacacctggctaatttttgtacttttagtagagatggggtttcgccatgttggcyaggttggtcttgaactcctggtctcaggtgattcattggcctcggcctcccaaagtgttgggattacaggtgtcagccaccgcactttttctttgtttgt

SEQ ID NO: 548575 - DNA, 201 bp, Homo sapiens
tcgggaggcagaggttgcagtgagctgacacagtgccactgcactccagcctgggtgacagagtaagactttttctaaaaaaaaaaaaaaaaaaaaaaaaaaagagcaaatttgagttctatatattgaggttatttaagagacagaatgggtggggcggggggaataggattaattgagtgcctggcattgtgcccatgt

SEQ ID NO: 548576 - DNA, 201 bp, Homo sapiens
gggcgtcactgagggctacaatggcaccatctttgcctacggccagacaggcagcgggaagtccttcaccatgcagggcctgccggatccgccctcccagrgaggcatcatccccagggccttcgagcacgtgttcgagagcgtccaggtacgggcctcgcagagggaaggggcagggccagagctgcagctgggcccaga

SEQ ID NO: 548577 - DNA, 201 bp, Homo sapiens
gagtctgtgggttagggagccctgtcccgagccctgctgtgcctgctccactgagcacggggtcctgccttcctcccatgcagggcgtcactgagggctayaatggcaccatctttgcctacggccagacaggcagcgggaagtccttcaccatgcagggcctgccggatccgccctcccagagaggcatcatccccaggg

SEQ ID NO: 548578 - DNA, 201 bp, Homo sapiens
ccacgtggaccacgtcaccgagcagatctacaacgagatcgcctatccgctggtggaggtgagggcgcccggcaggccgccctgcaggcggcagggcatgrggccgccccgagagtccccagggggctgcgctgccccccagccaggaggaaaggccctcgaggggcgcaggcggacgggaacaggtaggtccggaggctt

SEQ ID NO: 548579 - DNA, 201 bp, Homo sapiens
caatttgaacaccccaggggagcaaaaggagaggaagctttaaatctccctacatttatagaggaagaagacagtttggactcaagtgtgggctgggcacsgggcctgcagcaggctctcagcagggcgtagatggagcagccggggcagccctggctaggaagtgactctggggtgggacccaggcgtgaaggagggacg

SEQ ID NO: 548580 - DNA, 201 bp, Homo sapiens
gcagatgagggtcttctctggtgcctgagcccctcctgctgtctgtttcttaaaattatcccttggcttgggctgggaagtgtcctcccctgtttaagccygagccaggcctgacccccacctccacctgtgccctcctctaggccttgcaccaggcagcagtgacttcagcttttgttttctcatagcagtttcaactgg

SEQ ID NO: 548581 - DNA, 201 bp, Homo sapiens
ggcgtggtgtctcacgcctgtaatcccagcactttgggaggccaaggcgggtggatcacgaggtcaggagatcgaaaccatcctggctaacacagtgaaamcccgtctctactaaaaatacaaaaaaattagctgagcgtggtggcggatgcttgtagtcccagctacttgggaggctgaggcaggagaatggtgtgaacc

SEQ ID NO: 548582 - DNA, 201 bp, Homo sapiens
catcgagatgtctgccgtgggtatgcgaggccattgttgggggcagggggacagatgacccagccactcccactagccaaggcacgccacctctcggggcygcaggagcccctggaaagtgggaagagatgctctaacagcctggaggaaacccaagaggacccttgggatgctgggacccgtgttcccaggataaacagc

SEQ ID NO: 548583 - DNA, 201 bp, Homo sapiens
tgtggttggaggctcaggccccggtggccctggtggctcagcctgagcccctgccggccacagctggtgtgaagagggagagcgtgggcatggaggtggcrgtgctgactgatgacccgctgcccgttgtggaccagcagcaggtgctggcccggtaagcagcagagcatggggctggcgggaccccacggtgaggtggga

SEQ ID NO: 548584 - DNA, 201 bp, Homo sapiens
gcttctctaaggttgtaggaagcagtggagctgggctttgaacccagacttgtctggcttgagatcccaggctgcctcagtctgatgctttaaaaccccarctccccagcccagcctctttggatgcagacatagttgctgggtctgagacctcagccagagcagcctcgcagagcctggggtcccagctgcagggccagg

SEQ ID NO: 548585 - DNA, 201 bp, Homo sapiens
aaccctggcttttcctgatgtgaaacctgatgccaggcaggacgagctatcccggggctaggcctggatgtatccgctgctggacccctgccactcacctmccacctcccactggggtccgtcctcaggccccagaagcccctgttgggctgtgggtacctggggcccagcctctggggcagacaggagaaggactgtggg

SEQ ID NO: 548586 - DNA, 201 bp, Homo sapiens
ctcttggcttacttataggttctgtattgtttgaataacaaaaaaggaatactgaaagctgggtttcaaaatgatgataaaatgctgcctgccctctggtycctcccacccccccaggagtatgaagagcgcctggcccggctgaaagccgactataaggccgagcaggagtctcgggccaggctggaggaagacatcact

SEQ ID NO: 548587 - DNA, 201 bp, Homo sapiens
accttctgctaacccgcactggagcagcagggagccctcctccccttcgtcactaccctggaccctagaaaggcctcagttacccgggcctagaggggccraaggctggcagctgctcacacttgctgcagctgagccatgggtctcaggcctattgaaccagctgccttgggggctgcagtgacagatgcgcttgctgaa

SEQ ID NO: 548588 - DNA, 201 bp, Homo sapiens
tgagagccaggcagcccgtttgaccagcgggtgagtgtggtgttggcctcctggaaaaagctgtcacctggggcacctctcatctgagtgcctcccaacayccctgggaagcagcgggtcagacgatgcctgatttccagaggcggagctgatccccagagcgggacttccacagccaggcatggcgggggcccccccact

SEQ ID NO: 548589 - DNA, 201 bp, Homo sapiens
gggggcggatcacgaggtcaggagatcgagaccatcctggctaacatggtgaaaccctgtctctactaaaaatacaaaaaaaattagccaggcatggtggygggtgcctgtactcccagctactcgggaggccgaggcaggagaatggcatgaacctgggaggcagagctttcagtgagctgagatcgcaccactgcactc

SEQ ID NO: 548590 - DNA, 201 bp, Homo sapiens
gaagggacaggcaggtggggcccagcgggaagggcagggctgccgctggggtccaacgcgatatcaccgtaccttcaccgtgggtttggtcctgagaaagytgaagctcaaagagatgccaggacttgcccaaggtcacacagcaaagagtctgagccaggatttgaacttgagttcttgactccagactgcattcaatgc

SEQ ID NO: 548591 - DNA, 201 bp, Homo sapiens
tgttggtcaggctggtcttgaactcctggcctcaggtgatccgcctgccttggcctcccaaagtgctgggattacaggcgtgagccactgctcctggcctrtgtcttcacctcttgttcctgcttcccttggtatgctaactgaaggctttctccacatggccggaaggatggctgctggccattggtgatccaaaaggaa

SEQ ID NO: 548592 - DNA, 201 bp, Homo sapiens
aatttctgtttctcccccagccctgctgtccaggcaggtgcccccagaccctgtgcaggtggaggagaagctgttgccccaacctgtgatccagcatgacrtggaggccgagaagcagctgatccgggaggtgagacccaagcgggtgggaacatggagaagggacaggcaggtggggcccagcgggaagggcagggctgc

SEQ ID NO: 548593 - DNA, 201 bp, Homo sapiens
tgctccataaatatttgttggatgactaacagccttttacatggagatgtgtttgaaataagctgaatactttaaagtcttcttgaatgaccatgaggtcrtctttttatagatttctgcttagttcctgcacacaatgtgcccctcatcctggctgctaatttctgtttctcccccagccctgctgtccaggcaggtgcc

SEQ ID NO: 548594 - DNA, 201 bp, Homo sapiens
ggatggcttagccatggactgggccccagctcaaggctgactgtgagctgtgaagtgccaccctttctttagaggccagtccctgccccgaattgctgtgttttccggtctcctcttacttttgagcctctctgttagcaaagcaaacacattccataataaggatttaatccttagccacagctgtttacctatctggag

SEQ ID NO: 548595 - DNA, 201 bp, Homo sapiens
ctcagtctgatgctttaaaaccccaactccccagcccagcctctttggatgcagacatagttgctgggtctgagacctcagccagagcagcctcgcagagsctggggtcccagctgcagggccagggcctctggctgggcaggggggcgggagtggggtgggccaggctctccatcctacccacttggggcattttctctc

SEQ ID NO: 548596 - DNA, 201 bp, Homo sapiens
gtgctgtgggtcagtgttactgtggagagctggttttccactttcctcccgcctaaggattaaagaaggggccaaggctggatccttttcatgcccctccmttggcacctagaccctcaaccccctctggccctcattcaaaggtactcacagtcataaataccaagggaaagtagatggttcggtggcccatcttgccgg

SEQ ID NO: 548597 - DNA, 201 bp, Homo sapiens
ataaatatataagtaaaaaaattgcaacccttctaactgcttctgactcccaagcaccctccctacttgctttttcttctcagtacacatcgccttgtaaygtgttacccattttgcttatttattttgatgggaggtgcttaggcagggctggagtggagagggcctcgaacaccaccacgaggcatttcaccttgtcca

SEQ ID NO: 548598 - DNA, 201 bp, Homo sapiens
gggatggcttagccatggactgggccccagctcaaggctgactgtgagctgtgaagtgccaccctttctttagaggccagtccctgccccgaattgctgtgttttccggtctcctcttacttttgagcctctctgttagcaaagcaaacacattccataataaggatttaatccttagccacagctgtttacctatctgga

SEQ ID NO: 548599 - DNA, 201 bp, Homo sapiens
gaggatcacttgagcctgggagttcgaggctggaatgagccatgattatgccattgcactccagcctgggggacagagtgagaccctgtctcaaaaacaamacaaaacaaaaaagcattgagaacagtttggaaaggtcttcaccggcaagtaattatcacagtgttgtaccattggattctcttggcttacttataggtt

SEQ ID NO: 548600 - DNA, 201 bp, Homo sapiens
ttgtagactgtcgggaattatccagcacagaaggagaagtcgaggttataggaaggagggggcggattgcaagcacaaggtcctggagctgggtggcgtgrgttcagaggaggtggagcttccgggtagatctccaggtgggtgggaaggtgagggagtcctgtacctccctgttctctgtgacttaccaggcaggggatg

SEQ ID NO: 548601 - DNA, 201 bp, Homo sapiens
tggtgtgaacctgggaggcagagcttgcagtgagccgagatggcgccactgcactccagcctgggcgacagagcgagactccgtctcaaaaaaaaaaaaawtttttttttgctgatggtggcatgcccatagtcccagctatttgggaggctgaggcaggaggatcacttgagcctgggagttcgaggctggaatgagcca

SEQ ID NO: 548602 - DNA, 201 bp, Homo sapiens
gctgatctgaataattctggtgggcgttggggttgaggggctgttcctggttgtctctgcctggccctgggcctgttcagggcagggggaatcttggcttsgtgtgagagttacatacagcaggtggcttggggtgtggactcgggttcggctggtttatataccaaagatggactcactgactcgtggtttacggtttct

SEQ ID NO: 548603 - DNA, 201 bp, Homo sapiens
atgtaagtggaccagtttcaggcacggctggatctaggggctgaaacagtcagggtctgtgtctgtcttcacctctttttttttttttgagacggagtctygctctgttacccaggctggagtgcagtggtgcaatctcggctcacggcaagctccgcctcccaggttcacaccattctcctgcctcagcctcccaagtag

SEQ ID NO: 548604 - DNA, 201 bp, Homo sapiens
aaatgggtatcagtgcatgaattcaaacatccttcttttatttttatttatctatttatttatttatttattttgagacagagtctcactctgtcgcccakgctggagtgcactggtgtgatcttcaccttcacctcccgggttcacgtaattctacctcagcctcctgaacagctgggattacaggcgtgtgccagcaga

SEQ ID NO: 548605 - DNA, 201 bp, Homo sapiens
ctatttaaaacaaacaaacaaacaaacaaacaaaagaaatggaacattgttaatccagttgaaacccctgtgcaccagcctctctgtggctgtcctgcccrcccatgtcctgccagctgttctcaaatgggtatcagtgcatgaattcaaacatccttcttttatttttatttatctatttatttatttatttattttgag

SEQ ID NO: 548606 - DNA, 201 bp, Homo sapiens
ctggggctcctgtgcagctgaggggaaccctcggtgggtgggcattgagcacccagtgcctggcactgattgccctcgatacatagggctcacccgaggcyctcgccactttgcctggtctgtgtgcagatgagcggggcaaggaccacctccgggcgggcaagctgaacctggtggacctggcgggcagcgagcggcagt

SEQ ID NO: 548607 - DNA, 201 bp, Homo sapiens
attatttcgagacagagtctcgctctgtcgcccatgctagagtgcagtggtgcgatctcggctcactgaaagctctgcctcccgggttcagccattctcckgcctcagcctcccaagtagctgggactacaggcacccgccaccaagcccggctaattttttgtatttttagtagagacggggtttcactgtgttagccag

SEQ ID NO: 548608 - DNA, 201 bp, Homo sapiens
ctgtcccgagccctgctgtgcctgctccactgagcacggggtcctgccttcctcccatgcagggcgtcactgagggctacaatggcaccatctttgcctayggccagacaggcagcgggaagtccttcaccatgcagggcctgccggatccgccctcccagagaggcatcatccccagggccttcgagcacgtgttcgaga

SEQ ID NO: 548609 - DNA, 201 bp, Homo sapiens
tcagcttttgttttctcatagcagtttcaactgggccacagaacaaaccagcccgcaaaacctctgcagcagacaatggcgagccgaacatggtgaggacygcgggagagggagtggggtgtcgggggctgggagggctttgcccccagtgctgtgggtcagtgttactgtggagagctggttttccactttcctcccgcc

SEQ ID NO: 548610 - DNA, 201 bp, Homo sapiens
tcccgccctgacctgccactgtggtcaagtgcacaggcagggagttgggcaggaatcctggttgtgaccctgagcaagcagcgtcctgtcgccgagcctcrgtttccctccctgtgaagtggggttgttggaaggatctggggggcccacgcatagcctggagcctgctggatggcacgtgctcggtgatgggcagatatt

SEQ ID NO: 548611 - DNA, 201 bp, Homo sapiens
cggcaggagcgtgactccatgctcttgcagcagctcctggagcaggtgcagcccctgattcgcagggactgtaactacagcaacctggagaagattctgcrtgagtcctgctgggacgaagataacggcttctggaagatcccacatcccgtcatcacaaaaaccagcctcccagtaggtcaggagcttggctggcccttg

SEQ ID NO: 548612 - DNA, 201 bp, Homo sapiens
ttaaaaaattagctgatggtggccgggcgtggtgtctcacgcctgtaatcccagcactttgggaggccaaggcgggtggatcacgaggtcaggagatcgaraccatcctggctaacacagtgaaaccccgtctctactaaaaatacaaaaaaattagctgagcgtggtggcggatgcttgtagtcccagctacttgggagg

SEQ ID NO: 548613 - DNA, 201 bp, Homo sapiens
tcctcagttcccaagggcgagtcgtccctgctccctggcctcttaaccctgggctgtcccaggctggtcctctgctgtcctctctctgcactcgctgctcrggtggcttcgcctgggtccctggtgttatcaccacctctgcattcctgacttcccaaatgcaccctgcagcctggccatgcaatttgtgtttgtgtcttt

SEQ ID NO: 548614 - DNA, 201 bp, Homo sapiens
gccaccacgcccggcctacaaaatttttttaaaaaattagctgatggtggccgggcgtggtgtctcacgcctgtaatcccagcactttgggaggccaaggygggtggatcacgaggtcaggagatcgaaaccatcctggctaacacagtgaaaccccgtctctactaaaaatacaaaaaaattagctgagcgtggtggcgg

SEQ ID NO: 548615 - DNA, 201 bp, Homo sapiens
gaagcccttggcatccttatctcactgaatctccagcctgacccaggaggtagctgataaccccatttttgagatagggaggttgagactgagcctttatyggccaagttgagactggactctgaattcatcccggcatccaggctgcaggtgagaattacctggcgaccatttgtggcagtgcacggggaatggcggatg

SEQ ID NO: 548616 - DNA, 201 bp, Homo sapiens
ttattattattattattattatttcgagacagagtctcgctctgtcgcccatgctagagtgcagtggtgcgatctcggctcactgaaagctctgcctcccrggttcagccattctcctgcctcagcctcccaagtagctgggactacaggcacccgccaccaagcccggctaattttttgtatttttagtagagacggggt

SEQ ID NO: 548617 - DNA, 201 bp, Homo sapiens
gggaggctgaggctggtggatcacctgaggtcaggagttcgagaccagcctagccaacatggtgaaactccgtctctactaaaaaaaaaaaatagccagaygtggtggtggacaactgaactgtaatcccagctacttgggaggctgaggcaggagaatcgcttgaacctgggagttggaggttgcagtgagccaagatca

SEQ ID NO: 548618 - DNA, 201 bp, Homo sapiens
cttgtgatcctcctgcctcagcctcccagagtgctgggatttcaggcatgagccaccacgcccggcctctattttattttattttattttatttattattattattattattattattattatttcgagacagagtctcgctctgtcgcccatgctagagtgcagtggtgcgatctcggctcactgaaagctctgcctccc

SEQ ID NO: 548619 - DNA, 201 bp, Homo sapiens
cagatgtggtggcatgcacctggagtccctgctactcaggaggctgaggactggaagagagggaggactgggaggtcgaggctacagtgaaccaagatcaygccactgcactccagcttggtgacagagtgagaattttatggcatatgaattatatgaattatgtctcaagaaaactgtcacaaaaattatcgtgctggg

SEQ ID NO: 548620 - DNA, 201 bp, Homo sapiens
atacaggatccaccccaagcccacactaaggtctagaatttgcaagctcatgagctctgcaagggcaggaactgtgtctgcctcgttcaccactttgtccrtaggctgagcatagtccctgtcgaatgaatagaaacagcgatgaatgaagaatgactttgggaatgactttgggaacagcaccgggtttgcctcctctct

SEQ ID NO: 548621 - DNA, 201 bp, Homo sapiens
gaacctccctgggcctcagtaacactgtgggcattgctttgaggttcaagtgtatctaaaaatgtactaaagaatgcatggttacatctgaattattctcygtccccttctctccctccctaggagcctaaatcagtgctgtccatgccagtttctatttgccaaagggatctggagaggtgggagtatgacatggtgctt

SEQ ID NO: 548622 - DNA, 201 bp, Homo sapiens
accttgtgatcctcctgcctcagcctcccagagtgctgggatttcaggcatgagccaccacgcccggcctctattttattttattttattttatttattattattattattattattattattatttcgagacagagtctcgctctgtcgcccatgctagagtgcagtggtgcgatctcggctcactgaaagctctgcctc

SEQ ID NO: 548623 - DNA, 201 bp, Homo sapiens
ccccagccaggaggaaaggccctcgaggggcgcaggcggacgggaacaggtaggtccggaggcttttgtccaggcgggacacaaccagagcctgcctctartgtcgcctccgggtctgcactatccccagcgtctccgcctcccgggttcaagcgattctcctgcctcagcctcccaagtagctgggattacaggtgcctg

SEQ ID NO: 548624 - DNA, 201 bp, Homo sapiens
gggcactgcctccccctggtggtcaccagggagtagcgacgccgttcctggcgggtccctggagtgccacggatgggggtgccttctgccctggggatggrgtcgcctgcctccttctcgtggggcggcctagtggacactgcgtcagagtggtgctggctgacgccaccgccaccaggattccaagaaaccctgaggttt

SEQ ID NO: 548625 - DNA, 201 bp, Homo sapiens
ttgaccttgtgatcctcctgcctcagcctcccagagtgctgggatttcaggcatgagccaccacgcccggcctctattttattttattttattttatttattattattattattattattattattatttcgagacagagtctcgctctgtcgcccatgctagagtgcagtggtgcgatctcggctcactgaaagctctgc

SEQ ID NO: 548626 - DNA, 201 bp, Homo sapiens
ccagcctaacacactatttaaatggcaacttgggccgggcaaggcagctcacccctgtaatcccagcactttcgcaggccgagatgagaagattgcttgaycccaggagtttgagaccagcctggacaacatggcgagaccccatctctacaaaaaataaaagattagctgggtgtggtggtgtgtgtctgtagtcccagc

SEQ ID NO: 548627 - DNA, 201 bp, Homo sapiens
cttgaccttgtgatcctcctgcctcagcctcccagagtgctgggatttcaggcatgagccaccacgcccggcctctattttattttattttattttatttattattattattattattattattattatttcgagacagagtctcgctctgtcgcccatgctagagtgcagtggtgcgatctcggctcactgaaagctctg

SEQ ID NO: 548628 - DNA, 201 bp, Homo sapiens
attgtgagcagtgttgaatagtttttcatatgttttgtggccatttgcagtttttctccaaattatttttatttcttttgctcatttctctattagcatgkttgttctttttcttttctacatgtagaaactctttatacattaggaatattagctcttggtctgtgatataaattgtaaatttttttccagtttgtcttt

SEQ ID NO: 548629 - DNA, 201 bp, Homo sapiens
gtcaccgagcagatctacaacgagatcgcctatccgctggtggaggtgagggcgcccggcaggccgccctgcaggcggcagggcatggggccgccccgagrgtccccagggggctgcgctgccccccagccaggaggaaaggccctcgaggggcgcaggcggacgggaacaggtaggtccggaggcttttgtccaggcggg

SEQ ID NO: 548630 - DNA, 201 bp, Homo sapiens
cgcctaggcctcccaaagtgctggggttacagacatgagacactgtgcccagcctaacacactatttaaatggcaacttgggccgggcaaggcagctcacmcctgtaatcccagcactttcgcaggccgagatgagaagattgcttgatcccaggagtttgagaccagcctggacaacatggcgagaccccatctctacaa

SEQ ID NO: 548631 - DNA, 201 bp, Homo sapiens
tgctgggagtccccggcggggcgggggtcagctctggtcccggtggtcctgggcgcggcgccatggcctccgaggcggtgaaggttgtcgtgcgctgccgycccatgaaccagcgggagcgagagctgcgctgccagcccgtggtgactgtggactgcgcgcgcgcccagtgctgcatccagaacccgggcgccgccgacg

SEQ ID NO: 548632 - DNA, 201 bp, Homo sapiens
tcagaccaagagggtcctcacagggttcataaggcagtaattgggattcctaagtcactttattttcccgtctctcatattctgtctttttttttttttttctttttctaagctcagtggcaagacctatctcctatattttatagtgcaacagaaatgcatgttcttaaagcatgggtggtggtggttgttttttttttt

SEQ ID NO: 548633 - DNA, 201 bp, Homo sapiens
aacctcctgggctcaggtgatcctcctacctcagcctcccgaatagctgggactacaggcatgcaccaccatgcctggctaatttttgtattttttgtagmgacggggtttcaccatgttgcgcaggctggtcccaaactcctgggctcaagtgatcctcctgccttggcttcccaaagtgctgggattacaggcatgagc

SEQ ID NO: 548634 - DNA, 201 bp, Homo sapiens
acctcaagtgatccacccgcctaggcctcccaaagtgctggggttacagacatgagacactgtgcccagcctaacacactatttaaatggcaacttgggcygggcaaggcagctcacccctgtaatcccagcactttcgcaggccgagatgagaagattgcttgatcccaggagtttgagaccagcctggacaacatggcg

SEQ ID NO: 548635 - DNA, 201 bp, Homo sapiens
ccctgcctcaaggccccgccccccgtggccggcgctggccccgccccttggcccgggctgctgggagtccccggcggggcgggggtcagctctggtcccgktggtcctgggcgcggcgccatggcctccgaggcggtgaaggttgtcgtgcgctgccgccccatgaaccagcgggagcgagagctgcgctgccagcccgtg

SEQ ID NO: 548636 - DNA, 201 bp, Homo sapiens
aaggacagagacttcagcctcaaactcagaggacaagcagcacattctggtttcctgctggtaatcctcagaccaagagggtcctcacagggttcataaggcagtaattgggattcctaagtcactttattttcccgtctctcatattctgtctttttttttttttttctttttctaagctcagtggcaagacctatctcc

SEQ ID NO: 548637 - DNA, 201 bp, Homo sapiens
gtcgggtatgtctttatgagcattgtaaaaacagaccaatatacacacacacaagaacacacgtgccatctctttcttagataaaagtagctctagtgcaygctttcttctacctagcttttctcacacaacaatgtatagtatcctgaaggtcacagcagtatggagagatactcctcattcttttctgtttttgagacg

SEQ ID NO: 548638 - DNA, 201 bp, Homo sapiens
gaaggacagagacttcagcctcaaactcagaggacaagcagcacattctggtttcctgctggtaatcctcagaccaagagggtcctcacagggttcataargcagtaattgggattcctaagtcactttattttcccgtctctcatattctgtctttttttttttttttctttttctaagctcagtggcaagacctatctc

SEQ ID NO: 548639 - DNA, 201 bp, Homo sapiens
aacttctttttctttataaattacccagtgtcgggtatgtctttatgagcattgtaaaaacagaccaatatacacacacacaagaacacacgtgccatctytttcttagataaaagtagctctagtgcacgctttcttctacctagcttttctcacacaacaatgtatagtatcctgaaggtcacagcagtatggagagat

SEQ ID NO: 548640 - DNA, 201 bp, Homo sapiens
gctggcgggaccccacggtgaggtgggaaggggctgccttccaggatggaggcgggggtgccatagcttcctcccagctctcccttctaacttggcagggyggccctgatcctctctccaggcgcagtggggactaggcgggcagggctctgctccagacacaggctgccaccagcatcccttgtcaggcctgctggcctt

SEQ ID NO: 548641 - DNA, 201 bp, Homo sapiens
gtgaaggacagagacttcagcctcaaactcagaggacaagcagcacattctggtttcctgctggtaatcctcagaccaagagggtcctcacagggttcatraggcagtaattgggattcctaagtcactttattttcccgtctctcatattctgtctttttttttttttttctttttctaagctcagtggcaagacctatc

SEQ ID NO: 548642 - DNA, 201 bp, Homo sapiens
acgtactggtctcttccatcagtttctcattttcaggtttcagatccgtttttaggattgtcttgctccttgtggagggactgcaccctgccttccatcayctcattcctcctcgccccatgctgtcctggatgctctctgcttacctccccatggggtggctccggggctgtctgctgcacttgggggtttatctctgta

SEQ ID NO: 548643 - DNA, 201 bp, Homo sapiens
ctggtgtccctgagctggaggtgatctgtcggggctgcagcaggcggaatggccccgtctgggattgagccacctgggagctgtcggcgggggttggggcrgccttcccacctccacctgggtttctcttcacactcaggaggtagatctggcctcggaagtggccttagaggtggtgcggacagcagagcctggcgtgtg

SEQ ID NO: 548644 - DNA, 201 bp, Homo sapiens
ggggaagaatccttgtccacactcatttcaggtgttggcacaatttagtccaatgaggttggttgcgggactgaagtccccatctttttgctgactgtcgrctgtgggtcactcttggcttctagacaccgcctgcattcctgggctcctggatccctgcaaagacagccagagtgggaagcagtccctctcacgcgtgga

SEQ ID NO: 548645 - DNA, 201 bp, Homo sapiens; identical to SEQ ID NO: 380557

SEQ ID NO: 548646 - DNA, 201 bp, Homo sapiens
tttcaggctcccacatgcctcttggtatgattgtgacgagaactagagagactttgagagagctgtttgtgaagtgttaacaattctttcttctgcactcyttccctaaaattgggttttcttgatgtgttccccatttcccacctgaagtcaatgactggcacccatccaaacatggctcacctgtagatgtgcttgaaa

SEQ ID NO: 548647 - DNA, 201 bp, Homo sapiens
atgacaagtatgagcccacaaaaattatcagaagggattaagccgcctgtatttggtaatgtcaagtattttctcacactcaatccccaatccatgtgggktggggattcagagagcaaagttgctataagctattaaggtaaaaaaaaaaaagtctaggcatattatatatatatatatatatatatagacacacacaca

SEQ ID NO: 548648 - DNA, 201 bp, Homo sapiens
ccacgaagacattttccttgatcattcatataagcacatgtgtagcaatttaatattgtgcctgaaaatttaagataagcctgatgacatttccttgtggwccagatgtgtagccttgattcacatctgggaggggtaatgggcaataggtagcatggatactacacatttatttcttagttctttttggggatctgggcc

SEQ ID NO: 548649 - DNA, 201 bp, Homo sapiens
ctcatcattgactgtcagacaaatattccttaagtatattttaagtgaacagaagcacaaaacagataatttgattattactctttgattaaactgagccmcctagaggaagacaagtagactacaacaaccaagttatttaattctagccaaaagctgagaggaattattggatctttgaggctgaggtagtctaaaacc

SEQ ID NO: 548650 - DNA, 201 bp, Homo sapiens
ctttgagagagctgtttgtgaagtgttaacaattctttcttctgcactccttccctaaaattgggttttcttgatgtgttccccatttcccacctgaagtsaatgactggcacccatccaaacatggctcacctgtagatgtgcttgaaattggtgcacctgaagcctgttcccctgaagcgtgctcacctgaaggctgtt

SEQ ID NO: 548651 - DNA, 201 bp, Homo sapiens
ctgtgtatctacatttttgagtcaacttttgaaggtctaacaaagcaaaaagcaaaacctctgacagtcgacattatagaaaatacattgttttttcactraaagctcagagctcatggcctctttctgctgtaggaggcaggagggaacacagcacaccatgaatgggggatcccaaaagaagagatgatacagaaaacc

SEQ ID NO: 548652 - DNA, 201 bp, Homo sapiens
gggcggaagagttaacctttggacagggatgacaagtatgagcccacaaaaattatcagaagggattaagccgcctgtatttggtaatgtcaagtattttytcacactcaatccccaatccatgtgggttggggattcagagagcaaagttgctataagctattaaggtaaaaaaaaaaaagtctaggcatattatatata

SEQ ID NO: 548653 - DNA, 201 bp, Homo sapiens
tacagaaaacctgattgatataacacagccatgaagaagaggcttatgaagtctctggcctatagctctgtcgtgttctgaggttgttttctgaacacatyacatcttcccatctcccatctttccttggcacattaaccacacaaggatccctcacatttaattggtgggacaaaccttcattgggcttctacagaaccc

SEQ ID NO: 548654 - DNA, 201 bp, Homo sapiens
ggaattctagaacctcagaagtaacccatgtttcttcacaatgggttgggctctgaggttcttgtgtagcctgttcaggcaagttggcccttagcaacccmctgcttatttcactagtgaagaccaatgattattttctgtgtgcagggtagtgtgttggggctatctgccctatctttaaaaaaaaaaaaaaaagtatta

SEQ ID NO: 548655 - DNA, 201 bp, Homo sapiens
ccatgtttcttcacaatgggttgggctctgaggttcttgtgtagcctgttcaggcaagttggcccttagcaacccactgcttatttcactagtgaagaccmatgattattttctgtgtgcagggtagtgtgttggggctatctgccctatctttaaaaaaaaaaaaaaaagtattaccaaaaagcacatattttttgtaat

SEQ ID NO: 548656 - DNA, 201 bp, Homo sapiens
tagatgtgcttgaaattggtgcacctgaagcctgttcccctgaagcgtgctcacctgaaggctgttcacccgaggcctgctcaccagaaggctgttcaccsgagccatgttcacctgaaggctgttcatctgaaggctgttcacctgactcaagctcactcaaaggctgttctccggagaggtgttcacctgaaggctgtt

SEQ ID NO: 548657 - DNA, 201 bp, Homo sapiens; identical to SEQ ID NO: 270259

SEQ ID NO: 548658 - DNA, 201 bp, Homo sapiens
aaggaaaatgaatgtgcctccctgacaaagtcagcatcaggaagtcaggataccatccctgatagaatcagaagttcgccaccaaccctcccattcctctrtgggtgaaagacaagaagagtagagatagaagagggagagagaaagcaagtagttttcaatacctgagtatttgtaacctaaattaagggcggaagagtt

SEQ ID NO: 548659 - DNA, 201 bp, Homo sapiens; identical to SEQ ID NO: 270301

SEQ ID NO: 548660 - DNA, 201 bp, Homo sapiens
aatttaagataagcctgatgacatttccttgtggaccagatgtgtagccttgattcacatctgggaggggtaatgggcaataggtagcatggatactacayatttatttcttagttctttttggggatctgggccctgtgtctgatagacctgtgccagaggaaattccttcattcttcttcatctctgaccctcattgct

SEQ ID NO: 548661 - DNA, 201 bp, Homo sapiens; identical to SEQ ID NO: 270145

SEQ ID NO: 548662 - DNA, 201 bp, Homo sapiens; identical to SEQ ID NO: 270147

SEQ ID NO: 548663 - DNA, 201 bp, Homo sapiens; identical to SEQ ID NO: 270149

SEQ ID NO: 548664 - DNA, 201 bp, Homo sapiens
ggctggagtacagtggcacaatcttggctcactgcaacctccgcctcccgggttcaagtgatcctcctgcctctgcctcccgagtagctgggattacaggkgcatgccaccatacctggctaatttttgtatttttagtagagacagggtctcgccatgttggccaggctggtcttgaactcctgacctcaagtgatccgc

SEQ ID NO: 548665 - DNA, 201 bp, Homo sapiens
gcctgctcaccagaaggctgttcaccggagccatgttcacctgaaggctgttcatctgaaggctgttcacctgactcaagctcactcaaaggctgttctcyggagaggtgttcacctgaaggctgttctcctgaaggctgctcacctacagtatgctcaccttcagcatgttcagtcgcagcgggctcacctgaagcatgc

SEQ ID NO: 548666 - DNA, 201 bp, Homo sapiens
actttttcatctcatgcagcatcaggtataaatgttgagtggctaaaataagtagaaaccagactgtgccaagccagtgggaccctctgactgtaaagctrtgactagagaaatcaactggttcaggagctctccgagttggacttgtttagctgctcttgattctgactcagattggtttgggtgactgagagactggtc

SEQ ID NO: 548667 - DNA, 201 bp, Homo sapiens; identical to SEQ ID NO: 436198

SEQ ID NO: 548668 - DNA, 201 bp, Homo sapiens; identical to SEQ ID NO: 436199

SEQ ID NO: 548669 - DNA, 201 bp, Homo sapiens; identical to SEQ ID NO: 436201

SEQ ID NO: 548670 - DNA, 201 bp, Homo sapiens; identical to SEQ ID NO: 436200

SEQ ID NO: 548671 - DNA, 201 bp, Homo sapiens; identical to SEQ ID NO: 436202

SEQ ID NO: 548672 - DNA, 201 bp, Homo sapiens; identical to SEQ ID NO: 436203

SEQ ID NO: 548673 - DNA, 201 bp, Homo sapiens; identical to SEQ ID NO: 436204

SEQ ID NO: 548674 - DNA, 201 bp, Homo sapiens; identical to SEQ ID NO: 436205

SEQ ID NO: 548675 - DNA, 201 bp, Homo sapiens; identical to SEQ ID NO: 436206

SEQ ID NO: 548676 - DNA, 201 bp, Homo sapiens; identical to SEQ ID NO: 436207

SEQ ID NO: 548677 - DNA, 201 bp, Homo sapiens; identical to SEQ ID NO: 436208

SEQ ID NO: 548678 - DNA, 201 bp, Homo sapiens; identical to SEQ ID NO: 436209

SEQ ID NO: 548679 - DNA, 201 bp, Homo sapiens; identical to SEQ ID NO: 436210

SEQ ID NO: 548680 - DNA, 201 bp, Homo sapiens; identical to SEQ ID NO: 436211

SEQ ID NO: 548681 - DNA, 201 bp, Homo sapiens; identical to SEQ ID NO: 436212

SEQ ID NO: 548682 - DNA, 201 bp, Homo sapiens; identical to SEQ ID NO: 436213

SEQ ID NO: 548683 - DNA, 201 bp, Homo sapiens; identical to SEQ ID NO: 436214

SEQ ID NO: 548684 - DNA, 201 bp, Homo sapiens; identical to SEQ ID NO: 436215

SEQ ID NO: 548685 - DNA, 201 bp, Homo sapiens; identical to SEQ ID NO: 436216

SEQ ID NO: 548686 - DNA, 201 bp, Homo sapiens; identical to SEQ ID NO: 436217

SEQ ID NO: 548687 - DNA, 201 bp, Homo sapiens; identical to SEQ ID NO: 436218

SEQ ID NO: 548688 - DNA, 201 bp, Homo sapiens; identical to SEQ ID NO: 436219

SEQ ID NO: 548689 - DNA, 201 bp, Homo sapiens; identical to SEQ ID NO: 436220

SEQ ID NO: 548690 - DNA, 201 bp, Homo sapiens; identical to SEQ ID NO: 436221

SEQ ID NO: 548691 - DNA, 201 bp, Homo sapiens; identical to SEQ ID NO: 436222

SEQ ID NO: 548692 - DNA, 201 bp, Homo sapiens; identical to SEQ ID NO: 436223

SEQ ID NO: 548693 - DNA, 201 bp, Homo sapiens; identical to SEQ ID NO: 436224

SEQ ID NO: 548694 - DNA, 201 bp, Homo sapiens; identical to SEQ ID NO: 436225

SEQ ID NO: 548695 - DNA, 201 bp, Homo sapiens; identical to SEQ ID NO: 436226

SEQ ID NO: 548696 - DNA, 201 bp, Homo sapiens; identical to SEQ ID NO: 436227

SEQ ID NO: 548697 - DNA, 201 bp, Homo sapiens; identical to SEQ ID NO: 436228

SEQ ID NO: 548698 - DNA, 201 bp, Homo sapiens; identical to SEQ ID NO: 436229

SEQ ID NO: 548699 - DNA, 201 bp, Homo sapiens; identical to SEQ ID NO: 436230

SEQ ID NO: 548700 - DNA, 201 bp, Homo sapiens; identical to SEQ ID NO: 436231

SEQ ID NO: 548701 - DNA, 201 bp, Homo sapiens; identical to SEQ ID NO: 436232

SEQ ID NO: 548702 - DNA, 201 bp, Homo sapiens; identical to SEQ ID NO: 436233

SEQ ID NO: 548703 - DNA, 201 bp, Homo sapiens
agctccccatccaggatatcctggagaaggaccccagctgggtccttgggaaggctgctgcagagaatgggcacccagtccagtaatcctgaggaacagtmtaggcttcttgtgctggagggcctcccacctctcccaggactaaagctgcactctcatcccatccggtgggtgatgaccttcaggccaaaaggacagatg

SEQ ID NO: 548704 - DNA, 201 bp, Homo sapiens
gagcgttgagagcagcccacctccacgcttccttaacggagaggtgcaggactcagacttcaccagcccactcggtcccagccttgtacgcaaagagacgycaaggacgcgctctcccgcgtccaggcagccccagcttgctggcttgcctgcccgcctgcgtgcagcactcggccggcgtgcagcatgaccctgtggaac

SEQ ID NO: 548705 - DNA, 201 bp, Homo sapiens
actcagcgccaacccgcagaaccaggaaagtaacggctacagacagtgagaaatagtttcgctcgccggctagaaaaactctgtcggtaccaaccccagarcgttgagagcagcccacctccacgcttccttaacggagaggtgcaggactcagacttcaccagcccactcggtcccagccttgtacgcaaagagacgcca

SEQ ID NO: 548706 - DNA, 201 bp, Homo sapiens
ccaccgaacccatttctcccgccgagagcgccacacccccactttcctgtctgaatccgcttagttgcgaggtctccgaccgcgggcagcccgatgagccygcctcaccccgcagggaccccagtgcatcagctgaacgagaccattgactacaacgagcagttcacctggcgtctgaaagagaattacgccgcggagtac

SEQ ID NO: 548707 - DNA, 201 bp, Homo sapiens
atttctcccgccgagagcgccacacccccactttcctgtctgaatccgcttagttgcgaggtctccgaccgcgggcagcccgatgagcctgcctcaccccrcagggaccccagtgcatcagctgaacgagaccattgactacaacgagcagttcacctggcgtctgaaagagaattacgccgcggagtacgcgaacgcact

SEQ ID NO: 548708 - DNA, 201 bp, Homo sapiens
cttgctggcttgcctgcccgcctgcgtgcagcactcggccggcgtgcagcatgaccctgtggaacggcgtactgcctttttacccccagccccggcatgcygcaggcttcagcgttccactgctcatcgttattctagtgtttttggctctagcagcaagcttcctgctcatcttgccggggatccgtggccactcggtaa

SEQ ID NO: 548709 - DNA, 201 bp, Homo sapiens
ccctacagctgtgcacttcagtgcagaatggttcgtgggtacagtgaacaccaacacatcctacaaagccttcagcgcagcgcgcgttacagcccgtgtcsgtctgctcgtgggcctggagggcattaatattacactcacaggtgagggggctggggctaaatgaactcctggagctgggagatccccggttaggtgagt

SEQ ID NO: 548710 - DNA, 201 bp, Homo sapiens
tccaaccaccaccgaacccatttctcccgccgagagcgccacacccccactttcctgtctgaatccgcttagttgcgaggtctccgaccgcgggcagcccsatgagcctgcctcaccccgcagggaccccagtgcatcagctgaacgagaccattgactacaacgagcagttcacctggcgtctgaaagagaattacgccg

SEQ ID NO: 548711 - DNA, 201 bp, Homo sapiens
tctttggtgcagctcaccctgcggtctgagggcttcgacacctaccgctgcgaccgcaacctggccatgggcgtgaacctcaccaggtgagcctcgcggcsccgggaagccggccccggcccgcctgcacctccggtgcttggcgggagcgctttcgagcctagccctcattggctggcgtgggccatccgcgccttctca

SEQ ID NO: 548712 - DNA, 201 bp, Homo sapiens
tctgagggcttcgacacctaccgctgcgaccgcaacctggccatgggcgtgaacctcaccaggtgagcctcgcggccccgggaagccggccccggcccgcmtgcacctccggtgcttggcgggagcgctttcgagcctagccctcattggctggcgtgggccatccgcgccttctcattggcctgccacgcagtggggtgg

SEQ ID NO: 548713 - DNA, 201 bp, Homo sapiens
gtggggcccagctgagcgcgcggttcggaaaagcccgcgctggctgctgcgcgaacctgctttttcgcgccaaagtcacaaagcgggtggtggcgggaaartcaagggtttttccgcagtgccaggaacactgttccagggctctttgctcactaaatcctgttggccttgaatggacgctttagctgtggctttcttgtt

SEQ ID NO: 548714 - DNA, 201 bp, Homo sapiens
ctttagttggcttatctcgtttaatccacacatggcttggaagtgggtatgatttgaattttacagttaagatcttcctcagtggtttgtttgtttgttcgtttgtttgtttgttttgtgacggagtctcgctctgtcgcccaggctggagtgcagtggcatgatctcgactcactgcaacctctgcctcccgggcgcaaa

SEQ ID NO: 548715 - DNA, 201 bp, Homo sapiens
tttagttggcttatctcgtttaatccacacatggcttggaagtgggtatgatttgaattttacagttaagatcttcctcagtggtttgtttgtttgttcgtttgtttgtttgttttgtgacggagtctcgctctgtcgcccaggctggagtgcagtggcatgatctcgactcactgcaacctctgcctcccgggcgcaaac

SEQ ID NO: 548716 - DNA, 201 bp, Homo sapiens
cataaagctggggcttgacgagccgggaccgggacccgatctccacatatgcccggacttgttctgcggccgggttcaggagtcaaagaggcggggagacstgcgcgacgctgccccgccctgcgcccgcttcctccaatgtatgctctagggggcgggcctcgcggggagcatggacacgattggccctaaagtcttccc

SEQ ID NO: 548717 - DNA, 201 bp, Homo sapiens
ttagttggcttatctcgtttaatccacacatggcttggaagtgggtatgatttgaattttacagttaagatcttcctcagtggtttgtttgtttgttcgtttgtttgtttgttttgtgacggagtctcgctctgtcgcccaggctggagtgcagtggcatgatctcgactcactgcaacctctgcctcccgggcgcaaaca

SEQ ID NO: 548718 - DNA, 201 bp, Homo sapiens
tagttggcttatctcgtttaatccacacatggcttggaagtgggtatgatttgaattttacagttaagatcttcctcagtggtttgtttgtttgttcgtttgtttgtttgttttgtgacggagtctcgctctgtcgcccaggctggagtgcagtggcatgatctcgactcactgcaacctctgcctcccgggcgcaaacaa

SEQ ID NO: 548719 - DNA, 201 bp, Homo sapiens
ttttgtttgttttttgttttttttttttagacagtttccctcttgttgctcaggctggagtgcaatggtgtgatctcggctcactgcaacctccgcctccyaggttcaagcaattctcctgtctcagcctcccgagtagctgggactacaggcgcccgccaccacagctggctaatttttgtatttttagtagagacaggg

SEQ ID NO: 548720 - DNA, 201 bp, Homo sapiens
tctaagatgccagcatatactgaagtcttttctgtcaccaaatttgtacctctaagtacatatgtagatattgttttctgtaaataacctatttttttctytattctctgcaatttgtttaaagaataaagtccaaagtcagatctggtctagttaacctagaagtatttttgtctcttagaaatacttgtgatttttata

SEQ ID NO: 548721 - DNA, 201 bp, Homo sapiens
tggtccagggctccatcctcaagaaggtgttggaggcactcaaggacctcatcaacgaggcctgctgggatattagctccagcggtgtaaacctgcagagmatggactcgtcccacgtctctttggtgcagctcaccctgcggtctgagggcttcgacacctaccgctgcgaccgcaacctggccatgggcgtgaacctca

SEQ ID NO: 548722 - DNA, 201 bp, Homo sapiens
agacggcctgatgggtgagagtggtaaccccttctaaccgcgttcgaaatacagcccttcagcagacggcgttgattttaaagcatgtgtctcctgtcttytagtatgtccaaaatactaaaatgcgccggcaatgaagatatcattacactaagggccgaagataacgcggataccttggcgctagtatttgaagcacca

SEQ ID NO: 548723 - DNA, 201 bp, Homo sapiens
tttctatccagaagggacactgctggtggtattttagtataaatactgccagatgcgtcccaaaacgtctgcattaataatggcatcctccagcagtccgyttaccctccaccagttctgagacggcctgatgggtgagagtggtaaccccttctaaccgcgttcgaaatacagcccttcagcagacggcgttgattttaa

SEQ ID NO: 548724 - DNA, 201 bp, Homo sapiens
gatcacctcaggtcaggtgttcaagaccagcctggccaacatggtgaaaccccgtctctactaaaaaaaaataataataataatacaaaaattagccgggsgtggtggtaggcacctgtaatcccagatactcgggaggctgaggcaggagactcacttgaacctgggaggcggaggttgcaatgagctgagatcgcgcca

SEQ ID NO: 548725 - DNA, 201 bp, Homo sapiens
ttaaaaattagccaggtacagtggtgcacccctgtagtcccagctatttgggaggtggcaagaggatctctcgagcctagaagttggaggtggcagtgagyagtcatcttgccactgcactccagcctgggtgtcaaagggagactcccctctctagaaaataataaaaaaaaaagtttgacagttttcttgcttgtgcta

SEQ ID NO: 548726 - DNA, 201 bp, Homo sapiens
aattctaaggcttttgatacacatttctaagtttccaccagaaaaattataccaatgtatactcccacttgcaatgtatttaagtgcctacttccttgaakccttcctaacacaccaggtgttaacatgatttttattaatttggtaggttaaaattctgtctccattgaatttacatttctttgcttattaatgtggcta

SEQ ID NO: 548727 - DNA, 201 bp, Homo sapiens
gccctgtaagtgatgtaaaacacatataacactgcgtccccaacttaagcatactgtaatctcacaatgagacacttgcacacaaaagaattgcaatttcrttttttaaaaaaatataattttacatttttcttcttttcaatttttaaattttaattaatttatttctcctttttttagagacagggtctcactatgttg

SEQ ID NO: 548728 - DNA, 201 bp, Homo sapiens
agtacagctgtgtagtaaagatgccttctggtgaatttgcacgtatatgccgagatctcagccatattggagatgctgttgtaatttcctgtgcaaaagayggagtgaaattttctgcaagtggagaacttggaaatggaaacattaaattgtcacagacaagtaatgtcgataaagaggaggaagctgtaagtagttttt

SEQ ID NO: 548729 - DNA, 201 bp, Homo sapiens
gaaacattaaattgtcacagacaagtaatgtcgataaagaggaggaagctgtaagtagtttttaagtaaaaagaaaatagtttgaagagaattataatacygcttattaggttaattgctaaaattaaaagtagacagaattggatcccaagtaatttctgaaaattgagatactgttgaaatctgcgaatgatttataag

SEQ ID NO: 548730 - DNA, 201 bp, Homo sapiens
aaccagttcaactaacttttgcactgaggtacctgaacttctttacaaaagccactccactctcttcaacggtgacactcagtatgtctgcagatgtaccscttggtaagataataaatttgaaccttgttttgtaggtagtcatatgtgatacatactcctcagtaattaaccatcttcctgtctttcagttgtagagta

SEQ ID NO: 548731 - DNA, 201 bp, Homo sapiens
ttagacagtttccctcttgttgctcaggctggagtgcaatggtgtgatctcggctcactgcaacctccgcctcccaggttcaagcaattctcctgtctcarcctcccgagtagctgggactacaggcgcccgccaccacagctggctaatttttgtatttttagtagagacaggggttttaggtcaggctggttttgaatt

SEQ ID NO: 548732 - DNA, 201 bp, Homo sapiens
tattgttttctgtaaataacctatttttttctctattctctgcaatttgtttaaagaataaagtccaaagtcagatctggtctagttaacctagaagtatwtttgtctcttagaaatacttgtgatttttataatacaaaagggtcttgactctaaatgcagttttaagaattgtttttgaatttaaataaagttacttga

SEQ ID NO: 548733 - DNA, 201 bp, Homo sapiens
gtggctcatgcctgtaatcccagcactttgggaggccaaggcaggcagatcacatgaggtcaggagttcaagaccaacctggccaacatggcaaaaccccrtctctactaaaaatacaaaaattagccaggtgtgatggcgcatgcctgtaatcctagctattcaggaggctgaggcatgagaattgcttgaacccaggag

SEQ ID NO: 548734 - DNA, 201 bp, Homo sapiens
tgcctgtaatcccagcactttgggaggccaaggcaggcagatcacatgaggtcaggagttcaagaccaacctggccaacatggcaaaaccccgtctctacyaaaaatacaaaaattagccaggtgtgatggcgcatgcctgtaatcctagctattcaggaggctgaggcatgagaattgcttgaacccaggaggcggagat

SEQ ID NO: 548735 - DNA, 201 bp, Homo sapiens
gaggcggagattgcggttagccaagatcacaccactgcactccagcctgggtgatagagtgagactctgtctcagaaaaaaaaaaaagaaaaagaaaaagaaaaaaaaaaagaaattctaagtgataaagcattgtgtaacagtttgaggctgggcacagtggctcatgcctgtaatctcacactttgggagaccgattgg

SEQ ID NO: 548736 - DNA, 201 bp, Homo sapiens
aggcatgagaattgcttgaacccaggaggcggagattgcggttagccaagatcacaccactgcactccagcctgggtgatagagtgagactctgtctcagaaaaaaaaaaaagaaaaagaaaaagaaaaaaaaaaagaaattctaagtgataaagcattgtgtaacagtttgaggctgggcacagtggctcatgcctgtaa

SEQ ID NO: 548737 - DNA, 201 bp, Homo sapiens
aagtgataaagcattgtgtaacagtttgaggctgggcacagtggctcatgcctgtaatctcacactttgggagaccgattgggaagattgcttgagcccaggagttggagaccagccagagcgacatagtgggaccttctctctacaaaaacatttaaaaattagccaggtacagtggtgcacccctgtagtcccagctat

SEQ ID NO: 548738 - DNA, 201 bp, Homo sapiens
gttaccagcccacactctaaccaccatactatactgcctgcctgcatttattaatacttgtgttgctccagcattgcctttggtgtttcctgttctttctrttcactgccctgtaagtgatgtaaaacacatataacactgcgtccccaacttaagcatactgtaatctcacaatgagacacttgcacacaaaagaattgc

SEQ ID NO: 548739 - DNA, 201 bp, Homo sapiens
ccagcatatactgaagtcttttctgtcaccaaatttgtacctctaagtacatatgtagatattgttttctgtaaataacctatttttttctctattctctscaatttgtttaaagaataaagtccaaagtcagatctggtctagttaacctagaagtatttttgtctcttagaaatacttgtgatttttataatacaaaag

SEQ ID NO: 548740 - DNA, 201 bp, Homo sapiens
gctctgtccacccaggctggagtgcggtggtgcagtcggttcactacagcctcaaactccagggcttaagtgatcctcctgcctcagtttcccaagtagcygggactacaggtgtgtgccaacacacctagcctggtttcccctaatttcattttcccccttccattacaatctatttgttgaagaaattagatcatttat

SEQ ID NO: 548741 - DNA, 201 bp, Homo sapiens
ttccactcctgccaacctcgtttttttctttttctgtttttctttgtttttgagacagggtcttgctctgtccacccaggctggagtgcggtggtgcagtyggttcactacagcctcaaactccagggcttaagtgatcctcctgcctcagtttcccaagtagccgggactacaggtgtgtgccaacacacctagcctggt

SEQ ID NO: 548742 - DNA, 201 bp, Homo sapiens
caagaagggaatacaaattcagcacgtgtacataccacagaacagtggtttatggatcaagtccacaccggctcttaagggtaggattgggaagttaggcgtataacctttagctttctggagatacttactctcttaccaaataattgagcataggacagcagctcaatagaaggatatggttaggagtaaaagtctacc

SEQ ID NO: 548743 - DNA, 201 bp, Homo sapiens
aattataatactgcttattaggttaattgctaaaattaaaagtagacagaattggatcccaagtaatttctgaaaattgagatactgttgaaatctgcgamtgatttataagtgtcatccaatttagaattatatttgcaagaagggaatacaaattcagcacgtgtacataccacagaacagtggtttatggatcaagtc

SEQ ID NO: 548744 - DNA, 201 bp, Homo sapiens
gacctgcgcgacgctgccccgccctgcgcccgcttcctccaatgtatgctctagggggcgggcctcgcggggagcatggacacgattggccctaaagtctyccccgcaaggccgtgggctggacagcgtggtgacgtcgcaacgcggcgcagggtgagagcgcgcgcttgcggacgcggcggcattaaacggttgcaggcg

SEQ ID NO: 548745 - DNA, 201 bp, Homo sapiens
cagtcctcttgccttagtctcctaagtggctaggaaggactacgggcctgtcccaccacacctggctaattttttcatttttgtgtgtgggcgtgggggcrgtcttgcccaggctggtctggaactcctggcctcaagtgatcctcctccgtcaagatatgttaatataatttaagcctacttcataacaactttttctag

SEQ ID NO: 548746 - DNA, 201 bp, Homo sapiens
tctaacctgggattcctgggctcaagcagtcctcttgccttagtctcctaagtggctaggaaggactacgggcctgtcccaccacacctggctaatttttycatttttgtgtgtgggcgtgggggcagtcttgcccaggctggtctggaactcctggcctcaagtgatcctcctccgtcaagatatgttaatataatttaa

SEQ ID NO: 548747 - DNA, 201 bp, Homo sapiens
cctgcttctggtgaacttgtctggccggcattcatttaaggcctaaggatgaaggcggtaagtgtcctcaaaagcccggtcgccgcggcctagggcccctycgggtgatagagtcactgcctgagttagcttttaggcaggttttcacccgtgtctagggggcggtggtttagactgggggctttccattccttacaccga

SEQ ID NO: 548748 - DNA, 201 bp, Homo sapiens
ggattacaggcttgagtctttgctcctggccttaaagttcttttttaaagctataaatggcaattaccattcttaatattccatccccctcaccccccccttttttttttaaaggacctaagctatcaagaaagtcttcactgtgtccagactgcttttcatattctttctggacaaggtatgatattttcttaatcaagt

SEQ ID NO: 548749 - DNA, 201 bp, Homo sapiens
tttacgtattctgcctctgcttttttcactctgtggtatatgctcttagatttttgtttttcaatctattttcagtggaagaaagcagaagagaaactagmgcgagagcttcgagaggcagaagcttcagagagtactgagaaaaaacttaaactggtaggcagtttcatattctgttatgcttttaaaatgcgttaagtt

SEQ ID NO: 548750 - DNA, 201 bp, Homo sapiens
gctcccgtccttccatagacacaagttattaatatagcatacagataaaagaagttggtgtaaaatgttataaaagatgtttgaaggttttttcatgaacragggaaataacactgttaaatgcttttctatgtaaagtttttgagggcaatataaatattaagctgtatatttgtgttttttttccaatattagatgtta

SEQ ID NO: 548751 - DNA, 201 bp, Homo sapiens
ttcaatataggatatgtccaagaccttaccaagcatctgtcattgtgttgcatgtgttggtgtcagctgttgccattttcaacttggttcacaggttggckttagcttatagcataagtaacttctaactcatactttaaatattttcctagggtaaatttttacaaggggattcatttttgaatgaagatttaaatcagc

SEQ ID NO: 548752 - DNA, 201 bp, Homo sapiens
aactcctgaaatgtttgatactattaacagttcggtatttatccttctagatgtttttctttgcagatatagtcatatatacttgcttatattttaaaatraaaaatgggcttatactttgaaaactgttctggaacagttttcattttctatattgtgaacttacatatagggttatcccattctttctaatgcctacca

SEQ ID NO: 548753 - DNA, 201 bp, Homo sapiens
gtggtacaataataatcagaaagggtataattgataaaagacatgactattcttttttctccacaatattcttatttatttcagtatattactccaggcartttagaatccatttttcacttccttccctcaaaatagtccacacagagaatctgattagaatcgattcaatgtattgattagtttggatgaattaaaata

SEQ ID NO: 548754 - DNA, 201 bp, Homo sapiens
caagctccttaagtgtttaacatgtcaactcctgaaatgtttgatactattaacagttcggtatttatccttctagatgtttttctttgcagatatagtcrtatatacttgcttatattttaaaataaaaaatgggcttatactttgaaaactgttctggaacagttttcattttctatattgtgaacttacatatagggt

SEQ ID NO: 548755 - DNA, 201 bp, Homo sapiens
tgggagtttttcttttgtttttgaatttctgaactgtttggaaagctcctgggatctttgtgcaaccatctctgtctgatagaactataacatgagccacrtatgtcatttaaaaaaaatgcagacacactaaaaagcaatgaaattaattttaatagtatattatatatattcagattatcatttcaacatgtaataaat

SEQ ID NO: 548756 - DNA, 201 bp, Homo sapiens
tgaggaatttattccttataagtgtatgaagtaaaaagtattcaagctccttaagtgtttaacatgtcaactcctgaaatgtttgatactattaacagttyggtatttatccttctagatgtttttctttgcagatatagtcatatatacttgcttatattttaaaataaaaaatgggcttatactttgaaaactgttctg

SEQ ID NO: 548757 - DNA, 201 bp, Homo sapiens
tattattactgtaaaaatattttattaagattcttggatacttgtaagcagaggaatatgtaagggaacatctaatctgttttagagatcattgaagatcytattcaagagctgaccatagaagaacatttgattgagagaaagaagaaattacaggagaagaagatgcatattgcagccttggcatctgccatattatca

SEQ ID NO: 548758 - DNA, 201 bp, Homo sapiens
acctcaggtgatctacccgcctctgcctcacaaagtgctgagattacaggcatgagccaccacgcctggcctaaacgactgccgcgttttttgttttttgkttttttaaatagtactgggtgtatactagacacacatattttatactaattttgggcttttaatgttctgattttaaaaaatgattgacctttttggtct

SEQ ID NO: 548759 - DNA, 201 bp, Homo sapiens
gtatgagtacagatttaatatctgtgtttaatatatgtaatgaatatatattttatatagtttaatatatattgaatatttatattatgtatatatttgawataatctgacagccagttatttcatcaccattttttttctgctgatataaaatgctgcttaattattgtgttatatctatagtatatttgggtatgtggt

SEQ ID NO: 548760 - DNA, 201 bp, Homo sapiens
tatatcacttaatttttaaaaaatttatagtgctccattttatagatatattgtactttatttggtcagtcgcctatttgcactgggaatacttgcgcacgtgtgtgtgtgtgtgtgtgtgtgtgtgtatcttcatgcatgtgtgtgcatgtagtgccagatcaaagggtatgctcattttaaattttgataaataattgt

SEQ ID NO: 548761 - DNA, 201 bp, Homo sapiens
atatcacttaatttttaaaaaatttatagtgctccattttatagatatattgtactttatttggtcagtcgcctatttgcactgggaatacttgcgcacgtgtgtgtgtgtgtgtgtgtgtgtgtgtatcttcatgcatgtgtgtgcatgtagtgccagatcaaagggtatgctcattttaaattttgataaataattgtc

SEQ ID NO: 548762 - DNA, 201 bp, Homo sapiens
ttttagatctattaagactgaaaattgatctttttttcccctgcagtgagcctgttcatgcgaagaaacggaagcatgaacgcattatagataaatatgaraaaataccaagaactctgcaaactgcaccagagaaggaactgattcatttacttcctatcaaagataaaagtggtataatcccacagactagggagaagc

SEQ ID NO: 548763 - DNA, 201 bp, Homo sapiens
actcaactttgtattttaatggaaagaggattatgctatatattctaccacttttttaaccttagcatttaatcatggtaaacacattataatgtcactaytctctttatgtaaggtttatttaattctttgcttaacaaacaccatagttctgactatgtgccttccagttataaatgccttacaaaaatttaattttca

SEQ ID NO: 548764 - DNA, 201 bp, Homo sapiens
ttggtcttgcttcatattcctgaattgttctgaaagaaaacatgctatgattttgttgatcacttaaaacattttttttcttcttctgtcattcaacttgaaaaacatttttttaatcgtgaaaagtttcgcacatacaggatagtagaatggcatagtgaatgtccatatgccccccatcactcaggttcaacaatgaat

SEQ ID NO: 548765 - DNA, 201 bp, Homo sapiens
actgcttgacagtgaatctcagggaagtggagttttccttcctgaactggatgagcctgagtactgcaatgctcagaacactgctctgtgggaactgcatrctctgcgggtaagagtggccctggtttttttctttttggggatgtttgtgaataattgttttccagtttttcttcaaatagttgttattgccagagtact

SEQ ID NO: 548766 - DNA, 201 bp, Homo sapiens
tcctgccttagcctcccgagtagctaggattacaggtgcacaccaccacatctggctgatttttgtgtttttagtagagccggggtttcaccatgttggcygggatggtcttgatctcctgatctcgtgatctgcccgccttggcctcccaaagtgctgggattacaggcgtgagccaccgcgcctggccccgtattttct

SEQ ID NO: 548767 - DNA, 201 bp, Homo sapiens
ggctggagtgcagtggcacgatcccggctcactgcaacccccgactccccagttcaagtgattctcctgccttagcctcccgagtagctaggattacaggygcacaccaccacatctggctgatttttgtgtttttagtagagccggggtttcaccatgttggccgggatggtcttgatctcctgatctcgtgatctgccc

SEQ ID NO: 548768 - DNA, 201 bp, Homo sapiens
acctcaagcatttatctttgtgttacgaacaatccagttatacttttttagttattttaaaacataaaataaattattgttgactatagtcatcctatctrtcaaatactagatctttttctaagtgtatttttgtacccattaaccatccctactcctatctcctccaactgcctttcccagccagtggtaaccatcatt

SEQ ID NO: 548769 - DNA, 201 bp, Homo sapiens
tgctcccgtccttccatagacacaagttattaatatagcatacagataaaagaagttggtgtaaaatgttataaaagatgtttgaaggttttttcatgaaygagggaaataacactgttaaatgcttttctatgtaaagtttttgagggcaatataaatattaagctgtatatttgtgttttttttccaatattagatgtt

SEQ ID NO: 548770 - DNA, 201 bp, Homo sapiens
agactgcttttcatattctttctggacaaggtatgatattttcttaatcaagttttgtttgccttacctttgaatgctataacatacctaattggtgtttrttgtcatttcaaaggtgatgttctgaatattgatccattgaaattctacacacatctctacaaaacactgttcaaattacatgcaggtatgtatgtttag

SEQ ID NO: 548771 - DNA, 201 bp, Homo sapiens
caatctcattcttctaccttcttcccaggagacaccatctttaatttggtttgtatatacttcccgtccatgtttctctactttgtttatatttgcattcrtagacaacatgtggtattactgtatgtgttttatgacatttacgtattctgcctctgcttttttcactctgtggtatatgctcttagatttttgtttttc

SEQ ID NO: 548772 - DNA, 201 bp, Homo sapiens
cacattttttaaggcttgattatttaatgagaaaggtatgattcagcatatgaatatttgcttttagtccaccttttaggtataaaacaaagtccaggaawgtgataaatatttgtgtggataaccaaagggtctaatccccatcagagcacaagtgaccaatacatgtcacaaattatttattttccacacatatacaaa

SEQ ID NO: 548773 - DNA, 201 bp, Homo sapiens
aagttacctaatttggccttttaaaaaaggtgttagtgtttattatagctactttcaaggaaagtttgaatatgattctagtctctaaagttcttcacgtwttctgacattccctggagggtgactggggaagaattgctccagggtagaagaaccaggcccaagactttaccattctgatctagagacaaaggatactca

SEQ ID NO: 548774 - DNA, 201 bp, Homo sapiens
taaatttgagttaatatatttttatgaagatatttgagaaaagaaaaaaatagcttgtattcaggttcattggcttttgctggatgatccacctaaagaarttacctaatttggccttttaaaaaaggtgttagtgtttattatagctactttcaaggaaagtttgaatatgattctagtctctaaagttcttcacgtttt

SEQ ID NO: 548775 - DNA, 201 bp, Homo sapiens
catagtttggtgacctgtgggccaggccgatttttctggcctcaagagtttgaaaaaaattgaattagttgctgtcttttaaatattgaaagaattcatcygaaattcacatttcccgcttttcttgaaatactgggaggtttggtgacattggcttgtattttacatgacagtagtcagtcagttgctgcctcctctaca

SEQ ID NO: 548776 - DNA, 201 bp, Homo sapiens
tttctcagaattctggaggctgggaagttgaagatcaaggtgctggtaggtttggttgactgatgagggcgcctctctgcttctgagatggcatcttgttkctgcatcttctggaggggaggaaccccatgccctcacatggcagacaggacagaatgggagcagtgccacagcttcacttcatgaagcctcttctataaa

SEQ ID NO: 548777 - DNA, 201 bp, Homo sapiens
cttgctctgtcacccaggctggagtgcagtggcgtgatctcggctcactgcaagctccgcctcccgggttcacaccattctcctgcctcagcctcccgagyagctgggactacaggcgcccaccaccatgcccggttaattttttgtatttttagtagagacagggtttcaccgtgttagccaggatggtcttgatctcct

SEQ ID NO: 548778 - DNA, 201 bp, Homo sapiens
ccagggctcaggtgatcctcccactttagccttttgagtagctgggactacagatgtggggcaccatacctggctaatttttctatttttttgtagaaatkttttttttttttttttttgagagggagtcttgctctgtcacccaggctggagtgcagtggcgtgatctcggctcactgcaagctccgcctcccgggttca

SEQ ID NO: 548779 - DNA, 201 bp, Homo sapiens
gttcctgctaggaatatgagtgtcagttccctcctacctgctcagaatgttactatttaatctttgttagtcaggtaggtgaaaagtttatatatatatamactttttttacctgcttattatttgtcagtttttctcttaaagtaattgtcttaatgacttgtgatgagtttttagtacatattcattttaataaataac

SEQ ID NO: 548780 - DNA, 201 bp, Homo sapiens
ttttttttttttttttggttttgtaaacagttacttttggtacctctcccttatcacatatatatcacttaatttttaaaaaatttatagtgctccatttyatagatatattgtactttatttggtcagtcgcctatttgcactgggaatacttgcgcacgtgtgtgtgtgtgtgtgtgtgtgtgtgtatcttcatgcatg

SEQ ID NO: 548781 - DNA, 201 bp, Homo sapiens
agaaggtcttgccaagtaagggctgtgtaggttgaaatcttttagattccttctaaataggaaagaccaaagaattttcgagagttccctaatgatggccyattatcctcagttctcattccttttctgattgtcaccagcctttacttgaagctattcataacagtgggcttttttgattttctcatctcaaacctttta

SEQ ID NO: 548782 - DNA, 201 bp, Homo sapiens
gcctttttttctccccagtatttggaaattactttcttgatgatgctgccttttaaaagcttcacgtacattatagttttttaaaaaaatctttggactgsatcttactgaagtgcagttgctatattaaaattagggcatagagcacagaaaaatcaagaccatgagaagacattttaccatttagctactttttataac

SEQ ID NO: 548783 - DNA, 201 bp, Homo sapiens
ctagagcgagagcttcgagaggcagaagcttcagagagtactgagaaaaaacttaaactggtaggcagtttcatattctgttatgcttttaaaatgcgttragttgtttaaactagaaatttattgtttcagcttgtagctgtgtaattttggtttctttcatgaggcttagatgtgtgacttttgtgatgtgcgggaaac

SEQ ID NO: 548784 - DNA, 201 bp, Homo sapiens
ttaatgtacatctttcttttgagtctgaatagtcaagtagagtgaatgggggaagaatgctgttctcactttgaggtagtggcagaacagttctgagttcytacggctatgatttcacttaatcctcattaccctgctggtaggtcttattcccatttccagagaggaaactgatggttccctgcagtcacaagtatctgg

SEQ ID NO: 548785 - DNA, 201 bp, Homo sapiens
caggctagttctacaactttgctggtacttttagggtattcttatttgactatatcagattattagacaactattcagtcttctcaggtccattttttaaraattattattattattttaaatagacagggtcttgttctgtcacccaggctggagtgcagtgtgcaaaaatagcccactacagccttgacctcctgggct

SEQ ID NO: 548786 - DNA, 201 bp, Homo sapiens
actacaggtgtgttaaactagccttgaatagccacttaccactactagatcagtggttcttaacctgtttggggatcgtagaaccctttgaattgctgtgrattgggattgaataactgatgctgtagcgctcttctgtaggattaaagccatcgtttggttttagcttttatatgcaagtctgtggctgtgggacattga

SEQ ID NO: 548787 - DNA, 201 bp, Homo sapiens
atatagagattctggattctgttatgatcttcagaagggtatttttttttcttggcatattgttaatatggcaagatttaagctctaaactcctatctccmctgcattagccgtagttgaaatctccatgcagttctttcaatttccagttgttactttttgctggccccccctgggttctccagccaaggatctgaacat

SEQ ID NO: 548788 - DNA, 201 bp, Homo sapiens
tctgacaagccctggccagccgggtgacatgaattgcaccacccagaggatcaactacacggaccccttctccaatcagactgtggtaattcctgtctgcstgagctgggtctgggcagctgctctgttagccccgcaacccaaggccccaagtttcctttttcctaggagtccttcttccactcactcagtgtggggcct

SEQ ID NO: 548789 - DNA, 201 bp, Homo sapiens
aaggctactagaaactagtaattaagtttcttaatggactgagtagccacctacttgtccggctagaatgtttgttgatgtatgagtttagattaacactyaaaagcactaggacagatgtacatagaaggtgcctactcattgtattttgatgatttcattaacaggtaaataaaagttaatacaaaaggaacgagtgtg

SEQ ID NO: 548790 - DNA, 201 bp, Homo sapiens
ttgtgcccccaggtattgccttgtaccccggtcaggcccagttgctcagctgtaagcaccattacgaggtcattcctcctctgacaagccctggccagccrggtgacatgaattgcaccacccagaggatcaactacacggaccccttctccaatcagactgtggtaattcctgtctgcctgagctgggtctgggcagctg

SEQ ID NO: 548791 - DNA, 201 bp, Homo sapiens
agtttcagaacccaggtatttttcttatagtcccaataatttgggaagggctcttgataataacactactaaacatacaaaaaattagccaggtgtggtgrcaggttcctgtaatcccagctactcgggaggctgaggcaggagaattgcttgaacccaggaagcggagcttgcactgagccgagattgcgccacgcacac

SEQ ID NO: 548792 - DNA, 201 bp, Homo sapiens
tctgtgaggtgaacggttagtcctagtttatagatgaggaacccaaggcacagacgttaaggaatatgctcagagctcatgagtggcagggctcaaatccrtacccagagctgtctcgcaaggtgttctgactctggctcagttgttcctagatgagagctttcctgctccaaattctcccctccctgtagcagatcaatt

SEQ ID NO: 548793 - DNA, 201 bp, Homo sapiens
ttacagtggttagatacacgtaatgtaaaactcatcatcttactcattaaaatgtagagttcagtgatattaagcactttcatattgctgtgcaaccatcrccaccatccatctccacaatgctttttcatcctgcaaaactgaaattctatatatttggccattgttattagtttctgtttctctattgatcttgtcttt

SEQ ID NO: 548794 - DNA, 201 bp, Homo sapiens
ttcttttgctgtgcagaagctctttagtttaattaggccccatttgtcaattttggcttttgttgctattgcttttggtgttttagacatgaagtccttgyccatgcctatgtcctgaatggtattgcctaggttttcttctagggtttttatggttttaggtctgacatttaagtctttaatccatcttgaattaatttt

SEQ ID NO: 548795 - DNA, 201 bp, Homo sapiens
acagtgggggaatcctggggaatgagatgtgtctgaaagtttttaggtttatagggtgtggagcacagtggataaaagtcagaaagcccacgttcgtgcckggctgtgcctcttgctgtttgtgtgacttttattgagtcacataactttctgagcctcagtttctttgtctgaaagatgaagataataaaagtccctacc

SEQ ID NO: 548796 - DNA, 201 bp, Homo sapiens
tttgtatacagtgtaaggaagggatccagtttcagctttctacatatggctagccagttttcccagcatcgtttgttaaatagggaatcctttccccattkcttgtttttgtcaggtttgtcaaagatcagatagttgtagatgtgcggtattatttctgagggctctgttctgttccattggtctatatctctgttttgg

SEQ ID NO: 548797 - DNA, 201 bp, Homo sapiens
tggtgtttttagcatgaagggctgttgaattttgtcaaaggccttttctgcatctattgagataatcatgtggtttttgtctttggttttgtttatatgcrgattatgtttattgatttgcatatgttgaaccagccttgcatcccagggatgaagcccacttgatcatggtggataagctttttgatgtgctgctggatt

SEQ ID NO: 548798 - DNA, 201 bp, Homo sapiens
gattcttctctcttttcttccttattagtcttgctagctgtctatcaattttgttgatcttttcaaaaaaccagctcctggattcattgatattttgaagsgttttttgtgtctcagtctccttcagttctgctctgatcttagttatttcttgccttctaccagcttttggatgtgtttgctcttgcttctctagttctt

SEQ ID NO: 548799 - DNA, 201 bp, Homo sapiens
tttccttactgcccgccattttcccactgcccaaatgtttggctgttccctcattttgattttttttgcaaccataaaacactccagccgggcgtggtggytcatgcctgtaatcccagcactttgggaggccgaggcaggtggatcacgaggtcaggagatcgagaccatcctggctaacatggtgaaaccccgtctcta

SEQ ID NO: 548800 - DNA, 201 bp, Homo sapiens
tttgcagtggctggtaccagttgttcgtttccatgtttagtgcttccttcaggagctcttttagggcaggcctggtggtgataaaatctctcagcatttgyttgtctgtaaagtattttatttctccttcacttatgaagcttagtttggctggatatgaaattctgggttgaaaattcttttctttaagaatgttgaata

SEQ ID NO: 548801 - DNA, 201 bp, Homo sapiens
cttcatttcattcatttgatcttccatcactgataccctttcttccagttggttgaatcggctactgaagcttgtgcattcatcatgtagttctcatgccrtgggtttcagctccatcaggtcctttaaggacttctctgcattggttattctagttagccattcgtctaatcttttttcaaggtttttaacttctttgcg

SEQ ID NO: 548802 - DNA, 201 bp, Homo sapiens
catctttgtggttttatttacctttggtctttgatgatagtgatgtacagatggggttttggtgtggatgtcctttctgtttgttagttttccttctaacrgtcaggactctcagctgcaggtctgttggagtttgctggaggtgcactccagaccctgtttgcctgggtatcagcagcggaggctgcagaacagcgaata

SEQ ID NO: 548803 - DNA, 201 bp, Homo sapiens
gcctctgtgcgtgtgctcactccattccttcatcaacgctccgccaagctccattgggtaaaatgcccccagaagtcaagggctacctcaagttccatgtrttccataggggtccgctttccagacccgtctgcatttctgtctgtccttctcataatgaacttgctgccttctgtcttagtcaatagttactgctgtaca

SEQ ID NO: 548804 - DNA, 201 bp, Homo sapiens
tctcaccaagcacacctactaagtatttacagggaatgctcagctgtgtggatctatgcagctgtgctttgtccctgtaaacttgaagggttgaaacaaasgttgaaaattcagagaaatacttgatctgaaaaccaagtactttgaaatttggaatttttattgcttttaattgtgagtcttacatggtagtttgaatat

SEQ ID NO: 548805 - DNA, 201 bp, Homo sapiens
ggtaaagaccaaggaggaggatgggcgggaagcagtggagttccggcaggaggtaggtggctctgggtttgcttgaaactgctggtgacttttccacattygagtctgaggtggagggaagctttgcagagaaggctcctttgagcagggccttaagggtgagtaggccttggtcaggatgagaagggactcccatggagg

SEQ ID NO: 548806 - DNA, 201 bp, Homo sapiens
ccttcttggcattatttaaagcagcagagtttgccaaactgagtataaaatggatgatcaaaattagaaagagataccttaaaagaagaggtcaggcaacragccacataagctgaagtcacctcgcgttgtttagagaactgtccacatcaatgggagctgtcatcacttccactttgtaaacggagctatcaacaatcc

SEQ ID NO: 548807 - DNA, 201 bp, Homo sapiens
ttatagtcccaataatttgggaagggctcttgataataacactactaaacatacaaaaaattagccaggtgtggtggcaggttcctgtaatcccagctacycgggaggctgaggcaggagaattgcttgaacccaggaagcggagcttgcactgagccgagattgcgccacgcacacaagcctgggtgacaagagcgaaac

SEQ ID NO: 548808 - DNA, 201 bp, Homo sapiens
gaggaactggtataaagcataaaaaacagcttgggccagattggtggagcaaacaaattagagcaaatccctaacccaaaacagatgaaggagagacctgytgtagaggtacaagctttccttccaaacccccagcttggaatcagcaccgttagagagcagggtagtcattactggactgcctgttggctgggccagaca

SEQ ID NO: 548809 - DNA, 201 bp, Homo sapiens
gggaaagctctgagactttgaaggatgagtaaacctagacaggaggaaagcatcgtagatggggaaaagagcagaggactggaggcaggaatcctcctctragtttgggaggaaagacagccattggactagaaatgaggaaacacttgaaactatggtaactatgagatgggaacaagaggagctcaccttcttatggac

SEQ ID NO: 548810 - DNA, 201 bp, Homo sapiens
acccacttgaggaggcagtctgtctgttctcagatctcaaaccctgtgctaggagaaccactactctcttcaaagctgtcagacagggacatttaaatctrcagaggtttctgctgccttttgttcggctatgccctgcccccagaggtggagcctacagaggcaggcaggcctccttgagctgcggtgggctccacccag

SEQ ID NO: 548811 - DNA, 201 bp, Homo sapiens
cctggtgtgccatttgctaagaccattggaaaagcacggtattagggtgggagtggcccgattttccaggtgccatctgtcacagctttgcttggctatgwaagggaattccctgaccctttctgcttcccgggtgaggcgatgcctcaccctgcttcagctcacactcggtgcgctgcacccactgtcctgcacccactg

SEQ ID NO: 548812 - DNA, 201 bp, Homo sapiens
tccctcctaaaccaatgcaatactggggtttgcttaaggccactttagtcagccagtggtgaagctggctggggtttgggtccatcctgctagggtggccrattgccttttggccagggtgggtttagaagtgccatttgggagcaatagcctataattaggggattcgggattcttcctggtgctgtggcagggctggta

SEQ ID NO: 548813 - DNA, 201 bp, Homo sapiens
gaaaccccgtctctactaaaaataaaaataaaaaaatcaggcgtgtgtagtggcacgtgcctgtagtcccagctacttgggagggcaagacaggagaatcrcctgaacccgggaggcggagcttgcagtgagccgagatcacgccagtgcactccagcttgggcaacagagcgagacaccgtctcaaaaaaaaaaacaaga

SEQ ID NO: 548814 - DNA, 201 bp, Homo sapiens
tccctgaccctttctgcttcccgggtgaggcgatgcctcaccctgcttcagctcacactcggtgcgctgcacccactgtcctgcacccactgtatgacaarccccagtgatacgaacccagtacctcagttggaaatgcagaaatcacccatcttctgcatctctctcgctgggagctgtagactggagctgttcctattc

SEQ ID NO: 548815 - DNA, 201 bp, Homo sapiens
gagggcacagggagccctgtgggagtatcttagtcagctcagactgctgtaacaaaatgccacagttgagtggcataaacaacagaaatttatttctcacrgttctggaagcgagaatccaatatcaaggtgccagcaggattgaattctggtgaggcctttctccttggcttgcagatggctgccttctcattgtgtcct

SEQ ID NO: 548816 - DNA, 201 bp, Homo sapiens
cctcctgggttcaagcaattctcctgcctcagcctcttgagtagctgggattacaggcatgcgccaccacgcccagctaattttgtatttttagtagagaygggggtttcaccatgttggtcaggctggtctcgaactcccgacctcaggtgatcctcctgcctcggcctcccaaagtgctgggattacaggcttgagcca

SEQ ID NO: 548817 - DNA, 201 bp, Homo sapiens
ctcctgggttcaagcaattctcctgcctcagcctcttgagtagctgggattacaggcatgcgccaccacgcccagctaattttgtatttttagtagagacrggggtttcaccatgttggtcaggctggtctcgaactcccgacctcaggtgatcctcctgcctcggcctcccaaagtgctgggattacaggcttgagccac

SEQ ID NO: 548818 - DNA, 201 bp, Homo sapiens
ccagatgagaaaagaacatgcatcgtgctgtagagccacacttgctcccttgggtaacagggaactgttagtgggttttaagatgaaagaataacactaattttttttttgttagtatgtgaacgctaggccccctcctaaaatcctgctaaaatgattctctaaggaatgagatagaacagactagaacatcaataatag

SEQ ID NO: 548819 - DNA, 201 bp, Homo sapiens
ccagacacaccctataccctccccaggtatgcagagccgctggggatggttgcctctgggtaaaagaccctggaaccattctctacagaagcgaagggaagatgattctttgtgtaggcataggaaacagagcagacttctacaatggaaaaggagagagaactaaaggaaaggactcttcccagagtaaaacacactgga

SEQ ID NO: 548820 - DNA, 201 bp, Homo sapiens
cagacacaccctataccctccccaggtatgcagagccgctggggatggttgcctctgggtaaaagaccctggaaccattctctacagaagcgaagggaagatgattctttgtgtaggcataggaaacagagcagacttctacaatggaaaaggagagagaactaaaggaaaggactcttcccagagtaaaacacactggaa

SEQ ID NO: 548821 - DNA, 201 bp, Homo sapiens
agacacaccctataccctccccaggtatgcagagccgctggggatggttgcctctgggtaaaagaccctggaaccattctctacagaagcgaagggaagatgattctttgtgtaggcataggaaacagagcagacttctacaatggaaaaggagagagaactaaaggaaaggactcttcccagagtaaaacacactggaaa

SEQ ID NO: 548822 - DNA, 201 bp, Homo sapiens
agagtgctctcacataggtatgcccctatactgtagtgacgtaggcattttgttcagctttgtgggtggcaaagctgaggctcagcttcgatgatggatcygagcctctgggtggagctggtttctgcctttgttacctgtctgctctccgttacaccacacagcgtctttagtaattgacaaccagatctcaccaagcac

SEQ ID NO: 548823 - DNA, 201 bp, Homo sapiens
tagcattttccaccctttctgccacctagaattccctctcccttccctgcttcaagctggccatcttgccttcctcctggaagactttccccgggatcccrcccccactccacgctcctttcgtgagcttcctcggtatgctgctgcagtttttacttgtttttatgttcgctttgattttgctgcatctgcaccgtcttg

SEQ ID NO: 548824 - DNA, 201 bp, Homo sapiens
tgctggtgactgacagccctgttgaggcaatcacaatttggagaggaggcagggagtgggcagcatcctggttgtgccagcaaagaaaccagcttgcagtrggggcttcgactcctgctgccagacctgcattgacctggatcttccttctccttccttcctccaagcccaaacagggtaggcttcatgcaggcctgtgag

SEQ ID NO: 548825 - DNA, 201 bp, Homo sapiens
atcataaggaagagaaaatatacttactattcattcagtggaagtgatcattgtaaaggccttcatcctcatcgccttcatgttgagtaggctgaggaggrggtttggtcttgctgtctcaggagtggcagaggcaaaagaaaatccgcacgtgagtggacccagccagttcaaacctgtgttgttcaagggtctactgca

SEQ ID NO: 548826 - DNA, 201 bp, Homo sapiens
ctacatttcccatcaacactttcgcgactcctgggcggcagcggccaggcgcatgcgccgagtatcgccacgcctggtctctgggacgcccctccggaccsgtttcgcctcgcggagccggtaggtccaggtgcagcggccgcagtgctgcgtccgtgcgccgcgggctggggcggtctcaggtgtgccgaagctctggtc

SEQ ID NO: 548827 - DNA, 201 bp, Homo sapiens
gttccataggggtccgctttccagacccgtctgcatttctgtctgtccttctcataatgaacttgctgccttctgtcttagtcaatagttactgctgtacrtatctccctttgtaaaagactgattcacagaagggctttgtggactatataaagcaggtggcttagccctacagtggagggagaagccaacttgaaggca

SEQ ID NO: 548828 - DNA, 201 bp, Homo sapiens
atttctcctcccatcccctttattccatctgtttcctttgtctgaaaggagtctgagggattttaaccagtgctgtggattccatgacccctagattctgyaccctaaacagtgggggaatcctggggaatgagatgtgtctgaaagtttttaggtttatagggtgtggagcacagtggataaaagtcagaaagcccacgt

SEQ ID NO: 548829 - DNA, 201 bp, Homo sapiens
ggccttttcttttgtgcttcgagggctttaaactggagattttgcctgattctaaggggcaggagtggagtcgtggagagggagatagaagaatagattcrtaagagatgtttttcacttgtctcttggaggtgagtttttaatgaaaatgtctagaaaccttaaaaccttaaacactgatgctgtgaacctgacaaagtg

SEQ ID NO: 548830 - DNA, 201 bp, Homo sapiens
gagtggagattggatgcctctacgagccaacgaactccaaggattgctggctgtcaccagaagccaggagagaggcatggaacagatttcctcaccactcrtagaagaaggagccaaccctgccaacacctcaatttcagacttctagcctccagaactgtgagagaagacatttccgttgttttaagctgttcggtttgt

SEQ ID NO: 548831 - DNA, 201 bp, Homo sapiens
catgatcatctcagtcccagcttggtcctctcccagtatttcctgtttgcaggaatggtactaccacttaacgcagttgaacttcagagtagttctccatyccttccttcctctcatcccctttttctctggccctcagccatgctgatctttttttattttaggcctcattccctctcaccacagggcctttttgttgtt

SEQ ID NO: 548832 - DNA, 201 bp, Homo sapiens
gcctgtaatcccagcactttgggaggctgaggcgggtgagtcacttgaggccaggagttcaagaccagcctgggcaatatggcaaaactctgtctctacaraaaacacaaaaattagttgggcatgatggcatgcatctgtaatcccagctacttgggaggctgaggtggaagaatcgcttgagcccaggaggcggaggtt

SEQ ID NO: 548833 - DNA, 201 bp, Homo sapiens
tgattctttgtgtaggcataggaaacagagcagacttctacaatggaaaaggagagagaactaaaggaaaggactcttcccagagtaaaacacactggaawactcagtgtgcttccacagagcatacttagctttcccatgcaagggagaggcctattagagaaacagaaatttactactttggaagaaaccaaaacccag

SEQ ID NO: 548834 - DNA, 201 bp, Homo sapiens
tcatttccaaacctgtgtaggccagttgcacttgttacaatagttacataattcgactaaagagtgtaaaaacccttgaaataagggcacaaagagagagytgtttttatggaaatgaagttgaatgcagctactgcccccaagtctgagtgttggttcatctcctccatcaatttcttgaagtccacaagctataaacta

SEQ ID NO: 548835 - DNA, 201 bp, Homo sapiens
cttgagcccaggaggcggaggttgcagtgagctgagattgcactgctgcacaccagcctgggcgacagagtgagagaccctgtctcaaaaaagaaaaaaarcctatttgttgttggcatacggtcagttgaagtcgagatggcccagaggcagtgacagttacaggatggacaggagagaagggagggctggagttgtgca

SEQ ID NO: 548836 - DNA, 201 bp, Homo sapiens
ttacataattcgactaaagagtgtaaaaacccttgaaataagggcacaaagagagagttgtttttatggaaatgaagttgaatgcagctactgcccccaastctgagtgttggttcatctcctccatcaatttcttgaagtccacaagctataaactaacagagaagttatctcctccctatccaccaagtttcctaccca

SEQ ID NO: 548837 - DNA, 201 bp, Homo sapiens
ggctgaggcaggagaatagattgaacccgggaggcggaggttgcagtgaactgagatcgcgccactgcactccagcctggcgacagtgagactccatctcaaaaaaaaaaaaaaaaaaaaagtattcttaccaggttgtggaagtcagaaatccaagataagaactctgccttaaagagttacaactctgccttcaagagt

SEQ ID NO: 548838 - DNA, 201 bp, Homo sapiens
acaaattgtgtattagtcagagtataggctaagctaccaaataaaaacaaaacctgcaaatacaatggctgagatgagggagaagcctccttctctctctsagaacagtcctggcatgcaggccgtgtggcgtagtgggcagtactgcctcataggatagtccagccatgacttttgtcttgtcactgtgctgtcccctgg

SEQ ID NO: 548839 - DNA, 201 bp, Homo sapiens
ttttttctaaaattaatctataaattcagtttctatcacagttaaaagtcccagtgaatttttttgtggaactaagcaagctagtcttaaagcatacttaraacacgttcaaaaataaccaagacaagtttggggatggggaagagtagtagggagagcaccttcccagatctcagaacagtggaaaaaccacaggaatca

SEQ ID NO: 548840 - DNA, 201 bp, Homo sapiens
acttttgacccccaaaactactaacagcctactgttgacagaagccttaccaataacataaacaacacatattgcgtggttatatatatcatagactgtaytcttacgataaagtaaactagagaaaaaaaatgttattaagaaaatcatggccaggtgtggtggctcacacctgtaatcctaccactttgggaggccaag

SEQ ID NO: 548841 - DNA, 201 bp, Homo sapiens
ctactcaagaggttgaggcaggagaaccgattgaacccaggaggcagagtttgcagtgagctgagattgcgccactgcactccagcctgggcaacagagcragactccaaaaaaaaaaaaaaggaaatcataaggaagagaaaatatacttactattcattcagtggaagtgatcattgtaaaggccttcatcctcatcgc

SEQ ID NO: 548842 - DNA, 201 bp, Homo sapiens
agagaaaagagggatgggccttgcttttgctggtgactgacagccctgttgaggcaatcacaatttggagaggaggcagggagtgggcagcatcctggttktgccagcaaagaaaccagcttgcagtgggggcttcgactcctgctgccagacctgcattgacctggatcttccttctccttccttcctccaagcccaaac

SEQ ID NO: 548843 - DNA, 201 bp, Homo sapiens
acacaccacattttccttatccattcatcctaagtgttgatggatacttgagttgattccatatcttggctgttgtgaatagtgctacagtaaacatgggrgtgcggatatctctttgatacactgatttcctttttttttttttttcttttcttttttgatttcctttcttttggatatgcacccagcaatgagattgct

SEQ ID NO: 548844 - DNA, 201 bp, Homo sapiens
cttttaaacaattccaatgtggagttatatgtataatagaagctctttgtctggattcccagctcccttcatctctctgtaaaacacgctaatgaaaactygtggctgcttccgtcccactaggtgcctattctctggatgccctcctctcctcccccagttgaagtgtatgcttaggaggagtcagtgagggtcatttcc

SEQ ID NO: 548845 - DNA, 201 bp, Homo sapiens
cttactgtctactttttatcttattccagctgtgtatgtcccaaggctagagacggaggggtgagggcagggaagggaaggggcattctcagatgacccastggcccaggaagggacctcatgagcttggccggtccactcaacatcttatcacaaagttaagcaaatctggtgtggaggagcatgctggctctccatgca

SEQ ID NO: 548846 - DNA, 201 bp, Homo sapiens
gtccccaaggagacatgcggctgtgccatgtggacacttggctgtggttggctcacttgcattcagggaggacagtgaggcctccagcctttgctgagtawtgctcagggattcctgacagtgcggtgagaccctgtccccaatggaagaatggcagggctaaagggtggggctggtgcgatatagcgaagtgggtcccat

SEQ ID NO: 548847 - DNA, 201 bp, Homo sapiens
ccgcctccagcagcatccgcttcagcaaggcctgcctgaagaacgtcttctcggtcctactcatcttcatctacctgctgctcatggctgtggccgtcttyctggtctaccggaccatcacagactttcgtgagaaactcaagcaccctgtcatgtctgtgtcttacaaggaagtggatcgctatgatgccccaggtagag

SEQ ID NO: 548848 - DNA, 201 bp, Homo sapiens
atctcaccaagcacacctactaagtatttacagggaatgctcagctgtgtggatctatgcagctgtgctttgtccctgtaaacttgaagggttgaaacaarggttgaaaattcagagaaatacttgatctgaaaaccaagtactttgaaatttggaatttttattgcttttaattgtgagtcttacatggtagtttgaata

SEQ ID NO: 548849 - DNA, 201 bp, Homo sapiens
accatgcttggcccctttgagtcttctaataataataataaaaataatggtaatggtgatagtggttgccattttgggggtgctttcatgtactaggcctstgtagggctttagggctttttttttttttttttttttttttgtggggtgggaccttgctttgtggactgggctacagtacagtggtgtgatcatggctca

SEQ ID NO: 548850 - DNA, 201 bp, Homo sapiens
aatgagatcctgcctctaccaaacagacaaaaaccaaaaacactcacacaaaacaataagcattcttttattaaagcccaatatgtaaaagatagtagcayggctaatcctccctctgacatgaggcattgcctctaaagccctaaggctcccgggagaacaacttgaaagacctgtatattagttttctattgtttctat

SEQ ID NO: 548851 - DNA, 201 bp, Homo sapiens
aaattgacacagtgtctattagcaataggtagaggcaaaagtgaaatcaaacacaaaagaggctgagatgagaaagaattgccttaattccttttggacarctagagctgctgtggaccttggtggcttagctctcagctacccattgggtttccccagttctcacttatcctcgtacctgtagagtaaacctccactgcc

SEQ ID NO: 548852 - DNA, 201 bp, Homo sapiens
gacaaaaaattttttttctttcagcatttgaagatgttccattgtcttctggcctccattgtttctgttcagaaattagttgtcgttaatatcagtgctctatatgatagatagatagatagatagatagatagatagatagatagatagatagatatttttttccctcactgccttcaagatttttctcttttctttaca

SEQ ID NO: 548853 - DNA, 201 bp, Homo sapiens
taacatttttatcgttttttatcttttatcttttttcttttgagagtaaactccttaaagacaatgaataagtctccttcagcttggtgtcctctacctgrcagagaagctgtgtagtaaatgtttacaggtgccctttgttatgatttgtggggtgaggtggaaaggttgggcgtgcaggtgacttcacctccttggtga

SEQ ID NO: 548854 - DNA, 201 bp, Homo sapiens
acaaaaaattttttttctttcagcatttgaagatgttccattgtcttctggcctccattgtttctgttcagaaattagttgtcgttaatatcagtgctctatatgatagatagatagatagatagatagatagatagatagatagatagatagatatttttttccctcactgccttcaagatttttctcttttctttacat

SEQ ID NO: 548855 - DNA, 201 bp, Homo sapiens
agaggagctcaccttcttatggactgggtatagttttagggaaattcatctcaaagcaaggtcacttattgttggattaggccacaaaattaaatattgcytatcttatttgtgcagagcttttttgaaaaacagctttctttcagaatcactttattatagggaggagtcagtatttttctcctcaaactgagctatgga

SEQ ID NO: 548856 - DNA, 201 bp, Homo sapiens
aaaattttttttctttcagcatttgaagatgttccattgtcttctggcctccattgtttctgttcagaaattagttgtcgttaatatcagtgctctatatgatagatagatagatagatagatagatagatagatagatagatagatagatatttttttccctcactgccttcaagatttttctcttttctttacattagc

SEQ ID NO: 548857 - DNA, 201 bp, Homo sapiens
aaattttttttctttcagcatttgaagatgttccattgtcttctggcctccattgtttctgttcagaaattagttgtcgttaatatcagtgctctatatgatagatagatagatagatagatagatagatagatagatagatagatagatatttttttccctcactgccttcaagatttttctcttttctttacattagca

SEQ ID NO: 548858 - DNA, 201 bp, Homo sapiens
acaatatgaatatctgctcaatcatcgggcacaattactttcatttggtgacttccaaggacaaaaaggtagtatgagtctggactcccaagatggatctractcccaaggtatgttctaactgcttccagggaagggtttgttaggcatggcaactgatggcaggtgtccagaaagagtgacctggtgtccccgaggaag

SEQ ID NO: 548859 - DNA, 201 bp, Homo sapiens
attttttttctttcagcatttgaagatgttccattgtcttctggcctccattgtttctgttcagaaattagttgtcgttaatatcagtgctctatatgatagatagatagatagatagatagatagatagatagatagatagatagatatttttttccctcactgccttcaagatttttctcttttctttacattagcact

SEQ ID NO: 548860 - DNA, 201 bp, Homo sapiens
atgaatatctgctcaatcatcgggcacaattactttcatttggtgacttccaaggacaaaaaggtagtatgagtctggactcccaagatggatctgactcycaaggtatgttctaactgcttccagggaagggtttgttaggcatggcaactgatggcaggtgtccagaaagagtgacctggtgtccccgaggaagctggg

SEQ ID NO: 548861 - DNA, 201 bp, Homo sapiens
ttttttttctttcagcatttgaagatgttccattgtcttctggcctccattgtttctgttcagaaattagttgtcgttaatatcagtgctctatatgatagatagatagatagatagatagatagatagatagatagatagatagatatttttttccctcactgccttcaagatttttctcttttctttacattagcactt

SEQ ID NO: 548862 - DNA, 201 bp, Homo sapiens
actgatggcaggtgtccagaaagagtgacctggtgtccccgaggaagctgggttaactctttactgtgtccacaaaactacccatcatatgaggaaggggyatacgcagtgtgaccctcaaaaagcttttagcctagcctttgacagaaatgagtatgcattaaaaaaaagtctatttttcacattaaggttctaaaaatt

SEQ ID NO: 548863 - DNA, 201 bp, Homo sapiens
tttttttctttcagcatttgaagatgttccattgtcttctggcctccattgtttctgttcagaaattagttgtcgttaatatcagtgctctatatgatagatagatagatagatagatagatagatagatagatagatagatagatatttttttccctcactgccttcaagatttttctcttttctttacattagcacttt

SEQ ID NO: 548864 - DNA, 201 bp, Homo sapiens
ttttctttcagcatttgaagatgttccattgtcttctggcctccattgtttctgttcagaaattagttgtcgttaatatcagtgctctatatgatagatagatagatagatagatagatagatagatagatagatagatagatatttttttccctcactgccttcaagatttttctcttttctttacattagcactttgat

SEQ ID NO: 548865 - DNA, 201 bp, Homo sapiens
gatttggtttgcatttccctgattgattagtgttgttgagcatattttcatatgccttttggccatttgaatatcatcttttgggataaatctctattcaratctcttgcccattttaaaattgaattatttggctttttttgctattgagttgtttgagttccttatatattctggttactaatcccttgttggatgcat

SEQ ID NO: 548866 - DNA, 201 bp, Homo sapiens
cttcatctctctgtaaaacacgctaatgaaaactcgtggctgcttccgtcccactaggtgcctattctctggatgccctcctctcctcccccagttgaagkgtatgcttaggaggagtcagtgagggtcatttccaaacctgtgtaggccagttgcacttgttacaatagttacataattcgactaaagagtgtaaaaacc

SEQ ID NO: 548867 - DNA, 201 bp, Homo sapiens
cactttcgcgactcctgggcggcagcggccaggcgcatgcgccgagtatcgccacgcctggtctctgggacgcccctccggaccggtttcgcctcgcggakccggtaggtccaggtgcagcggccgcagtgctgcgtccgtgcgccgcgggctggggcggtctcaggtgtgccgaagctctggtcagtgccatgatccggc

SEQ ID NO: 548868 - DNA, 201 bp, Homo sapiens
gtatatacccagtaatgggatggctgggtcaaatggtatttctagttctagatccctcaggaattgccacactgtcttccacaacggttgaactagtttasagtcccaccaacagtgtaaaagtgttcctatttctccacatcctctccagcacctgttgtttcctgaatttttaatgatcgccattctaactggtgtgag

SEQ ID NO: 548869 - DNA, 201 bp, Homo sapiens
tgaatttttccccatatgatgttagctgtgggtttgtcatgtatggcctttattgtggtatgttccttctatactcagtttgttgagttttttgttttttktttgttttttgttttttgtttttttttttgacacagtttcattctgtctcccagcctggagtgcagtggcatgatctcagctcactacaacccctgcctc

SEQ ID NO: 548870 - DNA, 201 bp, Homo sapiens
acaatgtatccaggaatttttccacttcttttaggttttcctttattggcatatagtttttcattaagtctctaatgatcctttatattactgtggcatcagttgtaatgtcttttattttggtgtgattttatttatttgggtcttcattatatttttcttagatagattttgtttaacttagattttgtttaacttttc

SEQ ID NO: 548871 - DNA, 201 bp, Homo sapiens
tgttgggattacaggtgtgagccactgcgcccggcctcaaacaactaacttttcatttaagtttcagtttcatttatttctgctctgataattattattcygataaatttgggtttgttcttttctcgttctttgaggtgatcgttagcttatttgaaatctctactttttttgatgtaggcatttattataaacttccct

SEQ ID NO: 548872 - DNA, 201 bp, Homo sapiens
gagagaccgggggcctcctgtcgcctagcagtaagttgggtggcaagtggtgggcaggcagggctggcagtagtcggaccacttcagtctccctgctctgycttccccagcaccattcggtgcctcgaacctcctggtgaaccccctggagccccaaaatgcagataagatcaagatcaagatcgcagacctgggcaacgc

SEQ ID NO: 548873 - DNA, 201 bp, Homo sapiens
cagctggagcaggagaagggtacactgaagggagctgtgggcttcagggcagggtggaaccatctgtggccccttggcttttgctccaggtccgggacagygaccccagtgaccccaaaagagagaccattgtccagctcattgatgacttcaggatctcaggagtcaatggagtccgtatcctttgcaggaagagcaaag

SEQ ID NO: 548874 - DNA, 201 bp, Homo sapiens
ctctgctgggacatccagtgagtgcctccttcgcctccggggcccagcactggctgggatcctgtccctgggcttgcttggggccaccctgatccccgccrtgggtcctgccagggccacagcctacaagggtctcggtattgcaggcgcaagcgctttgtggccctcaaagtggtgaagagtgcggggcattacacggag

SEQ ID NO: 548875 - DNA, 201 bp, Homo sapiens
cggcagtagcagcaggtagggctcggctggggcacccggagcccctggcgtctctcatgcccactgccactcaccccacccgcagctcacaggcctcctgygggcccgagtcctcgggctccgaactagccctggccacaccggtgcctcagatgctgcagggccttctgggctccgacgacgaggaacaggaagacccca

SEQ ID NO: 548876 - DNA, 201 bp, Homo sapiens
gaggcgcaaacggaaacagcagaagcggctgctggaggagcggctgcgggacctgcagaggctggaggccatggaggctgccacccaggctgagggtgagrggccacagagggtgatgggccgtggagcgcagcaaaggctgcaagacatctgctcagcagctgcctccaccccgtctccccagactctggcttgagacta

SEQ ID NO: 548877 - DNA, 201 bp, Homo sapiens
cttaagggaaaagcgggacagctcccaccaccctgctgggcgccagttctccacaaccacagggcagagagacgctggagccaggcccggctctcagagcrtgttctgcctgagacccccgtgagggctctcggagaaagtgtgtgtattcctttcttaataaagtgtggactgaacatcggtgcctggagtgagggaggc

SEQ ID NO: 548878 - DNA, 201 bp, Homo sapiens
acggaaacagcagaagcggctgctggaggagcggctgcgggacctgcagaggctggaggccatggaggctgccacccaggctgagggtgaggggccacagrgggtgatgggccgtggagcgcagcaaaggctgcaagacatctgctcagcagctgcctccaccccgtctccccagactctggcttgagactagacgggggc

SEQ ID NO: 548879 - DNA, 201 bp, Homo sapiens
cccctcccgctccataggtaccaagggcccacatggggctgggtcggggcctctgggcctgaacccctgcctgagtctctgttcctccctgtccccccccmccgctccccacctgcactcccagtcagcactgccccccaggaggtcttggtaagttggggggcccctctctcccatgcctcctctcccatctgagccaac

SEQ ID NO: 548880 - DNA, 201 bp, Homo sapiens
caagacatctgctcagcagctgcctccaccccgtctccccagactctggcttgagactagacgggggcagcggctccacatcctcttcaggctgtcacccygggggcgccagagcaggtccctccccagcctcttcctcccccgccccagggggcggccgtagcctcagcgcgggctcacagacctcaggcttctccggct

SEQ ID NO: 548881 - DNA, 201 bp, Homo sapiens
cgtgccctgcgtgaagagcatcgtgaggcaggtgagtgccacccactgggctgcccagcctggcctgggcgggagttggaggaggtcaggtgcgactctcygcaggtgctgcacggcctggactacctccacaccaagtgcaagatcatccacacggacatcaagcccgagaacatcttgctgtgtgtgggggacgcttac

SEQ ID NO: 548882 - DNA, 201 bp, Homo sapiens
gcttgagactagacgggggcagcggctccacatcctcttcaggctgtcaccccgggggcgccagagcaggtccctccccagcctcttcctcccccgccccrgggggcggccgtagcctcagcgcgggctcacagacctcaggcttctccggctccctcttctctcctgcctcctgctccatcctctccggctcgtccaatc

SEQ ID NO: 548883 - DNA, 201 bp, Homo sapiens
ctgcctgagacccccgtgagggctctcggagaaagtgtgtgtattcctttcttaataaagtgtggactgaacatcggtgcctggagtgagggaggcccacrccaagtctagggagaaggtgctttattctgggatctgcgtaccaggctggctggggtgctggagtgggaaggggaatccaaggagcaaaccaagaaggtc

SEQ ID NO: 548884 - DNA, 201 bp, Homo sapiens
tgcgggacctgcagaggctggaggccatggaggctgccacccaggctgagggtgaggggccacagagggtgatgggccgtggagcgcagcaaaggctgcargacatctgctcagcagctgcctccaccccgtctccccagactctggcttgagactagacgggggcagcggctccacatcctcttcaggctgtcaccccgg

SEQ ID NO: 548885 - DNA, 201 bp, Homo sapiens
cgggacctgcagaggctggaggccatggaggctgccacccaggctgagggtgaggggccacagagggtgatgggccgtggagcgcagcaaaggctgcaagrcatctgctcagcagctgcctccaccccgtctccccagactctggcttgagactagacgggggcagcggctccacatcctcttcaggctgtcaccccgggg

SEQ ID NO: 548886 - DNA, 201 bp, Homo sapiens
tcagcgcctttctgctgcccatgatggagtacatccccgaaaagcgggccagtgccgctgactgcctccagcacccctggctcaacccctaggcccggctrtggctccacctccagctctccgtgccttaagggaaaagcgggacagctcccaccaccctgctgggcgccagttctccacaaccacagggcagagagacgc

SEQ ID NO: 548887 - DNA, 201 bp, Homo sapiens
gcaaatgggggggccctcgctgctagagcctgtctgcagacccgcacaatgggcttgcatccctcccagtaacgggagcctctggcacgaccccgcccccrggtaactgtgtttacgtggaggcagtaacaagctagcgttgattgtccatggacgttgctattatccccaaacggcaggtgctgtctctgtggcactgcc

SEQ ID NO: 548888 - DNA, 201 bp, Homo sapiens
gaacgggccctgggtgtccactgaggtgctggctgcggcgatcggccttgtgatctactacttggccttcagtgcgaagagccacatccaggcctgagggsggcaccccagccctgcccttgcttccttcaataaacatcacaggacctgggactgcacaggacctggggctgctggcttgcgttattgtgccttcccccg

SEQ ID NO: 548889 - DNA, 201 bp, Homo sapiens
ccagtgcattgcctgcctgcagcccccacccccgatgtctctgctgaggatgccttcagtaactcgtccaggccgtttgtggctctgaattgaggctggcstggcccccgggcctccgtgtcataggtccaagtgttggcatgtattgtccagtgaatccagcccccacctgtccccagttcgctcttcctgcacacctcc

SEQ ID NO: 548890 - DNA, 201 bp, Homo sapiens
gacactgcagcccccaactgggcctagcctgcccacctgcaggccgtgtgagcagcgcacagggctcctctgcccacacccagagggggcagaaggtgacyctgcctttgttccctcacccagaacatggctctctatgctgacgtcggtggaaaacaattccctgtcactcgaggccaggatgtggggcgttatcaggtg

SEQ ID NO: 548891 - DNA, 201 bp, Homo sapiens
tactcccctgagctggcttgtgatctcctttttttcagggcacttggaacgggccctgggtgtccactgaggtgctggctgcggcgatcggccttgtgatytactacttggccttcagtgcgaagagccacatccaggcctgagggcggcaccccagccctgcccttgcttccttcaataaacatcacaggacctgggact

SEQ ID NO: 548892 - DNA, 201 bp, Homo sapiens
ctccccagccttccttcacagccatcccgcctacgttgccattgcatttgtgaccgagcacttggatctgtctcgcatatcccacctggaaggggcaggargagcgcatgggtccccagctgatccgtgctatgaggcagggccgggccatcctgccctcagaccgggatactcgagctggccttacccaggcatctctcc

SEQ ID NO: 548893 - DNA, 201 bp, Homo sapiens
cttgggcagcccactgggcacccctgaccccagcacctcccttgtagactcaggaaatcactcagcccttttgatcatcccgcccctgctcacagtcaacrgggttcctatgcgtccagttaggcccggccatggggatctggccttgtgcccccgtagggaagaccaatgcagagggccagtcacgggattggtgagtgt

SEQ ID NO: 548894 - DNA, 201 bp, Homo sapiens
tttctctcacagctaacaagttgtgcttctggaaccagagtctctcccgtttacttcttcaggaaacgctggggccagtcttcaccttctgtcaactggcsgggggcagagaccctttctctcatcttgaaagccccagtgcattgcctgcctgcagcccccacccccgatgtctctgctgaggatgccttcagtaactcg

SEQ ID NO: 548895 - DNA, 201 bp, Homo sapiens
ctctcccggcccgtccggagggccccccgccacccgatgcagaccccctgggggagccggtccagggccaacttcggccaatcccctcagtgacagcggargcggccaatcaaccccggcgcgaagccctttccccgcccctggtggggcccctagccaatcggactccagactgcttcgggtgcggctaccccaccgctc

SEQ ID NO: 548896 - DNA, 201 bp, Homo sapiens
ggggatctggccttgtgcccccgtagggaagaccaatgcagagggccagtcacgggattggtgagtgttacctggtacctcctgccagggacactgcagcycccaactgggcctagcctgcccacctgcaggccgtgtgagcagcgcacagggctcctctgcccacacccagagggggcagaaggtgaccctgcctttgtt

SEQ ID NO: 548897 - DNA, 201 bp, Homo sapiens
ggccacgtcagtgctgccagagacgtcacaatgccggcccagccgttcggtgcgcgattggctgccgctgccacttacgcgtcgctcttcctcgtttgccyctcgtgttcatgggagctcgttttcttttcctctaggcagagaagaggcgatggcggcgatggcatctctcggcgccctggcgctgctcctgctgtccag

SEQ ID NO: 548898 - DNA, 201 bp, Homo sapiens
cacggagaagagcagaagcaaaacccccgcagcctcagaaaccctagctccttcccattccaggcgcctcgaggggaaggcatctggggctctaagactgsgggactatgggggatgactggcaaagtccggttctttgccaccgggataggtggcaaagcggtccacgagagaggaaaccgtggagaaatttgagtcccg

SEQ ID NO: 548899 - DNA, 201 bp, Homo sapiens
accaggtctgctgcaaggacctctggtacctagagacaggtaggcccggcccagccgactcccctcctcccatagcctcccgccccttctcaccaactgcrttctcccacagaaaagccaccacccccagcccgagtacaactggtacgcgccaacaccaactccctggaggtgagctggggggcagtggcaacagccgac

SEQ ID NO: 548900 - DNA, 201 bp, Homo sapiens
gaaatggtcactctcagggcacagagaagagccagactcccacacaagcaggccaacagaagtggctcagggctgcctgcaaaggggctggggacatcgtrcagaaggtgatggctgacggctggccccttctctcatcaggtgtccctgctgttctcaaagtgaccggtcctcaggctacaacaggaactccattggtca

SEQ ID NO: 548901 - DNA, 201 bp, Homo sapiens
cctgatcctaagagcatttgccacgtggactttcttgtcctgcagcctgagaggaggatctagccagctgggcttgccacaggcccatgagaatcaacggracctgactctggtctttagaaaggatccagagctcccagctgcctcttgccacgggggttgccgtgcatggtgggtggtgggagccctctgtgtctgggg

SEQ ID NO: 548902 - DNA, 201 bp, Homo sapiens
gtagagaaagctgagccatgctggcgggatgaggctcccaagagcagggcagcccctgggcaggttccggtgaggtccaccaagcagggaggtgggtggcwcctgtgacctggcctcacatgcccgtgcctgctgcaggtgattggcagtagcccacagatgagtgggatggccgcactggccgctgcggccgctgccacc

SEQ ID NO: 548903 - DNA, 201 bp, Homo sapiens
caggagcctgtcctgccttatctggccctccccttggtggtagaggaagcctgtggtggtcaagccaagtacaggccgggggggctcctgctgagcagccrcctgcctgtcgcccccacagaccccccacctgctgccagcgatcagggagaggtggagagcacccagggcgacagcgtgaacatcaccagctccagtgcc

SEQ ID NO: 548904 - DNA, 201 bp, Homo sapiens
ccatagccaacacagaaacttctgacatgcccttctctgctgttgacatcctgcagcccccagaggaactccaggtgtcgccaggtcctcgccagcagctkccgccacggcagcttctgcagtcggcttccacagccctgatgggggagtccgccgaggtcctgtcagcctcccagacccctgagctcccggccgccgtgg

SEQ ID NO: 548905 - DNA, 201 bp, Homo sapiens
ggaggcagcccagggctctaagtcccagtgccaaacccgccagaccagcgcgaccagcaccaccatgactgtgatggccaccggggccccgtgctcggccrgcccactccttgggccgagcatggcacgggagcccgggggccgcagccctgcttttgtgcagttggcccctctgagcagcaaagtcaggctgagcagccc

SEQ ID NO: 548906 - DNA, 201 bp, Homo sapiens
tcagcctcccagacccctgagctcccggccgccgtggatctgagcagcacaggggagccatcttcgggccaggagtctgccggctctgcggtggtggccastgtggtggtccagccacccccacccacacagtccgaagtagaccagttatcacttccccaagagctaatggccgaggcccaagctggcaccaccaccctc

SEQ ID NO: 548907 - DNA, 201 bp, Homo sapiens
aggtggagagcacccagggcgacagcgtgaacatcaccagctccagtgccatcacgacaaccgtgtcctccacactgacgcgggctgtgaccaccgtgacrcagtccacaccggtcccgggcccctctgtgccggtaagagcccagggggccgtgttcttccccgccttcccggcctacgcccgtgcagttccacactcag

SEQ ID NO: 548908 - DNA, 201 bp, Homo sapiens
aatgagctggccggcacggtccccagcactgtggcgctgctgccctcaacggccactgagagtaagcgactgagggcgaattggtgctggggtggtggggrcacccagggaggtgagggcaggacgggaggctcggtctcacttgggagccaggtttcccgagtctttcccgctgacaccttctttcttcctaggcctggc

SEQ ID NO: 548909 - DNA, 201 bp, Homo sapiens
gggggaagatctctttgaagctccttgaactaccacatggaatatctctactgtgttagaaaatggcttatgggaaccatgattagtcagttctggaagcytctagcctgttctgttgaccttctgaccccctggcttctagagtccggatggtgctcacctcacctgggagccaccctctgtgacctccggcaagattat

SEQ ID NO: 548910 - DNA, 201 bp, Homo sapiens
caacacccaggaccttcttgctccagcaaggcacctcgctcacccccggccatttcctcctccaccacaagttgccccgggtccctagtggtggccttctyatcccacggttcagtctccaggtcttgattttgcaggcgagccggtgggagtggaagagactcaaagcaaagacgcccaaaaacgggccccctccgtgtc

SEQ ID NO: 548911 - DNA, 201 bp, Homo sapiens
ggtgttcgcctggtcacacccgtcaccgtctccgccgtcaagccagccgtcaccacgttggttgtgaaaggcaccacaggtgtgtacccataggccaggtyccctgccacccctagattataacgaagcagggctggccttcaatccccatggcacagctgggtggcacagcagctcctctctcccgagccttctatgcaa

SEQ ID NO: 548912 - DNA, 201 bp, Homo sapiens
ctcacaaccccaaccatcaccatgcaggtagggcagggcctgaggccacgtgtgggcgagggaccccacacaagtggaagcacgtgaggctcacgccgtcygtccacaggcctttccttcctggtgttgcgctgctgccgggtgcagccatggcaggcctttcctcacctggggcattttccctggtgtcacatggtccct

SEQ ID NO: 548913 - DNA, 201 bp, Homo sapiens
atggtccctgtgtcatagtccgtggtttggctgtcatggtttggccatgcctggtgtttgaacaccgggttcttcctctcgcagtgttctacaggacgccrcagctcgtctgcatgtgtgtgcagtgttctgttcatacatattaaggaaaacggtgaaacgtttgttgttggcctttgagcattgagggggatttccatt

SEQ ID NO: 548914 - DNA, 201 bp, Homo sapiens; identical to SEQ ID NO: 384599

SEQ ID NO: 548915 - DNA, 201 bp, Homo sapiens; identical to SEQ ID NO: 384601

SEQ ID NO: 548916 - DNA, 201 bp, Homo sapiens
gcctggaacaaccaggtctgctgcaaggacctctggtacctagagacaggtaggcccggcccagccgactcccctcctcccatagcctcccgccccttctsaccaactgcgttctcccacagaaaagccaccacccccagcccgagtacaactggtacgcgccaacaccaactccctggaggtgagctggggggcagtggc

SEQ ID NO: 548917 - DNA, 201 bp, Homo sapiens
taagagctgtgtggggtgtgcggggagcaagctgggcccccggctccctttggaatccactggaaggatccagtgggcagagctctctgaagcaatgttcygcctctgagttttttgaatgagctctccatccaaatggcccaacatccaaaagtgcaaaagcctctacggtgcagggcctccttccctcctcccggttct

SEQ ID NO: 548918 - DNA, 201 bp, Homo sapiens
ttttggggagaaattcatgtctgatcactgagtgctagggaaggaaggcagtggctagattcccagtagctgatgagggatcttgcacagtaacttcccgytcattaagatgaccttggcgagaagcagggtggtcacaggctcttttgcactggcctgaagtcgaggggtttggaagatggcccaggtagcgcagctgga

SEQ ID NO: 548919 - DNA, 201 bp, Homo sapiens
aggtgctcaggatgtacctgaaggagcgctattgctagcctggtcgaaaccgcctgggtaacacaggaatctagctaccatgacaacagtcagagggcctsccgtaggctatagggaagccagggatggaattctctcactgagacagatcctaccttcctgagctagcttgaatccagggaacgacctgtgtgcagtcta

SEQ ID NO: 548920 - DNA, 201 bp, Homo sapiens
ctttggataagggctagccttgcacacggttccgcattgagccctgggggtgacagtgtgagactgggtgggaccagagtgcagtggggcatgcattcccraccatggtcagccgcctggccctgggtgcacacctgaatatggaaaaaaaacactgtttttcctcttctatggtctcacaacacttttggccaccaaact

SEQ ID NO: 548921 - DNA, 201 bp, Homo sapiens
ggtgctcaggatgtacctgaaggagcgctattgctagcctggtcgaaaccgcctgggtaacacaggaatctagctaccatgacaacagtcagagggcctgscgtaggctatagggaagccagggatggaattctctcactgagacagatcctaccttcctgagctagcttgaatccagggaacgacctgtgtgcagtctac

SEQ ID NO: 548922 - DNA, 201 bp, Homo sapiens
tgcaggacagtgggagggacaggcagacagccagctgcagcactaactctcctcctcgtgtgtctccccagcccgtgtcccagcccacccaggtaactctratcacggcacctagtggggtggaggcccagcctgtgcatgacctccctgtgtccattctggcctccccgactacagaacagcccaccgccacagttacca

SEQ ID NO: 548923 - DNA, 201 bp, Homo sapiens
ggagctgtgctccctgacagacctctcttgacgggggtggggagggcccctgccctgcctggagtgttctagaatgagatcagcacctcttgggtcctgtrgaaggatctggtgagcgggatccccaaagatatcacagggcgcttctggcctggcccaccggctcactgatcagcgtgtgataggaaagctgcccactga

SEQ ID NO: 548924 - DNA, 201 bp, Homo sapiens
atgtgggtggtttcctgtccaccctgcaggggctcttcatatctgagcattagccataggtccctttaaaaacaaacagtggcagcctggcgcacgcagtsccacacctggcctttctcatccgccgtatcttggagatcactccacgtccctgccccgcagcagcctccttcgagttgcggttgtgctgctgtaacttgt

SEQ ID NO: 548925 - DNA, 201 bp, Homo sapiens
tctgggtgagggaaaagccccctgcaggcggctgggggagggccttgggatgccctagtcctgagtggcaggcacggctcccagcactaaccccttgctcygcggccgttctctcctgggggctctagcgatcccctggcctcggtggtggccctgcagacaaaccctcgctgagtgggctttgtgtcctgagcggtgaga

SEQ ID NO: 548926 - DNA, 201 bp, Homo sapiens
gatcagggcatattctcacgcctgtgccccttgcagttctgcgggatcagtcctcaaaaagccttgtacctttggagagagctgatctggaaggggttccygttgctaggataagaaagcttcagggggtgtgtgctttgagagctcttagggtagctactgtgcttgtccttagggaattttagttccatgtggcaagcc

SEQ ID NO: 548927 - DNA, 201 bp, Homo sapiens
gcgcgaccagcaccaccatgactgtgatggccaccggggccccgtgctcggccggcccactccttgggccgagcatggcacgggagcccgggggccgcagycctgcttttgtgcagttggcccctctgagcagcaaagtcaggctgagcagcccaagcattaaggaccttcctgcggggcgccacagccatgcggtcagca

SEQ ID NO: 548928 - DNA, 201 bp, Homo sapiens
cactgagagtaagcgactgagggcgaattggtgctggggtggtgggggcacccagggaggtgagggcaggacgggaggctcggtctcacttgggagccagrtttcccgagtctttcccgctgacaccttctttcttcctaggcctggctccatccaacacatttgtggccccccagccggttgtggtggccagcccagcca

SEQ ID NO: 548929 - DNA, 201 bp, Homo sapiens
gtaagcgactgagggcgaattggtgctggggtggtgggggcacccagggaggtgagggcaggacgggaggctcggtctcacttgggagccaggtttcccgmgtctttcccgctgacaccttctttcttcctaggcctggctccatccaacacatttgtggccccccagccggttgtggtggccagcccagccaagctgcag

SEQ ID NO: 548930 - DNA, 201 bp, Homo sapiens
gctgggaaagcccctgtcaccgtgacctcccttcccgccggagtgcggatggttgtgccaacacagagtgcccagggaacggtgaggagtggtcactgggkcgggtgggatttcctgttgatccagtggattaagttgcaagtgtactgaggggttcacatccctctcgggctctggtaccacgcaccccacacctttccc

SEQ ID NO: 548931 - DNA, 201 bp, Homo sapiens
ttccattacgaccctgggggaccaaggaaagacagattcaggggggagagggccacacacaagctgagtctgagaccctccccgggcctgtgaggctccgccctatcaggtacagagtgttctaggtcctctgtgcaagcacctgggtgtctttgtggatgtccaggtcctaaagggaacctagaaactgtggacatgaag

SEQ ID NO: 548932 - DNA, 201 bp, Homo sapiens
tagcctggtcgaaaccgcctgggtaacacaggaatctagctaccatgacaacagtcagagggcctgccgtaggctatagggaagccagggatggaattctstcactgagacagatcctaccttcctgagctagcttgaatccagggaacgacctgtgtgcagtctaccttgtgtaaccctttcccctccgtctctctgcag

SEQ ID NO: 548933 - DNA, 201 bp, Homo sapiens
cattatagtctaggggcagcaggggcagccctcacagagcctgtctcccctgggccccactctcccatccaggtgtgaccagcagtcctggcatcaagtcmcccatcaccatcatcaccaccaaggtgatgacttcaggaactggagcacctgcgaaaatcatcactgctgtccccaaaattgccactggccacgggcagc

SEQ ID NO: 548934 - DNA, 201 bp, Homo sapiens
agtttggggtttctggaaagagtgtggtgaatcctctgagggacccctcataggaggaggttttcggggaagccctggcctgccaggtgtgaggggagtcragtttgaggacatgagggaggggcctggtcccagctgaaggctggctgtgccatcctgtggaagcaaagcagtgcctaaggtctgatttccctctttctt

SEQ ID NO: 548935 - DNA, 201 bp, Homo sapiens
gttctcactctgcctccttggccccatgtgacctgacggtagtggcttcagggttgaggcaagcgggaggtggaagggacgcttgagagtctgccaaggcygctctgaacttggcccacctcagaagaaggcagcaaggaccaacacccaggaccttcttgctccagcaaggcacctcgctcacccccggccatttcctcc

SEQ ID NO: 548936 - DNA, 201 bp, Homo sapiens
gaccgaagtggccaatggcatcgagtccctgggtgtggtgagtcgggtgtgttggggctcctgagtccgtggcctggggggcagcactgcctctaggtgckgagggcctgatctcgtcgcaccgattctgtcttgcagaagccagacctgccgcccccacccagcaaagcccccatgaagaaggaaaaccagtggtttgat

SEQ ID NO: 548937 - DNA, 201 bp, Homo sapiens
ctgtgtggtgacagtgcaggacagtgggagggacaggcagacagccagctgcagcactaactctcctcctcgtgtgtctccccagcccgtgtcccagcccrcccaggtaactctgatcacggcacctagtggggtggaggcccagcctgtgcatgacctccctgtgtccattctggcctccccgactacagaacagcccac

SEQ ID NO: 548938 - DNA, 201 bp, Homo sapiens
ctgccttatctggccctccccttggtggtagaggaagcctgtggtggtcaagccaagtacaggccgggggggctcctgctgagcagccgcctgcctgtcgmccccacagaccccccacctgctgccagcgatcagggagaggtggagagcacccagggcgacagcgtgaacatcaccagctccagtgccatcacgacaacc

SEQ ID NO: 548939 - DNA, 201 bp, Homo sapiens
aagcagaggcagatgggaaagcagagagaggagcgcgcttcctttcctccccgctgccgcccaccctggggagagacttttgcggggagggaaggcggagstgaggacagccagctccccctcccaaggctgtgcgttcctgagggccaggtcgggggcaggcatggaggggaggaaaggcgtccctcttggccctcccca

SEQ ID NO: 548940 - DNA, 201 bp, Homo sapiens
ttccactcctgtcctcccctctccagcagtcgcactgctctgtgctcccaagggcccggcttggtcagagctcttctagggtgtttgtctcatcgtgggakgggggcatgcagccttcctaccccattgggagtatgagcacaagatcggtgtcctctgtgcctcccagcacgtcgtatgccacacaggaaatgctctaat

SEQ ID NO: 548941 - DNA, 201 bp, Homo sapiens
gatgatttgggcaccgtccctgactataaccagctgaagaagcaggagctgcagccaggcacagcctataagtttcgtgttgccggaatcaatgcctgtgsccgggggcccttcagcgaaatctcagcctttaagacgtgcctgcctggtttcccaggggccccttgtgccattaaaatcagcaaagtgagtcttgctgtg

SEQ ID NO: 548942 - DNA, 201 bp, Homo sapiens
tgggggcctgggtgccaggccacaggaagaactcatgtccctgcccatggaagatcccatgagcacacatggctcagcaagttctgctgctcactcccctygcccacagcctccagaacattccctgagccgccaaggctgccggcggagagtagccagaccacacttcccttcctggcagtgatgccggctcatgcacct

SEQ ID NO: 548943 - DNA, 201 bp, Homo sapiens
atgatttgggcaccgtccctgactataaccagctgaagaagcaggagctgcagccaggcacagcctataagtttcgtgttgccggaatcaatgcctgtggscgggggcccttcagcgaaatctcagcctttaagacgtgcctgcctggtttcccaggggccccttgtgccattaaaatcagcaaagtgagtcttgctgtgg

SEQ ID NO: 548944 - DNA, 201 bp, Homo sapiens
cggcctacgcccgtgcagttccacactcagacgccagatgtcgctcttgtaccaggcatggggccgctcctggtcccttttccggaccataaaagggcagyctcggtgcctgctgcggcaggaggcaggagcctcaccgtcccccgcatctctggggcgcttttatttctgggactggttctcatcgcgtgtcacttcacc

SEQ ID NO: 548945 - DNA, 201 bp, Homo sapiens
gtttggccatgcctggtgtttgaacaccgggttcttcctctcgcagtgttctacaggacgccgcagctcgtctgcatgtgtgtgcagtgttctgttcatayatattaaggaaaacggtgaaacgtttgttgttggcctttgagcattgagggggatttccattctctgacaaaggacttgacttcagccagcctcctgcct

SEQ ID NO: 548946 - DNA, 201 bp, Homo sapiens
gcaccattgccaccctctcaagccaggtgatcaaccccactgccatcactgtgtcggccgcacagaccacgctgacagcggcaggcgggctcacaaccccraccatcaccatgcaggtagggcagggcctgaggccacgtgtgggcgagggaccccacacaagtggaagcacgtgaggctcacgccgtccgtccacaggcc

SEQ ID NO: 548947 - DNA, 201 bp, Homo sapiens
tggagatcactccacgtccctgccccgcagcagcctccttcgagttgcggttgtgctgctgtaacttgtacaggcgccgctccgtgagtatccttgcaccrtctccacccgtgtgcaagtgtatcctaggggtgaaaacctagaagtagggttgctgtccgatgcggctgaactgccctgcacagaggctgtgcccacgta

SEQ ID NO: 548948 - DNA, 201 bp, Homo sapiens
aagcccctgtcaccgtgacctcccttcccgccggagtgcggatggttgtgccaacacagagtgcccagggaacggtgaggagtggtcactggggcgggtgkgatttcctgttgatccagtggattaagttgcaagtgtactgaggggttcacatccctctcgggctctggtaccacgcaccccacacctttccctcctggg

SEQ ID NO: 548949 - DNA, 201 bp, Homo sapiens
cttgtgggcaacaaatgctacctgtttgggggtctggccaatgatagcgaggacccaaagaacaacattccaaggtgaggcttggtccttttctctggaamcccccgggtgggtgtgctctcacatgcacagggctccatggtgtcctaaagaatgtgcgcagcagagccccgtggccgggtccctttctcgtgctgggtt

SEQ ID NO: 548950 - DNA, 201 bp, Homo sapiens
gtgggtggtttcctgtccaccctgcaggggctcttcatatctgagcattagccataggtccctttaaaaacaaacagtggcagcctggcgcacgcagtgcsacacctggcctttctcatccgccgtatcttggagatcactccacgtccctgccccgcagcagcctccttcgagttgcggttgtgctgctgtaacttgtac

SEQ ID NO: 548951 - DNA, 201 bp, Homo sapiens
caggctgggggacctgtggaccctagatattggtgagcagggtggtagcaccccagcagccatgggacaaagcgggtctgcctcttggctggccccgtggrtggcgctgttgtatggtgaggtggggctcttagggagctggagcataccacttcgtgctttcctcttgtcatggtgggccagggtggggaaccctggatc

SEQ ID NO: 548952 - DNA, 201 bp, Homo sapiens
aaggtgaggcttggtccttttctctggaaccccccgggtgggtgtgctctcacatgcacagggctccatggtgtcctaaagaatgtgcgcagcagagcccygtggccgggtccctttctcgtgctgggttgtaaatgagagagcggcaccggatgccctctcaggagctttcgggctccaaaatcgctactgaccctgagc

SEQ ID NO: 548953 - DNA, 201 bp, Homo sapiens; identical to SEQ ID NO: 384591

SEQ ID NO: 548954 - DNA, 201 bp, Homo sapiens; identical to SEQ ID NO: 384590

SEQ ID NO: 548955 - DNA, 201 bp, Homo sapiens
cattacgaccctgggggaccaaggaaagacagattcaggggggagagggccacacacaagctgagtctgagaccctccccgggcctgtgaggctccgcccyatcaggtacagagtgttctaggtcctctgtgcaagcacctgggtgtctttgtggatgtccaggtcctaaagggaacctagaaactgtggacatgaaggtg

SEQ ID NO: 548956 - DNA, 201 bp, Homo sapiens
gggtttctttgttttgttgtttttaatgtaataatccaataacttcttgattttaattcccatccttgacaacaaaagaaccaagggcaaccaggggtggygggtttcctccatcctccttgctgacctcccttgtctgccctcccccagataccatggcctgggagaccatcctgatggatacactggaggacaacatcc

SEQ ID NO: 548957 - DNA, 201 bp, Homo sapiens
aggcctggaacaaccaggtctgctgcaaggacctctggtacctagagacaggtaggcccggcccagccgactcccctcctcccatagcctcccgccccttstcaccaactgcgttctcccacagaaaagccaccacccccagcccgagtacaactggtacgcgccaacaccaactccctggaggtgagctggggggcagtg

SEQ ID NO: 548958 - DNA, 201 bp, Homo sapiens
ccacttccactggcaccaccatgtcggtcagcgtgggtgccctgcttcccgacgccacttcttcccacaggaccgtggagtctggcctagaggtggcggcrgcacccagcgtcaccccccaggctggcaccgcgctgctggctcctttcccaacacagagggtgtgctccaaccccccctgtgagacccacgagacgggca

SEQ ID NO: 548959 - DNA, 201 bp, Homo sapiens
ccaccagcgagatgcccgtcgggcctgtgcagctggcacccctgccgtgatccggatcagtgtggccactggggcgctggaggcagcccagggctctaagycccagtgccaaacccgccagaccagcgcgaccagcaccaccatgactgtgatggccaccggggccccgtgctcggccggcccactccttgggccgagcat

SEQ ID NO: 548960 - DNA, 201 bp, Homo sapiens; identical to SEQ ID NO: 384602

SEQ ID NO: 548961 - DNA, 201 bp, Homo sapiens
ccatcacgacaaccgtgtcctccacactgacgcgggctgtgaccaccgtgacgcagtccacaccggtcccgggcccctctgtgccggtaagagcccagggsgccgtgttcttccccgccttcccggcctacgcccgtgcagttccacactcagacgccagatgtcgctcttgtaccaggcatggggccgctcctggtccct

SEQ ID NO: 548962 - DNA, 201 bp, Homo sapiens
atcacgacaaccgtgtcctccacactgacgcgggctgtgaccaccgtgacgcagtccacaccggtcccgggcccctctgtgccggtaagagcccagggggscgtgttcttccccgccttcccggcctacgcccgtgcagttccacactcagacgccagatgtcgctcttgtaccaggcatggggccgctcctggtcccttt

SEQ ID NO: 548963 - DNA, 201 bp, Homo sapiens
tagccaacacagaaacttctgacatgcccttctctgctgttgacatcctgcagcccccagaggaactccaggtgtcgccaggtcctcgccagcagctgccrccacggcagcttctgcagtcggcttccacagccctgatgggggagtccgccgaggtcctgtcagcctcccagacccctgagctcccggccgccgtggatc

SEQ ID NO: 548964 - DNA, 201 bp, Homo sapiens
ggatggaattctctcactgagacagatcctaccttcctgagctagcttgaatccagggaacgacctgtgtgcagtctaccttgtgtaaccctttcccctcygtctctctgcagacaccctgacgtggaataagcccagtctcagcggggtggcgcctcttcctcgcagtctccactcggcaaccaccatcggaaataagta

SEQ ID NO: 548965 - DNA, 201 bp, Homo sapiens
gcagggtcctttccccaccttcccctcccagctgagagccagcatttccaggatgaggggcccaaggattgggttacatgacaccccccagatgattcagrggtgactgagagcagctgtcacattgaaaagctgggagaagggaggagagcttgctcgtgtgctttcagggggcggaaccaggactcgtgggtgagatga

SEQ ID NO: 548966 - DNA, 201 bp, Homo sapiens; identical to SEQ ID NO: 384585

SEQ ID NO: 548967 - DNA, 201 bp, Homo sapiens
gaagcagaggcagatgggaaagcagagagaggagcgcgcttcctttcctccccgctgccgcccaccctggggagagacttttgcggggagggaaggcggasctgaggacagccagctccccctcccaaggctgtgcgttcctgagggccaggtcgggggcaggcatggaggggaggaaaggcgtccctcttggccctcccc

SEQ ID NO: 548968 - DNA, 201 bp, Homo sapiens
agtaccaccaagcccggcacgaccaccatcatcaaaaccatccccatgtcggccatcatcacccaggcgggcgccacgggtaggggcctcccccgacataygagtgtctgcaagtcctcactggaggggaaatggagtccgggttataaggcgtgctgtgtttctgtttagtttacccttttctatcttctccttgctgcc

SEQ ID NO: 548969 - DNA, 201 bp, Homo sapiens
tcaaaccaaggtaagtgaaggtggccagcctggctttcatggtctcccagccccccaggctgaaaggccaagacaacgatggcgggggtccgtccagagtycaccagtcaggctccttggcacccaatttaccagtggggagagctggggcgtcctggctgtacctgaagcagacagaggtctccaggagcctgtcctgcc

SEQ ID NO: 548970 - DNA, 201 bp, Homo sapiens
gcagtgctctggtgagtgatgggtgctgccaggctacggccactgccagtggtgaatggccgccctgggccagctccaggagagtctcagccaggccatgyccttgtttggtttccagatcactccttgctccatcccttcctttttagatttccaatctgggcaaagtgatgtcggtggtccagaccaaaccagttcaga

SEQ ID NO: 548971 - DNA, 201 bp, Homo sapiens
gggcggggggccacagcactagtgcttccctggccacgcccatcaccaccttgggcaccattgccaccctctcaagccaggtgatcaaccccactgccatyactgtgtcggccgcacagaccacgctgacagcggcaggcgggctcacaaccccaaccatcaccatgcaggtagggcagggcctgaggccacgtgtgggcg

SEQ ID NO: 548972 - DNA, 201 bp, Homo sapiens
ctctaagtcccagtgccaaacccgccagaccagcgcgaccagcaccaccatgactgtgatggccaccggggccccgtgctcggccggcccactccttgggscgagcatggcacgggagcccgggggccgcagccctgcttttgtgcagttggcccctctgagcagcaaagtcaggctgagcagcccaagcattaaggacct

SEQ ID NO: 548973 - DNA, 201 bp, Homo sapiens
ggtctccaggagcctgtcctgccttatctggccctccccttggtggtagaggaagcctgtggtggtcaagccaagtacaggccgggggggctcctgctgascagccgcctgcctgtcgcccccacagaccccccacctgctgccagcgatcagggagaggtggagagcacccagggcgacagcgtgaacatcaccagctcc

SEQ ID NO: 548974 - DNA, 201 bp, Homo sapiens
cccgtgcctgctgcaggtgattggcagtagcccacagatgagtgggatggccgcactggccgctgcggccgctgccacccagaagatccccccttcctcgscacccacggtgctgagtgtcccagcgggtaccaccatcgtgaagaccatggctgtgacacctggcactaccaccctcccagccactgtgaaggtggcctc

SEQ ID NO: 548975 - DNA, 201 bp, Homo sapiens
ccgtgcctgctgcaggtgattggcagtagcccacagatgagtgggatggccgcactggccgctgcggccgctgccacccagaagatccccccttcctcggsacccacggtgctgagtgtcccagcgggtaccaccatcgtgaagaccatggctgtgacacctggcactaccaccctcccagccactgtgaaggtggcctcc

SEQ ID NO: 548976 - DNA, 201 bp, Homo sapiens
ctccatcccttcctttttagatttccaatctgggcaaagtgatgtcggtggtccagaccaaaccagttcagacttcagcagtcacaggccaggcgtccacrggtcctgtgactcagatcatccaggtgagctctcagtctttgcacatacgcaagagtgggggcctgggtgccaggccacaggaagaactcatgtccctgc

SEQ ID NO: 548977 - DNA, 201 bp, Homo sapiens
cagatggcaagcccaccaccatcatcactaccacgcaggccagtggggcggggaccaagcccaccatcctgggcatcagcagcgtctcccccagtaccacsaagcccggcacgaccaccatcatcaaaaccatccccatgtcggccatcatcacccaggcgggcgccacgggtaggggcctcccccgacatatgagtgtct

SEQ ID NO: 548978 - DNA, 201 bp, Homo sapiens
ctggtaccacgcaccccacacctttccctcctgggacgtgcagatggggaaacgctcctgcgaggtcatggtgggaattaataggttaatgcctagaaggyctaacctgctgcctgatcctaagagcatttgccacgtggactttcttgtcctgcagcctgagaggaggatctagccagctgggcttgccacaggcccatg

SEQ ID NO: 548979 - DNA, 201 bp, Homo sapiens
ccccagccactgagactgcgagatcgctgcaggcttgccctgagcagcactgtgatctgtgtgttgtgtatccgtgtgtttgcaagggaggctgccacctyccggagcctgggtaccggcgggaaaggaagtcgcaggggaaaccattcagaggctttccaggaacgagggagagacaggaagccaaactgaaaggtgcct

SEQ ID NO: 548980 - DNA, 201 bp, Homo sapiens
agtgtcaacgctgctgtcagtaactactacctgcatgacgtcttggacctcatggacgtgagtccttggtgggcaggtgggaaaaggtgcctggtgcctcrgggctgggaagctgtggctccaggacctacccaagcatctccttgtttcctcctcagtgctgtgacacagggttccacctggccctggggcaggtgctcc

SEQ ID NO: 548981 - DNA, 201 bp, Homo sapiens
catgggaggccatcctggaggggctggggaagatgctcagtgcccaccagctccttgtcctcccacaggcctgcagcatgaaggcatcttccgggtatcgkgtgcccagctccgggtctcagagatccgtgatgccttcgagagaggtggggacgggcagggcgggcgggggtgggggctcgggcagatgtcaccagcttc

SEQ ID NO: 548982 - DNA, 201 bp, Homo sapiens
cacagcttggaccccctctcctccccagacctggagggggtcgtggaggctgtggcctgctttgcctacacgggccgcacagcccaggagctgagcttccrgcggggggacgtactgcggctgcacgagagggcctcgagcgactggtggcggggggagcacaacggcatgcggggcctcatcccccacaagtatatcacg

SEQ ID NO: 548983 - DNA, 201 bp, Homo sapiens
ggaggcaacccaggggagtccagagcctgggcagcaatggtgttcatggccactggtacagtgggccagcgccccgctgtgaatggtacagtctggcagtkgtgaccagggacagccttctggaggtggtgggatggcagcctgggatgccagcttacgttggggctctcacacctgctccggctgcttggcagcggggct

SEQ ID NO: 548984 - DNA, 201 bp, Homo sapiens
gttggctgagggcttgctttgggagtgggaggaactcaggtgggtcttgggcagggtcagtcgggggaactcactggtcactctccctttctttcccctcygctaggctgtggcacagaacatggactctgtgtttaaggagctcttgggaaagacctctgtccgccagggccttgggccagcatctaccacctctcccag

SEQ ID NO: 548985 - DNA, 201 bp, Homo sapiens
gcgtgctgaccaggcctgagccatggttccccccacagagatgcgctggcagctgagcgagcagctgcgctgcctggagctgcagggcgagctgcggcggragttgctgcaggagctggcagagttcatgcggcgccgcgctgaggtggagctggaatactcccggggcctggaaaagctggccgagcgcttctccagccg

SEQ ID NO: 548986 - DNA, 201 bp, Homo sapiens
gcaggggggccacggcagggcccaagctccgctcccaggtctcagtgcccctctacccccaggaaggagccgtccctcctgtcgcccttgcactgctgggyggtgctgctgcagcacacgcggcagcagagccgggagagcgcggccctgagtgaggtgctggccgggcccctggcccagcgcctgagtcacattgcagag

SEQ ID NO: 548987 - DNA, 201 bp, Homo sapiens
cttggaactacctggttttagttccacaccctccagccaaagcctagcaggaacagccctataatctccattgctggagggagccctgctccgtggggagsctggggcctctcagtgagagggtagtggaaaggccttagaggacttgggcttgccttaggggatctgggggagggcccaggtaagtggggcttggtcctg

SEQ ID NO: 548988 - DNA, 201 bp, Homo sapiens
aaaaaaaaaaagcaattgaatgacaacacagggcatgctgtgtccatggtgaagtaaacaccctctgtccccagagctcaggccagcctgtgcccctggtsgtggagagctgcattcgcttcatcaacctcaatggtaagcaggacccagcccctcccgatgtcctggcacccagcacccagttcccagcacctggcatgg

SEQ ID NO: 548989 - DNA, 201 bp, Homo sapiens; identical to SEQ ID NO: 384624

SEQ ID NO: 548990 - DNA, 201 bp, Homo sapiens
gggggtgggggctcgggcagatgtcaccagcttcctccccctaccgcaccactcgcccatctgcaggggaggacccactggtggagggctgcactgcccaygacctggactcggtggccggggtgctgaagctctacttccggagcctggagcccccactcttccccccagacctgttcggcgagctgctggcttcttcgg

SEQ ID NO: 548991 - DNA, 201 bp, Homo sapiens; identical to SEQ ID NO: 384628

SEQ ID NO: 548992 - DNA, 201 bp, Homo sapiens
ccttggaactacctggttttagttccacaccctccagccaaagcctagcaggaacagccctataatctccattgctggagggagccctgctccgtggggascctggggcctctcagtgagagggtagtggaaaggccttagaggacttgggcttgccttaggggatctgggggagggcccaggtaagtggggcttggtcct

SEQ ID NO: 548993 - DNA, 201 bp, Homo sapiens
accacctctcccagtcctgggccccgaagcccaaaggccccgcccagcagccgcctgggcaggaacaaaggcttctcccggggccctggggccccagcctyaccctcagcttcccacccccagggcctagacacgacccccaagccacactgaggtgccgctgctggagatgcgtgcccccggcggctacccgctggaccg

SEQ ID NO: 548994 - DNA, 201 bp, Homo sapiens
tgggactacaggcgcatgccaccgtgcccagttaattttttgtatttttagcggagacagggtttcaccgtgttggccaggctggtctccaactcctgagytcagataatccatccgcctcagcctcccaaagtgcttggattagaggcgtgagccactgcgccgggccaccattctgttttaaatagagttttattaagg

SEQ ID NO: 548995 - DNA, 201 bp, Homo sapiens
acctcgctgcctggccccgtctacgagaagtgcatggcaccgccttccgccagctgcctggggtacacccttggtgctgccgaggggactggggggtccastggagaagagcccccctcatctgcctcgctctgccctgaacctcagggacgcccagctggagagcctgggggcggacaatgagccggagctggaagccga

SEQ ID NO: 548996 - DNA, 201 bp, Homo sapiens
ccccctctcctccccagacctggagggggtcgtggaggctgtggcctgctttgcctacacgggccgcacagcccaggagctgagcttccggcggggggacktactgcggctgcacgagagggcctcgagcgactggtggcggggggagcacaacggcatgcggggcctcatcccccacaagtatatcacgctgcccgccgg

SEQ ID NO: 548997 - DNA, 201 bp, Homo sapiens
ccatggtgaagtaaacaccctctgtccccagagctcaggccagcctgtgcccctggtggtggagagctgcattcgcttcatcaacctcaatggtaagcagracccagcccctcccgatgtcctggcacccagcacccagttcccagcacctggcatgggaggccatcctggaggggctggggaagatgctcagtgcccacc

SEQ ID NO: 548998 - DNA, 201 bp, Homo sapiens
ggccctggggccccagcctcaccctcagcttcccacccccagggcctagacacgacccccaagccacactgaggtgccgctgctggagatgcgtgcccccrgcggctacccgctggaccggccactctccccagcccccttgcttctctccagccctgtccagcaagtgcagggtgcctgcacttcaccctgtgcagagag

SEQ ID NO: 548999 - DNA, 201 bp, Homo sapiens
gagccagctcccattcactgcaggacccagtacacacagagaaaattccagaagagccgccagccccgccccagctcccagtataaccagagactctttgrgggagacatggagaagtttatccaggtactagctttgccccacatgccagcccacctgtacatgctgatctttcttcagctctgggtcacctcagtggcc

SEQ ID NO: 549000 - DNA, 201 bp, Homo sapiens
ggcagaatacacatagcataaaacataccacgttcaccatttgtaagtgtgcggcccaggggcagaagcacattcacggtgctgtgcagccatcaccaccrtccagccgcagaacttgttcatcttcccaaactgaagctctggccccgttcaaccccaactccccaccccccagcccctggcacccacccttccactgtc

SEQ ID NO: 549001 - DNA, 201 bp, Homo sapiens
gggccagccctagtttagggggaggtcaggacagggtgtgctgacgagtttgtctgaactgagatccgaaagctctgccaggaaagccaccaatgcaatcracttgcaattcacaagttgcctgctcaacaccagccggtgtgcatgcccggatctggactaggacatggcttccagtcagcttttgctgccggcagtgat

SEQ ID NO: 549002 - DNA, 201 bp, Homo sapiens
aataagcactacaaagggaaggaaagtgcacggtgccaagaaggggtcggaagagggccagccctagtttagggggaggtcaggacagggtgtgctgacgmgtttgtctgaactgagatccgaaagctctgccaggaaagccaccaatgcaatcgacttgcaattcacaagttgcctgctcaacaccagccggtgtgcatg

SEQ ID NO: 549003 - DNA, 201 bp, Homo sapiens
cttctccagccgtggaggccgcctggggagcagccgggagcaccaaagcttccggtaggtgatgtgctggcaggggggccacggcagggcccaagctccgytcccaggtctcagtgcccctctacccccaggaaggagccgtccctcctgtcgcccttgcactgctgggcggtgctgctgcagcacacgcggcagcagagc

SEQ ID NO: 549004 - DNA, 201 bp, Homo sapiens
tggctggcgcggaggctgctggccctggaccccgtgcagggaaggagcactcgaaacaggccggtccttcccaccgcaggacggagaagcaggtggtgggygcagggctgcagactgcaggggagtctgggagcagtcccgagggcctcctggcatcggagctggtccaccggtgagcaagaagacggggctcagggggcc

SEQ ID NO: 549005 - DNA, 201 bp, Homo sapiens
acgtgtgcctactgctctcatttcaccatctggaaataccacttatcacccagaagtaattggctaatttgctggatttgccctttaaatgttccatgttmtcctgacacctgtaggtttcatttagaggctttttgtgctttttagtagagatgactctgtctggaaaggtgtttcgaaggataaatttaaccatggtat

SEQ ID NO: 549006 - DNA, 201 bp, Homo sapiens
ctataaacacctctacgcaaataaactagaaaatctagaagaaatggataaattcctggacacatacaccctcctaagactaaaccaggaagaagctgaawcccaataacaagttttgaaattgagcaataatggtagttgtccatagatgaggtctattttcttatttcctgagaacttattatgtttatatttaaaagc

SEQ ID NO: 549007 - DNA, 201 bp, Homo sapiens
aatggtagttgtccatagatgaggtctattttcttatttcctgagaacttattatgtttatatttaaaagcaataaaactatctttaaaagcactgtgatrtaatacaaaggtaatagcatccaatacccctgtggtaggcagaatttctcaaggacattcccattctaacccccagagcctgtgactcttgtcactttat

SEQ ID NO: 549008 - DNA, 201 bp, Homo sapiens
agaatagatgcacataatggaaaactgttcagcagtgaaaaggaatgctgacacatacagtacggctgaatcttgaaaacattatgctgcatgaaagagcyagaaacaaaaaaggaaataatctatagtttcaattctatgaaattctagaagagataaaattaacctatggtataaaaatcagatcaggctgggcacaac

SEQ ID NO: 549009 - DNA, 201 bp, Homo sapiens
agcctctgactttttaattccagagcagaaggaagtcgagatacccttgatggggaaactgagggcccagcaggagagggcccaagccggccaccctgtcygctcagcccaagaactctccccatccatggccctgcccttgccaggccgagttacagggctggcttttcacccatgtgcagagcccggaagagaggcaat

SEQ ID NO: 549010 - DNA, 201 bp, Homo sapiens
aaaagaaaaagattcatgttggtgtgctgcacccattaactcatcatttacattagggacatgtaccctacaacttaaagtataataaaaaaaaaaaaatatatatatatatatataaataaaagattcctggggaaaaatgaggtttgttatgttcccacctaaggctgaatccttgagctctatgcagtgtataaagat

SEQ ID NO: 549011 - DNA, 201 bp, Homo sapiens
taaaagaaaaagattcatgttggtgtgctgcacccattaactcatcatttacattagggacatgtaccctacaacttaaagtataataaaaaaaaaaaaatatatatatatatatataaataaaagattcctggggaaaaatgaggtttgttatgttcccacctaaggctgaatccttgagctctatgcagtgtataaaga

SEQ ID NO: 549012 - DNA, 201 bp, Homo sapiens
tctttggtgaagtctcttcatattttttacccattttaaaattggggttgagttcttattgttgacttttatgaattctttttttctttttttttttttttgagacagagtcttgctctgtcacccaggctggagtgcagtggtgtgatctcggctcactgcaacttccacctcccaggttcaagtgattctcctgcctca

SEQ ID NO: 549013 - DNA, 201 bp, Homo sapiens
cagatccgggctggttcgggcggcggcggcggctctgcagactgcgtgtgcaacgtggagtatttcactaggggaaaaagaggccgtcagaaggaattctrctctgtcttgcacagaagaagcaaatacagcagcaagcccgtgctgggaacagaactgggtttccctttgtatcccctggggggccgcttagcaaccttc

SEQ ID NO: 549014 - DNA, 201 bp, Homo sapiens; identical to SEQ ID NO: 113549

SEQ ID NO: 549015 - DNA, 201 bp, Homo sapiens
tttgggccggtcaaggggagagaaagagaaagctggacaggctctggaaacagctcagcctccatctcctcacctaaaaaatgagcgtgttcctgccagcrctgctggaagggttattttaaacaaagggctcaacctagcacctgcccacacagatgctggcctcgtggtggctaaccgtggcaaagctcatgacagtgg

SEQ ID NO: 549016 - DNA, 201 bp, Homo sapiens
accacaggcatgtttgcaaaacgaacacgaggcatgcgttagacagatgcatgtgggggctgcagattccagtggtttccttaagaaactggagttggctmatcccactcagcagacaatcccgctcagtggacagcctatgaaacgcatggggccatcatgcagaccaaagaggcccgtgagttttgtaagatcctgcct

SEQ ID NO: 549017 - DNA, 201 bp, Homo sapiens
catgaattttccaaatgattcttctcttgaacttcagaagactgtgctgtaactgttcccactattgaagttaatagagggaaaagacagagacagtgctrtatacagcaagcacctgggagagaaacagcgatgtatctggggaaaaaacctaaatgagttttacagagcaataatgtgatatccaaactgcctagggac

SEQ ID NO: 549018 - DNA, 201 bp, Homo sapiens
gagggcagctctgcatcataaattacttactttagggaaaagtggcaacacttgaccaagggcgtgccttaacaccatcagaagacaagaatctgctcggkgccattttatttaatgcaaacactagacagtttacaagtcacacctggacacaagcacgtgaacagatgtacagggaattctggaattttgagatcagtc

SEQ ID NO: 549019 - DNA, 201 bp, Homo sapiens
cactattcccatacgaaaggcacaccgttcttgcaagaaaagagcaaacactagtaaccacagccaagactgtggggagtgtatcagagttacaaccagayacacccataacttgtcacacttataaccgggtgtaacagcaatttgccattgcaacaggttacaaccagggttaccacaatttaccatcataacatgttg

SEQ ID NO: 549020 - DNA, 201 bp, Homo sapiens
aaaaatgttatttatgttaaatgtatgggtttagtgttgttcattttagattaataaagtctttcagttttaaattctaagatgatgagcattggtaaacrtgacccacataaacaaaaatctcttgagatctcaatgatttggggagtcctgagacaaaaaaggtttgagaactactgttacagggttctccagtggctt

SEQ ID NO: 549021 - DNA, 201 bp, Homo sapiens
gctgtaaaacaaggcacagctgcccttgttagagaattccaccctgaactggctgtgatccagcacctgccaatgcctgattgaaacgtctgatccttgasagagatcatttgatgggccccttaagtagcctttcatttggatttcattaattattcattccctcctctgttgttgctatccactccactcagttcatcc

SEQ ID NO: 549022 - DNA, 201 bp, Homo sapiens
ggtacgtccacaccatgaaatactgttcagtgaggaaaagcaacaaattattgatatatacggtgactcggaaggatctcaagggaattatgttgagtgaraaaagccagtcccaaaacagtatatactctgtgattccatttttgaaattgccaaatgctacagatggagaacaaattaatggttgtcaggggttagaga

SEQ ID NO: 549023 - DNA, 201 bp, Homo sapiens
tttagaaaataatcccaaatacaaccacctaacaatgacagctagatgttttctagcttctcctctacacagatgttcactgaacaggggtgtcatatctrtaggattcaactacagcagttttcaaagatatttctgctgtaaagcagcagaacgttctgacatcttgtgagaagcccgaggtagaaaactaataaaaac

SEQ ID NO: 549024 - DNA, 201 bp, Homo sapiens
caaataatacagttctgtcactttgacatgagtatacagaataccacctttcttggggccctgaagttacaacttttctgttattgcactgtgcttacctsttaaagagaagtccctttttcagctttctagattttttaatctaatcttccattcagtaggagagctgccaagcagaccagcaggcactatatatcaaag

SEQ ID NO: 549025 - DNA, 201 bp, Homo sapiens
gatcacttgagcccgggaggtcaaggctgcagtgaaccacgatcatgccactgcactgcagcctgggcaacagagtgagaccctgtcttggacacacacamaaaaaagtatgatcaataaaaggaaaaattgacaaactgaacatcatcaaaatctaaaacttctgcaaaggactctgttaagaggataaaaagacaagct

SEQ ID NO: 549026 - DNA, 201 bp, Homo sapiens
acatgtacagccgggttttcagttttcttgggtctatatgtaggagtggaatgactactttgacagtaaaatacaataagcaatcaccacggaagtttctkaaatccattcatgctgcacgatcctgctgcttatcactgacccctcttgactcccagtcctcagggaggtatacaggggactactaccccaccattcaca

SEQ ID NO: 549027 - DNA, 201 bp, Homo sapiens
gttatttatttagttatgtatttatttattgttgaggcggaatctcactctgtcgctcaggctggagtgcagtggtgcaatcttggctcactgcaacctcygtctcccaggttcaagtgattctcctgcctcagcctcccaagtagctgggattacagacatgtgccaccacgcccagctaatttttgtatttttagtaga

SEQ ID NO: 549028 - DNA, 201 bp, Homo sapiens
atgtaatcatgggatacttatggtgacggaactgtttgtatctgactgtgatgatagatacacaaacctacacacgtgataaaattgcagagaagacacayacacatgtgagtgtaaacaaaactaggaaatttgaataaatgcatagattatatctatgtcaatatatggctatgatagtagagtacaattttcaagatg

SEQ ID NO: 549029 - DNA, 201 bp, Homo sapiens
gcctttccactgtaaatcataaaatgaacaaaacccatgaggcaaaatcagcactgaacaagaaagtagtgagagcctgcaatccttgagattagggaaawtgtaacagctaaatccaacaggtgatctaggattggatcctgaacctataaaggccattactgggacaatcagcaaagttaaattaggtctgtagaccag

SEQ ID NO: 549030 - DNA, 201 bp, Homo sapiens
agtacttatacatgctacaacatggaagtgcctccaaaacattatgctacacaaaagaagccaggcacaaaaggctacatgctgtccagttccatttatayaaaatatccaggataaattcacagatacagaaagtaggttggtggttatttggggttgggaggataaaagaatagagagaaactgcttgataggtaaggg

SEQ ID NO: 549031 - DNA, 201 bp, Homo sapiens
tcaaaaaagttttgacacttaaatggctgaacttcagcagcgcagggaaacctagaaaataagtgaacatggttttaagctactaagtttatgatagcatgttcagcagcactggaaaactaacatgaggaagttaaaaatgttttaattgtatgagagcacgaccttttaatattttctaacaaaacaggaagtacattt

SEQ ID NO: 549032 - DNA, 201 bp, Homo sapiens
taactccagtctaatcatgacaaaaacatcaaataactcctgactggggggtgctgtacaaaatagctgaccaatcttcaaaatcaccaaggtcattaaamccagagtttgagaaaccggcatagcctgagaagcttaagaagacgtaaggactgacagtcacatggattagattggatcctggattggattctggaacag

SEQ ID NO: 549033 - DNA, 201 bp, Homo sapiens
tccgagatggagtttcgctcttgttgccgaggctggagtgcaatagcgcaatctcagctcaccaggttcaagcgattttcctgcctcagccccccaagtagctgggattacaggcgtctgccaccacgcccagctaattttgtatttttggtagagatggggtttttccatgttggtcaggctggtctcgaactcccaacc

SEQ ID NO: 549034 - DNA, 201 bp, Homo sapiens
acattacctggaggttttgccggagctctggtggttcctggcctattggttgtggtggtggtggtgtggtcccatggctctaaaagggagagggaggacascaaggggagcacgtttagtaacaaaacacagcagctactttatgacttggggaagtcacattgtgagtagaatatccttgtcttggtccttgaggcccct

SEQ ID NO: 549035 - DNA, 201 bp, Homo sapiens
ttccgagatggagtttcgctcttgttgccgaggctggagtgcaatagcgcaatctcagctcaccaggttcaagcgattttcctgcctcagccccccaagtagctgggattacaggcgtctgccaccacgcccagctaattttgtatttttggtagagatggggtttttccatgttggtcaggctggtctcgaactcccaac

SEQ ID NO: 549036 - DNA, 201 bp, Homo sapiens
ctcagtgttcacatggatgccttgattgtttctgcacacatggggcttaaaactgtaggtagttcacttgcatgctaccccagagggaactccagagggcycttcctcactgccctccttaaggcagccacattacctggaggttttgccggagctctggtggttcctggcctattggttgtggtggtggtggtgtggtcc

SEQ ID NO: 549037 - DNA, 201 bp, Homo sapiens
tttccgagatggagtttcgctcttgttgccgaggctggagtgcaatagcgcaatctcagctcaccaggttcaagcgattttcctgcctcagccccccaagtagctgggattacaggcgtctgccaccacgcccagctaattttgtatttttggtagagatggggtttttccatgttggtcaggctggtctcgaactcccaa

SEQ ID NO: 549038 - DNA, 201 bp, Homo sapiens
tacagataagaggggcaggctaaaatgacccatacaaaaatggattagagtaggagactttaagctaagtatgaaatcatatttagcttaattttttttttccgagatggagtttcgctcttgttgccgaggctggagtgcaatagcgcaatctcagctcaccaggttcaagcgattttcctgcctcagccccccaagtag

SEQ ID NO: 549039 - DNA, 201 bp, Homo sapiens
tcttacgccccccgaaccaagttcaaggaccttgaaaacaaccccaatccaggggtaacatgttgccacttctcacacttattctgcttggactatacagwgaattttttttaatggcaatgtaattcctatacaattcacccttttaaagtgtacaagtcagtacatagtgaatttttaaatgaagatgcagttcccata

SEQ ID NO: 549040 - DNA, 201 bp, Homo sapiens
ccccaccccaggtctcacaaaggctactctatactttgtcaatccagggtaccttctctccgatccccagtaccccacctagactagaggctctggctaaycacacataactgaaaaagctctggggaaaagtttttcacaatagaatttgtcctcacaagtggacccatctgcccaacctagcgtcctactgaacttgat

SEQ ID NO: 549041 - DNA, 201 bp, Homo sapiens
aggctgaggcaggagaattgcttgagcccgggaggcggaggttgcagcgagctgagagtgcgccactgcacttcagcctgggtgacaagagcaaaactccrtctccagaaataaataaataaataaataaataaataaataaataaaataaaaaaataaagctcaacccccagggactcttcttccaggtgaagaagggca

SEQ ID NO: 549042 - DNA, 201 bp, Homo sapiens
cgcattgatccatgctacaacctggataagccttgaaaacatgatgctaagtgaaacgagtcagttgcaaaaagccacatacggtatgagtccacttacamgaaatgtccagaataggcaaatccatacagactagaagtaaattcgtggttgcccagggttgtgaggtgggacaaatatggagtgactgcttaatagata

SEQ ID NO: 549043 - DNA, 201 bp, Homo sapiens
aataaacttgaaaaaagtcataaaacacaaagacaacagaactaaatatagagagaccttgaatttgaataggaaaacttaatactactaaaaaaaaaaaagaaggaaagaaaagaaaaaaaaaaggaaaaaaatgttgattttcctaagactctcacctagtcaatgcaagtgcaatcggaatcccaacggacttttttt

SEQ ID NO: 549044 - DNA, 201 bp, Homo sapiens
ttccaggttctctcccttcacgtagtctgcgttgagaccctctgcaaagggaaaagggcagagttagtgatgcgcacaggacctaagggtccccaatcgtkactgagaactcctgaccaagtcctctgcagctaaaaaagcagcacagctcccctggggaactcaaaaccctgcaccctgagccacctgaacatccttatc

SEQ ID NO: 549045 - DNA, 201 bp, Homo sapiens
accagagctttctccccactctgtcctctccaccaatcagggacacaacaagaagatagccatctccaaaagaggatgcagatcctcactggatactgtawctatccatgacttggtcttggacttcccagcctctagaactgtgagaaacaaatgtctgttgcttaattatcacccagtctgtggtaatttgttatagca

SEQ ID NO: 549046 - DNA, 201 bp, Homo sapiens
ctgcaccctgagccacctgaacatccttatccggatgaagactgttcgtcccagaattcactgcccaggagttctcatcatcgtcctcagaaataacaacracatgcagcgaaggcttccggcactccatcctcatagggcagctgccaccgcgtcaagacggcagctccgcccagtggagggggcgcccgatggcagggc

SEQ ID NO: 549047 - DNA, 201 bp, Homo sapiens
gtcacaggcatggcagcagatggccctggctgtcaccccagcatctttgggctcctgaaactgggaggcaggctcatcagggcaggcttttgctctggccrgacattctagaagcagacgcctctgtgcttccctgcttctctagcacagttctgctcagtgctgggaccaactaggaaagcgtcagcaagggacagtgag

SEQ ID NO: 549048 - DNA, 201 bp, Homo sapiens
cttgagcccaggaggcagaggctgcatttggtcaagatcatgctactgtacttccagcctgggagacagagcgagaccctgtctcaaaaaaaaaaaaaaaattaaattttacatatgtgtatttcaccacaggagaaaattgggaggaaaaaaagagtggtgcttaatgaggagagggggggaaagtatagatggaggata

SEQ ID NO: 549049 - DNA, 201 bp, Homo sapiens
ctggttcgggcggcggcggcggctctgcagactgcgtgtgcaacgtggagtatttcactaggggaaaaagaggccgtcagaaggaattctgctctgtcttrcacagaagaagcaaatacagcagcaagcccgtgctgggaacagaactgggtttccctttgtatcccctggggggccgcttagcaaccttccctcctgagc

SEQ ID NO: 549050 - DNA, 201 bp, Homo sapiens
tagtttacagctctgccaaaatagacctagcaagaaggggtcttctcaaggtcactcagctggttggcacaggtctgcgactataatctctttaatgatawaaaagcacaacgaaactcccttgggaagacgaacttcagaagtgataagccttttctacagcacaagcagcaatgcaagccccatttagctgaaacaatc

SEQ ID NO: 549051 - DNA, 201 bp, Homo sapiens
agggggaggagggcagctctgcatcataaattacttactttagggaaaagtggcaacacttgaccaagggcgtgccttaacaccatcagaagacaagaatytgctcggtgccattttatttaatgcaaacactagacagtttacaagtcacacctggacacaagcacgtgaacagatgtacagggaattctggaattttga

SEQ ID NO: 549052 - DNA, 201 bp, Homo sapiens
tgacatgaagcatttcagtccacaacagccacagccaccaatccacctgcagtggccataagaggtctgacccggtcactgacagggcacccggtcactgacagggtgactcttccagtcacccactatggaaaggaaaacatgataaataaggggtcactgagatgcaagcgccatgtctaaaagtcttaaagtgctttt

SEQ ID NO: 549053 - DNA, 201 bp, Homo sapiens
gtctcactatgttgcccaagctggtctcaaacttctgagctcaagcaatctgcctgcctcagcctcccaaagtgctgggattacaggcatgagccactgcrcccagtcaagaactctttgtattaataatagacattattgggacaattgttaaaacttggatggggtctgaggatttagtggtaataaggtatcagtgtt

SEQ ID NO: 549054 - DNA, 201 bp, Homo sapiens
ttaagaccctatttttaaccacagactgcatttattctactaagatgcttctcaaacttgaatgtgccagagaatcacccgcggatctagttgaaatgcasaatcagactcagtaggtcgggggcggggcgtgagatgctgcagttcttacaagctcccaggtgatgcctatgcggctgggccctggaccacattttgagt

SEQ ID NO: 549055 - DNA, 201 bp, Homo sapiens
gtgcccttgcccccatttggttccttgtgttaatttatcaagagtcttctgaccaacaggccagtgagggtgatccgggagtgctaataacacccctcccygcttctcctcccctccgggttctttaccaactgagaacagatgtaaggagccagagaaagatcaaaggtaaggcatctgcttgatgaagaggctaaagta

SEQ ID NO: 549056 - DNA, 201 bp, Homo sapiens
gaaatcccaaatgtgcctcagatgcctgcaaggataaccttttccaagaagtcagagctgagagctagggaactacttagcaaaagaaaaatggagtgggygccaggggctagggagtgaagggaatgaagactgactgctagaggctaaagggcatggggtttctttttcaggttgtgaaatgttttctagaactagata

SEQ ID NO: 549057 - DNA, 201 bp, Homo sapiens
ctttttttttttttttgagacagagtcttgctctgtcacccaggctggagtgcagtggtgtgatctcggctcactgcaacttccacctcccaggttcaagygattctcctgcctcagcctcccgagtagctgggactacaggcacgtgctaccatgcccagctaattttttgtatttttagtagagacagggtttcaccgt

SEQ ID NO: 549058 - DNA, 201 bp, Homo sapiens
cgcacacctccttccgcccagctttatctttccttgagctgtgacttcacccagcatgtgctcagagttgttacaaattttctctgccaaattaagctgayagagattggccactttcaaccagtcctttcagtccactgtgtctcccctctcgcttgggacaggcccatgctggccagtgcaaccttcagatagacacat

SEQ ID NO: 549059 - DNA, 201 bp, Homo sapiens
aggagatcctgtctccccaccacaacctccacttcaaccacttcctccctttgacttgtgcaacttttctccatgaacttgtccatgtgcgtcatactgcygggaaacagcttgctcaaattcccttcccaaatatacctaatggcagactgtggcctctatcaacaatcacactcaaattcaacacctgtgtacacagtt

SEQ ID NO: 549060 - DNA, 201 bp, Homo sapiens
tgggtctctctcaactgcagtcagtgctcctgggaacacggtctcacagacagcacatattctacgtcacagctctagggtttcaaggacttagccatccracaggcctcaccataaaggtaaagtggacaacccctgaggtcacgctgtccaggtggcgacaggccacgcatgccaaaatcctccatagccacctccggc

SEQ ID NO: 549061 - DNA, 201 bp, Homo sapiens
agcactttgggaggccgaggtgggtggatcacctgagtcaggagttcgagatcagcctgaccagcatggagaaaccctgtctctactaaaaatataaaatwagccgggtgtggtggtgcatgcctataatcccggctactcgggaggctgagacaggagatttgcttgaacctgggaggcggaggttacagtgagccgaga

SEQ ID NO: 549062 - DNA, 201 bp, Homo sapiens
caatatgctagttgcaactcaactacttgcacaggccactgatgggttgagccccaggtgcaacaacattgtacagatgctgcctaagaagtgaggtgttycttgtatcacagccaatccaggactgaagaaactctctaaccaggagtacttttttttctttcttttttttttgttttttgagatgaagtctcgctctgt

SEQ ID NO: 549063 - DNA, 201 bp, Homo sapiens
tgtgagccaccgcacccagcctaccatgagtattttctaaccaaatgtgaaagccctcccctccaagtcaagacatctgaatccttcacttgattctgtgycttcgaacttgggcaaattgctcccatcttcttcctcccttttcccattctgtagaaggaagggatgggattagataatataggacaacatccacttatt

SEQ ID NO: 549064 - DNA, 201 bp, Homo sapiens
aaaccaaagcaagcagatggaaaaaataaacacaagagcagagatccatgaaactgaaaataagaatgcaatactaaaaaaaaatcaataaaaccaaaagyttatttatacagtaaaaagggataaaccgctagccttactaacaaacataaaagttaaaaaagatgatatgccaataaaaggactgaaatgggacactgt

SEQ ID NO: 549065 - DNA, 201 bp, Homo sapiens
agtcctcagggaggtatacaggggactactaccccaccattcacagccactttaggccgtgtcacccagacttgcaccttcagacagacacaagaacacaygtaagtgcacctagacatactccagcaagtgaaatgatacgtgtataggatgaagccaagaaatggaaaagttttacccacacatatttggaaattattt

SEQ ID NO: 549066 - DNA, 201 bp, Homo sapiens
aacaacaacaaaaactttacatataggcttttcatgtttttctatatctgttatatttcacaatacaggtgaaaactatatacagtttgatgccaataatrtgaaatacatatttcagcatggaaaaaattattggcatactgtattctaacatgctaacagtggttatccctaggtaacgaggtttgtgtcttctctaca

SEQ ID NO: 549067 - DNA, 201 bp, Homo sapiens
gaagagcctcaaatcaataatctaagttactaattcaagatgctagaaaaagaagctagctagatactagaaaaacaaaaccaaagcaagcagatggaaawaataaacacaagagcagagatccatgaaactgaaaataagaatgcaatactaaaaaaaaatcaataaaaccaaaagtttatttatacagtaaaaagggat

SEQ ID NO: 549068 - DNA, 201 bp, Homo sapiens
tgcatttctctaatgattagtgatgttaagctttttttcatatgcttgttggccgcatgtatgtcttcttttgagaaaagtctgttcatgtcttttgcccrctttttaatgggatggtttgttttttgctagtaaatttgtttaagttccttatagattctggatattagacctttgttggatgcatagtttgcaaatatt

SEQ ID NO: 549069 - DNA, 201 bp, Homo sapiens
ctggacctgctcatggccatgctcttcaccgatgccggggcacccatgcggggtaaaggtgaggccggtctcccggcccgggcgggggcgttgggaggggmtgttgacccaccaccctccccctcactctttcctcagtccacctgctgtcagataccatccaaggggtcaccgccacagtgacaggggtgcggtaccagc

SEQ ID NO: 549070 - DNA, 201 bp, Homo sapiens
tgggctaagcaattgaatttctgagattaaggctggcttcccctgctatggggccccctcccgagcactgtcccctgcttccctttctccctagggtggcstgggttgcatccctcggaagagcgaaggaatgagccaggtcggggggcggggagacaggtgcacacaggaggtccagggcttggtccatggggctggtga

SEQ ID NO: 549071 - DNA, 201 bp, Homo sapiens
gcccaacagtgaaacatggaagatccaggaggccttcgcatggccatttctccagggacctgcagggaaagcgttctgggaacagcatgtgcaagggtccrgaggagcgagggcttggggccactgaggcgctgtggctggtgaagagcagtggggcgggagggaccatcagggtgacagcaaagggccctgtgactctca

SEQ ID NO: 549072 - DNA, 201 bp, Homo sapiens
tggctttgctcgcctatctgggccactctagtgctggaatgcttttggcttccactcttcgggaagctagacatgggcggatcccccgtggacctgagagrgcaggctgcccattctcctgggctacttggaccaggtgaaccctctgggattcttacccaaggttttctgtgacaatggcctgttatctgactagccttg

SEQ ID NO: 549073 - DNA, 201 bp, Homo sapiens
gcgttctgggaacagcatgtgcaagggtccagaggagcgagggcttggggccactgaggcgctgtggctggtgaagagcagtggggcgggagggaccatcmgggtgacagcaaagggccctgtgactctcagatgaaagctgcctgccgggaggccgaggcttcgtgtggagcacttgtgaaccatcccatctgttgtgcg

SEQ ID NO: 549074 - DNA, 201 bp, Homo sapiens
ctgctcaaggagcaggtgagcgcttggccctgcgagggagtggcgtgggtggggacacagccccatgcctgcccacacccggtccctgccgcccacagackgcgtaccccccgacacactacatccggagggtgccccagaggaagatccactacttcacgggcctgcaggtgcttcagctgctgctgctgtgtgccttcg

SEQ ID NO: 549075 - DNA, 201 bp, Homo sapiens
agaggtgactggcccttccgtgagctgctgggaccctcaaggcttgggatctggttcagccccctgtaaccccagggtggtgggggtgcccccaccatatkgctgccccaaggggctggggtgggctcaggcaaggcctggggccctggccttcttcctggcagggggaggcaggggactgtgcaggggctcagggaggcc

SEQ ID NO: 549076 - DNA, 201 bp, Homo sapiens
ggcattacttggacgactatcacacaaaaaggacttcatcccttgtcagcctgtcaggcctcggcgccagcctcaacgccagcctccacactgccctcaaygccagcttcctcgccagccccacggagctgccctcggccacacactcaggccaggcgaccgccgtgctcagcctcctcatcatgctgggcacgctctggc

SEQ ID NO: 549077 - DNA, 201 bp, Homo sapiens
gacccaccaccctccccctcactctttcctcagtccacctgctgtcagataccatccaaggggtcaccgccacagtgacaggggtgcggtaccagcagtcrtggctctgcatcatgtgagttgccaggccacttggccccccttcttgtcgcagtggaactgggtgtcccatgtcccctgtgccctgcagaggccagccca

SEQ ID NO: 549078 - DNA, 201 bp, Homo sapiens
ccccttgtaccccttggacttcactgatggtacgtggcctctgctttccaggccttgggcccacacgtgtgcctgtcctgcatccccagcaaaccctctcycccatcccccattcctaggcattattgggaaaaacaaggctgtgggcaaatacatcaccaccaccctgttcctctacttcgcctgcctcctgcccaccat

SEQ ID NO: 549079 - DNA, 201 bp, Homo sapiens
agttcgggccaggggaaccagacagtttaaacaaggcaagcctgacccggggaggaaggagtttatcatgagctccagaaccaaagcagtgaggacgtcttttgttttgttttgttttgttttgttttgttttgagtctcgctctgtcgcccaggctggagtgcagtggtgtgatctcggctcactgcaagctctgcctcc

SEQ ID NO: 549080 - DNA, 201 bp, Homo sapiens
gttcgggccaggggaaccagacagtttaaacaaggcaagcctgacccggggaggaaggagtttatcatgagctccagaaccaaagcagtgaggacgtcttttgttttgttttgttttgttttgttttgttttgagtctcgctctgtcgcccaggctggagtgcagtggtgtgatctcggctcactgcaagctctgcctcct

SEQ ID NO: 549081 - DNA, 201 bp, Homo sapiens
ttgtaccccttggacttcactgatggtacgtggcctctgctttccaggccttgggcccacacgtgtgcctgtcctgcatccccagcaaaccctctctcccmtcccccattcctaggcattattgggaaaaacaaggctgtgggcaaatacatcaccaccaccctgttcctctacttcgcctgcctcctgcccaccatcgct

SEQ ID NO: 549082 - DNA, 201 bp, Homo sapiens
ttcgggccaggggaaccagacagtttaaacaaggcaagcctgacccggggaggaaggagtttatcatgagctccagaaccaaagcagtgaggacgtcttttgttttgttttgttttgttttgttttgttttgagtctcgctctgtcgcccaggctggagtgcagtggtgtgatctcggctcactgcaagctctgcctcctg

SEQ ID NO: 549083 - DNA, 201 bp, Homo sapiens
tcgggccaggggaaccagacagtttaaacaaggcaagcctgacccggggaggaaggagtttatcatgagctccagaaccaaagcagtgaggacgtcttttgttttgttttgttttgttttgttttgttttgagtctcgctctgtcgcccaggctggagtgcagtggtgtgatctcggctcactgcaagctctgcctcctgg

SEQ ID NO: 549084 - DNA, 201 bp, Homo sapiens
ttaaagaacttcaaggaagagatccgtgcgcaccgcgacctagatggcttcctggcgcaggccagcatcgtcctgaacgagacggccacctccctggatarcgtgctgcggaccatgcttcgccgcttcgccagggaccctgacaacaatgagcccaactgcaacctggacctgctcatggccatgctcttcaccgatgcc

SEQ ID NO: 549085 - DNA, 201 bp, Homo sapiens
ctggtgccttgaggcagatcccccagcccgacactgggctcctcctcaggagcatggactagttcttttggggttttgtatttgtttatttgtttgttttwtttatttatctttgagacagagtctcactctgtcacccaggctggaatgttgaggtgtgatctcagctcactgcaacctctgcctcccaggttcaagcga

SEQ ID NO: 549086 - DNA, 201 bp, Homo sapiens
gtggttctgtccctggggtcccctcagtacctgaagttaaagaacttcaaggaagagatccgtgcgcaccgcgacctagatggcttcctggcgcaggccarcatcgtcctgaacgagacggccacctccctggataacgtgctgcggaccatgcttcgccgcttcgccagggaccctgacaacaatgagcccaactgcaac

SEQ ID NO: 549087 - DNA, 201 bp, Homo sapiens
acaggtgcacacaggaggtccagggcttggtccatggggctggtgacctttctgcttcccttgcagaaaactctcccaccatgtcgcagaatggatacttygaggattcaagtgagtacctctcggggagtgtgtgtgtgcagagagagcttgtcgggcaaaagcctccagggtgcatagcctacccaccagagtcctgtg

SEQ ID NO: 549088 - DNA, 201 bp, Homo sapiens
gtgcgcaccgcgacctagatggcttcctggcgcaggccagcatcgtcctgaacgagacggccacctccctggataacgtgctgcggaccatgcttcgccgyttcgccagggaccctgacaacaatgagcccaactgcaacctggacctgctcatggccatgctcttcaccgatgccggggcacccatgcggggtaaaggtg

SEQ ID NO: 549089 - DNA, 201 bp, Homo sapiens
ggtgcatagcctacccaccagagtcctgtggctttgctcgcctatctgggccactctagtgctggaatgcttttggcttccactcttcgggaagctagacrtgggcggatcccccgtggacctgagagggcaggctgcccattctcctgggctacttggaccaggtgaaccctctgggattcttacccaaggttttctgtg

SEQ ID NO: 549090 - DNA, 201 bp, Homo sapiens
cctggggcctctacctgggggctgaggtgatggcttccctgagaatcctcccgctgctcccctcttcccatgcctccaggagcagctcaacagggagctcrcaccagcccagggctgggggctgggggctgggggctgggggctggactgctgcggctggctgggagggagggaccaggcagtgacagcatctcatacatg

SEQ ID NO: 549091 - DNA, 201 bp, Homo sapiens
accccccgacacactacatccggagggtgccccagaggaagatccactacttcacgggcctgcaggtgcttcagctgctgctgctgtgtgccttcggcatragctccctgccctacatgaagatgatctttcccctcatcatgatcgccatgatccccatccggtacaggcgggtgggcagtgggcaggaggggcccagtc

SEQ ID NO: 549092 - DNA, 201 bp, Homo sapiens
cctatctgggccactctagtgctggaatgcttttggcttccactcttcgggaagctagacatgggcggatcccccgtggacctgagagggcaggctgcccmttctcctgggctacttggaccaggtgaaccctctgggattcttacccaaggttttctgtgacaatggcctgttatctgactagccttgggccaagaattc

SEQ ID NO: 549093 - DNA, 201 bp, Homo sapiens
cccgctgctcccctcttcccatgcctccaggagcagctcaacagggagctcacaccagcccagggctgggggctgggggctgggggctgggggctggactsctgcggctggctgggagggagggaccaggcagtgacagcatctcatacatgggcccgtgtggttctgtccctggggtcccctcagtacctgaagttaaag

SEQ ID NO: 549094 - DNA, 201 bp, Homo sapiens
tcctggtctcagcggctagggaatgctggagactcactttgtggcagctgccatgtcctgtgtggggctggggcaggactagaagctgccttcctcgcctrtgggatggcctctcccaccacggcccgagagtgggacagtccaggggtccctgctccctgggcttggagcccctccttcctgtgtgtggcactttaacag

SEQ ID NO: 549095 - DNA, 201 bp, Homo sapiens
ccgcgacctagatggcttcctggcgcaggccagcatcgtcctgaacgagacggccacctccctggataacgtgctgcggaccatgcttcgccgcttcgccmgggaccctgacaacaatgagcccaactgcaacctggacctgctcatggccatgctcttcaccgatgccggggcacccatgcggggtaaaggtgaggccgg

SEQ ID NO: 549096 - DNA, 201 bp, Homo sapiens
ggttcctgccgggccctgacccgccctgccccctgcctgcagtgattcgtgtcatctgtgatgactatgacctggacttcaactccttctacgcatggacrggcctgtggaatagtttcttccttgcgctttatgcctttttcaacctcagcctggtcatgagtctcttcaagaggtgactggcccttccgtgagctgctg

SEQ ID NO: 549097 - DNA, 201 bp, Homo sapiens
cccgggttacccgccctctgcttggggtcccctcccacatgtcctggcctctgaaggcctggtcctcaccctccccttcgcctcggccctgtgggtgtgtmagaaacatgttgctaggcccggcaagtcctcatgtccccggggattgccgaaaagttcgtatttccttgactgaaaggaaacgcttttgaccactatccc

SEQ ID NO: 549098 - DNA, 201 bp, Homo sapiens
gcgtggccctgctgctcaaggagcaggtgagcgcttggccctgcgagggagtggcgtgggtggggacacagccccatgcctgcccacacccggtccctgcygcccacagactgcgtaccccccgacacactacatccggagggtgccccagaggaagatccactacttcacgggcctgcaggtgcttcagctgctgctgct

SEQ ID NO: 549099 - DNA, 201 bp, Homo sapiens
tgactgaaaggaaacgcttttgaccactatccctattcaaacacgcggccttctctggcctgcccgcccgccagcccttctttgacttggttgactttgcratttgctggctgagggtccctgctccttcctgggccacacaccccctggccgggacaccatgctttttgtgggagccggaactgatacaatttcgggagt

SEQ ID NO: 549100 - DNA, 201 bp, Homo sapiens
aggaaacgcttttgaccactatccctattcaaacacgcggccttctctggcctgcccgcccgccagcccttctttgacttggttgactttgcgatttgctrgctgagggtccctgctccttcctgggccacacaccccctggccgggacaccatgctttttgtgggagccggaactgatacaatttcgggagtcttttaag

SEQ ID NO: 549101 - DNA, 201 bp, Homo sapiens
ggggtcgggggaactgcgcctgcaatgggcgtttatggcccccaggaccggtctgagagtgagaagagggatgtgcagagagatcccccgccttggcatcsgaggagagagggggagaggcccgctcgggcccggtcccttcctctcgctgcagcggggcagggttttctcaggaaaacctggattagcgaacatggtact

SEQ ID NO: 549102 - DNA, 201 bp, Homo sapiens
ggcgtgggttgcatccctcggaagagcgaaggaatgagccaggtcggggggcggggagacaggtgcacacaggaggtccagggcttggtccatggggctgstgacctttctgcttcccttgcagaaaactctcccaccatgtcgcagaatggatacttcgaggattcaagtgagtacctctcggggagtgtgtgtgtgcag

SEQ ID NO: 549103 - DNA, 201 bp, Homo sapiens
acagaactggggggagaattcctgtgaggttcggttcgtcatcctggtgctggccccacccaagatggtgagtgggtagtgccgtgtcctggggaagaagragggccccgggttacccgccctctgcttggggtcccctcccacatgtcctggcctctgaaggcctggtcctcaccctccccttcgcctcggccctgtggg

SEQ ID NO: 549104 - DNA, 201 bp, Homo sapiens
gcaaataccactggggaaacgtagctggggaaacatttttctccactgtggtttcattatctgtgatcacacagacttttgttgcttaggacaaaagtaayatcttgagtttataagaaatcatgagtttataacaaaaatatagatcgatggtagttgcggtgatctgctgacctggttgaaatcatggcagagtacact

SEQ ID NO: 549105 - DNA, 201 bp, Homo sapiens
gagccacggtccagtggcgccgagaacgaaggaacgcagcacagtctccctccctgcccacagacacccagaggtacagggtagaggccggcgggggccgscagggtcggcgggggcatgggccggacagggctaacaggcgctctgtcctctcctccagcccccaaagtgcaaggactttgtcccttttgggaagggcat

SEQ ID NO: 549106 - DNA, 201 bp, Homo sapiens
gcccgagagtgggacagtccaggggtccctgctccctgggcttggagcccctccttcctgtgtgtggcactttaacagccaggccctcttgctcttggggktctctaggctactacaagtgtgacacagatgacaccttcgaagcccgagaggagatcctgggggatgaggccttcgacactgccaactcctccatcgtgt

SEQ ID NO: 549107 - DNA, 201 bp, Homo sapiens
taggctactacaagtgtgacacagatgacaccttcgaagcccgagaggagatcctgggggatgaggccttcgacactgccaactcctccatcgtgtctggsgagagtatccgtttttttgtcaatgtcaaccttgagatgcaggccaccaacactggtatgggggctgcagcaggggcagactgggggaaggcacgggact

SEQ ID NO: 549108 - DNA, 201 bp, Homo sapiens
tgtgcagagagatcccccgccttggcatcggaggagagagggggagaggcccgctcgggcccggtcccttcctctcgctgcagcggggcagggttttctcrggaaaacctggattagcgaacatggtactggtactaactcggtgggaagacatccctggaacgtctctcctcctcgcctctggcccgcctgggcagcccc

SEQ ID NO: 549109 - DNA, 201 bp, Homo sapiens
tatccgtttttttgtcaatgtcaaccttgagatgcaggccaccaacactggtatgggggctgcagcaggggcagactgggggaaggcacgggactgggcakgtgtgactcgccttactaagaaagacctgaggagagggtggcaccctgagccctccccgcttttctccggcagagaatgaagcgacttccggtggctgtg

SEQ ID NO: 549110 - DNA, 201 bp, Homo sapiens
tatgggcgtgagccaccatgccctgccaggcacgggcctcttctacagcaaacatgcacagtgccccgggactagagctttgagcaacagacgggcagacmctgcccctaggtgagcaggttgctgtgatgagggctggacactgagttcgtgagttcatggttcacggacgggcttcaccttggccgggcgagagagaga

SEQ ID NO: 549111 - DNA, 201 bp, Homo sapiens
tcccaccatgtcgcagaatggatacttcgaggattcaagtgagtacctctcggggagtgtgtgtgtgcagagagagcttgtcgggcaaaagcctccagggygcatagcctacccaccagagtcctgtggctttgctcgcctatctgggccactctagtgctggaatgcttttggcttccactcttcgggaagctagacatg

SEQ ID NO: 549112 - DNA, 201 bp, Homo sapiens
tgtctcaaaaaaacacaaaaaacaaacagacaaaaaacctgctgccagttcatggggagagcaccttcacctgctcggcccgggcagggcctcctctgttyctaggggtgactcccatcctccacccctagaaaagcactaagactgcgatggaggtggcgcgcacgtttgccaccatgttctcggatatcgccttccgcc

SEQ ID NO: 549113 - DNA, 201 bp, Homo sapiens
tctcaaaaaaacacaaaaaacaaacagacaaaaaacctgctgccagttcatggggagagcaccttcacctgctcggcccgggcagggcctcctctgtttcwaggggtgactcccatcctccacccctagaaaagcactaagactgcgatggaggtggcgcgcacgtttgccaccatgttctcggatatcgccttccgccag

SEQ ID NO: 549114 - DNA, 201 bp, Homo sapiens
ctggcaagagccgtggaccctgaggagtggggagcctctggccacatgggacatagggaggagtgaggccctgtggacaggggcgcagaggtgacactcgyggctcgggccaccgcaggattgtgaacgtgaaggagacgcggctgacctcgctgggcgccagcgtcctggtgggcctgtccctgttgctgctgccggtcc

SEQ ID NO: 549115 - DNA, 201 bp, Homo sapiens
gctgctgacccatccttgtttctgcacaggtgtctgtcaggcatcagtggggtctgggctataagggcccctttcctgggagtacctacaagtgaggaacyttaggggacccacaagacgggaagggctgccagtggccaggggtgaggcagggatctaggaggacttcctggaggaggaggttccaagtgagtcttgaaa

SEQ ID NO: 549116 - DNA, 201 bp, Homo sapiens
aagttcgggccaggggaaccagacagtttaaacaaggcaagcctgacccggggaggaaggagtttatcatgagctccagaaccaaagcagtgaggacgtcttttgttttgttttgttttgttttgttttgttttgagtctcgctctgtcgcccaggctggagtgcagtggtgtgatctcggctcactgcaagctctgcctc

SEQ ID NO: 549117 - DNA, 201 bp, Homo sapiens
ttctgcacaggtgtctgtcaggcatcagtggggtctgggctataagggcccctttcctgggagtacctacaagtgaggaaccttaggggacccacaagacrggaagggctgccagtggccaggggtgaggcagggatctaggaggacttcctggaggaggaggttccaagtgagtcttgaaaaaggccctccagggaggga

SEQ ID NO: 549118 - DNA, 201 bp, Homo sapiens
atgagcccaactgcaacctggacctgctcatggccatgctcttcaccgatgccggggcacccatgcggggtaaaggtgaggccggtctcccggcccgggcrggggcgttgggaggggctgttgacccaccaccctccccctcactctttcctcagtccacctgctgtcagataccatccaaggggtcaccgccacagtgac

SEQ ID NO: 549119 - DNA, 201 bp, Homo sapiens
ggggtctgggctataagggcccctttcctgggagtacctacaagtgaggaaccttaggggacccacaagacgggaagggctgccagtggccaggggtgagrcagggatctaggaggacttcctggaggaggaggttccaagtgagtcttgaaaaaggccctccagggagggaagccctcagcttggaggacaggaccttgc

SEQ ID NO: 549120 - DNA, 201 bp, Homo sapiens
actgccaaggaacgtcccatttgctcttcttttccctccctagcagaggtcgccaggggtcaaggtcgagggggttctgggtcggggagccccagctcccyggggtgcaactgtgcactgtgtcctccccgcccctgccagctgtaccatgaaggccctacagaagcggcacgtgtgcatcagccgcctggttcgcccaca

SEQ ID NO: 549121 - DNA, 201 bp, Homo sapiens
gaggtgtaggtgtgtgggtgactgctctgtgctgcgccttctcatggctgactcaggcctggggcatctgggcattgtaggggtgcagtggtatgtgcccmcccctctcccattatcctttagctttaggccaagagcgttgctcagggcagcttctgcccagggtgggtgggactgagcaggatggattttcttttgata

SEQ ID NO: 549122 - DNA, 201 bp, Homo sapiens
gggcccgtgtggttctgtccctggggtcccctcagtacctgaagttaaagaacttcaaggaagagatccgtgcgcaccgcgacctagatggcttcctggcrcaggccagcatcgtcctgaacgagacggccacctccctggataacgtgctgcggaccatgcttcgccgcttcgccagggaccctgacaacaatgagccca

SEQ ID NO: 549123 - DNA, 201 bp, Homo sapiens
gcccttccaaaggcaaagcacagagtcacatttgggcgtggcatgagagggaaataaagagatttggctgtagtgggagggaggtttcagtgctttttctrgggacattggtgcctatctctattctgagagttgttctcctcataggacaccataaatcgcatccaggacctgctggctgaggggactataacaggtgag

SEQ ID NO: 549124 - DNA, 201 bp, Homo sapiens
aggggctgggctcacagccttgagtctggggttcttaagtgggggaaatgctggcagctttgagagggtcctgtctgttcaggctgtgtgcactcccctcycatggagccctctctctaccctggcacacttgattaggggctgtggccgggcaggttatttctcacacttgcctgctgctgtttggaacttgtccccacc

SEQ ID NO: 549125 - DNA, 201 bp, Homo sapiens
cggtatgtgcaggtggttgggcgggccaaaggcaggctgcaggcaggtggccctcaagtgagcaggtggtacttgggtgaatgggtacagaaccctgtggscttgctagggggtgctcaccctgatttctctgcttctctagtcccagagcttcctgacagagttcatcaactacatcaaggtaagaagccactgaacaga

SEQ ID NO: 549126 - DNA, 201 bp, Homo sapiens
agaaaaggctgggctatatgctctggtgtcctgcaggggtagcagcaaccagaacaggtgcctgccctgttctgcccccgatacctgacttttgcctcctrtgtccacaggaggaggaggagaggaaggcccgcgaggagcaggcccagcgggagcatgaggagtacctgaaactgaaggaggcctttgtggtggaggagg

SEQ ID NO: 549127 - DNA, 201 bp, Homo sapiens
acccatcagtgcagcctgtgccagacgcaaggctagccaccccatcccagacgcccctggccaggcagtgagaggtgggtgggcatcagtaccagcaggcyttagtggccagaggccttgtcctcagcagaggctggtgcctccgaaactctcaccctggaaggctctgctgcttgtgtaggcaagcggtatgtgcaggtg

SEQ ID NO: 549128 - DNA, 201 bp, Homo sapiens
cgagagctggaggcaggcctcggcgccggagggacctgggcagccgcctacaggcccagcgtcgagcccagcgggtggcctgggcagaagcagatgagaaygaggaggaagctgtcatcctaggtgagaggggcccagcctggtggggagagggtttgggttggagggggggataaaagggcccccaaagctaagtggggg

SEQ ID NO: 549129 - DNA, 201 bp, Homo sapiens
actgagaggacagacatatgagacctgaaggttgtaccttgagtttggtgagtggagggcatgggtgagactgtggcaggagttgtttcatagaactgggwacacagaagccagactggagtgggctgactgggtgagtgggtggtgaggaaatgcagggttcacatttgcttatgaggtgtggacatgacggggtatgct

SEQ ID NO: 549130 - DNA, 201 bp, Homo sapiens
agctgggactacaggtgcccgccaccacacccagctaattttttgtatttttagtagagatgaggtttcaccatgttagccaggatgatctcgatctcctracctcgtgatccgcccacctttgcctcccaaagttctgggattacaggcatgagccaccgtgcccagcccttttttgtacttttagtagagatggggttt

SEQ ID NO: 549131 - DNA, 201 bp, Homo sapiens
agcgtgaggcaagccggagggatggggtgcagctctgggaagtgcgaaagggcactgccttcctttttccctaaggcagactgagggcttgttgcctgctrggctggtgtttgctgcttccctggctctgtctcctgccgcctgggtctgtgccctggcccaggcattgccttccctagtctgtctgggcggtgggcacac

SEQ ID NO: 549132 - DNA, 201 bp, Homo sapiens
agacgcccctggccaggcagtgagaggtgggtgggcatcagtaccagcaggctttagtggccagaggccttgtcctcagcagaggctggtgcctccgaaaytctcaccctggaaggctctgctgcttgtgtaggcaagcggtatgtgcaggtggttgggcgggccaaaggcaggctgcaggcaggtggccctcaagtgagc

SEQ ID NO: 549133 - DNA, 201 bp, Homo sapiens
ctccaccacagcctagaaaagccactgctgaaaagcagagcctggagtggggatttttgtgcacgtgactattgaactttcggggagcatgtgaggaacgygaggcgaggaggatagctgggcagagaaagccaggagaggaggagaagatggcagagaggtgatgggggtctggatcctgaaggccttgaggctgaggaa

SEQ ID NO: 549134 - DNA, 201 bp, Homo sapiens
actcgagtcccagcgcgaagctgagtggaagaaggaggaggagcggcttcgcctggaggaggagcagaaggtgaggccagcccctaccctgacctctgacycttgaccaggcaaggcagccttgcttcttatgcagctccctggcacctccaacctagaaggtgggccatagacctggcacaagggcaggtcctggtttat

SEQ ID NO: 549135 - DNA, 201 bp, Homo sapiens
gctgagtggaagaaggaggaggagcggcttcgcctggaggaggagcagaaggtgaggccagcccctaccctgacctctgacccttgaccaggcaaggcagmcttgcttcttatgcagctccctggcacctccaacctagaaggtgggccatagacctggcacaagggcaggtcctggtttatttggtccctaggctccacc

SEQ ID NO: 549136 - DNA, 201 bp, Homo sapiens
tgagacagagtccctctctgtctccaggctggagtgcagtggcacgatctcggctcactgcaacctctgcctcttgggttcaagtgactctcctgcctcaktctcccgagtaggtgggactacaggtgcaccaccacgctcagctaatttttatatttttagtagagagagggtttcaccatgttggccagtatggtctca

SEQ ID NO: 549137 - DNA, 201 bp, Homo sapiens
accacgctcagctaatttttatatttttagtagagagagggtttcaccatgttggccagtatggtctcaatctcttgaccttgtgatcctcctgccttggyttcccaaagtgctgggattacaggcatgagccactgtgcccggcctttttttttttttttttttttttttaagagagatggagtctcactctcacccagg

SEQ ID NO: 549138 - DNA, 201 bp, Homo sapiens
ctcggcccatggttcagcttgggggaatggagaaatgggggtcctgaaggagctctgtctctgagaaaaggctgggctatatgctctggtgtcctgcaggrgtagcagcaaccagaacaggtgcctgccctgttctgcccccgatacctgacttttgcctcctatgtccacaggaggaggaggagaggaaggcccgcgagg

SEQ ID NO: 549139 - DNA, 201 bp, Homo sapiens
cctgccctaaagatagagtcttgatgcaccgtctaccttgtccccaaccaagagtgagtagtgcacagaagtctcctggcaccctgggaatcctgcatttktaatggacgaacaggcaggaaagaaaaaaaaaacccaaaccccatcactctgccagcccctgtgaccaaagcagcccaaatcagttaccttgacaactct

SEQ ID NO: 549140 - DNA, 201 bp, Homo sapiens
aggggtgtgcaaggaggggcactgagtagctggatgcagttacaaggaggacatgccagggcctggaggtggcagcagtgggagaggacaggcagggcagyctgattcgactctcctagcaggactggatgcagccaggaaagtccaggcaggcaggaggccggaagggccctgagccagctgtgaaggagtaggtgggca

SEQ ID NO: 549141 - DNA, 201 bp, Homo sapiens
atgaagacctctctccaggcagaggaggctgaacgtgaggagcggaaacgactcgagtcccagcgcgaagctgagtggaagaaggaggaggagcggcttckcctggaggaggagcagaaggtgaggccagcccctaccctgacctctgacccttgaccaggcaaggcagccttgcttcttatgcagctccctggcacctcc

SEQ ID NO: 549142 - DNA, 201 bp, Homo sapiens
accatgcccggctaattatttttgtatttttttttcccctgagacagtgtctcactctgtcgcccaggttggagtgcagtggcgtgatctcagctcactgsaagttccggctcctgggttcacattattctcctgcctcagcctcctgagtagctgggactacaggtgcccgccaccacacccagctaattttttgtattt

SEQ ID NO: 549143 - DNA, 201 bp, Homo sapiens
gatagagacattctgttgacacagaggcctccatatccctgcttccaggagaccaggagagccctcaggattgtcttctccagtacttggcagctggcttragcctgaggagggggcgtctgggcgtttctcagaaactgggggcatttgaggcttttgccttgtacctttggggattatccctttagctcaagaagaggc

SEQ ID NO: 549144 - DNA, 201 bp, Homo sapiens
catggtggcgcctgtgtggtacttggtagcggcggctctgctagtcggctttatcctcttcctgactcgcagccggggccgggcggcatcaggtaggagawgccgctgcaccagggttggtggtaccgggttttctggccttctgagcctttgtggaccgtcgcgccgcggctcctgcgcgtgcgcacctgggcgggcggg

SEQ ID NO: 549145 - DNA, 201 bp, Homo sapiens
ctgacattaaagcctctctgtgatgtgccgctgggcggggctccgagtagtgggcggagtctagattgggaaataggggcggggcctatgagatcccggcytcagggtggacgcagtggttctgcactgaggccctcgtcatggtggcgcctgtgtggtacttggtagcggcggctctgctagtcggctttatcctcttcc

SEQ ID NO: 549146 - DNA, 201 bp, Homo sapiens
tctgggcggtgggcacactctagccgggggtgagggatgtgcccctatgaagacctctctccaggcagaggaggctgaacgtgaggagcggaaacgactcragtcccagcgcgaagctgagtggaagaaggaggaggagcggcttcgcctggaggaggagcagaaggtgaggccagcccctaccctgacctctgacccttg

SEQ ID NO: 549147 - DNA, 201 bp, Homo sapiens
gcccctgggaagcccctctctgcacccatcagtgcagcctgtgccagacgcaaggctagccaccccatcccagacgcccctggccaggcagtgagaggtgrgtgggcatcagtaccagcaggctttagtggccagaggccttgtcctcagcagaggctggtgcctccgaaactctcaccctggaaggctctgctgcttgtg

SEQ ID NO: 549148 - DNA, 201 bp, Homo sapiens
ccgaaactctcaccctggaaggctctgctgcttgtgtaggcaagcggtatgtgcaggtggttgggcgggccaaaggcaggctgcaggcaggtggccctcargtgagcaggtggtacttgggtgaatgggtacagaaccctgtgggcttgctagggggtgctcaccctgatttctctgcttctctagtcccagagcttcctg

SEQ ID NO: 549149 - DNA, 201 bp, Homo sapiens
gccgggagtcccctgcccaagccccagcctgaccccagtccttccctcttggactcagagttggtgtggcctacctggctatacatcttcatccctccccmccatcctggggaagtgatggtgtggccaggcagttatagattaaaggcctgtgagtactgctgagcttggtgtggcttggtgtggcagaaggcctggcct

SEQ ID NO: 549150 - DNA, 201 bp, Homo sapiens
ctacataaccccagaggaactggccgccgtggccaacttcatccgacagcggggccgggtgtccatcgccgagcttgcccaagccagcaactccctcatcrcctggggccgggagtcccctgcccaagccccagcctgaccccagtccttccctcttggactcagagttggtgtggcctacctggctatacatcttcatcc

SEQ ID NO: 549151 - DNA, 201 bp, Homo sapiens
tggagtggggtcacccacaaccccaggaaaacagtttaaagatagagacattctgttgacacagaggcctccatatccctgcttccaggagaccaggagarccctcaggattgtcttctccagtacttggcagctggcttgagcctgaggagggggcgtctgggcgtttctcagaaactgggggcatttgaggcttttgcc

SEQ ID NO: 549152 - DNA, 201 bp, Homo sapiens
agagtgcctggccaagagtttctgcagttcctggagtggggtcacccacaaccccaggaaaacagtttaaagatagagacattctgttgacacagaggccyccatatccctgcttccaggagaccaggagagccctcaggattgtcttctccagtacttggcagctggcttgagcctgaggagggggcgtctgggcgtttc

SEQ ID NO: 549153 - DNA, 201 bp, Homo sapiens
aagctgtgggcctggtggaaaaggccttgccagtcagactgagaagtcggggccttgtgctgtgggcagcaggccgctaagcagaggaggtgaggcttccrggctgccgctcctcctgccatgggccgggctgggcttataggcagcattgtcatttctgtcttccctacagccggccaagagccactgcacaatgaggag

SEQ ID NO: 549154 - DNA, 201 bp, Homo sapiens
tgacacagaggcctccatatccctgcttccaggagaccaggagagccctcaggattgtcttctccagtacttggcagctggcttgagcctgaggagggggygtctgggcgtttctcagaaactgggggcatttgaggcttttgccttgtacctttggggattatccctttagctcaagaagaggccctttctttgccgtac

SEQ ID NO: 549155 - DNA, 201 bp, Homo sapiens
acttaagggttggggagttagagttcttacataaattatatggaaatctcttacaggagatatgtctctccttccctattcattaaatattcatgcagtctttttttttttttttttttttctgagatggagtctcactctgtcatccaggctggagtccagtggcgcaatctgggctcactgcaacctccgcttcccagg

SEQ ID NO: 549156 - DNA, 201 bp, Homo sapiens
tagcagagagggttttttcctttctgaatattggtcccgcttaatgtaccttaaatatcctggctcttctcccctgtaaccagtttcccttatccttaacrtcctacctcactttaataccttcctcacaactaatattgacacattattgttaactaaactctaacattattcagatttttctttattgattgattaaga

SEQ ID NO: 549157 - DNA, 201 bp, Homo sapiens
ttcacaccattcccctgcctcagcctcccgagtagctgggactacaggcacccgccaccatgcccggctaattatttttgtatttttttttcccctgagayagtgtctcactctgtcgcccaggttggagtgcagtggcgtgatctcagctcactgcaagttccggctcctgggttcacattattctcctgcctcagcctc

SEQ ID NO: 549158 - DNA, 201 bp, Homo sapiens
tatcctcttcctgactcgcagccggggccgggcggcatcaggtaggagatgccgctgcaccagggttggtggtaccgggttttctggccttctgagccttwgtggaccgtcgcgccgcggctcctgcgcgtgcgcacctgggcgggcgggacgcatgcgcgtccgtgcgctagtcgtgtgccgggtggggcttccgcagtg

SEQ ID NO: 549159 - DNA, 201 bp, Homo sapiens
aagttccgcctcctgggttcacaccattcccctgcctcagcctcccgagtagctgggactacaggcacccgccaccatgcccggctaattatttttgtatwtttttttcccctgagacagtgtctcactctgtcgcccaggttggagtgcagtggcgtgatctcagctcactgcaagttccggctcctgggttcacattat

SEQ ID NO: 549160 - DNA, 201 bp, Homo sapiens
ggccgggtgtccatcgccgagcttgcccaagccagcaactccctcatcgcctggggccgggagtcccctgcccaagccccagcctgaccccagtccttccytcttggactcagagttggtgtggcctacctggctatacatcttcatccctccccaccatcctggggaagtgatggtgtggccaggcagttatagattaaa

SEQ ID NO: 549161 - DNA, 201 bp, Homo sapiens
ctgcaagttccgcctcctgggttcacaccattcccctgcctcagcctcccgagtagctgggactacaggcacccgccaccatgcccggctaattatttttrtatttttttttcccctgagacagtgtctcactctgtcgcccaggttggagtgcagtggcgtgatctcagctcactgcaagttccggctcctgggttcaca

SEQ ID NO: 549162 - DNA, 201 bp, Homo sapiens
ggcagagaaagccaggagaggaggagaagatggcagagaggtgatgggggtctggatcctgaaggccttgaggctgaggaagatcattgtaagagatggtkcttacatcgagggcctggcatacagaaggtgctcagggaatggggtccactgcagtagtgactaatgaacatttgtttgccagatgctttctttgttctg

SEQ ID NO: 549163 - DNA, 201 bp, Homo sapiens
cagtcctggccttggagagtgtctagccacaggggctgcagggatgtgctgcagaggcaggatgaccacccaagatggggggaggggtgtgcaaggagggrcactgagtagctggatgcagttacaaggaggacatgccagggcctggaggtggcagcagtgggagaggacaggcagggcagcctgattcgactctcctag

SEQ ID NO: 549164 - DNA, 201 bp, Homo sapiens
cactgcagtcctggccttggagagtgtctagccacaggggctgcagggatgtgctgcagaggcaggatgaccacccaagatggggggaggggtgtgcaagsaggggcactgagtagctggatgcagttacaaggaggacatgccagggcctggaggtggcagcagtgggagaggacaggcagggcagcctgattcgactct

SEQ ID NO: 549165 - DNA, 201 bp, Homo sapiens
cagcggaaactcacctgtcggggaaaattggagctaagaaactgcggaagctggaggagaaacaagcgcgaaaggcccagcgtgaggcaagccggagggakggggtgcagctctgggaagtgcgaaagggcactgccttcctttttccctaaggcagactgagggcttgttgcctgctgggctggtgtttgctgcttccct

SEQ ID NO: 549166 - DNA, 201 bp, Homo sapiens
ggggcccagaggggcagagccgcagggtcctggccaggagagtttctctccctccaaccccgaaggtggagaaggacctgggtctgtgtgggaggcgcaarcctttgatcacttcctcacactcagtttgacagtttccctgctcttcagaccccacgctcagtgagtcagtgtgttttcaagtctcttcacatgtgtttt

SEQ ID NO: 549167 - DNA, 201 bp, Homo sapiens
gtgtacagtgtttttccagccaccgagaacagatcagatcagaatgcaaacctggagggtgcccatgcttagagggatttgcccaagctcagcctctcttycttttcctccttctttttgtagcagtccaaggttgtgctcttggaagacctggcttcccaggtgggcctacgcactcaggtaagccctggaacgtggcct

SEQ ID NO: 549168 - DNA, 201 bp, Homo sapiens
ctgcaacctctgcctcccagcctcaagcaatcctcccacttcagttccccgtccctgcgagtagctgggactataggtgtgcaccaccatgcctggctaattttttttttttttttttttttggtagagattgggtttcaccgtgtttcccaggctgcttttgaattcctagactcaagcaattctcttcccttggcctcc

SEQ ID NO: 549169 - DNA, 201 bp, Homo sapiens
tgcaacctctgcctcccagcctcaagcaatcctcccacttcagttccccgtccctgcgagtagctgggactataggtgtgcaccaccatgcctggctaattttttttttttttttttttttggtagagattgggtttcaccgtgtttcccaggctgcttttgaattcctagactcaagcaattctcttcccttggcctccc

SEQ ID NO: 549170 - DNA, 201 bp, Homo sapiens
gcaacctctgcctcccagcctcaagcaatcctcccacttcagttccccgtccctgcgagtagctgggactataggtgtgcaccaccatgcctggctaattttttttttttttttttttttggtagagattgggtttcaccgtgtttcccaggctgcttttgaattcctagactcaagcaattctcttcccttggcctccca

SEQ ID NO: 549171 - DNA, 201 bp, Homo sapiens
caacctctgcctcccagcctcaagcaatcctcccacttcagttccccgtccctgcgagtagctgggactataggtgtgcaccaccatgcctggctaattttttttttttttttttttttggtagagattgggtttcaccgtgtttcccaggctgcttttgaattcctagactcaagcaattctcttcccttggcctcccaa

SEQ ID NO: 549172 - DNA, 201 bp, Homo sapiens
ggagaaacaagcgcgaaaggcccagcgtgaggcaagccggagggatggggtgcagctctgggaagtgcgaaagggcactgccttcctttttccctaaggcrgactgagggcttgttgcctgctgggctggtgtttgctgcttccctggctctgtctcctgccgcctgggtctgtgccctggcccaggcattgccttcccta

SEQ ID NO: 549173 - DNA, 201 bp, Homo sapiens
aacctctgcctcccagcctcaagcaatcctcccacttcagttccccgtccctgcgagtagctgggactataggtgtgcaccaccatgcctggctaattttttttttttttttttttttggtagagattgggtttcaccgtgtttcccaggctgcttttgaattcctagactcaagcaattctcttcccttggcctcccaaa

SEQ ID NO: 549174 - DNA, 201 bp, Homo sapiens
taggtgggcattctcaggccagatggggaacgcccaggaggcctcagccccacaacctgcatgtccccacaggtgtgattgacgaccggggcaagttcatytacataaccccagaggaactggccgccgtggccaacttcatccgacagcggggccgggtgtccatcgccgagcttgcccaagccagcaactccctcatcg

SEQ ID NO: 549175 - DNA, 201 bp, Homo sapiens
tggcagatgcctctggagggcagagctgggctagtgacatttgcaggtgggtggaaggggatccccctgttaggggagggacgaggggttggggatccatsgtcatcagtcctctctggtcagaacctgaactgtctttctttgaccatacccagcccaggaggaggaaggtgtcgagaagccagcggaaactcacctgtc

SEQ ID NO: 549176 - DNA, 201 bp, Homo sapiens
taccactcgtgtgtctcggagtccaggacagggcccatgaggcaggtggttgttttgggtagattccttcctcgcaagaaggggaatgagagggtttatgrttgtgcgggtctctgtcaatgggtgatagtgagtgtgtgtgtgtgtgtgtgtgtgtgtgtcaggggagcaaggctgtcctacaggagtgtgtacagtgtt

SEQ ID NO: 549177 - DNA, 201 bp, Homo sapiens
cgtgaggagcggaaacgactcgagtcccagcgcgaagctgagtggaagaaggaggaggagcggcttcgcctggaggaggagcagaaggtgaggccagcccytaccctgacctctgacccttgaccaggcaaggcagccttgcttcttatgcagctccctggcacctccaacctagaaggtgggccatagacctggcacaag

SEQ ID NO: 549178 - DNA, 201 bp, Homo sapiens
cctccagttgaccctccgtacacatgagtttcacatcccatgcacaaatgctgatctgtgtgacctcacctgcatttgattgaaaaaagtatgcgcgtaaktgtacccacccagttcaaacccgtgtgtaagggtcaactgtacaaaaaagtttgtgaaataaacgtactggagaatctttaaaatttttgtgctttttaa

SEQ ID NO: 549179 - DNA, 201 bp, Homo sapiens
tctaaaatatctgtaatagctgaacatatatcaaacagatctatagagactagcacatgtaaaattttttttaagtttcttgtttgattcttctgtatttyatctttcttcatataaaatcagccttaattgacagagaaatattctatgtactcattcatatgtgggaactaaaaaagttgatctcatggagatagtcaa

SEQ ID NO: 549180 - DNA, 201 bp, Homo sapiens
aatcacttgaacctgggaggcagaggttgcagtgagccaagatcatgccactgcacatcagcctgggtgacagagtgagactatctcattaaaaaaaaaawatattttaaattattttatttggtcaggcacggtggctcacgcctgtaatcccagcactttgagaggccaaggtgggtggatcacctgaggtcaggagct

SEQ ID NO: 549181 - DNA, 201 bp, Homo sapiens
cgcacgtccataatcccagctatttgggtggcggaggcacaagaatcacttgaacctgggaggcagaggttgcagtgagccaagatcatgccactgcacaycagcctgggtgacagagtgagactatctcattaaaaaaaaaaaatattttaaattattttatttggtcaggcacggtggctcacgcctgtaatcccagca

SEQ ID NO: 549182 - DNA, 201 bp, Homo sapiens
gcgcacgtccataatcccagctatttgggtggcggaggcacaagaatcacttgaacctgggaggcagaggttgcagtgagccaagatcatgccactgcacwtcagcctgggtgacagagtgagactatctcattaaaaaaaaaaaatattttaaattattttatttggtcaggcacggtggctcacgcctgtaatcccagc

SEQ ID NO: 549183 - DNA, 201 bp, Homo sapiens
aagaaataagtttaattgactcacagttacgcatgactagggaggcctcaggaaacttacaattatggtggaaggggcacctttttcacgaggcaggagaraagagtgaagagcaaagcaggaagagcccattttaaaaccagatctcatgagaactcactatcaggagaacagcatgggggagattgccttgatgattta

SEQ ID NO: 549184 - DNA, 201 bp, Homo sapiens
cttgtttatttgttcacttgtttatagtctctgtcctctgaaatatataccctatgagagaagggaccttatctattagcctgtatccccacatagtgcartttgtggagtgtggtaggtactaagtaaatattgttgaacaaatgagcttacagttgttattcctgctttacagacaaaagaaacctggttccaagtata

SEQ ID NO: 549185 - DNA, 201 bp, Homo sapiens
gagaattgcttgagtcgtggcactacattccagcctaggcagcagagcgaaaccgtctcaaaaaaaaaaaaaaaaaaaaagggatgtaaaagtcaatatgwatattaggtccttgctcagtattgagctcaataagaagatgaacaactcacatttaaaaattggcaaaacaggccaggtacggtgtggctcatgccttta

SEQ ID NO: 549186 - DNA, 201 bp, Homo sapiens
gtgccatggcacaggcctgtagtcccaactgctgggaagattgaggtgggaggatggctgcagtacaagagcccaggagttcaaggccaggctgggcaacmtagtgctccgcctctgctgggctctgtagggaatcctttctgttgtaaaagagttaccatttaactcccttcactgagtgcgtttctgagaccttgctag

SEQ ID NO: 549187 - DNA, 201 bp, Homo sapiens
cttgaggtttgtgggttaagataggaaatgctatatttaagagtctaacattaaggttttcaaccaggcatggtggctcacacctgtaatcccaggacttygtggggctgaggcaggcggatcacttgaggtcaggagtttgagaccagcctggccaacatggtgaaaccccatctctactaaaaatacaaaaattagcca

SEQ ID NO: 549188 - DNA, 201 bp, Homo sapiens
cccagctttagaaaagaagtaaactggatacaaaaagttccattgaggaacagttatttacagtataaaagatttgtttactttacaaaaggcttgtgtctgtgtgtgtgtgtgtgtgtgtgtgtgtgtattttaaactgactcagtgacagctggggtggaatggcaagaacacttacaaccaaactcatgggctgctgc

SEQ ID NO: 549189 - DNA, 201 bp, Homo sapiens
ccagctttagaaaagaagtaaactggatacaaaaagttccattgaggaacagttatttacagtataaaagatttgtttactttacaaaaggcttgtgtctgtgtgtgtgtgtgtgtgtgtgtgtgtgtattttaaactgactcagtgacagctggggtggaatggcaagaacacttacaaccaaactcatgggctgctgca

SEQ ID NO: 549190 - DNA, 201 bp, Homo sapiens
atgcatagggactgtttcatttgtatcacttatattccctgtccccttaagacaggctaggtactccaaaaggctttaaatgaagtttatggaattagatrtatcttaaaatgagaacattcaacatagaaggtttcaatttgttctttaaaatagtagcttttacacaaaatttcagtgttctttagcaacatttaccaa

SEQ ID NO: 549191 - DNA, 201 bp, Homo sapiens
cccggcaggtcacctctcctcccagggcccgccgccccgcccgccgcccaggccgaggccgccagtgcccgccggccgcttccgctcccggcgcaggcgckgcagcttggccagagcggagggggctcgggagaggagtggacgccgctggccaggatggtgctggagagcgtggcccgtatcgtgaaggtgcagctccct

SEQ ID NO: 549192 - DNA, 201 bp, Homo sapiens
ggctacagttttctcacatgtaaaatggggataataatgatacctaccacatatagttgtttaagctaacatagtgttaaatgagctagtgcccttatacycttagcataacctgttcatttatctttaatgtttattagcatgagttagcatattattttctgtttttctcttttctcaactaagctatttccacatagt

SEQ ID NO: 549193 - DNA, 201 bp, Homo sapiens
ccttccctatttaaatctagctgttttttaaagctattgactctcttatgatgactctgcattcttagaaaccacatggagatctttaatgaccatatactagttaaatacaggcagttctcacctatcagaaacaacttaactatctttgtttatgtcacattttcaagagtgaggcgttcaagataaattactgtgatt

SEQ ID NO: 549194 - DNA, 201 bp, Homo sapiens
tatcagtacaaaaacagcctgaataaatgtacttacagtcatttgaattgagcttttcaagctgtattgctttcatgtataaagtttttcagtagttaaaytgtagttggttatctttaaaaagtagattatgttaagactttggtaagttattactttgttgtaggaggtaatagtacctctcatcactgtatttttaag

SEQ ID NO: 549195 - DNA, 201 bp, Homo sapiens
cactatagtacggttatatagaaaaagttctagtattcaatagcataatagggtgactattgttatcagtaattttagtgtatatttcaaaataggagagraaatttggaatgttctcaatataaataaatgataaatgaggtgacgaatatcccagttacactgagttgatcattgcacatcatatgcatgtatgcatgt

SEQ ID NO: 549196 - DNA, 201 bp, Homo sapiens
cttccctatttaaatctagctgttttttaaagctattgactctcttatgatgactctgcattcttagaaaccacatggagatctttaatgaccatatactagttaaatacaggcagttctcacctatcagaaacaacttaactatctttgtttatgtcacattttcaagagtgaggcgttcaagataaattactgtgatta

SEQ ID NO: 549197 - DNA, 201 bp, Homo sapiens
ttccctatttaaatctagctgttttttaaagctattgactctcttatgatgactctgcattcttagaaaccacatggagatctttaatgaccatatactagttaaatacaggcagttctcacctatcagaaacaacttaactatctttgtttatgtcacattttcaagagtgaggcgttcaagataaattactgtgattat

SEQ ID NO: 549198 - DNA, 201 bp, Homo sapiens
tccctatttaaatctagctgttttttaaagctattgactctcttatgatgactctgcattcttagaaaccacatggagatctttaatgaccatatactagttaaatacaggcagttctcacctatcagaaacaacttaactatctttgtttatgtcacattttcaagagtgaggcgttcaagataaattactgtgattatc

SEQ ID NO: 549199 - DNA, 201 bp, Homo sapiens
gcaaaaaacaatacagttcacattattattgcctacatttccttccctatttaaatctagctgttttttaaagctattgactctcttatgatgactctgcattcttagaaaccacatggagatctttaatgaccatatactagttaaatacaggcagttctcacctatcagaaacaacttaactatctttgtttatgtcac

SEQ ID NO: 549200 - DNA, 201 bp, Homo sapiens
ttttgtgagaaagggtttcactctgttgcccaggctggagtgcaggtggcatgatctctacccactcattgcagccttgacttcacaagctcaagccatcytcccacctcaacctcttgagtagctggtactacaggtgcacgctaccacacctggctcatttttttgtatcttattttagagacggggttttgccatgtt

SEQ ID NO: 549201 - DNA, 201 bp, Homo sapiens
gtgtgcaccaccatgcccagctaattttgtatttttagtagagacggggtttcaccatgttggccaggacggtctcgatgtcttgacctcatgatccgccygcctcagcctcccaaagtgctaggattacaggcatgagccaccagcacccagctgggtttttcttttctgttgcatcatcagactgcaaattttccaaac

SEQ ID NO: 549202 - DNA, 201 bp, Homo sapiens
acaggtgtgcaccaccatgcccagctaattttgtatttttagtagagacggggtttcaccatgttggccaggacggtctcgatgtcttgacctcatgatcygcctgcctcagcctcccaaagtgctaggattacaggcatgagccaccagcacccagctgggtttttcttttctgttgcatcatcagactgcaaattttcc

SEQ ID NO: 549203 - DNA, 201 bp, Homo sapiens
cctgggcgacaaggtgagactgtctcacaaaaaaaagaaaaaaaagaatacacacaataaatgcataggaaaaaatataccaaactgttaattattattaygtgtatctggatgggttatgagtgaattttttaaaatttatttttatttattctttatttatttttgcgggggacagagtcttgctctgtcactcaggct

SEQ ID NO: 549204 - DNA, 201 bp, Homo sapiens
taaaacttactgaggtcttggtttatgtaagtctctgttaaagggtagggagttagggattttttgtttagttggggaggagacaaatatttacctaactrtatagttttaaggcagaatgcattaatagtttgaattgtgttctgtagtttttactgagtgggttcctacttcattcgtttctcccagcaatcctatgaa

SEQ ID NO: 549205 - DNA, 201 bp, Homo sapiens
tattgggtactatcctcactacctaggtgggaggatcagccatatcccaaacctcagcatcacacaatatacccatatgacaaacctgcacatttacctcytcaacctaaaataaaagtcgaaattatattaaaatattttaaaaaggaaatttgggcacacacaaagggagaacaccatgtgaagatggaggcagagatt

SEQ ID NO: 549206 - DNA, 201 bp, Homo sapiens
agacggggttttgccatgttgcccaggctggtcttgagctcctgagcttaagctatccactcacctcagcctcccaaagtgctgaaattataggtgtgagscactgtgagtggcctagattttgtttctctgatggtgctggttctttcattcttcctttttggtcctgttatttatcttaatagtgggatacgtggaagg

SEQ ID NO: 549207 - DNA, 201 bp, Homo sapiens
gtagagacggggtttcaccatgttggccaggacggtctcgatgtcttgacctcatgatccgcctgcctcagcctcccaaagtgctaggattacaggcatgrgccaccagcacccagctgggtttttcttttctgttgcatcatcagactgcaaattttccaaacttttatgctctgcttcccttttaaacctaagttccga

SEQ ID NO: 549208 - DNA, 201 bp, Homo sapiens
cactcacagttcagcatggctggggaggccttaggaaacgtacaatcatggcggaaggcgaaggggaaacaaggcaccttcttcacatcatggcaggaagwagtgccgagcaaaggaggaagagccccttataaaaccatcagatatcatgagaactcactcactatcaccagaacagcatgggggataccacacccataa

SEQ ID NO: 549209 - DNA, 201 bp, Homo sapiens
tcgcttgaacccgggcagtggagattgcagtgagctaacacgacacacactccagcctgggaaacagagcgagacgctgtctcaaaaaaaaaaaaaaaaawttttttttgcacattatttacagttagtaatattttcctttcaaagtatctaaaatatctgtaatagctgaacatatatcaaacagatctatagagacta

SEQ ID NO: 549210 - DNA, 201 bp, Homo sapiens
catgcattgaaaatattttatcttttctacagttaagaaatagaaataatttctgtgtttagctacatatgataaatgagaaaatatgttataaaataacyagcaaccaagctgccagtattatttttatggtatcataagatgatatggctatattatatgtagatgtttgaaaatttgaaatggaaaaattctgttcta

SEQ ID NO: 549211 - DNA, 201 bp, Homo sapiens
aatccgtctgcctcggccgcccaaagtgctgggattacaggtgtgagccactgcgcccagccctaccttaggttttaagtggtaatagtaaactcatgcawtgaaaatattttatcttttctacagttaagaaatagaaataatttctgtgtttagctacatatgataaatgagaaaatatgttataaaataactagcaac

SEQ ID NO: 549212 - DNA, 201 bp, Homo sapiens
gcctctgctgcccaaaatgctaggattacaggcatgagccaccgtgcccagccaaaagtcttcatttgtgaccagaaattgggtaaatttttaaaaatatkattgaatttatagaaccttctgttatctttttgtcaaatatttttctaaaaaattttctacaggagcagtttgctttgttgaacttcagcctttgcccca

SEQ ID NO: 549213 - DNA, 201 bp, Homo sapiens
agaatcaccagttccttccccaagcatggacgctccctccccgactggttctgagtctccttttcagggaatgggaggtgaggaatcccagtcaccaaccrtggagagtgagaaatctgccacacctgaacctgtgacagataatcgtgatgtggaagacatggaactctcagatgtggaagatgatgggtcaaaaatcat

SEQ ID NO: 549214 - DNA, 201 bp, Homo sapiens
caggtttatatatgttgagttttattaatttcagtgttaaccaaagctgaagacagtaggaagggtccatttattatcaaaaaatatggccaggtgcagtygctcacgcctgtaatcccggcactttgggaggctgaggcgggcagatcacctaaggtcagcagttcaagaccagcctggccaaccaggtgaaataacatc

SEQ ID NO: 549215 - DNA, 201 bp, Homo sapiens
gggactacaggcacacaccaccacacccagctaatttttgtatttttagtagaggcggggtttcaccatattggccaggctggtcttgaacccctgacctygtgatctgcctgcctcagcccctcaaagtgctgggatacaggcgtgagccactgcacttggcctaatatgtaattattaagagtccatattttatgaatt

SEQ ID NO: 549216 - DNA, 201 bp, Homo sapiens
aaagcccaggtgacagcacatctgtttacagtgtggtttgctgaatatttcaagcccaatgttgagacctgctcttgttcagggaaaaaaaaaaaaaaacacagattctttacaaaatattactgttcattgacaatgcacccagtcacccaagagctctgatgtataaggagattgatgttattttcttgcttgctaaca

SEQ ID NO: 549217 - DNA, 201 bp, Homo sapiens
tacactttaaaacaaaggaaatgcagaaaagggtttaattgagtgaagattcaagagtagttgggggattgcaagaagaaaaaaatacttgatagtgtccmggataattttcaggttcaaggatatatgatgttagaggcagctggcattaaacaacagatctgaagaggagactaggcattaagaagcatttctgtggga

SEQ ID NO: 549218 - DNA, 201 bp, Homo sapiens
ggcataaaccatgggcaagcctgttttccaggtctgggaggctcccagtgacctatgctaaacaagccatcatggagatacttctaaaaaaaaaaaaaaaagcaaacaaaaactacactttaaaacaaaggaaatgcagaaaagggtttaattgagtgaagattcaagagtagttgggggattgcaagaagaaaaaaatac

SEQ ID NO: 549219 - DNA, 201 bp, Homo sapiens
taggcaagaaaaaaattctttgtgaacacatgatgttatggattcataggctctcatccttgaaagaggccttaagtttgacatagcttttttttttttttgtcttcaatctccatatggtttggtggattcacttaaggagaggttacattcctgttttgtcttttgatagatctatgaaattattagaatggtttctgt

SEQ ID NO: 549220 - DNA, 201 bp, Homo sapiens
caaagcccaggtgacagcacatctgtttacagtgtggtttgctgaatatttcaagcccaatgttgagacctgctcttgttcagggaaaaaaaaaaaaaaamacagattctttacaaaatattactgttcattgacaatgcacccagtcacccaagagctctgatgtataaggagattgatgttattttcttgcttgctaac

SEQ ID NO: 549221 - DNA, 201 bp, Homo sapiens
gaggtggaggttgcagtgagccaggatcacgccactgcactccagtctgggtgacagagtgagaccctatctccaaaaatagaaataaaaaagaaagaaaggaatagttataaagagttgattggaacatggggaaatgtttgttaagtgaaaataacagaatagaattttttttgtgtgaagagagggcatactttgttt

SEQ ID NO: 549222 - DNA, 201 bp, Homo sapiens
ggaggtggaggttgcagtgagccaggatcacgccactgcactccagtctgggtgacagagtgagaccctatctccaaaaatagaaataaaaaagaaagaaaggaatagttataaagagttgattggaacatggggaaatgtttgttaagtgaaaataacagaatagaattttttttgtgtgaagagagggcatactttgtt

SEQ ID NO: 549223 - DNA, 201 bp, Homo sapiens
ttatcttctttgattctcaaatcaaatatatgatataattaggggcaaagattattatcctcattttacagatgaggatactgatgataaaataaatcatrtaaatctacttggagataggaaactgaacattaaaaagtaagagagggctgggtgtggtggctcatgcctataatcccagcactttgggaggccaaggca

SEQ ID NO: 549224 - DNA, 201 bp, Homo sapiens
gggaggtggaggttgcagtgagccaggatcacgccactgcactccagtctgggtgacagagtgagaccctatctccaaaaatagaaataaaaaagaaagaaaggaatagttataaagagttgattggaacatggggaaatgtttgttaagtgaaaataacagaatagaattttttttgtgtgaagagagggcatactttgt

SEQ ID NO: 549225 - DNA, 201 bp, Homo sapiens
gagtgagaaatctgccacacctgaacctgtgacagataatcgtgatgtggaagacatggaactctcagatgtggaagatgatgggtcaaaaatcattggtrtgtctttatgtgattaatagacaacttattccttatctgttttgccttctcagcaatgaatacatcacaggcaggtattgaaagatagttcatttcttaa

SEQ ID NO: 549226 - DNA, 201 bp, Homo sapiens
tcatccatattatggcgtacgtcagaattttctccttcttatgggtggataatattccattgtatgcgtccacattcttttacccaatatttttttttgtktgtgacagagtcttgctctggcccaggctgcagtgcagtgtcacaatcccagctcactgcaacctctgcctcccaggttcaagcaattctcatgcctcag

SEQ ID NO: 549227 - DNA, 201 bp, Homo sapiens
tgggaggtggaggttgcagtgagccaggatcacgccactgcactccagtctgggtgacagagtgagaccctatctccaaaaatagaaataaaaaagaaagaaaggaatagttataaagagttgattggaacatggggaaatgtttgttaagtgaaaataacagaatagaattttttttgtgtgaagagagggcatactttg

SEQ ID NO: 549228 - DNA, 201 bp, Homo sapiens
gtttcaccatgttggtcaggctggtcttgaactcctgacctcatgatccgcctgccttgacctcctgaagtgctgggattacaggcatgagctaccgcacscggcccagattttattatttctttctacaaaatgagaaaaactgaagtccagagcagttaagataccacccaaaggaaaatgacaatttagtaaaagtcc

SEQ ID NO: 549229 - DNA, 201 bp, Homo sapiens
agaagaatcacttgagcctgggaggtggaggttgcagtgagccaggatcacgccactgcactccagtctgggtgacagagtgagaccctatctccaaaaayagaaataaaaaagaaagaaaggaatagttataaagagttgattggaacatggggaaatgtttgttaagtgaaaataacagaatagaattttttttgtgtg

SEQ ID NO: 549230 - DNA, 201 bp, Homo sapiens
aatgaaagttaaaccaacctggtatttgccatttgtgtcctagaggtcctagctaagggacagaaatgccagtttatctgaatatacatcaccatgagacyggaatagttgaaacactaatttgaagcacaggaaaagtgtctatgaatgtcagagttgagttacacttgggaaactgtggactactctgcaaccagcaac

SEQ ID NO: 549231 - DNA, 201 bp, Homo sapiens
cccgggttcaagcaattctcctgcctcagccttctgagtagctgggattacaggcgcgcgccaccatacccagctaatttttgtatttttagtagagacaggggttcaccatgttggtcaggctggtcttgaactcctgaccttaggtgacccacccatgtcagcctcccaaagtgctgggattacaggcgtgagccactg

SEQ ID NO: 549232 - DNA, 201 bp, Homo sapiens
ttttgttttacaaaatgaggagagagagaatgagaataattgaatgatcttgtaaatgaaatatgactctggtctgtgtttagtctcaggccctaattgargagctgttgctatacaagcgctcagaagatcagatagaactgaaggaaaagcagttgtcaactatgagggtggatgtgtgcagcacagaaactctcaaat

SEQ ID NO: 549233 - DNA, 201 bp, Homo sapiens
gtcacaccatttttatatgtgtgacattgtcagatttaaaaaataatattgctgacaaaacacatttgatgatcatattgaaccatgggcaacttattagrgacattaattttattccttgaatgcctttaaggtgtttattgatttcacttgattaaaaattggtatggggtggactcacggccacatgttaaaagaggt

SEQ ID NO: 549234 - DNA, 201 bp, Homo sapiens
atgaaatctgtaaagagaaacggaaattatttcccaccatcatactcccaactccatgttgatttaatttcatttttagcggtagttggatccagcacttsccacagtgtattcctatgaaatgatcagaggaagaagggttctgtgctcaaaaaagtttagaaaatgatccatactacttttcctttcctgaagattcaa

SEQ ID NO: 549235 - DNA, 201 bp, Homo sapiens
tttgtttgttttaacacatttcatttcttctttctgagtcttactgaaatttttttccctccatgaaatctgtaaagagaaacggaaattatttcccaccrtcatactcccaactccatgttgatttaatttcatttttagcggtagttggatccagcacttcccacagtgtattcctatgaaatgatcagaggaagaagg

SEQ ID NO: 549236 - DNA, 201 bp, Homo sapiens
ctttccttcctttcttttctttctttctttctttctttgagacagagtctcgctctgttgcccaggctggagtgcagtggcgcgatctcggctcgctgcarcctccgcctcccgggttcaagcaattctcttgcctcagcctcccaaatagctgggactacaggtgcgtgctaccatgtccggctaattttttgtattttt

SEQ ID NO: 549237 - DNA, 201 bp, Homo sapiens
aaaaaaaaaaagaaagaaactaagagtattagagtactgcacagtaaggcagcaagagtatgttcacaaagagaggttttcttcaaaagtcaaaagactamatttttttattttttattttatcctgaaatgaatatttcccatgtcattttagataaaacaggtgggaagaagttctccaaagaatttgaagaggcaagc

SEQ ID NO: 549238 - DNA, 201 bp, Homo sapiens
tcccgggttcaagcaattctcctgcctcagccttctgagtagctgggattacaggcgcgcgccaccatacccagctaatttttgtatttttagtagagacaggggttcaccatgttggtcaggctggtcttgaactcctgaccttaggtgacccacccatgtcagcctcccaaagtgctgggattacaggcgtgagccact

SEQ ID NO: 549239 - DNA, 201 bp, Homo sapiens
aaatcgcttgaaccgagaggtggaggttgcggtgagctgagatcgcgccgttgcactccagcttggccaacaagagcgaaactccatctcaaaaaaaaaaagataacacgggctgagaacaccctaaaagtgatgaaaaatatgaatctaagataaaggaagcaataacatatactaaatagcataaataaaaattttata

SEQ ID NO: 549240 - DNA, 201 bp, Homo sapiens
ggagggtggatcacagggtcaggagatcgagaccatccttcctgactaacacagtgaaaccccgtctctactaaaaacacacatacacacacacacacacaaaattagccaggtgtggtggcgggcgcctgtagttccagctagtcaggaggctgaggcaggagaatggcatgaacccgggaagcagagcttgcagtgagc

SEQ ID NO: 549241 - DNA, 201 bp, Homo sapiens
aggagggtggatcacagggtcaggagatcgagaccatccttcctgactaacacagtgaaaccccgtctctactaaaaacacacatacacacacacacacacaaaattagccaggtgtggtggcgggcgcctgtagttccagctagtcaggaggctgaggcaggagaatggcatgaacccgggaagcagagcttgcagtgag

SEQ ID NO: 549242 - DNA, 201 bp, Homo sapiens
cataatctcggaataaagtacagttcttaagttaaaaccttaagcccccaagaatgttttaactcagtgaaacatgtcttcagaaacctgtagtaaacatsatacgtaatgatgaaacaaagcattccaagacagaagtccttcattatcattactattgatcattatgctggaggttccatttatttagaaatgaatgaa

SEQ ID NO: 549243 - DNA, 201 bp, Homo sapiens
  misc_feature (1)...(201): n = A,T,C or G
ttaaaccatgtaaagatatgtttaaaaacaactactttgtgtgttactaccattgtttcatggaaaaaagtgagaaggacataatctcggaataaagtacngttcttaagttaaaaccttaagcccccaagaatgttttaactcagtgaaacatgtcttcagaaacctgtagtaaacatcatacgtaatgatgaaacaaag

SEQ ID NO: 549244 - DNA, 201 bp, Homo sapiens
cgggaggccaaggcgggtggtggatcatgaggtcaggagatcaagaccatcaagagatggtaaaaccctgtctctactaaaaaatacaaaaaaattagccrggcgtggtggcaggcacctgtagtcccagctactcaggaggctgaggcaggagaatggcttgaacccaggaggcagagcttgcagtaagccgagatcacg

SEQ ID NO: 549245 - DNA, 201 bp, Homo sapiens
tttgcctaaatggttgattattactttcttgttaacacacgtttttctttctttcttttcttttcttttctttttctctctctctctttctttctttcttyctttcctttcctttccttcctttcttttctttctttctttctttctttgagacagagtctcgctctgttgcccaggctggagtgcagtggcgcgatctcg

SEQ ID NO: 549246 - DNA, 201 bp, Homo sapiens
ttcgtatgatttaattttttgtatgtgattttagaacccagcagcagaaataaaggtgcagtaaatgcagttagttagattgatccaaatttgggatttcwttgagcacatgagatagaaggctgaattagggagaaggacaagagtatgagggttttaataaaatattggtttaaataatggacagagactctggaattg

SEQ ID NO: 549247 - DNA, 201 bp, Homo sapiens
tgcttgaggtcacattctgatttgattacaaagcccatgctctttctactaaccttggtatttctgcaacaagttgagcatgttcaactcattttttttttgtcttctcagatgtttgagactataattttgttttattttagcttctccagagttactgggtctttttttttagtgccaaacatctacaaagtgagggag

SEQ ID NO: 549248 - DNA, 201 bp, Homo sapiens
gtagataccggacagaattacctgtgtttaccaataaccgatcaaagagttattttcttgcccagaggtaaaattataacgtgcaaaaacatcaaatatgmtaacagtcatcattgaagactcacatgttaagtatctgctatgtgcccagtcatctcattgtaccttaaaatcgtctgagaagtagattttttaatcact

SEQ ID NO: 549249 - DNA, 201 bp, Homo sapiens
gagctgagattgcgccacttcactgtagcctgggcgacagagtgagactccatctccaaaaaaaaaaaaaaaaaaacaaaaagaagaagaagaaaagcttwacctagatgcatacataggatcatattattttgcaggacattcgtctagtgatgaaagcagcagcagagcctccctccagtagatgggaagactaagacg

SEQ ID NO: 549250 - DNA, 201 bp, Homo sapiens
taatgtttaacgttcttggtataccagtgatatattgcaaacagttctaatgtgagtgagagaacctcttctccaccctattttaaaacatttttactgamctatgcaagcattttacatttcctcaccttgggctctggggctttaactgtatggttacatcatttgcaagaataagttggtccctgtcccgtctctgct

SEQ ID NO: 549251 - DNA, 201 bp, Homo sapiens
tgcactctagcctgggcgacgagtgaaactgtctcaaaaataataataataataattaataagtaaatacaaataagaatcaaattaaaatacaagaagcsaggataagccaggtgcagtagttcatgcctgtaatcccagcaatttgggaggctgaggcgggcagattgcttgagcccaggagtacaggaccagcctggg

SEQ ID NO: 549252 - DNA, 201 bp, Homo sapiens
agatggcggccggcggcggcggaggcagcagtaaggcctcctcctcgtcggcctcttcggcaggggctctggagtcctcgttggatcgaaaattccagtckgtaaccaacaccatggagtccattcaaggcttgtcgtcttggtgtatagagaacaaaaaacaccacagtactatcgtctatcattggatgaagtggctcc

SEQ ID NO: 549253 - DNA, 201 bp, Homo sapiens
aatcccagctacttcgggaggctaaggcaggagaatagcttgaacccgtgaggcggaggttgcagtgagccgagattgtgccattgcactctagcctgggygacgagtgaaactgtctcaaaaataataataataataattaataagtaaatacaaataagaatcaaattaaaatacaagaagcgaggataagccaggtgc

SEQ ID NO: 549254 - DNA, 201 bp, Homo sapiens
cctcccaggttcaagtgattctcctgcctcagcctcccaagtagctggaattacaggcatgcgccaccatgcctggctaatttttgtatttttagtagacrcagggtttcaccatgttggccaggctggtcttgaactctggacctcaggtgatccacctgcctctcagcctcccaaagtgctgggattacaggtgtgagc

SEQ ID NO: 549255 - DNA, 201 bp, Homo sapiens
catctctactaaaaatacaaaaaaattagctgggcttggtggcaggtgcctgtaatcccagctacttcgggaggctaaggcaggagaatagcttgaacccrtgaggcggaggttgcagtgagccgagattgtgccattgcactctagcctgggcgacgagtgaaactgtctcaaaaataataataataataattaataagt

SEQ ID NO: 549256 - DNA, 201 bp, Homo sapiens
gccaccacgcccggccaaatttttatgttttttgtagagacgaggtattgccatgttgcccaggctgaactcttgggctcaagctatctgcctgccttggyctcccaaagtggtaggattacaggcgtgaaccaccaggcccagaccttctttcccatttttaatggtaaaatgggaatcaatatggaaaaatataaaaga

SEQ ID NO: 549257 - DNA, 201 bp, Homo sapiens
ttttagtaatgacaaaattttttatttttttttggtaaatagcctagtacagaaatatatatatgcatgatttgtgctatatttggtagcatataattccrtaggctgaatcatattaagagagtaaatcagctgaatgttttgatgcttggaacatgaagccgatttagggagagtcaaacttcctggtttctctctctc

SEQ ID NO: 549258 - DNA, 201 bp, Homo sapiens
gtaggatgaaaaccaggagagtggttaagagagaagccaaaggagaaagtactgtgacagattattctgcgcgccaaagctataaagaaataacattaaamaaaaatctccattgagtttagtaaattggaatttgttagtaaccttgaaaattggtgtttgagtgaactgttcgcaacataaatgagataacaatttata

SEQ ID NO: 549259 - DNA, 201 bp, Homo sapiens
tcctgaccttgtgatccgcccgtcttggcctcccaaagtgctgggattacaggcatgagccaccgtgcccggctgtgccaagaggttaagtaacttgcccrtggttacacagctaataggtggtggagatggagacagaattcaaacccaggcattcttgatctacagtatacactcttacccaccatcctacacagcctt

SEQ ID NO: 549260 - DNA, 201 bp, Homo sapiens
gcagaggttgcggtgagctgagatcatgccattgcgctccagcctgggcaacaagagcgaaactccatctcaaaaagaaaaaaaaaaaattagccagacayggtggcatgtgactgtagtcccagctatttgggaggctgaggtgggaggatcacttgaacccaggaggcagaggtttcagtgagccaagattgtgactgc

SEQ ID NO: 549261 - DNA, 201 bp, Homo sapiens
tgtgatccgcccgtcttggcctcccaaagtgctgggattacaggcatgagccaccgtgcccggctgtgccaagaggttaagtaacttgcccgtggttacasagctaataggtggtggagatggagacagaattcaaacccaggcattcttgatctacagtatacactcttacccaccatcctacacagcctttcttattca

SEQ ID NO: 549262 - DNA, 201 bp, Homo sapiens
actatctcttagtgatttgaagttctgataggcatttatttatgtttttgattaattaaaaaaagggaaaaaaatggaacataattattgaagctatcgtytaggtaaaaacctttctaaatgtaaggttcatttagattgatgacctgtagagtgtaacagtattgccataggcatacagctttttaatcacatatcata

SEQ ID NO: 549263 - DNA, 201 bp, Homo sapiens
cgaagctatgttgtgtagcctattgctctttggctgtaaacctgcactgcatgtcactgtattgaatactataggcagctgtaacaatggtaagtacatayctaaacttttttttttttaaacggagtctcactctgtctccaggctggagtgcaatggcgcaatctcagctcactgcaaccttcgactccttggttcaag

SEQ ID NO: 549264 - DNA, 201 bp, Homo sapiens
ttactaggtaaattgatctaggtgagtttaaatatggatacattttttgtgacaagataatttccatttaatgatttttgccttctctgtgaaacagcatrtaagcttatctcctgagagtgagaagaagagatgtggtaaagattcgggcctgacaagtggttaaaatttgaaatagttctttgagagaggatgctgact

SEQ ID NO: 549265 - DNA, 201 bp, Homo sapiens
atttgggaggctgaggcgggcagattgcttgagcccaggagtacaggaccagcctgggcaacatggcaaacccttgtctctactaaaaatacaaaaaaaaattagccaggcatggtggcatgcctgaagtcccagctactcgagaggcttgaggtgggaggatcacctgagcccaaggaggctgcagtgaactgtgatcgc

SEQ ID NO: 549266 - DNA, 201 bp, Homo sapiens
gcaatttgggaggctgaggcgggcagattgcttgagcccaggagtacaggaccagcctgggcaacatggcaaacccttgtctctactaaaaatacaaaaawaaattagccaggcatggtggcatgcctgaagtcccagctactcgagaggcttgaggtgggaggatcacctgagcccaaggaggctgcagtgaactgtgat

SEQ ID NO: 549267 - DNA, 201 bp, Homo sapiens
gtcaaggtttttagtatgtttggtaaactgatccattagttcatttgtcagtttatccatccagcctcccttccatccattagttcatttgtcggtttatmcatccatccttcctcccttccatccatgtaattacattcatctttttatatccatgtaagaaaaaaaaaataaccagttacagtttgagaacactgtatt

SEQ ID NO: 549268 - DNA, 201 bp, Homo sapiens
tttcgagtaagttacagaatttgtttaatatagcaaagtattattcaccccttttgtattatagtttcctgtatagtccaataagatttatctgtattcarttacacatgtcatgttttaaacatgcatgaactgttctaaaggaacccagattgggattagattgcttggcgttttatctgttcccctaatggtagaaat

SEQ ID NO: 549269 - DNA, 201 bp, Homo sapiens
taagtaaatacaaataagaatcaaattaaaatacaagaagcgaggataagccaggtgcagtagttcatgcctgtaatcccagcaatttgggaggctgaggygggcagattgcttgagcccaggagtacaggaccagcctgggcaacatggcaaacccttgtctctactaaaaatacaaaaaaaaattagccaggcatggtg

SEQ ID NO: 549270 - DNA, 201 bp, Homo sapiens
ttacagcctgaaatcttaaaacactatgctatgagtagagaagagtgctcaggagagaatcctggagaacatcaacatttaaatgaggatgatcacggccrgactggctacctatacatgattctagaggaggacccggagaggtaggatgaaaaccaggagagtggttaagagagaagccaaaggagaaagtactgtgac

SEQ ID NO: 549271 - DNA, 201 bp, Homo sapiens
gatttgatatgataaataattggacaattttgcatatttgaaaatgaatttggctcccacttccctaccttgctcccctgttaaaatagaaacggggattsatttatgtcccattcctgaatgcatgtaaaatttatacaaaaatactttctatgaaaatgatttgtaatctgtagacttaatacctgggagatgtcttga

SEQ ID NO: 549272 - DNA, 201 bp, Homo sapiens
aaaaaaattagctgggtgcggtggcgcatgcctgtaatcccagctactcaggaggctgaggcaggagaatcgcttgaacctgggaggcagaggttgcggtragctgagatcgtgccattgcactccagcctgggcaacaagagtgaaactctgtctcaataaataaataaattacaataaaataaaatattaaaatcagcc

SEQ ID NO: 549273 - DNA, 201 bp, Homo sapiens
ctctggcctgggcgatagagtgagactaagtctccaaaaaaaagaataaggcagtaaacaagagaaattccagtcttctggatgcttataatccagtgagsatacagacaagtacactacaatgtgataaatgctatagtaggtaaaagtatagggtgcttaaagaccactgcctttaagcattttcccagattacctcaa

SEQ ID NO: 549274 - DNA, 201 bp, Homo sapiens
aaagtgctctgactagagtggagagtttgcattgaggagaaatagtaataaaatagtttggggtggtttgcgggaagaagtagagatttaacatgggggtrgtcagaaactgacatgagttaaatttaaaattttggacgttttcctatggatgagtagaaaaccactgaaaacggtttaggatgagttatcctagaaaag

SEQ ID NO: 549275 - DNA, 201 bp, Homo sapiens
tgaggcgaaggttgcagtgagccgaaatcacaccaccgcactctggcctgggcgatagagtgagactaagtctccaaaaaaaagaataaggcagtaaacaagagaaattccagtcttctggatgcttataatccagtgaggatacagacaagtacactacaatgtgataaatgctatagtaggtaaaagtatagggtgctt

SEQ ID NO: 549276 - DNA, 201 bp, Homo sapiens
gtgaggcgaaggttgcagtgagccgaaatcacaccaccgcactctggcctgggcgatagagtgagactaagtctccaaaaaaaagaataaggcagtaaacaagagaaattccagtcttctggatgcttataatccagtgaggatacagacaagtacactacaatgtgataaatgctatagtaggtaaaagtatagggtgct

SEQ ID NO: 549277 - DNA, 201 bp, Homo sapiens
gttcatttcttaaaaacaaggatattccttaaacagttgcattagtcagcttggctgccataacaaaataccacagactgggtggcttaaacaaagaaatygattttctcacagttctagaggttgcagagttcaagatcaaggtccagtttggtctctggtgagggctcagggctccttcctggctttagtctgtcacac

SEQ ID NO: 549278 - DNA, 201 bp, Homo sapiens
cttggcctccctaagtactgggattacaggcgtgagccaacgcacccggccaggtttaatttcatatagtaaatagccatagctataacccacaaaaacawaactctttgaggtcctcagtaatttttaccaatataaagggtttctgaaaccaaaatatagaatgacctttgtcaattttctgcaatgtagatatccatt

SEQ ID NO: 549279 - DNA, 201 bp, Homo sapiens
gtgatggaggtagtaagtagtggttggagtctgtatatgttttttaaacttgttatttttgaataatttcagatgttaaaaaagtttcaagagtattacaraaaccttctgtgtactttccactcagattcccattattaacattttaacatatttgctttatctctcttactgctctctctacaggcacacacacacttt

SEQ ID NO: 549280 - DNA, 201 bp, Homo sapiens
tataaagggtttctgaaaccaaaatatagaatgacctttgtcaattttctgcaatgtagatatccattgtctctcatcttaacatcgcatattgcccgatsgtctctaggctttattttatcaaccagttaatttttatttttaatttgtgagatcataagtttgttagctttttattttgccaaaaatggacataaaaat

SEQ ID NO: 549281 - DNA, 201 bp, Homo sapiens
tcccttatgagcctatattctcgtgggggagataggcaaaaaataaattgtatagtatattggaaaattatgtgttatttgggagaataaagcaaagaagrgtggtaagagtgttgttggcttgatgttgcaattctttttttttttttttttttgagtcggagtcttgctctttcacccaggctgaagtgcagtggcgca

SEQ ID NO: 549282 - DNA, 201 bp, Homo sapiens
agctgagactacaggcgcccaccactgcgcctggctaattttttgtatttttagtagagacggggtttcaccgtgtcagccaggatggtctcgatctcctracctcgtgatccgcccgccttagcctcccaaagtgctgggattacagacgtgagccaccgcgcccggccacaggacacaatgtttttgttagatttatgt

SEQ ID NO: 549283 - DNA, 201 bp, Homo sapiens
cttctgcaacagcccctagaatacctcattgtacctagcccctacctaatgctgtgcatttacagagaagtcttaggggattgttagccaaactgaatagrggactactctatttttccccttttcttgtcttccttctctttttttttcctaatttatttattcaagaagtagttactgaacgccaactaagtgttaagc

SEQ ID NO: 549284 - DNA, 201 bp, Homo sapiens
gcttcatatgaagtgtttggcaaactacctgacatttagaaaattcagcaaatgataacttgtcatttaaaatgcagttatgatatacagttattataacrttttatgcaggcctgtctgcataagctttttaaattcttccgattaatcctgcgtactctatgtgaaatgtttattaaggttaataatgtaaaggagtgg

SEQ ID NO: 549285 - DNA, 201 bp, Homo sapiens
acaggagtgagccactgtgcccggctgggattttttatttttatttttttgaaacagagtctcactgtgtcacccagtctggggtgcagtggtgcgatcayggctcactgcagccttgacatcccggactcagttgatctttcccatctcagcctcctgaggtgctaggactatgggtgcaggccaccatggtcagctaac

SEQ ID NO: 549286 - DNA, 201 bp, Homo sapiens
agttttttttctagtcagcaataatgagataaaatgaagccagaattttttacctcagctgttgttgctattgtgcctgagcttatttcctttattgataycttaagagtgaaaaaatgaatgctccaggagggcagtgtgtcagttgaagtgcattgtgtatagtttatatagttaagtgcttttggctaaatatgatgt

SEQ ID NO: 549287 - DNA, 201 bp, Homo sapiens
tgaatccctaagcaagaaattaaggtactcctttaaaaaatacattatttagtaaacaaagcatctctgacttctatacatacagcaccatttgttcagtrttttcagttcttaaaaaagaaataaaattataacatttagatccaaaaggggccttagaaacttttttgagtacattcattttacatagacttaggctag

SEQ ID NO: 549288 - DNA, 201 bp, Homo sapiens
gtggtgcgatcatggctcactgcagccttgacatcccggactcagttgatctttcccatctcagcctcctgaggtgctaggactatgggtgcaggccaccrtggtcagctaactattaaaattttttgtagagatgatgtcttgctatgttgcccaggctggtctcgaactcctggactcaagctatcctcttgccttgac

SEQ ID NO: 549289 - DNA, 201 bp, Homo sapiens
cggcctctcaaagtgttgggattacaggcgtgagccaccatgcctagccagtaaattcttgtaagttcgaatatggtatgacctctagtaatgtacatctsttgatgtctctaatttctgtattagtatattctttgtacttcattctgtagagcatatggtattcacataatacttttggttattgggtatggcacatac

SEQ ID NO: 549290 - DNA, 201 bp, Homo sapiens
agaggttttttttttttttttttttggtgacggagtcttgctctgttgcctaggctggagtgcagtgcagtggcgcaatcttggctcactgcaacctccayctctcaggttcaagcgattctcctgcctcagcctcctgagtagctgggattacagatgcgcgtgccaccacgcccagctaatttttgtatttttagtaca

SEQ ID NO: 549291 - DNA, 201 bp, Homo sapiens
ctcggcctcccaaactgctgggattacaggcgtgagccactgtgcccggcctgattttattttattttattttattttattaattttgagatggagtttcrctcttgtcacccagactggagtgcaatggcgcgatctcggctcactgcaacctccacctcctggttcaagcaattctgcctcagcctcccaagtagctgg

SEQ ID NO: 549292 - DNA, 201 bp, Homo sapiens
ttgggaggctaaggtgggtggattgcttgaggtcaggagttcgagaccagcgtggccaacgtggtaaaccctgtctactaaaaatacaaaaattagccggkcatggtggcaagcgcctgtaatcccagctgctggagaggctgaggcacaagaatcacttgaacctgtgaggcgaaggttgcagtgagccgaaatcacacc

SEQ ID NO: 549293 - DNA, 201 bp, Homo sapiens
tgcttgaacctgggaggcggaggttgcagtgagccgagatcgcgccactgcactctagcctggacaacagagctagactgtctcaaaaaaaaaaacaaaaraaaaacgaaacaaacaaaagaagaaggcagtacactaggcgcggtggctcacgcctgtaatcccagcactttgggaggcccaaggcaggtggatcacctg

SEQ ID NO: 549294 - DNA, 201 bp, Homo sapiens
gctcatgcctgtaatcccagcactttgggaggtccaaggcgggtggatcacctgaggtcaggagttttagaccagcctgaccaacatgatgaaaccccgtytctactaaaaatacaaaaattagccaggcgtgctgatgcgcacccgtagtcccagttactcaggaagctgaagcaagagaattgcttgaacctgggaggc

SEQ ID NO: 549295 - DNA, 201 bp, Homo sapiens
caagtgatcctcccacgtcagcctctgagtaacaggactacagttatgcaattacgcctggctaacttaaaatttttttttggagagatagcgtcttattrtgttgctcaggctggtaccaacctcatagaattgtggtgaggatgtaagttaatatctgtatcctctttaaacagtccctggcatatagaaagtattaaa

SEQ ID NO: 549296 - DNA, 201 bp, Homo sapiens
ttcaggggttacatctcagatctttggactctcgtgctgatgccctttccattataccataatgcttgttttctgtaaagactacatggattgaaaacacwgtatcagctgtcttagcccattgttggaacaaggcaaggtagacataaaatgtaaataattcaagttaaaaattatctaacccgtctcctaccaagttaa

SEQ ID NO: 549297 - DNA, 201 bp, Homo sapiens
tatgcatcttgcacctttgtaaaaaatcgattgccggctgggcgcggtggctcatgcctgtaatcccagcattttgggaggctgaggcgggtggatcacckgaggtcaggagttcgagaccagcctggccaacatggtgagacctcatctctactaaaaatagaaaaattagccaggtgtgatggtgggcgcctgtaatcc

SEQ ID NO: 549298 - DNA, 201 bp, Homo sapiens
gtgtccttacagttaaatatttatttaatcataggatattgaagccagagggtatgttatggacgatctaatctaaactagttattttatatgggtttttktgtgtgtgtggagacaggaccttgccctgtcattcaccctggagtatagtagcacaactatggctcactgcagccttgaccccccgggctcaaccgatcc

SEQ ID NO: 549299 - DNA, 201 bp, Homo sapiens
tagatggggtttcaccatgttagtgaagctagtcttgaactcctgacctcaaatgatcctcctgcctaggcctccaaaagtgctggtattacaggaatgcrccaccacgccctgccaagtacttacaagtaaattctttttttctttttgagatggagttttgcttttgttgcccagactggagtgcaatggcgtgatctc

SEQ ID NO: 549300 - DNA, 201 bp, Homo sapiens
ctgacctcaggtgatccgcccgcctcggcctctcaaagtgttgggattacaggcgtgagccaccatgcctagccagtaaattcttgtaagttcgaatatgrtatgacctctagtaatgtacatctcttgatgtctctaatttctgtattagtatattctttgtacttcattctgtagagcatatggtattcacataatact

SEQ ID NO: 549301 - DNA, 201 bp, Homo sapiens
ggtgcttgattaactgcttggttaagatgaaaagggcattaaatttttggtggaatatatgaacagatatgtgtttccgttgacagcagtcaggttctgtwctgtctggtttcaggaatccactaggggtcttagaacatatacccccatgttaaggagggactactgtaattgcctttacccctgaatatttgtttaggg

SEQ ID NO: 549302 - DNA, 201 bp, Homo sapiens
agatggagttttgcttttgttgcccagactggagtgcaatggcgtgatctcggctcattgcaacctccgtctgctgggttcaagtgattctcctggctcarcttcccgagtagctgggattacaagcatgtgctaccacgcccggctaattttgtatttttagtaagagacagggtttctccatgttgatcaggctggtct

SEQ ID NO: 549303 - DNA, 201 bp, Homo sapiens
gagtctctctctgttgcccaggctagagtgcagtggcacaatctcagctcactggagcctctgtctcccaggttcaggtgattctcctgcctcagcctctygagtagctgagattacaggcatttgccaccatgcctggctaatttttactatagatggggtttcaccatgttagtgaagctagtcttgaactcctgacct

SEQ ID NO: 549304 - DNA, 201 bp, Homo sapiens
tgtatacagtaagaaaggcttcatggaggaaacggtttttcaaaaactatgtgaaacaggtgaaagaagacatccgatatataagcaaaagtgtgaaagartcagagaggagtcataaccagaaggcacgcatgcatagctaagtgagaatggaaaagacagaaggaataaaaggcatcatcatcatctattattattatt

SEQ ID NO: 549305 - DNA, 201 bp, Homo sapiens
attttactcaggacttggcttctaaagtcagtacataaaatgaaattaggcttgaaaatactggaaatttttagtaatgacaaaattttttatttttttttggtaaatagcctagtacagaaatatatatatgcatgatttgtgctatatttggtagcatataattccgtaggctgaatcatattaagagagtaaatcagc

SEQ ID NO: 549306 - DNA, 201 bp, Homo sapiens
gtaatgacaaaattttttatttttttttggtaaatagcctagtacagaaatatatatatgcatgatttgtgctatatttggtagcatataattccgtaggstgaatcatattaagagagtaaatcagctgaatgttttgatgcttggaacatgaagccgatttagggagagtcaaacttcctggtttctctctctctcatc

SEQ ID NO: 549307 - DNA, 201 bp, Homo sapiens
ttttattttattttattttattttattaattttgagatggagtttcactcttgtcacccagactggagtgcaatggcgcgatctcggctcactgcaacctycacctcctggttcaagcaattctgcctcagcctcccaagtagctgggattacaggtgcccaccaccacgcccagcgaatttttgtatttttagtagagac

SEQ ID NO: 549308 - DNA, 201 bp, Homo sapiens
aaaaggcatcatcatcatctattattattattattattattattattattattattattagggatggagctcttgttgcccaggctggagtgcagtggcasgatctctgctcactgccacctccgcctcctgggttcaagcagttctcctgcctcggcctccaagtagttgggattacaggcgcctgccaccacgcctggc

SEQ ID NO: 549309 - DNA, 201 bp, Homo sapiens
gcctcccaggttcaagcaattctcatgcctcagccttccgagtagctggcactactggtgtgctaatttttgtttttttagtagagatgggatttcgccckgttgcccaaactggcctgaaactcttgaactcaggtattccacccacctcggcctcccaaagtgctgggattacaggcatgagccactgctgcacctggc

SEQ ID NO: 549310 - DNA, 201 bp, Homo sapiens
ctcaggtgatccacccacctcggcctcccaaactgctgggattacaggcgtgagccactgtgcccggcctgattttattttattttattttattttattaattttgagatggagtttcactcttgtcacccagactggagtgcaatggcgcgatctcggctcactgcaacctccacctcctggttcaagcaattctgcctc

SEQ ID NO: 549311 - DNA, 201 bp, Homo sapiens
aaaggcatcatcatcatctattattattattattattattattattattattattattagggatggagctcttgttgcccaggctggagtgcagtggcacratctctgctcactgccacctccgcctcctgggttcaagcagttctcctgcctcggcctccaagtagttgggattacaggcgcctgccaccacgcctggct

SEQ ID NO: 549312 - DNA, 201 bp, Homo sapiens
acctcaggtgatccacccacctcggcctcccaaactgctgggattacaggcgtgagccactgtgcccggcctgattttattttattttattttattttattaattttgagatggagtttcactcttgtcacccagactggagtgcaatggcgcgatctcggctcactgcaacctccacctcctggttcaagcaattctgcc

SEQ ID NO: 549313 - DNA, 201 bp, Homo sapiens
cagatgtctagagatacaatggtttaagaccatagtctctggaaccagtgtgcatagatttgaattctggctctgtcacctcataactctataactttagrtaaataaaattagtttctcgtctgtataatgaatccagtaatagtacatacttcataaagtgtggaaactaaagagttaataatatatataaagggctta

SEQ ID NO: 549314 - DNA, 201 bp, Homo sapiens
ctcctgaggtgctaggactatgggtgcaggccaccatggtcagctaactattaaaattttttgtagagatgatgtcttgctatgttgcccaggctggtctygaactcctggactcaagctatcctcttgccttgacctcccaaagtgctaggattacaggtgtgagccacgagacctggcctcaaataagaggtttttttt

SEQ ID NO: 549315 - DNA, 201 bp, Homo sapiens
gcaacctctgcctcccaggtacaaatgattctcctgcctcagtctcccaagtagctgggattataggcatgtgccaccatgcctggctaatttttttttttattattatttagtagagacagggttttaccatgttggtcacgctggtctagaactcctgacctcaggtgatccacccacctcggcctcccaaactgctgg

SEQ ID NO: 549316 - DNA, 201 bp, Homo sapiens
gtgcagtgcagtggcgcaatcttggctcactgcaacctccacctctcaggttcaagcgattctcctgcctcagcctcctgagtagctgggattacagatgygcgtgccaccacgcccagctaatttttgtatttttagtacagacggggttttgccgtgttggtcaggctggtcttgaactcctgacctcaggtgatccac

SEQ ID NO: 549317 - DNA, 201 bp, Homo sapiens
ctgaaatggtgggcacctgcggctggacacctcaatctgtggtacatattgagcagtccaactttttttgataatgtcatgacttttctttgcttctttgragcacttttaacatcactagtggcactttgtgtgggtctcatggtgtttacttaaggtttacaatattgcactaaacctgaaaaatatgagaaccacaag

SEQ ID NO: 549318 - DNA, 201 bp, Homo sapiens
aggtgtgaatagagtctaggaaacagtacgtagtggaaggattactctttaataggagtgatgctttttactaggtaaattgatctaggtgagtttaaatrtggatacattttttgtgacaagataatttccatttaatgatttttgccttctctgtgaaacagcatataagcttatctcctgagagtgagaagaagagat

SEQ ID NO: 549319 - DNA, 201 bp, Homo sapiens
gtatcagatctcatccaaataaaaaaaaattttttttgaaatggggtctccctatgttgcccaggctagtctcaaacttcaaactttgaactctgaactcrtaggcctaagcagtactctttccccagcctcttgagtagctgggattacaggtgtgtgccactgtgcccggcctcgtcacatattttttaaaaatctgta

SEQ ID NO: 549320 - DNA, 201 bp, Homo sapiens
caggtgtgagccaccacacctggcctaagaagtctgtttcttatagctaaagtggatgtctttgctaggctgtatcagatctcatccaaataaaaaaaaawtttttttgaaatggggtctccctatgttgcccaggctagtctcaaacttcaaactttgaactctgaactcgtaggcctaagcagtactctttccccagcc

SEQ ID NO: 549321 - DNA, 201 bp, Homo sapiens
tccagctgattttttgtatttttggtagacagggtttcaccaagttgcccaggctggtctcgaacttctaagctcaggcattcctcctgcctcgctcggcctcccaaagtgctaggattacaggtgtgagccaccacacctggcctaagaagtctgtttcttatagctaaagtggatgtctttgctaggctgtatcagatc

SEQ ID NO: 549322 - DNA, 201 bp, Homo sapiens
cgcatccagctgattttttgtatttttggtagacagggtttcaccaagttgcccaggctggtctcgaacttctaagctcaggcattcctcctgcctcgctyggcctcccaaagtgctaggattacaggtgtgagccaccacacctggcctaagaagtctgtttcttatagctaaagtggatgtctttgctaggctgtatca

SEQ ID NO: 549323 - DNA, 201 bp, Homo sapiens
tgtgcgcccacacatttctcaggcacacacagagataccacagaccacccacttcgtaaccacttgcactttactctcttccagacgttccttttttttttaatccctttgtccccattattttgttttccagtttaataaagtatggtttcctttgttgtgtggttgacttttcccctcctgttgatcttttccagatgt

SEQ ID NO: 549324 - DNA, 201 bp, Homo sapiens
catccatattatggcgtacgtcagaattttctccttcttatgggtggataatattccattgtatgcgtccacattcttttacccaatatttttttttgtgtgtgacagagtcttgctctggcccaggctgcagtgcagtgtcacaatcccagctcactgcaacctctgcctcccaggttcaagcaattctcatgcctcagc

SEQ ID NO: 549325 - DNA, 201 bp, Homo sapiens
ccctctaccctctcaaaagttgagagtaaatagaatttggtttgattccagggaggggaaaataagcagagaataggacttttatactttccaataccagkaataaaatgtttgtgatatatatgggtccagcaaacctatcgagataatgtgaatacgataaacttcctaatggcaggatattcactctcaatcctgaag

SEQ ID NO: 549326 - DNA, 201 bp, Homo sapiens
gttcatccatattatggcgtacgtcagaattttctccttcttatgggtggataatattccattgtatgcgtccacattcttttacccaatatttttttttktgtgtgacagagtcttgctctggcccaggctgcagtgcagtgtcacaatcccagctcactgcaacctctgcctcccaggttcaagcaattctcatgcctc

SEQ ID NO: 549327 - DNA, 201 bp, Homo sapiens
gttctggtattcataacgtgaaagaaaggggttttattctttctgtgtctgtgatttaaaactccgtgaccatgctctgacttttgtatttcaacctgagyttaaacaaataaacaagatattttttaaagaaagcataacatagtgtgtcttagcaaggacatgattcatatggaagcagaatgtgagaagttgtaaggt

SEQ ID NO: 549328 - DNA, 201 bp, Homo sapiens
gtgttgcccaggcttatctcaaactcctgggctcaagtgatcctcctgctttggcctcacaaagtgctgggattataggtgtgagccaccacactggcccrttaatgacctttaaaaggacatatacttcagggaaaggaaaataatcccagaaaaaaatctaagagataaaatgcagtgctaagcaagtaaattggtaac

SEQ ID NO: 549329 - DNA, 201 bp, Homo sapiens
gcccaagaggttgaggctgcagtgaagtgtgattgcaccactacactccagcctaggcaacaatgtggcaaatcaagatccccgtttcagccgggcgcggyggctcacgcctgtaatcccagcactttgggaggccgaggtgggcagatcacctgaggtcgggagttcgataccagcctgaccaacatggagaaaccccgt

SEQ ID NO: 549330 - DNA, 201 bp, Homo sapiens
aggttcatccatattatggcgtacgtcagaattttctccttcttatgggtggataatattccattgtatgcgtccacattcttttacccaatatttttttktgtgtgtgacagagtcttgctctggcccaggctgcagtgcagtgtcacaatcccagctcactgcaacctctgcctcccaggttcaagcaattctcatgcc

SEQ ID NO: 549331 - DNA, 201 bp, Homo sapiens
ttgtttgaggaagttcccttatatttctagttttctgagactttttatcataaatgaatgtggaattttattgagcctttcatagtactttttttttttawaaaaaagagggctgggcgcggtggctcacgctggctcccagcactttgggaggccaaggtgggtggatcacgaggtcaggagatcgagaccatcctggct

SEQ ID NO: 549332 - DNA, 201 bp, Homo sapiens
tgcttgaacccaggaggcggaggttgcggtgagccgagatcgcgccactgcactccagcctgggtaacaagagcgaaactctgcctcaaaaaaacaaaaamaaaaaagatccccgtttcagaaaagcaaagaaaatgtggaaacaacctgaaagtccatcagcagctcaatggataagactgtggtgtattcatagtgaaa

SEQ ID NO: 549333 - DNA, 201 bp, Homo sapiens
catttcacagtttaaagagacccaggccaccttttgctaggggccctccgttctttgcaccaaaacgcccattcttccctcccaggtactgatggaaaccragggaaaggcattttgaacagtctagagaacattggaagtaggagtttggtttattgttgttgtttttatttgttttctctttctcgattttttttttat

SEQ ID NO: 549334 - DNA, 201 bp, Homo sapiens
tttgtttgaggaagttcccttatatttctagttttctgagactttttatcataaatgaatgtggaattttattgagcctttcatagtactttttttttttwaaaaaaagagggctgggcgcggtggctcacgctggctcccagcactttgggaggccaaggtgggtggatcacgaggtcaggagatcgagaccatcctggc

SEQ ID NO: 549335 - DNA, 201 bp, Homo sapiens
gtggctcacgcctgtaatcccagcactttgggaggccgaggtgggcagatcacctgaggtcgggagttcgataccagcctgaccaacatggagaaaccccrtctctactaaaaatacgaaaattagccgggcatgatggcacatggcctgtaatcccaattactcgggaggctgaggcaggagaattgcttgaacccagga

SEQ ID NO: 549336 - DNA, 201 bp, Homo sapiens
ctcacacagagacaccatcagccggagtggtataatcttacggagtccccggccagactttcggcctagggaaccttttctcagcagagacccatttcacrgtttaaagagacccaggccaccttttgctaggggccctccgttctttgcaccaaaacgcccattcttccctcccaggtactgatggaaaccaagggaaag

SEQ ID NO: 549337 - DNA, 201 bp, Homo sapiens
cctacatccctggcatgcgcagttaacaatagagtttatgctcctatgagaatctaatgatgccactgatctgacaggatttggggctcaggggttaatgytcgctcacccaccactcacctcctactgtgtggcccagttcctaacaggccattggggttgggaaaccctgtgtagaggaagggtgagggtgaacattct

SEQ ID NO: 549338 - DNA, 201 bp, Homo sapiens
gacctcgtgatccgcctgccttggcctcccaaagtgctgggattacaggcgtgagccaccgtgcccagtggggtttttttttttaattttttttttttaaattttttgagacagagtctcactgtcacccaggctggagtgcagtggcacaatctcggctcactgcaacctctgcttcccgggttcaagcagttctctgcc

SEQ ID NO: 549339 - DNA, 201 bp, Homo sapiens
actcccaggacccagggaccacgggggccccacccaacgggacctcaacggccctggccttagccgtgtacgagagagcctcaccctaccctcccattctytggaacacctgggcccaccccatggaggaggaggtgggggaggcagcaacagcagcagtggcccccccttgggtccctcacacagagacaccatcagccg

SEQ ID NO: 549340 - DNA, 201 bp, Homo sapiens
cctgggtgacagagcaagagcctgtctcttgaaaaaaaaaaaggaaactattagtagggatgaattatgtggctagggaactttttttggaatgaaacatsgatttttttttttcttcagaaggatcataactaaagtaaacattatttcagttgtttggatattactgaatattggataacaataaagaccatccaacat

SEQ ID NO: 549341 - DNA, 201 bp, Homo sapiens
ttcgagaccagcctggccaacatggtgagacctcatctctactaaaaatagaaaaattagccaggtgtgatggtgggcgcctgtaatcccagctacttggraggctgaggcaggagaattgcttaaacctaggaggcagaggttgcggtgagcagagatcacgccactgcactccagcctgggtgacagagtgagacccca

SEQ ID NO: 549342 - DNA, 201 bp, Homo sapiens
gggaggcagaggcaggagaatcgcttgaatctgggaggcagaagttgcagtgagccgagatcacgccgttacactccagcctgggcgacaagtgagactcygtctcaaaaaataaataaataaataaataaaaagaaccatgtataaaatatttaaattaataaaggaatctaaaatatatcaaggaacaactcttagaca

SEQ ID NO: 549343 - DNA, 201 bp, Homo sapiens
tcttttgagcccaagaggttgaggttacagtgagctatgatcgcaccactgcactccagcctgggtgacagagcaagagcctgtctcttgaaaaaaaaaaaggaaactattagtagggatgaattatgtggctagggaactttttttggaatgaaacatggatttttttttttcttcagaaggatcataactaaagtaaac

SEQ ID NO: 549344 - DNA, 201 bp, Homo sapiens
gatcacctgaggtcaggagttcgagaccagcctggccaacatggtgagacctcatctctactaaaaatagaaaaattagccaggtgtgatggtgggcgccwgtaatcccagctacttgggaggctgaggcaggagaattgcttaaacctaggaggcagaggttgcggtgagcagagatcacgccactgcactccagcctgg

SEQ ID NO: 549345 - DNA, 201 bp, Homo sapiens
tgggcctggtaacaagtacccgtagtcccagttactggaaaggctgaggagggaggattgcttgatcccaggagttgcagatttctgtgagctatgatttygccatgcactccagcctgggcagtagagcaagaccctgtctagaaaaaaaacaaagaaaagaaaacttccccaaaaggtacagaggtatgaagggaataa

SEQ ID NO: 549346 - DNA, 201 bp, Homo sapiens
ccttgagaaagatgctgaattgaacctgggtcactactgcccttgactctctgccagagtaaatgcaaatacatttttagaaaaagctttctctgattagrctttcagaattcccatagataaaattcaacaaaatataagcttacaataaaagaattgccaaacacaaagaaataaacaactgtgggtgagatttaatag

SEQ ID NO: 549347 - DNA, 201 bp, Homo sapiens
caaagtgctgggattacaggcatagaagttttatagttaggttttaccttaggtctataatgcattttgaattaatttttgcaaatagcatgagatatggmtcaattttttaaaatgggtatccaattgttcgagcaccatttattgagaagccagtcctttcatcattaaattgtctatgcatcttgcacctttgtaaaa

SEQ ID NO: 549348 - DNA, 201 bp, Homo sapiens
atttggcatcaatagtagtgggatggcatgaaaattatatgtctcttacggaaggtagtgggtggtatacaatgccaacaaagttgtattcttgccaaaawtgtttaacctgaacctactcttgagaaaatgaatgaatcctgaaatgtgggatgttctgcaggacatctggcttggatcatcaaagtcatgaagaatagg

SEQ ID NO: 549349 - DNA, 201 bp, Homo sapiens
gagatagtttttttcagatttcttcttttttgaagcctcttacacattgtactctttgggaagaagtcactgcacagcccacaatttaggggagttatgcygtctacctccttgaggaggcagcatctatgtaaatttttcagaattctgtgtagacattaacaagcacacattttaatgcattactgggtgtactaaaaa

SEQ ID NO: 549350 - DNA, 201 bp, Homo sapiens
tcttaattttgatgaagtccagtttattttaaaaatgttaacagatgatattttcgttacatataagaaatcctttaattcaaagtcataaagaatttctyctatattttcttacagaagttttatttattttaattagtttattttttgagaaagggtcccacttggttacccaggctggagtgcagtggtgccatatag

SEQ ID NO: 549351 - DNA, 201 bp, Homo sapiens
tccatagtggttgtactagtttacattcccaccagcagtgtagaagtgttcccttttcactgcatccatgccaacttctattaatttttgattttttgatyatggccactcttggaggagtcaggtggtatcacattgtggttttgatttgcatttccctgatcattagggatggtgagcattttttcatatgtttgtttg

SEQ ID NO: 549352 - DNA, 201 bp, Homo sapiens
caggcatgagacaccacacccggccttaacagcatttttaaaaaagcaataatttcttaattttgatgaagtccagtttattttaaaaatgttaacagatkatattttcgttacatataagaaatcctttaattcaaagtcataaagaatttcttctatattttcttacagaagttttatttattttaattagtttatttt

SEQ ID NO: 549353 - DNA, 201 bp, Homo sapiens
aacattgcgagacgtagtctctattattaaaaaaagaaagaaagacattttgtaaggctatagttgccgctaataatgattccttttatggatctgggcaraggaaattgaaaaccttctggaaaggattcaccattctagatggcatgaagaacatttgtgattcatagggagaggtcaaaatatcaacattaaggccag

SEQ ID NO: 549354 - DNA, 201 bp, Homo sapiens
aaagaaatacagggctgggcatggtggctcacacctgtaatcccagcactttgggaggccaaggctagtggatggatcacttgaggtcaggagttcaagamcagcctggccaacatggtgaaaccccgtctctactaaaaataaaaattagccaggcatggtggcacacgcctgtaataccagccactcaggaagccgagg

SEQ ID NO: 549355 - DNA, 201 bp, Homo sapiens
cctgacctcgtgatccgcctgccttggcctcccaaagtgctgggattacaggcgtgagccaccgtgcccagtggggtttttttttttaattttttttttttaaattttttgagacagagtctcactgtcacccaggctggagtgcagtggcacaatctcggctcactgcaacctctgcttcccgggttcaagcagttctct

SEQ ID NO: 549356 - DNA, 201 bp, Homo sapiens
tcctgacctcgtgatccgcctgccttggcctcccaaagtgctgggattacaggcgtgagccaccgtgcccagtggggtttttttttttaattttttttttttaaattttttgagacagagtctcactgtcacccaggctggagtgcagtggcacaatctcggctcactgcaacctctgcttcccgggttcaagcagttctc

SEQ ID NO: 549357 - DNA, 201 bp, Homo sapiens
gaaggtcttgatctcctgacctcgtgatccgcctgccttggcctcccaaagtgctgggattacaggcgtgagccaccgtgcccagtggggtttttttttttaattttttttttttaaattttttgagacagagtctcactgtcacccaggctggagtgcagtggcacaatctcggctcactgcaacctctgcttcccgggt

SEQ ID NO: 549358 - DNA, 201 bp, Homo sapiens
atcacttgaggccaggagtttgagaccagcctggtcaatatagcaaaacccctatctctattgtttttaagaatttttaaaaataattaaaaaaaaaaaaagattggagaacagtaatatttagtggtgagagacaattttacctattaccagaaatctgagtagtatatctatcttaaaaagatgttcttttgaagaagt

SEQ ID NO: 549359 - DNA, 201 bp, Homo sapiens
gtggcgcaatctcggctcactgcaaacgccgcctcctggtttcacgcccttctcctgcctcagcctcctgagtagctgggactacaggcacccgccaccaygcccggctaattttttgtatttttagtagagatggggtttcactgtattagccaggaaggtcttgatctcctgacctcgtgatccgcctgccttggcctc

SEQ ID NO: 549360 - DNA, 201 bp, Homo sapiens
gcgtgaacccgggaagcggagcttgcagtcagctgagatcgcgccactgcactctagcctgggcgacagagtgagactccgtctcaaaaaaaaaaaaaaaraaagaaactaagagtattagagtactgcacagtaaggcagcaagagtatgttcacaaagagaggttttcttcaaaagtcaaaagactaaatttttttatt

SEQ ID NO: 549361 - DNA, 201 bp, Homo sapiens
cgtggtggctcacagctgtaaccccaactacttgggaggctgaggtaggagaatcgcttgaacccggaaggcagaggttgcagtgagccagcctgggcgaygagcaaaactctgtctcaaaaaaagagaaacttcagtgggcaaaggagcagagtatgacttgttatgattaaagagcaaacttttggctgggcgcagtgg

SEQ ID NO: 549362 - DNA, 201 bp, Homo sapiens
tgcttaaacctaggaggcagaggttgcggtgagcagagatcacgccactgcactccagcctgggtgacagagtgagaccccatctcaaaaaaaaaaaaaaattgattgcccacgtatatatatgctgccttgattattgtagcttgtatggaaatcaggtagtatgcatcttctaacaaaattttcaaaactatgttgtct

SEQ ID NO: 549363 - DNA, 201 bp, Homo sapiens
tctttccaaaaaaaaatacaaaaaaattagctgggcgtggtggctcacagctgtaaccccaactacttgggaggctgaggtaggagaatcgcttgaacccrgaaggcagaggttgcagtgagccagcctgggcgacgagcaaaactctgtctcaaaaaaagagaaacttcagtgggcaaaggagcagagtatgacttgtta

SEQ ID NO: 549364 - DNA, 201 bp, Homo sapiens
tcactgcagcctctgcctcccagattcaagcaattctcctacctcagtctcctgagtagctgggatcacaggcacctgccaccaccttcagttaatttttktatttatagtagagagggggtttcaccatgttggttaggctgatctcaaactcctgacctcacatgatccacctgcctcggcctctggaagtgctgggat

SEQ ID NO: 549365 - DNA, 201 bp, Homo sapiens
ccagtatgaagacctttttttcctgaattatttgaaaataagttgcttgtaccccattatccaaaatgttttagtgtgtatttcctactggacatactctyctacataaccatcaggtgtatgtatgtatttatttatttagccgggtgcggtggctcacgcctgtaatcccagcactttaggaggccgaggtgggtggat

SEQ ID NO: 549366 - DNA, 201 bp, Homo sapiens
gagacttcaggcccggtgtggtgggtcacacctgtaattccagcactttggggacgggtggatcacctgaggtcaggagttcaagaccagcctggccaacrgggtaaacctgtctttccaaaaaaaaatacaaaaaaattagctgggcgtggtggctcacagctgtaaccccaactacttgggaggctgaggtaggagaat

SEQ ID NO: 549367 - DNA, 201 bp, Homo sapiens
tggaggcatcacattacctgatttcaaactatactctaaggtcatagtcaccaaaacagcatggtactggcataaaaataggcacatagaccaatggaacrgaataatgtagggaaagaattctcaaacgagacacactatgctagccataataaaaataatgattaccataataaatatataaattcagcattattaaaa

SEQ ID NO: 549368 - DNA, 201 bp, Homo sapiens
caccaccacatctggctaagttttgtgggttttttggtagagacagtgtcttactatgttgcccaggctgatcttgaactcctgggctcaagtgttcctcmcatcttggcctcctaaaatgttgggattacaatcatgagccactgcacccagcccgaaattttttaaataaattttgccaggcaaggtgggataccgtgt

SEQ ID NO: 549369 - DNA, 201 bp, Homo sapiens
caggagaatggcctgaacccaggaggcggagcttgcagtgagccaggatcgcgccactgcacagcctgggcgacagagcaatactccgtctcaaaaaaaaacaaaaaacaaaaattaggccaggtttggtggctcacgcctgtatttccagcactttgggaggccaaggcaggcggatcacctgaagtcaggagttcaaga

SEQ ID NO: 549370 - DNA, 201 bp, Homo sapiens
atatgtttgtttgacatttgtatgccttcttttgaaaatcgtgtattcatgtccttaactcactttttgatgggatcgtctgtgtgtttttttttttttttggtaatttgtttgagtttattatagattctggaaattaatcatttgttagacgtatagattgtgaagattttctcccactctgtggattgtctgtttact

SEQ ID NO: 549371 - DNA, 201 bp, Homo sapiens
agtaagcccagtaaggaggataaaaagttaatttccatctttttaaattgaatcattaatctgtttttgggggggttgttgttgttgttgttgttgttgtttagacagagtttcgctctgtctcccaggcaggagtgcagtggtgcaatcttggctcactgcaacctctgcctcccgggttcaagtgttctgctgcttcag

SEQ ID NO: 549372 - DNA, 201 bp, Homo sapiens
tgtatgagagaatgttccttctgaaatatttagggataaattatattgctctctacaatctactttaagatggtttggcaaaagagaactaaatgttgtawatatagagagatagagctgatgcggcaagatattaacgattgctaaatgtaggtaaaatataggaatgtttactgaactttcaacctttttgtggagttt

SEQ ID NO: 549373 - DNA, 201 bp, Homo sapiens
gcagtgagccaagatcgccactgcactccagcctgggcaacagagcaagactccgtctcaattaaaaaaaaagaaatacagggctgggcatggtggctcamacctgtaatcccagcactttgggaggccaaggctagtggatggatcacttgaggtcaggagttcaagaccagcctggccaacatggtgaaaccccgtctc

SEQ ID NO: 549374 - DNA, 201 bp, Homo sapiens
aagtaagcccagtaaggaggataaaaagttaatttccatctttttaaattgaatcattaatctgtttttgggggggttgttgttgttgttgttgttgttgtttagacagagtttcgctctgtctcccaggcaggagtgcagtggtgcaatcttggctcactgcaacctctgcctcccgggttcaagtgttctgctgcttca

SEQ ID NO: 549375 - DNA, 201 bp, Homo sapiens
gttgctgaattaatgttttttgttgttgttgttgttttcttctcttttcttttgagacggaatttcactcttaaaagttgcccaggctggagtgcaatggygcgatctcggctcactgcaacctccgcctcctgggttcaagcgattctcctgactcagcctccttagtagctggcattacaggcatgcaccaccacgcct

SEQ ID NO: 549376 - DNA, 201 bp, Homo sapiens
cctggaggtggagcttgcagtgagccaagatcgccactgcactccagcctgggcaacagagcaagactccgtctcaattaaaaaaaaagaaatacagggcwgggcatggtggctcacacctgtaatcccagcactttgggaggccaaggctagtggatggatcacttgaggtcaggagttcaagaccagcctggccaacat

SEQ ID NO: 549377 - DNA, 201 bp, Homo sapiens
taagtaagcccagtaaggaggataaaaagttaatttccatctttttaaattgaatcattaatctgtttttgggggggttgttgttgttgttgttgttgttgtttagacagagtttcgctctgtctcccaggcaggagtgcagtggtgcaatcttggctcactgcaacctctgcctcccgggttcaagtgttctgctgcttc

SEQ ID NO: 549378 - DNA, 201 bp, Homo sapiens
tattcctaacttcgtccatgtaagaccgtgaacttaattgataaatgtcgtgtgttttctgattgcactaacccaccattccccatctctttctatctccygggacctccttattccctgagacaccacaatatcgaaattagaacaattaatagccctacagtggcctctcagtgttcaagtgaaaggaagagtcacaca

SEQ ID NO: 549379 - DNA, 201 bp, Homo sapiens
gtaagtaagcccagtaaggaggataaaaagttaatttccatctttttaaattgaatcattaatctgtttttgggggggttgttgttgttgttgttgttgtkgtttagacagagtttcgctctgtctcccaggcaggagtgcagtggtgcaatcttggctcactgcaacctctgcctcccgggttcaagtgttctgctgctt

SEQ ID NO: 549380 - DNA, 201 bp, Homo sapiens
ggaacatggggaaatgtttgttaagtgaaaataacagaatagaattttttttgtgtgaagagagggcatactttgtttcattgtgcattgcaggtaatgtrgttgtttttagaaactgaaggtttgtagcaaccctgtgcctattggtgctatttttccaacatatgctcattcatgtctctgtgtcacattttggtaata

SEQ ID NO: 549381 - DNA, 201 bp, Homo sapiens
tgatttggtgaattgtttctcttatatccccagccttcataaatcttattagatagtttgactcctgttgaattcaatgcactattgatacagcccttaargcattaaaaataattattcaaggtgattgagagttaaaacattgtagtttcaaattagctagtgcctgattgcaccccccaatagggcaatttcaggaag

SEQ ID NO: 549382 - DNA, 201 bp, Homo sapiens
atggtaatattcacttagggagtataaaaagcagaaactagaaactactgcatgcttgacagatgatatattatcttgttttgtgccagcaatgtacgtgrttaataatagaaaatctaatcagagtcaaaatgggtcgccagggatgatggtgtatgcctgcaatcctagcattttgggaggctgaggtgggaggatcac

SEQ ID NO: 549383 - DNA, 201 bp, Homo sapiens
aaaccccgtctctactaaaaattcaaaaattagccgggtgtggtggtgcacgcctataattccagctacttgggaggccgaggcaggagaatcacttgaayccaggaggcagaggttgcagtgagctatgatcatgccactgcactgcagcctgggcaacaagagcgaaattccttctcaaaaaaaaaaagaagaggctgg

SEQ ID NO: 549384 - DNA, 201 bp, Homo sapiens
tgacatcaggagttcaagaccagcctggccaacatggtgaaaccccgtctctactaaaaattcaaaaattagccgggtgtggtggtgcacgcctataattycagctacttgggaggccgaggcaggagaatcacttgaacccaggaggcagaggttgcagtgagctatgatcatgccactgcactgcagcctgggcaacaa

SEQ ID NO: 549385 - DNA, 201 bp, Homo sapiens
gcctgggagattaaggctgcagtgagccgagattgcaccactgtacgccagcctgggggaccagagtgagaccctgtctcaaggtgagggggttgggggaraagtataattggaatgattgtaacacaaagaaatgatatatgtttgaggtgatggctaccctattatatactctgatgtcattattacacactatatcaa

SEQ ID NO: 549386 - DNA, 201 bp, Homo sapiens
aatcctgacaagttgggaggctgaggtgggaggattgcctgagccaaggagtctgcaaccagcctgggcaacatggtgagattccgtctctaaaaaaacaygaaatttagccaggtgtggtggcatgtgtttatagtcccagctactcaggaggctgaggtgggaggatcacctaagcctgggagattaaggctgcagtga

SEQ ID NO: 549387 - DNA, 201 bp, Homo sapiens
ttggttcttggagtgaaaaaaacaaaggtaaaaataacagtatataaaaaaaaaccccaactataaacagtctggtgattgttgggaaaatttgatgatgmgctttatatcggctggtgttgctgaattaatgttttttgttgttgttgttgttttcttctcttttcttttgagacggaatttcactcttaaaagttgccc

SEQ ID NO: 549388 - DNA, 201 bp, Homo sapiens
atttttgtatttttagtagaggcggggtttcaccatattggccaggctggtcttgaacccctgacctcgtgatctgcctgcctcagcccctcaaagtgctrggatacaggcgtgagccactgcacttggcctaatatgtaattattaagagtccatattttatgaattgccttagtttttacctactgttgttttctccat

SEQ ID NO: 549389 - DNA, 201 bp, Homo sapiens
tgcctgcctcggcctcccaaagtgctaggattacaggcgtgagccactgctcctggccatttttttctttttttcttttctctttttttttttttttttttgagacagtgtctctcactctgtcacccaggctggagtgcagtggtgtgatctcagctcaatgtaacctctgcctcctagacttcagccatcctaccacct

SEQ ID NO: 549390 - DNA, 201 bp, Homo sapiens
cggaggttgcagtgagccaagaccatgtcactgcactccagcctagatgacagagggagaccctctctccaaaaaaaaaaaaccagacacattggagtccrgaaactaggccgagcatggtggcagaaactctcccaaagagttaaaatatctcattaataattttttatttataacactgaaatgaaaatatttgggata

SEQ ID NO: 549391 - DNA, 201 bp, Homo sapiens
ctgcctcctgggttcaagtggttctcctgcatcagcctccccagtagctgggattgcaggcaggcaccatgacacccggctaatttttgcatttttagtaracagagattcaccatgttggccaggatggtcttgaactcctgacctcaggtgatttgcctgcctcggcctcccaaagtgctaggattacaggcgtgagcc

SEQ ID NO: 549392 - DNA, 201 bp, Homo sapiens
aatcacttgaacccaggaggcagaggttgcagtgagctatgatcatgccactgcactgcagcctgggcaacaagagcgaaattccttctcaaaaaaaaaaagaagaggctgggtttggtggctcatgcctataatcccagcactttgggaggctgaggcgtgtggatcacttgaggccaggagttcgagaccagcgtggcc

SEQ ID NO: 549393 - DNA, 201 bp, Homo sapiens
ggatccttccaccagaaatacaactaaatcttacagaagttgcaacagaccttttttttttttttttttttttttttttttttttttgagacggagtttcmctcttgtcacccaggctggagtgcagtggcgtgatcttggctcactgcaacctctgcctcctgggttcaagtggttctcctgcatcagcctccccagtag

SEQ ID NO: 549394 - DNA, 201 bp, Homo sapiens
tgaacctgggaggcggagcttgcagggagccgagatcgcgccactgcactccagcctgggagacagagcaagactccgtctcaaaaaaaaaaaaaaaaaaatcgtccaccccaaaaagatgtgttgaagccctaaccttcagtacatgtgaatgtgaccttatttggaaatagggtctttgctgatataatcaagttaaaa

SEQ ID NO: 549395 - DNA, 201 bp, Homo sapiens
ggtatttgaaatagcacagttggccaggcgtggtagctcatgcctgtaatgccggcattttgggaggccgaggcaggtggattgcttgagcccaggagttygaaactagtctgggcaacgtgacaaagccccatctctaccaagaatacaaaaaaaattagctgggcttggtggtgctgcatttatcaataccataagttt

SEQ ID NO: 549396 - DNA, 201 bp, Homo sapiens
tcaagcctgtaatcccagcactttgggaggccgaggcaggtggatcacgagggcaggagatcgagaccatcctggctaacatcgtgaaaccccgtctccaytaaaaaatacaaaaaattagccgggcgcagtggcaggcacctgtagtcccagctacttgggaggctgaggcaggagaatggcgtgaacctgggaggcgga

SEQ ID NO: 549397 - DNA, 201 bp, Homo sapiens
gtaatcccagcactttgggaggctgaggtgggaggattgcatgagcctgggagtttgagatcagctggggcaacatatttaagagtccatatctaaccccrcaccacccccaccaaaaaaaaaattagtcgggcgtggtggcatgtgcctgtagccccaagtactcgggaggctgagacagaattacttgaacccaggagg

SEQ ID NO: 549398 - DNA, 201 bp, Homo sapiens
tgaacccgggaagcggagcttgcagtcagctgagatcgcgccactgcactctagcctgggcgacagagtgagactccgtctcaaaaaaaaaaaaaaagaaagaaactaagagtattagagtactgcacagtaaggcagcaagagtatgttcacaaagagaggttttcttcaaaagtcaaaagactaaatttttttattttt

SEQ ID NO: 549399 - DNA, 201 bp, Homo sapiens
tacatttaggctctcaataaatattggttggttggatagataaacaggagcaagggaatataaattacagataactgctaggtttctaactcaggcaactrtgtggatggtaatattcacttagggagtataaaaagcagaaactagaaactactgcatgcttgacagatgatatattatcttgttttgtgccagcaatgt

SEQ ID NO: 549400 - DNA, 201 bp, Homo sapiens
ggcgtgaacccgggaagcggagcttgcagtcagctgagatcgcgccactgcactctagcctgggcgacagagtgagactccgtctcaaaaaaaaaaaaaaagaaagaaactaagagtattagagtactgcacagtaaggcagcaagagtatgttcacaaagagaggttttcttcaaaagtcaaaagactaaatttttttat

SEQ ID NO: 549401 - DNA, 201 bp, Homo sapiens
tttttgtagagacagtatctccctatgttgcccaggctggtcttgaactcctggcttcaagtgatcctccttgcctcagcctcccaaagtgctgagattayagacatgaaccaccaggcccagcccctgttttttaaaacaatagcatctgacctcccaggctttgctttatttttggatttgattttttttttcttgtct

SEQ ID NO: 549402 - DNA, 201 bp, Homo sapiens
atatatttaatcacaataagaaaatgataaaaaaaaaaaagccaaaaaaaaaaaagatcagtataaaaggactacaattaaagagtaataattggagctgsgcatggtggctcacacgtgtaatcctgacaagttgggaggctgaggtgggaggattgcctgagccaaggagtctgcaaccagcctgggcaacatggtgag

SEQ ID NO: 549403 - DNA, 201 bp, Homo sapiens
gggcgtggtggcaggcgcctgtagtcccagccactcgggaggctgaggcaggagagtggcgtgaacccgggaagcggagcttgcagtcagctgagatcgcrccactgcactctagcctgggcgacagagtgagactccgtctcaaaaaaaaaaaaaaagaaagaaactaagagtattagagtactgcacagtaaggcagca

SEQ ID NO: 549404 - DNA, 201 bp, Homo sapiens
ttttagataaaacaggtgggaagaagttctccaaagaatttgaagaggcaagctccaagctggaagaatttgtgaatggattagataagcaggtgaaaaayggaccctcattaacagaagcactggaaaatgctggaattttctatgaagcacaatacaaagaagtaaaagtggtggctaatgtaagtaataattaaagct

SEQ ID NO: 549405 - DNA, 201 bp, Homo sapiens
taatcccagctactcaggaggctgaggcaggagaatcacttgaacccaggaggcagaggttgcagtgagccaagaccataccactgcactccagcctgggygacacagcgagactccatctcaaaaaaaaaaagaaagaaagtccagcaaagtgtcacaaacaagaggagtctaaggagaaagaagacatgactactaaat

SEQ ID NO: 549406 - DNA, 201 bp, Homo sapiens
acattacactttcttctgggtgatggaacaagaccctaaatcttaaaaaaaaaaaaaaaaagaaagaaaagtctgataaatgctacaaaatggttgaaccrtgaaaacatgctgaaataagccagacacaaaaggacaaatattgtatgattacatttatcaaaatacctagaattgttaggtccatagagagagattaaa

SEQ ID NO: 549407 - DNA, 201 bp, Homo sapiens
ccccatctccgctaaaaatacaaaaaattagctgggcgtggtggcaggcgcctgtagtcccagccactcgggaggctgaggcaggagagtggcgtgaaccygggaagcggagcttgcagtcagctgagatcgcgccactgcactctagcctgggcgacagagtgagactccgtctcaaaaaaaaaaaaaaagaaagaaact

SEQ ID NO: 549408 - DNA, 201 bp, Homo sapiens
caggtgtgggggcgcacgcctgtaatcccagctactcaggaggctgaggcaggagaatcacttgaacccaggaggcagaggttgcagtgagccaagaccayaccactgcactccagcctgggcgacacagcgagactccatctcaaaaaaaaaaagaaagaaagtccagcaaagtgtcacaaacaagaggagtctaaggag

SEQ ID NO: 549409 - DNA, 201 bp, Homo sapiens
tacgtgtattttaccacaattttccttaaaaaaggaatgacattacactttcttctgggtgatggaacaagaccctaaatcttaaaaaaaaaaaaaaaaaraaagaaaagtctgataaatgctacaaaatggttgaaccatgaaaacatgctgaaataagccagacacaaaaggacaaatattgtatgattacatttatca

SEQ ID NO: 549410 - DNA, 201 bp, Homo sapiens
ttgggaggccgaggtgggcggatcacgaggtcaggagatcgagaccatcctggctaatacggtgaaaccccgtctctactaaaaattaaaaaaaaaaaaaacaaaaattagctgggcgtggtggcgggcgcctgtagtcccagctactcaggaggctgaggcaggagaatggcatgaacccgggaggcggagcttgcagtg

SEQ ID NO: 549411 - DNA, 201 bp, Homo sapiens
agacagttcacccttgttttgctaggcagatattgaggctggtcatattaattaaatctgaaacctaactgactcgaggctgaattgcagtttaagcaagscttgttccacctctggttcactccagcttctggaatgtagatttttcccacagagagcctggaatgatcactaagcccccttctccatggcatgatttga

SEQ ID NO: 549412 - DNA, 201 bp, Homo sapiens
aggcggatcacctgaagtcaggagttcaagaccagcctggccaacttggtgaaaccctgtctactaaaaatacaaaaattagctgggcatggtggcatgcrtctgtagtcccagctacttgggaggctgaggcaggacaatcacttgaacctgggaggcgggggttgcagtgagccaagatcacgccactgcacttcagcc

SEQ ID NO: 549413 - DNA, 201 bp, Homo sapiens
ttttacgtgtattttaccacaattttccttaaaaaaggaatgacattacactttcttctgggtgatggaacaagaccctaaatcttaaaaaaaaaaaaaaraagaaagaaaagtctgataaatgctacaaaatggttgaaccatgaaaacatgctgaaataagccagacacaaaaggacaaatattgtatgattacattta

SEQ ID NO: 549414 - DNA, 201 bp, Homo sapiens
tttgggaggccgaggtgggcggatcacgaggtcaggagatcgagaccatcctggctaatacggtgaaaccccgtctctactaaaaattaaaaaaaaaaaaaacaaaaattagctgggcgtggtggcgggcgcctgtagtcccagctactcaggaggctgaggcaggagaatggcatgaacccgggaggcggagcttgcagt

SEQ ID NO: 549415 - DNA, 201 bp, Homo sapiens
tgttgcccaggctggagcgcggtggcacaatcttggttcactgcaacctctgtctcccgggttcaagcgattctcctgcctcagcctcctgagtagctggkactacaggcgcacaccaccacgcccagctaatttttgtatttttagtagagacgaggtttcaccatattggtcaagctggtcttgaactcctgacctcat

SEQ ID NO: 549416 - DNA, 201 bp, Homo sapiens
cttaggtgacccacccatgtcagcctcccaaagtgctgggattacaggcgtgagccactgcgcccggccaaaaaggaaggaaattctaatacatgccgcarcatgggtgaactttgatgacattatgctaagtgaaacacgcctgtcacaaaaagacaagtattatatgatgccacttacatcagtcaccttcagtagtca

SEQ ID NO: 549417 - DNA, 201 bp, Homo sapiens
aaccttgctcccttgtcttcaatatatttactttttttttttttttggagacggagcctcgtgctgttgcccaggctggagcgcggtggcacaatcttggytcactgcaacctctgtctcccgggttcaagcgattctcctgcctcagcctcctgagtagctggtactacaggcgcacaccaccacgcccagctaattttt

SEQ ID NO: 549418 - DNA, 201 bp, Homo sapiens
gtgagccaagaccatgtcactgcactccagcctagatgacagagggagaccctctctccaaaaaaaaaaaaccagacacattggagtccagaaactaggcygagcatggtggcagaaactctcccaaagagttaaaatatctcattaataattttttatttataacactgaaatgaaaatatttgggatatattaggatga

SEQ ID NO: 549419 - DNA, 201 bp, Homo sapiens
ctaaccttcagtacatgtgaatgtgaccttatttggaaatagggtctttgctgatataatcaagttaaaatgagttcactggggtgggccttaatcatccratataactggtgtccatataagaagagggaaactggctgggtgcaatggctcacacctgtaatcccagcactttgggaggctgaggcaggcagatccctt

SEQ ID NO: 549420 - DNA, 201 bp, Homo sapiens
aatttttttttaatttagtgtcttaccccaaggcatactcaactgataatctccagctagatgagtaaaacagtatgtgtttagttttccagagaattctrgcaagtttcatattttcttccaagttagtatagaactaactataggaagtatggggttgctttttcctccagtagaatattaaagatgggggagggtggg

SEQ ID NO: 549421 - DNA, 201 bp, Homo sapiens
acatccttgacaaaacttaagcagaaccaaaaacagtggatgtattagaatggcaaagctaacattaaccagcatgccgataacattaatactatgtgatyttggcatttaaactaggctctggagaagggcaaatgtgctcttgtgtaattagctccccctggcttctgagatatagttgttctatatgaacacattttc

SEQ ID NO: 549422 - DNA, 201 bp, Homo sapiens
gatgagagctctctccctgctcccctctaccctctcaaaagttgagagtaaatagaatttggtttgattccagggaggggaaaataagcagagaataggasttttatactttccaataccaggaataaaatgtttgtgatatatatgggtccagcaaacctatcgagataatgtgaatacgataaacttcctaatggcagg

SEQ ID NO: 549423 - DNA, 201 bp, Homo sapiens
agatcacgccactgcactccagcttgggtgatacagtgagactgagtctcaataaataaataaataaaaagttttaaaaaagaaaaacaaagaaaaggccrggtgctgtggctcacgcctgtaatcccagcaccttgggagaccgaggcgggtggatcacttgaggtccggagatcgagaccatcctggccaacatggtca

SEQ ID NO: 549424 - DNA, 201 bp, Homo sapiens
ttgagagtaaatagaatttggtttgattccagggaggggaaaataagcagagaataggacttttatactttccaataccaggaataaaatgtttgtgatayatatgggtccagcaaacctatcgagataatgtgaatacgataaacttcctaatggcaggatattcactctcaatcctgaagttaccggttcctgcagaat

SEQ ID NO: 549425 - DNA, 201 bp, Homo sapiens
cttttatactttccaataccaggaataaaatgtttgtgatatatatgggtccagcaaacctatcgagataatgtgaatacgataaacttcctaatggcagsatattcactctcaatcctgaagttaccggttcctgcagaattgagcttcagctgttactgttttgaagccgctgtaaattactgctttccccagttcccc

SEQ ID NO: 549426 - DNA, 201 bp, Homo sapiens
agtgagtgcaaataggagggaacttctcaggagctgaaaccgctgctttgtggagcaggcctgtggttggaaaacctaagttttctctagcaaagacccarcctgactgtccagggccgaaggtgaaaccaactagagaatgcagaaggaaaagcctggatatatctcagaagatatggttgtattggcttttggtccaag

SEQ ID NO: 549427 - DNA, 201 bp, Homo sapiens
ataaagtatggtttcctttgttgtgtggttgacttttcccctcctgttgatcttttccagatgtcccctttgacttctgcacttaatgtcactgaaggcartctgagcctcttaagatctttatggccttgtgggttttctgtttgatcctttgtgtaattgaattttggaaagggataatgggtcgggtgagttctagat

SEQ ID NO: 549428 - DNA, 201 bp, Homo sapiens
agtggttggtgaagtgggatatactgtattaataattttttgtgcatgtcttcaaaaggttgtgcaactgtgagccaagaagcatttttaaagcaagcatrgaattgggggtttggggtggtagcagggatccttctggccaattatttgcccacatctgcccttactgcatattggcaatctgttgtgcagaagccacac

SEQ ID NO: 549429 - DNA, 201 bp, Homo sapiens
agcagttctcctgcctcggcctccaagtagttgggattacaggcgcctgccaccacgcctggctaatttgtgtgtgtgtgtgtgtgtgtgtgtgtgtgtgtgtgtgtgtgtttttagtagagaccaggtttcaccctgttggccaagctggtcttgaactcctgaccccaggtgacccacctgcctcggcctcccaaagtg

SEQ ID NO: 549430 - DNA, 201 bp, Homo sapiens
aagcagttctcctgcctcggcctccaagtagttgggattacaggcgcctgccaccacgcctggctaatttgtgtgtgtgtgtgtgtgtgtgtgtgtgtgtgtgtgtgtgtgtttttagtagagaccaggtttcaccctgttggccaagctggtcttgaactcctgaccccaggtgacccacctgcctcggcctcccaaagt

SEQ ID NO: 549431 - DNA, 201 bp, Homo sapiens
caagcagttctcctgcctcggcctccaagtagttgggattacaggcgcctgccaccacgcctggctaatttgtgtgtgtgtgtgtgtgtgtgtgtgtgtgkgtgtgtgtgtgtttttagtagagaccaggtttcaccctgttggccaagctggtcttgaactcctgaccccaggtgacccacctgcctcggcctcccaaag

SEQ ID NO: 549432 - DNA, 201 bp, Homo sapiens
tcaagcagttctcctgcctcggcctccaagtagttgggattacaggcgcctgccaccacgcctggctaatttgtgtgtgtgtgtgtgtgtgtgtgtgtgtgtgtgtgtgtgtgtttttagtagagaccaggtttcaccctgttggccaagctggtcttgaactcctgaccccaggtgacccacctgcctcggcctcccaaa

SEQ ID NO: 549433 - DNA, 201 bp, Homo sapiens
cgcatgcatagctaagtgagaatggaaaagacagaaggaataaaaggcatcatcatcatctattattattattattattattattattattattattattwgggatggagctcttgttgcccaggctggagtgcagtggcacgatctctgctcactgccacctccgcctcctgggttcaagcagttctcctgcctcggcct

SEQ ID NO: 549434 - DNA, 201 bp, Homo sapiens
agaatcagagaggagtcataaccagaaggcacgcatgcatagctaagtgagaatggaaaagacagaaggaataaaaggcatcatcatcatctattattatyattattattattattattattattattattagggatggagctcttgttgcccaggctggagtgcagtggcacgatctctgctcactgccacctccgcctc

SEQ ID NO: 549435 - DNA, 201 bp, Homo sapiens
acctgggaggcggagcttgcagggagccgagatcgcgccactgcactccagcctgggagacagagcaagactccgtctcaaaaaaaaaaaaaaaaaaatcrtccaccccaaaaagatgtgttgaagccctaaccttcagtacatgtgaatgtgaccttatttggaaatagggtctttgctgatataatcaagttaaaatga

SEQ ID NO: 549436 - DNA, 201 bp, Homo sapiens
aagtgtgaaagaatcagagaggagtcataaccagaaggcacgcatgcatagctaagtgagaatggaaaagacagaaggaataaaaggcatcatcatcatcyattattattattattattattattattattattattattagggatggagctcttgttgcccaggctggagtgcagtggcacgatctctgctcactgccac

SEQ ID NO: 549437 - DNA, 201 bp, Homo sapiens
aaaagtgtgaaagaatcagagaggagtcataaccagaaggcacgcatgcatagctaagtgagaatggaaaagacagaaggaataaaaggcatcatcatcatctattattattattattattattattattattattattattagggatggagctcttgttgcccaggctggagtgcagtggcacgatctctgctcactgcc

SEQ ID NO: 549438 - DNA, 201 bp, Homo sapiens
ggaatctggctcaccctttttttccttgtctcttgggaccttgacttgcccacctgatttctatatctacccctaaagaagcaacagctttgagacttccycataaggttttctgggcatgttattcataatttcctctgcctaatttttttttttaatgtaagccaatcttgtgtagcagggatgagttattccttcatg

SEQ ID NO: 549439 - DNA, 201 bp, Homo sapiens
cactttgggaggccgaggcaggtggatcacgagggcaggagatcgagaccatcctggctaacatcgtgaaaccccgtctccactaaaaaatacaaaaaatyagccgggcgcagtggcaggcacctgtagtcccagctacttgggaggctgaggcaggagaatggcgtgaacctgggaggcggagcttgcagggagccgaga

SEQ ID NO: 549440 - DNA, 201 bp, Homo sapiens
ctggtctcgaactcctggactcaagctatcctcttgccttgacctcccaaagtgctaggattacaggtgtgagccacgagacctggcctcaaataagaggktttttttttttttttttttggtgacggagtcttgctctgttgcctaggctggagtgcagtgcagtggcgcaatcttggctcactgcaacctccacctctc

SEQ ID NO: 549441 - DNA, 201 bp, Homo sapiens
caggagtgagccactgtgcccggctgggattttttatttttatttttttgaaacagagtctcactgtgtcacccagtctggggtgcagtggtgcgatcatrgctcactgcagccttgacatcccggactcagttgatctttcccatctcagcctcctgaggtgctaggactatgggtgcaggccaccatggtcagctaact

SEQ ID NO: 549442 - DNA, 201 bp, Homo sapiens
taatgtggcatcttccaggcttgtccattataaagttttcccttggtgattgttatgggttaaattatgcaccccaggccgggcgcagtggctcaagcctrtaatcccagcactttgggaggccgaggcaggtggatcacgagggcaggagatcgagaccatcctggctaacatcgtgaaaccccgtctccactaaaaaat

SEQ ID NO: 549443 - DNA, 201 bp, Homo sapiens
acacaaatgcaggttgcaggtttttgtgtttgacttgagagttggctaaaccagtctaccctggacatgttcagggtcatggtaaattggatattccagcratcttccttcctcatccccattgtgtccccttattttcgagaattactcatatcctttgccacataatttgtgggagaggagagaaaaggacttgaaact

SEQ ID NO: 549444 - DNA, 201 bp, Homo sapiens
gttccccttgatattctgattaatgtggcatcttccaggcttgtccattataaagttttcccttggtgattgttatgggttaaattatgcaccccaggccrggcgcagtggctcaagcctgtaatcccagcactttgggaggccgaggcaggtggatcacgagggcaggagatcgagaccatcctggctaacatcgtgaaa

SEQ ID NO: 549445 - DNA, 201 bp, Homo sapiens
gtataatgtttcccagtttgagtttatttgatatttctttgtgatcaggttgaggttatgcatctttagaaggaatatcacagaagtgattctgtgttctycatgtttcgtcttgtcagatggcacacaagtttggtttatctcactacctgtaatgttccccttgatattctgattaatgtggcatcttccaggcttgtc

SEQ ID NO: 549446 - DNA, 201 bp, Homo sapiens
atgagtcagggggtgcagagatagataattcacccataacaaatggcttcgtgttttttataaattttcaaaaattctcagctattgatctcaattattgktactgtttcatctccctcctctcctcttggaactcacattagtatgtatattggatctcattgttgtgttccaaatgcctttttttatagtcctttctga

SEQ ID NO: 549447 - DNA, 201 bp, Homo sapiens
aaaattagctgggcgtggtggcacgcgcctgtaatcccagctactcaggaggctgaggcaggagaatcgcctaaacctgggaggcggaggttgcagtgagscaagatcgcaccactgcattccagcctgggtgacagagcaagactctgtctcggagtggggggagggggggacattagctgggcatggtggcacgcacct

SEQ ID NO: 549448 - DNA, 201 bp, Homo sapiens
ttggtttctatcattgtactggagcagtctcaagtaatttcccaaaaaaaaagtgtttgtgagagggaaattttgtctgaccttatatttagaaatgtctyaggctgggcacagtggctcatgcctgtaattccaacactttgggaggctgaggtaggaggatcacttgaggccaggagttcaagattagcctgggcaaca

SEQ ID NO: 549449 - DNA, 201 bp, Homo sapiens
gacttgagagttggctaaaccagtctaccctggacatgttcagggtcatggtaaattggatattccagcgatcttccttcctcatccccattgtgtccccytattttcgagaattactcatatcctttgccacataatttgtgggagaggagagaaaaggacttgaaacttgctacatttttcttggggtgtttcagttgg

SEQ ID NO: 549450 - DNA, 201 bp, Homo sapiens
atgttcagggtcatggtaaattggatattccagcgatcttccttcctcatccccattgtgtccccttattttcgagaattactcatatcctttgccacatwatttgtgggagaggagagaaaaggacttgaaacttgctacatttttcttggggtgtttcagttggaatgggtagaaaggagaccgacagcatccctttcc

SEQ ID NO: 549451 - DNA, 201 bp, Homo sapiens
tgggattacagacatgaggcactgttcccggacacattgtggcattttattttattgattttatttttattttatttattttattttttgagacggagtawcattcttttttgcccaggctggagtgcaatggcgaaatctaggctcactgcaacctctgcctcccaggtacaaatgattctcctgcctcagtctcccaag

SEQ ID NO: 549452 - DNA, 201 bp, Homo sapiens
taggactctagtcaccttggaatttctattccaaaagtggagttaagctgagaatttcctaaaattttactaagggcctaggacacccttcactgtggatyccctttttcctgcacttctgtggaaatctagctttattttgtgcacacttttttccttaaccttaatctggtagagaaaagtcggaagacgcctcttttc

SEQ ID NO: 549453 - DNA, 201 bp, Homo sapiens
gttaagctgagaatttcctaaaattttactaagggcctaggacacccttcactgtggattccctttttcctgcacttctgtggaaatctagctttattttstgcacacttttttccttaaccttaatctggtagagaaaagtcggaagacgcctcttttcttggctttctattggacccacctcttttaccctatatcaaa

SEQ ID NO: 549454 - DNA, 201 bp, Homo sapiens
tatgcaggcctgtctgcataagctttttaaattcttccgattaatcctgcgtactctatgtgaaatgtttattaaggttaataatgtaaaggagtggacayggctttttttgagccctttcttattaatattagcaaatagcaaaagaacatataatttggaagctgttttcctattttgattatttcaaggacctattca

SEQ ID NO: 549455 - DNA, 201 bp, Homo sapiens
ttcaccgtgtcagccaggatggtctcgatctcctaacctcgtgatccgcccgccttagcctcccaaagtgctgggattacagacgtgagccaccgcgcccrgccacaggacacaatgtttttgttagatttatgtatgtagggagacatactgtattgtactgttgtatgttggttagttggtaaagaacatgggcttcga

SEQ ID NO: 549456 - DNA, 201 bp, Homo sapiens
agcgctatggtaggccaaggtggaaagattgcttgagtccaggagttggagaccagcctgggcaacatagtgagacccccatctctacaaaaaaaaaaaaataggtagacatggtggcgcgtacctgcagtcctagctactcaggagcctgaggtgggaggattgcttgagcctcagtggttgaggctacactgaattgtg

SEQ ID NO: 549457 - DNA, 201 bp, Homo sapiens
tcccaaacagccttgcacctgcccattctcatatagaagcaagtagaagaacacacttctctccttttaagccagaccattaaacagatttgcaaaaatgraaaacaatttgctcccactaaatttttgttttacaaaatatagttatttttaattaagaaataatttattggctagacagggtggctcactgagtgcctg

SEQ ID NO: 549458 - DNA, 201 bp, Homo sapiens
tgttattacttaataatcttatatttccagtcattaatgtagttaattttacaaacataacactaatagtttagtaagaaaataacatttactgagttcttatgtgatttcatttaatataacaattcattagttaatgtattattactgagtaaatctattagtgatgtatatgtaaattacactggtgacaggtaaaat

SEQ ID NO: 549459 - DNA, 201 bp, Homo sapiens
ttgttattacttaataatcttatatttccagtcattaatgtagttaattttacaaacataacactaatagtttagtaagaaaataacatttactgagttcttatgtgatttcatttaatataacaattcattagttaatgtattattactgagtaaatctattagtgatgtatatgtaaattacactggtgacaggtaaaa

SEQ ID NO: 549460 - DNA, 201 bp, Homo sapiens
ctgggggctttacttctttgagaatcattttcctgttttaaagggagtatacttgacatagttgttttaggaattaggtgaaatagtgaaggcatagcacygggtgttcagtagtagtctagggtggaggggcaacagcccaagttttaagaatagatgtttcaagccaggcatggtggctcacgcctgtaaacgcagcac

SEQ ID NO: 549461 - DNA, 201 bp, Homo sapiens
gttgttattacttaataatcttatatttccagtcattaatgtagttaattttacaaacataacactaatagtttagtaagaaaataacatttactgagttcttatgtgatttcatttaatataacaattcattagttaatgtattattactgagtaaatctattagtgatgtatatgtaaattacactggtgacaggtaaa

SEQ ID NO: 549462 - DNA, 201 bp, Homo sapiens
agattttggtcagttgttttaaaatttcaattgagaattaaggatacatgaggtttaatttgttgaaggaactcagagaccctaataaaaattacccaagracagaacaatttacaaaccagcttgactgactttctcatctatttgtcaaggaaacaaaaagtagttgtgtttcgtagtgatttcaaattccactgcccc

SEQ ID NO: 549463 - DNA, 201 bp, Homo sapiens; identical to SEQ ID NO: 230139

SEQ ID NO: 549464 - DNA, 201 bp, Homo sapiens
tgtcagttatgttctcttttttcctcccactttttccaggtgtttattgttttacagcagtacttttaaaagtcaaaaggggagattttggtcagttgttktaaaatttcaattgagaattaaggatacatgaggtttaatttgttgaaggaactcagagaccctaataaaaattacccaagaacagaacaatttacaaac

SEQ ID NO: 549465 - DNA, 201 bp, Homo sapiens
aatctattttggtctcttgcgtatttttactcttggtttacgcttaatggcatttctgtattcattgagcaggagctctgttataattggttattatccaycctctccctcccctttagatgcctaagtcaccttttttttttttcattccattgctctaggttcatagagttataggtggtatttttccaggtttctggc

SEQ ID NO: 549466 - DNA, 201 bp, Homo sapiens
ctcttttagttgaactttcttttctttaccttaattacaagtgccttcactctggcaggttcacatgagtctgttctgtaaagaattttaataatctgttktgtgattttgtgatttggagaaacttgtttaagataaaattgtgaggccgggcacggtggctcacaactgtaatcccagcactttgggaggcccaggcag

SEQ ID NO: 549467 - DNA, 201 bp, Homo sapiens
tgtctgttttagtcttaattctgtatccataaattagctttgtgtaatgaaggaaaaggatcttttaaagtctgtaactaggctgggcgcggtggctcackcctgtaatcccagcactttgggaggccgaggtgggcggatcacgaggtcaggagatcgagaccatcctggctaatacggtgaaaccccgtctctactaaa

SEQ ID NO: 549468 - DNA, 201 bp, Homo sapiens
tctaaaggaacccagattgggattagattgcttggcgttttatctgttcccctaatggtagaaataaccttcttccagtatatctattatcagctgagttscatattcaatttatgccagcaagagagtttattttcctgtgaaactctttctaaattagaatttgcttagaataacagaaggctatgtttatgtaattaa

SEQ ID NO: 549469 - DNA, 201 bp, Homo sapiens
acatgcatgaactgttctaaaggaacccagattgggattagattgcttggcgttttatctgttcccctaatggtagaaataaccttcttccagtatatctrttatcagctgagttgcatattcaatttatgccagcaagagagtttattttcctgtgaaactctttctaaattagaatttgcttagaataacagaaggcta

SEQ ID NO: 549470 - DNA, 201 bp, Homo sapiens
accacatttaggaatgtttaaatttcctagtccattatttattttaggaattatgacttaaatgtgcatgtttgccatatgttcagagtatatctttaackatagagctaaaatttttcctgttagtcaactttttgtgtctgtattcttaatgaccttttgtttaattccaacagcatctacaaatccaaaagctgctct

SEQ ID NO: 549471 - DNA, 201 bp, Homo sapiens
cacgcctgtaaacgcagcactttgggaggccaaggcaggtggatcacctgaggtcaggagttcaagaccagcctggccaacattgtgaaaccccatctctwctaaaaatacaaaaaaatagccaggtgtggtggcgggcgcctgtaatcccagctactcgggaggctgaggcaggagaatcgattgaatctgggagtcgga

SEQ ID NO: 549472 - DNA, 201 bp, Homo sapiens
cactttgggaggccaaggcaggtggatcacctgaggtcaggagttcaagaccagcctggccaacattgtgaaaccccatctctactaaaaatacaaaaaawtagccaggtgtggtggcgggcgcctgtaatcccagctactcgggaggctgaggcaggagaatcgattgaatctgggagtcggaggttgcagtgagccaag

SEQ ID NO: 549473 - DNA, 201 bp, Homo sapiens
gtgccattgcactccagcctgagcaacaagagtgaaactccatctcaaaaaacaaaaaacaggccgggcacagtggctcacgcctgtaatctcagcacttygggaggccaaggtggtcggatcacgaggtcaggagttcgagaccagcctgacatggtgaaaccctgtctctactaaaaatacaaaaattagccgagcgtg

SEQ ID NO: 549474 - DNA, 201 bp, Homo sapiens
ctctttgtatttcagggtgtctaccagaagatggacccaagatccatggaggctcctgtgactcagatcaactgccctgcccgggaaacctggtctctccrgaaaccttgattaaactgctttttctgacacctcttcctctacaacccttgattctatcaccattgaaacttcagaaccaactctaaccatccccacctc

SEQ ID NO: 549475 - DNA, 201 bp, Homo sapiens
acttagtctagtgtgttattggcttaggttctttttgaggttcaaggtaaactttgtctcagccccccaaagaagtaataaatctattttggtctcttgcrtatttttactcttggtttacgcttaatggcatttctgtattcattgagcaggagctctgttataattggttattatccaccctctccctcccctttagat

SEQ ID NO: 549476 - DNA, 201 bp, Homo sapiens
tctctgtagtaaattagcatatgctttgaagaactaggaggacaaaatggaaaatattgtgttaatgacatccattttgtcttttttttttttttttttttgagacatattcttgttctgtcacccaggctggagtgcagtggcatgatcttgactcactgcaacctctgccccctgggttcaagtgattctcctgcctca

SEQ ID NO: 549477 - DNA, 201 bp, Homo sapiens
cctcccaggtcaaagtgattctcttgcctcagcctcctgagtagctgggattacaggcgtgcaccactaagcccagctaatttttttttttttttttttttgagacagagtttcactcttttcacccatgctggagtataatggcacgatctcagctcactgcaacctccgcctcccaggttcaagtgattctcctgcctc

SEQ ID NO: 549478 - DNA, 201 bp, Homo sapiens
tctaaggatatgttccagagatatttttattttatccttctttacttttttttttttgagatggagtctcgctctgtcgtccagactggagtgcagtggcrcgatctcagctcactgcaacctccacctccagggttcaagcaattctcctgcctcagcctcccaagtagctgggattacaggcacgcaccaccacgtcca

SEQ ID NO: 549479 - DNA, 201 bp, Homo sapiens
tgtccggctaattatttgtatttttagtagagacggggtttcatcattgtggcctggctggtctcgaactcccgacctcaggtgatccacctgcctcggcytcccaaagtgcagggattacagacgtgagccccccgtgcccggccccgttactttttaattacctgaaatacctttttacacaattgagttgatctcatg

SEQ ID NO: 549480 - DNA, 201 bp, Homo sapiens
gagaatttttgcacagggtgtcagttcttactaagctgtttggtagtaagcatatatcagcagtctttagactgtcttttgatttagatttacagtaagtkgtgtactgttttgttaaaaggaattatgtattatatgcatgtaattaagttattgaacagaagtttgtgataatctgctaccatgaccgtcattttacta

SEQ ID NO: 549481 - DNA, 201 bp, Homo sapiens
gcaatccatccactacggcctcccacaattggccagactggtctcgaactcctgacctcaggcaatccatccacctcggcctcccaaagcgctgggattasaggcgtgagccactgtgcccagccaacattgtttaaagttaggtagccaacttgaacctgaagctcatctgtgaaccaaacagaataaaccaataccctt

SEQ ID NO: 549482 - DNA, 201 bp, Homo sapiens
acttccaagctcaagtgattttcccacctcggcctcccagaattggccagactggtctcaaactcctgacctcaggcaatccatccactacggcctcccamaattggccagactggtctcgaactcctgacctcaggcaatccatccacctcggcctcccaaagcgctgggattacaggcgtgagccactgtgcccagcca

SEQ ID NO: 549483 - DNA, 201 bp, Homo sapiens
tctcattcacttctactttaacactttttttttttgagacaaggtcttgctctgtggcccaggctgggttgcagtgttgtgatcaccagtcagtacagtayagatcctcttgcctcagactcccatgtagcgggtactacaaatgtgtgccaccacatgtggctaattttttcatttttagtagagataaggtctctctct

SEQ ID NO: 549484 - DNA, 201 bp, Homo sapiens
gacataattaaaatctttacttaaattattaactttattggtaattatttctcattcacttctactttaacactttttttttttgagacaaggtcttgctytgtggcccaggctgggttgcagtgttgtgatcaccagtcagtacagtacagatcctcttgcctcagactcccatgtagcgggtactacaaatgtgtgcca

SEQ ID NO: 549485 - DNA, 201 bp, Homo sapiens
ctccttggttcaagcaattctcctgcctcagcgtcccgagtagctgggattacaggcatgtgccaccgcacccagctaatttttgtatttttagtagagayggggtttcaccatgttggccaggatggtctcgatctcttgaccttgtgatccgcctccctcggcctcccaaagtgctgcgattacaggcatgagccacca

SEQ ID NO: 549486 - DNA, 201 bp, Homo sapiens
ggtggatgtgtgcagcacagaaactctcaaatgcttaaaaggtaatgcttacatccttttagagtaagtcagattttctttccatatgtgtcatttttccrgtaatcatactggtttacctcataaggagatccttgggtagaaagcagttgtggcacctctggtttcccaggtagttatttcatgcatataaatttcata

SEQ ID NO: 549487 - DNA, 201 bp, Homo sapiens
aagcatttgaaatgaagcttgtccaacttgagatgtgctataagtataaaatacacattgaggccaggtgcagtggctcatgcctgtaatctcagcacttygtgaggctgaggcgggcagattgcttgagcccaggactttgagaccagcctgggcaacatagtgaaaccctgtctctacaaaaaatataaaaattagtca

SEQ ID NO: 549488 - DNA, 201 bp, Homo sapiens
tagtttcacatgtcttgcaccaagctcatgcctcttgcttttcctttttgactttatctccctcagtttttcttctgctgtggccagaaagacagtcactrcagttgactattgatacaaaggtgcaacagaaatattatccctgcatttttaaatataagaagtagacattaattttaccatggtgcctccctaatgtaa

SEQ ID NO: 549489 - DNA, 201 bp, Homo sapiens
gggtatgttagtggtgtttggtgtttttgttttgttttgtttagtgcccagaggtagctgctaatgtagtgtctgcattttctttttagccatttggaccyatctcttagcatgcctgctaattttttatcgaatgctgaacattaaaagattatggagtctctggatgatttttcttcctttagagacagttcacccttg

SEQ ID NO: 549490 - DNA, 201 bp, Homo sapiens
attattacagtatagtatgtacagtagtgaattttattcagttatgatataatactgaatttttatgattgtttacattactctcaactggatggctgcaygtatgtcttttaagtgtgtgcataagttttgatagatgttaactttttaaaatagatttgtgtatatttaatggtagtaaatgagaaaatagactagtgt

SEQ ID NO: 549491 - DNA, 201 bp, Homo sapiens
ttgcatttgcctgtctcccgcttgaaaataacaatgtatattaacttattagagataataagtttgaaggttgaaggttggtttgaaggttggacaggaarggtagaacagatctgtttgcatttagagaaacacttccacagatcaaacattaagaaatactggcttaaagtgttgttttaagaataactttgcctcctt

SEQ ID NO: 549492 - DNA, 201 bp, Homo sapiens
gagaaaagagccaatcaggagggcgcagaggtgtgtcctgggggcttataaaggcggcctcgcggcgcgcgcgcgacagcagttacactgcggcgggcgtytgttctagtgtttgagccgtcgtgcttcaccggtctacctcgctagcatgtcgggccgcggcaagactggcggcaaggcccgcgccaaggccaagtcgcg

SEQ ID NO: 549493 - DNA, 201 bp, Homo sapiens
gaaaagagccaatcaggagggcgcagaggtgtgtcctgggggcttataaaggcggcctcgcggcgcgcgcgcgacagcagttacactgcggcgggcgtctsttctagtgtttgagccgtcgtgcttcaccggtctacctcgctagcatgtcgggccgcggcaagactggcggcaaggcccgcgccaaggccaagtcgcgct

SEQ ID NO: 549494 - DNA, 201 bp, Homo sapiens
gtgtgtcctgggggcttataaaggcggcctcgcggcgcgcgcgcgacagcagttacactgcggcgggcgtctgttctagtgtttgagccgtcgtgcttcaycggtctacctcgctagcatgtcgggccgcggcaagactggcggcaaggcccgcgccaaggccaagtcgcgctcgtcgcgcgccggcctccagttcccagt

SEQ ID NO: 549495 - DNA, 201 bp, Homo sapiens
cctttgtcaggtaggagaagggagtagggagtgactggacctggaaaggagggctgcagtagctataatattgacccctttcctttaaaaatcctacgccrgcacagatttcccagacgctctctaggtggcctcagactccacccctttggtcttccgcttctggtttccgattgtagtgtttaaatctcgcgcgcttta

SEQ ID NO: 549496 - DNA, 201 bp, Homo sapiens
tggcggcaaggcccgcgccaaggccaagtcgcgctcgtcgcgcgccggcctccagttcccagtgggccgtgtacaccggctgctgcggaagggccactacsccgagcgcgttggcgccggcgcgccagtgtacctggcggcagtgctggagtacctcaccgctgagatcctggagctggcgggcaatgcggcccgcgacaa

SEQ ID NO: 549497 - DNA, 201 bp, Homo sapiens
tgcagccggggtgtctggtacccccccggcgtggtgcttagcccaggactttcagacgcggccgctggccgggaggctttggtgggagagacgcgatcgcygatttcggtctggcgccccttctgcggccgggacccaggcctttcacatcagctctccctccatcttcattcataggtctgcgctggggccgggacgaag

SEQ ID NO: 549498 - DNA, 201 bp, Homo sapiens
cgcttcagactgcggggcaagcgggccgcggctcccttcccctcccctcccctcgcccgccttcgccgcccggcctcgagtccccgcccgcccccgctccygtcccgcaccgcctgccgcgtcggcctcgggccctgccctgtccgccgtccgccctccggtagggttcgggccttccggatgcggcttgggcgctcttcg

SEQ ID NO: 549499 - DNA, 201 bp, Homo sapiens
gaggcgtcctgcccaacatccaggccgtgctgctgcccaagaagaccagcgccaccgtggggccgaaggcgccctcgggcggcaagaaggccacccaggcytcccaggagtactaagagggcccgcgccgcggccggccgccaggcctccccatgccaccacaaaggccctttttaagggccaccaccgccctcatggaaa

SEQ ID NO: 549500 - DNA, 201 bp, Homo sapiens
gtcggcctcgggccctgccctgtccgccgtccgccctccggtagggttcgggccttccggatgcggcttgggcgctcttcggggacctccgtggcgcggargacccgagcctgccggggggaggccggcggcgccgcacctgcccgcctcggcgttcgtgactcagccgccccatcccgagtcgctaaggggctgcgggga

SEQ ID NO: 549501 - DNA, 201 bp, Homo sapiens
ggcaacaaaacgagactccgtctctacaaaaataaaataattagccaagtgtggtggagcacttgtagtaccagctacgagggaggtttagcagggaggaktccttgaacccaggagttcgaggctgcagtgagctgagatcacactactgcactccagcctgggtgacagagccagtgacacccggtctattaaaaaaag

SEQ ID NO: 549502 - DNA, 201 bp, Homo sapiens
gggcaaaaggttttcaaattcgaccaatcagcgggcgcgctccctcagccgagccgcgacacccaagggttaaccgcaaccaaccggaggcgggtattggmgaaaagagccaatcaggagggcgcagaggtgtgtcctgggggcttataaaggcggcctcgcggcgcgcgcgcgacagcagttacactgcggcgggcgtct

SEQ ID NO: 549503 - DNA, 201 bp, Homo sapiens
ggagagacgcgatcgctgatttcggtctggcgccccttctgcggccgggacccaggcctttcacatcagctctccctccatcttcattcataggtctgcgmtggggccgggacgaagcacttggtaacaggcacatcttcctcccgagtgactgcctcctaggaggacatttaggggagggcagaggcctgcagtttggct

SEQ ID NO: 549504 - DNA, 201 bp, Homo sapiens
gtccgccgtccgccctccggtagggttcgggccttccggatgcggcttgggcgctcttcggggacctccgtggcgcggaagacccgagcctgccggggggwggccggcggcgccgcacctgcccgcctcggcgttcgtgactcagccgccccatcccgagtcgctaaggggctgcggggaggccgcagcaccttctggaag

SEQ ID NO: 549505 - DNA, 201 bp, Homo sapiens
ggagcttctgccattggacaacagggggagcacccaagcaacaaagatgcactctatctcttgttcacatctctgcttttacatttcttcttttttgaagsctgttgcccacgctggtcttgaactcctggcctcaagggatcctcctgcctcagcctcttaaagcgctgggattacaagcatgagccagcttgcctggcc

SEQ ID NO: 549506 - DNA, 201 bp, Homo sapiens; identical to SEQ ID NO: 385679

SEQ ID NO: 549507 - DNA, 201 bp, Homo sapiens
gcccaggctggtctcgaacacctgggctcaagtgattcccccacctcggcctcccaaagtgctgggattacagacaggcatgagccatcgcgcccagcccrtttccttaagaaacgttttgagcgtctgttaggtgtcatacgctctgacgggggaaacaaaaacgaatataaaacattgactatggttcacaatctgcgt

SEQ ID NO: 549508 - DNA, 201 bp, Homo sapiens
agtggcagttgtgaaaatggagacagaggaaacaatccccaggctgagttggccttgttgggagcatgctgagactcactgcaggtccagggctgttgtawtcatttgactcccttaaggcgataagaagagcagggcagggccttcaggggccttaccagggaccttgccctgtgcacttcagctgccttctttctcatc

SEQ ID NO: 549509 - DNA, 201 bp, Homo sapiens
atgaaatctgtttgtcggaggggtccgtgccgcgcgcctctttggtttagctggtcatccagagttgttctgtggtctacgggaagaaagaaggaagtccrtttcctaacttgttatcaactgagcaatcctgggcaagtcatttaacctctctgggttttaatttccttatctgtaggagatgtgtgcatgccaatttga

SEQ ID NO: 549510 - DNA, 201 bp, Homo sapiens
cagagggggatttggcagggtcataggacaatagtggagggaaggtcagcagataaacaagtgaacaaaggtctctggctttcctaggcagaggaccctgyggccttccgcagtgtttgtgtccctgggtacttgagattagggagtggtgatgactcctaacgagcatgctgccttcaagcatctgtttaacaaagcaca

SEQ ID NO: 549511 - DNA, 201 bp, Homo sapiens
gaccgcgggaccttttccggcgctggatgctttgctgccggggttcgggagtgacctgcgcctagagcaggtcgggcgcactgcagtcccgcactcggggytcttcttccggtcacctgtagagcccggccgaggaatggaataacaggcgtcctgtccgcagccccgcggagggggcgctggcctgccggttagtattga

SEQ ID NO: 549512 - DNA, 201 bp, Homo sapiens
tcagagagaatatcctacaccagaagaatttttaaaaattagttgtcggctgggggtggctcccgcctgtaatccctgcactttgggaggctgaggcaggyggatcatgaggtcaggaaatcaagaccatcctaacacggtgaaaccccatctccactaaaaatacaaaaattggtggtggcatgtgcctgtagtcccagc

SEQ ID NO: 549513 - DNA, 201 bp, Homo sapiens
tgagccagaagaattgcttgaacccaggaggtggaggttgcagtgagccgagatcgcgccactgcactccagtctgggcgactgagccagactccatctcaaaaaaaaaaaaaaaaaaaaaattggcccggcgtggtggcacgcacctgtaatcctaggtactggggagtctgaggcaggagaattgcttgaacctgagag

SEQ ID NO: 549514 - DNA, 201 bp, Homo sapiens
gagccagaagaattgcttgaacccaggaggtggaggttgcagtgagccgagatcgcgccactgcactccagtctgggcgactgagccagactccatctcaaaaaaaaaaaaaaaaaaaaaattggcccggcgtggtggcacgcacctgtaatcctaggtactggggagtctgaggcaggagaattgcttgaacctgagagg

SEQ ID NO: 549515 - DNA, 201 bp, Homo sapiens
agccagaagaattgcttgaacccaggaggtggaggttgcagtgagccgagatcgcgccactgcactccagtctgggcgactgagccagactccatctcaaaaaaaaaaaaaaaaaaaaaattggcccggcgtggtggcacgcacctgtaatcctaggtactggggagtctgaggcaggagaattgcttgaacctgagaggt

SEQ ID NO: 549516 - DNA, 201 bp, Homo sapiens
ctcgtgatctgcctgcctcgtcctcccaaagtgctgggattacaggcgtgagccactgcgcccggccttgttttgttttttaactcttttgtcaaaataarttgggcagaggaacaagggattcagcagtggagaaattagaaagtgctgggaaacgtaggatgcaagttttctgttttgttttggttttatttttttaag

SEQ ID NO: 549517 - DNA, 201 bp, Homo sapiens
ggtagaatagtatttcacaagaacaagctgaagaacaatgggaaatttttaatgtaaaacacctgatttagattgacctaggcaggtgaactcattggttyttctccagaataacttgttaacattggaggactatatcccttccccaacactgcagaaacctaagggaagaaagttgccgtcttgcagaacatgtgccaa

SEQ ID NO: 549518 - DNA, 201 bp, Homo sapiens
gatatagctgtgaatgcagggacaggcagctagatagctaaagcccatccatgctccaggtaggggctagaattctaccaggaactgtttttgtttttggytttttgtttgtttttgttagtttttttttgagatggagtttcgctcttgttgtccaagctggagtgcaatggcgcgatctcgacttactgcaaccttccc

SEQ ID NO: 549519 - DNA, 201 bp, Homo sapiens
caagtgattcctgtgtacatgagctggagaagtacactgattcagatgctatcgggtgcacatgtctccctagaaccattggaaagttggagccatcctaygtgatccgcaagtttctggatgcccagcgcattcacaacctgactgcctacctgcagaccctgcaccgacaatccctggccaatgccgaccataccaccc

SEQ ID NO: 549520 - DNA, 201 bp, Homo sapiens
ggatctacgacacactccttgagctgcgactgcagaactgggcccacgagaaggatccacaggtgaggcctggccagggcttcaggagaaaagacagttcrtgccgtctccattcttccgtcttggtggctgcctttcactgcattccttagaccagtaacaccttacctcggggctcaatggtcctctgtgaagagggaa

SEQ ID NO: 549521 - DNA, 201 bp, Homo sapiens
attttccccttttgtccagcagctctgccctccttcctctccaggtcaaagagaagcttcacgcagaggccatttccctgctgaagagtggtcgcttctgygacgtctttgacaaggccctggtcctgtgccagatgcacgacttccaggatggtgtcctttacctttatgagcaggggaagctgtaagagtttggggaat

SEQ ID NO: 549522 - DNA, 201 bp, Homo sapiens
tggaggactatatcccttccccaacactgcagaaacctaagggaagaaagttgccgtcttgcagaacatgtgccaaactgacagaggtgtaaaatagacayatcggtgagggtatatatgcacataaaccatgcaaattacatgatgggctgagggcagtgttgatcagagagaatatcctacaccagaagaatttttaaa

SEQ ID NO: 549523 - DNA, 201 bp, Homo sapiens
tatcttttttaaaaccataaaatgttacacaattacattgtttgcaatttttttaaactaataataaagtgtggagcattttccatgtaactgtggttcayttcctcgtttactgctgtagaacattccatagcatggggttcgttctgccataatgatagacatatacgctgtcagttcaattccacagggaaagatttt

SEQ ID NO: 549524 - DNA, 201 bp, Homo sapiens
ctcttctaggtacttgggaagacagatgggtgggtgacaagctgctgacagctgggctctgtggcaggggcccttcacctttatccagagagtgccacacrtggttgattgtcttgtttcctcttggaccccaatctcagtggtgcagaccctggcccacaactccacagccacactctccgtcatcagggactacctggt

SEQ ID NO: 549525 - DNA, 201 bp, Homo sapiens
cggctgggcatcagagggagaccgtggaaagagagggagagggagaccctggggaaagggggagggggagggggagggagagctattcttccttttaagartagttatgtattcaggcagtagacaaattggtagaaatagaaattcagttaaaattttaacagaatttaattacacaaataatacacaaatgtaatcttt

SEQ ID NO: 549526 - DNA, 201 bp, Homo sapiens
cattttgattcttcaagttgtgttttaattgaggaattccaaaaaatggtttattacatagatcattatttattgggctttggatgatattattttgtagsaggtactttttgttctttatatgcctgtattctaccacttctaaacacatccgtattgtggttggaagccgttctggtgtttttcttttttgagacagga

SEQ ID NO: 549527 - DNA, 201 bp, Homo sapiens
cgcagtccttggagactgcattttccttaagtgtggatggaaataagtcatctgttttctctcctactaagttgatgcctggccacccttcacagaaaggsccgcttgaagaccctggctgtcagggccagggttgtgtcaagcctgaacttgtttaaggagctcttagctcttcctttctctacatttttcgtgatgctt

SEQ ID NO: 549528 - DNA, 201 bp, Homo sapiens
aataacaggcgtcctgtccgcagccccgcggagggggcgctggcctgccggttagtattgaggtgccctaggctttggatagacgttggagaatggctgtscctcggactgagtccgtcgcaaccccctctgttttactgaggaaactgaagccacagaaaaagatgtttgctgatgggtcagagataaccgatgcattcg

SEQ ID NO: 549529 - DNA, 201 bp, Homo sapiens
tgatgggctggcccagattttcatgcagtatggagaccatctctacagcaagggcaaccacgatggggctgtccagcaatatatccggtcagtctggaggyactttgggatatagctgtgaatgcagggacaggcagctagatagctaaagcccatccatgctccaggtaggggctagaattctaccaggaactgtttttg

SEQ ID NO: 549530 - DNA, 201 bp, Homo sapiens
gttacagtcacatccggcaaactcgcacactgcagatctaggactaccccgcgcggccccgcccactttcccagcagcgggacgctgtcaccccgactcargagctcctgggcccgcgggctcccggaagctgccgaccacgtgattcgctggctcagctcacgtgacaaagctcccggaggtgggagccctgggccaaaa

SEQ ID NO: 549531 - DNA, 201 bp, Homo sapiens
tgcgcccggtgtttttttctttgctttttttgtttgtttgtttgtttttgagacagattctcgctctttcacccaggctggagtgcaatggtgtgatctcrgctcactgcaacctctgcctcgggttcaagcaattctcctgtctcagcctcccaagtagctgggattacaggatcatgctgccatgcctggctaattttt

SEQ ID NO: 549532 - DNA, 201 bp, Homo sapiens
cggaaaattaaagtttgctgaggcaactacacaggaggctgaggcaggagaatcacttgaacctgggaggcggacgttgcagtgagccgagatcacgccaytgcactcaagcctgacgactggcgacagagcgagactccgtctcaaaaataaaataaaataagataaaaataaattaaagtttgcatttgggacaagaag

SEQ ID NO: 549533 - DNA, 201 bp, Homo sapiens
ggagaatcacttgaacctgggaggcggacgttgcagtgagccgagatcacgccactgcactcaagcctgacgactggcgacagagcgagactccgtctcaaaaataaaataaaataagataaaaataaattaaagtttgcatttgggacaagaagtgttcctgttttgttccagtggatgtaactgttttatatcatgggc

SEQ ID NO: 549534 - DNA, 201 bp, Homo sapiens
gagaatcacttgaacctgggaggcggacgttgcagtgagccgagatcacgccactgcactcaagcctgacgactggcgacagagcgagactccgtctcaaaaataaaataaaataagataaaaataaattaaagtttgcatttgggacaagaagtgttcctgttttgttccagtggatgtaactgttttatatcatgggca

SEQ ID NO: 549535 - DNA, 201 bp, Homo sapiens
agaatcacttgaacctgggaggcggacgttgcagtgagccgagatcacgccactgcactcaagcctgacgactggcgacagagcgagactccgtctcaaaaataaaataaaataagataaaaataaattaaagtttgcatttgggacaagaagtgttcctgttttgttccagtggatgtaactgttttatatcatgggcag

SEQ ID NO: 549536 - DNA, 201 bp, Homo sapiens
ttggacaagtatctttacctttcttgttcctggtgccccagatttacaacagtctactctctcaggaatactcttgataaaatagtagattattacatttytcttacttgcagaatttctgtactagatagtgataatatatacagagaaagaaattgtgatctctggttatatatttaatagatgggtaatggttaatga

SEQ ID NO: 549537 - DNA, 201 bp, Homo sapiens
gaatcacttgaacctgggaggcggacgttgcagtgagccgagatcacgccactgcactcaagcctgacgactggcgacagagcgagactccgtctcaaaaataaaataaaataagataaaaataaattaaagtttgcatttgggacaagaagtgttcctgttttgttccagtggatgtaactgttttatatcatgggcagc

SEQ ID NO: 549538 - DNA, 201 bp, Homo sapiens
actaactttttaaatgacgttggacaagtatctttacctttcttgttcctggtgccccagatttacaacagtctactctctcaggaatactcttgataaartagtagattattacatttctcttacttgcagaatttctgtactagatagtgataatatatacagagaaagaaattgtgatctctggttatatatttaata

SEQ ID NO: 549539 - DNA, 201 bp, Homo sapiens
aatcacttgaacctgggaggcggacgttgcagtgagccgagatcacgccactgcactcaagcctgacgactggcgacagagcgagactccgtctcaaaaataaaataaaataagataaaaataaattaaagtttgcatttgggacaagaagtgttcctgttttgttccagtggatgtaactgttttatatcatgggcagca

SEQ ID NO: 549540 - DNA, 201 bp, Homo sapiens
aggttgcagtgagccgagatcgcgccactgcactccagtctgggcgactgagccagactccatctcaaaaaaaaaaaaaaaaaaaaaattggcccggcgtrgtggcacgcacctgtaatcctaggtactggggagtctgaggcaggagaattgcttgaacctgagaggtggaggttgtagtgcgccaagattgtgccactg

SEQ ID NO: 549541 - DNA, 201 bp, Homo sapiens
  misc_feature (1)...(201): n = A,T,C or G
tacgggaagaaagaaggaagtccatttcctaacttgttatcaactgagcaatcctgggcaagtcatttaacctctctgggttttaatttccttatctgtargagatgtgtgcatgccaatttgacgaggttaatttgagatcaataagaaaaagaatgcaagttggctttaaaagatgaatatgtannnnnnnnnnnnnnn

SEQ ID NO: 549542 - DNA, 201 bp, Homo sapiens
cctgggaggcggacgttgcagtgagccgagatcacgccactgcactcaagcctgacgactggcgacagagcgagactccgtctcaaaaataaaataaaataagataaaaataaattaaagtttgcatttgggacaagaagtgttcctgttttgttccagtggatgtaactgttttatatcatgggcagcagtttgctaaag

SEQ ID NO: 549543 - DNA, 201 bp, Homo sapiens
ttctcattaaaacactcagctctcaaagctgccacttccaggtttttgctcagttctatgtcccctaccctgccactatggaaagggggagaaagcccagkgccttgggaattcctgccccaccagtatttcccagtttccttttttttttttttgagacaaggtcttgctctgtcgcccatgctggagtgcagcggctcg

SEQ ID NO: 549544 - DNA, 201 bp, Homo sapiens
tctactctttagctgtttctgtcatagaatgacagaagcacctcactgccttctcttttaacttacagctccatagaaatgtgcgcagtcgcccgggcgcrgtggctcacgcctgtaatcccagcattttgggaggccaaggcgggcgaatcactggaggtcaggagttcgagaccagcctggccaacatggtgaaacccc

SEQ ID NO: 549545 - DNA, 201 bp, Homo sapiens
cgcaatctcggctcactgcaacctctgcctcctgggttcaagcgattctcctgccttggccccctgagtacctgggattacaggtgcctgccatcatgccyggctaatctttatatttttagtagagactgggtttcaccatattggccaggctggtctagaactcctgacgtcaggtgatccacctgcctcggcctccca

SEQ ID NO: 549546 - DNA, 201 bp, Homo sapiens
ttctgagtgcctcaagtggtcttttttcccctctccacttcctgatcttttcagccttactgaagtaattttcttgttttcttacaggtttcacagatggsagtgttacattgaacaaaggagacatcacccgggaccggcatagcaagacccagattttgcacaagggcaactatcctgtaactggattggcctttcgcc

SEQ ID NO: 549547 - DNA, 201 bp, Homo sapiens
caggtgtgagccactgcacccagccagtgacacttatagctagagttggttacaatgctttttttaactgaaaaatggatgtttttactgcaggtatttgstacatagccctagcatactagaatgctccagggaatttggacctgctttttttgttctgttttgtttgagatggagtctcgctctattgcccaggctgga

SEQ ID NO: 549548 - DNA, 201 bp, Homo sapiens
ccaagtagctgggattacaggatcatgctgccatgcctggctaattttttgtatttttagtagagacggggtttcaccacgttctctaggctggtctcgarctcctgagctcaggcaatctgcctgcctcggcctcccaaagtgttaggattacaggtgtgagccacagtgcctggcctttttaattttctttataagaac

SEQ ID NO: 549549 - DNA, 201 bp, Homo sapiens
taattcttggaattttctgccttaagaaggggttttagaaatctgtctaaggtggccgggcgcggtagctcacgcatgtaatcccagcactttgggaggcygaggcgggtggatcacgaggtcaggagatcgagaccatcctggctaacacggtgaaaccccgtctctactaaaaaatacaaaaaattagctgggtgtcgt

SEQ ID NO: 549550 - DNA, 201 bp, Homo sapiens
atggcctgaaccccagaggcggagcttgcagtgagccgagatcgcaccactgcactccagcctgggtatcagagcaagactgtctcaaaaaaaaaaagttkgtctaaggctggggtgcagtggcatgtgcctgtgatcctatccctttgggagaccgaggtgggaggaatgcatgagcccagtctgagcaacatagcaaga

SEQ ID NO: 549551 - DNA, 201 bp, Homo sapiens
gcctgaaccccagaggcggagcttgcagtgagccgagatcgcaccactgcactccagcctgggtatcagagcaagactgtctcaaaaaaaaaaagtttgtytaaggctggggtgcagtggcatgtgcctgtgatcctatccctttgggagaccgaggtgggaggaatgcatgagcccagtctgagcaacatagcaagaccc

SEQ ID NO: 549552 - DNA, 201 bp, Homo sapiens
cactgcactccagcctgggtatcagagcaagactgtctcaaaaaaaaaaagtttgtctaaggctggggtgcagtggcatgtgcctgtgatcctatcccttkgggagaccgaggtgggaggaatgcatgagcccagtctgagcaacatagcaagaccccatttctaacaataaataaataaataaaatttaaaaatatggct

SEQ ID NO: 549553 - DNA, 201 bp, Homo sapiens
tcctgtaatcccagcactttgggaggccaaggcgggtggatcacttgaggttaggagtttgagaccagcctggccaacatggtgaaaccctgtctccacttaaaaaaaaaaaaaaaaaaaaaatacaaggccaggcgtggtggctcacgcctgtaatctcagcactttgggaggctgaggcaggtggatcacctgaggtca

SEQ ID NO: 549554 - DNA, 201 bp, Homo sapiens
cctgtaatcccagcactttgggaggccaaggcgggtggatcacttgaggttaggagtttgagaccagcctggccaacatggtgaaaccctgtctccacttaaaaaaaaaaaaaaaaaaaaaatacaaggccaggcgtggtggctcacgcctgtaatctcagcactttgggaggctgaggcaggtggatcacctgaggtcaa

SEQ ID NO: 549555 - DNA, 201 bp, Homo sapiens
tggagaaaccctgcctctactaaaaatacaaaactagctgggcatggtggcacatgcctgtaatcccagctactcaggaggctgaggcagaagaatcgctygatcctgggaggcagaggttgcggtgggctgagatcgtgccactgcactccagcctgggcaacaggagcgaacctccctctcaaaaaaaaaaaaattaat

SEQ ID NO: 549556 - DNA, 201 bp, Homo sapiens
ctctactaaaaatacaaaactagctgggcatggtggcacatgcctgtaatcccagctactcaggaggctgaggcagaagaatcgcttgatcctgggaggcrgaggttgcggtgggctgagatcgtgccactgcactccagcctgggcaacaggagcgaacctccctctcaaaaaaaaaaaaattaattaaattttaaaata

SEQ ID NO: 549557 - DNA, 201 bp, Homo sapiens; identical to SEQ ID NO: 385729

SEQ ID NO: 549558 - DNA, 201 bp, Homo sapiens
ctgggctgcaacgcgacctactcatgcactccaggaggggcacttaagcagcctggaggaagatgtgggcaacagtggaggaccaagagaacagacacaatgggacctgggcgggcgttacacagaaggctggctgacatgcccagggctccactctcatctaatgtcacagccctcagaactaaagcggactttctttcc

SEQ ID NO: 549559 - DNA, 201 bp, Homo sapiens
gaaatctgtttgtcggaggggtccgtgccgcgcgcctctttggtttagctggtcatccagagttgttctgtggtctacgggaagaaagaaggaagtccatytcctaacttgttatcaactgagcaatcctgggcaagtcatttaacctctctgggttttaatttccttatctgtaggagatgtgtgcatgccaatttgacg

SEQ ID NO: 549560 - DNA, 201 bp, Homo sapiens
accccagaggcggagcttgcagtgagccgagatcgcaccactgcactccagcctgggtatcagagcaagactgtctcaaaaaaaaaaagtttgtctaaggytggggtgcagtggcatgtgcctgtgatcctatccctttgggagaccgaggtgggaggaatgcatgagcccagtctgagcaacatagcaagaccccatttc

SEQ ID NO: 549561 - DNA, 201 bp, Homo sapiens
tcgcagagctggccacaggcacctagaagcagctgcaggagcaggttccccaagtcatattggccagggtgtttccctccttgtgggtcacagccttactyagcttccttagggtaggattataaggtaaatggcctgggatggggctttagagggaagtagtggctgggagcctgagcccactctaagggttcactttgt

SEQ ID NO: 549562 - DNA, 201 bp, Homo sapiens
agtagagacagggtttcaccatgttggccagtctggtctccaactcctgacctcaggtgatccacccaccttggccttccaaagtgctgagattacaggcrtgagccaccgcacctggccttgaattttatttctaactagcttttttttttttttttttcctttgagacaggatcttgctgtgtaacccaggctagagtg

SEQ ID NO: 549563 - DNA, 201 bp, Homo sapiens
actcctgacctcaggtgatccacccaccttggccttccaaagtgctgagattacaggcgtgagccaccgcacctggccttgaattttatttctaactagcttttttttttttttttttcctttgagacaggatcttgctgtgtaacccaggctagagtgcaatggtgctgtctcagctcactgcaacctctgcctcctggg

SEQ ID NO: 549564 - DNA, 201 bp, Homo sapiens
caagttcctttgcctccctcctggcatcactgtctgcgactcaggccgagggagcctggtctttggagatatccttcgtttggagctgtcttttccctccygggatcccgaagagatcgagttaggatgaaatctgtttgtcggaggggtccgtgccgcgcgcctctttggtttagctggtcatccagagttgttctgtgg

SEQ ID NO: 549565 - DNA, 201 bp, Homo sapiens
gagggaatggactgagggaaagagttgactggctttgtcccaagagaccttgtgattttccccttttgtccagcagctctgccctccttcctctccaggtsaaagagaagcttcacgcagaggccatttccctgctgaagagtggtcgcttctgcgacgtctttgacaaggccctggtcctgtgccagatgcacgacttcc

SEQ ID NO: 549566 - DNA, 201 bp, Homo sapiens
tgggtcacagccttactcagcttccttagggtaggattataaggtaaatggcctgggatggggctttagagggaagtagtggctgggagcctgagcccacyctaagggttcactttgtttccagagaaccttatgaaataagatgatactgatcttggggatatctggtagctcttggtttgtctaggatctaggcagatc

SEQ ID NO: 549567 - DNA, 201 bp, Homo sapiens
ggaaggtttctcccaagtaaggactcagtgagaagggacagggagagggctggacttgttccccagaatccgcctgattttaaaatcctaatgcctggatmctgccaatctcctactcctactccggtgttatgtaggtaacatttctgttttttttttttgagatggagtctcgctctgtcacccaggagtgcagtggcg

SEQ ID NO: 549568 - DNA, 201 bp, Homo sapiens
ccccgcgcggccccgcccactttcccagcagcgggacgctgtcaccccgactcaggagctcctgggcccgcgggctcccggaagctgccgaccacgtgatwcgctggctcagctcacgtgacaaagctcccggaggtgggagccctgggccaaaatggcggcctacctgcagtggcggcgcttcgttttcttcgacaagga

SEQ ID NO: 549569 - DNA, 201 bp, Homo sapiens
tgctcaaagggatgaagggtccgctctcaagcattttagctagcgaagttacagtcacatccggcaaactcgcacactgcagatctaggactaccccgcgmggccccgcccactttcccagcagcgggacgctgtcaccccgactcaggagctcctgggcccgcgggctcccggaagctgccgaccacgtgattcgctggc

SEQ ID NO: 549570 - DNA, 201 bp, Homo sapiens
ttttgagatggagtttcgctcttgttgtccaagctggagtgcaatggcgcgatctcgacttactgcaaccttccctcctgggttcacatgattctcctgcytcagtctcccgagtagctgggattacaggcgcgtgccaccacacctggctaattttttgtatttttagtagaaacggggtttcaccatgttagccaggct

SEQ ID NO: 549571 - DNA, 201 bp, Homo sapiens
ctcctgacctcaggtgatccacccaccttggccttccaaagtgctgagattacaggcgtgagccaccgcacctggccttgaattttatttctaactagcttttttttttttttttttcctttgagacaggatcttgctgtgtaacccaggctagagtgcaatggtgctgtctcagctcactgcaacctctgcctcctgggc

SEQ ID NO: 549572 - DNA, 201 bp, Homo sapiens
tcctgacctcaggtgatccacccaccttggccttccaaagtgctgagattacaggcgtgagccaccgcacctggccttgaattttatttctaactagcttttttttttttttttttcctttgagacaggatcttgctgtgtaacccaggctagagtgcaatggtgctgtctcagctcactgcaacctctgcctcctgggct

SEQ ID NO: 549573 - DNA, 201 bp, Homo sapiens
ccctacagcttacaggcttccaagcctacaaactacgggtgacacacctgtaccaactgaagcagcacaatattctggcatctgttggagaagatgaagarggcatcaaccccttggtgagtcccagcagggaaatgggaaagatccagaagcctaggaatgattttttgttggaggatgactagcatttacacttctgag

SEQ ID NO: 549574 - DNA, 201 bp, Homo sapiens
aacgttatgatatcaccttaggaatctgaaagtcaggtgcctgtttcctctcccttctctatctccctctgtgtaaatgattttgtctcatgtctccctgrcagaaaaagagtgagagtgaagtccactttgatgtggagacagccatcaaggtcctccggcaggctggctactactcccatgccctgtatctggcggaga

SEQ ID NO: 549575 - DNA, 201 bp, Homo sapiens
tcttcattctacaaatattgagcctctgtggtgtcccagacactattctgaacagcacaggcaaaaagccttcatggagctttatgttgtagaagagacaracagcaaacatgttaaataggcaaactttttttttttcttttgagatagagtctcactctgtcacccaggctagagtgcagtggcgcgatctcagctcac

SEQ ID NO: 549576 - DNA, 201 bp, Homo sapiens
cagaatccgcctgattttaaaatcctaatgcctggatactgccaatctcctactcctactccggtgttatgtaggtaacatttctgttttttttttttgaratggagtctcgctctgtcacccaggagtgcagtggcgtgatctcggctcactgcagcctcgcctcctgggttccagtgatactcctgcctcagcctcctg

SEQ ID NO: 549577 - DNA, 201 bp, Homo sapiens
gcctgattttaaaatcctaatgcctggatactgccaatctcctactcctactccggtgttatgtaggtaacatttctgttttttttttttgagatggagtytcgctctgtcacccaggagtgcagtggcgtgatctcggctcactgcagcctcgcctcctgggttccagtgatactcctgcctcagcctcctgaatagctg

SEQ ID NO: 549578 - DNA, 201 bp, Homo sapiens
cattttaggaagaaacatgctcaaagggatgaagggtccgctctcaagcattttagctagcgaagttacagtcacatccggcaaactcgcacactgcagawctaggactaccccgcgcggccccgcccactttcccagcagcgggacgctgtcaccccgactcaggagctcctgggcccgcgggctcccggaagctgccga

SEQ ID NO: 549579 - DNA, 201 bp, Homo sapiens
acctccagcctggaggctgggctgcaacgcgacctactcatgcactccaggaggggcacttaagcagcctggaggaagatgtgggcaacagtggaggaccragagaacagacacaatgggacctgggcgggcgttacacagaaggctggctgacatgcccagggctccactctcatctaatgtcacagccctcagaactaa

SEQ ID NO: 549580 - DNA, 201 bp, Homo sapiens
gggtgacagttcacaaggcacatgacatccctcatcttgatctcccggtatccgcgcattttaggaagaaacatgctcaaagggatgaagggtccgctctyaagcattttagctagcgaagttacagtcacatccggcaaactcgcacactgcagatctaggactaccccgcgcggccccgcccactttcccagcagcggg

SEQ ID NO: 549581 - DNA, 201 bp, Homo sapiens; identical to SEQ ID NO: 385751

SEQ ID NO: 549582 - DNA, 201 bp, Homo sapiens
tgaggagaggagtggataagaggagaggcatccacaccacattcattccttcaaccaaacatggaacttctaccaggctctgctaggcctcgttcacagtyacggtacaagatgtagcccccgctctcagggaactctggctggtggaaatacagcatcaaatattctgaaataagttgggggagggccgggtgcggtggc

SEQ ID NO: 549583 - DNA, 201 bp, Homo sapiens
gggtgaccacctgaccaacctccacaggctgggtggcccggaggctgggctgggcgagtatctcttcgaaaggctcactctcaagcacgactaagagcctkctgagcccagcgacttctgaagggccccttgcaaagtaatagggcttctgcctaagcctctccctccagccaataggcagctttcttaactatcctaaca

SEQ ID NO: 549584 - DNA, 201 bp, Homo sapiens
gcctcccgctaaccattgttgcctccatctcttcccgtagggcttctatttcgaccgcgatgatgtggctctggaaggcgtgagccacttcttccgcgaaytggccgaggagaagcgcgagggctacgagcgtctcctgaagatgcaaaaccagcgtggcggccgcgctctcttccaggacatcaaggtaactagtgtgtg

SEQ ID NO: 549585 - DNA, 201 bp, Homo sapiens
cacctgaccaacctccacaggctgggtggcccggaggctgggctgggcgagtatctcttcgaaaggctcactctcaagcacgactaagagccttctgagcmcagcgacttctgaagggccccttgcaaagtaatagggcttctgcctaagcctctccctccagccaataggcagctttcttaactatcctaacaagccttg

SEQ ID NO: 549586 - DNA, 201 bp, Homo sapiens
cccaggatgatctgtgcgggacagaggcagcggcctgtgaggcccaagcaggcgtgtgggtaagggaagaacagcacggccggctgcagagcaagcctcckcggcccggggaccacagcctggcgtgtcacacgtgggacctcaggaggccatacctttaccgagctggagaatgggagtggggggaggagggatgggagg

SEQ ID NO: 549587 - DNA, 201 bp, Homo sapiens
gaggatgtgggttctcagtcacagggtctctggcacccccctctgggtctttaccccctcccatctctgggtctctgtccccatgctctgggtctttgctktccgagcctctgttcccaccccacctttggccctctttctctgggcctctttccacccctggcacccagacctctggccccctctctctgggtctctgtc

SEQ ID NO: 549588 - DNA, 201 bp, Homo sapiens
gtccgctgccccacgccgggcccgccgtctgctggcctagagatacctgcttgggccactcagggacgtggggctctctgcactcacttgacatctttttytggggtgccctgtggggtctgtgggttagggatgagttggtcctgggcctgacctgcaggagctcacgggaaaggaaaagaagggagctcacgggaaagg

SEQ ID NO: 549589 - DNA, 201 bp, Homo sapiens
ttccgagcctctgttcccaccccacctttggccctctttctctgggcctctttccacccctggcacccagacctctggccccctctctctgggtctctgtccccccctctggatctctggccccccatctctctctgggtctgtcccccgaccctgagtttctgtctccctctctctgggtctctgtcctctctctggctg

SEQ ID NO: 549590 - DNA, 201 bp, Homo sapiens
ccatctggaagaagatgggctgaggcccccagctgccttggactgtgtttttcctccataaattatggcatttttctgggaggggtggggattgggggacrtgggcatttttcttacttttgtaattattggggggtgtggggaagagtggtcttgagggggtaataaacctccttcgggacacacttcggcatctgagtc

SEQ ID NO: 549591 - DNA, 201 bp, Homo sapiens
ttgtggcctgggcctctgacccccaacgactcttgggaaatgtaggtttagttctatgtgccgagtgtgtgtattctgagccatttctcccttctatatasaagccagctgaagatgagtggggtaaaaccccagacgccatgaaagctgccatggccctggagaaaaagctgaaccaggcccttttggatcttcatgccc

SEQ ID NO: 549592 - DNA, 201 bp, Homo sapiens
gccatttctcccttctatatagaagccagctgaagatgagtggggtaaaaccccagacgccatgaaagctgccatggccctggagaaaaagctgaaccagscccttttggatcttcatgccctgggttctgcccgcacggacccccatgtacgtacccgctgcatccatggctacccaaccatacccctcaagcctctgct

SEQ ID NO: 549593 - DNA, 201 bp, Homo sapiens
agtgaagcttatcaagaagatgggtgaccacctgaccaacctccacaggctgggtggcccggaggctgggctgggcgagtatctcttcgaaaggctcactytcaagcacgactaagagccttctgagcccagcgacttctgaagggccccttgcaaagtaatagggcttctgcctaagcctctccctccagccaataggca

SEQ ID NO: 549594 - DNA, 201 bp, Homo sapiens
gcttatcaagaagatgggtgaccacctgaccaacctccacaggctgggtggcccggaggctgggctgggcgagtatctcttcgaaaggctcactctcaagyacgactaagagccttctgagcccagcgacttctgaagggccccttgcaaagtaatagggcttctgcctaagcctctccctccagccaataggcagctttc

SEQ ID NO: 549595 - DNA, 201 bp, Homo sapiens
caagcacgactaagagccttctgagcccagcgacttctgaagggccccttgcaaagtaatagggcttctgcctaagcctctccctccagccaataggcagmtttcttaactatcctaacaagccttggaccaaatggaaataaagctttttgatgcagctggtggttttgtgtgtggtgtggaagatgaggtgggatctgt

SEQ ID NO: 549596 - DNA, 201 bp, Homo sapiens
acgggaaaggaaaagaagggagctcacgggaaaggaaaagggagctcacgggaaacgagggtgataggtggtacatctgtcgcagcccaggatgatctgtrcgggacagaggcagcggcctgtgaggcccaagcaggcgtgtgggtaagggaagaacagcacggccggctgcagagcaagcctcctcggcccggggaccac

SEQ ID NO: 549597 - DNA, 201 bp, Homo sapiens
cacgactaagagccttctgagcccagcgacttctgaagggccccttgcaaagtaatagggcttctgcctaagcctctccctccagccaataggcagctttyttaactatcctaacaagccttggaccaaatggaaataaagctttttgatgcagctggtggttttgtgtgtggtgtggaagatgaggtgggatctgttctc

SEQ ID NO: 549598 - DNA, 201 bp, Homo sapiens
gcgactgatgtccctgtctccaggacggcctcctctcctactttgggacgcccacgtggcagaccgtgaccatctttgtggcgggagtgctcaccgcctcrctcaccatctggaagaagatgggctgaggcccccagctgccttggactgtgtttttcctccataaattatggcatttttctgggaggggtggggattggg

SEQ ID NO: 549599 - DNA, 201 bp, Homo sapiens
gatgggtgaccacctgaccaacctccacaggctgggtggcccggaggctgggctgggcgagtatctcttcgaaaggctcactctcaagcacgactaagagmcttctgagcccagcgacttctgaagggccccttgcaaagtaatagggcttctgcctaagcctctccctccagccaataggcagctttcttaactatccta

SEQ ID NO: 549600 - DNA, 201 bp, Homo sapiens
ggattacaggcgtgagccactgcgcccggcctacaacattctttttaaaaaatgtattgtgggtacatagcagatgaatatatttatgaagtgcataagayattttggtacaggcatgcaatgtataataatcccatcatggaaaatggggtgtccatcccctcaagcatttatcttttgtgttacaaacaatccattata

SEQ ID NO: 549601 - DNA, 201 bp, Homo sapiens
ttacaggcatgagccactgcgcccggccttaagtaactctgagaattattatatgtgatacgtgaaaatgagtgaatgaatgaatgaatgaatgaatgaadatttaacacttaaggtacttggtacttggtaaagcaatacttaagtgtcagctataattattatctgtaaaatggagacaataatagtaactacctcata

SEQ ID NO: 549602 - DNA, 201 bp, Homo sapiens
agcctaagagttcaaggctgcagtgagccatgatcatgccactgcaccccagcctgggtgacagaccttgactcaaaaaaaaaaaaaaaaaaaaaaaaaaaggccaggcatgatatgatggtgcatgcctataatcccagcactttgggaggccgaggcaggaggattgcttgagcccaggagtttgagatcagcctgggc

SEQ ID NO: 549603 - DNA, 201 bp, Homo sapiens
cgatactcccacctcagcctccctagtagctgagactacaggcatgtaccaccatgctcagcttattttatttatttatttatttatttatttatttattwgagacgaaatctcactctgtcacccgggctggagtgcaatggcacgatctcggctcgctgcaacctctgcctcccgggttcaagtgattcttcttcctca

SEQ ID NO: 549604 - DNA, 201 bp, Homo sapiens
taccacctagagctgacatcaagatgaaaactagatgaatgaggccaggcgcggtggctcacgcctgtaatcccagcactttgtcaggagttccagaccakcctggctaacatggtgaaaccccgtctctactaaaagtacaaaaattagccaggcgtggtggtgggcgcctgtaatcccagccactcgggaggctgaggc

SEQ ID NO: 549605 - DNA, 201 bp, Homo sapiens
acaaagcgcatggccgaaaacaacagaaatggattatcttgcggttctggaggccagaggcctggagtcaagggattggcagggctatacttccactgaargttctaaggaggagcttttattgactctctcttagcttctggtggttgccagcaattcctgaggttctgtggttttttttatggccacatctttgcctcc

SEQ ID NO: 549606 - DNA, 201 bp, Homo sapiens
caccttctgtcttggtgcaggagcaactagaagcagctctggagttgacccggcaacagctgggccaagccaccagggaggctggggctcccgggagggcytggggtcgccagcgcctcttgcaggaccggctggtcagtgtgagggccaccctctgtcacttgactcaggtgagcacctgggaaggggcctgccctccta

SEQ ID NO: 549607 - DNA, 201 bp, Homo sapiens
attgcaccgttgcactccagcctgggcaacagagcgagactctgtctcgaaaataataataataataataataataataataataataataataataataaaataaataaggcatttcttggccagtggtattggctcatgcctgtaatcccaacactttgagaggccaaggtaggtggatcagttgagtccaggcgttca

SEQ ID NO: 549608 - DNA, 201 bp, Homo sapiens
caattgcatcctcgttttgttttgttttggtttgtttttttgttttgttgttttttgagacagagtctctctctgtcacccaggctggagtgcagtggtgygatctcggctcactgcaacctccgcctcctgggttcaacggattctcctgcctcagcctctggagtagctgggattacaggcgcacgccaccacgcctgg

SEQ ID NO: 549609 - DNA, 201 bp, Homo sapiens
gattgcaccgttgcactccagcctgggcaacagagcgagactctgtctcgaaaataataataataataataataataataataataataataataataataaaataaataaggcatttcttggccagtggtattggctcatgcctgtaatcccaacactttgagaggccaaggtaggtggatcagttgagtccaggcgttc

SEQ ID NO: 549610 - DNA, 201 bp, Homo sapiens
agattgcaccgttgcactccagcctgggcaacagagcgagactctgtctcgaaaataataataataataataataataataataataataataataataataaaataaataaggcatttcttggccagtggtattggctcatgcctgtaatcccaacactttgagaggccaaggtaggtggatcagttgagtccaggcgtt

SEQ ID NO: 549611 - DNA, 201 bp, Homo sapiens
ggggcatggcctctgcgagtcactctgctacaatccagcttctaatccgcccaaaagcggcagccaatcggagcgcgaggacgtggtctggaggtaccgcyggagatctgggaccactcagggcatcagggggcgtggtctggtccccattgcgggcccgggaggggaatggtttctatggccaaagtttggttttctcaa

SEQ ID NO: 549612 - DNA, 201 bp, Homo sapiens
gcaggaggagatagaccagaagcaggaggagaaggtgcggggccctgggccaaggacagggcgcctggcctctctgcctgccctgagcccttcctgaatgyggaagtcaggatgctgactggacgtccaggacgtgaaaggacatcttttctttcttcttggggctaggcatggcttctgaagtctaaccaccttctgtct

SEQ ID NO: 549613 - DNA, 201 bp, Homo sapiens
gcctgtgtccaccctcaccccctcccaggaccatcctaggctctccctgttcacttctgtccccttctctcctcagaagcccacccgggcagtaaacaagrtccacgcctttgggaagagaggcaatgcgctcaggagggatcccaaccttcccgtgcacatccgaggctggcttcataagcaggtggggtcagtaggaga

SEQ ID NO: 549614 - DNA, 201 bp, Homo sapiens
tctcaaaaacaaaaacaaaaaaacggaatatgatgtgcttgaacgtggctgagagaggagaacttcaatttgacatttggtcagggaaaattatctctgargtgacatttgagctggctgagcatagtgggtcatgccggtaattcaaacgctttgggaggctgaggcgggcggatcacctgaggtcaggagttcaagacc

SEQ ID NO: 549615 - DNA, 201 bp, Homo sapiens
atttgacatttggtcagggaaaattatctctgaggtgacatttgagctggctgagcatagtgggtcatgccggtaattcaaacgctttgggaggctgaggygggcggatcacctgaggtcaggagttcaagaccagcctggtcaacatggcgaaaccctggctctactaaaaaatacaaaaattagccgggccagcttggg

SEQ ID NO: 549616 - DNA, 201 bp, Homo sapiens
gccctagatccgtagtgatatctttagttcctcaaattcccttggtcaatagcagatcctacttctgcatcaaggaaattgggtgatagtgacgcgcgagwggactacaaatcccgtaatgcatgtgggcggtatgagggcggtgccatgtttaacgtattttagagacacgtgctaggaactacaactcccagaaaggca

SEQ ID NO: 549617 - DNA, 201 bp, Homo sapiens
gggtaagttccctggctgggctgggaggggctctctgggttcacattcctggtgccgcagggcttggcttggggagttggcaggggtggtttgggggtgcrtgtgggagggcgggagacaggtagcctggggcagccggaaggaggcagggaatggggagtccctaagcacagagagggtcaaattcctggcctgagtgca

SEQ ID NO: 549618 - DNA, 201 bp, Homo sapiens
ttggggagttggcaggggtggtttgggggtgcatgtgggagggcgggagacaggtagcctggggcagccggaaggaggcagggaatggggagtccctaagyacagagagggtcaaattcctggcctgagtgcagtgggcaggaataaagaagcccctattctctggcctgggctgcagacagctgccccctcccgcagctg

SEQ ID NO: 549619 - DNA, 201 bp, Homo sapiens
attactggagataaaaggtcttgacaagcgtcaattgcatcctcgttttgttttgttttggtttgtttttttgttttgttgttttttgagacagagtctcwctctgtcacccaggctggagtgcagtggtgcgatctcggctcactgcaacctccgcctcctgggttcaacggattctcctgcctcagcctctggagtagc

SEQ ID NO: 549620 - DNA, 201 bp, Homo sapiens
ccgcccatccttctgtttccccaaggactctggttgttaaggacaaagatccttagcaacggggtctgccagacatagtaaggtcccaaattgcctacacrccgcagctaggaattcagaggcactcccagctctgtccccaccctttgtattttcctaattctaaaccagagtaacaacctcccttgaccctggttgcta

SEQ ID NO: 549621 - DNA, 201 bp, Homo sapiens
tgctccccagctacaatattagaccagatgggccgggagccccccgagggcggcgcttcaccttcaccgtgagtccatccatccatgttgtgcaccaggcratgggaactggagatgagggcgggtagatatctgtcgaggaaactccaagtcctaacaagcactggaatatccattactggagataaaaggtcttgacaa

SEQ ID NO: 549622 - DNA, 201 bp, Homo sapiens
ggtgggagggcccccccgcccagtctgcccttctctctagcatcttggccttctgatccctgtgtgatccttgaccccagcccctctttgcagacagccgygaggagagtgtcctaggcagcgtcctgctccccagctacaatattagaccagatgggccgggagccccccgagggcggcgcttcaccttcaccgtgagtc

SEQ ID NO: 549623 - DNA, 201 bp, Homo sapiens
ttccctctttccctctttcctttctttcttgacggtcttgctctgtcacccaggctggcgtgcagcgacgcaaagtgcagtcttcctgcctcagtctcccyggtagctgggactacaggtgcgctccaccacgtccggctaattttttgatttttttgtagagacgggggcggaaggaggtggaggggggtgtctcattat

SEQ ID NO: 549624 - DNA, 201 bp, Homo sapiens
ccagaaagccctagatccgtagtgatatctttagttcctcaaattcccttggtcaatagcagatcctacttctgcatcaaggaaattgggtgatagtgacrcgcgagtggactacaaatcccgtaatgcatgtgggcggtatgagggcggtgccatgtttaacgtattttagagacacgtgctaggaactacaactcccag

SEQ ID NO: 549625 - DNA, 201 bp, Homo sapiens
cattgccaccttcctggcctctctgtgtctcaggctccagaataattggactaagtctctgcagctaaagtctgcccatatgtggtccatgtctcatccaracctccctaaaacttctcaatctccagcggatagacgagaaaacatgaaggtggattctaggcggaaatgacttgttccagagcatagtttgaaagtggg

SEQ ID NO: 549626 - DNA, 201 bp, Homo sapiens
tcatgtcactgcacaccagcctgggtgacagagtgagaccctgtctcaaaaacaaaaacaaaaaaacggaatatgatgtgcttgaacgtggctgagagaggagaacttcaatttgacatttggtcagggaaaattatctctgaggtgacatttgagctggctgagcatagtgggtcatgccggtaattcaaacgctttggg

SEQ ID NO: 549627 - DNA, 201 bp, Homo sapiens
attatggggccctcccagcccatagtcccagttcagatcccaaaggacctactacagctctggctctggtggccaagggcatctgcttcttggcagtggaygcttgatccccaaattgcttccctacagcctcttccttgcctctgaacacctccctctgcccatcaaaaaaagagtctcggcccggcgcagtggctcacg

SEQ ID NO: 549628 - DNA, 201 bp, Homo sapiens
gcatctgcaacaaaaccagaaagccctagatccgtagtgatatctttagttcctcaaattcccttggtcaatagcagatcctacttctgcatcaaggaaaytgggtgatagtgacgcgcgagtggactacaaatcccgtaatgcatgtgggcggtatgagggcggtgccatgtttaacgtattttagagacacgtgctagg

SEQ ID NO: 549629 - DNA, 201 bp, Homo sapiens
tggtcatgtactcctggccttgagtaatccgcctgcctcggcctcccaaagtgttgggattacaggcgtgagccacctcgcccaaccaggatttttttttwaagatgggatctcattctgtcgcccaggctggactgcagtggtgtgatcatggctcactgcagcctcgaattcttgggctcaagcaatcctcctgcttca

SEQ ID NO: 549630 - DNA, 201 bp, Homo sapiens
taagttcccggggcatctgcaacaaaaccagaaagccctagatccgtagtgatatctttagttcctcaaattcccttggtcaatagcagatcctacttctscatcaaggaaattgggtgatagtgacgcgcgagtggactacaaatcccgtaatgcatgtgggcggtatgagggcggtgccatgtttaacgtattttagag

SEQ ID NO: 549631 - DNA, 201 bp, Homo sapiens
tattttcctaattctaaaccagagtaacaacctcccttgaccctggttgctaagataaagccgctccccagccatgaggcccctcgagttctgagaagtartggctgctcttgattagtgccagaacttgctgtcctatctctcgccatccaatctacccactaatgaaatcctataaggagagacccttctctgacaata

SEQ ID NO: 549632 - DNA, 201 bp, Homo sapiens
tgtcctcctttttacaaggcccgggagtccggattccaagccttctcttcccgcaggcagagcacccgggcatgaggacctacgttttggccgctgacacsttagaagacctgcggggctggctacgggcgctgggccgggcctcccgtgcggagggggacgactagtgagtagaggtccaagccatgctcctgaccctcc

SEQ ID NO: 549633 - DNA, 201 bp, Homo sapiens
gaggtttgccattctcatgtcccactcatcctctccaggtggaaatttggactcccagggagaccctcttcccggtgtgccgctgcctccttcggaccccrcgcgccaggagacccctccccccagatctcccccggtggctaattcgggttccacggggttctctcgccgagggagtgggcgtggaggaggtcccacccc

SEQ ID NO: 549634 - DNA, 201 bp, Homo sapiens
ttttatttatttatttatttatttatttatttatttgagacgaaatctcactctgtcacccgggctggagtgcaatggcacgatctcggctcgctgcaacytctgcctcccgggttcaagtgattcttcttcctcagcctcccaagtagctgggattacaggcgcccgtcactacgcctggctaagttttgtatttttagt

SEQ ID NO: 549635 - DNA, 201 bp, Homo sapiens
ggggtttttttttaaattctctcattaaaattttaattaagcttcaattttgaatgccgttttctcgagctgttatctaatttctgctgtaaagttgtttmtttgtttgtttttaagacagtctcactctgtcgcccaggctggagtgcagtagcgcaatcttggcgcactgcaacctctgccttccaggttcaagtgatt

SEQ ID NO: 549636 - DNA, 201 bp, Homo sapiens
aggcgggcggatcacctgaggtcaggagttcaagaccagcctggtcaacatggcgaaaccctggctctactaaaaaatacaaaaattagccgggccagctygggggtgcctgtaatcccaactacttgggaggctgagacaaggaaaatttgaatctgggaggtggaggttgcagtgagccgaggttgcgccattgcactc

SEQ ID NO: 549637 - DNA, 201 bp, Homo sapiens
gactggctggggatgttggacttctgggttttagggaggagagagctggagacctggaatcccaggtcctggagaggaggggtctgggggccggtgagaaytttttatcttggtgagtaaagagttgggcagggtttgggagttttaggtctcaggcaagaggtgactggggtccgggacacttgggaggaggggaggaag

SEQ ID NO: 549638 - DNA, 201 bp, Homo sapiens
gaagtacaaatcgcaacccttctagagatgcttaagttcccggggcatctgcaacaaaaccagaaagccctagatccgtagtgatatctttagttcctcarattcccttggtcaatagcagatcctacttctgcatcaaggaaattgggtgatagtgacgcgcgagtggactacaaatcccgtaatgcatgtgggcggtat

SEQ ID NO: 549639 - DNA, 201 bp, Homo sapiens
gggggcccgcgtgggatgccgggatcgcccctccggtcctgccacaagacgagggggcatggcctctgcgagtcactctgctacaatccagcttctaatcygcccaaaagcggcagccaatcggagcgcgaggacgtggtctggaggtaccgccggagatctgggaccactcagggcatcagggggcgtggtctggtcccc

SEQ ID NO: 549640 - DNA, 201 bp, Homo sapiens
tttctctggatcagagaggtccaaagagcagcaggggcttggggctcatcttatctatgggtagcagatgttgggcacagtttcagggtatacaaagcagscagactgcatagctaaaaatacctgcttattaagactatgtttaaaacaattggatgtgtagaaatctgagtgtgctgctaccaagcttttaggccaatg

SEQ ID NO: 549641 - DNA, 201 bp, Homo sapiens
ctgaactcatgtgctgctttataggaacacaggtaaagttaaacattgtcagtcactgggtgctatggctcacccctgtaataccagtactttgggaggcsgaggcaggagtaagagaccagcctgggcaacatagcaagactctgtctctactaaaaataaaaataaaaataattagccaggcatggtggtgcgagcctg

SEQ ID NO: 549642 - DNA, 201 bp, Homo sapiens
ggtgagcagaggggaagaggggcgcatctcagaatcaccggaagtgactcgactctccagaggtcgtggtagacccaggctgctcactcccagccccacarccgacctccactctggactccagatgcggagggcgaggagccccgagtgagtagggaggacatggttgtgggcgtggcctaagagaagggcagggccgga

SEQ ID NO: 549643 - DNA, 201 bp, Homo sapiens
agccactgtgcctggcctaaaggttgggtcttgggacgtttctcgcctccctaggccccggtggcccggccccggatgagtgcccaggagcagctggagcrgatgcgcagaaaccaggaatgtggacggcccttccctcgcccgacctccccccggcttctcaccctgggaaggacactgtccccagccagacgccagcct

SEQ ID NO: 549644 - DNA, 201 bp, Homo sapiens
tctctggaaacgccgctggttcgtcctctccggccattgcctcttttattacaagggtcagtggctggctggctggcttggggtgggagggcccccccgcycagtctgcccttctctctagcatcttggccttctgatccctgtgtgatccttgaccccagcccctctttgcagacagccgcgaggagagtgtcctaggca

SEQ ID NO: 549645 - DNA, 201 bp, Homo sapiens
ggccgaaaacaacagaaatggattatcttgcggttctggaggccagaggcctggagtcaagggattggcagggctatacttccactgaaggttctaaggargagcttttattgactctctcttagcttctggtggttgccagcaattcctgaggttctgtggttttttttatggccacatctttgcctccatcatcccatg

SEQ ID NO: 549646 - DNA, 201 bp, Homo sapiens
tatgaggaatgtcatctcttggcctagggtgcctagagaactgtagatatttcaaagaccctgggtaggtattagattcatgtggtggctgtaacaaagckcatggccgaaaacaacagaaatggattatcttgcggttctggaggccagaggcctggagtcaagggattggcagggctatacttccactgaaggttctaa

SEQ ID NO: 549647 - DNA, 201 bp, Homo sapiens
agtcataaataaaatgtctaaatttctccattaattataatatttgccatggctgcttgatcaagagcccattattgatctttctgaagccaagaatgtgsaagttggtctactgaaatttgctaatgcttagaaggaagctgataaggagaggggtcgctaggcttggtggttcatgcctgtaatcccaggacttcagga

SEQ ID NO: 549648 - DNA, 201 bp, Homo sapiens
ggttttttttatggccacatctttgcctccatcatcccatgatgatcttcctttgtgtttttgttgctgtccatctcctcctattaggacaccccatgacrtcgtcgtaacttaacttaaatccgcaaaaacctctttctttctttctttctctttctttttcttttcttttctttctttctttctttttttttttttttt

SEQ ID NO: 549649 - DNA, 201 bp, Homo sapiens
ccccaaaaaacaaaaaaccattgatgcctagttttaaatgcatcttctcactctaagctgctcccactagatctacaatccagacttggcaagaacagacmcatgccagctgcagtggctcacacctgtaatcccagcactttaggaggatgaggcaggtggatcacctgagcccaggagtttgaggctagcctgggcaac

SEQ ID NO: 549650 - DNA, 201 bp, Homo sapiens
cacctgagcccaggagtttgaggctagcctgggcaacatggtgaaactctgtctctactaaaaataaaagtgaaaaaattagctgggcctggttgtgcacrcctgtggtcccagttactcaggaggctgaggtggaaggatcgcttaagcccaagagttcgaggatgcagtgagctatgatcaagccattgcacgccagcc

SEQ ID NO: 549651 - DNA, 201 bp, Homo sapiens
agtaggtaaggaactggagggcgtatcaagggagcaggaaaaaaaaatttgcaaaagcaaaggggagtagcattattattaaagtctcctgaatatggaastacaaatcgcaacccttctagagatgcttaagttcccggggcatctgcaacaaaaccagaaagccctagatccgtagtgatatctttagttcctcaaatt

SEQ ID NO: 549652 - DNA, 201 bp, Homo sapiens
aaaaataaaagtgaaaaaattagctgggcctggttgtgcacgcctgtggtcccagttactcaggaggctgaggtggaaggatcgcttaagcccaagagttygaggatgcagtgagctatgatcaagccattgcacgccagcctgggtgacagagggagggactgtctccaaaaacaaacaaaaagaacagactctcatatt

SEQ ID NO: 549653 - DNA, 201 bp, Homo sapiens
gtcaggagttcaagaccagcctggccaacatagtgaaaccctgtctctactaaaaatacaaaaattagctgggtgtggtggtgcgtgcctgtaatcccagytactcgggaggctgaggcaggagaatcatttgaacctgggaggcagaggttgccgtgagccgagatcatgccactgctctccagcttaagctacagagca

SEQ ID NO: 549654 - DNA, 201 bp, Homo sapiens
cagaaatggctcagaagctctgggtcctggagtaggtaaggaactggagggcgtatcaagggagcaggaaaaaaaaatttgcaaaagcaaaggggagtagmattattattaaagtctcctgaatatggaagtacaaatcgcaacccttctagagatgcttaagttcccggggcatctgcaacaaaaccagaaagccctaga

SEQ ID NO: 549655 - DNA, 201 bp, Homo sapiens
agcccagaaatggctcagaagctctgggtcctggagtaggtaaggaactggagggcgtatcaagggagcaggaaaaaaaaatttgcaaaagcaaaggggartagcattattattaaagtctcctgaatatggaagtacaaatcgcaacccttctagagatgcttaagttcccggggcatctgcaacaaaaccagaaagccc

SEQ ID NO: 549656 - DNA, 201 bp, Homo sapiens
ccggcctggtttatggtctgaatcctattcagactgtattccaatgcctaaatgcttgcaacatggtaataataataattattataatgatcatcattatyccccttttctaatccccgcagagcctgccagagtccttggaactgagctcccctaggtcccccgagactgactgggggcggcctcctggaggcgacaaag

SEQ ID NO: 549657 - DNA, 201 bp, Homo sapiens
gtgattacaggtgcccacaaccaagcctggctaagttttgtatttttagtagaaacggagtttcaccttgttggccaggctggtcatgtactcctggcctygagtaatccgcctgcctcggcctcccaaagtgttgggattacaggcgtgagccacctcgcccaaccaggattttttttttaagatgggatctcattctgt

SEQ ID NO: 549658 - DNA, 201 bp, Homo sapiens
aggcagaggttgcagtgagccaagatcgtgccattgcactccagcctgggcaataagagtgaaactccatctcaaaaataaaataaaataaaataaaatawtttaaaaaaaagaaggcatttcttgtgcttacttgttatcatggatacaaaagcaatcgagcctttcctaggaagagaggagaggcactttttgattctc

SEQ ID NO: 549659 - DNA, 201 bp, Homo sapiens
aaactcctggcttaaaatgatcctccagtctcagtattccaaaacgccaggattacaggagtgaggcaccgcacccagccctaatatgattatatatatawtgcacttagacaccaggcactgttctaagtgccacatatatatggactcaatcctaatatcaaaaagtaaaatgttaatgagccaggcacagtggtgcac

SEQ ID NO: 549660 - DNA, 201 bp, Homo sapiens
gcaggtctgggtggcccccagaaaccgcccccacacactgagcctgactccccatctcccgtgctccagggcgaggagtcctcagagagggaggtaagacrcacataattcctccccaccccaagcttcatgtcccacctgtccttgactcagtctattccccacccacctctttaattcttccttgatcagctaacccac

SEQ ID NO: 549661 - DNA, 201 bp, Homo sapiens
acttggtaaagcaatacttaagtgtcagctataattattatctgtaaaatggagacaataatagtaactacctcataggaattaaatgagagttgagaacmatgcctagcacatgatcagtgcccaataagtgttagctgatattatcattgttattgttggtattggcaaggaagtttctgctgccccagggtgagtggg

SEQ ID NO: 549662 - DNA, 201 bp, Homo sapiens
acagctaggaaccaaggtaagctgtaggtccatcctgtaatccttgcatctgaccatcagggacccccacacttctgggaaacagctaggagtagagcgtyctaaggccatactcagagcagagagagcactgcttgttaagagcattgagattgatttttgtctctgtcgcttctaagctgtgtgactttgggtcagtta

SEQ ID NO: 549663 - DNA, 201 bp, Homo sapiens
gcggccccctgggacccgggcctccatggttttattggtaggtatcctggagtaccctaaatctaccggagccccctcccttcctttcttctctatgaggratgtcatctcttggcctagggtgcctagagaactgtagatatttcaaagaccctgggtaggtattagattcatgtggtggctgtaacaaagcgcatggcc

SEQ ID NO: 549664 - DNA, 201 bp, Homo sapiens
cctccttcggaccccacgcgccaggagacccctccccccagatctcccccggtggctaattcgggttccacggggttctctcgccgagggagtgggcgtgkaggaggtcccaccccctgggggcccgcgtgggatgccgggatcgcccctccggtcctgccacaagacgagggggcatggcctctgcgagtcactctgcta

SEQ ID NO: 549665 - DNA, 201 bp, Homo sapiens
ttcccagagttggggagagaatgttctagatgatgggaggagcggcaggggaagagccagatctggaccatcagtagctcccgctctcctttctccagacrctgctgaccaagttgtgcgggcaggaccggcttctgcggaggctgcaggaggagatagaccagaagcaggaggagaaggtgcggggccctgggccaagga

SEQ ID NO: 549666 - DNA, 201 bp, Homo sapiens
tggcgggatctcggctcactgcaagctccgcctcccgggttcacgccattctcctgcctcagcctcccaagtagctgggactacaggtgcccgccactackcccggctaattttttgtatttttagtagagacggggtttcaccgttttagccgggatggtctcgatctcctgacctcgtgatccgcccgcctcggcctcc

SEQ ID NO: 549667 - DNA, 201 bp, Homo sapiens
ctctggctcccccacttatctccagctccccccgcggccccctgggacccgggcctccatggttttattggtaggtatcctggagtaccctaaatctaccrgagccccctcccttcctttcttctctatgaggaatgtcatctcttggcctagggtgcctagagaactgtagatatttcaaagaccctgggtaggtattag

SEQ ID NO: 549668 - DNA, 201 bp, Homo sapiens
agagactggaagagacagagatcagagggagacacagaaagtgagagtggggagagaggtagtgtaaaaggaagagagagagagagagaccgtaagagacrggagacaaagagacaaaaagtgtgagtgagcaggtgaggagagagattgagaactatgagagacagcagctaagagacaaaggaggcgggagactgccta

SEQ ID NO: 549669 - DNA, 201 bp, Homo sapiens
ttctgacctctggtgatccacccgcctcggcttcccaaaatgctgggattacaggtgtgagccaccacgcctggccaaaagacagttttttttttttttttgagacggagtctcgctctgtcgcccaggctggagtgcagtggcgggatctcggctcactgcaagctccgcctcccgggttcacgccattctcctgcctca

SEQ ID NO: 549670 - DNA, 201 bp, Homo sapiens
ggacgactagtgagtagaggtccaagccatgctcctgaccctccaccctgagtcagtctcgtcatcccaactcctcccctttggggccctgcccccttgartgtccaatcaccagtcttctagctaaggcgcctcgtcttctaggccccacctccagggaacttttccaatcagcaaaagtctttctcccttaagttccgc

SEQ ID NO: 549671 - DNA, 201 bp, Homo sapiens
tgctctgtcgccaaggttagagggcagtggcacgatctcggctcactacaacctctgtctcccgggttcaagcgattctcctgcctcagcctcccgagtarctaggattacaggcacctgccaccacgtccggctgatttttatatttttggtagagatgaggtttcaccatgttgaccaagctggtctcgaactcctgac

SEQ ID NO: 549672 - DNA, 201 bp, Homo sapiens
tgcccccttgagtgtccaatcaccagtcttctagctaaggcgcctcgtcttctaggccccacctccagggaacttttccaatcagcaaaagtctttctccyttaagttccgcccaccaccttgtccgtccccgcccccaagctgacccttcagtcacgcactcagctctgctccaggaatgatcaatattgcacactctct

SEQ ID NO: 549673 - DNA, 201 bp, Homo sapiens
caagcctggccaatatggtgaaaccccatctctactaaaaatacaaaaattaggctgggcgtggtggctcactcctgtaatctcagcactttgggaggccraggtgggcggatcatgaggtcaggagatcgagaccatcctggctaacacggtgaacccccatctctactaaaaaatacaaaaaaaaaaaaattagccggg

SEQ ID NO: 549674 - DNA, 201 bp, Homo sapiens
tcacctgagcccaggagtttgaggctagcctgggcaacatggtgaaactctgtctctactaaaaataaaagtgaaaaaattagctgggcctggttgtgcaygcctgtggtcccagttactcaggaggctgaggtggaaggatcgcttaagcccaagagttcgaggatgcagtgagctatgatcaagccattgcacgccagc

SEQ ID NO: 549675 - DNA, 201 bp, Homo sapiens
gacactcgggagcccagaaatggctcagaagctctgggtcctggagtaggtaaggaactggagggcgtatcaagggagcaggaaaaaaaaatttgcaaaarcaaaggggagtagcattattattaaagtctcctgaatatggaagtacaaatcgcaacccttctagagatgcttaagttcccggggcatctgcaacaaaac

SEQ ID NO: 549676 - DNA, 201 bp, Homo sapiens
cccccagaaaccgcccccacacactgagcctgactccccatctcccgtgctccagggcgaggagtcctcagagagggaggtaagacgcacataattcctcyccaccccaagcttcatgtcccacctgtccttgactcagtctattccccacccacctctttaattcttccttgatcagctaacccacctggtacaagtgtc

SEQ ID NO: 549677 - DNA, 201 bp, Homo sapiens
tgtcactgcacaccagcctgggtgacagagtgagaccctgtctcaaaaacaaaaacaaaaaaacggaatatgatgtgcttgaacgtggctgagagaggagaacttcaatttgacatttggtcagggaaaattatctctgaggtgacatttgagctggctgagcatagtgggtcatgccggtaattcaaacgctttgggagg

SEQ ID NO: 549678 - DNA, 201 bp, Homo sapiens
ctacttctgcatcaaggaaattgggtgatagtgacgcgcgagtggactacaaatcccgtaatgcatgtgggcggtatgagggcggtgccatgtttaacgtmttttagagacacgtgctaggaactacaactcccagaaaggcacgtgcggtacccgggtccccactgtgccagctgtttattttttatttttatttttatt

SEQ ID NO: 549679 - DNA, 201 bp, Homo sapiens
ctgcaccttggttctccccaggtaaatcgctgcttggagaccccaagacccacccccaactccaagttctgcctggaaatccttttagcatttaatcttcrcccacagaatcgaggccccgcccagttgacccttagcctcctttctgtcctttcaatctaagccccttattttagttaagaccatgccctttggggtttt

SEQ ID NO: 549680 - DNA, 201 bp, Homo sapiens
atgtcactgcacaccagcctgggtgacagagtgagaccctgtctcaaaaacaaaaacaaaaaaacggaatatgatgtgcttgaacgtggctgagagaggagaacttcaatttgacatttggtcagggaaaattatctctgaggtgacatttgagctggctgagcatagtgggtcatgccggtaattcaaacgctttgggag

SEQ ID NO: 549681 - DNA, 201 bp, Homo sapiens
tgatatctttagttcctcaaattcccttggtcaatagcagatcctacttctgcatcaaggaaattgggtgatagtgacgcgcgagtggactacaaatcccrtaatgcatgtgggcggtatgagggcggtgccatgtttaacgtattttagagacacgtgctaggaactacaactcccagaaaggcacgtgcggtacccggg

SEQ ID NO: 549682 - DNA, 201 bp, Homo sapiens
agcaaagaggcccatgggaattgtagtccatacgcctgcagggctccagggaccaaactcccttatctcctccttagctgacaaatgatggggtggggaasgatctggtgggagagggacctaacctatgtctccccctttatgcaacctgaggagcgagagagggtttgggacacgtacagtggcctggagcaggagctg

SEQ ID NO: 549683 - DNA, 201 bp, Homo sapiens
cctcagcctcccgagtagctgggcttacaggcatgcaccatcatgcctagctaatatttgtatttttagtagagatggggttttatcatgttggccagggyggtctgaaactcccgacctcaagtgatccacccgcctcggctccctaaaatgctgggattacaggcgtgagccaccgtgcctggcccattcattcattct

SEQ ID NO: 549684 - DNA, 201 bp, Homo sapiens
tgagggaggaggggctgggggcctggactcctgggtctgatggaggaggggctgggaatccggagtcctgggtctgagggaggaggggctgggaatccggrgtcctagcgctgaggtttgccattctcatgtcccactcatcctctccaggtggaaatttggactcccagggagaccctcttcccggtgtgccgctgcctc

SEQ ID NO: 549685 - DNA, 201 bp, Homo sapiens
cagaagcttggctccatcactgattggctggctttcagaagtctttggggtacctgttgggattacttgatcaaatagatttaaaagcacttcttggggcygggaaccgtggctcgtacctgtaatcccagcactttgggaggccgaggcaggcagatcacttgaggtcaggagtttgagaccagattgaccaacatggtg

SEQ ID NO: 549686 - DNA, 201 bp, Homo sapiens
ctttaagtaacaaattcctttcctccctgcaggacagagtgtctgctcagcagcagctgtggatggtggaagacacgctggcaggtctgggtggcccccaraaaccgcccccacacactgagcctgactccccatctcccgtgctccagggcgaggagtcctcagagagggaggtaagacgcacataattcctccccaccc

SEQ ID NO: 549687 - DNA, 201 bp, Homo sapiens
aggacaaagatccttagcaacggggtctgccagacatagtaaggtcccaaattgcctacacaccgcagctaggaattcagaggcactcccagctctgtccmcaccctttgtattttcctaattctaaaccagagtaacaacctcccttgaccctggttgctaagataaagccgctccccagccatgaggcccctcgagttc

SEQ ID NO: 549688 - DNA, 201 bp, Homo sapiens
ctgcagagacacagcccctttctttctctcccccagcccttgatggaggggagccgacctcgcagcagcctgagcctggccagcagcgcctccaccatctmctcgctcagcagcctgagccccaaggtttgagcttcctggcggggatggggaggaaggtggggctctgggccgcccatccttctgtttccccaaggactc

SEQ ID NO: 549689 - DNA, 201 bp, Homo sapiens
attacaggcatgagccaccgcgtctgtccagtcctttcctttcctttcctttccattttcctttcctttcctttcctttttcctttcctttcctttttttytctctctctctctttctttctttctctttctctctttctttctctcccttcccttccctctttccctctttcctttctttcttgacggtcttgctctgtc

SEQ ID NO: 549690 - DNA, 201 bp, Homo sapiens
ctccgtctctggaaacgccgctggttcgtcctctccggccattgcctcttttattacaagggtcagtggctggctggctggcttggggtgggagggccccyccgcccagtctgcccttctctctagcatcttggccttctgatccctgtgtgatccttgaccccagcccctctttgcagacagccgcgaggagagtgtcct

SEQ ID NO: 549691 - DNA, 201 bp, Homo sapiens
gtgtcctaggcagcgtcctgctccccagctacaatattagaccagatgggccgggagccccccgagggcggcgcttcaccttcaccgtgagtccatccatscatgttgtgcaccaggcgatgggaactggagatgagggcgggtagatatctgtcgaggaaactccaagtcctaacaagcactggaatatccattactgga

SEQ ID NO: 549692 - DNA, 201 bp, Homo sapiens
ccatgttggccaggatggtctagatctcttgacctcatgatccacccgcctcggcctcccaaagtgctgggattacaggcgtgagtcacggcgcctggccrccctcttatttatttatgagatggagtcttgctctgttgcccaggctggagtgcagtggtgtgatctcggctcactgcaacctctgcctcccgggttcaa

SEQ ID NO: 549693 - DNA, 201 bp, Homo sapiens
gccaccatgcccagctaatttttgtatttttagtagagatggggtttcaccatgttggccaggatggtctagatctcttgacctcatgatccacccgcctyggcctcccaaagtgctgggattacaggcgtgagtcacggcgcctggccgccctcttatttatttatgagatggagtcttgctctgttgcccaggctggag

SEQ ID NO: 549694 - DNA, 201 bp, Homo sapiens
caggtgtgtgccaccatgcccagctaatttttgtatttttagtagagatggggtttcaccatgttggccaggatggtctagatctcttgacctcatgatcyacccgcctcggcctcccaaagtgctgggattacaggcgtgagtcacggcgcctggccgccctcttatttatttatgagatggagtcttgctctgttgccc

SEQ ID NO: 549695 - DNA, 201 bp, Homo sapiens
cctcagtttccccttctgaagaagggggacgatgatttatagtgcacaactttccttttttgggtgcatccttgtgttctcacctgtgacaagagaatagkgctgttatgaagttcgaaggagtgatatcttgtctatgtccactcgctagtgggcaacccaggtcacctgcacgaccccagcccggggagggccccggcg

SEQ ID NO: 549696 - DNA, 201 bp, Homo sapiens; identical to SEQ ID NO: 169320

SEQ ID NO: 549697 - DNA, 201 bp, Homo sapiens; identical to SEQ ID NO: 169390

SEQ ID NO: 549698 - DNA, 201 bp, Homo sapiens; identical to SEQ ID NO: 169266

SEQ ID NO: 549699 - DNA, 201 bp, Homo sapiens; identical to SEQ ID NO: 169393

SEQ ID NO: 549700 - DNA, 201 bp, Homo sapiens; identical to SEQ ID NO: 169394

SEQ ID NO: 549701 - DNA, 201 bp, Homo sapiens; identical to SEQ ID NO: 169440

SEQ ID NO: 549702 - DNA, 201 bp, Homo sapiens; identical to SEQ ID NO: 169395

SEQ ID NO: 549703 - DNA, 201 bp, Homo sapiens; identical to SEQ ID NO: 169267

SEQ ID NO: 549704 - DNA, 201 bp, Homo sapiens; identical to SEQ ID NO: 169327

SEQ ID NO: 549705 - DNA, 201 bp, Homo sapiens; identical to SEQ ID NO: 169329

SEQ ID NO: 549706 - DNA, 201 bp, Homo sapiens; identical to SEQ ID NO: 169442

SEQ ID NO: 549707 - DNA, 201 bp, Homo sapiens; identical to SEQ ID NO: 169397

SEQ ID NO: 549708 - DNA, 201 bp, Homo sapiens; identical to SEQ ID NO: 169398

SEQ ID NO: 549709 - DNA, 201 bp, Homo sapiens; identical to SEQ ID NO: 169273

SEQ ID NO: 549710 - DNA, 201 bp, Homo sapiens; identical to SEQ ID NO: 169275

SEQ ID NO: 549711 - DNA, 201 bp, Homo sapiens; identical to SEQ ID NO: 169276

SEQ ID NO: 549712 - DNA, 201 bp, Homo sapiens; identical to SEQ ID NO: 169277

SEQ ID NO: 549713 - DNA, 201 bp, Homo sapiens; identical to SEQ ID NO: 169278

SEQ ID NO: 549714 - DNA, 201 bp, Homo sapiens; identical to SEQ ID NO: 169279

SEQ ID NO: 549715 - DNA, 201 bp, Homo sapiens; identical to SEQ ID NO: 169458

SEQ ID NO: 549716 - DNA, 201 bp, Homo sapiens; identical to SEQ ID NO: 169286

SEQ ID NO: 549717 - DNA, 201 bp, Homo sapiens; identical to SEQ ID NO: 169350

SEQ ID NO: 549718 - DNA, 201 bp, Homo sapiens; identical to SEQ ID NO: 169358

SEQ ID NO: 549719 - DNA, 201 bp, Homo sapiens; identical to SEQ ID NO: 169291

SEQ ID NO: 549720 - DNA, 201 bp, Homo sapiens; identical to SEQ ID NO: 169416

SEQ ID NO: 549721 - DNA, 201 bp, Homo sapiens; identical to SEQ ID NO: 169418

SEQ ID NO: 549722 - DNA, 201 bp, Homo sapiens; identical to SEQ ID NO: 169294

SEQ ID NO: 549723 - DNA, 201 bp, Homo sapiens; identical to SEQ ID NO: 169295

SEQ ID NO: 549724 - DNA, 201 bp, Homo sapiens; identical to SEQ ID NO: 169421

SEQ ID NO: 549725 - DNA, 201 bp, Homo sapiens; identical to SEQ ID NO: 169420

SEQ ID NO: 549726 - DNA, 201 bp, Homo sapiens; identical to SEQ ID NO: 169474

SEQ ID NO: 549727 - DNA, 201 bp, Homo sapiens; identical to SEQ ID NO: 169475

SEQ ID NO: 549728 - DNA, 201 bp, Homo sapiens; identical to SEQ ID NO: 169366

SEQ ID NO: 549729 - DNA, 201 bp, Homo sapiens; identical to SEQ ID NO: 169368

SEQ ID NO: 549730 - DNA, 201 bp, Homo sapiens; identical to SEQ ID NO: 169370

SEQ ID NO: 549731 - DNA, 201 bp, Homo sapiens; identical to SEQ ID NO: 169477

SEQ ID NO: 549732 - DNA, 201 bp, Homo sapiens; identical to SEQ ID NO: 169478

SEQ ID NO: 549733 - DNA, 201 bp, Homo sapiens; identical to SEQ ID NO: 169424

SEQ ID NO: 549734 - DNA, 201 bp, Homo sapiens; identical to SEQ ID NO: 169479

SEQ ID NO: 549735 - DNA, 201 bp, Homo sapiens; identical to SEQ ID NO: 169480

SEQ ID NO: 549736 - DNA, 201 bp, Homo sapiens; identical to SEQ ID NO: 169376

SEQ ID NO: 549737 - DNA, 201 bp, Homo sapiens; identical to SEQ ID NO: 169482

SEQ ID NO: 549738 - DNA, 201 bp, Homo sapiens; identical to SEQ ID NO: 169483

SEQ ID NO: 549739 - DNA, 201 bp, Homo sapiens; identical to SEQ ID NO: 169484

SEQ ID NO: 549740 - DNA, 201 bp, Homo sapiens; identical to SEQ ID NO: 169486

SEQ ID NO: 549741 - DNA, 201 bp, Homo sapiens; identical to SEQ ID NO: 169487

SEQ ID NO: 549742 - DNA, 201 bp, Homo sapiens; identical to SEQ ID NO: 169492

SEQ ID NO: 549743 - DNA, 201 bp, Homo sapiens; identical to SEQ ID NO: 169387

SEQ ID NO: 549744 - DNA, 201 bp, Homo sapiens; identical to SEQ ID NO: 169319

SEQ ID NO: 549745 - DNA, 201 bp, Homo sapiens; identical to SEQ ID NO: 270439

SEQ ID NO: 549746 - DNA, 201 bp, Homo sapiens
aacagtcttaattttaatatggttaaactgattagtatttcctatttttttatctactgtgtaagaagacactataatatatgggcattactgagagataytgcccatatgttgtcctcgtaagcaaggagatattttttatctcccatatattacctctcaaacctttgttactttagtttcgagatatagatccagaat

SEQ ID NO: 549747 - DNA, 201 bp, Homo sapiens
tcaacttgacacagagtcttggtaatgattcaaagggaggatgttagagtaaggtatttataaggatttgagataagggtccaactggtttaaaatgagtyaaaatagggaactagtagagactgagaaagggttgtgaatagcttaggtttggtaaacttaggaaatcaacagtcttaattttaatatggttaaactgat

SEQ ID NO: 549748 - DNA, 201 bp, Homo sapiens
agcttttctattcttgtcttttcccagagacagaacctcgcctgtttcctcacaaacccacactgtggcagccttgttaatgcagatggccatggtgaagygtggacagattggaataatatgtccaagtttttccagtatggatggcgatgcaccactaatgagaatacctattcaaaccgtaccctgatgggcaactgg

SEQ ID NO: 549749 - DNA, 201 bp, Homo sapiens
agagtcgtatagtgcaactttgctgtgaccttagtgaacatcccctcttgaggactacaaaaacaaacgtaactttttaaaattattatggagaattttaygtaaaacaaaagtagacaggctagtctaatgaactcccatgtatcattacccagcatcaactatttatgactaatcttacctacttctactttgtcttat

SEQ ID NO: 549750 - DNA, 201 bp, Homo sapiens
gtttcacatccaggtttctaagaaatgataagatacttcacttttccagagtgaaatgtaggagggagcacattctaagtacagctaaaaatttagctcaytgtaacacagtttcactctctgaataaataaagcaaaaaacacagtaaatattctttatccctttttttgttgttgttttaaccaagatttaaatgtcaa

SEQ ID NO: 549751 - DNA, 201 bp, Homo sapiens
gacagttacacctagatctccagtatgagtaccaggcccattggactttgtggcaccagctactctggtcatcatgttgtttggtaacatcagtgcatgcrtctgtcttcacaaaggcagatggtatgagggtagttacctgggatgtcatccttcaatgctgcattattggctttgtttctgcctgtggaaaggcaagtg

SEQ ID NO: 549752 - DNA, 201 bp, Homo sapiens
gtgcttaaatctcctatcttctattcgttcaagaaagagtattgagtgtctattgcgtgccaggccactgtgagggtggttacgatatgtggatgaacaaratgtggcctatgatttcaatgagcctgcagtctggtggggaatgcacagagcaaaacaggcaactctgatatggcagggtgtgtgctctgggagcacaca

SEQ ID NO: 549753 - DNA, 201 bp, Homo sapiens
aaacaaacgtaactttttaaaattattatggagaattttacgtaaaacaaaagtagacaggctagtctaatgaactcccatgtatcattacccagcatcarctatttatgactaatcttacctacttctactttgtcttattgaattaattttggagcagatcttagaaatagaatttaatctataaaaatcttggtgggc

SEQ ID NO: 549754 - DNA, 201 bp, Homo sapiens
aatcaagccactgcactcctgcctgggtgacagagtgagactctatctcaaaaaaaaaaaagaaaaaaaaggtgaataactacatgaatgagtaaacaggwttttttcttcaattttaacaggacttactgtctattccctagaaataagagcaagatcagttactaaaactccttagtgttgactgttttcatttgtctt

SEQ ID NO: 549755 - DNA, 201 bp, Homo sapiens
cctttttttttcttccctcaggatttaagcgagagcctcactggttcccaggacatcaacctgaactggatcctccccgatacaaatgcacagaaaagtcmacttacatgaatagctattcaaagccttaaattgggcatcactcaggatgtgtataagatcttaatattgactagtttcacatccaggtttctaagaaat

SEQ ID NO: 549756 - DNA, 201 bp, Homo sapiens
cactttcctgtcacctcgccctttcaccccctcgggaagatcaaagtgtctttagcccaagcatggccttgagcgacttcatcacacctgcatgaggtcayaagcagtcactagcgcaggggggtgaggcgagttctgggtgaaagaaacggggcggggctgaggccaaggaagaggttggactgtgtctcgcatgctcct

SEQ ID NO: 549757 - DNA, 201 bp, Homo sapiens
ctacttgggaggctgaggcaggagaattgcttgaacccaggaagcagaggttgcagtgagctgagacggtgccattgctctccagcctgggcgacaagagygaaactccgtctcaaaaaaaaaaaagaaaagaaaaagaaaaaaaaaatcttggtatactggctgggcacagtggctcacacctaatcccagcactttggg

SEQ ID NO: 549758 - DNA, 201 bp, Homo sapiens
agtatggatggcgatgcaccactaatgagaatacctattcaaaccgtaccctgatgggcaactggaaccaggaaagatatgacctgaggaatatcgtgcascccaaacccttgccttcccaggtaatctaactttgtcttttttgtttgtttgtttccttctgttggcaaaagaaatgtagtggccatttgaaatgcaggg

SEQ ID NO: 549759 - DNA, 201 bp, Homo sapiens
aaaaatcacaaatttgtgactcgaacattatgatagtaatacaaaataaatagcattaaaggagaatgagaacataaattttgcaatgctgcctccttttyttttctgttatgatgtccttgatcatcacttttccaccttggatgaccctcttacagagccagggtaatggaagttgctctgttaaaagacatgaagtgc

SEQ ID NO: 549760 - DNA, 201 bp, Homo sapiens
acttaaactatttccagaagcttcaaaaggtcaatgcaaccaacttccaggccctggctgcagagtttggaggcgaatcattcacttcaacattccaaacwcaatcaccaccatctttttacagggtgagcctggggaaggggatgggattgtttggtttagtttttactctcacagcagacagctgacaaggtaactttg

SEQ ID NO: 549761 - DNA, 201 bp, Homo sapiens
tttgccaacatctgggcacaccctttgcccagacacgagtggggaaagcagttctttctcctcagtttccaaagtaaatggggaatcccagctttcttttytactagcaaatgaccctaccatttatttctgcctttttcttccgttcattgtgaggaaaaataaaactggttgagagctttgttgtactaattccagcag

SEQ ID NO: 549762 - DNA, 201 bp, Homo sapiens
agcttccctctggactgtagaggagctaactgtttggaacagaaaactgctggctgttgattttgtctggttcctttgccaacatctgggcacaccctttscccagacacgagtggggaaagcagttctttctcctcagtttccaaagtaaatggggaatcccagctttcttttctactagcaaatgaccctaccatttat

SEQ ID NO: 549763 - DNA, 201 bp, Homo sapiens
tcactaaaccttgcaaagcctagattgtcttatcagtcatttgttaatcaaataattttttaccttccaagagctaatttatgttagcaaccaatgtttgyttaaagtgagctgacataatttgtcaagtctattcaccctgcctgattactgaaattaacatgatgtcatgaataccgcttatatccttttttaaaaaaa

SEQ ID NO: 549764 - DNA, 201 bp, Homo sapiens
tttaaagagctctatccagtttctttttcatatacaaatataatatgaaatcatctttatctttcatagtatttgtgtttggcatttttaacattactgtktcagtctgcctcatttagttataataacacccttgaagacagaaaatcttctgtcctaaacatattcggcccaataactactttttattaattgattctt

SEQ ID NO: 549765 - DNA, 201 bp, Homo sapiens
tcgattcctataccagtgccagtctatacaggtaagtcatggctcataaaggatcactaaaccttgcaaagcctagattgtcttatcagtcatttgttaaycaaataattttttaccttccaagagctaatttatgttagcaaccaatgtttgtttaaagtgagctgacataatttgtcaagtctattcaccctgcctgat

SEQ ID NO: 549766 - DNA, 201 bp, Homo sapiens
tcttccactaagctacattgccttccttattactgaataatgcttaagaaacaatggcttagtacttggtgattgactataggcaaccatcaggcaattcragcagatgcttctttacccttctgcaggctataaactgtacttcctgctgtctcataccagtttccctggagatccaggtattgtgggcatatgtaggtc

SEQ ID NO: 549767 - DNA, 201 bp, Homo sapiens
cattataccaaattttttactctgaaactcagttctgagaattttctattattattacatgattaacaatttccttcccactcttttctctgatatctctttttttttttttttttttggcactcctattaatctgttagggtgtcgctagattgaatctctatttttcttttctctcgttgtctatctccttatcttttt

SEQ ID NO: 549768 - DNA, 201 bp, Homo sapiens
tcccagctacttgagaggctgaggcaggagaatcgcttgaacctgggaggcaaaggttgcagtgagccgagatcgtgcccctgcactccagcctgggtgasagtgcgagacttcgtctcaaaaaaaaaaaaaaaaaagatcaggaataataacatagtcttattgtgaacttttgtgttcttccactaagctacattgcct

SEQ ID NO: 549769 - DNA, 201 bp, Homo sapiens
caataatgtcagctataaagatttgctccaaaaattgaatatatgtcctctccccattataaaattcctgaaggaaaactaaagtcctaatagtaaatccttttgtaagtttaagtcaaaagaaagtttattatttattcataggtaatatgttcttatccattttctttctctgattagtctcagccagtcttcgatgcc

SEQ ID NO: 549770 - DNA, 201 bp, Homo sapiens
tgcagtgaactgaaatcacaccactgtactccagcctgggcaacagagcgagactccatctcaaaaaaaaaaagatcagaggtcgggtgtggtgggtctcrcctgtaatcccagcactttgggaggccaaggcaggcaaatcacaaggtcaggagttcaagaccagcctggccaacatggtgaaaccctgtctgtactaaa

SEQ ID NO: 549771 - DNA, 201 bp, Homo sapiens
aataatgtcagctataaagatttgctccaaaaattgaatatatgtcctctccccattataaaattcctgaaggaaaactaaagtcctaatagtaaatccttttgtaagtttaagtcaaaagaaagtttattatttattcataggtaatatgttcttatccattttctttctctgattagtctcagccagtcttcgatgcct

SEQ ID NO: 549772 - DNA, 201 bp, Homo sapiens
ccagccttgtctccatagataatgcatttgtcatagaaggaagagtataagaaatcatgcccacttgaagcctttttttttttgagatggagtctcactgygttgccctggctcgagtgtggtggcatgatctcggttcactgcaacctccaccccccgggttcaagggattctcctgcctcactcagcctcccgagtagc

SEQ ID NO: 549773 - DNA, 201 bp, Homo sapiens
ataatgtcagctataaagatttgctccaaaaattgaatatatgtcctctccccattataaaattcctgaaggaaaactaaagtcctaatagtaaatccttttgtaagtttaagtcaaaagaaagtttattatttattcataggtaatatgttcttatccattttctttctctgattagtctcagccagtcttcgatgcctg

SEQ ID NO: 549774 - DNA, 201 bp, Homo sapiens
cttaagatttgcaccctgtatattatgcttcaataaaaatattttttaaaattagttacttggcatgtttttcttttatctaaacgctttttcttttaaawaacattttagcaaacttaaactatttccagaagcttcaaaaggtcaatgcaaccaacttccaggccctggctgcagagtttggaggcgaatcattcactt

SEQ ID NO: 549775 - DNA, 201 bp, Homo sapiens
gtccctgctgttctcctaggttccaagaagcatgactgatccacagaatatggaggtatgatgctgttgtaccaggaaaaaagaaaaagaatatttggctyctctgcatctgaggcaattttagtctaagttgtactgttgaaagataaatgtaagcgtgatgtagcaaacaattaagtagggatctaaaacggtgccttt

SEQ ID NO: 549776 - DNA, 201 bp, Homo sapiens
taatgtcagctataaagatttgctccaaaaattgaatatatgtcctctccccattataaaattcctgaaggaaaactaaagtcctaatagtaaatccttttgtaagtttaagtcaaaagaaagtttattatttattcataggtaatatgttcttatccattttctttctctgattagtctcagccagtcttcgatgcctgg

SEQ ID NO: 549777 - DNA, 201 bp, Homo sapiens
catgtccggctaattttttgtatttttagtagagatggggtttcagtatgttggccaggctggtctcgaactcctgacctcaggtgatccacctgcctcgrcctcccaaagtgctgggattataggcctgagccaccatgcctggctgagcttcctattttcattacaaattgctgatcatacacattcttgaccatcaat

SEQ ID NO: 549778 - DNA, 201 bp, Homo sapiens
cacctagcggaaggaaggcgcaagggcttcttcgtcactgacggttgccaggcaacggaggcacggcccggcccgcgttaaggaggagggcgcagaccgarggacactgaaagagctgtaacaaccccactttcgattggttgaagagctctcagccttctcatgagccaatgagaagaggcacgcggatggcgtcagacg

SEQ ID NO: 549779 - DNA, 201 bp, Homo sapiens
tgtcagctataaagatttgctccaaaaattgaatatatgtcctctccccattataaaattcctgaaggaaaactaaagtcctaatagtaaatccttttgtaagtttaagtcaaaagaaagtttattatttattcataggtaatatgttcttatccattttctttctctgattagtctcagccagtcttcgatgcctggctg

SEQ ID NO: 549780 - DNA, 201 bp, Homo sapiens
tttctcttattcatttaagccatgaaaaaatagccagatagatattttgccatctcagttcaccttctttcttagcttaactttaacttttatttcatgtrtaaagatacaaataactgcattttacatgaggtaaatatctcctccatgtggttttcagggtatgagttccgaaggaaatgtttaaatagctcttggaag

SEQ ID NO: 549781 - DNA, 201 bp, Homo sapiens
gtcagctataaagatttgctccaaaaattgaatatatgtcctctccccattataaaattcctgaaggaaaactaaagtcctaatagtaaatccttttgtaagtttaagtcaaaagaaagtttattatttattcataggtaatatgttcttatccattttctttctctgattagtctcagccagtcttcgatgcctggctgg

SEQ ID NO: 549782 - DNA, 201 bp, Homo sapiens
tcagctataaagatttgctccaaaaattgaatatatgtcctctccccattataaaattcctgaaggaaaactaaagtcctaatagtaaatccttttgtaagtttaagtcaaaagaaagtttattatttattcataggtaatatgttcttatccattttctttctctgattagtctcagccagtcttcgatgcctggctgga

SEQ ID NO: 549783 - DNA, 201 bp, Homo sapiens
ctataaagatttgctccaaaaattgaatatatgtcctctccccattataaaattcctgaaggaaaactaaagtcctaatagtaaatccttttgtaagtttaagtcaaaagaaagtttattatttattcataggtaatatgttcttatccattttctttctctgattagtctcagccagtcttcgatgcctggctggagtta

SEQ ID NO: 549784 - DNA, 201 bp, Homo sapiens
taaaccttgcaaagcctagattgtcttatcagtcatttgttaatcaaataattttttaccttccaagagctaatttatgttagcaaccaatgtttgtttamagtgagctgacataatttgtcaagtctattcaccctgcctgattactgaaattaacatgatgtcatgaataccgcttatatccttttttaaaaaaaatct

SEQ ID NO: 549785 - DNA, 201 bp, Homo sapiens
aaccttgcaaagcctagattgtcttatcagtcatttgttaatcaaataattttttaccttccaagagctaatttatgttagcaaccaatgtttgtttaaartgagctgacataatttgtcaagtctattcaccctgcctgattactgaaattaacatgatgtcatgaataccgcttatatccttttttaaaaaaaatctga

SEQ ID NO: 549786 - DNA, 201 bp, Homo sapiens
tataaagatttgctccaaaaattgaatatatgtcctctccccattataaaattcctgaaggaaaactaaagtcctaatagtaaatccttttgtaagtttaagtcaaaagaaagtttattatttattcataggtaatatgttcttatccattttctttctctgattagtctcagccagtcttcgatgcctggctggagttag

SEQ ID NO: 549787 - DNA, 201 bp, Homo sapiens
agtgcccacgtctttggagctgcagcgagggacggatggcggaaccctccagtccccttcagaggcgactgcaactcgcccggccgtgcctggactccctmcagtggtccctactctcgtgactccctcggcccctgggaataggactgtggacctcttcccaggtgagggaaaacgttgtgggggtggaaacttacttct

SEQ ID NO: 549788 - DNA, 201 bp, Homo sapiens
gttgaagagctctcagccttctcatgagccaatgagaagaggcacgcggatggcgtcagacgctatgcgactcctcccacccacgctctggcaatgcgatkggagaccgcggaggcctacgtcggacccggaggccctgaatgccccatgcgcaccccacagctcgcgctcctgcaagtgttctttctggtgttccccgat

SEQ ID NO: 549789 - DNA, 201 bp, Homo sapiens
tgtttggtttaacataccgtactaatataggtatattattatgttagcattggactgcagcctccatggtgtttaattataggttgaagaaggcagactgyagccacttgcagcaggagatttatcagactcttcatggaaggcccagaccagagtatgttgccatctttggtaatgctgacccagcccagaaaggagggt

SEQ ID NO: 549790 - DNA, 201 bp, Homo sapiens
attaatagatacaagacaaaataccgccttcagttttagttaatttgcttcttttcgttgctagttccaggttcctgtaatacttacctcacaggctaatkctcctctgttggctggaaacacttgtcagaatgtagtttctcaggtagggatactgacctcagattctggactgatgtgtgttaatcaacactgccagag

SEQ ID NO: 549791 - DNA, 201 bp, Homo sapiens
tatccattttctttctctgattagtctcagccagtcttcgatgcctggctggagttaggaatccctcggcagcttcagcccaggctggccatccttgtaaygtatgtggttctttcagtgcctcagaagttatatttatcctatgccaagtccctcatgagcctcactatgttaaaaaaaaaaaaaaaaggctgggcatgg

SEQ ID NO: 549792 - DNA, 201 bp, Homo sapiens
aatgtcagctataaagatttgctccaaaaattgaatatatgtcctctccccattataaaattcctgaaggaaaactaaagtcctaatagtaaatccttttrtaagtttaagtcaaaagaaagtttattatttattcataggtaatatgttcttatccattttctttctctgattagtctcagccagtcttcgatgcctggc

SEQ ID NO: 549793 - DNA, 201 bp, Homo sapiens
cagatttcagttttccctatgagaaactctgaggcagccacttatcttggctaaatagaacctcacctgctcatgaccagagagcatttaggataatagakgacctaactgaaggaatccttgtatatgaaaggagttattttagaaaagcaataaaaatattttattcatcatagctctctgctttgggctctgcaggcc

SEQ ID NO: 549794 - DNA, 201 bp, Homo sapiens
cgactcctcccacccacgctctggcaatgcgattggagaccgcggaggcctacgtcggacccggaggccctgaatgccccatgcgcaccccacagctcgcrctcctgcaagtgttctttctggtgttccccgatggcgtccggcctcagccctcttcctccccatcaggggcagtgcccacgtctttggagctgcagcgag

SEQ ID NO: 549795 - DNA, 201 bp, Homo sapiens
taggctggtgcagtggtgcacacctgtaatctcagcactttggcaggctgaggtgggaggatcacttgagcctaggaattcgagaccagcccaggcaacayagtgagaccccatctctacaaaacatcaaaaaattagctgggcatggtggcatgcacctgtattcctagctactcaggaggctgaggtgggaggattgct

SEQ ID NO: 549796 - DNA, 201 bp, Homo sapiens
ctgataaagttcttatatatgtaaaataaggaactcttacagctcattaatgagttagacacttgtaccaaagatgaatttgttctagttgatagtctgartgcagctacaaaaacacacctaaaagttagtatccacaattttttctttaatagtttttatttgtactgattttacgtagggtattaacatataatggtt

SEQ ID NO: 549797 - DNA, 201 bp, Homo sapiens
atacaatgacaaactaaaaatgggcaaaagatttgaacagatacttcagcctggtgcagtggctcacacctgtaatcccagcactttgagaagctgagatragcggatcacttgaggtcaagagtttgacaccagcctggccaacatggtgaaactccatctctactaaaaacacaaaaatttgctgggcatggcgacgca

SEQ ID NO: 549798 - DNA, 201 bp, Homo sapiens
acatggacatttacaacacactttatttattcattcattcattcattcattcattcattcattctagagatggggtctcgctctgtcactctggctggagkcaaatatgctttattaaataaagtctaacattcataatagaaatcaccatatctgattgtgttaaattaaaagagacttgtagatataacatacagatac

SEQ ID NO: 549799 - DNA, 201 bp, Homo sapiens
gaaataatatcattggctttgtatatgaaagcgctctacaactgtagagtacaataaagattagaggttattattattggggatggttagtggacttagaratttgctggtgatggctataacatttctaaagatatgaagctaatctatctttttaaaatgtctatgaagcaaaataatgttcctgcacaaaatggattt

SEQ ID NO: 549800 - DNA, 201 bp, Homo sapiens
gttgctcagactgaatcctaaaggggtttggggcctacaacgggtaacatttggatgtaagaagagttagtctttgtgcctcccacccgtacttccactcytaggacattcccttggtttttcctaggaattgccttttctgattctctagagcagggctggccagtagaataagaccttcgtgtcgtcctataggtgccc

SEQ ID NO: 549801 - DNA, 201 bp, Homo sapiens
tctcccctcatttgtttaaaaaaaaaaatctttattgagtgcttactctgtgccaagtactatgcctggaactagttatagagaggtgaagcagatagacrtcatccatggaaggtctgagacacccctgaggtgaacagttctaatctgtgtagaaattcaccagcagatactgaaggcctgaacttgggtgggagtttg

SEQ ID NO: 549802 - DNA, 201 bp, Homo sapiens
catggtggctcacacctgtaatcccagcactttggaagccgagacagatggatcacttaaggtcaggagtttgagaccggtctggccaaaacggcaaaacsctgtctctattgaaaatacaaaaattagctgggcatggtggcacacgcgtgtaatcccagctactccagaggctgagacaggagaattgcttgaacccga

SEQ ID NO: 549803 - DNA, 201 bp, Homo sapiens
atacctttaagctcttttaggtgtaatatatcatctgtgatggtagaaattttaggcaaaaattctacttagcctatgtttaccatcactaccgccaatatctttgcactgaagtgagagacaaaatgtaaactttctcttattcatttaagccatgaaaaaatagccagatagatattttgccatctcagttcaccttct

SEQ ID NO: 549804 - DNA, 201 bp, Homo sapiens
agtagcttctctctcaaatatgtttatccctaaggaaaaaaaaatggagatatttaaagaaaaattacctttacatggacatttacaacacactttatttattcattcattcattcattcattcattcattcattctagagatggggtctcgctctgtcactctggctggagtcaaatatgctttattaaataaagtctaa

SEQ ID NO: 549805 - DNA, 201 bp, Homo sapiens
accttgcaaagcctagattgtcttatcagtcatttgttaatcaaataattttttaccttccaagagctaatttatgttagcaaccaatgtttgtttaaagtgagctgacataatttgtcaagtctattcaccctgcctgattactgaaattaacatgatgtcatgaataccgcttatatccttttttaaaaaaaatctgac

SEQ ID NO: 549806 - DNA, 201 bp, Homo sapiens
ttcagcccaggctggccatccttgtaatgtatgtggttctttcagtgcctcagaagttatatttatcctatgccaagtccctcatgagcctcactatgttaaaaaaaaaaaaaaaaggctgggcatggtggctcacacctgtaatcccagcactttgggaggccgaggcgggcggatcactaggtcaggagatcgagacca

SEQ ID NO: 549807 - DNA, 201 bp, Homo sapiens
ctgttccatgctcacctctgcctgtttctacttgccctcctctgtccgtaatcaacttatttttcttccctttcagttcctaccaaaaactcacctacccrtgaacccttttaaagagctctatccagtttctttttcatatacaaatataatatgaaatcatctttatctttcatagtatttgtgtttggcatttttaac

SEQ ID NO: 549808 - DNA, 201 bp, Homo sapiens
gtagcttctctctcaaatatgtttatccctaaggaaaaaaaaatggagatatttaaagaaaaattacctttacatggacatttacaacacactttatttattcattcattcattcattcattcattcattcattctagagatggggtctcgctctgtcactctggctggagtcaaatatgctttattaaataaagtctaac

SEQ ID NO: 549809 - DNA, 201 bp, Homo sapiens
ctgatatcaggcagctccccagctaggggaagctagagtcagggtttaggtaggtgtaactgttcagttctgctatcattgactattgctaagatattcattccttgtgtctcactgaaagagaactacataggaccaatatgagataaaggtatatcttgcttagaataattcatttctctcttcagggaaagtaataat

SEQ ID NO: 549810 - DNA, 201 bp, Homo sapiens
tagcttctctctcaaatatgtttatccctaaggaaaaaaaaatggagatatttaaagaaaaattacctttacatggacatttacaacacactttatttattcattcattcattcattcattcattcattcattctagagatggggtctcgctctgtcactctggctggagtcaaatatgctttattaaataaagtctaaca

SEQ ID NO: 549811 - DNA, 201 bp, Homo sapiens
agcttctctctcaaatatgtttatccctaaggaaaaaaaaatggagatatttaaagaaaaattacctttacatggacatttacaacacactttatttattcattcattcattcattcattcattcattcattctagagatggggtctcgctctgtcactctggctggagtcaaatatgctttattaaataaagtctaacat

SEQ ID NO: 549812 - DNA, 201 bp, Homo sapiens
aggatcactaaaccttgcaaagcctagattgtcttatcagtcatttgttaatcaaataattttttaccttccaagagctaatttatgttagcaaccaatgtttgtttaaagtgagctgacataatttgtcaagtctattcaccctgcctgattactgaaattaacatgatgtcatgaataccgcttatatccttttttaaa

SEQ ID NO: 549813 - DNA, 201 bp, Homo sapiens
cacacacacacacacacacacaataataataattaatttttaatgataaaagtcagaaagtggttacttctgggaaagggacagagaatagactggaaagrgacatgaaggagctctgaaatgatggacatactccagaccttgctttgcgtattggctataaagcatatataattggcaaaactcattgaactaaatatt

SEQ ID NO: 549814 - DNA, 201 bp, Homo sapiens
ctaaaccttgcaaagcctagattgtcttatcagtcatttgttaatcaaataattttttaccttccaagagctaatttatgttagcaaccaatgtttgtttmaagtgagctgacataatttgtcaagtctattcaccctgcctgattactgaaattaacatgatgtcatgaataccgcttatatccttttttaaaaaaaatc

SEQ ID NO: 549815 - DNA, 201 bp, Homo sapiens
tcattataccaaattttttactctgaaactcagttctgagaattttctattattattacatgattaacaatttccttcccactcttttctctgatatctctttttttttttttttttttggcactcctattaatctgttagggtgtcgctagattgaatctctatttttcttttctctcgttgtctatctccttatctttt

SEQ ID NO: 549816 - DNA, 201 bp, Homo sapiens
ttctttgagtttacacttaagatttgcaccctgtatattatgcttcaataaaaatattttttaaaattagttacttggcatgtttttcttttatctaaacrctttttcttttaaaaaacattttagcaaacttaaactatttccagaagcttcaaaaggtcaatgcaaccaacttccaggccctggctgcagagtttggag

SEQ ID NO: 549817 - DNA, 201 bp, Homo sapiens
gagttattccaggcaaaactatgttcccagagcttggtacttactgttgccaaagaccacagcaaatgcataatatgttcatcagagtgaaggagggtgawtgaagaaaatcttcaagtttaacaaaataattatttactgtccaaaaattataatcaaaagtttgcttgttgagctgagtcaaaacaaagggaattcatt

SEQ ID NO: 549818 - DNA, 201 bp, Homo sapiens
gttcctttgccaacatctgggcacaccctttgcccagacacgagtggggaaagcagttctttctcctcagtttccaaagtaaatggggaatcccagctttyttttctactagcaaatgaccctaccatttatttctgcctttttcttccgttcattgtgaggaaaaataaaactggttgagagctttgttgtactaattcc

SEQ ID NO: 549819 - DNA, 201 bp, Homo sapiens
agtaaggagagaaatatactttctgatgaagactcatttttacccctttgtaaatcttggatagtaagtttaaaaccagccttgtctccatagataatgcrtttgtcatagaaggaagagtataagaaatcatgcccacttgaagcctttttttttttgagatggagtctcactgtgttgccctggctcgagtgtggtggc

SEQ ID NO: 549820 - DNA, 201 bp, Homo sapiens
ctggaggtggctaagaccctttcctgtcctctgctcaccaccctggttctgtgcttccctaaggtcttgtagggcactccagcgcctgcagaatgaagctkgcattccaagactgattccgcattcaagacacttctcaacatccacctttgtctgagtctgctctctctgtaataggctctcccgtccaaacctttcact

SEQ ID NO: 549821 - DNA, 201 bp, Homo sapiens
agcattagcctctgtaagagcgtgggcaataggggatgcctctccagagttcagggaatagccgcagcaaaagcattcccccggggaaagcactgtaattsagcacttgagttccatagtcggaggagatgaggttaaagtcctgttcgtgcccctactaacggtgtgatcttgggtaagtcaataaaataagtttggcca

SEQ ID NO: 549822 - DNA, 201 bp, Homo sapiens
ataaaataagtttggccaataaaatgagaatcataacactttgcaggctgcgaggattagatcagaaaacgtatccacggtgatcagcctatagcatgatyctttacacatattatttttatgcaggtgactgaaaaccagggaatcaaacagtgggaagtcccagaatagggggaccaaaaggcgggatggggcatccta

SEQ ID NO: 549823 - DNA, 201 bp, Homo sapiens
ggcggcggtctggcctcatctgcttggcgattccggagtagccagaaggccagttccggtcctttctccctcttccaagcggcccagacctaaacttcctrgcttttgctttcgccatttcccccagttctgctctgatgcacacagtccctcccaaccatccaggctccagctgccatctcctctaagaagtcttccctg

SEQ ID NO: 549824 - DNA, 201 bp, Homo sapiens
gctgagtcattactggaacccaggtctcctcttgcccctcatcttgaggactgcctgtgcctcaaagtggggccacacaagatgtggctctggggatgcascattggtgtagggacctgctgggaatgcaaaagaggggagaaggagcggcctgtcagcacctaccttcagctcctgcatggagggctcatggcccagctc

SEQ ID NO: 549825 - DNA, 201 bp, Homo sapiens
ctgggtgcacgatgggcaccgtctgcatggcggggaaggcgggtgtggccagttcccagcgcgcggtgcgcactagctccacagctagcagctggagcacsgcttgcgccagctcctggccgaggcagctgcgcgcaccgccgccgaacgggatgtaatggaagcggctggaggcgccccgggaatcttcgcgcgctgcgc

SEQ ID NO: 549826 - DNA, 201 bp, Homo sapiens
gtgggggaaggaaaggagagagagccatttgtggccagaaacctgcaaagatgggcctaggattcttgccttcagttctcctactgacaaggctggctggwggctgaaggctgcagaggtagtgagtgtggctgagtcattactggaacccaggtctcctcttgcccctcatcttgaggactgcctgtgcctcaaagtggg

SEQ ID NO: 549827 - DNA, 201 bp, Homo sapiens
ccccttcctaaaaccccttatgtttaccccctgcgttgtgtctgggagttgctctggggggaattccagtgacttgaggtcccttcgagggaacggagtakctaggcaaaggcgagagttgtgcgcgcttcccggggtcgtgggcgatgggcagggactggctacaaatcccatgggcattgagactgaggagggtccagt

SEQ ID NO: 549828 - DNA, 201 bp, Homo sapiens
cctaaaaccccttatgtttaccccctgcgttgtgtctgggagttgctctggggggaattccagtgacttgaggtcccttcgagggaacggagtagctaggyaaaggcgagagttgtgcgcgcttcccggggtcgtgggcgatgggcagggactggctacaaatcccatgggcattgagactgaggagggtccagtgggagc

SEQ ID NO: 549829 - DNA, 201 bp, Homo sapiens
aatgattaggtcgagggcatcacccggctctgcagccttgtcctcgtgaagcttctcagaaatggccccctccaggtgccgatgcagctggtcccttgccyggatgccctgatgttcagggagagaagaaagatggggcaggaaggctaagggggccaagcccggccacttacccagaaaaccttctcagcactggctctg

SEQ ID NO: 549830 - DNA, 201 bp, Homo sapiens
gcccagctcccttgcactgtgaatgattaggtcgagggcatcacccggctctgcagccttgtcctcgtgaagcttctcagaaatggccccctccaggtgcygatgcagctggtcccttgcccggatgccctgatgttcagggagagaagaaagatggggcaggaaggctaagggggccaagcccggccacttacccagaaa

SEQ ID NO: 549831 - DNA, 201 bp, Homo sapiens
agagaagaaagatggggcaggaaggctaagggggccaagcccggccacttacccagaaaaccttctcagcactggctctgccaacatccttgtgttaacakcttcccagcttagctcctggcctggcatatggctgggctcagtaaatggtcggggatatgtccactgtccacaaacatcattctgtcttgattatcacaa

SEQ ID NO: 549832 - DNA, 201 bp, Homo sapiens
aggagctccacagccgactcctgcaagacagccccgggctgcactgagtctcgggcggtggagtcgcccggggcgctgacccgacggccccgtggagatgaaaagcacccaaatttactattgcgaaaagccagggggcagggaagtgctattaccgccgcgactgtgtgtacggttttgaagtcgattaaatctcaagtc

SEQ ID NO: 549833 - DNA, 201 bp, Homo sapiens
tatgctagtaaaacatttaatatgtcacttaagaaatttgttgccctcattgtattatatgttcattcttatcacaactgtgataccatgttaatcactgygtattccaaatgaaagaactagtctctactttataaaatgttactcagtacaatcaaagtagatcaggtagatgaatgctcaggttcagggctgaggttg

SEQ ID NO: 549834 - DNA, 201 bp, Homo sapiens
gcgtacatatgcacatgatcttccttatagacatttttcccttagtgttctgtcagtagatgacacctatgttgacctaaaaactaatatcagaaatctgsggattatccttgatactttctttccccttattatttatgtttaatttgtcaccaagtcctgtgaattttacccccagagtatatatttctcaagttctct

SEQ ID NO: 549835 - DNA, 201 bp, Homo sapiens
aggatttattttattttatttttctttattttattttattactttaaattctgggatacatgtgcagaacgtgcaggattgttacatagggtatacatgtrccatggtggtttgctgcacctatcaacccatcaccctcacccttccccgcccaccggctccagtgtgtgatgttcccctccctgtgtccatgtgttctca

SEQ ID NO: 549836 - DNA, 201 bp, Homo sapiens
cttttgtgttgcctgttcttccaattgttatttccttagtaacactcctcccgcccctggcaggttgtaacagttatgatagcaatgatttgtagtgactrccaaccctcagggaaccaggatactatagattcatagggttataagggaccttaaaggtcatttagtccagtcttgtagacttgattctctagggatatc

SEQ ID NO: 549837 - DNA, 201 bp, Homo sapiens
caaatgcaatttttaacatatctttctggaagtgctcttttttcttggagcttcccaaagtctcaaagaacttttcagcctcagttttttacatttttagyattacagtggtgtttcagtaaaaagaattctaatgtcaaatgtaaactggtaatttgtagagtggggctccgtccccattaacttgagaatgccaccaca

SEQ ID NO: 549838 - DNA, 201 bp, Homo sapiens
gggaggctgaggcaggaagattgcttgaggccaggagttcaagaccagcctgggcaatatagtgagactttgtctccacaaaaactaaaaaaaattagccrggtgcagtgatgcatgcctatagttctagctacttgggaggctgaggttagaaggttgcttgagtccaggagtttgaggctgcagtgagctatgatcgtg

SEQ ID NO: 549839 - DNA, 201 bp, Homo sapiens
gaaagtaaaagtattccaggcccacaggtaatataatcagttaaatttggttggcttttgcaaacttacaatacatacataaaattacatgtatgtatatratgtgcatatgtttttaacatatctattatactatgcatactttttgtaactttttaaaaatttgatatagaatggacatttttctattgcagtacatac

SEQ ID NO: 549840 - DNA, 201 bp, Homo sapiens
tcttctcttgccttcattattttattttattatttcttctttttctcttttttagagccaccaatactggatttgtttgtttttcatttttttcttttgtrgaaacggagtcctcctgtgttgcccaggctggtattcaaactcctggccttatgcattcctcccaccctggcctcccagagtgctgggattacaggtgtg

SEQ ID NO: 549841 - DNA, 201 bp, Homo sapiens
ttagtagagatggggtttcaccatgttggccaggctggtcttgaactcctgaccttgtgatctgcctgcctcggcctcccaaagtgctgggattacaggcrtgagccaccacgcctggtcacttggttatttataaacctaagaattaagaaaaaattttttatgactttaaaataatatttattgtggcaaactcaggga

SEQ ID NO: 549842 - DNA, 201 bp, Homo sapiens
tgtctagaacaaagttggtgataaacacacagtgattattactactctgaatcaaaagtgaaggattgctaaaccttgtaagcagtcactgcagcttttargcctggtttttcagtgaaaagatcaaagagtagccttctttgttcacctaatgataattaagggtgaaaaatgttgatgcatttcctgaaaggtatgtct

SEQ ID NO: 549843 - DNA, 201 bp, Homo sapiens
acgcatacgtgaatgagcagactaaggtcacgggaagaaactcaaggaaggtttttttgaattgcaagagacaaaaactcttagcacataaagcctgtgcrttataagcaggatacgtcttggtggagctgctgtgcgtaggagcattgttcttagctttcagtgcatagaaactcagttttatactttgactcaggagtg

SEQ ID NO: 549844 - DNA, 201 bp, Homo sapiens
ttttaaatttttcatattgtgattattagaatgagtggtggtaggaggctatatgcagttcagcaatagaataagaagctctatttctccccagatggagrtatatttttatcacaagagtagtatatgcttgaaaaatagtcaaaagaaagcctgtactttacaatcttcactttcaacaatttaatatatacccttcta

SEQ ID NO: 549845 - DNA, 201 bp, Homo sapiens
tcatttgatctcattagaaccagggttgatttaataattttttcagtagtgcctttaatatgtgtgttgcttcacagtttcttatagaaaatagtaataaygttcattttgtataccctatttataaacccgtgcacttaatttatccccagaactgctgtttcttatgaactagttatggactctggttcacagctgtct

SEQ ID NO: 549846 - DNA, 201 bp, Homo sapiens
atatatctctaaacacactacagctgtcccccatcaagatgtaaagaacgtgaggacataggacaaagagtgagaggacaatatggcttgaacagatgtgrtaagacagctggagttgacctaaaaaagggtgtaaaatccaggtgtgtaaggcaataacagatgtaagggagggtagagttggaactcgggctttcaaac

SEQ ID NO: 549847 - DNA, 201 bp, Homo sapiens
tccctgagtgaaccacttttaatagttaatatccagatattccatgcacatgtaagtaatagttctcttaaaacattaatatttatgtagtatgtattctktgacatcacttgaaagtagcaaaccatggttgagtttctaaatgtataatatttatattttcatgggtctagggagaagagacttgctaagaaatactat

SEQ ID NO: 549848 - DNA, 201 bp, Homo sapiens
agaaagaaacaaatacaattataatttgtatttactatggtcgtatacagaacttatagaaagtaattatttgtgtcagtgttaagacttcattatcttayagaatgattttaattaatatacaagcataaaatatttacagtctcacttaacgttccttattatataaatcacatttaaaaaataagtattttaactgat

SEQ ID NO: 549849 - DNA, 201 bp, Homo sapiens
ggcaggaagattgcttgaggccaggagttcaagaccagcctgggcaatatagtgagactttgtctccacaaaaactaaaaaaaattagccgggtgcagtgrtgcatgcctatagttctagctacttgggaggctgaggttagaaggttgcttgagtccaggagtttgaggctgcagtgagctatgatcgtgccactgcatt

SEQ ID NO: 549850 - DNA, 201 bp, Homo sapiens
atttaggaacttgttagcaactcacaatctcagacccttccagatctactaacaagttcccagggcgaatcatatgcactaaagtttgagagaggcactgytgtatattatgtgattgttctgcattggttcaacatttccagggaaaaggaacccactactatcaaaaataaagctttacattttcaggtagttgtattt

SEQ ID NO: 549851 - DNA, 201 bp, Homo sapiens
ctcattagaggatgacaggaaagaatacatttcctgtttccttaccctgtagttcttatactcttcatctggtctaaaggggccaaaaactttgggttacraggcctcctatccaggaacattggaggaattgttactgtccatgtgtcacctgcccttttttactttatcatccttcagaaatattttccctgaggtctt

SEQ ID NO: 549852 - DNA, 201 bp, Homo sapiens
agatatctttgatgtgagacacatgttaatgtgcctgtggaacacagtttgtttttggaacaaattgacaacccatttttctaaaatagtgttattttcarttcctcaagctaatatttttattatatgtatgtgtgtatatatttgcatttttgaggtgatgaaggtcagattgttttctttggattgtttgtttaccct

SEQ ID NO: 549853 - DNA, 201 bp, Homo sapiens
ccctgtagttcttatactcttcatctggtctaaaggggccaaaaactttgggttacaaggcctcctatccaggaacattggaggaattgttactgtccatstgtcacctgcccttttttactttatcatccttcagaaatattttccctgaggtcttattgcaggaagctctgtatcgtggtgattttttttttaaattac

SEQ ID NO: 549854 - DNA, 201 bp, Homo sapiens
ttgtgctttttttaccaccaatcagcaatatattatgacaccaaacagctcctaagagaataaaatccttaattttttgcatttcagtatcaaagacatasaaagttcgtaaatgactatattttatactatggtggcaaaaaagaagacttcaagcgtttggggtaagtatcaggaagtttacatagaagggaatgtggg

SEQ ID NO: 549855 - DNA, 201 bp, Homo sapiens
tatatgcagttcagcaatagaataagaagctctatttctccccagatggagatatatttttatcacaagagtagtatatgcttgaaaaatagtcaaaagaragcctgtactttacaatcttcactttcaacaatttaatatatacccttctagattttctgaatgtgtaagcatgtatagtgtgtgaatatttttaaaaag

SEQ ID NO: 549856 - DNA, 201 bp, Homo sapiens
agttaattgtattggcgaataattcaaaatgtgctttaagtataataggtttttaaaaatcatcttttttaaatgaacaggaaactctgatgaggaagaamgtgcttcagaatctgaactttggaagggtccactaccagagacagatgaaaaatcacagtaagtgctgatattaatagagaatatgtaccttttcaatca

SEQ ID NO: 549857 - DNA, 201 bp, Homo sapiens
tttttgccttaatttaaggaaaaacttgtcccttagaactgtctgacaaaaggaatggagaaatgggctgcctctggagtagcgagtgttccagcatggaytggattggcacttattggaggtgttgcagtgaaagttcattcattggataagtgttggattaaatgacctccaggttcccctttcaactcagaaagtcag

SEQ ID NO: 549858 - DNA, 201 bp, Homo sapiens
gttaagttactgaattggagtcattaagatcattcctaacatatacaagaaattattagctacaaaagtaaaattagagaaggtgtattcatgatacattrttagcaaaggtctgaatataatgctttaatgattattacctttatacttttgcctttagaacattcagttgaatgttctgcatatttctaagtatgtaga

SEQ ID NO: 549859 - DNA, 201 bp, Homo sapiens
tattttacaaattaaagatttcatagcaagacaactttcaacaaaaaagaaaggtttatttttttcctttctttattaatttttggaataatgaattggtrttactgtttttcagccaaatccacatttcaaaagtagaagttaaatatcactttaatcccaatagaattttggggcaggctagtactcatttttggaagt

SEQ ID NO: 549860 - DNA, 201 bp, Homo sapiens
agcttcttccaatacaattgagtggcaactgaggtcttccagcatttctaagaatttcagttctaaaatgaagtcccagcattttgggatgctgaggtggrcggattgctcaagcccaggagtttgagaccggcgtgggcaacatggcgaaaccccttatctacaaaaaaaaaatttttttaagtttgccaggtgtgatta

SEQ ID NO: 549861 - DNA, 201 bp, Homo sapiens
aattgatgatgtactgttcacaaatactgtaattctcctggaatatagtaaatcatattccagagaggaaatttggagtaattgaaattgtgggcgcaggmatcaagtacagcagattagccacttactggatttgtaaatagatttacttaactttgattacttcattcctaaatgaagataactttctaacttgcagaa

SEQ ID NO: 549862 - DNA, 201 bp, Homo sapiens
tatacaagttggttgaacatattactctggtcagtttttaaaggctgactatggttaatttgcatattttagaagtacattttaggggtaatactagatcrtatagataaatattatcaccaactaccatagctaatattcctttcctttctgcaggtcaatttttctgtggaaataaatattgtgataaaaaagaaggct

SEQ ID NO: 549863 - DNA, 201 bp, Homo sapiens
atagaataagaagctctatttctccccagatggagatatatttttatcacaagagtagtatatgcttgaaaaatagtcaaaagaaagcctgtactttacartcttcactttcaacaatttaatatatacccttctagattttctgaatgtgtaagcatgtatagtgtgtgaatatttttaaaaagctaaatagactcatat

SEQ ID NO: 549864 - DNA, 201 bp, Homo sapiens
aaaaagtattcacaatgacttataaaaacatacacaataagtttttttaaggttaaaaaagtcagaataatggaaaaataaggtagaatagcaatgtaaarctacaggtgaaatttatacacacaaatgtattccaaaaagtcctgcataattgcagagatagatcacagatttgtcagtgttcttcctaacaaccaaacc

SEQ ID NO: 549865 - DNA, 201 bp, Homo sapiens
tgagaagagaaatgcacttgttaaattaagtaagttgattttagggggtatatgattgattcttccaagtttgtctttaatttaaaaatatatagactttmaaattcaaatgcaatttttaacatatctttctggaagtgctcttttttcttggagcttcccaaagtctcaaagaacttttcagcctcagttttttacatt

SEQ ID NO: 549866 - DNA, 201 bp, Homo sapiens
aggaaatgactatactcacattattattagatatctttgatgtgagacacatgttaatgtgcctgtggaacacagtttgtttttggaacaaattgacaacmcatttttctaaaatagtgttattttcaattcctcaagctaatatttttattatatgtatgtgtgtatatatttgcatttttgaggtgatgaaggtcagat

SEQ ID NO: 549867 - DNA, 201 bp, Homo sapiens
tttttttgtaagacagggtcttgttctgtcacccaggccccaggctggagtgctggaatacagtggcatgatcttggctcactgcagcaggcttaacctcrgaggcccatgtgatcctcctttctcagcctcccaggtaactgggactacaggcctgcactaccatactcagctaattttgttgttgttgttgttgcagag

SEQ ID NO: 549868 - DNA, 201 bp, Homo sapiens
ttcattattttttgttttgtgctggctattacagaccatatgagcacataagatatgatctctgcctaaaagaacgtaacattttaatgagggagataagrctaaggaacatgaaagattagaaaacagtgaagtgcttatctgtaagactataagcaaactagaatattgctaagaattctggttatagctacaatgatt

SEQ ID NO: 549869 - DNA, 201 bp, Homo sapiens
caggtattcattattttttgttttgtgctggctattacagaccatatgagcacataagatatgatctctgcctaaaagaacgtaacattttaatgagggasataagactaaggaacatgaaagattagaaaacagtgaagtgcttatctgtaagactataagcaaactagaatattgctaagaattctggttatagctaca

SEQ ID NO: 549870 - DNA, 201 bp, Homo sapiens
aaaatacattcaagtataagaccagtggaccaatgttatctcaggatgaaatcatagatacatacttcaacaaaggtgtacacaggctaaagtgggagagygtattttagttttcatccatttccaacagtgagaggtgtgaatgcttatgcaatatagaaaaaattcccctttttcagttctaattttttatccttaaaa

SEQ ID NO: 549871 - DNA, 201 bp, Homo sapiens
tattgtttaacacaaaggagaaaagaaatcaagtcaaaaaaaagaaaagataaaaccaaaaaagactgtgaagagtcatcacataaaaaatccagattatyttctgcagaagaggcctccaagaaaaaagataaaggtaaaaggaaattaagataaggcatctactcacatttgtgagcatgaaatataatctgccatatt

SEQ ID NO: 549872 - DNA, 201 bp, Homo sapiens
cctggacaattggcaacatagattctaaatagctgactttgtactcctttacagatgcatggtcatggaggctatgattctgattttagtgatgatgaacrctgtggagaatccagcaaaaggaaaaaaaggtaagtaatttttttttattgatctatttttcacatcctttctagattaatatgaagtataaataaacaa

SEQ ID NO: 549873 - DNA, 201 bp, Homo sapiens
tttcattcaactgtcaaggactgtttatttgtaaatgttgtagctcagaaggggcttgaatggtggtctcttgccattacttgccttcaaagtgaagttartatggaggatgaaagtataatgcagcacagttcttacgcatacgtgaatgagcagactaaggtcacgggaagaaactcaaggaaggtttttttgaattgc

SEQ ID NO: 549874 - DNA, 201 bp, Homo sapiens
ttataataaattacatttttgatgctttacattttctagatttttcattcaaaaatactactttgtaagaatagaatttgagcaaatctagttggatactytgctccaggattatattcatcactataactagggctgacagtctatggcagggtgtccagtcttttggctttcctgggccacatcggaagaagaattgtc

SEQ ID NO: 549875 - DNA, 201 bp, Homo sapiens
gaggctatatgcagttcagcaatagaataagaagctctatttctccccagatggagatatatttttatcacaagagtagtatatgcttgaaaaatagtcamaagaaagcctgtactttacaatcttcactttcaacaatttaatatatacccttctagattttctgaatgtgtaagcatgtatagtgtgtgaatattttta

SEQ ID NO: 549876 - DNA, 201 bp, Homo sapiens
tttacattttctagatttttcattcaaaaatactactttgtaagaatagaatttgagcaaatctagttggatactttgctccaggattatattcatcactrtaactagggctgacagtctatggcagggtgtccagtcttttggctttcctgggccacatcggaagaagaattgtcttgggccacgtactacagtggagca

SEQ ID NO: 549877 - DNA, 201 bp, Homo sapiens
ttccattttcattccattatgcttctactatattcctttattcttaagagtagaaatttctatttactggtggcttagagctgttcagcagtttcttcttmtttgtgtttttttaacatgtaggtggatatggattatgtgaagggaaatgaggcttttttttgtaatttagttttaaatggctaagtgatagaatataga

SEQ ID NO: 549878 - DNA, 201 bp, Homo sapiens
tcactgcgtattccaaatgaaagaactagtctctactttataaaatgttactcagtacaatcaaagtagatcaggtagatgaatgctcaggttcagggctraggttggacccttcgtattatgcgtacatatgcacatgatcttccttatagacatttttcccttagtgttctgtcagtagatgacacctatgttgaccta

SEQ ID NO: 549879 - DNA, 201 bp, Homo sapiens
ggcaccacactctaaagggaacattgaaaacttgaagcaggtcaagaagaaaaaaactgaggtatggagaaaacttgaaattatattgtaggaagaatgtyggaggaactgcagatgtttacctgggagaagagtgaaaggatgggagggaagaggtgaggaagtagacatggaaattactgtatggatatttgcaaggct

SEQ ID NO: 549880 - DNA, 201 bp, Homo sapiens
attagcagtgtggttattcaaaatcagccattcagtggtgtcttttctttttagggttatgccaagaatgttccattaaattaaatttccatcacaggtamtgtcttttaaaatgccattcttaatgtttagtaatccaggatatagtcatttacctgcactaagtatctaaatgtagacttaggtggttgatggttgaat

SEQ ID NO: 549881 - DNA, 201 bp, Homo sapiens
ggcgcactcgggggacggtgccatttagatgtaacacgtggccgtgtcggaccggaagtggtgcccagtcgggacccgtagggagaggcgggttgcgggcggcggcggcggcggcggcggcggtggtggttgtggcgaggctgtgcggcagggcgcacgggacctgtcctgcagcggctctctcaggccgtgggtcgtcgc

SEQ ID NO: 549882 - DNA, 201 bp, Homo sapiens
tgaggaagtagacatggaaattactgtatggatatttgcaaggctgctactatgtaggagacttattttttatgactctgggttggcagaactgcccaaaracagatttttgccttaatttaaggaaaaacttgtcccttagaactgtctgacaaaaggaatggagaaatgggctgcctctggagtagcgagtgttccagc

SEQ ID NO: 549883 - DNA, 201 bp, Homo sapiens
gcgcactcgggggacggtgccatttagatgtaacacgtggccgtgtcggaccggaagtggtgcccagtcgggacccgtagggagaggcgggttgcgggcggcggcggcggcggcggcggcggtggtggttgtggcgaggctgtgcggcagggcgcacgggacctgtcctgcagcggctctctcaggccgtgggtcgtcgct

SEQ ID NO: 549884 - DNA, 201 bp, Homo sapiens
cgcactcgggggacggtgccatttagatgtaacacgtggccgtgtcggaccggaagtggtgcccagtcgggacccgtagggagaggcgggttgcgggcggcggcggcggcggcggcggcggtggtggttgtggcgaggctgtgcggcagggcgcacgggacctgtcctgcagcggctctctcaggccgtgggtcgtcgctg

SEQ ID NO: 549885 - DNA, 201 bp, Homo sapiens
ccatttagatgtaacacgtggccgtgtcggaccggaagtggtgcccagtcgggacccgtagggagaggcgggttgcgggcggcggcggcggcggcggcggyggtggtggttgtggcgaggctgtgcggcagggcgcacgggacctgtcctgcagcggctctctcaggccgtgggtcgtcgctgcagctgccgggaaagaag

SEQ ID NO: 549886 - DNA, 201 bp, Homo sapiens
acagctactgtgccttctgattctgtcattcttccctgctttctattccggtgtgccttttttttttttttttttttttaagatggagtctcactctgtcrcccaggctggagaacagtggcttgatctcggctcactgcaacctgtgccgctgtggttcaagcgattctcctacctcaggctcccgagtagctgggatta

SEQ ID NO: 549887 - DNA, 201 bp, Homo sapiens
gggagaggtgccaccatatgaaatatttttattttaatcaatctgggtatagttatgattattctagaaactaagaattatttgatggctgaatcatggcratatattgatatatagcagaatcagccaatatgttgacttaaagtattttatttttattaatctcatataatgtatcatgtagtaatttttttactctat

SEQ ID NO: 549888 - DNA, 201 bp, Homo sapiens
atctagttggatactttgctccaggattatattcatcactataactagggctgacagtctatggcagggtgtccagtcttttggctttcctgggccacatyggaagaagaattgtcttgggccacgtactacagtggagcacacacaattgtgaatctgttggttcacattgttggcctgaagcagtgctgggcctgcgta

SEQ ID NO: 549889 - DNA, 201 bp, Homo sapiens
ttaatgtttagtaatccaggatatagtcatttacctgcactaagtatctaaatgtagacttaggtggttgatggttgaattggttgatcatgtagaaaatstggcattgtcgtatggctacataaacgaggggtttagaagtccgctatgccctattcttgccaagcagttttaaatgtaaaggcctatgtgaggtggtag

SEQ ID NO: 549890 - DNA, 201 bp, Homo sapiens
ttcttgggcaaactgcttaacctctgtaaggcttaattttatcacctgtaaaaatgaggctactcaggctattgtggggaataaatgaaagtgcatgtaargtgcttgccacagtacctggcattaaagatgttcacactgattcttcgcaacttgcctttgtgatggtcaggttttatgcgctggataacagttaaaagt

SEQ ID NO: 549891 - DNA, 201 bp, Homo sapiens
aaggaaaaaaaggtaagtaatttttttttattgatctatttttcacatcctttctagattaatatgaagtataaataaacaagagtgaaatttttgaattstgtttacatgtgaagacaattgctctagtgaatgaatttttgttcattaagctaatacattgattaaaaattggagaacaattgtgggaaaaataaaaat

SEQ ID NO: 549892 - DNA, 201 bp, Homo sapiens
tattgtctcaaagttgtcttgctaggctgactcttggtcatttggttagagagaacagcttttgttgacgattttttagtccgtgcctgttggtgtttccrggttgtcaccttctttacctccaattctaggatacatgagacaaaaagaaaacctagggaactcgctatcatgtcataccataggtcttcaggaggtccc

SEQ ID NO: 549893 - DNA, 201 bp, Homo sapiens
tccaggtatttggtttttctgtctctctcttttttttttttcctgaaatattaactggtttgttacaatatggaaataccataatctgattaaattgtctrttagtacacattatgatcagttaaatcactatacatgtttaatagtcacagagaatattgtagaaggtgaggttagctattatgtgcatgtttggctcta

SEQ ID NO: 549894 - DNA, 201 bp, Homo sapiens
caaacaatttgaaaatgtttaaaatagaaagtaaaagtattccaggcccacaggtaatataatcagttaaatttggttggcttttgcaaacttacaatacrtacataaaattacatgtatgtatatgatgtgcatatgtttttaacatatctattatactatgcatactttttgtaactttttaaaaatttgatatagaat

SEQ ID NO: 549895 - DNA, 201 bp, Homo sapiens
gaagaagcaagaaatagaaggtttcatctcatagctatggatgctgtatcctttttttatttccagatttttataactagtagaatattttaaaatctgcttttttgttttataaaatcttgtgaagtcaaataggcttttttatttttaaagataagtatttagtgatgtaggattttgccatttatacttttgggtaca

SEQ ID NO: 549896 - DNA, 201 bp, Homo sapiens
aatgtaaatcttaacttgcgtgtcttctgtgtaaccaagaaaaagaagaaactagatcagagacaactatattgcaagagataattgacttacaagagttratattggaattgctactttaactcagtgtaacttagagaagtttcgatgagacttaaaatccttggcctttttgctgagattctttggtaacccttggct

SEQ ID NO: 549897 - DNA, 201 bp, Homo sapiens
aaaccagcctaggcaatatagtgagaccttgtctctataaaaaataaaattagccaggcagggtagcacatgcctgaagtcctagctattcggaaggctgaaaaaaaaaaaaaaaaccccacaacaaactgaagttagcaaggcattgaacactttatatgaatcctctgtcttactataacaatccggtgaacttaaggt

SEQ ID NO: 549898 - DNA, 201 bp, Homo sapiens
ttatgctaatacttaaaactattaactattattaccattaaatattgaaaggtttcacccagctataagtgtgtgtactttggaaagtgcgtttttttttkgggggggtatttgtgagtatgttgttttttttgtttttgtttttttatttgtttttccttaaaccaactttctgagaaatatgtccattctttaatactg

SEQ ID NO: 549899 - DNA, 201 bp, Homo sapiens
attctttaatactgtctttccaaagtgtaagattccctaatagggagtcgctaaaatgtctatctaaatacagtctatcaagcaagaattctgtgactgattttttttggtaacagtactttgatttgatacttgtatacaagttggttgaacatattactctggtcagtttttaaaggctgactatggttaatttgcata

SEQ ID NO: 549900 - DNA, 201 bp, Homo sapiens
tcaggttttatgcgctggataacagttaaaagttcagcttttgcaactttataaaatgtatacataagcatattaattttaaaatagctttcttttttttcaatcacatgggttgtcaaaaaataacagctttgttataaatgtgcctatatagtattttagctgttaaaaataaatgttaaataatatttttaattctta

SEQ ID NO: 549901 - DNA, 201 bp, Homo sapiens
ttgacggctccagtttttatttgacacttgagtttagttttctcttttataaacccagtgaactcctgcactggcatttggatgtgtgttaatgctatttkttttgtcttaaaagtaaaacctttctcagtttgaacttgtattctctaaggatgagttctttagctttgcttatgagttcctcttctcaattattgtgtt

SEQ ID NO: 549902 - DNA, 201 bp, Homo sapiens
cctcttcggccctgcaccaatagggagaggcggcgacgagcggacggccaatggggagcggggctgcgcgcgcggggcggtgggaacggcgccgagtcagkgtacacgtcggttgcctaacaaccggcagcggactcctttggctatggtgagtgctgccgctctgtcgcgccccacgcccagcggctgagcccttcccag

SEQ ID NO: 549903 - DNA, 201 bp, Homo sapiens
caaaatgggcttcctgacacttgccgcaagtctagactcgagttacattgttaaaaaggaaagggtgacctgaccaggcagtggcagggctacaggacagkagtaaccaaccgtggtgtccccctactcatgtgttttatgttctacttgttaagtctgagaaagatactaaagaagaaatcctgaaagctttcaagctct

SEQ ID NO: 549904 - DNA, 201 bp, Homo sapiens
cctttctcagtttgaacttgtattctctaaggatgagttctttagctttgcttatgagttcctcttctcaattattgtgttgaaggcagcctattagatamaaaactccttaccagcctatggacagaaaatgaataatcctttgctactttcctggcatgaattgctttttgccttggaaggctgctggtttgtaaaact

SEQ ID NO: 549905 - DNA, 201 bp, Homo sapiens
tctttctttttaagcaaagctttggaattggttatataaatgactttaaaaatacatatgggtgtctgtaactatgttatgtaaatatggactgtatgatrtattattgtgcttgtgtattgcataacatataaaggcctccaactttaagaaggcaaacatggcatcaagttctcagcgaaaaagaatgagccctaagcc

SEQ ID NO: 549906 - DNA, 201 bp, Homo sapiens
tgtctccatgtctctgagcaatgcctgatggggagggatctaggtatgccatcccagcgtgctcggtgggaccagggtagtcagctgagggatgttagagktgatcgtccttcagcctgttagtgggaactgtgttctttcccctgaggggttgttcatgaggacctccgcctgctcttggagacccacctgccgtccaaa

SEQ ID NO: 549907 - DNA, 201 bp, Homo sapiens
tcgctctagcaattagaaataagcctcccggacgccgcccccgaacgattaaagcagaagctgggatgtggggcccaggtatcagcatattttaagagctyccaaggctgagaaccgctgcttgactgcgccgcagaggcaggagggagggaaggaaaccacttagcctctttctccccccaggtggaggagtccgtgctc

SEQ ID NO: 549908 - DNA, 201 bp, Homo sapiens
tacctggcaaacaaatgcagtattgcctcacgaatcgattgcttctctggtatgggtgggggggcgttggcaggtgtgagaaggggctgggtggctgggtsgggaggcttgcaaccatagcttccacaatgatggcaatatttttcgtcaacagcagttcacctagtgagtgttgagactctgggtctgagtgaagctgag

SEQ ID NO: 549909 - DNA, 201 bp, Homo sapiens
agagcttccaaggctgagaaccgctgcttgactgcgccgcagaggcaggagggagggaaggaaaccacttagcctctttctccccccaggtggaggagtcygtgctcaacctgggcaaattccacagcatcgttcgtctggtggccttttgtccctttgcctcatcccaggttgccttggaaaatgccaacgccgtgtctg

SEQ ID NO: 549910 - DNA, 201 bp, Homo sapiens
tgcacttccacaatctggtgaagggtctgaccgatctgtcagcttgtaaagcacagctggggctgggacacagctattcccgtgccaaagttaagtttaaygtgaaccgggtggacaatatgatcatccagtccattagcctcctggaccagctggataaggacatcaataccttctctatgcgtgtcaggtaaagtgcag

SEQ ID NO: 549911 - DNA, 201 bp, Homo sapiens
atgttaacgacacgcgttcccctgccttggctacttaattgctgaagatgtaatgagcactgttctcacagcctgttcccctgtccttccctttaggagaygagtgaaaaacccaaaaagaagaaaaagcaaaagccccaggaggttcctcaggagaatggaatggaagacccatctatctctttctccaaacccaagaaa

SEQ ID NO: 549912 - DNA, 201 bp, Homo sapiens
aggggaggagctgagctgccttggctaatggggttgaaatttctgatcttaaactctccactgaatattctctcagagccctgaagacaaggggtaacacyccaaaatatggactcattttccactccaccttcattggccgagcagctgccaagaacaaaggccgcatctcccgatacctggcaaacaaatgcagtattg

SEQ ID NO: 549913 - DNA, 201 bp, Homo sapiens
tttttttaatgggctgaggtaatttctcatgacatgttttccttctaatttgggacagcctttggggtggatttctaaagttatacccacacaattaaacyatcccagaaacactgggcaatgttaacgacacgcgttcccctgccttggctacttaattgctgaagatgtaatgagcactgttctcacagcctgttcccc

SEQ ID NO: 549914 - DNA, 201 bp, Homo sapiens
acttggttgcttgttgtgatttctgggaaggccttcaggctgggctggtgcccgtgggtgcgggagctagctcagagccccttgttgctcaccgtcttgcyctcttcttaggagttcgtctgcacttccacaatctggtgaagggtctgaccgatctgtcagcttgtaaagcacagctggggctgggacacagctattccc

SEQ ID NO: 549915 - DNA, 201 bp, Homo sapiens
caaggctaaggctattctggatgcctcacggtcctccatgggtcagtgcagagcctggcaacctgcataaggtatggggctctaaatagctggcctcttgmattcacacttggtttttcctaggcatggacatatctgccattgacttgataaacatcgagagcttctccagtcgtgtggtgtctttatctgaataccgcc

SEQ ID NO: 549916 - DNA, 201 bp, Homo sapiens
ttgatgaagcagctgggccagggagtgactgtggctctttgcagggagtggtacgggtatcactttccggagctggtgaagatcatcaacgacaatgccayatactgccgtcttgcccagtttattggaaaccgaagggaactgaatgaggacaagctggagaagctggaggagctgacaatggatggggccaaggctaag

SEQ ID NO: 549917 - DNA, 201 bp, Homo sapiens
acagttaatgaccctgaggaggcaggccacagaagtggctccaagaaaaagaggaaattctccaaagaggagccggtcagcagtgggcctgaagaggcggytggcaagagcagctccaagaagaagaaaaagttccataaagcatcccaggaagattagaatgcaaatggacattctctgggaggtggggcataccatagc

SEQ ID NO: 549918 - DNA, 201 bp, Homo sapiens
aaagaagaaagtactcttgggagttggggatcccaagattggtgccgcaatacaggaggagttagggtacaactgccagactggaggagtcatagctgagrtcctgcgaggtgagaccatcatctgttatattcctgttatcctggacattttgggggaggaggttctggaaacttggttgcttgttgtgatttctgggaa

SEQ ID NO: 549919 - DNA, 201 bp, Homo sapiens
taggcgtgaggcagtatttgagccatacaatgtgtaatttgaaataattgtcttcacagagctcaaggtctgggaactgtgctagaccaaactgtttaagyagacgatgtggaatgtgtgttaacgtttccttgtgggcactgtagtgacaaactattttttatttttattttttttgagatggagtctgtcccccaggct

SEQ ID NO: 549920 - DNA, 201 bp, Homo sapiens
cctcccggacgccgcccccgaacgattaaagcagaagctgggatgtggggcccaggtatcagcatattttaagagcttccaaggctgagaaccgctgcttkactgcgccgcagaggcaggagggagggaaggaaaccacttagcctctttctccccccaggtggaggagtccgtgctcaacctgggcaaattccacagcat

SEQ ID NO: 549921 - DNA, 201 bp, Homo sapiens
gagagatgtggttcctttcggtatcctctcgggcagcttgtgatagtatttgccgtccttggctggctctgagtctgataggcgtgaggcagtatttgagmcatacaatgtgtaatttgaaataattgtcttcacagagctcaaggtctgggaactgtgctagaccaaactgtttaagcagacgatgtggaatgtgtgtta

SEQ ID NO: 549922 - DNA, 201 bp, Homo sapiens
aaacagttaatgaccctgaggaggcaggccacagaagtggctccaagaaaaagaggaaattctccaaagaggagccggtcagcagtgggcctgaagaggcrgctggcaagagcagctccaagaagaagaaaaagttccataaagcatcccaggaagattagaatgcaaatggacattctctgggaggtggggcataccata

SEQ ID NO: 549923 - DNA, 201 bp, Homo sapiens
aggtaccagtgagggcacctgcccacaatcaggtgccacttctggtgcccactgcttgttgggggatcacggtgatggctgaccagggctccctgacctayacaggcctctgctatgggggtgatggccagtcctggtgtctgagtgattcccagggcccagcaaagggaccaagtttccaggtcagcgacattggatgcc

SEQ ID NO: 549924 - DNA, 201 bp, Homo sapiens
atgttttccttctaatttgggacagcctttggggtggatttctaaagttatacccacacaattaaactatcccagaaacactgggcaatgttaacgacacrcgttcccctgccttggctacttaattgctgaagatgtaatgagcactgttctcacagcctgttcccctgtccttccctttaggagatgagtgaaaaaccc

SEQ ID NO: 549925 - DNA, 201 bp, Homo sapiens
ctcaggagaatggaatggaagacccatctatctctttctccaaacccaagaaaaagaaatctttttccaaggaggagttgatgagtagcgatcttgaagaraccgctggcagcaccagtattcccaagaggaagaagtctacacccaaggaggaaacagttaatgaccctgaggaggcaggccacagaagtggctccaaga

SEQ ID NO: 549926 - DNA, 201 bp, Homo sapiens
gtcctgccctcccagggcatgctgtcgtccaggggagccagggcatcacttgggaggccatgggcagtctggactgggctgcctgctgcagtgtccagggyccttccttagaagggaactgatgctgtcctccctaccccgacctcaggctccaggagggtgggggagcccccggccatcactttcttcctccccatgagg

SEQ ID NO: 549927 - DNA, 201 bp, Homo sapiens
cctaagggcattctggggatcctgggctgagctgagggctcgctttcctccagggtaccagccatgggaccagtgctgagcctctgagggtccaaggtggrcagtcagcagcagcaggagcaggaggcctcgcctggagctggccatggctgctctaatggacagggtacagcattcaaggagacttacctcacccccaca

SEQ ID NO: 549928 - DNA, 201 bp, Homo sapiens
gtggggatctccagctcccttgggcatgccctcttgtccaccctaaacaagcctgacgcatagaaacctcagcacatacacacaaatcaggcggtaagacwttgcctcataggaactaaccactttcttctttagttaccgggctctcctgatgcactgtaaatgtttgatttgcaaaacagtagcaaaccatttccccac

SEQ ID NO: 549929 - DNA, 201 bp, Homo sapiens
aaggagtttccagaagtggaagaaagttggaggggaacagagacctgaattcaggccaatggatgggaggatagatggatggtcaggggagttctcaatgyaggcgtgtttggagcaccagtgctagggaaccagagttgcaggccttctgcccttttctccgtggcctgctgtatctcttccatagtagttggggatgtg

SEQ ID NO: 549930 - DNA, 201 bp, Homo sapiens
cccccacatccccctacttcctccagggccactttggaaaactggcatctcaggggcagctttggtatctccttatgcccttccctctctgccaccgctcstcatcccaagcatacaggggtccagatcctgggggatcctggcccagcaggggatgatgctccaggggacgagccttctccctgagcctggggcacagag

SEQ ID NO: 549931 - DNA, 201 bp, Homo sapiens
gggagcccccggccatcactttcttcctccccatgaggctgggagacacccacctgggggcctaagggcattctggggatcctgggctgagctgagggctygctttcctccagggtaccagccatgggaccagtgctgagcctctgagggtccaaggtgggcagtcagcagcagcaggagcaggaggcctcgcctggagct

SEQ ID NO: 549932 - DNA, 201 bp, Homo sapiens
ttgtgcgcttctacttcctcactcgtgtttactccgagtaccttgaggatgttctggaagagctgacatatggacctgccccggacctggtgatcatcaaytcctgcctctgggatctctccaggttggggcgagggaaaggggaatactggttggggctggaagtacggctgaggcagtccacccttgtgctcttgccca

SEQ ID NO: 549933 - DNA, 201 bp, Homo sapiens
tgcccaagcgtggctatccccctggtgagccctaccataagtgggggggtagtgatgcactggggccctcagaggacagggctcagaaacagaatgggacrcagccactcaagggaagtagaggtcccttgaaggactcctgtggcttctgcatgcaccttcctcaacccctgaggagggttagatcatcggagcaatatt

SEQ ID NO: 549934 - DNA, 201 bp, Homo sapiens
gagttgcttcaaggcagagctgcactcactctggccagaagcctgctcttataatgactggttcttttgtaggatgtggccctggagtgaactttgtgccyggccctctgccacctccaatccctggccctaatccccatggtcagcactggggcccagtggtccaccgggggatgccacgctatgttcctaacagcccct

SEQ ID NO: 549935 - DNA, 201 bp, Homo sapiens
aacaggaaagaaatggggcatgggtgtgaggagtggaaagacagggaggaagggccatccaggcagtgtggcagaagcaaagaagcccacagctggggggygggggtacagtcaactggcagggtgtggaacagggatgttgcatcgggaaggccagccttatggacttgggctcaatggacagtgttccataggcttctt

SEQ ID NO: 549936 - DNA, 201 bp, Homo sapiens
ttgggctcaatggacagtgttccataggcttcttagttcagcctcagagtcccactgtgactggtgcagcttggtgtagctctcctcgggccccatctctrggcctttggtggaggcttctgagggccccactcccccttgttttgaggcactgctccccatcacatctcaactgtaacactctgctgcagaacctctgtt

SEQ ID NO: 549937 - DNA, 201 bp, Homo sapiens
gcctctccctgcagcctgtcgttgctggtggcggcatggtcttctgtctgtcgagcgaggagccgcgccgcccgctgcgaagcgacatggtccacttccakgcctcggaagtccagcagctgctacacaacaagttcgtggtcatcttgggggactccagtgagtgcctcttctagggtgacgcttccagtcccacacctt

SEQ ID NO: 549938 - DNA, 201 bp, Homo sapiens
gggcttcggggtgaccactgtgcttgcctcagtttccttttctggagcaggggaaggcccggctccctgcccaaaggcggctgtgcgctaagtggcagacrctcggggagagccggcgcggggcggaccccagcgccagtagtgacaggggcgaacgccgccgggagactccagccggcgggcgagcagggtaagccaggc

SEQ ID NO: 549939 - DNA, 201 bp, Homo sapiens
cgtgggcgggagggcggggcagctcaccggtaaaaggcagagtccccgagtgggttccagttcgccgtgtagcagtccatggctggtgcagacggcagctrggaagcaccgaggggacacccacctagagcgggctccaggccggcacttccgcttccgcccgtccgggtcacgtggcgaggccgccgccgcggccatcac

SEQ ID NO: 549940 - DNA, 201 bp, Homo sapiens
ggctcagacactcagagagactgatccacacatacaaactggacagacggcctcctgcccattcggggacatggcctgggtagactggatcttgggctggractggatgtgccaatggcccttcagggcctgcctggcacctcaggtactgggctagggtgtctgctatgcctggtattgttcttgtccattgctgtcacc

SEQ ID NO: 549941 - DNA, 201 bp, Homo sapiens
tacccgggtcgcgggtgaacaccgcggagccccgggacttggtaattggcgcgagcgggtgcgcgcatgcgcgggacggcggcgggcacgtggcgaggcgyagggcggcgccgcgcgggaagctccccagtgccctggaggcctgctggctggacgaccccctgcctctggtaccaagtgtgaccaaggctggcgccacca

SEQ ID NO: 549942 - DNA, 201 bp, Homo sapiens
tccagggaagccataggcagaccccagacttcggggagcacctggccttgctcccacccccaccttcttctttgcctcctcccatgccttttccctacccrcttcctcagccctcgccacctcccctcttcccacccctgccccaggataccccttttttcccaggccagcccttcccaccccatgaattcttcaactata

SEQ ID NO: 549943 - DNA, 201 bp, Homo sapiens
ttcgcgcccgccaagtgggcccagccctggctcctgcgccctgtggcggccacctccatcgccttgctttcccttcgggcactgggggtcgctcagggcgrgacatgggtgaacggaagtggaagctgtgagcgtcgcagcccgaggcgccgaggcctgaggcgccgtcggggccaccgcgacgctcgcatggagagcgct

SEQ ID NO: 549944 - DNA, 201 bp, Homo sapiens
gggagacagaacgatgctcatgctttggattggcaggaaagaggggctatggcggaaacaaaaggagatgagggcaggggcacttttaggaaggactgagrctgctggcagtgtcacatgactgttgagaagaagggaatttgttagcaagtggttacatttagtaggaaaagtgttgagggcatgggtttggattaaagg

SEQ ID NO: 549945 - DNA, 201 bp, Homo sapiens
ctcttgtctgtcttctggtctgttccgtccagtaggttttctctttttatgtcccacacatcttccacaggagtcctgacaggtgtaataacctgtgcacyttttagcccatccttgctcagcatttctcgccctgacagctccccataatttccatcacgaaagcgttgcattgtgtagtgtgtctcctgggtgacttgg

SEQ ID NO: 549946 - DNA, 201 bp, Homo sapiens
acttccgctgttccgggattcacggacgactcgcccccttttcccagccttggtcagcactgttaccccgcccgccgtgcgatcccgcccccctcggagcrcccctgtggtctgacttcagcagcactttccggcaggagactgggcactcgctgtcacccgcgagctgcctccctcagcgagatctgagcatctttccgg

SEQ ID NO: 549947 - DNA, 201 bp, Homo sapiens
tgggactggatgtgccaatggcccttcagggcctgcctggcacctcaggtactgggctagggtgtctgctatgcctggtattgttcttgtccattgctgtyaccaataaaggcatggaagaacagagtgacaaattcctgtgtgcagtgggtatcccaaaccatgatcttaagattgggggaggttgcctctgggctttgt

SEQ ID NO: 549948 - DNA, 201 bp, Homo sapiens
ggatggtaaaaggaagttgttggggaagggaataacaggatctttatgtttggcttatttactggtctatggggaggaggtgggcgaggaaaaagctagayacaagacctgggcaaacaaagaaggctctggagggaagtgtaggttagaacaaaggtaagtctgagaggtaagagagaaggaacacactttgggcttggc

SEQ ID NO: 549949 - DNA, 201 bp, Homo sapiens
tatcccttttttgtagatagggaaacagagaagctcacctggaggacaagagttgcttcaaggcagagctgcactcactctggccagaagcctgctcttayaatgactggttcttttgtaggatgtggccctggagtgaactttgtgcctggccctctgccacctccaatccctggccctaatccccatggtcagcactgg

SEQ ID NO: 549950 - DNA, 201 bp, Homo sapiens
ggcactgggggtcgctcagggcgagacatgggtgaacggaagtggaagctgtgagcgtcgcagcccgaggcgccgaggcctgaggcgccgtcggggccacmgcgacgctcgcatggagagcgctgggcgctgggctgtgcaccgacggctaacctggacccacggtctctgcggggcgggagctttgcagaaccgactggc

SEQ ID NO: 549951 - DNA, 201 bp, Homo sapiens
ggttttctctttttatgtcccacacatcttccacaggagtcctgacaggtgtaataacctgtgcactttttagcccatccttgctcagcatttctcgccckgacagctccccataatttccatcacgaaagcgttgcattgtgtagtgtgtctcctgggtgacttggccgacttaatttctgccaggtgatcttgggtcac

SEQ ID NO: 549952 - DNA, 201 bp, Homo sapiens
gccctatttttccacgacctagctgacacttgaaattttctgttgcttttttttttcttaatagtagccatcatattatgtgtgaagcaatgtctcattgktgttttgatttgtatttccctaatgattagtagtgataagtacatgaaagattccttacatcactaatgagtagggctatctagtatgttagaatgagag

SEQ ID NO: 549953 - DNA, 201 bp, Homo sapiens
tgaaacagttacactcttgacatcaagaggcatatgtggaatgtaaatatttgtcaccaaaagaacatacctcattaactcaatgtaccatatttataacctttaaaatataagcctttaaaataacatgcatgagcggattatgtgtttagctgtccttgatccctgaagctgactggtggcaaatgaaaaattattgca

SEQ ID NO: 549954 - DNA, 201 bp, Homo sapiens
attaactttgtgtgaaaatgttgttctggaaaataaaaataatgatagtatactatgtggttcaggtgtaaataagtttcagtggttacaatgaggtaaaycctgaccactgatctaaatacaattaaaatctgattatttggggaggattatggtgttggaatctttcatgtagtagtggagataggaagatagaaggaa

SEQ ID NO: 549955 - DNA, 201 bp, Homo sapiens
agacaaggcccataggtatggcccccccttccccctcccagtactagttaattttgagtaattgtattgtcagaaaagtgattagtactagttttttttttgttgtttcaaaaaaaatttttttgtgtgtgtttttttgtttgtttgttttgtttaaaagcaaggcatgcttatggatgactctgtaacagactaattgga

SEQ ID NO: 549956 - DNA, 201 bp, Homo sapiens
ctgaaggctgtcaagtatgtggagtgttctgcacttacaaagaaaggcctaaagaatgtatttgacgaagcaatattggctgccctggagcctccagaacygaaaaagagccgcaggtgtgtgctgctatgaacatctctccagagccctttctgcacagctggtgtcggcatcatactaaaagcaatgtttaaatcaaac

SEQ ID NO: 549957 - DNA, 201 bp, Homo sapiens
tttataacctttaaaatataagcctttaaaataacatgcatgagcggattatgtgtttagctgtccttgatccctgaagctgactggtggcaaatgaaaawttattgcatagcgccgctgcatagcaggctttcatgtttcattatctgaagacctcccagctggtaaacagaggcaggccctggcttatgaatatctgag

SEQ ID NO: 549958 - DNA, 201 bp, Homo sapiens
catcggaatatgtaccgactgtttttgacaactatgcagtcacagttatgattggtggagaaccatatactcttggactttttgatactgcagggcaagakgattatgacagattacgaccgctgagttatccacaaacagatgtatttctagtctgtttttcagtggtctctccatcttcatttgaaaatgtgaaagaaa

SEQ ID NO: 549959 - DNA, 201 bp, Homo sapiens
cttctaaaaaaaaaaaagggatacacgtacaagaatgtgcaggtttgttacatgggtatacgtgtgccatggtggtttgctgcacctattgacctgtactytaagttccctcccctcacccccaccccccaacaggccctggtgtgtgctgttcctcgctctgtgtccatgtgttctcattgttcagctcccacttaggag

SEQ ID NO: 549960 - DNA, 201 bp, Homo sapiens
gttgcttttttttttcttaatagtagccatcatattatgtgtgaagcaatgtctcattgttgttttgatttgtatttccctaatgattagtagtgataagyacatgaaagattccttacatcactaatgagtagggctatctagtatgttagaatgagagaaaatgtatagaaataaaaagtattagatttatttagcaat

SEQ ID NO: 549961 - DNA, 201 bp, Homo sapiens
agtaacataactcaaacaagttttgacaattttaacaggtcaatgtcacttagcaggaacatgtactgaggtggagtcgcttattctccacatgtactaggctagacaaagcagaactaaacaacattgtttctaaaaaaaactaatcttcaaattgataactaacaattataactgaaattggataaaaatcatataaag

SEQ ID NO: 549962 - DNA, 201 bp, Homo sapiens
cactcttgacatcaagaggcatatgtggaatgtaaatatttgtcaccaaaagaacatacctcattaactcaatgtaccatatttataacctttaaaatataagcctttaaaataacatgcatgagcggattatgtgtttagctgtccttgatccctgaagctgactggtggcaaatgaaaaattattgcatagcgccgctg

SEQ ID NO: 549963 - DNA, 201 bp, Homo sapiens
acactcttgacatcaagaggcatatgtggaatgtaaatatttgtcaccaaaagaacatacctcattaactcaatgtaccatatttataacctttaaaatataagcctttaaaataacatgcatgagcggattatgtgtttagctgtccttgatccctgaagctgactggtggcaaatgaaaaattattgcatagcgccgct

SEQ ID NO: 549964 - DNA, 201 bp, Homo sapiens
ttcattgtgttagccaggatggtcttgatctcctgacctcatgatccacccacctcagcctcccaaagtgctggaattacaggcttgagccaccgcacccrgccagagtgggatttttaagaggagagccccagacccagaaaactcagtcaaaggatcttggataaatcactggtctctctacacctcagtatcctcatc

SEQ ID NO: 549965 - DNA, 201 bp, Homo sapiens
gatcctaaactgtccctattttggagaagctactctagggctgatactacacgtgagttcatgagttgcaattctatttcatgatgtgaagattatcccamcttaaataaaatgagcttttcaagtgcacaagcccatctaggaattgtcatcaagggttgttctatatagggaatcacataagttactcacgaataatgc

SEQ ID NO: 549966 - DNA, 201 bp, Homo sapiens
catgaaagattccttacatcactaatgagtagggctatctagtatgttagaatgagagaaaatgtatagaaataaaaagtattagatttatttagcaatamacacacagaaaacaaaatgaacaaatagaaaacaagtattaactttgtgtgaaaatgttgttctggaaaataaaaataatgatagtatactatgtggttc

SEQ ID NO: 549967 - DNA, 201 bp, Homo sapiens
aatagaaaacaagtattaactttgtgtgaaaatgttgttctggaaaataaaaataatgatagtatactatgtggttcaggtgtaaataagtttcagtggtyacaatgaggtaaaccctgaccactgatctaaatacaattaaaatctgattatttggggaggattatggtgttggaatctttcatgtagtagtggagatag

SEQ ID NO: 549968 - DNA, 201 bp, Homo sapiens
gcatgagcggattatgtgtttagctgtccttgatccctgaagctgactggtggcaaatgaaaaattattgcatagcgccgctgcatagcaggctttcatgkttcattatctgaagacctcccagctggtaaacagaggcaggccctggcttatgaatatctgagttgaaaacatctcctccttgcaaacattccccctggc

SEQ ID NO: 549969 - DNA, 201 bp, Homo sapiens
aaagagcaagaaaataaaaaaatgaaaaatacatagttagcaaaataaaaagcataaagtaagatggtaggacacaataaaactgatccattctaacaatytaagtcaatgaagtaaactcggtgaaaaaacaaacattgtcagactaaatttttttttcagctattagtggtttatttgcttcagtaccatatttaattt

SEQ ID NO: 549970 - DNA, 201 bp, Homo sapiens
atgagtagggctatctagtatgttagaatgagagaaaatgtatagaaataaaaagtattagatttatttagcaataaacacacagaaaacaaaatgaacawatagaaaacaagtattaactttgtgtgaaaatgttgttctggaaaataaaaataatgatagtatactatgtggttcaggtgtaaataagtttcagtggtt

SEQ ID NO: 549971 - DNA, 201 bp, Homo sapiens
attcaaaactaaaacattgcaaaaattaaacaattactcaacattccttcctcctccaagcccctagtaaccaccattctactttctggttttgactactmtaggtacctcagaaaagtgaaattacacagtatttgtctttttgtaactgatttattttgcacagcataatgtcctcaagcttcattcatgctgtagcgt

SEQ ID NO: 549972 - DNA, 201 bp, Homo sapiens
attcatattgtttagcaaccatcaacactatcatttctccagagttttttaaatattcaaaactaaaacattgcaaaaattaaacaattactcaacattcyttcctcctccaagcccctagtaaccaccattctactttctggttttgactactctaggtacctcagaaaagtgaaattacacagtatttgtctttttgta

SEQ ID NO: 549973 - DNA, 201 bp, Homo sapiens
ttccaagtaatgccattcttagtaacctatacccaggtttctgtctctgttccatgggctgctgggttgggggccatgggaattgggagaaggggtttctyactttccttccatttttccgccctaccaggtcacacgacctacaagtagggagcagggaaagaagagtgagcctgcatgccaattctaagctcttcagga

SEQ ID NO: 549974 - DNA, 201 bp, Homo sapiens
agtctccctcccctttaaacagcccatttttccccaagaggtgggaggggcaaattgtttctatgatctgggagaaatgacaggagaaacaagactgatasttggcttagatgataatatagctctggaaacttttttgctcttcagtgggttttgggtttggaagataaggggagacagaatatgaatttgggtgaaggg

SEQ ID NO: 549975 - DNA, 201 bp, Homo sapiens
agtaacctatacccaggtttctgtctctgttccatgggctgctgggttgggggccatgggaattgggagaaggggtttctcactttccttccatttttccrccctaccaggtcacacgacctacaagtagggagcagggaaagaagagtgagcctgcatgccaattctaagctcttcaggatcaaagtaagcaaaaaggag

SEQ ID NO: 549976 - DNA, 201 bp, Homo sapiens; identical to SEQ ID NO: 390179

SEQ ID NO: 549977 - DNA, 201 bp, Homo sapiens
aattctaagctcttcaggatcaaagtaagcaaaaaggaggggcaaagagtctccctcccctttaaacagcccatttttccccaagaggtgggaggggcaarttgtttctatgatctgggagaaatgacaggagaaacaagactgatacttggcttagatgataatatagctctggaaacttttttgctcttcagtgggttt

SEQ ID NO: 549978 - DNA, 201 bp, Homo sapiens; identical to SEQ ID NO: 390168

SEQ ID NO: 549979 - DNA, 201 bp, Homo sapiens
ctgtaggggacctgtctgactgggaagggagttccgagagggagggggcaatcccttcccccatcccccactggccaagtgtttcaatgcagtgtgagccrctcccttctggcagaggccgacctccaaggctctgttctcccctccccgtgtacatatactcccggtttccctgcccctccattgcccttggctttttct

SEQ ID NO: 549980 - DNA, 201 bp, Homo sapiens
gctgcacagggggaccccagctgtgcgacccctcttcatttcctttcccttggctcctcccctttgttccatttccactgagggacccaccaacccctcgytcacggagcctcctaactggagagaaccacttccaaactgttcagccatctcagtttctcctacattcaacctggtcctggtgtgcccagcttagcctac

SEQ ID NO: 549981 - DNA, 201 bp, Homo sapiens; identical to SEQ ID NO: 390181

SEQ ID NO: 549982 - DNA, 201 bp, Homo sapiens; identical to SEQ ID NO: 390182

SEQ ID NO: 549983 - DNA, 201 bp, Homo sapiens; identical to SEQ ID NO: 390186

SEQ ID NO: 549984 - DNA, 201 bp, Homo sapiens
gcaccattgcactccagcctgggcaacaagagcaaaactctgtctcaaaaaaaaaaaaaaaaaaaaaaaattacggattatgctttcatgtggtatctaaraaatctttgcttaaaagaaaaggccacaaaaattttctcctatgtttttttctagaggttttatagctttagggattacatttagatctatgatcctttt

SEQ ID NO: 549985 - DNA, 201 bp, Homo sapiens
gtcagacaatgaggtccttttggaggtacaggtgtgatgcaaacaataaaatatagatcctatcctaaattcttctggaggaataaaatggttttttttttctcccctacttaaacattattctacattagttttccttagaatattgtgtatatggcacatatcaccataatacctatgggaattaggtggctttgggag

SEQ ID NO: 549986 - DNA, 201 bp, Homo sapiens
ggccaaggcaggcagatcacctgaggtcgggagtttgagaccagcctgaccaacatggagaaagcccatctctactaaaaatacaaaattagctgggcgtwgtggcgcatgcctgtaatcctagctactcgggaggctgaggcaggagaattgcttgaacccggaaagtaaagattgctgtgggccgagatagcaccattg

SEQ ID NO: 549987 - DNA, 201 bp, Homo sapiens
ttccatataaattttagaattagcgtatcaatttcttaaggcttggtgggatttccattgggattgtattgagtctatataaataaataaaactgagagakaattaacattttattttatttttttgagatggagtctcactctgttgcctaggctgtcgtgcggtggtgcgatctcagctcactgcaacctctgcctccg

SEQ ID NO: 549988 - DNA, 201 bp, Homo sapiens
cccatctctactaaaaatataaaaattagcctggcatggtgataggcgcctgtagtcccagctacccaggaggctgaggcaggggaatcacttgaacccargaggcagaggttgcagtgaaccgaaatcatgccattgcactctagcctggacgacagagcaagactctgtctcaaaaaaaaaaaaagtatttcaggcaag

SEQ ID NO: 549989 - DNA, 201 bp, Homo sapiens
ttttattttgaaaaattatagacttataagaagtttcaagactcacctcagttgtttctctttcctcggggatcacaattttcagtagtctgaaagcactkgtttcataattttgcctagtttctagtagcttacagtgagaggttaagtcccccattcatcttagctacaagtggaaatatctgctttgatttttattga

SEQ ID NO: 549990 - DNA, 201 bp, Homo sapiens
tgtttgagaaattgcatctagcaatttttcttgttagcaaagagcgcccacctccatctgttctaaactcctcttgtttcttgaatgtatttgctgtcttktgtctctggggctttgtattaactgttatcttttggcatccaacctcctacccctctttacctcactaattttatacatcctttagatccctgctatagt

SEQ ID NO: 549991 - DNA, 201 bp, Homo sapiens
aaacctgagttctaatactagctttgcaacttggtgtcaaaggaccttcctaattctgaaatcttctggaattttttttttttaagactcaaatttagtawtacagttttctggattcttgatgcagtgtggctgtacaaatttattcagttactttgattcagatactcaaaaaccttggaatcatcttttacttttttc

SEQ ID NO: 549992 - DNA, 201 bp, Homo sapiens
atcttgagaactttctattttctctaagcattttaagccataggctcccctttaggcactgctagctgcatcccacacattttgatatgttttcattttcwttttttttttttttaagataaagccttgctctgtcacccagcctgagtgcagtggtacaatcatggttcactgtagcatcaacctcccgggctcgtgatc

SEQ ID NO: 549993 - DNA, 201 bp, Homo sapiens
ctaaatggtcaagtggcatacccaagttattggagctggctagtgatacaaccaggactacaccccaggtctttggactcccatgccagtattcatcctamtaaagtagatgatagtcttaagaaagtacaaattgttgggaggaacaaaactagtttgcttagttgcataatttttttttctttgaagatttctttggtg

SEQ ID NO: 549994 - DNA, 201 bp, Homo sapiens
tgcctcccgggttcacgccattctcctgcctcagcctcccgagtagctgggactacaggcaccccccaccatgcccggctaatttttttgtatttttattwtttatttatttatttatttaatttatttttgaggtggagtctcgctgttgcccaggctggagtgcagtggcgcgatcttggctcactgcaggctccgctc

SEQ ID NO: 549995 - DNA, 201 bp, Homo sapiens
cagtggctcgatctcagctcactgcagtctccgccttccaggttcaagtgattctcctgcctcagcctcccgagtagctgggactacaggcgcctgccacyatgcctggctaatttttttgtatttttagtagagacagggtttcaccatgttggccaggctggtcttgaactcctgaccttaggtgatccgcccacttcg

SEQ ID NO: 549996 - DNA, 201 bp, Homo sapiens
ctacctttatggtccctgcgagttataatagtcatcaatttttgtttgtatcttttttttttttcttttgagacagggtcttgctctgtcaccctggctgkagtgcagcgatatgatgactgctctctgcagccttgacctcccatcctcaagtgatcctctcacctcagccccatgagtagctggaactataggcgtgtg

SEQ ID NO: 549997 - DNA, 201 bp, Homo sapiens
ttattttcttggcacatggatattcaattgcttctttaccatttattgaaaagactgtccattctgcattgaattgcctttgtacctttgtcaaaaatcawttgtctctagaaaaatcaggtttccaggaaaaaaaagactaatgtgttccactagtgttcttatttttcagttgtgttggcttttgtagattctttgcat

SEQ ID NO: 549998 - DNA, 201 bp, Homo sapiens
ccacctctactaaaaatacaaaaaaatacccaggtgtggtggtgcacacctgtggtcccagctacgaggaagactgaggtgggaagattgcttgagcccargggacagaggttgcactgagccgagatcatgccactgcacaccagcctgggagactgaccttgtataaaaaataaaataaaaatttaaattattacaaac

SEQ ID NO: 549999 - DNA, 201 bp, Homo sapiens
ggtgcacacctgtggtcccagctacgaggaagactgaggtgggaagattgcttgagcccaggggacagaggttgcactgagccgagatcatgccactgcayaccagcctgggagactgaccttgtataaaaaataaaataaaaatttaaattattacaaacaaggctaaagtttcctttgactatcatcccgaatcccagt

SEQ ID NO: 550000 - DNA, 201 bp, Homo sapiens
taatcttcacctttctattccttgttagcaggaggttgtatctatttccttctcttcgtctttttttaaattatttgatttttttagagacagggtctcaytctgtggcccaagctggaatacagtggtgtgatcatagctcacagcagccttgaactcgtggactcaagtcatcctccctcctcagcctcctgagtagct

SEQ ID NO: 550001 - DNA, 201 bp, Homo sapiens
gtttggctaccttccagatccttcaagttgtgttctccccacttcattagaagatattgcaaaccaaagtgactagattctttctccagctctcaagagastacagtccatgttatcattcagcctgaactattggctgatgggaaagctcctaaaggggagacttacgggaagaactgaaggtgaagaggttagagaggt

SEQ ID NO: 550002 - DNA, 201 bp, Homo sapiens
tagctgggactacaggtgtgtgccgccaagcctggctaattttttgtattttttgtagagatggggttttgccatgttgcccacgctggtctcaaactccygggctcaagtgatctatccacctcggcctcccaaagtgctaggattacaggtgtgagccactgggccttgccttaattaatttatttttttatttttttt

SEQ ID NO: 550003 - DNA, 201 bp, Homo sapiens
ataaaagcagtagcccatgtcccctgtagcacattttttctttccttctctcttcattccctccctggtattaagtactttacattgcatggaatagagayattatgatagcctttaagtaactgagtttaaggatttacaggaaaagatgattagatgagacttttcaccaggtctcgtagtgaaaagaattaaccgtag

SEQ ID NO: 550004 - DNA, 201 bp, Homo sapiens
ggaattttttttttttaagactcaaatttagtattacagttttctggattcttgatgcagtgtggctgtacaaatttattcagttactttgattcagataytcaaaaaccttggaatcatcttttacttttttctctctcaccccatattcagtctatcagcaaatcccataggttctgcatatacagttgtccttggtat

SEQ ID NO: 550005 - DNA, 201 bp, Homo sapiens
taacacataagtctgttctatatatttttgccaagtgaccgtttagcctttgcttagagttctaataatgcaaaacgcattacctcataaggcaggtcatkcattgcttagaaaattttagttgttagaacgttattccttacgttgagtcaaacgtggcttccctataacttctagtggtagttcctagttctgccctct

SEQ ID NO: 550006 - DNA, 201 bp, Homo sapiens
aagagtatctgattggtttacttaatgacctgctggtaccaggcagccttctaggtcattatgtcattagccagctgagagagtctctgttctttggtcaygtgccacacttgattgagttagggtcatgtgggtggtaaaaagtattatgtcctataaaacctgtcagaattggcatagcaggtactcagcattatccat

SEQ ID NO: 550007 - DNA, 201 bp, Homo sapiens
cagtcctaccaacagtgcacaagagttctaatttttccccatccttgccagcacttatttttttgtgctttttttttttttttgaggctggagtctcgccytgtcatccaggctggagtgcagtggtacagtcttggctcactgcaacccctacctcccacattcaagtgattctcgtgcctcagcctcccaagtagctgg

SEQ ID NO: 550008 - DNA, 201 bp, Homo sapiens
tccatggatgtagaacccatggatatggagggtcagctgtatatccaaagcctaactatttctcatcatttgacctggattgttgcaagtctcctaaatgscctccctgcttctgcccttgccagtgcactgttcacaactcagcagccaaagaaagagattcttttaaagcataaatcacatttgctcaatatttcccag

SEQ ID NO: 550009 - DNA, 201 bp, Homo sapiens
gagagctgttctctagtggttaacatggtattctttaagaagaaaaaacaaagccaaagaaaactcattatctggcatgttcgccttaaagatggtactgrgtagaatctggagttttcatctcttttcaaagctgcatatctctcatatttggtattggcctctaagtctaatattgcagttggaattcttgctgtatta

SEQ ID NO: 550010 - DNA, 201 bp, Homo sapiens
aaacaaagccaaagaaaactcattatctggcatgttcgccttaaagatggtactgggtagaatctggagttttcatctcttttcaaagctgcatatctctyatatttggtattggcctctaagtctaatattgcagttggaattcttgctgtattattttttaagcaagtgttaggtgcatttaactgctttcttcatcca

SEQ ID NO: 550011 - DNA, 201 bp, Homo sapiens
tgagtgggtgattagaagaagatggaaaagggtagaatggctgggcgcggtggctcacacctgtaatcccagcactttgggtggccaaggtgggtgggtcrtttgagaccatcctggctaacatggtgaaaccccatatctaccaaaaatacaaaaattagctgggtgtggtggcaagcatctgtagtcccagcctcagga

SEQ ID NO: 550012 - DNA, 201 bp, Homo sapiens
cccagcactttgggtggccaaggtgggtgggtcgtttgagaccatcctggctaacatggtgaaaccccatatctaccaaaaatacaaaaattagctgggtrtggtggcaagcatctgtagtcccagcctcaggaggctgaggcaggacagttgcttgaatctggtggcgaaggttgcagtgagccaagatggtgccactgt

SEQ ID NO: 550013 - DNA, 201 bp, Homo sapiens
atccgcctgcctcggcctcccaaagtgctgggattacaggtgtgagccaccacgcccgacctattttctatttttcaatgggagtcatcctaatgggtgtraagtggtcagtttttataattttagactttctaatatatgtgtagtgatatctcattgtagttttcatttgcattttcctaatgagtaataatgttgagc

SEQ ID NO: 550014 - DNA, 201 bp, Homo sapiens
gatgcaccactgcactccagcctgggtgacagagtgtaagactgtctcaaaaaaaaaaaaaaaaaaaacatatatatatatatatgtatatatatatatayacacacacacacacacacacacgtgggaatgtaaggcttattttcttggcacatggatattcaattgcttctttaccatttattgaaaagactgtccatt

SEQ ID NO: 550015 - DNA, 201 bp, Homo sapiens
ggcgtgaacccgggagacggagcttgcagtgaaccgagattgtgccactgcacttcagcctgggcgacagagcaagattccatctcaaaaaaaaaaaaaawaaaaaaaattggattattttcttattactgagtttcgagagttctttaaatacatgttccaaatgcaagtttctttgccagataagtaatttggaaatat

SEQ ID NO: 550016 - DNA, 201 bp, Homo sapiens
tcttgctctgttgcccaagctggaatgcaatggcatgatcttggctcgctacaacctccccctcctgggttcaagcaattctccctgcctcagtctcccamgtagctgggattacaggcacccgccaccacgcctggctaatttttgtatttttagtagagacagggttttgccatgttggccaggctggtttcgaactcc

SEQ ID NO: 550017 - DNA, 201 bp, Homo sapiens
ttgcactccggcctgggcaacaaaagcaaaactccgtctcaaaaaaaaaaaaaaaaaagataataagcatattggactaaaaactttctttgtgcacctttgtaattcctcccttctgcctatctctgccccctctaatccccaggcaagattgaccactgatctagtgtctactgcagttagtttgcattttctaaagtt

SEQ ID NO: 550018 - DNA, 201 bp, Homo sapiens
tattattgatgtagaatgtaacaaagtaaatcatccttcaactccattattctaatgtaagtataatctctttagtttagtgccccatgggttttttttttataataacacttaaaaagaaataccaacaacttcctttctggtatccctgcaaatggaaaactttctatgaaattataagtacttaaagtagaaaaggat

SEQ ID NO: 550019 - DNA, 201 bp, Homo sapiens
gtgaattgcttacaatgtaagtgataatcaaaagctcacaactcaggctacttgggacagtaataaatttgcaatctcaatattctcatccactgattcttagtacagtcagtcagtatgagtatgggccagaaattgctctcaccaaggtcaccattgctctgatggccagatctagtgattcttttcagtctttatccc

SEQ ID NO: 550020 - DNA, 201 bp, Homo sapiens
tttttgttttgtgttaaagtgtaaactgaatattcagacattttacataatatacatttgttttgtttgtatgttgtagatatcattccatgatagtacayacagatctacttcattgtgtttttaaataattgaaaagtactccatagcacaaacataccatgatttactgaacagttctcttggtaatagacatttagg

SEQ ID NO: 550021 - DNA, 201 bp, Homo sapiens
tagagacagcatttcacgttgtgcccaggcttgtgtttgtatctctaatgaccttttttttttttttgcattttttctatacatatatatatatatatataaagatttgtgtgtgtgtgatcatgattaatttttagatttttggtggaaccttagacattgcctagcaccccttttccatccctttcccattttgtaaat

SEQ ID NO: 550022 - DNA, 201 bp, Homo sapiens
gtagagacagcatttcacgttgtgcccaggcttgtgtttgtatctctaatgaccttttttttttttttgcattttttctatacatatatatatatatatataaagatttgtgtgtgtgtgatcatgattaatttttagatttttggtggaaccttagacattgcctagcaccccttttccatccctttcccattttgtaaa

SEQ ID NO: 550023 - DNA, 201 bp, Homo sapiens
gccaccatgcgccgctgatttttctgtttttttgtagagacagcatttcacgttgtgcccaggcttgtgtttgtatctctaatgaccttttttttttttttgcattttttctatacatatatatatatatatataaagatttgtgtgtgtgtgatcatgattaatttttagatttttggtggaaccttagacattgcctag

SEQ ID NO: 550024 - DNA, 201 bp, Homo sapiens
ctaaaccattaaacagacgctctgtactagaaaagaatcttataaaagtaactgttgcaccatttaatccaacagtttgtgatgctctgcttgataaggaygagactgattcgtccaaagatactgaaaaactctcttcccttggagaagagatgagagaagatggtcttagcccaaatgaaagcaaactttgtactgaat

SEQ ID NO: 550025 - DNA, 201 bp, Homo sapiens
acgtgccacacttgattgagttagggtcatgtgggtggtaaaaagtattatgtcctataaaacctgtcagaattggcatagcaggtactcagcattatccrtcctcctccattatgatataaaaattgattcactttaaacttactaagaacagttattaaactggatgtttccccaaaaccagtcaccttcatatttata

SEQ ID NO: 550026 - DNA, 201 bp, Homo sapiens
ctttctaatctcaactatgaaatgttgctcccagaaaattttttaaggaaagtcaatcctatgatagttttatattgttggaattctggctttgtcattasacatgtgactttgggcaaattagttaacttttctgtgcctcggtttctttacagttttatatacttttgtctgtaaagcggggaaaataccttataggat

SEQ ID NO: 550027 - DNA, 201 bp, Homo sapiens
ttctaatctcaactatgaaatgttgctcccagaaaattttttaaggaaagtcaatcctatgatagttttatattgttggaattctggctttgtcattagasatgtgactttgggcaaattagttaacttttctgtgcctcggtttctttacagttttatatacttttgtctgtaaagcggggaaaataccttataggattg

SEQ ID NO: 550028 - DNA, 201 bp, Homo sapiens
gatatgatgactgctctctgcagccttgacctcccatcctcaagtgatcctctcacctcagccccatgagtagctggaactataggcgtgtgccaccatgygccgctgatttttctgtttttttgtagagacagcatttcacgttgtgcccaggcttgtgtttgtatctctaatgaccttttttttttttttgcatttttt

SEQ ID NO: 550029 - DNA, 201 bp, Homo sapiens
tttttcttttgagacagggtcttgctctgtcaccctggctggagtgcagcgatatgatgactgctctctgcagccttgacctcccatcctcaagtgatccyctcacctcagccccatgagtagctggaactataggcgtgtgccaccatgcgccgctgatttttctgtttttttgtagagacagcatttcacgttgtgccc

SEQ ID NO: 550030 - DNA, 201 bp, Homo sapiens
ctgggaggcggagcttgcagtgagccaagatcgcaagatcgtgccactgcactctagcctgggcaacagagtgagactccgtctcaaaaaaaaaaaaaaaaggaatgcatgaactaaagttaaagctcagggtgtggtatggagggtcatggagtaggggaaattttatagttaacaaggctacaagtacttttccaaatt

SEQ ID NO: 550031 - DNA, 201 bp, Homo sapiens
agaatggcgtgaacctgggaggcggagcttgcagtgagccaagatcgcaagatcgtgccactgcactctagcctgggcaacagagtgagactccgtctcaraaaaaaaaaaaaaaggaatgcatgaactaaagttaaagctcagggtgtggtatggagggtcatggagtaggggaaattttatagttaacaaggctacaag

SEQ ID NO: 550032 - DNA, 201 bp, Homo sapiens
cccgggaggcagacagagcttgcagtgagccgagatcgcgccactgcactccagtctgggctacagagctagactccgtttcaaaaaaaaaaaaaaaaaaagaggaagtaacatcagacatcagaaagagaatggtttgtacaaattaaaattatctcctcctctctatatataccatatatatggtattgttttgtatac

SEQ ID NO: 550033 - DNA, 201 bp, Homo sapiens
gagcagtcttctggggaagatgatggtgggcatgttgagaagggagaaagagggagtcaaattctacttgatactccccgagagaaaaattcatcgtacarcctgggaccagtagctgagactcctgacctcttcaaactacctcagctaagtacatcaagtggtcatggaccagctcatactaaaccattaaacagacgc

SEQ ID NO: 550034 - DNA, 201 bp, Homo sapiens
aatgaatgaatggtggctgctattattgcttcaccttcaccctccaagagtaatctccccattctggtttatagtttctgtgctcactgcttgtgataatygtaagtatatattgttgagaacagtgcctgttttctctttccctgaaaacacatactttgacgttggctgacatagttcactcagctgttcctaaccact

SEQ ID NO: 550035 - DNA, 201 bp, Homo sapiens
gtttctgtgctcactgcttgtgataatcgtaagtatatattgttgagaacagtgcctgttttctctttccctgaaaacacatactttgacgttggctgacrtagttcactcagctgttcctaaccactgatccctctgtatcacaggtatctcgggggagctttgtgccttgatggatcaagttcatcatatgcagcactc

SEQ ID NO: 550036 - DNA, 201 bp, Homo sapiens
atttcatgttcttttgctgttttgtgctttgccgattttggattttatttttcacaaaatttttatttaaaaaactcgtcaccttttggaaatgcccattrccgacttgaatttttttgtatgaagtccctcctgattttgtgtgtgtgtgtctgtgtttaagcaagcgttcggttggtatagtttttttttgttttttta

SEQ ID NO: 550037 - DNA, 201 bp, Homo sapiens
ttggtaatagacatttaggttgcctccaggatttggctactttgaacatccatgtatatatatatgaagttctagaagtgaaattgctgggtcaaatggtrtagtcaaattactcttcacaaaatatcgtactgacttaacgcttttactgatagtgtgtgaatgctcgtttctccacatcctcaccaatccagattatca

SEQ ID NO: 550038 - DNA, 201 bp, Homo sapiens
ctattttttatggagtgataaagcctgctgagtgcgtttcgtgctgtgtgcttcacatgtattgcatttgggaaaggttggaaatcaaaggccagggggargtcttgtccactggaaataatctctgctcttggctgtacctgtcagaccctgcttggtaatggtcttgactttagagcttgaaagaggatgtgggcttgc

SEQ ID NO: 550039 - DNA, 201 bp, Homo sapiens
ctccgtctcaaaaaaaaaaaaaaaaaagataataagcatattggactaaaaactttctttgtgcacctttgtaattcctcccttctgcctatctctgcccsctctaatccccaggcaagattgaccactgatctagtgtctactgcagttagtttgcattttctaaagttttatgtgatggaatcatacactatgtactct

SEQ ID NO: 550040 - DNA, 201 bp, Homo sapiens
cattcttgttagcatctctaaatttggaggaagatgaggttcaaactataagctaaaatgaggtttttggattattagccccacctgggtttgaatcctgrctttcctgatttactagatgatagatgagtatcttttctttctttttttttcttttttttttggagacagtgtcttgctctgtcactcaggttggagtgc

SEQ ID NO: 550041 - DNA, 201 bp, Homo sapiens
gtagataaggtaatgaaaaacatgtaaacgagctgaaaagtctccactgtctagggctttgattttcaaagtgtgcttctcagctgggcatagtaactcamgcctgtaatcccagcactttgagagagcaaggtgggtggatcacttgaggtcaggagttcaagaacagcctggccaacatggtgaaaccctgtctctact

SEQ ID NO: 550042 - DNA, 201 bp, Homo sapiens
agataaggtaatgaaaaacatgtaaacgagctgaaaagtctccactgtctagggctttgattttcaaagtgtgcttctcagctgggcatagtaactcacgyctgtaatcccagcactttgagagagcaaggtgggtggatcacttgaggtcaggagttcaagaacagcctggccaacatggtgaaaccctgtctctactaa

SEQ ID NO: 550043 - DNA, 201 bp, Homo sapiens
ctgaagtgttttaaagcacattttctttttgaaaagaaacctgttgctgcagcttagcgcatctgttctctgtgtccatgtgggaggagaatcctggcacyctcatctagtgaaatgttacctaaagcaaagatttgcagccctgggttgttttttccgtcctgcagtgtttttagttacttcgaaggaatttgcaaaact

SEQ ID NO: 550044 - DNA, 201 bp, Homo sapiens
ctaccaaaaaaaaattaaaaggttagccgggcatggtgacatacacctgtagtccttgctactcagaaggctaaggcaggaggattgcttaagcccagaaragggaggttgcattgatgcaccactgcactccagcctgggtgacagagtgtaagactgtctcaaaaaaaaaaaaaaaaaaaacatatatatatatatatg

SEQ ID NO: 550045 - DNA, 201 bp, Homo sapiens
tctctttccctgaaaacacatactttgacgttggctgacatagttcactcagctgttcctaaccactgatccctctgtatcacaggtatctcgggggagcwttgtgccttgatggatcaagttcatcatatgcagcactcaaaatggcagcatccttcggacctcaccacgcggtgagtgggtgattagaagaagatggaa

SEQ ID NO: 550046 - DNA, 201 bp, Homo sapiens
caagtcggcgggcgacagatgcccctcaccccgctgaggaaaagggaagctccctggtcgtcttgagagtcggggagcgccgtctgcagtcccctgcccastgggggtgggggccgcctctgtcccggccggctcggcgggaggctgttgctggcgggaagatagccgcgggcttttctgccgcgtctcgcgggtgggggc

SEQ ID NO: 550047 - DNA, 201 bp, Homo sapiens
ggagagagctgttctctagtggttaacatggtattctttaagaagaaaaaacaaagccaaagaaaactcattatctggcatgttcgccttaaagatggtastgggtagaatctggagttttcatctcttttcaaagctgcatatctctcatatttggtattggcctctaagtctaatattgcagttggaattcttgctgta

SEQ ID NO: 550048 - DNA, 201 bp, Homo sapiens
aaaacgctatattcctgtttctaatgggctgtttttcttttttctggtttgctttattcaaggactaatgttccgacgttttcacagtcaaatctagaacrgcagaagcagctttatctcaggagtgtcattgctcatatagaagacccagaggacactaaccaaggtaacatggtacccagagaaaggcatataaaacat

SEQ ID NO: 550049 - DNA, 201 bp, Homo sapiens
atcagaagttctcttcttttgctaacttttctattttctttacattattaatcttatattttcagttgtttgaggcttccggtgacccagggcactttttyttcatcctttgatagttttatgacttaagttttctagactcttcaaacactttatttgctttcaaactgtaatggggagaagaagctaaaggagcatcta

SEQ ID NO: 550050 - DNA, 201 bp, Homo sapiens
caaacactttatttgctttcaaactgtaatggggagaagaagctaaaggagcatctatctatcttgcttactggggaattcatcactcatccaccttattraagcatctctgctgacatgaaagggtatcagttctgatttaatggatgagcctccataaaaagttttctgtttagttctctataaattttggtattttgt

SEQ ID NO: 550051 - DNA, 201 bp, Homo sapiens
tcagctcactgcaaccttcgtctcccgagttcaagcgattcccctgcctcaacctcctgagtagctgggattacagacaggtaccaccctgcccagttaatttttttttttttttggtatttttagaagaggtggggtttcaccacattggccaggctgatctcgaactcctgacctcaaatgatctgcccctgctcagcc

SEQ ID NO: 550052 - DNA, 201 bp, Homo sapiens
acaggagattgaacaggcatttgctaacctataagaaacaaagtccttgctgagaaaatcttgttagtttagatggctcgatttggacattggtggtctcrtgagcagttatgcttatacacgttgagtgctttaagtatccttgttccttcagtgtacatatctaaaaaaaatggaacccccagtagtttattttgcatt

SEQ ID NO: 550053 - DNA, 201 bp, Homo sapiens
gaatttgactactctagctaactcatataagtggaaccattcaatatttatacttttgtgactggcttattttcatttaacatgatgtcttcaaggtttayacatgttgtggcatatgtcagaatttccttccttttaaaggctgaataatgttccattgtacattgtgtgtgtgtgtgtgtgtgtgtgtgtgtatataca

SEQ ID NO: 550054 - DNA, 201 bp, Homo sapiens
ctttggagaaatttaacttggttacaggtatggctagaagttactggctatttcagcactatttttgctatcctttttcttgtcccaaaatctgagaaagragtacctcacactttatggagtaaacatttattaaataggtactgagtacaggatgcactttgcaagttacaggacatacagctttgtgtggtatattcc

SEQ ID NO: 550055 - DNA, 201 bp, Homo sapiens
cgggagtgtctgaggcccagtgtgttttttagggttaccccatgtaaagcacttaccgctgtgcttggaattcagcagctgtcaaaggtgcaatttcaggrgcagggaacctttgaggatctgggcccgaccctcactacccctgagatattagttcccaggcctgttttcccacaggattgtgggctctctgcttcctta

SEQ ID NO: 550056 - DNA, 201 bp, Homo sapiens
tattttcatttaacatgatgtcttcaaggtttatacatgttgtggcatatgtcagaatttccttccttttaaaggctgaataatgttccattgtacattgtgtgtgtgtgtgtgtgtgtgtgtgtgtatatacacacatatgtatacacacatacacacataccacattttgtttatgtgttcaatggacacttgggttgc

SEQ ID NO: 550057 - DNA, 201 bp, Homo sapiens
attttcatttaacatgatgtcttcaaggtttatacatgttgtggcatatgtcagaatttccttccttttaaaggctgaataatgttccattgtacattgtgtgtgtgtgtgtgtgtgtgtgtgtgtatatacacacatatgtatacacacatacacacataccacattttgtttatgtgttcaatggacacttgggttgct

SEQ ID NO: 550058 - DNA, 201 bp, Homo sapiens
acctaaatccattttttattagagttataaaatggtgatattcacattttctttccttattataggaatattaattagaacagtcctatgaagaaaaaaawtatcttatctatttggtacccagatataaagttcacacacaaaatgcaagataaattcttctttccccattgcccctttactaaagcagttttcagaata

SEQ ID NO: 550059 - DNA, 201 bp, Homo sapiens
ggccaggctggtctcgaactcctgacctcaagtgatccacccgcctcccaaagtgctgggactacaggcgtgagccactgcccctggcccttttttttttkttgttgagctggagtctcgctctgtctcccaggctggagtgcaatggcacgatcccggctcactgcaacttctgcctcctgggttcaagtgattctctta

SEQ ID NO: 550060 - DNA, 201 bp, Homo sapiens
ttggctattatcagagctgttataaacatttaggtagaagtctttccatgatattattttagaagtttagtttctgtatcctctttattaatcgtaaagtrttatacaaagctgtaaagattagtgatgacttcatttcgcagtttccttatctattaaaagaggataatacctaccctacctattgcagagttattttta

SEQ ID NO: 550061 - DNA, 201 bp, Homo sapiens
taatatacactgttaaattgtcttttagagaagctatggtaatttatactgtagttccctcagatctcatttatcctgggtgttagcataaaataaaaataaaaaaaaaagaaatacactaaaattttcagaagaaaacttaaaccttccttaatttcacctcccagagataggtttagtgtatattctcacggacttaaa

SEQ ID NO: 550062 - DNA, 201 bp, Homo sapiens
gggcctaagagaccctataatttctttggaattttagataaggtgcagtaaaaatcttacttccctttgtagcttacttattttttcatggatacgtgtgratcacttaaagttatcaaaagtaaactagttgttatctaggaatgctttggagaaatttaacttggttacaggtatggctagaagttactggctatttca

SEQ ID NO: 550063 - DNA, 201 bp, Homo sapiens
ggtggactgatgcctgttttgcacactcgtcacttccagggcactttggaacttgaggtgggagactggaaggataataggaggtaagggaacctccccayagaagaaaacttatacacataagttttgccaaagcaatgatagttttcttactgatatcatgggtgatcacagttaaagaaaaacttgtgatatttctgt

SEQ ID NO: 550064 - DNA, 201 bp, Homo sapiens
cacaagaattatggaggagcttatgaaaaataaaaattttcaggcgctgcctctagagattttgattgtgttggtctggattagggtccaacaaattacatttttttttttttttgagacagagtcacgttcagctgcccagagtagctgagattacaggcacccaccatcatgctcagctaatttttgtattttagtaga

SEQ ID NO: 550065 - DNA, 201 bp, Homo sapiens
cgttggccaggctggtctcgaactcctgacctcaagggatccgccctcctacgcctccccaagtgctgggattacaggcttgaaccaccatgcctggccaygaatttgattatatagattaatagaatccaaatgggacattaacattctttttgcaaagagatatataacttgtttcaaatgtaagagcactttttaaaa

SEQ ID NO: 550066 - DNA, 201 bp, Homo sapiens
cagcacaaagaatgtaccacagtttttctaaccattttcatatctcattggtgaacttttaaggtttttcttatttgtggatgaatatctggtacatatayattcttccttcacttgaataatttctttaagaaagagttctagaagtgggattctaggtgaaagaatttgaattcttttatgactgttgataaaaattgc

SEQ ID NO: 550067 - DNA, 201 bp, Homo sapiens
atcggaattcaatcaaggctcttacattctatttaaccgacttgtctctttcatctcttttactgtacagattgcatcccttacctcccccctcttttttktccccttaaaatttatttgttttggaaactgaatctttggtcctgtggagttccctgttttctggatttttgctgtttacatccctggggtatcatttaa

SEQ ID NO: 550068 - DNA, 201 bp, Homo sapiens
taaatcactcctttatagttgtggtgaacatgaaccactagaaagacttcttcactcaacacacatcaggtatgtagcaattttttagaatttactttcastttgataatgaaggagaataagtcattgtgattgcattcccatgtgaaagctatgagatgccccattttagttttctcaacaacctaaacattatataaa

SEQ ID NO: 550069 - DNA, 201 bp, Homo sapiens
cacacttataaaagcagaaatcaccataaatcttttaggcttttttgcttatgtttcttagtgactaaaagtcaattaggagtacattagcctatttgttkcctagtcttagtctttattttacacttttatcctccctttgcactttgctcattagtaactcccaccagagaacaaatgaaaatataacactttatgatt

SEQ ID NO: 550070 - DNA, 201 bp, Homo sapiens
gacatacagctttgtgtggtatattcctaagttcccacaattgccagttctaactagtgtttattttttgagacggagttttgctctgtcggccaggctgsagtgcagtggtgtgatttcagctcactgcaacctccacatcccaggctcaagcaattcttgtgcctcagcctcccaaatagctaagattacaggcacgtg

SEQ ID NO: 550071 - DNA, 201 bp, Homo sapiens
cggaattcaatcaaggctcttacattctatttaaccgacttgtctctttcatctcttttactgtacagattgcatcccttacctcccccctcttttttttmcccttaaaatttatttgttttggaaactgaatctttggtcctgtggagttccctgttttctggatttttgctgtttacatccctggggtatcatttaaca

SEQ ID NO: 550072 - DNA, 201 bp, Homo sapiens
ggcatcatttattctccgtactgatcactacatcatggtaagtgaattcaattaaatattacatatgttaaatgcagagtcctaaataatatacagtagtsctcccttatccatgatttcactttccatggtttcagttaccgaaggtcatccatggtctgaaaatattatatataataagatattttgagagacagagac

SEQ ID NO: 550073 - DNA, 201 bp, Homo sapiens
cagcactttgggaagccaaggtgagggggatcacctgcggtcaggagttcgagaccagcctggccaacatggtgaaaccctatctctgctaaaaatagccrggtgtggtggcgggcacctgtaatcccagctacttgggaggctgaggcagaggttgcagtgagccaagactgcgccactgcactccagcctgggtgacgg

SEQ ID NO: 550074 - DNA, 201 bp, Homo sapiens
gactggtttgtgtcagagtgcaaatcaattattcctgaaatgatggagagatatttcaccaacttgttctccttgaggtttttcttttttttttttttttwattgatcattcttgggtgtttctcgcagagggggatttggcaggatcacaggacaatagtggagggaaggtcagcagataaacaagtgaacaaaggtctc

SEQ ID NO: 550075 - DNA, 201 bp, Homo sapiens
ggtggccgggcagaggggctcctcacttcccagtaggggcggctgggcagaggcgcccctcacctcccggactgggcggctggccaggcggggggctgacycccccacctccctcccggacgggtcggctggccgggcggggggctgaccccccacctccctcccggatggggcggctggccgagcggggggctgaccccc

SEQ ID NO: 550076 - DNA, 201 bp, Homo sapiens
agaaacacatttcataagactatagctgccttagattatgattcctctgatggatgtgggcagtcaattgaaaaatttatggaaaggattcaccattctasatgccattaagaacagttgcaattaatgggaggaggttaaaataacaacatgaacaggagggaagaagttgattccaaccctcatggatgactttgaggg

SEQ ID NO: 550077 - DNA, 201 bp, Homo sapiens
gatatttggatccaacaagtaagtgagaacaagtgatgtttgtctttctgtccctggcttattttacttaacatagtggtctccagttccatccatgttgytgcaaatgataggatcttattcttttttgatggctgaatagtactctattatgtatatatacctcattttctttatccattcatctgttgatggacactt

SEQ ID NO: 550078 - DNA, 201 bp, Homo sapiens
gaggcttcaggaatctgcttggtgctttatttttactgtggctgagctggtacccaggtggcaaaacaaagtcctctttacttttctctcttgtttccacragaggaaggagtctctctttgagctgcactgcctggagagttgggggatgggtgacacaagtactcccctggccaccacaactggtgtctcactgggtct

SEQ ID NO: 550079 - DNA, 201 bp, Homo sapiens
gtcttatgatctctattttaacattaatgatggtctgttgttgtgcccaaactctaaaagggagggagtatgacaaggtgtgtctgacctccctttccatygtggctgagaactcaatttttaaggtttctttggggtccccttggccaagagatatcccaaaattagttcaaggtcaaaaaagatttaatttataacttg

SEQ ID NO: 550080 - DNA, 201 bp, Homo sapiens
attttgccaaagaatatattaacaattttgacaatagaattagactcttgagggtataacaaatggctcatggattcttcataaatcattttctgggacayggttttggaaaataaagctcgtgcctaacatgtttaaaggacatttagttaacaccaagttaacttaagggtgctgagaagactgctacagaattagtat

SEQ ID NO: 550081 - DNA, 201 bp, Homo sapiens
cgccagggcccggagacagcaacatcttctggggcctgcaggtgacgcggcgggaagccgggccgggaggcaggtgcagatcgggcaccgtgcggtgggasccttgcgggtgttgggccccacgctccaggctggggacctcagtcagattgtaactcgaggctctgtctagtgctggccctgtccttacctggggggttc

SEQ ID NO: 550082 - DNA, 201 bp, Homo sapiens
gctcctgaaggccatgtctcaccactggcagctgggcagaagcccagcctctgtgtctgtagcccaggcctctaccccagtagcaggtggagggccaggaytggtgggtgagctttagggagcagctgctcgtttggagtcctggacgttggagggattacccactactgatacctgcagaatggactgcagaaaagtctc

SEQ ID NO: 550083 - DNA, 201 bp, Homo sapiens
gtattaaatagggaacctggtcccttcattcattcatgggaaagttctgtccttttaagtacagtaaactgtagataagtcagatttgaaactcaaaatcygtgggagaagacacttattatctaatattttacctactcattgtatttattgaatatctataggttccccacagtctagtagcaactagacctttagatc

SEQ ID NO: 550084 - DNA, 201 bp, Homo sapiens
taaatttctgtgataggaggctgggtgcggtggctcacgcctgtaatcccggcactttgggaggccgaggtgggcggatcacaaggtcgggagatagagamcatcctggctaacacagtgaaaccccatctctactaaaaatacaaaaaattagcccggtgtggtggcgggcacctgtagtctcagctactcgggaggctg

SEQ ID NO: 550085 - DNA, 201 bp, Homo sapiens
atgtcattgttagcctttgagatgacaattggtatggtcctttttttgtgacatatgctgcttctttttttattattattattatactttaagttctgggwtacatgtgcagaatgtgcaggtttgttacataggtatatatgtgccatggtggtttgctgcacccatcaacctgtcatctacattaggtatttctcctaa

SEQ ID NO: 550086 - DNA, 201 bp, Homo sapiens
atgatcattagcatttttagcagtaaggtttttttttgtttttttggttttttttttgagacagggtctctctgtcacccaggctggagtgcaatggcgcratctcagctcactgcaatctccaccttccaggctcaaagtgatcctcccacctcagcctctcgggtagctgggaccacaggcgtgagccaccatgcctgg

SEQ ID NO: 550087 - DNA, 201 bp, Homo sapiens
ctttataaaagaagcaaaaagtgtgtccaatcttaaaagatgagtagcatttgaagaagtaagacatgccaaggaggatattttaggcaaaaagataggtrtgaagagatctttaaaagctacagactgggaaaccaaaaactgaactttgcaggggcagtaagaaaactggtgtcaccagaattaacattcatactgagg

SEQ ID NO: 550088 - DNA, 201 bp, Homo sapiens
atagaagttgagatgtgatgggtaatagttcataattcagcataggttcttaaggaggcaagtaacataattaaaatagtgttttataaatggcaatcccrcaataaaaaaggaaaaagatgggataaaaaggaaaaaagagatattggagttatgtggactaaataggagggtcctgcaatagtctagtcatgataatga

SEQ ID NO: 550089 - DNA, 201 bp, Homo sapiens
aagaacatggggccaggcgcagtggctcatgcctgtaatcccagcactttgggagaccgaggcaggcgcatcacttgaggtcaggagtttgagaccagccwggccaacgtggtgaaaccccatctctactaaaaatacaaaaattagccaggtgtggtggcgtgcctgtaattccagctacctgggaggctgaggaaggag

SEQ ID NO: 550090 - DNA, 201 bp, Homo sapiens
attccccgactccccttccctccagcacctagccatgttttaaggtaagtataaagaaggcctcccccacctctttctgggatttgagcatggaacttcayaaggaatagagaggcagagtctccgagccataaccctcccaacctcatattttctcaccccctcttttagaatagacataaatctgagagattcccaagc

SEQ ID NO: 550091 - DNA, 201 bp, Homo sapiens
gggccttgaaggatgagccactgattccaacatgtgggacagggccacattcagatcctaagtctccccctccatccagccactagactgggcatgtctgygtcctgtgagaagggcccaactcctagttagcagagaggaggagagctagctatgctaggaagtagagtcgggggtcaacccgggatgaggacaggaaac

SEQ ID NO: 550092 - DNA, 201 bp, Homo sapiens
tggcaaatagaccttctcccttcaatctgtctcccgtgctcttgccacactgaacttccctattatgcctttggtgcaaaaccactggtagctcttcatgrcttataagaataaagttagcaactcttcggcattcaggacatttctttctttctttcttttctaaaagagacatggtctcactctattgcccgggctgaa

SEQ ID NO: 550093 - DNA, 201 bp, Homo sapiens
cctctgataatccctttatccccaggcttgaggctcttcccttgtcatcttcaattatgtctgtctcccatttcctcacacattcttcagtgtagaaatcyttcagttgctgctagtgcactgttttttcttttttctttttttttgagacggagtctcactctgtcccccaggctggtgtgcagtggcggatcactgcaa

SEQ ID NO: 550094 - DNA, 201 bp, Homo sapiens
aagaaaaaaaaaaaaagaagaagaagaaaaaaagaacaaacatgggacacatcagggttaaaatcagggttaaaagctctgacacttattacctgtagaamctttcactgaggttaaaaggacttaatataatcatagagatggaaagtaccttgcagttcctgccccaccacaggcagtcaacactcatttgttgacaga

SEQ ID NO: 550095 - DNA, 201 bp, Homo sapiens
agtatgggaccagctgtagagagatcaaaatacagcaacttaatagatactagggagcacatgaatccaggaggatgagtgtgagggtcagcccagggatrgagaggggacagtgcgaactggcagtggatggggacaggtccacctgtgagggcatcaaggcaagggtagaactaaacagcaaaagaggagaaatcctaa

SEQ ID NO: 550096 - DNA, 201 bp, Homo sapiens
caaagtgtattcatctccaggcaagattggcttcccggttggctaagctttccccagcccatctcacacagtgtgttctagcccaaggaggagccgacccygctgagagggttgcccttggtccccacctcctgtgctcctccacgaagttgacaatctcctcttcgctattgggcttgtctgggatggtcacaggctctt

SEQ ID NO: 550097 - DNA, 201 bp, Homo sapiens
cctagtggctgactgctctaacaaccatggctctggatgggaggggttggaagcggagtttgcagaggtctggccagccccgcctgtattccccgactccycttccctccagcacctagccatgttttaaggtaagtataaagaaggcctcccccacctctttctgggatttgagcatggaacttcataaggaatagagag

SEQ ID NO: 550098 - DNA, 201 bp, Homo sapiens
tgagggttacccacgctctgagtctttgctcttgaagtagccaatgagtttgatctcatcctcaatattctcaaacgcctgcagctctcgttcaccttcartcaattccacagggtcctctaggacctgaaagaggaggacattgcaggaagagagtttctatcctcaagtagaaccagaaagggacctagggaaaagaag

SEQ ID NO: 550099 - DNA, 201 bp, Homo sapiens
ctatcctcaagtagaaccagaaagggacctagggaaaagaaggctggggaactggaggagggggctagatgttgacagtgtgtgggtgtgtgtgtgggggrttgcatgtgcgtgtgtgtgtatagtgtgtgatgtgtgcagtgtgtggtgtgcatgtgtggtgtgtgtgtgcatgtgatatatatgtatggtgggtgtgtg

SEQ ID NO: 550100 - DNA, 201 bp, Homo sapiens
acttcagttaggcctagggagtgagccgggcgcaggggtgaggtagtgagccatgatcccaggcttcccacagattcaaggtccaaatcctcggccacagsccatttgataatcaccggggccccacatgctccacctcatgggcccgttgccccacccacctcctctgacccagaggccgacaggcctgaggtctctgcc

SEQ ID NO: 550101 - DNA, 201 bp, Homo sapiens
ccaggcaagcatgttcctgccttgatgaagggagccagtagtatgggagagtaagtactgtatatactgcaagggagcttgcagtgatccaccactgcacrctagcctgggggacagagtgattggatatttccagctgtggactactatgaaggaagggaattatgtgtgagtgcccggcaggattattcaacctcagca

SEQ ID NO: 550102 - DNA, 201 bp, Homo sapiens
ggggcaggcagtggagttttcaagcaaggccgtcaggtccaggggagtccttacatcaagcagaaactccacgatggtgtcagcagaaaactcgccatcgwactcaatgacttcatctcccttgaatacatacatgctgtccacttcagttaggcctagggagtgagccgggcgcaggggtgaggtagtgagccatgatcc

SEQ ID NO: 550103 - DNA, 201 bp, Homo sapiens
gggactagggggcaggcagtggagttttcaagcaaggccgtcaggtccaggggagtccttacatcaagcagaaactccacgatggtgtcagcagaaaactygccatcgtactcaatgacttcatctcccttgaatacatacatgctgtccacttcagttaggcctagggagtgagccgggcgcaggggtgaggtagtgagc

SEQ ID NO: 550104 - DNA, 201 bp, Homo sapiens
gtgagggtcagcccagggatggagaggggacagtgcgaactggcagtggatggggacaggtccacctgtgagggcatcaaggcaagggtagaactaaacarcaaaagaggagaaatcctaaagggagagaatcgggagggtcagctgggtgcactggcccctcttttctgaggaaaactggataggaaaccctgttctgat

SEQ ID NO: 550105 - DNA, 201 bp, Homo sapiens
gtccctagcaccagcagcaacagcagtgccagccgcagacccggcacagctctgggccccatcctgtctgtagcactcatggaggtagtgggatctgggtkggctctcctggtccagaagaggttagctggggtagggaggggcccctgggtcccagattctgagttaggggctcaagtgggaggggggattggggaatgg

SEQ ID NO: 550106 - DNA, 201 bp, Homo sapiens
tcagttaggcctagggagtgagccgggcgcaggggtgaggtagtgagccatgatcccaggcttcccacagattcaaggtccaaatcctcggccacagcccrtttgataatcaccggggccccacatgctccacctcatgggcccgttgccccacccacctcctctgacccagaggccgacaggcctgaggtctctgcccct

SEQ ID NO: 550107 - DNA, 201 bp, Homo sapiens
gtaggaggggagtggagcaggagacacagggtcatgtcgagaagcagtataatgggggaacaaatattaggaagggagtcagaaagccgggatccttgtcwctgccactgtgacacctgacaagtgtcttaacttgcctggggttgggtttaacatgagaggggtgttagatcatctaaagcccctcttcagctctaaatc

SEQ ID NO: 550108 - DNA, 201 bp, Homo sapiens
gcagaaaactcgccatcgtactcaatgacttcatctcccttgaatacatacatgctgtccacttcagttaggcctagggagtgagccgggcgcaggggtgrggtagtgagccatgatcccaggcttcccacagattcaaggtccaaatcctcggccacagcccatttgataatcaccggggccccacatgctccacctcat

SEQ ID NO: 550109 - DNA, 201 bp, Homo sapiens
aagtgtcttaacttgcctggggttgggtttaacatgagaggggtgttagatcatctaaagcccctcttcagctctaaatctatggagtgggaggagccggrggggggggcaggtagggagtgccagcacgtaggaagggaccaggtcagccatcgattctgggagaggaaactggaggacagcttcaggacatgaggcaga

SEQ ID NO: 550110 - DNA, 201 bp, Homo sapiens
ggcttgtctgggatggtcacaggctcttccatgaaggcctcgtagaaatcaatctcattcagcttcagggtcagcttctttgccacctttgggagaggggrtaggaggggagtggagcaggagacacagggtcatgtcgagaagcagtataatgggggaacaaatattaggaagggagtcagaaagccgggatccttgtca

SEQ ID NO: 550111 - DNA, 201 bp, Homo sapiens
gggcgcaggggtgaggtagtgagccatgatcccaggcttcccacagattcaaggtccaaatcctcggccacagcccatttgataatcaccggggccccacrtgctccacctcatgggcccgttgccccacccacctcctctgacccagaggccgacaggcctgaggtctctgcccctggattaagcctagggggctagcgt

SEQ ID NO: 550112 - DNA, 201 bp, Homo sapiens
tcctgtcagggggtaagaaggagaacagggttttggagaagaccttactatactccctgaagttgaggagcccagaacagatcctagatgttcattgaacytcaattttgtggaaatccagcttcaggaccagatatattctttcgttttttggggtttgtttttttttgtttttgagacagagtttcactctgtccccca

SEQ ID NO: 550113 - DNA, 201 bp, Homo sapiens
catcccccactatcgtccccaattctttgcaggcagggttcattttgagacccaccccttctagttcttcgagagtgaggggaaggtggaatactggaggkgcttgtctgggaacccccagagtacagggaggtcagagctgttgatggtgctgaccacggctggaggaagaggtgggaagtgcagaggtagaggctgaga

SEQ ID NO: 550114 - DNA, 201 bp, Homo sapiens
agccgagatcgtgccagtgcactccagcctggcgacagagcgagactccgtctcaaaaataaataaataaataaataaataaataaataaataaataaatataaaaaggttgggctcagagccccagagtggctgtccaagtcctgctgctgtgtcagtttcctcactggactacaaggatggtgttgaattttctcccca

SEQ ID NO: 550115 - DNA, 201 bp, Homo sapiens
gcccaggcctcatcttcaggtaccatgtttttaattgatctaaggtggggcttaggcatcagtgttttgttttgtttttcgagactgagtctcactctgtygcccaggctgcagtgcaatggcacaatctcggctcactgcaacttccacctcccaggttcaggtgattctcctgcctcagcctcctgagtagctgggata

SEQ ID NO: 550116 - DNA, 201 bp, Homo sapiens
gccgagatcgtgccagtgcactccagcctggcgacagagcgagactccgtctcaaaaataaataaataaataaataaataaataaataaataaataaatawaaaaaggttgggctcagagccccagagtggctgtccaagtcctgctgctgtgtcagtttcctcactggactacaaggatggtgttgaattttctccccat

SEQ ID NO: 550117 - DNA, 201 bp, Homo sapiens
ttttgttttgtttttcgagactgagtctcactctgtcgcccaggctgcagtgcaatggcacaatctcggctcactgcaacttccacctcccaggttcaggygattctcctgcctcagcctcctgagtagctgggataacaggcatgcaccaccacacctggctaatttttgtatttttagtaaagacggggtttcaccacg

SEQ ID NO: 550118 - DNA, 201 bp, Homo sapiens
cgcccaggctgcagtgcaatggcacaatctcggctcactgcaacttccacctcccaggttcaggtgattctcctgcctcagcctcctgagtagctgggatwacaggcatgcaccaccacacctggctaatttttgtatttttagtaaagacggggtttcaccacgttggccaggctggtctcgaactcctgacctcgtgat

SEQ ID NO: 550119 - DNA, 201 bp, Homo sapiens
cttcagctcatccagttccttctccttctgtttcttcttgccgcccccattctctgccgtggtggcggcaggtgagtactcacggccagcctgagggaggragagccggagagtcagggaagagaggggctggggcctccattcccaccactcagccagggagcccaggcagtgggggtgtgtgttcaaaagcagcggctg

SEQ ID NO: 550120 - DNA, 201 bp, Homo sapiens
aagaacttgtcaggaggtcagaagggagaccgaggggattccagctctgaggaatccatgtgtggcatttgagcgtgggtggcagctggcacgaatccttkgttcagaactggcagggccccctcaggagtcagggccaggtcgtgccaaagccccagtggcatcgcggctctgctattcctgaacagctgtgctgctccc

SEQ ID NO: 550121 - DNA, 201 bp, Homo sapiens
tccctcaccattgccacctccttcttcagctcatccagttccttctccttctgtttcttcttgccgcccccattctctgccgtggtggcggcaggtgagtwctcacggccagcctgagggagggagagccggagagtcagggaagagaggggctggggcctccattcccaccactcagccagggagcccaggcagtggggg

SEQ ID NO: 550122 - DNA, 201 bp, Homo sapiens
atgcgggcacctaccgctgcctcgccaaagcctatgttcgagggtctgggacccggcttcgtgaagcagccagtgcccgttcccggcctctccctgtacaygtgcgggaggaaggtgagagggggctgggccctggacggggttcgaggattgtcaaccccttttccttctgtttccatgacccctccctctccgtcagct

SEQ ID NO: 550123 - DNA, 201 bp, Homo sapiens
gagtttcctggggcggtgcttggcggcagccctaaccccatgctccctggccctgcaccctctgaccccatgtcctttgttctgcaggtgtggtgctggargctgtggcatggctagcaggaggcacagtgtaccgcggggagactgcctccctgctgtgcaacatctctgtgcggggtggccccccaggactgcggctgg

SEQ ID NO: 550124 - DNA, 201 bp, Homo sapiens
gtgaatcagatggcctttttttttttcttgagacagggtctcactctgtcacccaggatggaatgcagtgtgcaatttcagctcactgcaccctccgcttytagggctcaagcaatactcccacctcagcctctcaagtagctggggccacaagcatgcaccaccacgctcagctaatttaaaacaattttctttctttct

SEQ ID NO: 550125 - DNA, 201 bp, Homo sapiens
tgaagtctcaaaaaatccaacttccagccctgcagtgcccacctgcacggggtcctctgtggttgatgctgacttgcatgctgagggggcaggctgtgggyagggatgggggtgtctgtgaatggagaaggtgggttcagagaacttgatggggaaagcgcagaggcaagtgtatgggtggaggatgatggcatcctctct

SEQ ID NO: 550126 - DNA, 201 bp, Homo sapiens
tgcagggaaggactagagatgtgggagtggggtggagggagagatggagggggcatgtgtggtgggctgtgggtctaactgtgggcagggggctggggcgkgcagaggagaggagagcactagggtatgtgaccgccgtgggatctgtacacacattggtagtttggagactgttagtttcaagttccaagtatcccactc

SEQ ID NO: 550127 - DNA, 201 bp, Homo sapiens
aggtgtctgctgcccccccagggccccgaggccgccaggccccaacctcacccccacgcatgacggtgcatgaggggcaggagctggcactgggctgcctrgcgaggacaagcacacagaagcacacacacctggcagtgtcctttgggcgatctgtgcccgaggcaccagttgggcggtcaactctgcaggaagtggtgg

SEQ ID NO: 550128 - DNA, 201 bp, Homo sapiens
tgagtggattcaggatcctgatggcagctgggcccagattgcagagaaaagggccgtcctggcccacgtggatgtgcagacgctgtgtaagtgccacttayacatcccactgtgggagctgggagggacagtatcctggtgggcactgtggccacagggggtaccagatagccatcatctgactccaaggaactcatcttc

SEQ ID NO: 550129 - DNA, 201 bp, Homo sapiens
ggggtgcccaggcaggggacgcaggcacctaccactgcactgccgctgagtggattcaggatcctgatggcagctgggcccagattgcagagaaaagggcygtcctggcccacgtggatgtgcagacgctgtgtaagtgccacttatacatcccactgtgggagctgggagggacagtatcctggtgggcactgtggccac

SEQ ID NO: 550130 - DNA, 201 bp, Homo sapiens
ctgtttccatgacccctccctctccgtcagctgtttgcaggccacagcctcacgctcctcttctaccaagattgtgggaataccctgagtttcctggggcrgtgcttggcggcagccctaaccccatgctccctggccctgcaccctctgaccccatgtcctttgttctgcaggtgtggtgctggaggctgtggcatggct

SEQ ID NO: 550131 - DNA, 201 bp, Homo sapiens
cctcaggagtcagggccaggtcgtgccaaagccccagtggcatcgcggctctgctattcctgaacagctgtgctgctccccttggcatagggttcaagaawgggggcaggagtgtgggcctagccagggaaagaggagggttcagagagtagacacacacacacacacacacacacacacacacacacacacacacagttc

SEQ ID NO: 550132 - DNA, 201 bp, Homo sapiens
aaatctttccttctaagaggaggccctcttggggtgatagaataggatagaggctgaggaaggcctgggtagccatgaaaagttcccaaaaaggtaccttyttacttcctcttctgccccagtcttctctcctcccacttccctcaggaaatagagtccttgtcatagaggggctgctcagtttccacctggtgcctattt

SEQ ID NO: 550133 - DNA, 201 bp, Homo sapiens
ttctgcctctgcctttctcaggtgacctaagaggattcatttaattgagtggattgaaatgctttacattcactaactgtctgtggtgggacagagctgasaaaaggaagaaatgcaatcaagggaacagaggcaagagatcaggctggctgagcttcagtgtgaccctcaggaacttcagggacagaagggggcccaggc

SEQ ID NO: 550134 - DNA, 201 bp, Homo sapiens
ggtcctgcatctcagctagggatgccctttccatggggagccagagatgtcaagatgcagctgaaggtcccaagacagtatatcttcctgcagctatgacytcttcctccgtgaagcccatacctcacagctcctaagggcaggctcacagactctcaagcacccccacacagtgacatttatgcttgtgcaggcttgaag

SEQ ID NO: 550135 - DNA, 201 bp, Homo sapiens
ccacgttggccaggctggtctcgaactcctgacctcgtgatccacgcactttggcctcccaaagtgccgggcttacaggcgtgagccactgcgcccagcckcatcggtattttttttaactccccagatgaatcaacaggcagatttgagaaccactgaactatattgtccctaagatctgtagctcatcatagctaacag

SEQ ID NO: 550136 - DNA, 201 bp, Homo sapiens
ttggccaggctggtctcgaactcctgacctcgtgatccacgcactttggcctcccaaagtgccgggcttacaggcgtgagccactgcgcccagccgcatcrgtattttttttaactccccagatgaatcaacaggcagatttgagaaccactgaactatattgtccctaagatctgtagctcatcatagctaacagttagt

SEQ ID NO: 550137 - DNA, 201 bp, Homo sapiens
cgcatcggtattttttttaactccccagatgaatcaacaggcagatttgagaaccactgaactatattgtccctaagatctgtagctcatcatagctaacrgttagtgagcacttattgtagattgcatgtttgtgtctccccagaatttacagattgaacctctgatgtgatggtattaggaggtggggcacttgggaga

SEQ ID NO: 550138 - DNA, 201 bp, Homo sapiens
aactgtgggcagggggctggggcgtgcagaggagaggagagcactagggtatgtgaccgccgtgggatctgtacacacattggtagtttggagactgttastttcaagttccaagtatcccactcagctcctctctcccgctccttccacatcccattcccacttcatccttcctcagcagcctccctcaccctctagact

SEQ ID NO: 550139 - DNA, 201 bp, Homo sapiens
actgtcaccagcctctgggaaagtcctcaaagcccatggcttggaacccacggacaatgctgctcgggacatccggaggggtgctggggtgggggctgggkcatcattcttcctccccacaccccgcccagctgtccttggcactcagggcccctggagctggtgtccggaactacttggtgactctgggagccggatgct

SEQ ID NO: 550140 - DNA, 201 bp, Homo sapiens
accctctcaaggcagaaagtcaaggccacaagtgacctatctagttgccccttaggttttgtagccaaggaacttgaggcccaaagaggttaagtgatttkcacaaagtcacccaataactcagtggctgatgtgggactcaaacccagagttcctcacccaggccagtgctcatcttatcatattaagacccctcctggg

SEQ ID NO: 550141 - DNA, 201 bp, Homo sapiens
cgtctgggacagtcggagaccctggcagacagagaaagccaaagcaacagggtagctttaaataggtccttctccccctctcccccgccttcccctcctcsgaaagaaacgtttgttgaaacaggatccctgaggactcctcccctcccgcccctttagccactggccctagacagcccgtttgtcccacggcatgccccc

SEQ ID NO: 550142 - DNA, 201 bp, Homo sapiens
ccctgcatggaggggaacactgagccaggagagcagaggagatggcccaggcaggggagctagaggacagaggtctgaggatcctgggtagtaacacctayggtagaggaagaggatctggaagatggcaaggtagggaagccagagagatggagaattaggccgagtagaggggccaggaagctgagagaggaacaagtt

SEQ ID NO: 550143 - DNA, 201 bp, Homo sapiens
gaatctatgcctgagtagagtagtgatagggagaagtcaaaagagaggaaaatacagaacctctaagatgtgtgtgaaggtcaatatcatagcaaatatcrgacatgtgaacgggaaaggagagcgactgtttccttcttccagtggggaaggggaagcaaagctgcagcatgcaggactgaggctggagaacaggcctct

SEQ ID NO: 550144 - DNA, 201 bp, Homo sapiens
gttccagaggggcctgctgaagacactgttctctccttgggccttatcccctctggagggagacaccaacccagttctcaacgccaacctgcccccagctycttcccagccccaggccacagggtaagagaggatacctcacctccctgaagacccctctcatcatactcatactgggggttggttatgacttgtttatga

SEQ ID NO: 550145 - DNA, 201 bp, Homo sapiens
ggttgttgagggagtagaatcactctgtaggaatgtcttagcccaacaccatggcaattttacttagagaggggtagaaatactcaggaacttgggggagyaagagtctttggggagccaggggattaggcaggaacgtgtccagaggagagccaggtctggtggtggaatggtagggatggaaagagcaggcctgatgga

SEQ ID NO: 550146 - DNA, 201 bp, Homo sapiens
ccttggctcctctcaaccccctctggcctgtggcactcacaactgagagaggctgcaagggaagggggcctgggtcccaggttggggggatatgccccctwggatctggctgaaggggagcagttgactcagaatcccaggatgacagagaccatgtggcctaactcttcttttccaagtgggtaaactgaggctcagaga

SEQ ID NO: 550147 - DNA, 201 bp, Homo sapiens
gaggagacagggatggatgaaaaagatgtttgggaggtagaatttcagtatttggcagctgattggacatcagagtaaggaaggaagccgttggagatggkgggggtggtgaggacgttggtgcaaagttaactaaaataagggtaggggagaaaggagattgggaaataagccgcaagtttgcatgggggcatatgaagg

SEQ ID NO: 550148 - DNA, 201 bp, Homo sapiens
tccttcttgtccaccatgaacctcagcctccaggatattaacaggtgtagacacctgatcgtttgatctggagtgcctgggttgggctactgtttcttcaracacagtcagcagtaccagtttggatcaaggcccttggagtaagaggagcaaaggagagagaaagaaagacttgaaagcaggaggatggaaggccaagat

SEQ ID NO: 550149 - DNA, 201 bp, Homo sapiens
tcaggaggtggcaaagacaggaggactcacagtgccaaacatcctttcagctgggaggccgggagatgcagtgagaggagggactgctgcagggaaggackagagatgtgggagtggggtggagggagagatggagggggcatgtgtggtgggctgtgggtctaactgtgggcagggggctggggcgtgcagaggagagga

SEQ ID NO: 550150 - DNA, 201 bp, Homo sapiens
tttcccagctgctcaactaggtgcaataacatgtccttgcctgactcctcctgggcccagaaacacccacggctccccctaggcacagtcttcctcatacyctcctgttccgcagcatgccctttccctctgtgtcctcttttgccagtattccacaaaaggaaagcagccaggcacagcatgtaaaaggattgggccact

SEQ ID NO: 550151 - DNA, 201 bp, Homo sapiens
gcagcatgcaggactgaggctggagaacaggcctctctgcagtgaagtgggggagattggaaatgtctgaggagtgaggatgcccatcagagtcaggagcmatcccagaaatgcctaaggctttgcctggggctggaaagggtatctttaaccttataccagctagaaactggggacaacgagatgacccaggacaggacc

SEQ ID NO: 550152 - DNA, 201 bp, Homo sapiens
aaataaataaataaataaataaataaataaataaatataaaaaggttgggctcagagccccagagtggctgtccaagtcctgctgctgtgtcagtttcctyactggactacaaggatggtgttgaattttctccccatctctcctttaacatctgctcctccgttttctttttggtctttcttttatttttatcttatttt

SEQ ID NO: 550153 - DNA, 201 bp, Homo sapiens
cctgtcctctcacagtccccaccgtggtccaatgcaatggactcttgcctgaaagtcaagtcagctgaggctagtcctgctgaagccactaaccacctgtstgatgttggacaagaggcttctctactctgaccttggcatcttcatctgaatgacaaggaacgggatgagaaaatctgtgagtaattccagcactttggg

SEQ ID NO: 550154 - DNA, 201 bp, Homo sapiens
ctgggcagctacagcggcaaggtggagctgagaggtactgggccctgggacggggtggagccacacaccctctcaaggcagaaagtcaaggccacaagtgrcctatctagttgccccttaggttttgtagccaaggaacttgaggcccaaagaggttaagtgatttgcacaaagtcacccaataactcagtggctgatgtg

SEQ ID NO: 550155 - DNA, 201 bp, Homo sapiens
agtaacacctatggtagaggaagaggatctggaagatggcaaggtagggaagccagagagatggagaattaggccgagtagaggggccaggaagctgagaraggaacaagttttaaggggcaaaaaactaacagtttcagatttcagatgccagggggaaaggaaagctggtcacttttttttttgtcaactcagaggtca

SEQ ID NO: 550156 - DNA, 201 bp, Homo sapiens
aagctggtcacttttttttttgtcaactcagaggtcactggtgtgtcctttgggaaaaccatttccatgtcaggttgagtttggaaataaacctgtgaagsgttgaggagtgtggtgaggaagctgaggcagggcgtaggttatcctctcccaaggggattgtgggagatggaaggggaaagaagactgggtaaactgaga

SEQ ID NO: 550157 - DNA, 201 bp, Homo sapiens
gtcctgtctttgaacgtgctcctctctgagagctgtctgcttggttgtgactgtggtgtgtcacatctcagctggattataaactgcttttgggcagagcstgggtctcaattatctttaacaatactcatgacacctcagtgtcaccttggtgtcttgtgtatatgtcatcttgaggtgaaatgagacctgtttcatgtg

SEQ ID NO: 550158 - DNA, 201 bp, Homo sapiens
ttgccactggtcccactgcgcctgtgggccctagctttgatcataatggggcaccatgacacacatgttttcatttcatcttcacaacaatccttaaaaawtaatgagatcggtactctagtaattctcactttacagatgatgacactgaggctagagaaagtgagtaacgggattcaggctacacagctggcaaattca

SEQ ID NO: 550159 - DNA, 201 bp, Homo sapiens
cgcctgagctcctgattggtaacctggctcatcccctgatttccaggttcgttctggccagtcccctttccccagggctatccagttcaggagctgggatmcttcatgccagtgctcagggcctcagtaccagctggattccctgtcaccctgccctgctggctggttggacctctacatctttgttgtctcccagctcct

SEQ ID NO: 550160 - DNA, 201 bp, Homo sapiens
cacagggccctgttaaggggtggaggccgcgagggagccccactcagggctctctgtccttagcccacaccgggcacccttttcaggtcttgcaggtgtcractgtcttccggcccagctccaagccctcctctggttgcctggacaccctctccctctgtccactcttcctttaatttatttgacctcccactacccaga

SEQ ID NO: 550161 - DNA, 201 bp, Homo sapiens
ctccagctgttctctccagttcttccagatgtcctccaggtgtctgctgcccccccagggccccgaggccgccaggccccaacctcacccccacgcatgayggtgcatgaggggcaggagctggcactgggctgcctggcgaggacaagcacacagaagcacacacacctggcagtgtcctttgggcgatctgtgcccgag

SEQ ID NO: 550162 - DNA, 201 bp, Homo sapiens
tatgtgaccgccgtgggatctgtacacacattggtagtttggagactgttagtttcaagttccaagtatcccactcagctcctctctcccgctccttccamatcccattcccacttcatccttcctcagcagcctccctcaccctctagactgcgacccctgctctttagggatactcaccccacggcccatcttggggca

SEQ ID NO: 550163 - DNA, 201 bp, Homo sapiens
tcacccaataactcagtggctgatgtgggactcaaacccagagttcctcacccaggccagtgctcatcttatcatattaagacccctcctgggagaagaartgtccttaagttgtccagtccactttccattcccaagaacgaagaagactgttgggttgaatagcctctactcctggacagtacaggacccagatctggg

SEQ ID NO: 550164 - DNA, 201 bp, Homo sapiens
ctagtgtatgatggactccagaggaactaacagtgtccactgtggaggtgacatgaccacaagagaggaagggcccagattccttctcttgtcactcggcrtgtcctcacttcctcagtcacacagcaaatgtctgttgagcttctactccttgccaggaaactctgtaggctttggggaaaggcaaaaaagagttaacag

SEQ ID NO: 550165 - DNA, 201 bp, Homo sapiens
ccctctggagggagacaccaacccagttctcaacgccaacctgcccccagctccttcccagccccaggccacagggtaagagaggatacctcacctccctkaagacccctctcatcatactcatactgggggttggttatgacttgtttatgaaatgtatccctaacatatagaactatgttccctgagggcaggggagca

SEQ ID NO: 550166 - DNA, 201 bp, Homo sapiens
aagtcacccaataactcagtggctgatgtgggactcaaacccagagttcctcacccaggccagtgctcatcttatcatattaagacccctcctgggagaakaaatgtccttaagttgtccagtccactttccattcccaagaacgaagaagactgttgggttgaatagcctctactcctggacagtacaggacccagatct

SEQ ID NO: 550167 - DNA, 201 bp, Homo sapiens
ggcacgaggtcaggagattgagaccatcctggctaatgcgtgaaactccatctctactaaaaatacacatgcacacaaaattagctgggcgtggtggcagrcacctgtagtcccagctactcaggaggctgaggcaggagaatggcttgatcctgggaggtgcaggttgcagtgagctgaggttgcgccactgcactccag

SEQ ID NO: 550168 - DNA, 201 bp, Homo sapiens
ctctgtgcctcagtgtctctgaaagtccaagattcttttacttttgtgctcccctctggatgttctcaccactgcccccttgaggaatgtgagtgccctcwgggtgacttaataaacagaacatgtgctttttgatgttattgcatcatttagacattcaacaaacatttgttgagcacgtactttatgctatattctgtg

SEQ ID NO: 550169 - DNA, 201 bp, Homo sapiens
agcttcatgttaacatcccatgcccaggcctcatcttcaggtaccatgtttttaattgatctaaggtggggcttaggcatcagtgttttgttttgtttttygagactgagtctcactctgtcgcccaggctgcagtgcaatggcacaatctcggctcactgcaacttccacctcccaggttcaggtgattctcctgcctca

SEQ ID NO: 550170 - DNA, 201 bp, Homo sapiens
tcaagcaatactcccacctcagcctctcaagtagctggggccacaagcatgcaccaccacgctcagctaatttaaaacaattttctttctttctttctttytttttttttttttagatataaggtctcactatattgcctgggctcaagtgatcctcccaccttggcctcccagaatgctgggattataggtgtgagccac

SEQ ID NO: 550171 - DNA, 201 bp, Homo sapiens
ccctccaccctcctcactctgccttcctcctggcctctgccactggccttcccttcccatcttctgaccctcctgctactatctctctcctccacattatrtcacatgaagtctcaaaaaatccaacttccagccctgcagtgcccacctgcacggggtcctctgtggttgatgctgacttgcatgctgagggggcaggct

SEQ ID NO: 550172 - DNA, 201 bp, Homo sapiens
tcatccagttccttctccttctgtttcttcttgccgcccccattctctgccgtggtggcggcaggtgagtactcacggccagcctgagggagggagagccrgagagtcagggaagagaggggctggggcctccattcccaccactcagccagggagcccaggcagtgggggtgtgtgttcaaaagcagcggctgccttggg

SEQ ID NO: 550173 - DNA, 201 bp, Homo sapiens
gccttctactgggaacagtcagaggacaggattcccctggagtacccctgtttctctgggcacagagatggagtgaggggaagccagcggagtggggcagrtctaagtgtcctgagtgcaaagaaagcagagaggaagggagggagggaaggggggctttggccagaggcctaaggtgcctgctggctgggctgggtccat

SEQ ID NO: 550174 - DNA, 201 bp, Homo sapiens
tgtgtgctaagcccatatttaactgtgtccctagtgacgtttgtctttaagcagcaacataacaggagttagaagcacaggctccacagtgaggcgatccrtttcgaatccctgtgtggacagtaactaatgcattaaccttggacaagtttcttaacttttctatgcctcagttttctcacagggataataatagcacat

SEQ ID NO: 550175 - DNA, 201 bp, Homo sapiens
accgcggggagactgcctccctgctgtgcaacatctctgtgcggggtggccccccaggactgcggctggccgccagctggtgggtggagcgaccagaggayggagagctcagctctgtccctgcccagctggtgggtggcgtaggccaggatggtgtggcagagctgggagtccggcctggaggaggccctgtcagcgtag

SEQ ID NO: 550176 - DNA, 201 bp, Homo sapiens
agccaggggagagcctgcagcgcggcaggcatggggcagggagaggtgaaaacacaggatgagctgtgcctggctggaaggcccaggtggctgtgtgcctygagtcctcttccagagctctctctgcatctcctgtcctctgttctgattggaagagagagttgagacttcttccacttcagagaatcctgtaaagcctgg

SEQ ID NO: 550177 - DNA, 201 bp, Homo sapiens
ccctgcccagcagaacttcgagtggttcctgtataggcccgaggccccagatactgcactgggcattgtcagtaccaaggatacccagttctcctatgctrtcttcaagtcccgagtggtggcgggtgaggtgcaggtgcagcgcctacaaggtgatgccgtggtgctcaagattgcccgcctgcaggcccaggatgccgg

SEQ ID NO: 550178 - DNA, 201 bp, Homo sapiens
ttctccagggttcctcaatgtggcttctactggcaaccccgtgagcatcttctcagagtcaggcactgtgccacgcttgaggaataccatgtcaaggaagrtctggtctggcctgtgccacttaccctctctgggcctcagtttcctcttctgtaaaggggggtgagtgagtgggagggaagggggatgagaggggagagg

SEQ ID NO: 550179 - DNA, 201 bp, Homo sapiens
agaagtctagtttccataaatctagaatagcggccacatgttgttaggtggtgggtttactctgggattggcctgcggttgccagggaggagagtttggcsgcagatggtggcacacaacatttagcgccatgcaaaggtacagaaaagattgcgcgaagcgaggctagcagtcggacctagtctccgccccttcctgctg

SEQ ID NO: 550180 - DNA, 201 bp, Homo sapiens
ggagtttgagaccagcctggccaacatggtgaaaccctgtctctactaaaaataaaaaaattagccgggtgtggtggcgcatgtctgcaatcccagctacmtgggaggcggaggttgcagtgagccgagatcgcgccattgcactctagcctgggcaacaagagtgaaactctgtctcaaaaagaaaagcaccagcaagtt

SEQ ID NO: 550181 - DNA, 201 bp, Homo sapiens
agcctgacctgtgacatctctgtgtttcagtcactgtggagcaacatataggcaacattttcatgtttagtaaagtggccaacacaattcttttcttccgyttggatattcgcatgggcctactttacatcacactctgcataggtgaggagactgcctttctttctttttttttttttgtaagactgtgttgatagactt

SEQ ID NO: 550182 - DNA, 201 bp, Homo sapiens
atttatgaaaggagaaacacgtgcatgctcagttgagcttcatatctgtccataagacccatgttcaaaagtggcaatgttaaccatgatctgaggtggasttttcagccctctcaagtcaaaaggtgaagcagaggacacagaaactatgcattctccttagcctggccagatccactgcatggtcactggtctcttatc

SEQ ID NO: 550183 - DNA, 201 bp, Homo sapiens
ataaataaataaataaaattaaaaaaatatattttatatataatatatatgtattaatgtgcttttaatactaaagctgattttaataaactttacaaacmaatctgtctaatcttgatcagctttgactagacaagataaaatttccataaaccttttatatcctcttagaatttgttttcttttttttttttttttttt

SEQ ID NO: 550184 - DNA, 201 bp, Homo sapiens
taataaactttacaaacaaatctgtctaatcttgatcagctttgactagacaagataaaatttccataaaccttttatatcctcttagaatttgttttctttttttttttttttttttcttttattgatcattcttgggtgtttctcgcagagggggacttggcagggtcataggacaatagtggagggaaggttggcaga

SEQ ID NO: 550185 - DNA, 201 bp, Homo sapiens
atctcatacctaatgaattatatatgtagctcagatgataacagtttacagagactgttattgtagaggtagggaatgtgttggtggtctacatatatccmcaagtgtgtattatttgggggctgaaatccttgggttggtttggaagtaaattccctgtgtaaggctttttatgtttccttcgacatcttctttctgtat

SEQ ID NO: 550186 - DNA, 201 bp, Homo sapiens
cagagtttgactcttttcgtcaacactggccactggacttcacccaaaaataaggcctccaagtggtggagaccaagaagctcccacttggtcacaagtcragcttccaaggacataagatgagaaggaaacctcatctggtttttattttggggacccacagcacaatttgtatgtcattctgataagaattttaaaact

SEQ ID NO: 550187 - DNA, 201 bp, Homo sapiens
aaaaagtacgaaaaccagtcaggcgtggtggcgcttgcctgcaatcgcaggcactcggtgggctgaggcaggagaatcaggcagggaggttgcagtgagcygagatggcagcagtacagtccagcttcggctcggcatcagagggagaccgtggaaagagagggagagggagaccgagagggagaagggagaggggagagg

SEQ ID NO: 550188 - DNA, 201 bp, Homo sapiens
ttggctcactgcaacctccgtctcctgggttcaagtaattctcctgcctcagcctcccgagaagctgggactacaggtgcctgccaccacgtctggctaawttttgtatttttagtagagacggggtttcaccatgttggcctggcttgtctcttaactcctgacctcatgatccgcccgccttggcctcccaaagtgctg

SEQ ID NO: 550189 - DNA, 201 bp, Homo sapiens
attctcctgcctcagcctcctgagtagctgggattacaggtgcacgccaccacgcccggctaattttttgtatttttagtagagacgggttttcaccatgytggccaggatggtctcgatctcctgaactcgtgatccagctgcctcggcctcccaaagtgctgggattacaggcatgagctaccgtgcctggccaatttt

SEQ ID NO: 550190 - DNA, 201 bp, Homo sapiens
aatcccagcactttgggaagctgaagcaggtggattacctgaggtcagaagtttaaaatcagcctggccaacgtggtgaaaccccatctctactaaaaatmcaaaaaaaaaaaaaaaaaaaggtgccactgaccctctcttttggggcctctcgttttccttatagagccccaaaagtcactaatgggttcatgtcaggtt

SEQ ID NO: 550191 - DNA, 201 bp, Homo sapiens
ccaggtttctttctgtttcaccattgagactaattaacagccctatcaaaactgtacatacacgtgtataacgttttacagtgccgctcattatgtaaagmctcctgaggagccagtaaggtagacaaggcaagtagtaatattcctgtttcattggtgaagaaatggatctcggtatatttaggtgacttgccccaggtc

SEQ ID NO: 550192 - DNA, 201 bp, Homo sapiens
cagtttcaccacgttagttaggctgatctcgaacttctggcctcaagccatccgcccgctttggcctcccacagtgctgggattacaggcgtgagccatcrtgcctggcctcaaactaatttttataagtgtttcttttttttcctctgagttaaaagacttgcatctgcaatggactgttaccttacaaggaatcgaacc

SEQ ID NO: 550193 - DNA, 201 bp, Homo sapiens
tcccctttgctctctgagggtttgttgaaaaatcaaccgacaaagggcacattaataggagaaaggcatagaaattttattttaacgtgcatagcatgagrgaattgcaggagaatgacccagtggggtacagatgcttatataccctctttcataggaatatgggagatgggaaaatgtgggtgattttaaggtggatcg

SEQ ID NO: 550194 - DNA, 201 bp, Homo sapiens
gtgttttgaatctgatttctgtcttttaaaaatcttgccaagggagtttctaaggctgtgttctttctgtatctttttatgggtactagaaagatagctgttttttttttttttcctcaggccaggtacggtggctgtaatcctagcactttgggaggccaaggcgtgtggattgcctgaactcaggagttcgagaccagc

SEQ ID NO: 550195 - DNA, 201 bp, Homo sapiens
ttaagaaactaagtggcttgggctgggtacagtggctcacgcctgtaatcccagcactttgggaggccagggcggatggatcacctgaggtcaggagttcragaccagcctgaccaatgtgatgaaaccccatctctactaacaatacaaaaaaaattagctgggtatggtggtatgcacctgtaatcccagctacttggg

SEQ ID NO: 550196 - DNA, 201 bp, Homo sapiens
ggtggcgagtgcctgtaatcccagctactcgggaggctgagatgggagaattgcttgaacccagcaggcggaggttgcattgagctgtgatcacaccactscactccagcctgggtgacagagcaagactctgtctcaaaaataataataataataataataataataataataagctaagagttgctttataatgaagaa

SEQ ID NO: 550197 - DNA, 201 bp, Homo sapiens
caatgttttatttaaataaataaataaagtttttttttttttttttttgagatggagttttgctcttgttgcctaggctggagtgcaatggctcagtctcrgctcaccacaacctcagcctcctgagtagctgggattacaggcatgtgccaccatgcccagctaattttgtatttttagtagacatggggtttttccatg

SEQ ID NO: 550198 - DNA, 201 bp, Homo sapiens
tatatataatatatatgtattaatgtgcttttaatactaaagctgattttaataaactttacaaacaaatctgtctaatcttgatcagctttgactagacmagataaaatttccataaaccttttatatcctcttagaatttgttttctttttttttttttttttttcttttattgatcattcttgggtgtttctcgcaga

SEQ ID NO: 550199 - DNA, 201 bp, Homo sapiens
cctgtccctcataggtcttacagatgcaaccccatgctgggaacgcaaaccctttgtaccagaaaaggtaaaatggtctggggattaaaaaaaaaaaaaarggcttcctgggaccagaacataaaaacatacaggttaatagaactgtaaaatgtaagatgtttaaacaagctttatctaaggtagttgtaacccctttta

SEQ ID NO: 550200 - DNA, 201 bp, Homo sapiens
ctctaagaaaaaaaaatgggtagcatatatgaattggaaatcacagtggcaaaatgttggttactgttgaagctgggtaataggggttcattcaattatcytctcttctgtatgcttcaaattatccataataaaaagttttaaaacaattaaatagaacaaccaagggctctgcattatagagtcatcctagaacccaag

SEQ ID NO: 550201 - DNA, 201 bp, Homo sapiens
cactttgaactcgggtggcagaggttgcagtgagccaagatcgtgccactgcactccagcctgggcaacagagtgagactgtgtctcaaaaaaaaaaaaaraaagaaagaaaagaaaagaaaatgggttctacatctaattgggggatgttttcccctttctagtactgtaaaactgaagatgtaaatctgctcatgtaaa

SEQ ID NO: 550202 - DNA, 201 bp, Homo sapiens
cattgatccccaggactggcaagagttggagaagtctagtttccataaatctagaatagcggccacatgttgttaggtggtgggtttactctgggattggcctgcggttgccagggaggagagtttggcggcagatggtggcacacaacatttagcgccatgcaaaggtacagaaaagattgcgcgaagcgaggctagcag

SEQ ID NO: 550203 - DNA, 201 bp, Homo sapiens
tagcgccatgcaaaggtacagaaaagattgcgcgaagcgaggctagcagtcggacctagtctccgccccttcctgctgtgttcaccatcccagcgtcccctgtcccctccacccgaagcgatgggtggttccgtcaggcgcttcccgcaccttcccgctccctgcttgcaaagtggttgtgccccaaggtccgcctccagg

SEQ ID NO: 550204 - DNA, 201 bp, Homo sapiens
atacaggttaatagaactgtaaaatgtaagatgtttaaacaagctttatctaaggtagttgtaaccccttttacctaaatgtcttatgaaaatgggtactrtaaggctgggcatggtggctcacacctgtaatcccagcactttgggaggctgaggcgggtggatcacaaggtcaagagttcaagattagcctggccaagg

SEQ ID NO: 550205 - DNA, 201 bp, Homo sapiens
ttatgcttccctaaaatatataaaatcaagctgtagagcaccttgggcacatattctcaggacctccagagggctgtgtcacaggccatggtcactcatayttgcctcagaataaatctcttaaaatattttacagagtttgactcttttcgtcaacactggccactggacttcacccaaaaataaggcctccaagtggtg

SEQ ID NO: 550206 - DNA, 201 bp, Homo sapiens
acatggagaaaccccgtgtctactaaaaatacaaaaatagccgagtgtggtggcgcatgcctataatgccagctatttgggaggctgaggcaggagaatcrcttgaacccgggaggtggaggttgcagtgagctgagattgcaccattgcggtccagcctgggcaacaagagactccatcaggaaaaaaaaaaaaagattc

SEQ ID NO: 550207 - DNA, 201 bp, Homo sapiens
aaaaataataataataataataataataataataataagctaagagttgctttataatgaagaaaattatacagataaaactaaatggatttttttttttwaaaaaggaaaacaaaacaagccagggcaacaaaactctgagccctatggttaccaagaaaatagtcaatataggggaagggcaaaaccaagtaactattt

SEQ ID NO: 550208 - DNA, 201 bp, Homo sapiens
gctgaggcaggagaatcgcttgaacccgggaggtggaggttgcagtgagctgagattgcaccattgcggtccagcctgggcaacaagagactccatcaggraaaaaaaaaaaagattctgtctcgaaggccactgcacctattgtctgtaggtgttaggttccctgtcagttaattggaggtaataacccctggcttacag

SEQ ID NO: 550209 - DNA, 201 bp, Homo sapiens
caaaaataataataataataataataataataataataagctaagagttgctttataatgaagaaaattatacagataaaactaaatggattttttttttwtaaaaaggaaaacaaaacaagccagggcaacaaaactctgagccctatggttaccaagaaaatagtcaatataggggaagggcaaaaccaagtaactatt

SEQ ID NO: 550210 - DNA, 201 bp, Homo sapiens
cctacaggaaggcctgccatgctgtggccaactgtttcactggagcaagaaagagatctcataggacggagggggaaatggtttccctccaagcttgggtyagtgtgttaactgcttatcagctattcagacatctccatggtttctccatgaaactctgtggtttcatcattccttcttagttgacctgcacagcttggt

SEQ ID NO: 550211 - DNA, 201 bp, Homo sapiens
ccctattttgtggggattgagaaggggtgaatagaggcttgagactttcctttgtgtggtaggacttggaggagaaatcccctggactttcactaaccctytgacatactccccacacccagttgatggctttccgtaataaaaagattgggatttccttttgattgcgcgtttgtgtgtttctgtattagaaaagcctga

SEQ ID NO: 550212 - DNA, 201 bp, Homo sapiens
ttttaatactaaagctgattttaataaactttacaaacaaatctgtctaatcttgatcagctttgactagacaagataaaatttccataaaccttttatawcctcttagaatttgttttctttttttttttttttttttcttttattgatcattcttgggtgtttctcgcagagggggacttggcagggtcataggacaat

SEQ ID NO: 550213 - DNA, 201 bp, Homo sapiens
tcatgatacggcacatgactatatatttcacagcataacagtgtgtcagtgataactgtggttgtgtttttttttttaagtcctcgtgtaagacacagtgrggaatttttttttttttttttttttttttgagatggagtttcactcttgtcgcccaggctggagtgcaatagcgctttctcggctcactgcaacctccgc

SEQ ID NO: 550214 - DNA, 201 bp, Homo sapiens
aaaaaaaggtcaagattaaaccctccaaatcaagaagggggtactaaaaatgcccaaacagctggtaaaacaaaattggttgccttctaaactattatgtrttacttctgcatccaccccaaccataaaaattttctgcttactataaaattaaggaaaaatatttactaacattataaagtaccatggaacaaagcctcc

SEQ ID NO: 550215 - DNA, 201 bp, Homo sapiens
tttgtatagctaattgctataagtctgtaacagaaaccaagcttacagtagctccacataaaagttaaaaataagtcagtctgccgggcgtggtggttcamtcctgtaatcctagcactttggtaggctggggtgggcggatttcctgaggtcaggagttcgagaccaccctgggcaacatggtgaaaccccatctctact

SEQ ID NO: 550216 - DNA, 201 bp, Homo sapiens
ggtcaagattaaaccctccaaatcaagaagggggtactaaaaatgcccaaacagctggtaaaacaaaattggttgccttctaaactattatgtgttacttytgcatccaccccaaccataaaaattttctgcttactataaaattaaggaaaaatatttactaacattataaagtaccatggaacaaagcctcctgggtat

SEQ ID NO: 550217 - DNA, 201 bp, Homo sapiens
ttatatgacttctcctgtgacaaaaccttttctcccaaataccagtatatggtgcaatacaaaagttgtgggaaaaataggtttctacttttaataagtcygtaacaatttaaacaccaaggaccaggcatttctcccatttaatttatatcctccctcaggatgctatacctatggagataaattggcggaaagagagat

SEQ ID NO: 550218 - DNA, 201 bp, Homo sapiens
atgaagaaccgcagatccagtaagtttagttcacttctcagactcaaggttagatctaatgccctttggaggtgctttgcttcatgttaagagagtggcartcatttggtaaatttgtcctacgtttaattccaaggctgaatttgaacttggacttctatcccctccctgtctcctatttcaaagtgccccatgaagagg

SEQ ID NO: 550219 - DNA, 201 bp, Homo sapiens
cacctctaattgctctcgtgtattcggtgccgcgactttcacgatggctcgcccaaccttactaccttctgtcggccctgctctctgctgccttcctactygtgaggaaactgccgccgctctgccacggtctgcccacccaacgcgaagacggtaacccgtgtgactttgactgggtgagcctcccgcgtgttagtaccc

SEQ ID NO: 550220 - DNA, 201 bp, Homo sapiens
gcacatgttctcaggacctcctgagggctgtgtcatgggccatggtcactcatatttggctcagaataaatctctgaaaatattttacagagtttcactctttttttttttgagacggagtctcgctgtgtcgcccaggctggagtgcagtggcgccatctcggctcactgcaagctccgccttccgggttcacgccattc

SEQ ID NO: 550221 - DNA, 201 bp, Homo sapiens
accccctttaaaaaaaaattatgtttagtccttgtgttcacttcctttcttgttggcatgatctttgctgagaaaaatgtaaaatttcttttttctttgtyttttttttttttttttttttttttgagacagggtctcactctgttgcccaggctggagtgcaatggtgagatgtcaccttactgcaaccttgacctcccg

SEQ ID NO: 550222 - DNA, 201 bp, Homo sapiens
tcatgggccatggtcactcatatttggctcagaataaatctctgaaaatattttacagagtttcactctttttttttttgagacggagtctcgctgtgtcrcccaggctggagtgcagtggcgccatctcggctcactgcaagctccgccttccgggttcacgccattctcctgcctcagcctcccgagtagctgggacta

SEQ ID NO: 550223 - DNA, 201 bp, Homo sapiens
ctactaaaaatacaaaaattagccaggcatggtggcatgcactgtagtcccagctactaagactgaggcaggagtatcgcttgaacccgggagatggaggytgtggtgagccaggatcacaccactgcactccagcctgggcaacagagcaagactccgtttccccccacaaaaaaaaataattatatatatatatatgca

SEQ ID NO: 550224 - DNA, 201 bp, Homo sapiens
atggtctttgtgcacatttgcattaagaaaaaagagtcctaaggtcaaactgaaaactatagagttctaggttctgtttttttttctgcctgctttagatyggctgttacttttcgactgagataaaaaccactgttctctgtttttttgcaagtcggtgaagttgtatttgtctcatggcaaaagtattgaattaatagc

SEQ ID NO: 550225 - DNA, 201 bp, Homo sapiens
aaaccccctttaaaaaaaaattatgtttagtccttgtgttcacttcctttcttgttggcatgatctttgctgagaaaaatgtaaaatttcttttttctttktcttttttttttttttttttttttttgagacagggtctcactctgttgcccaggctggagtgcaatggtgagatgtcaccttactgcaaccttgacctcc

SEQ ID NO: 550226 - DNA, 201 bp, Homo sapiens
acccgggagatggaggttgtggtgagccaggatcacaccactgcactccagcctgggcaacagagcaagactccgtttccccccacaaaaaaaaataattwtatatatatatatgcatgtggtggccatggtgcctcacgcctgtaatcccagtaactttgggaggccgaggtgggtggatcacctgatgtcaggagttcg

SEQ ID NO: 550227 - DNA, 201 bp, Homo sapiens
aattaatagctatgggaactgtgtgtgtgtgtatttaaaggcctttataatagacttatataattttacgttcaattggcaattgaaacccttttaatttmcctctagcacaccagactttctcttcttaccttatgatgtaaattttgctatctgattttcacctgagttgcctttaatatgcaaatttaaggctgttta

SEQ ID NO: 550228 - DNA, 201 bp, Homo sapiens
cccaggaggcggaggttgcagtgagccgagatcgtaccattgcactccagcctgggcaacgagtgaaactgcgtctcaaagaaaaacaaaaaaccaagaaycttgtagagtgaatttttgccctcaaataaaataactgggttgcttgagagagagagacatttagggtaaaacagcctaaccattgtgaatgatctatgt

SEQ ID NO: 550229 - DNA, 201 bp, Homo sapiens
gtaaagactcctgaggagccagtaaggtagacaaggcaagtagtaatattcctgtttcattggtgaagaaatggatctcggtatatttaggtgacttgccscaggtcatacaactaatgagtgcctgggacttgaaactactcttctggccacactacctgcacaacactgtcagccgcttcttaattcaataaacatttc

SEQ ID NO: 550230 - DNA, 201 bp, Homo sapiens
aaatctttgggatttctttgggaagtgtcccaagctccttgctgtgcttccttggtatgggtggagggactgctcggaacataaacttaaagcactttccsttctgccatatagcatgtaggggccaaggaaaagcttcccctttgctctctgagggtttgttgaaaaatcaaccgacaaagggcacattaataggagaaa

SEQ ID NO: 550231 - DNA, 201 bp, Homo sapiens
aacataaacttaaagcactttcccttctgccatatagcatgtaggggccaaggaaaagcttcccctttgctctctgagggtttgttgaaaaatcaaccgayaaagggcacattaataggagaaaggcatagaaattttattttaacgtgcatagcatgagggaattgcaggagaatgacccagtggggtacagatgcttat

SEQ ID NO: 550232 - DNA, 201 bp, Homo sapiens
ggtgattttaaggtggatcgtaaatgatttttagggtgattcagtggcctggagaacatacagtggcctgggacaatgactgttgggcctgcagagcagasaatggtttctgacaaaaatctgtccaggtgtgttgacaggcttccatctttcttcttgtactgaagtaagttaatgaaaactcagggaagagaccagaag

SEQ ID NO: 550233 - DNA, 201 bp, Homo sapiens
aagatggcattgtagatgagttctcaaagctaggcctctgtatatgatgtaggcaaacaggtatttaataagagagacatttctatggaacaagacaaacmaagcttaatatctggtatagtctataaactagtttctttagagtctggagggcagtcaattgggaagattaatagcaatctattttcctagattgtaggt

SEQ ID NO: 550234 - DNA, 201 bp, Homo sapiens
tactcgtgaggaaactgccgccgctctgccacggtctgcccacccaacgcgaagacggtaacccgtgtgactttgactgggtgagcctcccgcgtgttagkaccccgcgaccttgactgtccctgcccttgcaggtgtatctgggaaccctggggtttacctctctgaggacacctgaggttccgagcctgtagcggactt

SEQ ID NO: 550235 - DNA, 201 bp, Homo sapiens
ctcctgggcaaagccatcctgccacctcagctttccaggtagctggaaccaaaggcatgcactacacacctggctaatttttaaaaattttttttcaaggyggggtctcttgatgttgcccaggctggtcttgaactcctgagctcaagggatcctcctgacttggcttcctaaggagctgggatttacaggtgtgagcca

SEQ ID NO: 550236 - DNA, 201 bp, Homo sapiens
cttttggggcctctcgttttccttatagagccccaaaagtcactaatgggttcatgtcaggtttaaaactcttctctcttttgaattaaactctctagtcwttggcttttgtatcgatacatgtgtctatatatgtatgtatatgtctatacatgtgtttattgtgtatatggtaccaataacgaatgagtacccccaaaa

SEQ ID NO: 550237 - DNA, 201 bp, Homo sapiens
aacagggttatctaatcttttggcttccctgggccacattggaagaattgtcttggggcacacataaaatacactaacacctaatgatagctgatgagctwaaaaaaaaaaaaaatcaaaaatgtctcataatgttttaagaaagtctatgaatttgtgttggaccccattcaaagccatcctgggctgcatgtgagccac

SEQ ID NO: 550238 - DNA, 201 bp, Homo sapiens
tgcaaaatgctggaagttttatattcttactctgatagaatttttaaaaaatgcttagggttaatagccaatttttgtttttctggaaaattcatggttcrcctatttaccttgctgattgggactaggttctcagagcttctagatagctaaacacaggaaggttcctggaacatatccttttgggtttttatggaactt

SEQ ID NO: 550239 - DNA, 201 bp, Homo sapiens
attggccattggtgatcagctgaactttcagcctggtggggggtggggtggggctgaaagtcctaacctgctaatcatgcggtgtccttaggccatatggkccttgtgggagcatcatagagtgtacttacacaaacttagatggcctactacacacctaggctttatggcacaacctgttgctcccaggcacaaacctac

SEQ ID NO: 550240 - DNA, 201 bp, Homo sapiens
ctcgtgtaagacacagtgaggaatttttttttttttttttttttttttgagatggagtttcactcttgtcgcccaggctggagtgcaatagcgctttctcrgctcactgcaacctccgcctctcgggttcaagcgattctcctgccttagcctcctagtagctggaactacaggtgcccgccatcacgcctggctgacttt

SEQ ID NO: 550241 - DNA, 201 bp, Homo sapiens
actcttatctcgaagaaaaaaaaaaggtcaagattaaaccctccaaatcaagaagggggtactaaaaatgcccaaacagctggtaaaacaaaattggttgycttctaaactattatgtgttacttctgcatccaccccaaccataaaaattttctgcttactataaaattaaggaaaaatatttactaacattataaagta

SEQ ID NO: 550242 - DNA, 201 bp, Homo sapiens
ctcccacttggtcacaagtcaagcttccaaggacataagatgagaaggaaacctcatctggtttttattttggggacccacagcacaatttgtatgtcatyctgataagaattttaaaactcacccaccagtctggagggccagcttgaccaataggcttacaggggctttattctgatgttgtactttatggtaccctac

SEQ ID NO: 550243 - DNA, 201 bp, Homo sapiens
tggagggccagcttgaccaataggcttacaggggctttattctgatgttgtactttatggtaccctactctatgacaaaataacacaggaagatataacamgagaaaaagactattttggggagaaaaagaatcagacaatgtgaatattcataccaaaaacatatcaaagttgctacacctaagactaatcatacaaatg

SEQ ID NO: 550244 - DNA, 201 bp, Homo sapiens
ataagtataggagaccttttataaagttcatttacctgtatactcttatctaatatgcaaaatgctggaagttttatattcttactctgatagaatttttwaaaaatgcttagggttaatagccaatttttgtttttctggaaaattcatggttcacctatttaccttgctgattgggactaggttctcagagcttctaga

SEQ ID NO: 550245 - DNA, 201 bp, Homo sapiens
gatttctgtcttttaaaaatcttgccaagggagtttctaaggctgtgttctttctgtatctttttatgggtactagaaagatagctgtttttttttttttycctcaggccaggtacggtggctgtaatcctagcactttgggaggccaaggcgtgtggattgcctgaactcaggagttcgagaccagcctgggcaatacag

SEQ ID NO: 550246 - DNA, 201 bp, Homo sapiens
tgaatatttatgaaaggagaaacacgtgcatgctcagttgagcttcatatctgtccataagacccatgttcaaaagtggcaatgttaaccatgatctgagrtggagttttcagccctctcaagtcaaaaggtgaagcagaggacacagaaactatgcattctccttagcctggccagatccactgcatggtcactggtctc

SEQ ID NO: 550247 - DNA, 201 bp, Homo sapiens
aaaaaaaaaaacctgaccttctgaatctggtttgaacttccataggtaaacccagttaagttccgtatggagctctggactcctaaattcccctgaagaaraaaccaatgtactgtggtctcttgggacttgggacagggactctagcagcacctctgtatcctttctggccatttggacaaaagcagttgccccgacttg

SEQ ID NO: 550248 - DNA, 201 bp, Homo sapiens
ctccacctcccgggttcaagtgattgtcctgccccagcctcctgagtagctgggactacaggcacgtgctaccacgcctggctaattttttgtatttttastagagacggagtttcaccgtgttgttagccaggatggtctcgatctcctgacctggtgatccacccgcctcagcctcccaaagttctgggattacaggca

SEQ ID NO: 550249 - DNA, 201 bp, Homo sapiens
tttttttttttatcttgttgggcagggtggttcacgcctgtaatcctagcactttgggaggctgaggcaggcagatagcttgagtccaggagttcaagacyagcctgggcaacatagggagacccctgtctctacaaaaaatacaaaaattagcctagcatggcagtgtatgcatgtagtcccagctacctgggaggctga

SEQ ID NO: 550250 - DNA, 201 bp, Homo sapiens; identical to SEQ ID NO: 428625

SEQ ID NO: 550251 - DNA, 201 bp, Homo sapiens
aaagtttgagaccagcctgggcaacataatgagaccccatctctacaaaaaataaaaataaattagctagggatagcagcatgcacctgtagtctcagctrcctaggaagatgaggtggtagaaatcacttgagcccaggaagttgaggctgcagtgagccatgattgtgccactgcactccagcttggatgatagaggaa

SEQ ID NO: 550252 - DNA, 201 bp, Homo sapiens
ttcataatggagcagaatggatgataagagcaggagagatttcctccctctactcacctggaccttcctttggttccttcagttgccggagcagtgtcgtytgatgcatattcagcctcccaagaagaagaataagcacaagcacaaacagagccgtacccaggatcctgtccccccaggtaagaagcagttctattcaaa

SEQ ID NO: 550253 - DNA, 201 bp, Homo sapiens
tcgctgttgtccaggctggagtgcagtggcgcaatctcagctcactgcaacctccacctcccgggttcaagtgattgtcctgccccagcctcctgagtagytgggactacaggcacgtgctaccacgcctggctaattttttgtatttttagtagagacggagtttcaccgtgttgttagccaggatggtctcgatctcct

SEQ ID NO: 550254 - DNA, 201 bp, Homo sapiens
agttgagactaagtaaattaggagagagagggacatgcttttgtaggctcatcccagttggttttctcatggacatctcttcctctcccaggaagcttacmattttcttctctctcttttgtgcaatttgtctgatttaggacttgttctgtgttttctttaaaaaaaaaaaaattacatttatcaaactggctgaagtgt

SEQ ID NO: 550255 - DNA, 201 bp, Homo sapiens
agagagggacatgcttttgtaggctcatcccagttggttttctcatggacatctcttcctctcccaggaagcttacaattttcttctctctcttttgtgcmatttgtctgatttaggacttgttctgtgttttctttaaaaaaaaaaaaattacatttatcaaactggctgaagtgtgactgcctgttaagaggtatgtgc

SEQ ID NO: 550256 - DNA, 201 bp, Homo sapiens
atgcatattcagcctcccaagaagaagaataagcacaagcacaaacagagccgtacccaggatcctgtccccccaggtaagaagcagttctattcaaagcmaaaaaaaaaaaaaaaaaaaaaaacctgaccttctgaatctggtttgaacttccataggtaaacccagttaagttccgtatggagctctggactcctaaat

SEQ ID NO: 550257 - DNA, 201 bp, Homo sapiens
agtgtcgtctgatgcatattcagcctcccaagaagaagaataagcacaagcacaaacagagccgtacccaggatcctgtccccccaggtaagaagcagttytattcaaagcaaaaaaaaaaaaaaaaaaaaaaaacctgaccttctgaatctggtttgaacttccataggtaaacccagttaagttccgtatggagctctg

SEQ ID NO: 550258 - DNA, 201 bp, Homo sapiens
tgtagaatagtcaaaactggaatttgaactctcaagttacagtttagaaaaagcacagactgccttctcacctgagccttaaggataaccatctggacagrggagagttggcagagcaggggaaattcagaagattgtaatggcaagaggcagtgcccagagttatgaggagagatactgtgacattgggtctcctgccat

SEQ ID NO: 550259 - DNA, 201 bp, Homo sapiens
gtagtccaggaaagataatggtttgaaccagagcatagcagggcatagagaagtaaatggatacaggatgttagaggtagagctgacagggttgaaaaatygaatacagggccaggcgctgtggctcacgccagtaatcccagcactttgggaggctgaggtgggaggattgcttgagcccaaaagtttgagaccagcctg

SEQ ID NO: 550260 - DNA, 201 bp, Homo sapiens; identical to SEQ ID NO: 428628

SEQ ID NO: 550261 - DNA, 201 bp, Homo sapiens
ggacagaaaatcagttggactccagtgaagtgaacaaaaggaaagagtgttagggagagagatgaagctgggagagttaggcagaggcttttataaagcartaaaggcatttagattgtaaatacaaaaggaagccatttaaaaaatttttttatagacacaaggtctcactgtgtcacccaggctggactgcagtggtat

SEQ ID NO: 550262 - DNA, 201 bp, Homo sapiens
ggcctaccctgagcaccctattaaaaaataccacagctgggtgcagtggctcacacctgtaatcctagcactttaggagaccgaggcgtggggatcacttkaggtcaggagttcaagatcagcctggccaacatggtgaaaccttgtctctactaaaaatacaaaaattagctgggcgtggtggcacacacctgtaatccc

SEQ ID NO: 550263 - DNA, 201 bp, Homo sapiens
ctgaggatggaggggaggagtctatgagaacgtccaaggggaagcacctgataaagcatgaggtgggcaggaggtcccaacactgattagctcagattgtyggcctcagcaaagccagtggtgtcacagagccccaaagggcagctgcgaagttagaaaaagaggacttgttgctaagtgccagcagctcctgaaacacac

SEQ ID NO: 550264 - DNA, 201 bp, Homo sapiens
acccagcttcagagaaagggtgccagaggtgtcagacaggcccccggggttgtgttgctcactttggccttgggcaaaccaccaaaacactctgagtctcygcttcctcttctgctggctgaggatggaggggaggagtctatgagaacgtccaaggggaagcacctgataaagcatgaggtgggcaggaggtcccaacac

SEQ ID NO: 550265 - DNA, 201 bp, Homo sapiens
gaggaggtgactggctctgtgggcagagatgggcagggtgcccagctcagcagccacggcccgggggttcccttctgctccatggaggcaccagagccagrggcttaggcaagggtgtgtggcgttggttttaactgcattaaaagtacttttgtaaaatcctgtctggcccctcagtgctctctccatacttggcccagg

SEQ ID NO: 550266 - DNA, 201 bp, Homo sapiens
gttggtgggagggtggcctcaggggcagtgggaacagcccaggccaaggcaggaggactgacacctgggggctggggatcctcccagtggggcccttcatrgcctcctgcctctctggcttggccttgcacccctctcccctcacagggcagcttccggccccacggccttgttccgcaacactaaggcagccggggcagc

SEQ ID NO: 550267 - DNA, 201 bp, Homo sapiens
cgacgtgccccagagtccccctgagtccccttcctcaggggagaagaaggagaaggcaccagagcgcagggtatcagcccctgctcggccccgggggcccsgggcacagaaccgcaaagccatcgtggacaagtttggcgggtaggacacaggccaggggctgggctgggctttcccataggaaccctgggttggtgggag

SEQ ID NO: 550268 - DNA, 201 bp, Homo sapiens
aggggcctggtctaacagaagctccccggttccagaggacagatacatacgcatgtggaagtggtgggttaatgtagaactagagaccagagggtcctgckcccatgtgaggacaataagtgcaatgaaaatgtgggcttggaatcagacccagctgggtttgagtctttttttattttaatttttgtttttattttttgg

SEQ ID NO: 550269 - DNA, 201 bp, Homo sapiens
ccgcagccttgtgcagaaaggactggtgaagaccaagaagaagtgaggaggtgactggctctgtgggcagagatgggcagggtgcccagctcagcagccayggcccgggggttcccttctgctccatggaggcaccagagccaggggcttaggcaagggtgtgtggcgttggttttaactgcattaaaagtacttttgtaa

SEQ ID NO: 550270 - DNA, 201 bp, Homo sapiens
tttctttgtagactgagtaaaatgttttctgtttttatttttccttctcttgatactttttttttacagtgcacctatgatatgtgttttagaaatagccrttaaactttggtttgaatgaagaatgtctctcaatccacctatatttctcaaacgaagtgaagaaaatagttcaaaatttgtggaaacaaaacagtcaca

SEQ ID NO: 550271 - DNA, 201 bp, Homo sapiens
gtacacagacacactcacacatatgtagtgtgtgtttaagttggagagggttatatcttttagaacataaccaactaaattttgccaattccactagaatsttctatttttcattaatgtcaattcaaagtcagagccaacagggttgaatatatccctgtctgatgctaacgtgaaaccattgcattcctaatatctgga

SEQ ID NO: 550272 - DNA, 201 bp, Homo sapiens
aatgagatcgttgaaccaaagggtatgaatattttaagactcttgatttaaatggtcaaattgcttccatgaagagttatgctatttaatcctgctctcaraccaccatttcctcaccagcattcactgtatcatttgttttatctttggcttatgatatagatgaaaatggcatttaatcattgaacagttttcagtggt

SEQ ID NO: 550273 - DNA, 201 bp, Homo sapiens
aacataatagaatgtacttacacaaccttcatagtatagcctactatacacctgggcaatacctattgctcctagcctacaaaatctgtacagcatgttaytgtactgcatactgtacacagttgtacacacaatggtattagtgtatctaaacaaatataagcatagaaaagtacagtagaagtacagtataaaaatagt

SEQ ID NO: 550274 - DNA, 201 bp, Homo sapiens
tcacacatatgtagtgtgtgtttaagttggagagggttatatcttttagaacataaccaactaaattttgccaattccactagaatcttctatttttcatkaatgtcaattcaaagtcagagccaacagggttgaatatatccctgtctgatgctaacgtgaaaccattgcattcctaatatctggaaaacaaaactgcca

SEQ ID NO: 550275 - DNA, 201 bp, Homo sapiens
ataaccaactaaattttgccaattccactagaatcttctatttttcattaatgtcaattcaaagtcagagccaacagggttgaatatatccctgtctgatrctaacgtgaaaccattgcattcctaatatctggaaaacaaaactgccatctctggaacaaaaaagggttcttgaaaaatggattctcagtacctgaactt

SEQ ID NO: 550276 - DNA, 201 bp, Homo sapiens
ttttccccttgggtacatttggcaagtgcctttttctactataaccggcgtttttgtatctctttatttgtatctcaaactcactgggacttacaatcttaaaaaaaaaaagaaaaagaaaaattcatttgatgagtaattaaattagtgccactaacttcttctcagcaaattatgttgtattttatgtttctctggact

SEQ ID NO: 550277 - DNA, 201 bp, Homo sapiens
aacatgtgtgaactagaacacaaacatggatttccatgatttgatctgtttctgtgctttggttttatgatgtgagagatctcacgctcatggaaaactarcaataccttggattgtgtacaggttttgcataattatgcttgcagactttagttcataaagctttttcttttatcatataattaaaaaaataggctaggc

SEQ ID NO: 550278 - DNA, 201 bp, Homo sapiens
caggtttgttacattgatacacatgtgccctggtagtttgctgcacccatcatctacattaggtattgctcctaatgctatccctcccctagctccccacscccagacgggctccagtgtgtgatgttcccctccctgtgtccatgtgttctccttgttcaactcccacttatgagtgagaacatgcgttgtttggttttc

SEQ ID NO: 550279 - DNA, 201 bp, Homo sapiens
aaaagtgggatgtgacagtgggaaatcattagtgacttagaaattccagttggtcattgggccaattttgatgctaccttctctcttttatttctcacttyaaaataaaatttgcaaaaacaaaaaattaaatatagtatgagtccagttactggcctaaggagctaaaagcattctgggtttgtatgaagacagctgagt

SEQ ID NO: 550280 - DNA, 201 bp, Homo sapiens
tcttccttacagggtatacagatagcaattttggcagccatcacccttctttgaagaaaatattaagtgggaaagttattttaccatttttctctagtackaaagaatctgaatgatgtatgtttttaaaaaacataaattcttagagtaagtggacattaatgttactctgtaaatttttaaaatttataggataatata

SEQ ID NO: 550281 - DNA, 201 bp, Homo sapiens
aacatttatctggatttgcatagatgtttaccattttctttactcagtgttttatcaaatacatcctttaggaattcctttaatttggtctcttgttggcrtatgttcagttttcatttgtctattaaatgtttatcacttttttcgtgataggttgttctgctgggttcacaattttaggttgccagttctgtttttttg

SEQ ID NO: 550282 - DNA, 201 bp, Homo sapiens
tcactgctgaataatatctgtgatatactacagtttatctggtttcctgctaatgaaacactttggttatttctagtttttcctattgcaaataatgctaytacacacattcttgtgcaagtacaagctcctctaggaaacatccctaggagtcacattgctgagttgttgagtatgagaatattcacctttacaggataa

SEQ ID NO: 550283 - DNA, 201 bp, Homo sapiens
agatgcaacttggtgagtataattaatttggggtggaaattgggtagaaggaggaataaaaaattaatgtatttttagccttaagttccagaatgatggaygcaccatcaaggtgttaaaattgttagttccttaggaacagtctttatgttttctaagtctttttagcccccatgactcaaattgtacttccttgcacat

SEQ ID NO: 550284 - DNA, 201 bp, Homo sapiens
acaaaaaagggttcttgaaaaatggattctcagtacctgaactttatatttgaaataactttcagtttattgcttttaatcttatgttttaaagtgtgccratttggtggtttaaaacatgtttaataagtactaaaacagcacacaattgtgacttaaattgagtaattttctttgtagactgagtaaaatgttttctgt

SEQ ID NO: 550285 - DNA, 201 bp, Homo sapiens
cacttgtactttttttctgtctcagacctggaatcaattgtttttctaagaagctatagtttcttttaataggaaatggtattagaaactaagatctggtraattcattacttttgggatgtcattgcttcaatggatagagccaggaaaaatacatagttatgtatcatgagttcacacagatagttccaattcatattt

SEQ ID NO: 550286 - DNA, 201 bp, Homo sapiens
tagaagtaaatggggttacaatctgctggctgaaaaataggtcataagtgatttttcttgaggttagtagcaaacataggcagaactagaattagaattcyggtatctagggctgtttctttaagtcctaaggttgttaaaagcagagactctggagctagactacctgaatctaaatctcagcctttctgcttatcagcc

SEQ ID NO: 550287 - DNA, 201 bp, Homo sapiens
aatactgctttcttacccaaaatgcaaatctgtgcgtaatcagtacacagcaaaaatatttactgtattttgtttttccccttgggtacatttggcaagtrcctttttctactataaccggcgtttttgtatctctttatttgtatctcaaactcactgggacttacaatcttaaaaaaaaaaagaaaaagaaaaattcat

SEQ ID NO: 550288 - DNA, 201 bp, Homo sapiens
tttttacagtgcacctatgatatgtgttttagaaatagccgttaaactttggtttgaatgaagaatgtctctcaatccacctatatttctcaaacgaagtraagaaaatagttcaaaatttgtggaaacaaaacagtcacaaactacttccatagcttcagaagatccccttcaaaacttatgtttagcatctcaagaagt

SEQ ID NO: 550289 - DNA, 201 bp, Homo sapiens
ctttataacatttcttttggctgctcagaggccttccttgctcatttttagattcttaattggttttcacccagttgcaattgtcacattggtgagaaatyatgggtcttcttgctgaaaagtaattttacaatgtgtctcaaaaaattaaggccttgggtactgaaagaagcatgtaaaagccttttggtctcttggagg

SEQ ID NO: 550290 - DNA, 201 bp, Homo sapiens
ccagaccacagaccagtaccggtcctaaggaaccaggccgcacaccaagaggtgagctgctggagagcaagcgaagcttccgtctgtatttacagccgctscccatcactcgcattaccacctgagctctgcctcctgtcagatcagcggcagcattagattctcataggagcatgaaccctattgtgaactgtgcataca

SEQ ID NO: 550291 - DNA, 201 bp, Homo sapiens
tctttaaaaaaaaattcttagaataattaagagaaatcattattattgtaccaagcctgtggttaagaagaaatatttatattttttctttctttctttctttttttttttttttttttgacagggttgttacaagttgagttgaaaacaagaaaaacttgcttttggcgccatcaaaaaggaaagccagatactttcctt

SEQ ID NO: 550292 - DNA, 201 bp, Homo sapiens
tccacctccacatcttgtcccactggaagctcttcaggggtaatgtatggagctgtcatctcctatgatagcaatgccttcttctggaatacctccttaargacctgcctgaggctattttacagttaacatttcttttttctaattaggatgagtgtactctaaaactaaaaaaattaagtgtagtatagcaaatatata

SEQ ID NO: 550293 - DNA, 201 bp, Homo sapiens
tcttgtcccactggaagctcttcaggggtaatgtatggagctgtcatctcctatgatagcaatgccttcttctggaatacctccttaaggacctgcctgargctattttacagttaacatttcttttttctaattaggatgagtgtactctaaaactaaaaaaattaagtgtagtatagcaaatatataaaccagtaacag

SEQ ID NO: 550294 - DNA, 201 bp, Homo sapiens
ttttgtaacaatcaccattcttaatattatggtatatcttttaaaccatatgcatatttataggagtttattgtgagcttcctatttagctttaaagaccytttttattaacataaaaattaaaatgtttatatatttttttatttgtgctttttttacctttagcttccattgaagattgacatcattaaacatccaaat

SEQ ID NO: 550295 - DNA, 201 bp, Homo sapiens
gccatttgttggtgtggctagtatagaaacaaaattaaaaattagtgcattcatttgttccaggaagaacttggtaaatttttactttcctatttatatcwatatctatatatatatatatatatatgtatttttttggttgagtttatataaaaaattatgtttgtaaataatatttgagttttggatctaggaaaatgt

SEQ ID NO: 550296 - DNA, 201 bp, Homo sapiens
aggaaaaatacatagttatgtatcatgagttcacacagatagttccaattcatatttaacattataaggatttttatttcttttagagtgaaaaacttggytcctaataatagtgatttaaaacagttactttacttgtccatgtatgattagaaggcaagaaagctattcagttgatattaggcagttgctaaaacagtt

SEQ ID NO: 550297 - DNA, 201 bp, Homo sapiens
gtatacatttatctgtaaaagatgtggtgcagcttttccctggtgtcattccaacctgtgtggctgttctcttgagcagtggtcgtttatctccatccacmttctctcccacctaagtgcgtgccaccacccgatggaagattcgatggacatggacatgagccccctgagaccccagaactatcttttcagttgtgaact

SEQ ID NO: 550298 - DNA, 201 bp, Homo sapiens
caatggtttcccttgggggctttgaaataacaccaccagtgtcttacggttgacgtgtggctcagggctagggcatattagtggacagcacttagtagctrtggaggaagatgcaagaaaagatgaagaggaggaggatgtgaaactcttaagtgtatctggaaagcgatcagcccctggaggtggtagcaaggttccaca

SEQ ID NO: 550299 - DNA, 201 bp, Homo sapiens
cccctggaggtggtagcaaggttccacagaaaaaagtaaaacttgctgccgatgaagatgatgattatgaagatgatgatgatgatgaagatgatgatgaygatgatgatgattttgatgataaggaaaccaaagaaaaagcaccagtgaagcaatctatatgagatactccagccaaaaatgcacaaaagtcaaatcaga

SEQ ID NO: 550300 - DNA, 201 bp, Homo sapiens
agccatttgtcaaatggatttgaaaggctttttaaaagtcaccaatgttaatgttttaaaaattgcggggtggagagaaacagtgttggaacagttcagcrttttgttttgagattaagtgcaactattgacaaggggattcctgaggtccatgcctcataaacactcagagtgctgtttaccagggtctctggtccctgc

SEQ ID NO: 550301 - DNA, 201 bp, Homo sapiens
taaaactgacaaattattttcaccatttgttgaattaggagcatgggaaatgatctacagtggtagtaggtctctgtcatggaaatttgtcccttttgttrtatctttatcattatctagtgtatctttgaaagtacatttttaaaaattatacagcctttgaaatgctgaaataagggaaaaatacataaagtccaggac

SEQ ID NO: 550302 - DNA, 201 bp, Homo sapiens
ccggctctgctggggcctctcgcctctcttcctggacgaagcctttttgtatgtatttgacataattctgcttcttggtctaacccccagctgcttctctragatactgtagtacacagattaggtgatttcttctcttcctggggctgtccttttcagaactgtaaaacatattttctaattgcctaaaccaaccttaag

SEQ ID NO: 550303 - DNA, 201 bp, Homo sapiens
gtggaagctcagctgctatactgttgcctctctatgtttgcctttcttgtggcttttatgctagagtggctttaaggactgagggtagtgcttctctgtcyacttgtttcctaatcccttagttcctgttcctgttcccttagtgtccctttcattggaaatggagctgatggtagaacaagtgggagtattttcagggtt

SEQ ID NO: 550304 - DNA, 201 bp, Homo sapiens
  misc_feature (1)...(201): n = A,T,C or G
cccagaattctactgggattcttcctacagcatggctgataacagatctgtaatggcacagcaagcaaacatagaccgcaggggcaaacggtcaccaggantcttccgtccagagcaggatcctgtacccagaatgccgtttgaggtgtgtgttctttcctatcaccaggcaatttggagataggtctgaggttgactgtc

SEQ ID NO: 550305 - DNA, 201 bp, Homo sapiens
ttgactttagttgtcttcttccacctaattatgctactattcctttatgcttttgttatcccttattgcttctcactgtgatgctttctgtcactaggacyccaagagctcccctctgcttcctccggacctgttaaagagtctggctgccttggaggaagaggaagagctgattttttctaaccctcctgatctttaccc

SEQ ID NO: 550306 - DNA, 201 bp, Homo sapiens
actctggattccagcaggtaagttacagttgtgtgtactatccagctgaatgaaataaggggaaatgctgaaagattcaatgttagaaatgctcattaaamtttgacatacttcttgcttagatttatagtgattatgggaaaacaaaagtattgtctctactgtttatgaaagttcaaatgttttccttactcttgtaaa

SEQ ID NO: 550307 - DNA, 201 bp, Homo sapiens
ggtttttttacatacttagtaaatcatgtgagtgcaggtaacatcagcttgcagttctgtatgtcagcgtggatgcaatcaagcctcccaagtgcctgtaraaataggtgtatgatagtatgctagagaagccctcttgtacatgtgaattagtaactattgctacagcagcttataatgacagaaaatgcaaagatgctt

SEQ ID NO: 550308 - DNA, 201 bp, Homo sapiens
gcggcggaggatgagcctgcagagcgcgcagtacctccggtgagtgccgaggccgggctggtacgtagggggagcgggccgcaggttggggcatggagcarcagacaccgaggtaagtccggggtggcgggggagttgctgcgtcctctcctcgccgggcaggtcggcggagactgcaaggggatctgcgggagggggcgg

SEQ ID NO: 550309 - DNA, 201 bp, Homo sapiens
ttaggtgagtgttaggggaatgtctgtgtcccaaagataacatgcagagttttgacaggtgagttattttcatcaggatcatgataaagaagagcagagamcaataagcattataatttctttctgtatgttaatttttaaaaaaatttagtgaacagtattccaccaaacaacattttaattaaaatgtttgcaaatttt

SEQ ID NO: 550310 - DNA, 201 bp, Homo sapiens
cattgagacaccaactgagagcatctgggtgattttttatagtgctggttaacagatcactgtgaacacagttattagaaggtaaatgaaatttgatgatyacgcatgtacttctctaagaggggaaaataccagttgataatttgtagaagtacctataatacatcctaatgttgttttagtatgccatttaccctgtgt

SEQ ID NO: 550311 - DNA, 201 bp, Homo sapiens
taccttttcctttgtccatagatcagtgcatatttaataatgagggaaataatcacatttaaggaaacaaatagatattataattcaaatcttaacatttrgaaacaacaccaatgttctacaagagaataatagttaaattatggcataactgtagaatggaaacacaaaatgattacaggttgatatttatcaagattt

SEQ ID NO: 550312 - DNA, 201 bp, Homo sapiens
ttcttctgttgtcctttcattttatttagagttgtttgaagtacagaagttaccaggatttttttttttttgcaataccttttcctttgtccatagatcartgcatatttaataatgagggaaataatcacatttaaggaaacaaatagatattataattcaaatcttaacatttggaaacaacaccaatgttctacaaga

SEQ ID NO: 550313 - DNA, 201 bp, Homo sapiens
ctctaagaggggaaaataccagttgataatttgtagaagtacctataatacatcctaatgttgttttagtatgccatttaccctgtgttccagaatatgtmcttgctatgccttgtttataaaataagttttaatgtatcaagcctctgaaagagtaaattttatgacaaatctgggaagtcatgctttatgtactgggag

SEQ ID NO: 550314 - DNA, 201 bp, Homo sapiens
agagggtgtaagtattccaccagcccgctgagtgtgcacgaaatgttcgcagtgcaacaaaaagaaaaatccatcaggaactctccgtccccccggggccytccggagggagagagagaggaactgctgtttatctcactcagttacttggtatcaccgcctctcaccttctccatcgtgcatgtccccagccacatggga

SEQ ID NO: 550315 - DNA, 201 bp, Homo sapiens
tattatttatacaatggaatttatctggattttgagatgttattaaactaagaagtagagtagcttttcctctgtttgaataataagctattattcattgkccccagagattttctttttccttagtcacgtcctgatagaacttctaaatcaggcaaggtaagagaataaataaatcttatttttgaccatgggattttc

SEQ ID NO: 550316 - DNA, 201 bp, Homo sapiens
tgcaattttttgctgtttccttaaaactaaagctgtgttcttctgttttgaagggtttccgcccccaacatatgttatccccccgcctgtggcattttctrtgggctcaggttacaccttcccagctggtgtttctgtcccaggaacctttcttcagcctacagctcactctccagcaggaaaccaggtgcaagctgggaa

SEQ ID NO: 550317 - DNA, 201 bp, Homo sapiens
taactcaaaccccaactcaagcaagtaactcccagttcatccccattcatcaccctggagccttccctcctcttcccagcaggccaggtaaatatgttttrtaatttcttctacttaatcttttctgtgcaagaatttctattcagtcactgagaaatgtgttttctgttggagtaatgttactaagccataaaaagttct

SEQ ID NO: 550318 - DNA, 201 bp, Homo sapiens
ctgtaccagagatacacagatggatgagatacatttctgtttctgttggtgctagccagagcaagagtggaaagccgtgttcatatgtcagtagcctaacrtaaatcagtactatttctctgagactctgataggaagccagctctgttatgtgaaggcttttcacttagtgtgtttttcatctgttcaccaaaaattgct

SEQ ID NO: 550319 - DNA, 201 bp, Homo sapiens
ctcaattaccaaatagttcatactggcagtggtatatacacagaggctttacagggtgttctgagctctgttgcgtttagcatcaagatttcatgattctrattacattgcccattcttttgaaaaattcttcctactgttaccttacctgcatttcttcctgcaagcatcaagaaggaagcattgatctggggctttaag

SEQ ID NO: 550320 - DNA, 201 bp, Homo sapiens
tatagactagcaataaggaataacttcacagagaggctgtttgtttgttcttttgacatgattgttagtagtaatagccagcacttttatgttgtgccagrcagtattccaaatattgtgtgtttattaactctttgaatagtagatgtatactattattgctctgttacacagctaggcaaacaggcataggagacatac

SEQ ID NO: 550321 - DNA, 201 bp, Homo sapiens
gacctcatgatccatccacctcggcctctcaaagtgctgggattacaggcgtgagccaccgtgcccagcctcttattttaatccttcttaggtaatatatrtatatttttttctctccttttatcattgtttttcaacgatttgattaaaatgcctttgtgtggttttcttttgtgtttaaatgcttgtagttgagcttct

SEQ ID NO: 550322 - DNA, 201 bp, Homo sapiens
agcatttcctgtatcttagtcatttggtacttgtaatttcttaattttgtaatgatctctttttttatatgtgacttatctctgcagctagactaagtatsgttgagaccatgtttcagcatcttttaaatgtacagtgtacataattggtgttaaataaaattgtcatgcttttgttttgtttttgcaaaacatttagga

SEQ ID NO: 550323 - DNA, 201 bp, Homo sapiens
ttattcttggttcattcattattttcattaattccttcagcttaaagaattaaaaggaattcatgttgccataccctctaccaagagaaaacattttaaarttcttgcctctctgtatgagcattggctgtaaacttcaatgttaattcattgatggtttttataacaaaaccatagaacaattgaggtatagtatttttt

SEQ ID NO: 550324 - DNA, 201 bp, Homo sapiens
taatactgcctcttagaaaggttacgaattatttacttttgtatcaggtgatcacctaaccagattatctttgagatactgtacagtaatgagataattartagtgaggtaatcaaaggaaaatgcaactggaagatggtattcaaagagaaaaatgagttaaagactgcttacttgaaattttttttattactggtgaaa

SEQ ID NO: 550325 - DNA, 201 bp, Homo sapiens
ccagcttcttagggaacaagtaccagatagtaataaagatcaacttctattctcaatggttttgttactctacctatttaggtggaaggagaaagaagaarcaagaagtgacctatcgaaaacgtgagagggactaggaaagactgagcagaaaagttttaatgaaggggttgctctaatgcaatagtttgcaaaatgtgg

SEQ ID NO: 550326 - DNA, 201 bp, Homo sapiens
ccctattctacaaagaatctaaaaatcaaccaggcacggtggcgcacacctgtagtaccagctactctaggaagctgaggcaggaggatcacttgagcccrggaggttgaggttgcagtgagccatatttgcgccacctgcctgggtgacagagtgagaccttgtctcaaaaaaaaaaaaaaaaagaaggagttgcaagtc

SEQ ID NO: 550327 - DNA, 201 bp, Homo sapiens
tagattgctgtaatacttgagaattcaaaaggtatgatttataatgaatgatactagttatcctgtgaaagattaacgtataatatatatatatatatatwttttttttttggagacagtcttgctctctcacccaggctggagtgcagtggcgtgatctcggctcactgcaacctccgcctcctgggttcaagcgattct

SEQ ID NO: 550328 - DNA, 201 bp, Homo sapiens
ttggggttactccagaatcttaactttctcctgtaggtcagccttataatcagttggctatcttagcttcttccaaaggagaccatctgaccacaattttytactactgcagaagcattgctgtgaagttccctttcccagctgcctccactaatctgcaaaaagcactttctaaagcactggaaaggtagggttgtttgg

SEQ ID NO: 550329 - DNA, 201 bp, Homo sapiens
acagaatgagtctcaggaggagtcctacaatgcctatcctcttccagcagtcaaggtctccatggactggctaagactcagacccagggtctttcaggagkcagtggtggatgaaagacagtagtaagtatttttagaatttcatgttaacttgtgtgctttgtttgtttgatatccataaatatgtaaaaactgccttct

SEQ ID NO: 550330 - DNA, 201 bp, Homo sapiens
acaagcaacttaaagtcatagacaagtttttttcaacttgttagcatcaggcatctcatttgtaaaacaaatgggctctaaggtcctttacatttttggawttttgtgatcatgggaaagcaaaataattagtaaaactaagatagtaaaattatcttttattggctattaaataatttgctttgattttccatttttaac

SEQ ID NO: 550331 - DNA, 201 bp, Homo sapiens
accaggtgcaagctgggaaacagtcccacattccttacagccagcaacggccctctggaccagggccaatgaaccagggacctcaacaatcacagccaccytcccagcaaccccttacatctttaccagctcagccaacagcacagtctacaagccagctgcaggttcaagctctaactcagcaacaacaatcccctacaa

SEQ ID NO: 550332 - DNA, 201 bp, Homo sapiens
tgtaactgctcacaataaggtccagactgaaaatacaatctccttttttggtttctcatccatctcaaatcacctataaatgattaaagaaagaaagagtraacatatcaccacactctgtacctcgtcccgggttttctataaatgctactcatgttccctcattttgctcaactttgagcagtgcatatgacatctact

SEQ ID NO: 550333 - DNA, 201 bp, Homo sapiens
aaatacaatctccttttttggtttctcatccatctcaaatcacctataaatgattaaagaaagaaagagtaaacatatcaccacactctgtacctcgtccygggttttctataaatgctactcatgttccctcattttgctcaactttgagcagtgcatatgacatctactctctggctccatctataggatctcagggcc

SEQ ID NO: 550334 - DNA, 201 bp, Homo sapiens
agccccagttgtcactgcagtctgggcaaccccagcaatgaaaaggggtgagataacgctcattgctcttcagagagagtggttggagccccccccccccsccccgtatgcttacattattgctcttttagtttgacatggtgtttgggttttgtttttttgaaaggtctgaaaaggtgaagccccctacccaatggcaat

SEQ ID NO: 550335 - DNA, 201 bp, Homo sapiens
ggagttgctgcgtcctctcctcgccgggcaggtcggcggagactgcaaggggatctgcgggagggggcggaacgggtatgggtgcctagcccctaccgccygggctgagctctggcgaagccggctcgtcccggtgcgaggagggaggttggggaagcgtgagaatgtgcgcgcgcgcccttggtctcgggtttgctagcg

SEQ ID NO: 550336 - DNA, 201 bp, Homo sapiens
ctctcctcgccgggcaggtcggcggagactgcaaggggatctgcgggagggggcggaacgggtatgggtgcctagcccctaccgcccgggctgagctctgrcgaagccggctcgtcccggtgcgaggagggaggttggggaagcgtgagaatgtgcgcgcgcgcccttggtctcgggtttgctagcgaggggtggagagaa

SEQ ID NO: 550337 - DNA, 201 bp, Homo sapiens
cagagtaaaattttagatctgtgtttatcaatggaagcctgctccagagtctgcaagaactatagttcatcacctgacagcttataagaaaagcagattgyttgtaaattacattactattatataccccatataatctttgactggaagttggtaacatcattaggtggatgttagcatactgaaatgttacttgttcat

SEQ ID NO: 550338 - DNA, 201 bp, Homo sapiens
ccggctcgtcccggtgcgaggagggaggttggggaagcgtgagaatgtgcgcgcgcgcccttggtctcgggtttgctagcgaggggtggagagaaacgtcyggggaggcggcggcgaccccgagtggaggtgggtgtggaggagtctgatccccgtggcaggggactcgtggtgtggcgtgggattggttggagcgatgca

SEQ ID NO: 550339 - DNA, 201 bp, Homo sapiens
atgcctgcttacgcattcattaattcaacaaattgaacgcatttttagtgaacagctgctacggtcaaggcattattgtagctgttatgggtgtagccctsaacactatcttttttgcattctttaccttctcatatacccagctggccaaactaacaatctgggagtgacagactctttcctctgctttatcttcctttc

SEQ ID NO: 550340 - DNA, 201 bp, Homo sapiens
gttccagcactatccagctcctagttgttcagccttattttcttccatttcccccagtatttataaactctatacactatgtgctatacttgaatagctcmctatttttattcctccacacctttgttcatgttgtgcctagaacatttccttctcctctactgcccttccatcaccagcctggtaagcacttagccatac

SEQ ID NO: 550341 - DNA, 201 bp, Homo sapiens
agaatgaaagattttaaaagactttgacacctctgttgagtaaaagaaagggtgtattgaatacaattcatttgatgggggtaggagaaggttaggatagrccgcaggtgaggtataatattatgctttaaaataatggcattttgaaaaaaagaaaagtggaaattaacatatcaaagttggaaaagcaggagtggggga

SEQ ID NO: 550342 - DNA, 201 bp, Homo sapiens
gcattactaatttgtaggaaagcccaaattcagacctgagtctttttgcttcatattattttccattacataaaactgcctcctgtatggttcatattttrtcactcaataattcaacaaattcaacaatttttagtgaacagctgccatgggccgaggcattattctagttgttatggccctcatcttttccaacactcc

SEQ ID NO: 550343 - DNA, 201 bp, Homo sapiens
tattttcttacttgtctttgtatctttcttgtttactgggtgtctgatatactagcacatacttggatgaatataataatatttgaatgacgatatttgtragtaaatatttgaataactgtgaagtaaatattcttcacagtgtgaagaactgtgtgcggggcaagaaataagcccttggcaagcaaagtgagaggagaa

SEQ ID NO: 550344 - DNA, 201 bp, Homo sapiens
aaattagttttcagtgattataaataaagccgatatgatattcatgtgcaggtttttgtgtagacatcagttttcagctcaattgaataaatacctagagkcatatggtaagattatgtttagctttgtgagtaactgctaaacttccaaagtgactgtactattttgcattcccaacagcagtgaatgagagttcccgat

SEQ ID NO: 550345 - DNA, 201 bp, Homo sapiens
ctacagaatcccttcctttaactgtactctttaatgtttaccatccttcaggatcttttttcacttgtgtcgctctcttcttttaaattattccctttacygatcttactttctgtgaaccaatctcaattttcctttaaaaggccttcctgatctgatttttcttttcaagttctgtccttctttacctttgttttatgg

SEQ ID NO: 550346 - DNA, 201 bp, Homo sapiens
taattagacccagtcaaaatactgggattgagggcagaaccatttactcatctgtaattctattacacatggtggttctaaatgcagactaccagtttaatttcttgtgtcaaagatggttcctgttcttgataatatatgcagtacgtctgtcttcttttacagaggctgctattccaaaaagctttcaactctcagcag

SEQ ID NO: 550347 - DNA, 201 bp, Homo sapiens
caagtgggtgtccttgggatctccccagtagattataacctttccaaagtcactaactacttcctcatttttgtattcaggtttctgtcatacagtaggtmgttaaatgcttccatgtttgaatgaacttaccacctccaagcttcaattttcacatctatagaataggaattatatatagctaccttataggacatatca

SEQ ID NO: 550348 - DNA, 201 bp, Homo sapiens
attaatagtgaggtaatcaaaggaaaatgcaactggaagatggtattcaaagagaaaaatgagttaaagactgcttacttgaaattttttttattactggkgaaaaaagtaaaaaagcatagtgttgagagaaccaccataggataaatttggacattaaagagtgtcttaggacatctgcagaattttgtgtgtgtgcat

SEQ ID NO: 550349 - DNA, 201 bp, Homo sapiens
tggtcatttcaagcaaattacttggcatgcaagataaatgtttataaaactttattcttaaaatgataaaagaatctttcctaataaaaagttgtggtttrtttgagctccctgactagaaagtgaaatgtgagtaaaaatattacattaatgtaatgaatttgtatattttcttttctgctttgtttcatagtttgtaaa

SEQ ID NO: 550350 - DNA, 201 bp, Homo sapiens
tcacgatagtatatcttcttcgggcctttttcttacgtgtgtacacacacacaggaaatgattcatatcaaataaagttttgtgcctgattttgaaatttrgtattatattgttagcattttcttttgtcattaagcattttgaaaacatgacttttactggcttcataatattccatcctatggaagtgctataatctat

SEQ ID NO: 550351 - DNA, 201 bp, Homo sapiens
tctagatcacttacaatatgtaatacaatgtaaaagttgttacactatattgctttttaatttgtattttaaaaaattgttatttttttctgaaaaaaaawtttttttttttttttttggtctacaattggttgaatccatggatgaggaactcaccgatagagggccagctcataccacaataaccctcatgctttctgc

SEQ ID NO: 550352 - DNA, 201 bp, Homo sapiens
taccgttatgtttttgtttttgttactcagattctaagctgggtccagctgaagtctggacatccaggcaggctctgcaggacctgtaccagaaaatgctrgttaccgatttggaatacgctttagacaagaaagtagaacaggatctgtaagtattacctatcatttgagaagtccctgtaagatcaagaatttcaccga

SEQ ID NO: 550353 - DNA, 201 bp, Homo sapiens
cttcttggtctaacccccagctgcttctctaagatactgtagtacacagattaggtgatttcttctcttcctggggctgtccttttcagaactgtaaaacrtattttctaattgcctaaaccaaccttaagttggtagtaggatatagcaaaacatttctgcctttatagttctcccaaatcatggagacataccttggtt

SEQ ID NO: 550354 - DNA, 201 bp, Homo sapiens
cctccaacacacaaccataattctgttccattctccaattttggacccattgggactccagataacagggatagaaggactgcagatcggtggaaaactgwtaagccaggtgagatctacatttcattgccaggcaaaattgaaagaatttactctatccttccctggggtctggcaattggcagtgatagaacatcttct

SEQ ID NO: 550355 - DNA, 201 bp, Homo sapiens
ggcaccaaataggaagttcctcccctgcatattttgatggtatatttaaggagaatctctttgaaagttttgctttgtggcccagcatgtatattgaccarggtcacaacttagaaaatgccttttttaagccacatttaagaccctgtgggccaagcactgtggctcatgcctgtaatcccagcacttggggaggctgag

SEQ ID NO: 550356 - DNA, 201 bp, Homo sapiens
tcttctttctagcacatttgagtttcaatttattatagatagttttgcttctattggttacaggtaaaatcccagacagaactaagaaagactccagtgtytgaagccagaaaaacacctgtaactcaaaccccaactcaagcaagtaactcccagttcatccccattcatcaccctggagccttccctcctcttcccagc

SEQ ID NO: 550357 - DNA, 201 bp, Homo sapiens
caataagatgatgtctgaaaaatatccattgtatttggctattaggtaaccaattgtctgatagtagtttcagtagagtggtaatggatggttgggtgagrggagggagaggggttgtgtggaagccagatgataatggattaaggagtaaatagaaattgagaaagcagatatgaaaagtgtggactcctttgaaggcat

SEQ ID NO: 550358 - DNA, 201 bp, Homo sapiens
caatttctagaatttactttcccttgtacttttttgagaacatactctcttaagctaatgaatacatggaatagtgattttcctttgtagaaaatagttayagggtaaagcagtatatcattaggtaatccactcatgcgctttttctacagtgttttctcgagagcttatgtgtgttgcatgaagacattgtacagtata

SEQ ID NO: 550359 - DNA, 201 bp, Homo sapiens
tttttgtatgtatttgacataattctgcttcttggtctaacccccagctgcttctctaagatactgtagtacacagattaggtgatttcttctcttcctgsggctgtccttttcagaactgtaaaacatattttctaattgcctaaaccaaccttaagttggtagtaggatatagcaaaacatttctgcctttatagttct

SEQ ID NO: 550360 - DNA, 201 bp, Homo sapiens
agggggaccagtgtctgcccagtgagtcactgctataccaaatagaattacattttgttttcagctggaatcacgcctttaagaatcagatcacaacactrcaaggccaggcaaagaatcgagcaaatccgaatcggagtgaagttcaggcaaacctttctctgttcctagaggcagctagtggcttctatactcaggtga

SEQ ID NO: 550361 - DNA, 201 bp, Homo sapiens
agtcactggtgtggtataatggttttaactgctggggtttatctatctaccgttatgtttttgtttttgttactcagattctaagctgggtccagctgaaktctggacatccaggcaggctctgcaggacctgtaccagaaaatgctagttaccgatttggaatacgctttagacaagaaagtagaacaggatctgtaagt

SEQ ID NO: 550362 - DNA, 201 bp, Homo sapiens
agttgaatgagccaaggagtttgaattaagactggcttaatttgtattttggttgtcctgagttcagatccctattatatactagcaatgtaaccttgaasctctctagttttttaccttggctacctgtaaaatgaccatggtagaattactaggagaattacatgagaagatagacacagtataatccctccatagccg

SEQ ID NO: 550363 - DNA, 201 bp, Homo sapiens
ttctgaaaaaaaattttttttttttttttttggtctacaattggttgaatccatggatgaggaactcaccgatagagggccagctcataccacaataaccytcatgctttctgcttttttgttacctgtgctgtttctttatacctgaaataacaattagtctttccactatttttggcagctgatttgaagctacaagtg

SEQ ID NO: 550364 - DNA, 201 bp, Homo sapiens
gaaagcattttaagtataaaatattttaaaattggcttataggagactgatattttaataactattataaatgtatatctgcattgaataaaataaaaacrttaagattaaaaaatttggtaacattacattgccaccgctactgttaatactttctagtctttttatcaatatagaatatgcattttatgcatatacaga

SEQ ID NO: 550365 - DNA, 201 bp, Homo sapiens
aaaatgactttttttgcaattttttgctgtttccttaaaactaaagctgtgttcttctgttttgaagggtttccgcccccaacatatgttatccccccgcmtgtggcattttctatgggctcaggttacaccttcccagctggtgtttctgtcccaggaacctttcttcagcctacagctcactctccagcaggaaaccag

SEQ ID NO: 550366 - DNA, 201 bp, Homo sapiens
gcctgacacgttctaataggtagaagctttcagtgtggttattttttctttggttggtttttgtgcccccattctacttcccaccctcctgccccatctcyatcccttcttttacccaatgctgtatgctagtaattgtttttattcctaatgtgtgcaacatcacatctccccaagaagcaacagcatggggtccagcag

SEQ ID NO: 550367 - DNA, 201 bp, Homo sapiens
ctgggattacaggcgtgagccaccgtgcccagcctcttattttaatccttcttaggtaatatatatatatttttttctctccttttatcattgtttttcarcgatttgattaaaatgcctttgtgtggttttcttttgtgtttaaatgcttgtagttgagcttcttagatttataggcttataattttcatcaaatttgga

SEQ ID NO: 550368 - DNA, 201 bp, Homo sapiens
ggcgtgagcccctgtgccaggcccgaaagattaccatataattttcatgcagtttttgttcagatttcagcagtatgtggtactaggtacacatcttacartttataaactttacttttagagcacttgtgacttactactaaattttgtttgtttttcttttagttattacaagaactgtgtacagtatttaatgtagat

SEQ ID NO: 550369 - DNA, 201 bp, Homo sapiens
attttaatccttcttaggtaatatatatatatttttttctctccttttatcattgtttttcaacgatttgattaaaatgcctttgtgtggttttcttttgwgtttaaatgcttgtagttgagcttcttagatttataggcttataattttcatcaaatttggatcctgcaattgccattgaagtctgtatgttcatttctc

SEQ ID NO: 550370 - DNA, 201 bp, Homo sapiens
tatggctatttcaggttctttatgtaaataaaaacaaaaatctcagagtagtctgggcagagacagctgtaagtttctgacatggtaggatctcctgtcaytgctggtagaactgtaagtaaggattatctgttttccgccataatgctagtgataatgaatccctgctctctgcaaaaatttcccctgggcatagaggaa

SEQ ID NO: 550371 - DNA, 201 bp, Homo sapiens
ttttacagtcgcacagcaagcagtctcacagaaggcaggctagtccattcacagcctgacacgttctaataggtagaagctttcagtgtggttattttttytttggttggtttttgtgcccccattctacttcccaccctcctgccccatctccatcccttcttttacccaatgctgtatgctagtaattgtttttattcc

SEQ ID NO: 550372 - DNA, 201 bp, Homo sapiens
taaccttttgtgttctgctctgtcagtatttttgcttttctattgtcttgaactttctccattattgtccttgtgtcgctttgcctttgcatttcagagcsttttttctctttgcctaataccatctatctcactatccccttgactttagttgtcttcttccacctaattatgctactattcctttatgcttttgttatc

SEQ ID NO: 550373 - DNA, 201 bp, Homo sapiens
tactttttgttagttattgagagagttttggaatctccaaataattatagatttatctatttctctattccctgtttctgtttttgtattttcttttttgyttgtttgaaacagggtcttgctctgttgcccaggctgcagtgcagtgacaccatcatggctcactgcagtctcaatcacctgggctcaagcaatcctccc

SEQ ID NO: 550374 - DNA, 201 bp, Homo sapiens
ttttgaactctgatggtctggcaaagaaaccatgtacagaaatctctaaaacagcatgttagagaattctgagacaaagcactcctctcagttgggctgartcatctaagtttaaaaataggtttactgatatttaaataaattgctctctgagaggaacaaggttagccagttatcttggacagtggaggtccctttctt

SEQ ID NO: 550375 - DNA, 201 bp, Homo sapiens
ctgcaaatagagctgcttaaaaagcatattaacaaagccatttgtcaaatggatttgaaaggctttttaaaagtcaccaatgttaatgttttaaaaattgyggggtggagagaaacagtgttggaacagttcagcattttgttttgagattaagtgcaactattgacaaggggattcctgaggtccatgcctcataaacac

SEQ ID NO: 550376 - DNA, 201 bp, Homo sapiens
catcagagtaagcagtgagtttggcagggagattcattgatactgtgtttaggttgttttgctttaaatataatctttgcacacacatatttaatattgcrataggaatgagacatttttcaaaatcactttataaaatattgaaaaatacataattttcagatcatattgtatagtgtattttgttttgttttgttttta

SEQ ID NO: 550377 - DNA, 201 bp, Homo sapiens
tatgattatttagaaatgtttgattcatttccaaatatttgaggaattagagaactttattctttaacttagacaactaattctagttgtttatatatatwtttttaaatttgtacttctatgactttaattcttttaaatttctgagatttgttttgtggttcagcatatgttctatcttggtgaatgtgccatgtgcac

SEQ ID NO: 550378 - DNA, 201 bp, Homo sapiens
gttggattcataaacagaatgagtaaaaatgaagaggattctatttataaacattgtcagagtgtcataaatgagtaaatatgaaaataactagaaacacwtaaaataaaatctgagaactcagcctgcatttcaaagaacatcattctatatgcttgtcagtgttcatattatattttactgtgggtggggagtataaaa

SEQ ID NO: 550379 - DNA, 201 bp, Homo sapiens
acagtctttggaggaggtaagaagagaaatgtttagagttgaattctattaaggtcattacggcagctcttttagggcctgtcaaaaaaaacaaatatatmtatttcaaatactaagagtgtttggattgtctgtggtcagtcttataattaagccgcgatttaaaaaaaaaatacaagaataggctttagaaaaatcttt

SEQ ID NO: 550380 - DNA, 201 bp, Homo sapiens
ctattctaggtttttgcatttccagataaattttaaaatagcctgccagtttctaacgaaaacaatctgcttgggttctgattgcaattgtgttataactrtagttcagtttggggagaattatataaatccttctgaagaatcagcttttgtctttcacttattttctgtgtctttgttttctgctcttcactatttcct

SEQ ID NO: 550381 - DNA, 201 bp, Homo sapiens
caaagttggattcataaacagaatgagtaaaaatgaagaggattctatttataaacattgtcagagtgtcataaatgagtaaatatgaaaataactagaawcacttaaaataaaatctgagaactcagcctgcatttcaaagaacatcattctatatgcttgtcagtgttcatattatattttactgtgggtggggagtat

SEQ ID NO: 550382 - DNA, 201 bp, Homo sapiens
agtacctatactacctcttctgtagtacctgtagtatagtatatagtactgagtgtttagaatgcattaaatgtatttatagatgttgattattccacgartatttattgtttcagtttattagctttcaacatagttggctgtcactgaatgttccatattttattcagccttttaatgactttttctttttttattgct

SEQ ID NO: 550383 - DNA, 201 bp, Homo sapiens
taattctgcttcttggtctaacccccagctgcttctctaagatactgtagtacacagattaggtgatttcttctcttcctggggctgtccttttcagaacygtaaaacatattttctaattgcctaaaccaaccttaagttggtagtaggatatagcaaaacatttctgcctttatagttctcccaaatcatggagacata

SEQ ID NO: 550384 - DNA, 201 bp, Homo sapiens
tgcagtttttgttcagatttcagcagtatgtggtactaggtacacatcttacagtttataaactttacttttagagcacttgtgacttactactaaatttygtttgtttttcttttagttattacaagaactgtgtacagtatttaatgtagatttaccatgccgtgtgaagtcttcccaattgggaattatcagcaataa

SEQ ID NO: 550385 - DNA, 201 bp, Homo sapiens
gactgcccacattccttagctcatggcccccttccatcttcaaagccagtagtcacattactctatattctacttcccccaccactctttctctgactctyctgcctctctttcacttagaaagatccttgtaatcacattggacacacccagataattcaatacactctccctttctcaaaatccttaactaatcacacc

SEQ ID NO: 550386 - DNA, 201 bp, Homo sapiens
gtttttaaaatgtgtgagatacttggacatgttaaaatgctgaagagaaggaaagatccaaatgaagtgagggaagtctcaaaattggtgcaagggaaggrgtaaatcaaaggaacagtccttaagaagggttagcaagaacatacctaagtggaattattgttcttaaatattaaataagaggtgcaatacctctagtgt

SEQ ID NO: 550387 - DNA, 201 bp, Homo sapiens
ctgttagaaatatatgagacagaatttttaaatgtttgttctaagaaacattaaacaaaaaaagaaaaaggctttgacatttttcctttacctttcacatkaagtcatttcaaataaagataaaataattttcttcataggggttctctgttattgtgggttaactcatattttcctcctctcctctatctagaatgtctt

SEQ ID NO: 550388 - DNA, 201 bp, Homo sapiens
cagtctgttatttcaaatgggttggcttactgtaaggcatatagtttcctgttatatgaaaaggcagaaatacaaacaaaaagcaaagggcaaaccattcttttttttttttttttttagcccttttcatttcatgatattatttcaaaactaaaaacagaagcattgtaaaccagacttagtcattagtcaaaagttgaa

SEQ ID NO: 550389 - DNA, 201 bp, Homo sapiens
tagactcctttacaggaaaggtccagaaagtatctgttttgttttgtgtgtgtgtgtgtgtgtgtgtatgtgtgcatatgtgtatatatacatatatacakgtgtgcatatgtgtatatatgcatatatacatgtgtgtgcatatgtgtatatatgcatatatacatgtgtgtgcatatgtgtatatatgcatatatacgt

SEQ ID NO: 550390 - DNA, 201 bp, Homo sapiens
tctgttttgttttgtgtgtgtgtgtgtgtgtgtgtatgtgtgcatatgtgtatatatacatatatacatgtgtgcatatgtgtatatatgcatatatacaygtgtgtgcatatgtgtatatatgcatatatacatgtgtgtgcatatgtgtatatatgcatatatacgtgtgtgcatatgtgtatatatgcatatatacgt

SEQ ID NO: 550391 - DNA, 201 bp, Homo sapiens
atacatgtgtgtgcatatgtgtatatatgcatatatacatgtgtgtgcatatgtgtatatatgcatatatacgtgtgtgcatatgtgtatatatgcatatrtacgtgtgtgcatatgtgtatatatgcatatatacgtgtgtgcatatgtgtatatatgcatatatacgtgtgtgcatatgtgtatatatgcatatatacg

SEQ ID NO: 550392 - DNA, 201 bp, Homo sapiens
ctctttcctgtccctcaccggattctctctcaatcaggtaggtgaacaatgaagaatcctgctgtgtgcttttagtgtagactgatcattgtctttctcayactgtttcagtatgtctgttttttctttattttccatgtattagtgtattccagatatttgattttatcccccttgtctctgattggggcatactagtga

SEQ ID NO: 550393 - DNA, 201 bp, Homo sapiens
catatgtgtatatatgcatatatacgtgtgtgcatgtgtatatatgcatatatacatgtgtgtgcatatgtgtgcatatatacatgtgtatatgtgtgtawgtatacatatatgtatatgtgtctatgcacatatgtgtgtatatatacatatattttttgtatgatacatgtatagtgaagacgctgcatctcagtggct

SEQ ID NO: 550394 - DNA, 201 bp, Homo sapiens
gctattggctgtacttttgcctttcaaatggtgacatgagaatagttgatagaggaaggtgggtaggttttgaggtttttctctttcactccagaaggttrtcagttaaagtggtattgatgtataactgtgctgtccaatatggtacccactggccacatatggctatttaaatgcatttaaataaaatgaaatttaaga

SEQ ID NO: 550395 - DNA, 201 bp, Homo sapiens
atggtattgatctcttggcatcaaatttcctcagctcttatgtttctaaaaaaaaaaacgtatttttttcacctttggttttaaagaatatttttgctggrtataaaattatagattggcattttttccctagtattttaaagatgttattctattatcttctggcttgtcttttttctgataagaacttagctagccctt

SEQ ID NO: 550396 - DNA, 201 bp, Homo sapiens
ggagatggaggtttataccttagataagaagtgacagcttaggctttttggttttccagttgcattcctgagttctgacatgtttgatgtgtccaaagccyataggctgtgattagtgttatatatacttattcctgttaaggtgaccattggagtcacattacatgagtaggacttagaatttcttctatggtctcatta

SEQ ID NO: 550397 - DNA, 201 bp, Homo sapiens
gaaaagccactgggagaaaatggaaagccagaggtggcttcagctccctcagttatttgtacagttcagggactactcacagagagtgaagaggtaagaargtaacttaaatcagctgtcttgttggtcttctgcctagggaagcagaacagagtagttagagcacataggctaactccagaaagttaaactacctggatc

SEQ ID NO: 550398 - DNA, 201 bp, Homo sapiens
tttgggaggctgaggccagtggatcacttgaggttgggagttcgagaccagcctggccaacatggtgaaaccccatctctactaaaaatacaaaaatggcygggcgcagtggctcatgcctgtaatcccagcactttaggaggccgaggcgggcggatcacttgaggtcaggagttcaagaccagcctggccaacatggtg

SEQ ID NO: 550399 - DNA, 201 bp, Homo sapiens
aggcggaagttgcagtgagctgagatcgtgccattggactccagcctaggtaacagagcgagactccgtctcaaaagtaaaaaaattaaaaataaaaaaatacatgctttttgactgaatttctaatacttcagtcattaggggcctgggtcataaggactgctttatgagtatccttgtaattcatgcttttggagttgt

SEQ ID NO: 550400 - DNA, 201 bp, Homo sapiens
agaccagtctgggcaatacagggagacaccatctctacaaaaaacaaaaaacaaattagccaggtatggtggcatgttcctgtagttccagctacttaggrgtctcgggggagcccaggagtgcaaggctgcagtgagccatgatgatgctactgcactccagcctgggcaacagagtgagaccctgtctcaaaaaaaaaa

SEQ ID NO: 550401 - DNA, 201 bp, Homo sapiens
cttcatttaagaaggaatgcagggaacaaaaggatgatataggctttttattttgtactattgacttttaagtaatatgatccattctatatatatatatwtttttttttttttttttttttgacagggtctcactctgttgcccaggctggagtgcagtggtacagtcttggctcactgcaacatcctcttcccaggctc

SEQ ID NO: 550402 - DNA, 201 bp, Homo sapiens
tcatttaagaaggaatgcagggaacaaaaggatgatataggctttttattttgtactattgacttttaagtaatatgatccattctatatatatatatatwtttttttttttttttttttgacagggtctcactctgttgcccaggctggagtgcagtggtacagtcttggctcactgcaacatcctcttcccaggctcag

SEQ ID NO: 550403 - DNA, 201 bp, Homo sapiens
ctttgtcctaacaagttgggatgttttgtattaggcttttagtcctctttttggggattttggagcttagcactacagtctcagtggttgtttccaaggcttttttttttttctccctttcccagaacacaagctgctaagcactggccccacagagccatggtccatccgagagaagctatgtttagcatcttctgtcat

SEQ ID NO: 550404 - DNA, 201 bp, Homo sapiens
cacagatgtcgatccaaatggaagttatgaacattggttgattgtagtattgtgtccggaattggttccttccggtgggttcttggtctcgctgacttcargaatgaagctgcagactctcgtggtgttacagttcttaaagatggtgtgtccagagtttgttccttcggatgttcagatgtgtccggagtttcttcctcc

SEQ ID NO: 550405 - DNA, 201 bp, Homo sapiens
gtagactttcttttctttttcttctttttttgagactgagtctccttctgttgcccaggctggagtgcagtggtgcggacacgcccagctaatttttgtattttttagtagagacagagtttcgccatgttggccaggctggtctcgaactcctgacctcaggtgatccccccacctcggcctgccagagtgctgggatta

SEQ ID NO: 550406 - DNA, 201 bp, Homo sapiens
ttgtatgaatataccaagttttgtttatccatcacttgatagacaattgggttgtttccactttttggccattatgaataatgctgatgatgtgcacattsgtgtacaaggttgtggacaatgtttttaattctcttgagttttttattcaaggagtgaaattgctgggttatgtagtaactttattatgtttgacttttt

SEQ ID NO: 550407 - DNA, 201 bp, Homo sapiens
ttgttttttttgagacagagccttgctctgtcgcccaagctggagtgtggtggcacaatcttggctcactgcaatctccacctcctgcgttcaagcagttytcctgcctcagcctcctgaatagctgggattacagcacccaccaccacgcctagctaatttttttttttttttttttttttttttttttgtatttttagt

SEQ ID NO: 550408 - DNA, 201 bp, Homo sapiens
tgctgggattacaggcgtgagccaccgcgcctggccattcgcatcttttttattccaaagtttgaactccaagccttgcactctcagcatacctctcctaytgttttctgcttggtgtgtaataaagctttcctcattttgtagggtatcagttagcagagcaatcaagccctttgcagaacctggccgccctccagactg

SEQ ID NO: 550409 - DNA, 201 bp, Homo sapiens
aagatatgtttcatagccaaacaagtttataaagttatgatgagctcagtatcatatcttcatttaagaaggaatgcagggaacaaaaggatgatataggstttttattttgtactattgacttttaagtaatatgatccattctatatatatatatatttttttttttttttttttttgacagggtctcactctgttgcc

SEQ ID NO: 550410 - DNA, 201 bp, Homo sapiens
tatatatatattttttgaagagcagatttcttttttttctcatagagacagggtcttgctttgttgcccaagctgggtcttgaactcctggcttcaagcawtcccacctcagcctcccaaagtactgggattataagcctgagccactgtgcccagcctagatttcaatttttggtacacaaataggatacagtttaaaat

SEQ ID NO: 550411 - DNA, 201 bp, Homo sapiens
gacagaacattataatctccgttctttcttattggcctacaacagtgactctggatcccccaagcaaagcatttggctggctattgcaaggctggttaatrggatcttttatctattgaagacagcaaaatattgcacaagaggaaggagctgggctgcagggagagagcagcagatggaaagaagccttctaattgtcct

SEQ ID NO: 550412 - DNA, 201 bp, Homo sapiens
cctttaacattaaggagactcccttggtggatacacttttcagccatgctacctcctcaaagctgtaagcgtagactttcatccaagtttgttaagattcrtacttctgtttatgcctatttgaatcatgaaatggattacttttataagttaaagaaaattagagttggaaaacacaaaaaatataattaattaagtata

SEQ ID NO: 550413 - DNA, 201 bp, Homo sapiens
agtgaggtatgatgtaatggaagggcatcaggctagaaaactacatggtcttaaggtcattggataatctcttggggcattgttttccttggtgtgtgatraagctaatataatgaggtacttgtccagcctacctcacagggatgttgtgaggataaaatgagataatagatatgaaactggcttggaaaaaaaagaaaa

SEQ ID NO: 550414 - DNA, 201 bp, Homo sapiens; identical to SEQ ID NO: 392286

SEQ ID NO: 550415 - DNA, 201 bp, Homo sapiens
  misc_feature (1)...(201): n = A,T,C or G
ggcccctgggagcatcctatccagcaggagcgggacaagccagtacctctccctgcaccagaaatgacggtcaagcaagagagactggactttgaggaaanggaaaacaagggaatacatgaactggtggacatcagggagcccagtgcagagatcaaggtggaacctgcagaaccagagccagtcatttcaggagccgaa

SEQ ID NO: 550416 - DNA, 201 bp, Homo sapiens
aacaactctcctacttctgcccatctccatctttgtagccctttggtgctaacatactagtcatctcctcaggtctacccatgttactggtttgcacaggrcaggtgcctcttcattgtttgcctccactacatggaaaaaatggagcgaaaagctgcagattcaagccatcacatttggtgctaacaaaaattgaaggac

SEQ ID NO: 550417 - DNA, 201 bp, Homo sapiens
cctgggtgggatgactaatagttattctgtgggaccctaggtgaattccaaggacctctgtagtgggcatgagcaagatattccatcctacatttcctctyacaaactaccaggtgttctttagccactctgtgggaagacagaaatatgcccctcatccctctggatttttctgctgattctcttccctctcccccaaga

SEQ ID NO: 550418 - DNA, 201 bp, Homo sapiens
aatatatttgagccagaagagtactatacaaagttctatttacagtgcttaaagtgtacttaatttgtccctactaaatcaggtctccatggcctaccctrtttcttctccctacagcaattcttggccacgcagttgattatgcaaacatccgagtctgggatcagtgctaaaagtcttcgagggagagattctacccgc

SEQ ID NO: 550419 - DNA, 201 bp, Homo sapiens
ctggttagaattcctgtttaggcctttcttccagaaagtgctggcctggcaaaaaaaattactttgtaagggttctgtgaactctggggaggagccagagytgtctagcatctaacccttaattccctgtttaggaaaaagaaattggaagaagaggaggctgaagtaaagaggaaggctacagatgctgcataccagggt

SEQ ID NO: 550420 - DNA, 201 bp, Homo sapiens
agcaaaaaaaagttagggctgcttgattctttagcatccctattgcaactagaattaaaacttaatatgctaaacttccaatcagtcaaaatatatttgarccagaagagtactatacaaagttctatttacagtgcttaaagtgtacttaatttgtccctactaaatcaggtctccatggcctaccctgtttcttctccc

SEQ ID NO: 550421 - DNA, 201 bp, Homo sapiens
atccatctctagaagtgttaaagctttctaatccaaacttattatgctgctttagtaatgcaacatacctatttgtcctttattgtataatagcagactartgtcaagtttcatttatttaatcttgaagatttggacattgttctcttttatgttctagctcgtcaagcagtaaaaacacccccccggaggttacccact

SEQ ID NO: 550422 - DNA, 201 bp, Homo sapiens
ccatgttggccacgatggtctcaatctcctgacctcatgatctgtccgcctcggcctcccaaagtgctgggattacaggcgtgagccactgccaggcctatttttttttttttttttttgagacaagattgcactctgtggcccaggctggagggcagtggtgtgatcttggctcactgcaacctccatatctcaggctca

SEQ ID NO: 550423 - DNA, 201 bp, Homo sapiens
gagaagatggatattgctgtgtcttacacaggtgaagagctggattttgagactgttggagacatcattgccatcattgaggacaaggtaactattcagcraagccccagagaatctcatgggtcctacataggcttctcttttcagcctcactttggtgctgctgctgcttttttttttttttttttggagacagagtct

SEQ ID NO: 550424 - DNA, 201 bp, Homo sapiens
taattaattaattaatttgagacagagtctcactgtcacacaggctggagtgtagtagttagatcttggctcactgcaacctccgcctcccaggttcaagygattatcgtgccttagcctcccaagtagctgggattacagccatgcgccacgagtggcctggctaatttttgtatttttagtagagatgaggttttgtcc

SEQ ID NO: 550425 - DNA, 201 bp, Homo sapiens
aattgagctcatttttaaacaaaacaggtaaactggtttgaaatagaatctaatctgtatatttcctcacatttttattagataaatagtgttaagaatcttttttttttttgagatggagtctcactgtgtcacccaggttggaatgcagtggcacgatctcggctcactgcaacctccacctcctggatttaagtgatt

SEQ ID NO: 550426 - DNA, 201 bp, Homo sapiens
ttgagactgttggagacatcattgccatcattgaggacaaggtaactattcagcgaagccccagagaatctcatgggtcctacataggcttctcttttcarcctcactttggtgctgctgctgcttttttttttttttttttggagacagagtcttgctctttcatccaggctgaagtgcagtggcacgatcttggcttac

SEQ ID NO: 550427 - DNA, 201 bp, Homo sapiens
cttggctcactgcaatctccacctcctgcgttcaagcagttctcctgcctcagcctcctgaatagctgggattacagcacccaccaccacgcctagctaatttttttttttttttttttttttttttttttgtatttttagtagaggcagggtttcgctatgttgcccaggctggtctcaaactcttgacctcaagtgacc

SEQ ID NO: 550428 - DNA, 201 bp, Homo sapiens
gaggatctgagagaagtaaacaagtttatgctaagagggaggcggggtagtaggaggggctggccgctcgggttcctgggaaataagccctgaataagttyaaactggaataaagtccagtattcttaaaactgggcttttagggagaactgcctaatctgacattccctgtttcttaataaagcggagcttcaagccatg

SEQ ID NO: 550429 - DNA, 201 bp, Homo sapiens
ggactaccagcctgtgccaccacaccctgctaattaaaaaaaatttttttagtagaaaccaagttttgctacattgcccaggctggtctcaaactcctgarctcaagcgttccacctgcctcggcctcccaaagtgctgagattacaggcgtgagacaccatgcctggcctttttctttatttttaaatttttattttaaa

SEQ ID NO: 550430 - DNA, 201 bp, Homo sapiens
aatagcttgctatgtgttccttaaccctttaggtactgaatatctggttagacaaaagaaaaggctcaagtagtctggaaggagaaccagctaacccagtrgatgatggaaaacctgttttctaacctggagctgctatcctgactttttctagagtttgaatctctcccggaactctgacctagagaggatcctggtact

SEQ ID NO: 550431 - DNA, 201 bp, Homo sapiens
ttgtcttgtcaattgtacagactttttaaaaaaaacaaccaccagtgaaatgtgtgtgtatacaataaactgaaaaaaaaaactagcctttggcttgttckgtgtgtgtgtgtgtgtgtgtgtgtgtgtgtgtgtgtgtgtgtgtatttgaaacttgtttcttctgcataactatttcatttgtaggaatgagattgttac

SEQ ID NO: 550432 - DNA, 201 bp, Homo sapiens
taaacagcaaataactactgtgtgataaactgatgattggtgctctttacaactttgatacctggggccagcactcctcctctgatagtagaatatagtgrcttgacctgtgggctctggagtcaggctgcctctgaattggaattcaggctgtgtgcctttcagtgagtacttaacctctttagatttcaatttcttcat

SEQ ID NO: 550433 - DNA, 201 bp, Homo sapiens
tgaggcagaagaagcacttgaacccgggaggcggaggttgcagtgagctgagatcgcgtcactgcactccagcctgggcaacagagcaagattccatctcaaaaaaaaaaaaatagcccaacactttgggaggctgaggtgggagggttgcttgagcctaggagtttgagaccagcctggacaacaaagtgagaccctttc

SEQ ID NO: 550434 - DNA, 201 bp, Homo sapiens
cctccgcctcccaggtgcaagcgattctcctgccttagcctcccgagtagctgggatcacaggcatgcaccaccaagcccggctaattttgtggtttcttyagtagaggtggggtttctccatgttggtcaggctggtctcaaactcctgacctcaggtgatccacccgcttcggcctcccaaagtgctaggattacagac

SEQ ID NO: 550435 - DNA, 201 bp, Homo sapiens
gcttgaacccaggaagcagaggttgcagtgagccgagattgggccattgtgctccagcctgggcaacaagagtgaaagttcgttcaaaaaaaaaaaaaaaraaaagaaaagaaaagaaaatggtgatggggataaggaaattgggaagaagcagtgattttggagataaaggaaatgtgatttttattttagaaatgttac

SEQ ID NO: 550436 - DNA, 201 bp, Homo sapiens
aaatacattaataagaaagcagaggaccaagcatgaacatagaaggtagggatttattgaaagttgtaaaagggagaggacaaagaaagatataaaaaaamcaagatagtggtgtaatgagagcaagggaagatatattttaagcttaatgtttctcaacatcaatttggatatgaccagaaggatgccaaaggcaatcct

SEQ ID NO: 550437 - DNA, 201 bp, Homo sapiens
acaggcacatgccaccacgcctcactaattttttgtatttttagtagagatgagttttaccatgttggccaggctggtctcaaactcctggcctcaagtgrtccacccacctcggcctcccaaagtgctgagattacaggcatgagccaccatactcggctgctttgcttcttacagtaagaattacttaaacaactctcc

SEQ ID NO: 550438 - DNA, 201 bp, Homo sapiens
gacagagtcttgctctttcatccaggctgaagtgcagtggcacgatcttggcttactgttacctctgcctcccagcctcaagtaattcttgtgcctcagcstcctgagtagctgggactacaggcacatgccaccacgcctcactaattttttgtatttttagtagagatgagttttaccatgttggccaggctggtctca

SEQ ID NO: 550439 - DNA, 201 bp, Homo sapiens
cgctctcctatagattctgcctccccaggaggtgattatccacttggggacttgactccaaccactatggaagaggctacctctggggtgagtatatttcyatctgtgggaattgatcagtgaaggggcaataagccggcagagctgagcgatgaggaaaccacttttggcctagaggcaacttcctctcttgatctgaat

SEQ ID NO: 550440 - DNA, 201 bp, Homo sapiens
ccaccatgcccaactaatttttgtatttttagtagagacggggtttcaccatgttggccaggttggtattgatctcctgaccttgtgatccacccgtcttrgcctcccaaagtgctgggattacaggcgtgagccaccgcgcctggccattcgcatcttttttattccaaagtttgaactccaagccttgcactctcagca

SEQ ID NO: 550441 - DNA, 201 bp, Homo sapiens
cagagaatctcatgggtcctacataggcttctcttttcagcctcactttggtgctgctgctgcttttttttttttttttttggagacagagtcttgctctktcatccaggctgaagtgcagtggcacgatcttggcttactgttacctctgcctcccagcctcaagtaattcttgtgcctcagcctcctgagtagctggga

SEQ ID NO: 550442 - DNA, 201 bp, Homo sapiens; identical to SEQ ID NO: 392305

SEQ ID NO: 550443 - DNA, 201 bp, Homo sapiens
tattatgtttgacttttttttttttttttttttttttttgcagacagggtctcactgtcacccaggctggagtgcagtagtgcgatcgtggttcactgcarcctctgcctcctgggctcaagtgatcctccggcctcagcctcctgagtagccgggactacaggcacatgccatcacccctggctaatttttgtatttttt

SEQ ID NO: 550444 - DNA, 201 bp, Homo sapiens
gacataacactttttaaggttcattcttatgtagcatgtatcaatacttaattccttttttagctgaataataatctgttgtatgaatataccaagttttrtttatccatcacttgatagacaattgggttgtttccactttttggccattatgaataatgctgatgatgtgcacattcgtgtacaaggttgtggacaatg

SEQ ID NO: 550445 - DNA, 201 bp, Homo sapiens
atatacagacacatagatcttagaatgatggtggtttgcacccatctaaacgttgaataagcctattgtaaccgaaaggcccagtcacatgggagaaatcrtgagtaggggaattattaattcctctgggagagtgctctcaaggcgggggaaatggcttagcctgcagcagttggggaccatcagtttctgtgctagagg

SEQ ID NO: 550446 - DNA, 201 bp, Homo sapiens
taccattgtcatgatgcctgcgctgccagcaccatcctctgctccggctgtctccactactgaaagtgtagctccaggtgcgtccctgagcagccactagwtctaaaatttcattttgagctttagttagagaaaaatgaccaagagcatcagctccgattcagatgcttcttctctgttctacatagacatgtgccatct

SEQ ID NO: 550447 - DNA, 201 bp, Homo sapiens
aagtactgcagctggagagattgttgaagcagatgttgccattgggaaaggcgatgagactccacttacaaatgtgaagacagaggtacttaagaaagatyggggctggggagatggaggtttataccttagataagaagtgacagcttaggctttttggttttccagttgcattcctgagttctgacatgtttgatgtgt

SEQ ID NO: 550448 - DNA, 201 bp, Homo sapiens; identical to SEQ ID NO: 392384

SEQ ID NO: 550449 - DNA, 201 bp, Homo sapiens
gcaatatgtgctcagcagggtgttaggtacctaatgtgcattatttcatttaatcctcaccacaaccttatgaggtaatcacaatcattatttccattttyaagaagttaacaaactaacttaatgggaacctcatagctaaaggtagaagaactggatttaaacctcctaattctgctgatttcaatccctgtgctttca

SEQ ID NO: 550450 - DNA, 201 bp, Homo sapiens
ttggccttgagggaccccaggccagatgttttcaaacaaatcaattacactcccaggccgaaaatcaacaaatgacagcagtgagggaggctacaggagcyacagaactcacacatgttccttctccccaaatccaatacccttgcccagggctgagcaattacctgggatactcggtgagtgatgcccactcattcccat

SEQ ID NO: 550451 - DNA, 201 bp, Homo sapiens; identical to SEQ ID NO: 142436

SEQ ID NO: 550452 - DNA, 201 bp, Homo sapiens
aggcgggtggatcacgaggtcaggagatcgagaccatcctggctaacacggtgaaaccctgtctctactaaaaacgcaaaaaatcagccgggtgtggtggygggcgcctgtagtcccagctactccagaggctgaggcaggagaatggcgtgaacccgggaggcggagcttgcggtgagccgagatcgcgccactgcactc

SEQ ID NO: 550453 - DNA, 201 bp, Homo sapiens
ttgggaggccgaggcgggtggatcacgaggtcaggagatcgagaccatcctggctaacacggtgaaaccctgtctctactaaaaacgcaaaaaatcagccrggtgtggtggcgggcgcctgtagtcccagctactccagaggctgaggcaggagaatggcgtgaacccgggaggcggagcttgcggtgagccgagatcgcg

SEQ ID NO: 550454 - DNA, 201 bp, Homo sapiens
caagtccctcttctggcttgagatacagtaacatactatcttttgaaagtccctatactgacaactctaaagcacatgttttgagttatttttccaacagyggggatagatttacgcttttaatgcccattttcacaactgagttctctggtgtgtctggtgcactgccaagatgtaagaagctaacaaaatcaaagagga

SEQ ID NO: 550455 - DNA, 201 bp, Homo sapiens
ctccaggggccaaggtaagcaggcctggatagagcaggcagggagaggagttagttgtattgaaagccagagagagcacagaccagagcctgaccagcagsgggagaaggggcatcaggtcctcgtgcttgtggggctgcagagggagcactagcatggcagcaggtcctgggctgtgctttttctacaaccagtgctgcc

SEQ ID NO: 550456 - DNA, 201 bp, Homo sapiens; identical to SEQ ID NO: 142389

SEQ ID NO: 550457 - DNA, 201 bp, Homo sapiens
tggtcctctttcttcatagacccccagaggatttaccgtcttgatttctgcctgtggctgtatctttcagcccaggtagcaacaaaatcaatatcttcagwtctcatttcctatctagcattctcctttctcaccattcccctctggagatctcagttccattcctgaggaaagggtgtgggtgtttgtaggaagggagta

SEQ ID NO: 550458 - DNA, 201 bp, Homo sapiens
gggaatggtgggtgcagcagggaggtcagaatggccaccagcatcaaaagaagaaatccttgagggtactgggtgagttggtgggcaagcgctgccacctkcagtgccagcacaatctggggtcagcaaagaggggtagcaagtgtgccttagagatgaagaaatggctaaggaggaaagcactgtaaaggtgacttgggg

SEQ ID NO: 550459 - DNA, 201 bp, Homo sapiens
gctggttggagcaggaggctagaaggctaagcctcttggtaccactctgtcctccaactcccactgtagattcccgaggtcagagactgcctccatccctrggagcactgcacaaaggaatgctctgcccaagcaaaagctgacagagtttcctcccctcctcctccaaaggtcctgctggggtcagagcataatgaagtc

SEQ ID NO: 550460 - DNA, 201 bp, Homo sapiens
ttcaaaggggcacacagactattcagagttccagaggacaggactggaattcttagaacagtgttctacctgctgcctcagtgtgcttggtgccttaaaaygatagcagtcccctgtgcatgggtggagactcggaggtggggatggatgataagaaatggacagatggacgctgtaaggtagagacaggacaaacaaagg

SEQ ID NO: 550461 - DNA, 201 bp, Homo sapiens
gtgcattatttcatttaatcctcaccacaaccttatgaggtaatcacaatcattatttccattttcaagaagttaacaaactaacttaatgggaacctcayagctaaaggtagaagaactggatttaaacctcctaattctgctgatttcaatccctgtgctttcaaccagtatgtaattccgcatccccttcaggtgaag

SEQ ID NO: 550462 - DNA, 201 bp, Homo sapiens; identical to SEQ ID NO: 392332

SEQ ID NO: 550463 - DNA, 201 bp, Homo sapiens
ctgctggaagcgcatttgtactccaaccatgaagggggtggggcagcagacggtggccagaaggctctcagggacaacagggatgtaggtgtgcgcccagytgaaggggtagagcagtgcggcagcagcatggatgcactgagacaaggtgctgggacagagcacagaggatgagagtcagggggcccctgcaccaccatg

SEQ ID NO: 550464 - DNA, 201 bp, Homo sapiens; identical to SEQ ID NO: 142502

SEQ ID NO: 550465 - DNA, 201 bp, Homo sapiens
aacctgcatttattgagcatcacctgtgtgtcgggtgccaggttaggagctctaggcaggtggtttcccccagaatccttaggaagtgaacactgttatcsccattttagagatgagaaagctcaggcttaaagaggtaaggtaacttgcccctaatcacacagctgtaagcagcagagctgggatctgaatcccactcta

SEQ ID NO: 550466 - DNA, 201 bp, Homo sapiens; identical to SEQ ID NO: 142368

SEQ ID NO: 550467 - DNA, 201 bp, Homo sapiens; identical to SEQ ID NO: 142397

SEQ ID NO: 550468 - DNA, 201 bp, Homo sapiens; identical to SEQ ID NO: 142401

SEQ ID NO: 550469 - DNA, 201 bp, Homo sapiens; identical to SEQ ID NO: 392340

SEQ ID NO: 550470 - DNA, 201 bp, Homo sapiens; identical to SEQ ID NO: 142402

SEQ ID NO: 550471 - DNA, 201 bp, Homo sapiens; identical to SEQ ID NO: 142404

SEQ ID NO: 550472 - DNA, 201 bp, Homo sapiens
gtctacctacagctattttgtgggtttctaaagagaagtattctttctttcccctcctctttattctagaggtaaccctctatgggcttagactgatgggkactgttactgtacctgcaggaggattcttgctcttctcggcttcctggatgaaaagtgagaagagctgtgtcttcacaaacttcttcacaaatcggcggt

SEQ ID NO: 550473 - DNA, 201 bp, Homo sapiens
aaggcaaaggaaaagacaagtggatgtgaagctgggggcagagatagcaggagacagcttcagagctggtgggcttcctttgaggctctaaagcagtctarggttaagcttctccactagcataggggcgaagggtgcctttgcccatgactctgcacagtttgcattctgggtccagttggaacaactccaaagctgaaa

SEQ ID NO: 550474 - DNA, 201 bp, Homo sapiens
gaggcgggtggatcacgaggtcaggagatcgagaccatcctggctaacacggtgaaaccctgtctctactaaaaacgcaaaaaatcagccgggtgtggtgrcgggcgcctgtagtcccagctactccagaggctgaggcaggagaatggcgtgaacccgggaggcggagcttgcggtgagccgagatcgcgccactgcact

SEQ ID NO: 550475 - DNA, 201 bp, Homo sapiens
tcaggttatgtcatttcaactccactaataaaagtctacctacagctattttgtgggtttctaaagagaagtattctttctttcccctcctctttattctrgaggtaaccctctatgggcttagactgatggggactgttactgtacctgcaggaggattcttgctcttctcggcttcctggatgaaaagtgagaagagct

SEQ ID NO: 550476 - DNA, 201 bp, Homo sapiens
ctgtccgagcttcagggagctgaaaaactcagtgtgggaaggaagtggggagtggtgggatttccctgaagaaagtaaacgtctgagaggtgaatcctgcygacctccacttcccaaacactgatctgaggaggaaaggcagaatcccagctctagccacacaggaatttctggtttccattcaaggctgggagtgaaaga

SEQ ID NO: 550477 - DNA, 201 bp, Homo sapiens; identical to SEQ ID NO: 142412

SEQ ID NO: 550478 - DNA, 201 bp, Homo sapiens
ctaaaagataaaagcagggttgtcaacctaaaatcactggttttctccctccccagatatgaatagaaggtctacccctacccctactgttttatgacttytttcattctccattctattacatctccccacgtccttctcagatctgaagcccctaaaaggtagagaccatggcacaatagtaccctgcttccactatac

SEQ ID NO: 550479 - DNA, 201 bp, Homo sapiens
agagctatttccaaagcaaaagatgatgccactcccttcaaggattacctacaactagttcctctttggttatcacccatttttacagaatcttcaacacrgagaccccactgcttgcccaagtttcctttcctctgaaacccatggcattcacctgcccctctgacttctgttgagtccctaacatccttttcttcttcc

SEQ ID NO: 550480 - DNA, 201 bp, Homo sapiens
aagaatggctttcttgcaggcggaaagctcctggggaaagccatagggtagggttcataattactgactgagatgggaatctgggtatgagttctctgccrttgcttaggaagaatacaatcccaaattcagacttgccctaggttctaggcctctagggctggtctaggactactgaatgagttcattttagttctggaa

SEQ ID NO: 550481 - DNA, 201 bp, Homo sapiens; identical to SEQ ID NO: 142415

SEQ ID NO: 550482 - DNA, 201 bp, Homo sapiens
aaaatccacatgttctaggtgggagtccaggggccgtgtcagtgaaatgaactgtggggaaaccagagagagagaaggtgtcactatactgcaagatcatrcagaccccgaggtgctaggcctctaccagcctctattccttctgcccccaggagtgaatctggccctgtctctctgtccccctgctaattggctggagga

SEQ ID NO: 550483 - DNA, 201 bp, Homo sapiens; identical to SEQ ID NO: 142376

SEQ ID NO: 550484 - DNA, 201 bp, Homo sapiens; identical to SEQ ID NO: 142514

SEQ ID NO: 550485 - DNA, 201 bp, Homo sapiens; identical to SEQ ID NO: 142515

SEQ ID NO: 550486 - DNA, 201 bp, Homo sapiens
atgatggtaccatgtccactcatgctggttggagcaggaggctagaaggctaagcctcttggtaccactctgtcctccaactcccactgtagattcccgargtcagagactgcctccatccctaggagcactgcacaaaggaatgctctgcccaagcaaaagctgacagagtttcctcccctcctcctccaaaggtcctgc

SEQ ID NO: 550487 - DNA, 201 bp, Homo sapiens; identical to SEQ ID NO: 142419

SEQ ID NO: 550488 - DNA, 201 bp, Homo sapiens; identical to SEQ ID NO: 142516

SEQ ID NO: 550489 - DNA, 201 bp, Homo sapiens; identical to SEQ ID NO: 142517

SEQ ID NO: 550490 - DNA, 201 bp, Homo sapiens
cctgtctctactaaaaacgcaaaaaatcagccgggtgtggtggcgggcgcctgtagtcccagctactccagaggctgaggcaggagaatggcgtgaacccrggaggcggagcttgcggtgagccgagatcgcgccactgcactccagcctgggcgacacagcgagactctgtctcaaaaaaaaaaaaaaaaaaaaactacc

SEQ ID NO: 550491 - DNA, 201 bp, Homo sapiens; identical to SEQ ID NO: 142518

SEQ ID NO: 550492 - DNA, 201 bp, Homo sapiens
ggatatactcaactgtgaacttaagaacagaagctagcactcagcaatatgtgctcagcagggtgttaggtacctaatgtgcattatttcatttaatcctyaccacaaccttatgaggtaatcacaatcattatttccattttcaagaagttaacaaactaacttaatgggaacctcatagctaaaggtagaagaactgga

SEQ ID NO: 550493 - DNA, 201 bp, Homo sapiens
gcttctaaccaagtgtctacaacacatgtactactgtttcctacctgtgtcacctctgcaaaaaatggagctctgagcccagttctgtgagcatggtgtcrgagccctccaaagtcctgagaaatcaataccagggatccaaatctcagacaccagtttgaagcaatacctggataccaagactcagagtgaggatatgga

SEQ ID NO: 550494 - DNA, 201 bp, Homo sapiens
tgctcccatccacattggtcagaacgaaggagaaggtctccctaagaaagagcagacaaggcttgatttgtattgctcactgaatcctaaaacaggaaagyggtcagcactagagggtggagaggagggcaaaggggagttgctgattaatcacaggagtaagggctcactggtgtcaggccctaaacacatcatctcatc

SEQ ID NO: 550495 - DNA, 201 bp, Homo sapiens
tccctcttctggcttgagatacagtaacatactatcttttgaaagtccctatactgacaactctaaagcacatgttttgagttatttttccaacagtgggsatagatttacgcttttaatgcccattttcacaactgagttctctggtgtgtctggtgcactgccaagatgtaagaagctaacaaaatcaaagaggattca

SEQ ID NO: 550496 - DNA, 201 bp, Homo sapiens
cgaaggagaaggtctccctaagaaagagcagacaaggcttgatttgtattgctcactgaatcctaaaacaggaaagtggtcagcactagagggtggagagragggcaaaggggagttgctgattaatcacaggagtaagggctcactggtgtcaggccctaaacacatcatctcatctaattgtcaaaacaactctttgag

SEQ ID NO: 550497 - DNA, 201 bp, Homo sapiens
atttgtattgctcactgaatcctaaaacaggaaagtggtcagcactagagggtggagaggagggcaaaggggagttgctgattaatcacaggagtaagggytcactggtgtcaggccctaaacacatcatctcatctaattgtcaaaacaactctttgaggtaggttcagtaattattcccactttaaagatgaaggaact

SEQ ID NO: 550498 - DNA, 201 bp, Homo sapiens; identical to SEQ ID NO: 142485

SEQ ID NO: 550499 - DNA, 201 bp, Homo sapiens; identical to SEQ ID NO: 142486

SEQ ID NO: 550500 - DNA, 201 bp, Homo sapiens
taattactgactgagatgggaatctgggtatgagttctctgccattgcttaggaagaatacaatcccaaattcagacttgccctaggttctaggcctctarggctggtctaggactactgaatgagttcattttagttctggaagggaatgattgagaagcatgcccttgcactgcctggagagacccaaaataagagtaa

SEQ ID NO: 550501 - DNA, 201 bp, Homo sapiens
tgcccctttgcctcagttttcccaagtgtgctttaatgctgactctggctatgggagaagagctccactaagagcttagttgcacaggcagggttggcagycagagacagcctggaatatgggcaggccctgaggaatcctatccctaccttggagaacaagccgaagcagccgatgcagctgatgatgcagtacactttg

SEQ ID NO: 550502 - DNA, 201 bp, Homo sapiens
ggcacacagactattcagagttccagaggacaggactggaattcttagaacagtgttctacctgctgcctcagtgtgcttggtgccttaaaacgatagcaktcccctgtgcatgggtggagactcggaggtggggatggatgataagaaatggacagatggacgctgtaaggtagagacaggacaaacaaaggagagtgga

SEQ ID NO: 550503 - DNA, 201 bp, Homo sapiens; identical to SEQ ID NO: 142489

SEQ ID NO: 550504 - DNA, 201 bp, Homo sapiens
gtgtgtttatttaacatctgttctccccactggacttacagctccaaaaggtcagggaccacattcattttggtcaccactgtattcccagaaaatagtayagcttggcacacagcaagcattaagcacttattttttgagaaagtgaaaatttctagcctctccccttattttcctgtggggaagccaaggttcaaaggg

SEQ ID NO: 550505 - DNA, 201 bp, Homo sapiens
gcatttagtacattgttcacataagtgctttacacgtttgatctcaagcaacagtcccgtgaggcagatacaatctccattttgaagatgaggaaacagamccaaagaagctgcccgaggtcatactatgctgctaataagagaaccaatttttttccaagcctagactgatattcttgagattgcattcctctctctaca

SEQ ID NO: 550506 - DNA, 201 bp, Homo sapiens
tgaaaatcacgaatgtaagtcaggaaaaaaccaaagaaggaaaatgacatagaccattctgctgcagtagtgatcatgtgaagcacataaccctgagtgaygggaaaaaaagaatagttttgtgaaatttcatttaaacgatctatatactatgtttcaaataaaaaacacacaattcttataaaataatggagcttctga

SEQ ID NO: 550507 - DNA, 201 bp, Homo sapiens
acagttaattttcaaaaaggcgggagagttgcctatggaaagttctcttagtctaccttcctggactaagagaaggaagtctgactgaataaatctaataytgtgccttcttacctgaaaatcacgaatgtaagtcaggaaaaaaccaaagaaggaaaatgacatagaccattctgctgcagtagtgatcatgtgaagcac

SEQ ID NO: 550508 - DNA, 201 bp, Homo sapiens
caaaacttttaaaatctgtaattgtgtcacttctaatttatatcaattttgtttcagtagtgagttgaagtaatctccaactaagtagtaatgaagactcyaataattgtcctgtggatcctaaaaaagttaaaataatttgtatttgttcagacttttaaatatgaatttttctagttgtgcaagtagctatttctaata

SEQ ID NO: 550509 - DNA, 201 bp, Homo sapiens
aatttataaaatgtgaagggttgggatgtgcagactgattggtgcacgtcaggttgtttctcttaaataaggtataaaaaactatgatatcatagtctttygactttattttctgagataaaaaagtataggcataggtgtttttaatagtcttcttgatgatatcctttagaataatctatcaaatggcttctttcatgt

SEQ ID NO: 550510 - DNA, 201 bp, Homo sapiens
gtcatgctctctagcacaccttcagacattcatggtgactagaacactacctacccagttaacttttatgtttttcaaggctcaatctttccagcttcagytgagtgtccctgctttgtttttaacagcaccctttacttccccaaccagggcactcattacatttaacttgcttgtttggttttctcttcctcactaaac

SEQ ID NO: 550511 - DNA, 201 bp, Homo sapiens
tccccttcttaaaactactacaaagattaaaaagacagtgtctttggccttgaattgacatactacaggaaagagataattagggtctcaactaagacaawgcatggggataaaaaagaagtagaaagttatagctggtaagaatccataacatatagtaaacatttagattaggggtgttaggaaatggaaagtattaaa

SEQ ID NO: 550512 - DNA, 201 bp, Homo sapiens
ggaattaaataatgttttaattccaggatataaattttcatatgcattctcacatccaacaccttcactatcttaaagaggaaaaaagaaatatcattgcrtcttctcctatagagagacatgaggaaaaaaataatagattattaagcaaaataaagcaattgcaagtccatgtgatgtaaagaacacagctgtgagatg

SEQ ID NO: 550513 - DNA, 201 bp, Homo sapiens
ctcaaaactttttttttaataaaattgtgtgaacttcagcaagcttcataacttctctgaaccagtttctcctttgaaaaatggaataatgtgaggctggrtgcggtggctcaggcctgtaatccagcactttgggaggccgaggcaggcggatcacgaggtcaggagttctgagaccagcctggccagcacggtgaaacc

SEQ ID NO: 550514 - DNA, 201 bp, Homo sapiens
cggtgtctttagggaataagatccttccacttctctacctaagcatagcagaggaccttacccatagtaatcactcaattatttgttgaatgaacagccaragcaaaatccttttatttcccaaaactattcatgatttttctatttcagtaaacaacattaccatttttttcaggttatgaggattctaagacttcagag

SEQ ID NO: 550515 - DNA, 201 bp, Homo sapiens
tgtctaatcaccctggcctgccttcaccaagaatcctattaggtcagtgctatggttttgactatttgacccctccaaatctcaagttgcaatttgatccycaatgttggaaatggggcctaatggcaggtgtctgggtcacaggggtggatccctcatgaatagactgatgtggggggttgggggtggtgaatgagttct

SEQ ID NO: 550516 - DNA, 201 bp, Homo sapiens
ataatgagctacagaaactgattagggaaggcagaactctatttgtggcacagacagctagctagttgtccacccaaattgttgttatcctttcatagtayaaagtggctgctgggaactaatgtccagcaaaactaaattttctccagggtccattttttctgacctgtgcacacccgctgcacccccatatctagcaaa

SEQ ID NO: 550517 - DNA, 201 bp, Homo sapiens; identical to SEQ ID NO: 392388

SEQ ID NO: 550518 - DNA, 201 bp, Homo sapiens
attctttacctgtacatacagagatccaaggagaaacaatccaatcatttgcatacccagaaaaaatgagaacactgtttttgtagatgcatgtatcacamttattttgcatgtagtttaattggattgccaattttgttctttagaatttgggctctacaaaggttacatcctattaaaaaggctcaatatttacctgtt

SEQ ID NO: 550519 - DNA, 201 bp, Homo sapiens
ttatggcctaccaaacagaggaaacagtatgtgagaggaaattaaataagcttgtcctatttaaggagcacaaaaaggctagtgatatatataatggagayattaagaagggggacaatgcaaaattaggcttgaaaggtagacatcagccagattatacaagatctttgagttagttaggcagtttggtggtttagcaaa

SEQ ID NO: 550520 - DNA, 201 bp, Homo sapiens
gcggcgaataattccaattctatattctgaaacaacttcaaatacttacttagaaaacaaggcactaaagagtcacagttcaagaaccagttcacaaactsaatcttattgggctgtctctacatttctctatcacaaagaaaaagccaaattcaagttcctttttatattccctttattgttgtaatgccaatgtaaaat

SEQ ID NO: 550521 - DNA, 201 bp, Homo sapiens
tggtgaaaagggtcataggaaaagcatagtgcaataagaaaagattaggatggactgcagtgctgggaatagggagtttccatttaaattcaatttaactrtaaataaaatttaaagactcaagaaattaaaatattctcccttggctctagcttgattggttatatatagttacactgctataagccaaggaacaccaag

SEQ ID NO: 550522 - DNA, 201 bp, Homo sapiens
agactgagcttcgtgtaaacacaaggtcaccagggatcgtaatttcaaactctcccctccccctcgctccctccagccaccaaagtatctgaacccagaaytcacaacaggaacgtgtactcaacaggaacgtgtactcaattagcttttgtgggaaagggttgaagattcttggtaactgcttcaacaaaccagaggaat

SEQ ID NO: 550523 - DNA, 201 bp, Homo sapiens
tccttactggttgcttaagaagtccactacagtcctcaaggaatatctggttagacttaacaacttccatttgaatgaatagtagaataatccgacacatwtttttttaaaggtttattcccataagtccgcatttctagaaaagtgtttttcttttaaaaggagcataattatgatcaattatttagtgataacatactc

SEQ ID NO: 550524 - DNA, 201 bp, Homo sapiens
acaacccagagatttcaataggacattcactgagtagagaagctcggccaattctacaaacaaattactttctgaagtaattttctctcataatactcagyttaaacctaaggattatagtaataccaaactatttcatatacctccactgaaaatataataggaattattcatttattattttcttcatttaataatatg

SEQ ID NO: 550525 - DNA, 201 bp, Homo sapiens
cactatgtacaatctgaattccatatttcaaattctttagtttaggattgtgaacctaagaatctctcctacaaaaaaaaaaaaaaaaaaaaaaaaaaaaragacaaaaaggcttcttatactgcaccaatagtgtttacttaaatcttgtcattcaattcctttccaagtgtagccacattgtacagtgaaggatactgc

SEQ ID NO: 550526 - DNA, 201 bp, Homo sapiens
aaataaagttgccaatgaagagttcacaaaggtcactgctatccagaatcacagattttccttttaaaattaatcagagagaataaaaagaaaaaaaaaamcaaaatagctgtagttttgtttttgcttttaaaaaatggggtctctctatgttgcacaggctggactccaactcctgacctcaagtgatccattggcctc

SEQ ID NO: 550527 - DNA, 201 bp, Homo sapiens
ccaacatggtgaaaccccatctctactaaaaatacaaaaattaggcgtggtggtgtgcgcctgtaattctagtgactcaggaggctgaggcaggagaatcrcttgaacctgggaggcggaagttgcagtgagccgagattgtgccactgcactccagcctgggcgatagagtgagattccatctcaaaaaaaaaaaaaagt

SEQ ID NO: 550528 - DNA, 201 bp, Homo sapiens
actacttttacatgtaattataacttgccataaatgaaaatctaagaagctcttgagtatggttatgacttttattaatcatatctgctgttattcccaamcttctcaatgttacatgaatactaacccttgttttatataaaatatgactaaagtaaatttacctacaggtgcctctctccttcattggtgattaaaatt

SEQ ID NO: 550529 - DNA, 201 bp, Homo sapiens
ttgtcatttactctggccatctgatttgttgctaaatatacacatttgcatttcataatcttctcttttctcttcctttttccttgtcagtccttaacatyccatcaatatcttttttcttcatctattcagttaatcatgacaagtccttgccaaatcctattggtgctttccccagcataggtttccaggacaagagtt

SEQ ID NO: 550530 - DNA, 201 bp, Homo sapiens
tgctttccccagcataggtttccaggacaagagttcttaatttacataattttgaatcatttctaagatctttaattttttcatttttcatctctttaaaygttaatttgtttctgatcattcctataagtccttaggagtctatgtcagtttagctgtcccttacacatatgttttacagtttttgactctgagcctata

SEQ ID NO: 550531 - DNA, 201 bp, Homo sapiens
cctgggcgacagcgagattccatctcaaaaaaaaaaaaaaaaaaaaaaatttccatgattgtggaaaagttctattggactgtgctgagtagtctttgtayagcttatactgatagcacaagcaaagaacctaacagattgctggtgcataataaatggtagcttttagtattatctgttaaatagtataaaataataccc

SEQ ID NO: 550532 - DNA, 201 bp, Homo sapiens
ttatatcttttgtgccacgccataccactgtggaaacaacatgtagatagtaatgcccagatcttttcttgacatttttaaaagataaatttaatcttccmatttatcattctttaaaagattactattttctgtgttggaaaggttatttttctgaaggtaaacaaatgaataaatgaaacaaccacaacagcaacaaaa

SEQ ID NO: 550533 - DNA, 201 bp, Homo sapiens
tatttctcgaattggaaccttaaattctaaaacatttttgggttctgtaaatcttcccaaactgcatccaatttgtttatatcttttgtgccacgccatamcactgtggaaacaacatgtagatagtaatgcccagatcttttcttgacatttttaaaagataaatttaatcttccaatttatcattctttaaaagattac

SEQ ID NO: 550534 - DNA, 201 bp, Homo sapiens
tgattggatgtatagaagtggaacccatgaatatagggggctggctgtattaaaagtttttcaaaacgaaagcagacaagttctcagatggagaaaaaaartactgtgaaagaccctcatgaatcttaaatatgtaccttccggagttactaaagaatggtgtggctccttaggctacatattccactagcagagtggtaa

SEQ ID NO: 550535 - DNA, 201 bp, Homo sapiens
aagttgcagtgagccgagattgtgccactgcactccagcctgggcgatagagtgagattccatctcaaaaaaaaaaaaaagtttgggtgcagtggctcacrcctgttaattccagcactttgggaggctgaggtgggcagatcacaaagtcaggagttcaagagcagcctgaccaacatggtgaaaccccatctctactaa

SEQ ID NO: 550536 - DNA, 201 bp, Homo sapiens
gttcctcttataatgtgaaaaatgaattacctgttttacaacttcacaaaatgttagtcttcagacctgctcatacctgcaccttttgtaaatcctaaaaycgacacaaagaaaataagaagtttttctctcaatccacacaattttaaacatgtacagttttaagtcaacacgccaatattgttcatgggcagaatacta

SEQ ID NO: 550537 - DNA, 201 bp, Homo sapiens
ctccagccaccaaagtatctgaacccagaactcacaacaggaacgtgtactcaacaggaacgtgtactcaattagcttttgtgggaaagggttgaagattyttggtaactgcttcaacaaaccagaggaattaattagaccgctgattttctccggaagcgcgaagcactaggccgtttgaggatctccgctccgctttgc

SEQ ID NO: 550538 - DNA, 201 bp, Homo sapiens
gagagcagcctgtcacctgtccctgattgtgctctacttctgctatcagccaaatgcccccaaaggaaacacactgctagtatactactctagtttcagcytttttattgttgttgtttaactttttagccctggagatttccctgtctttcgtagaagacctgtcatgaatttaatgagctaatgtaatttattcagcat

SEQ ID NO: 550539 - DNA, 201 bp, Homo sapiens
tctgaaatagagaaaacatattagaaaagataattcacaagagtttcctcatcctactttagccatccatgcccacagccttgtacttaccaccccaagctgtttcacctctgaaatcatccctcatgccataccccaatactcgctctccttccctttcttagtgagcgcaaccaagattcacccacgtgacagagctag

SEQ ID NO: 550540 - DNA, 201 bp, Homo sapiens
ctgaaatagagaaaacatattagaaaagataattcacaagagtttcctcatcctactttagccatccatgcccacagccttgtacttaccaccccaagctgtttcacctctgaaatcatccctcatgccataccccaatactcgctctccttccctttcttagtgagcgcaaccaagattcacccacgtgacagagctaga

SEQ ID NO: 550541 - DNA, 201 bp, Homo sapiens
ttccagcttcagctgagtgtccctgctttgtttttaacagcaccctttacttccccaaccagggcactcattacatttaacttgcttgtttggttttctcwtcctcactaaactttaagttctgtgagaacaggaaacaactgttctgttcactattatatttccagctcctacattggggcagcaggagcaggggcggag

SEQ ID NO: 550542 - DNA, 201 bp, Homo sapiens; identical to SEQ ID NO: 392377

SEQ ID NO: 550543 - DNA, 201 bp, Homo sapiens
ccaaaggaatttagttaggattagcggtggtcagctgcatccacaactctttgttccttactggttgcttaagaagtccactacagtcctcaaggaatatytggttagacttaacaacttccatttgaatgaatagtagaataatccgacacatatttttttaaaggtttattcccataagtccgcatttctagaaaagtg

SEQ ID NO: 550544 - DNA, 201 bp, Homo sapiens
ggtggagagaaatctccatacttcttgatgatcagagaagtattgtgttgattattgagtgagagaacaggaaaaacactttgggtggtttttcttcctctttttttttttttttttgagacaaggcctcactctgttgcccaggctggagtgcagtggtgcaatcacagctaacagcagccttgacctccctggctcaag

SEQ ID NO: 550545 - DNA, 201 bp, Homo sapiens
ggggaaaagcccaccttaccatatttatcagtcaagaactagctaaatcaaattttccactgcagaaatattgccagacaattcaacagtgtagaaagcawtacaagagatatgcttgtaaagacatgtttctgaagagtttggtcatgaaatgaacttctttaagttgaattatcttcctgatttctatttttgacctaa

SEQ ID NO: 550546 - DNA, 201 bp, Homo sapiens
cagattaaggatgttgttaagtaataatgagtcaataatgtgaattaagaaacattggtacaaattcatgcttttaatttttttaatttttaaaaatatargaatacttttaaattagaatactcctatgaatgtgagaataatttcatgtttgaaggagtatcttctcatatttttttgatgacctaaagaaatttagtg

SEQ ID NO: 550547 - DNA, 201 bp, Homo sapiens
gcttttaatttttttaatttttaaaaatataggaatacttttaaattagaatactcctatgaatgtgagaataatttcatgtttgaaggagtatcttctcrtatttttttgatgacctaaagaaatttagtgttttccatgaactttgtgaatacttacagcttcctcatctgagactgactttccaaagaatgaaatctc

SEQ ID NO: 550548 - DNA, 201 bp, Homo sapiens
tttagtgttttccatgaactttgtgaatacttacagcttcctcatctgagactgactttccaaagaatgaaatctcagccattttttattggtatttgtcrtttactctggccatctgatttgttgctaaatatacacatttgcatttcataatcttctcttttctcttcctttttccttgtcagtccttaacatcccatc

SEQ ID NO: 550549 - DNA, 201 bp, Homo sapiens
ctgaggcaggagaatggtgtgaaccccggggggcggagcctgcagtgagccgagatcgcgccactgcactccaacctgggcgacagcgagattccatctcaaaaaaaaaaaaaaaaaaaaaaatttccatgattgtggaaaagttctattggactgtgctgagtagtctttgtacagcttatactgatagcacaagcaaag

SEQ ID NO: 550550 - DNA, 201 bp, Homo sapiens
tcagcctcccagatagctgggactgtaggcacatacctgtgtgcctggctcatgctgtggatgttggagaaccttaaggttgtattatggaactactgatscctccagtgactaagcaaatcatttgccttccatgggtctcatatttacaaacagttatataaaacacaaaatgtttttatgattagcatcagaatcagc

SEQ ID NO: 550551 - DNA, 201 bp, Homo sapiens
aaaaaacaaaatagctgtagttttgtttttgcttttaaaaaatggggtctctctatgttgcacaggctggactccaactcctgacctcaagtgatccattrgcctcagcctcccagatagctgggactgtaggcacatacctgtgtgcctggctcatgctgtggatgttggagaaccttaaggttgtattatggaactact

SEQ ID NO: 550552 - DNA, 201 bp, Homo sapiens
caggagaatcacttgaacgcgggaggcggaggttgcagagagccaaggtcgtgccactgcactccagcctggcaacagagcgatactccattaaaaaaaargaaaagaaaaagtcttgcatctctaacctaacctatcttctctgctctctttgaagttctatgaatcaaaactgtgattacaattttttaacaaatattt

SEQ ID NO: 550553 - DNA, 201 bp, Homo sapiens
tgaaatctaagctagttgagaagaagacagtaaggagggaagtaaagacagaaatggaaagaagtgaatgtcttcaaaaaatattcaagaagtaaaaccawtaagtcctgactccatttaaaacacagtgctagcctctcttccaagccaatacctgcaagggtaaaaccatttatagacctggttttgtaaaatttttcc

SEQ ID NO: 550554 - DNA, 201 bp, Homo sapiens
tgttttaaaagaaattcaatttttattttttaagttagatttttcaaataccatcttatagcaattattaggcatctctttaaatgcaggcaaccacagcrataagagaattttttccaatcctgcatagtccctttaacctctctcaataagttactaaataattaatgaaagcatgtttgtcttaagtactaagctagg

SEQ ID NO: 550555 - DNA, 201 bp, Homo sapiens
agggcatttactcatccctcatttctttgaagtgagtatgatcaggctcaacatttttgttcctagctcaattactgaggcactatgtacaatctgaattycatatttcaaattctttagtttaggattgtgaacctaagaatctctcctacaaaaaaaaaaaaaaaaaaaaaaaaaaaaaagacaaaaaggcttcttata

SEQ ID NO: 550556 - DNA, 201 bp, Homo sapiens
cagagaacaaaaatcactttacagtctaaaaggattactcacacatttattgctaaggtctaaacccattttcttaaagacttaatgttacacagcagtgrtactgtaaaactaaaaatgtgctgctcagagggtcacaacaaaatggttctcacagtcaaaccccacctctttgctcagaaaattagcagttctatcata

SEQ ID NO: 550557 - DNA, 201 bp, Homo sapiens
ttccagataacaaaaagtgggagaagatgtcttttcaattcagaaaacaagtattcaaaacataaatgatctcggttggctatattatatactatacccayatttaggggagtcaatttctcagaaaactcttctgccatcgcaatgctcttcatattttgacaatatctacagatcacaggtgacaggagaatatggaag

SEQ ID NO: 550558 - DNA, 201 bp, Homo sapiens
tgcatcatggggatagtgaaaatgccccagaaaatggctgaagagtgttcagggcatgttttctgcccctgccatgtccccccagtgtggctagcttgctstgtatgaactgcatgtacaaagcacctgaccactggtacccccaggacctgcaggcccgcgcccgtggggatgagtacctgtcatggcagcacatggccc

SEQ ID NO: 550559 - DNA, 201 bp, Homo sapiens
ggggatagtgaaaatgccccagaaaatggctgaagagtgttcagggcatgttttctgcccctgccatgtccccccagtgtggctagcttgctgtgtatgarctgcatgtacaaagcacctgaccactggtacccccaggacctgcaggcccgcgcccgtggggatgagtacctgtcatggcagcacatggccctgcagagt

SEQ ID NO: 550560 - DNA, 201 bp, Homo sapiens
gtgtgcatcattctcattgtggctttcaggcggctgtggaagacagggtggggatggtggcttcgggaggtgaggtgctctgggacttgggcaagtcttargcaagccattcctgctttctgggcctggctcccatgggccattagaaatgaaaatgctttgtggactgctgaggacggtgcaagggtgaggtttcccagc

SEQ ID NO: 550561 - DNA, 201 bp, Homo sapiens
actggagggaagagtgagggcgaaggctccaggtgggacaatgcatggggttcagactggagagcaacgggccagggtgggtgcagtgagcaggaagagcrggaggtcatgacagaggggagcatgggacactgggaaggctttggctcttaccacaggtagattgagtcgctggagggttttgagcagaggggaactgtg

SEQ ID NO: 550562 - DNA, 201 bp, Homo sapiens
agagtgttcagggcatgttttctgcccctgccatgtccccccagtgtggctagcttgctgtgtatgaactgcatgtacaaagcacctgaccactggtaccyccaggacctgcaggcccgcgcccgtggggatgagtacctgtcatggcagcacatggccctgcagagtagctgctgctgggccatgtggcagaaggcgagc

SEQ ID NO: 550563 - DNA, 201 bp, Homo sapiens
caaccacatccagcaatttcttttttttcctttttttttttttttttggtatttgtggagacgggattttgccatgtagaccaggctgaccttgaactccwgagctcaagtgatcctcctgcctcctccttctaaagtgttgagattacagacatgcactaccatgtctggccctgggtctcttccacttttatgtatttc

SEQ ID NO: 550564 - DNA, 201 bp, Homo sapiens
gtgtggcagcataagcaggacttcagcaactagccagggccccctgcctagtgggttcacctgcccacagcactcacatgcatcagctccgtgatggctaygaggtcagctaaggagatgtgaggaccagtaaggaaggccttgttctggaggaacttgtcctcgagcaactgcagggtcacatccaactctgccagggtg

SEQ ID NO: 550565 - DNA, 201 bp, Homo sapiens
catcatggggatagtgaaaatgccccagaaaatggctgaagagtgttcagggcatgttttctgcccctgccatgtccccccagtgtggctagcttgctgtrtatgaactgcatgtacaaagcacctgaccactggtacccccaggacctgcaggcccgcgcccgtggggatgagtacctgtcatggcagcacatggccctg

SEQ ID NO: 550566 - DNA, 201 bp, Homo sapiens
gacgggattttgccatgtagaccaggctgaccttgaactccagagctcaagtgatcctcctgcctcctccttctaaagtgttgagattacagacatgcacyaccatgtctggccctgggtctcttccacttttatgtatttcttggcattcttctgccttttcttttcctgcatctgacttgctctatcccatggggcttc

SEQ ID NO: 550567 - DNA, 201 bp, Homo sapiens
ggaacttgtcctcgagcaactgcagggtcacatccaactctgccagggtggctgccagtgtctggggagatactggctcacccaggaaaacagggaacatyacctggggattgggcaggcaaagtcgggagttactggggtagggagttagttttgatttgcatttccctaatgattagtgatgctgagcatcttttcttt

SEQ ID NO: 550568 - DNA, 201 bp, Homo sapiens
atgtccccccagtgtggctagcttgctgtgtatgaactgcatgtacaaagcacctgaccactggtacccccaggacctgcaggcccgcgcccgtggggatsagtacctgtcatggcagcacatggccctgcagagtagctgctgctgggccatgtggcagaaggcgagccatggagggcagggacatctcccaagatgcca

SEQ ID NO: 550569 - DNA, 201 bp, Homo sapiens
gagtgggggtgtgtgtcattatgagtaggatgttgagggaagactccctggaggaggtggcatctgagcagagagctgtaggaatgtgcaaggcatgaggrgaagggtgttctcactggagggaagagtgagggcgaaggctccaggtgggacaatgcatggggttcagactggagagcaacgggccagggtgggtgcagt

SEQ ID NO: 550570 - DNA, 201 bp, Homo sapiens
agctccgtgatggctacgaggtcagctaaggagatgtgaggaccagtaaggaaggccttgttctggaggaacttgtcctcgagcaactgcagggtcacatycaactctgccagggtggctgccagtgtctggggagatactggctcacccaggaaaacagggaacatcacctggggattgggcaggcaaagtcgggagtta

SEQ ID NO: 550571 - DNA, 201 bp, Homo sapiens
tgccatagcccggtgtggcagcataagcaggacttcagcaactagccagggccccctgcctagtgggttcacctgcccacagcactcacatgcatcagctycgtgatggctacgaggtcagctaaggagatgtgaggaccagtaaggaaggccttgttctggaggaacttgtcctcgagcaactgcagggtcacatccaac

SEQ ID NO: 550572 - DNA, 201 bp, Homo sapiens
cccctgccatgtccccccagtgtggctagcttgctgtgtatgaactgcatgtacaaagcacctgaccactggtacccccaggacctgcaggcccgcgcccrtggggatgagtacctgtcatggcagcacatggccctgcagagtagctgctgctgggccatgtggcagaaggcgagccatggagggcagggacatctccca

SEQ ID NO: 550573 - DNA, 201 bp, Homo sapiens
agtgtggctagcttgctgtgtatgaactgcatgtacaaagcacctgaccactggtacccccaggacctgcaggcccgcgcccgtggggatgagtacctgtsatggcagcacatggccctgcagagtagctgctgctgggccatgtggcagaaggcgagccatggagggcagggacatctcccaagatgccaagggatgctg

SEQ ID NO: 550574 - DNA, 201 bp, Homo sapiens
ggctctgggacacctaaaaaacactcttttataccaaaagccattgaattgtgtaaacttgaaatggataagttgtacgctttgtaaattatatctcaatraagctcttgtaaaaaccttgcttttgactcctttgtgtacatcttttactacattgtgcttcctggaataaagatgtgatggctagtcctctagctgcca

SEQ ID NO: 550575 - DNA, 201 bp, Homo sapiens
ctaagtcatgaagtagacaccaaaatctctggagggttcaaattgtgaactatgcttgaaatcatgggtgggctagacactggggaggcaggatttcctcytggagacaagttctcacatggtttgacttcatctattgccaataatatcctttctctccttcttccatagtaatagaatttttagcatcactaaaaggct

SEQ ID NO: 550576 - DNA, 201 bp, Homo sapiens
tgatggctagtcctctagctgccatcttggactatgaggatgagggtcacaccccaagatggcagagcagtgaactggaaggagctggggcctggaggacytcactgaccaaagctgtctagccggtttttgggttacatatatctttggaatattttgcgaaatgaaaacaaatttctgttttctttgaaccactgctaa

SEQ ID NO: 550577 - DNA, 201 bp, Homo sapiens
gtgtaaacttgaaatggataagttgtacgctttgtaaattatatctcaataaagctcttgtaaaaaccttgcttttgactcctttgtgtacatcttttacwacattgtgcttcctggaataaagatgtgatggctagtcctctagctgccatcttggactatgaggatgagggtcacaccccaagatggcagagcagtgaa

SEQ ID NO: 550578 - DNA, 201 bp, Homo sapiens
aatggatgtaactgggagaatttcacagaggctctgggacacctaaaaaacactcttttataccaaaagccattgaattgtgtaaacttgaaatggataakttgtacgctttgtaaattatatctcaataaagctcttgtaaaaaccttgcttttgactcctttgtgtacatcttttactacattgtgcttcctggaataa

SEQ ID NO: 550579 - DNA, 201 bp, Homo sapiens
tctggcttcctatgtccccctgtgtgtaacatgcagattcaggaaggaggcttcttcctgcacggactgcaatcccttgtgggccccaatgggctgtgtgrcctctttgagccacattctatctgaaacatggagataattatattttctcacgctgcttactcatggaatcgagataatcaatgagctaatgcgtgggga

SEQ ID NO: 550580 - DNA, 201 bp, Homo sapiens
gctggcagcctggacgtgccagcagggaccctcaccatacacatattgggatatggccgtgaccccttctcctccacagcctggtggctcattcctgcgarggaccaaggcaagggggaagaaagccctgctgcctgattccacgttgccactcacagaccctcggttgattggcagcactgaacaggttaagaaaaaaaa

SEQ ID NO: 550581 - DNA, 201 bp, Homo sapiens
ggttccctccaagcccaggtctcttctccccggcacagctctgctggcagcctggacgtgccagcagggaccctcaccatacacatattgggatatggccktgaccccttctcctccacagcctggtggctcattcctgcgagggaccaaggcaagggggaagaaagccctgctgcctgattccacgttgccactcacaga

SEQ ID NO: 550582 - DNA, 201 bp, Homo sapiens
aaatcttgcaaggtgttggacacttactgaagcagagaagatgtcctttgaaactcagaaaacgaaccttgctacagaaaatcagtatttaagagtatccytggagaaggaagaaaaagccttatcctcattacaggaagagttaaacaaactaagagaacagattagaatattggaagataaagggacaagtactgaatt

SEQ ID NO: 550583 - DNA, 201 bp, Homo sapiens
gagttttgctcttgttgcccaggctggagtgcagtgcgtgatctcggctcaccgcaaccttcgcctcccgggttcaagcaattctcctgcctcagcctccygagtatctaggattacaggcatgcaccaccatgtccagctaattttgtatttttagtagagatggggtttctccatgttggtcaggctggtctcgaactc

SEQ ID NO: 550584 - DNA, 201 bp, Homo sapiens
gcagttagttctatggtcatctcttttgccgagactgtatatttatcagactcctgggagaacaccaacatccatggggttgtagggaaggctaaggacargagtggggagtggtaccttgaaaatccaaaagccatctcaagtaaaaggaataaatgtgtcatgctttttaaaaagttgatgtgcggaaaatgttttctt

SEQ ID NO: 550585 - DNA, 201 bp, Homo sapiens
ttaaaaaaggatgcaagtattaacagcactttgagagtttctatatcatttttttcactttctagtggaaagccccacccttatgcaaaaaaaaaaaaaaagcagcaattccagttatggactctatgaacattactttaaaaagaaaataaaggcctagagcagtggctcatgcctgtaatcccaggactttgggaagcc

SEQ ID NO: 550586 - DNA, 201 bp, Homo sapiens
ctattgaaaatactacccggggggttgtatctgtagaagtaaagacacaaaagcttatggggtattatatcttgaagatttaaattcagcttttaaagcayttgacattttatttcttctctttcaaaaaaaaatgtagtcattgaaagaaaatcttgcaaggtgttggacacttactgaagcagagaagatgtcctttga

SEQ ID NO: 550587 - DNA, 201 bp, Homo sapiens
agtattttcatctcagcctagtgacgatgaatcaagtagtgatgaaaccagtaatcagcccagtcctgcctttagacgacgccgtgctaggaagaagaccrtttctgcttcagaatctgaagaccggctagttgctgaacaagaaactgaaccttctaaggagttgagtaaacgtcagttcagtagtggtctcaataagtg

SEQ ID NO: 550588 - DNA, 201 bp, Homo sapiens
ttgtcattgttgaagaagcacagagttcagaagactttaacatgggctcttcctctagcagccagtatactttctgtcagccagaaactggtaagaatacmctgataagagacttaaagacatgtacgaccacattttatataaaggcttgttttctacccctaataatttagtctctagttttgaatatgtttgggtaaa

SEQ ID NO: 550589 - DNA, 201 bp, Homo sapiens
atccagtgtgaatggtttacttttattttctgagttcaggtcatatagcagaagatggagatggtgagggtattattttaattcatatttttttttttttttgagagagggtttcgctcttgttgcccaggctggagtgcagtggcgcgatctcggctcactgcaacctctgccttccagtttcaaacgattctcctgcct

SEQ ID NO: 550590 - DNA, 201 bp, Homo sapiens
gaactcgtgagagaagtgagctcttttttctgtggttattgagggggcaaagatgggcttctcagcttctgcagcccactaggagaatgcagtggtctgayctaattctgagagttgtcaagggatctgatggtgttctcaagctatatgatgagcctgctattgcataattctttactaatagtaggaatcatatctttt

SEQ ID NO: 550591 - DNA, 201 bp, Homo sapiens
tagcagccagtatactttctgtcagccagaaactggtaagaatacactgataagagacttaaagacatgtacgaccacattttatataaaggcttgttttstacccctaataatttagtctctagttttgaatatgtttgggtaaaactcaagacaagactatttttgtgtgtgaaatctattaatacctagtgtttcgct

SEQ ID NO: 550592 - DNA, 201 bp, Homo sapiens
gaacttaagagtgaggactcttgggatctgttttcagtgccattattaaatgtgtggccttgaaaacttgaagcctgtttgagcctcagttttctcattcrggaagtgggtgctgcctatctcacaaagctttttatttaaataaggtagtagttattaagaaatgtaaggataataaccatatatgtttgtgactctttt

SEQ ID NO: 550593 - DNA, 201 bp, Homo sapiens
agatggggagtctcactatgttgcccagcctggtcttgaacgcctggcctcaagtgatcctcccacctcagcctccgaaagtgctgtcacaggtgcaagcygccactcttggccctgccatcttaatatatgctatttaatttaattaattaatttatttattttgagacggagtttccctcttgttgcccaggctggagt

SEQ ID NO: 550594 - DNA, 201 bp, Homo sapiens
ttttttttggtagagatggggagtctcactatgttgcccagcctggtcttgaacgcctggcctcaagtgatcctcccacctcagcctccgaaagtgctgtyacaggtgcaagccgccactcttggccctgccatcttaatatatgctatttaatttaattaattaatttatttattttgagacggagtttccctcttgttg

SEQ ID NO: 550595 - DNA, 201 bp, Homo sapiens
cctactttggccaagtttgtttcttttcattatagtttatatgaaaagatcaccttaagtgaaattattttcctttaatcttttatgtatttattcacttytggaagctaggaatgagcaacacaaattttactctgaagtcagaagagctcatatataataattctaatgtcccacctattttcacttgtccattccatg

SEQ ID NO: 550596 - DNA, 201 bp, Homo sapiens
atttcattttttttttttttttttgagacggaattttgctttttttgtgatccaccggcctcagcctcccaaagtgctgggattacaggcgtgagccaccrtgcccagccagatttgaattttttatatcccacagcatctagcgaagtgccttgtctagagtagttccataaatgttaagtagaaacaaattattataga

SEQ ID NO: 550597 - DNA, 201 bp, Homo sapiens
tccatgagcctttttaacacagtggtgaatcctataaggatggatgaatttagacagataattcaaaggtacatgttaaaagaactggatactttttgtcrctggaacgaacttgatcagttcatcaataagtttttcctaaacggtgtctttatacatgatcagaagctcttcactgactttgttaatgatgttaaagat

SEQ ID NO: 550598 - DNA, 201 bp, Homo sapiens
ttcattccaacaatataactgttgagactgttctagtccaggagggtctccttatcttagaagtttgcttctatctgttcatacaggtatgcagtcctgtsatgttctgtatggtaaatctatgggtggcttgtctctgtttcacctggaagacagtaaaccacttttcaaacttagtgtcacatatagtgcttcctatag

SEQ ID NO: 550599 - DNA, 201 bp, Homo sapiens
acatttttgggttcagttaaggaaacatttgatgccatgaagaattctaccaaggagtttgtaaggcatcataaagagaaaattaagcaggctaaagaagmtgtgaaggaaaatctgaaaaaattctcagattcagttaaatccactttcagacactttaaagataccaccaagaatatctttgatgaaaagggtaataaa

SEQ ID NO: 550600 - DNA, 201 bp, Homo sapiens
cgttctgatttgtgggaaagattgtatgttgaggcaaaagatcaaaatggaaaacaaggaacagatggaaaaaagaaagggggcagaggaagccacagggytaaaaataagtcaaaggaaacatttttgggttcagttaaggaaacatttgatgccatgaagaattctaccaaggagtttgtaaggcatcataaagagaaa

SEQ ID NO: 550601 - DNA, 201 bp, Homo sapiens
tgaaatctcaggtcctctgagaaatacatttcatgtttaaagcattagtctttgagccaaagaaataatggagtttagatttttccttctggggaagttayctctggctatgagaggatctgacccttgagattaacttcaagttaggttgatatatagaatatttacgataaagaaaaagtattttagaaacaagtacat

SEQ ID NO: 550602 - DNA, 201 bp, Homo sapiens
tcatattcctaggggaggatcccttataactcagtcacctcctaaaggtcccacttcttagtactatcacattggcgattacattccagcgtagaaatttktggggacaccttcagatacattcagtacaagatacagctgttgaagtttattacgtacataacctaaaaagttcagtgagtcttttttgggcttccacac

SEQ ID NO: 550603 - DNA, 201 bp, Homo sapiens
tggccaggctgatctcgaactcctgacctcaggtgatctgcccgcctcggcctcccaaagtgctgggattacaggcgtgagccactgctcctggccagcartgaaacttgaggctatgcgaatgaaggattgttctaagagtgtaaactataaggcgaggaggattaaataaaaaaacagagataggctctcaaagcacca

SEQ ID NO: 550604 - DNA, 201 bp, Homo sapiens
aagaggaaggtattctattggtgttactttactttttcatttaggagcctcacccattgactctctcctttgttttttggagacggagtcccactctgtcrcccaggctggagtgcagtggcacaatctcagctcaatgcaaactccactcccagggttctagcaattctcctacctcagcctccggagtaactgggataa

SEQ ID NO: 550605 - DNA, 201 bp, Homo sapiens
tcacccattgactctctcctttgttttttggagacggagtcccactctgtcgcccaggctggagtgcagtggcacaatctcagctcaatgcaaactccacycccagggttctagcaattctcctacctcagcctccggagtaactgggataacaggcgcccgccaccatgcctggctaatttttttatatttgtagtagag

SEQ ID NO: 550606 - DNA, 201 bp, Homo sapiens
tttcacctggaagacagtaaaccacttttcaaacttagtgtcacatatagtgcttcctatagaattaaaaaaaatgtgtctcatgagtcaatatgtttttrtatttgtagacctgaaagatgtctgaaaattccagtgacagtgattcatcttgtggttggactgtcatcagtcatgaggtatgatatttaatacttttta

SEQ ID NO: 550607 - DNA, 201 bp, Homo sapiens
tcttttttttctttttctttatgagacagagtctcgcactgttgcccaggctggagtgcagtggcgcaatgatctcagctcactgtaacctccgcctcccyggttcaagtctcagcctcctgtgtagcttggattacaggtgcctgccactatgcccagctattttttttttattttttatttttagtagagacgggggtt

SEQ ID NO: 550608 - DNA, 201 bp, Homo sapiens
gcctgatcatagacattaaggaaagcggtgtaggtgttgtgagcttttgctgtaagaaaaagttgagacttttgttttgctttgtttgtgagagatgtgtrtgtatttctgctgagtgataaagccagcggggagggactgatttttataggaaaggaggaaaaataatggaaacacatctcattattttattgtcacatt

SEQ ID NO: 550609 - DNA, 201 bp, Homo sapiens
tttagtttatagtgccataataagtagttatttgcatatgggtgtttctctgaatatgttgtaaaattgaattttggatttcattttttttttttttttttgagacggaattttgctttttttgtgatccaccggcctcagcctcccaaagtgctgggattacaggcgtgagccaccgtgcccagccagatttgaattttt

SEQ ID NO: 550610 - DNA, 201 bp, Homo sapiens
tcctaagaaaggagcttagataacacaaatagaactttctcaagttttaagactgtgaggatcaatttctgtatttattcagagaaaccataaagatcagwtctgtgggataattggctggtttcaatgttatctttccttgaaggaagtaaacaaagcattaaactggggcctgattaaagtgggcttattgatttgaga

SEQ ID NO: 550611 - DNA, 201 bp, Homo sapiens
ggggtttggtctaggtcctgctgcttgccgcacagaaagccaatcacagagacgggtattgccagggaagaaggctttaattgggtgctgcagccaaggasatgggagatcagtctcaaatccatctcagtctcaaatccatctctgactgactaaaattagaggtctatatagcagagaagaaatgtaaccatgtgtggg

SEQ ID NO: 550612 - DNA, 201 bp, Homo sapiens
gatggggtcaagggatggttctcaaaggaaatgaaccgttagctgagacaagcagaggagtttgggtggaggtaaaggggatgggcaactgatcagaataygtaaagccctggagtaaagacaaagccaagcattttgaggggaactgagaaggttgggcaaagcgggaatgaattaaaagagatgagagctagagataaa

SEQ ID NO: 550613 - DNA, 201 bp, Homo sapiens
cttaatatgtatttagcattcattcaatgtgtgttgggaatacattataggctggtaaacaagcaattacagcacaatattctatattaagtgccagatgsagaaaataataagagtcttagggatggggtcaagggatggttctcaaaggaaatgaaccgttagctgagacaagcagaggagtttgggtggaggtaaagg

SEQ ID NO: 550614 - DNA, 201 bp, Homo sapiens
atggaatctgtattatgtatacttcacatgggatttgatgcacacattatttatatagagaaataggactcctgaacaattactgcatacacttatgttcrtatttaaattacttcattaactttttaaaaaaattacagtaaaatgcatacagaacatttcccctcaggagaaaaaagtggatgtgtcaaggccagaaat

SEQ ID NO: 550615 - DNA, 201 bp, Homo sapiens
tgcataattctttactaatagtaggaatcatatcttttattttaactcagatgactataatacttactactgttgtattctaagaaaatgtaagacccttraatgattgttgaacttaccatctctaaaattatgattcttcaggcagaggaacaaaagatacccgaagacagtatctatattggaactgccagtgatgat

SEQ ID NO: 550616 - DNA, 201 bp, Homo sapiens
attttgagttctgtaaagaacaattaactgcactatcacccagacgtggttacctttcttgtttattgattgcttaatatgtatttagcattcattcaatrtgtgttgggaatacattataggctggtaaacaagcaattacagcacaatattctatattaagtgccagatggagaaaataataagagtcttagggatggg

SEQ ID NO: 550617 - DNA, 201 bp, Homo sapiens
agaactggagagagaacgactagtaactacggctttaaggggggaactccagcagttaagtggtagtcagttacatggcaagtcagattctcccaatgtayatactgaaaaaaaggaaatagcaatcttacgggaaagactcactgagctggaacggaagctaaccttcgaacagcagcgttctgatttgtgggaaagatt

SEQ ID NO: 550618 - DNA, 201 bp, Homo sapiens
gtgcagtggcgccatctcggctcactgcaagctccgcctcccgggttcacgccattctactgcctcagcgtccgaagtagctggaactacaggcgcccacyaccacgcccggctaatcgcccggctaattttttgtgtttttttgtagagacagagtttcactgtgttagccaggatggtctcgatctcctgacctcgtga

SEQ ID NO: 550619 - DNA, 201 bp, Homo sapiens
cacctaagttagaagaaattggaaatcaagaagttgtcattgttgaagaagcacagagttcagaagactttaacatgggctcttcctctagcagccagtayactttctgtcagccagaaactggtaagaatacactgataagagacttaaagacatgtacgaccacattttatataaaggcttgttttctacccctaataa

SEQ ID NO: 550620 - DNA, 201 bp, Homo sapiens
gacaagtactgaattagttaaagaaaatcagaaacttaagcagcatttggaagaggaaaagcagaaaaaacacagctttcttagtcaaagggagactctgytgacagaagcaaagatgctaaagagagaactggagagagaacgactagtaactacggctttaaggggggaactccagcagttaagtggtagtcagttaca

SEQ ID NO: 550621 - DNA, 201 bp, Homo sapiens
gagtgcagtggcgccatctcggctcactgcaagctccgcctcccgggttcacgccattctactgcctcagcgtccgaagtagctggaactacaggcgcccrccaccacgcccggctaatcgcccggctaattttttgtgtttttttgtagagacagagtttcactgtgttagccaggatggtctcgatctcctgacctcgt

SEQ ID NO: 550622 - DNA, 201 bp, Homo sapiens
aaggagtcttaggatctgtaagccctactcagtctgtccccttgccaccactctgtttattatcttgtgggtttttttttttgtttgtttttttttgagayggagtctcgctctgtcgcccaggctggagtgcagtggcgccatctcggctcactgcaagctccgcctcccgggttcacgccattctactgcctcagcgtc

SEQ ID NO: 550623 - DNA, 201 bp, Homo sapiens
ggaaaggaaaaaacatttggaaaatagtaacattgatatttcttgtgaaggagaagtagaaagtaacagtgacttctagatttctgggttgggtcatctgttgttggatagtagtaccactgagatagggaattcaaggtttggggcaagggtaattggagatgagaattgtgtttggaggtaactactgacattcaagtg

SEQ ID NO: 550624 - DNA, 201 bp, Homo sapiens
aagcagctgaaaaaccaagaacagtttttagtgactatttacatccacagtataaggcacctacagaaaaccatcataatagaggccctactatgcaaaawgatggaaggaaagaaaagccagttcactttaaagaattcagaaaaaatacaaattcaaagaaatgcagtcctgggcatgattgtagagaaaattctcatt

SEQ ID NO: 550625 - DNA, 201 bp, Homo sapiens
aggaaaggaaaaaacatttggaaaatagtaacattgatatttcttgtgaaggagaagtagaaagtaacagtgacttctagatttctgggttgggtcatctgttgttggatagtagtaccactgagatagggaattcaaggtttggggcaagggtaattggagatgagaattgtgtttggaggtaactactgacattcaagt

SEQ ID NO: 550626 - DNA, 201 bp, Homo sapiens
gaaaatctgaaaaaattctcagattcagttaaatccactttcagacactttaaagataccaccaagaatatctttgatgaaaagggtaataaaagatttgrtgctacaaaagaagcagctgaaaaaccaagaacagtttttagtgactatttacatccacagtataaggcacctacagaaaaccatcataatagaggccct

SEQ ID NO: 550627 - DNA, 201 bp, Homo sapiens
tgggaagccaaggtaggtggattgcttgagcccaggagttcaagaccagcctggccaatatggtgaaaccttgtctctactaaaaatacaaaaatcagcckggtgtggtggcacatacctgtaatcccagctttttgggaggcttaggcacaagaattgcttcaatctaggaggcagaggttatagtaagctgagatcaca

SEQ ID NO: 550628 - DNA, 201 bp, Homo sapiens
ggaaaatctgaaaaaattctcagattcagttaaatccactttcagacactttaaagataccaccaagaatatctttgatgaaaagggtaataaaagatttrgtgctacaaaagaagcagctgaaaaaccaagaacagtttttagtgactatttacatccacagtataaggcacctacagaaaaccatcataatagaggccc

SEQ ID NO: 550629 - DNA, 201 bp, Homo sapiens
cagcggccgcacgggcgacctcctcgggccgtgcgcgagtgcacagctccggaggcccgagccgaccctggggcgtccggtccggtggtcttgcagcctcmaaaccccgagtgctataccgaactgcgcgccaagggtgggagagctgacggcctgggccacccttcttccttcactgggcaggctttgaggtgcttgtcg

SEQ ID NO: 550630 - DNA, 201 bp, Homo sapiens
caatggcgccatcttggctcaccgcaacatccgcctcctgggttcaagcaattctcctgcctcagcctctcgagtagctgggattacaggtgcttgccacyatgcccggctaattttttgtatttttagtagagacagggtttcatcatctttgccaggctggtgttgaactcctgcccttatgatctacccgccttggcc

SEQ ID NO: 550631 - DNA, 201 bp, Homo sapiens
gaaatgcatttacttgcatatgttaaagaaaattttcttttttttctttttctttatgagacagagtctcgcactgttgcccaggctggagtgcagtggcrcaatgatctcagctcactgtaacctccgcctccccggttcaagtctcagcctcctgtgtagcttggattacaggtgcctgccactatgcccagctatttt

SEQ ID NO: 550632 - DNA, 201 bp, Homo sapiens
tagtagagaaggggtttcgccatgttggccaggctgatctcgaactcctgacctcaggtgatctgcccgcctcggcctcccaaagtgctgggattacaggygtgagccactgctcctggccagcaatgaaacttgaggctatgcgaatgaaggattgttctaagagtgtaaactataaggcgaggaggattaaataaaaaa

SEQ ID NO: 550633 - DNA, 201 bp, Homo sapiens
taattttgtgctagccattgcttaattttgttttttcctttccctttcttcatccttaaggatttcaacttcaattttttcttctcctgacttatattcttgtggcagtgtacgttttgttgggttaagaacactgcctgcttcctctttatgaactctcttccctgacaaaaagcaaagttggtagtgtagagaagtttg

SEQ ID NO: 550634 - DNA, 201 bp, Homo sapiens
agcaaaatagctggtctcttatctagttttttcctaagaaggttgtagagagaaatgcagggtagaaaaataagctatgtctgggtgtggtggcaacctcycaaattcccaaagttggtaaccttgggaagccaaggtaggtggattgcttgagcccaggagttcaagaccagcctggccaatatggtgaaaccttgtctc

SEQ ID NO: 550635 - DNA, 201 bp, Homo sapiens
atagctagatgatcattttacatggtgttttagtctgtactgatctgacaaaatacctgatactgggtgatttataacaaacagaaatttatttctcacarttatagaggctgggaagtttaagatcaaagtgtggacaagttcagtgtttgctgatgacatgctgtcttgtttccaaatggcattttgttgctacatctt

SEQ ID NO: 550636 - DNA, 201 bp, Homo sapiens
catggaactcgtgagagaagtgagctcttttttctgtggttattgagggggcaaagatgggcttctcagcttctgcagcccactaggagaatgcagtggtytgatctaattctgagagttgtcaagggatctgatggtgttctcaagctatatgatgagcctgctattgcataattctttactaatagtaggaatcatatc

SEQ ID NO: 550637 - DNA, 201 bp, Homo sapiens
ctttctgctatgcttcagctcagttttagcagtatgtataacatcttttaatgtgatgtaagtatgtaggtataaagttcctggatatatcagttattaasccacaattataactaagcgtgagttatggcagagacaacttgaaacactgctagtgattctaaaaatttcctaatttgacgaagaaacaggaaacaggta

SEQ ID NO: 550638 - DNA, 201 bp, Homo sapiens
cgctttttaaaaggagtcttaggatctgtaagccctactcagtctgtccccttgccaccactctgtttattatcttgtgggtttttttttttgtttgtttktttttgagacggagtctcgctctgtcgcccaggctggagtgcagtggcgccatctcggctcactgcaagctccgcctcccgggttcacgccattctactg

SEQ ID NO: 550639 - DNA, 201 bp, Homo sapiens
tcttaacaaatttggccttgagaatggtgcacaatcaccattagccaattattttctgtgctgtactttttgggctttgttgtatccttaaggcaaaataktaaaaaaaaaaaaaattttcatttttccttattgacttacgacctgtgaaaaaataccagggtttgttcatttctctgtataagggaggctgaaacactt

SEQ ID NO: 550640 - DNA, 201 bp, Homo sapiens
aagctaaaacgctttttaaaaggagtcttaggatctgtaagccctactcagtctgtccccttgccaccactctgtttattatcttgtgggtttttttttttgtttgtttttttttgagacggagtctcgctctgtcgcccaggctggagtgcagtggcgccatctcggctcactgcaagctccgcctcccgggttcacgcc

SEQ ID NO: 550641 - DNA, 201 bp, Homo sapiens
tgattattctaaataatttttactgggaaagcttttccaagattttgaatagctaaatgtcaacttttttcttaatagtattttcatctcagcctagtgaygatgaatcaagtagtgatgaaaccagtaatcagcccagtcctgcctttagacgacgccgtgctaggaagaagaccgtttctgcttcagaatctgaagacc

SEQ ID NO: 550642 - DNA, 201 bp, Homo sapiens
cacaatcttggctcactttaatctctgcctcctggattcaagccattcttctgcctcagcctcccaagtagctgggactacaggtgcccaccaccatgccyggctagttttttttttttttttttttttgtatttttagtggagatgaggtttgcaccatgttggccaggctaatctggaactgtacccgacctgacagtt

SEQ ID NO: 550643 - DNA, 201 bp, Homo sapiens
aatacgtgcaaggtatagcagtggctcaggaagggattaactctgggagacatgatgtcttatggtggttttgaaggagaaatagaagtctccttgaaggracggaaaagaattccaaataaaaggagtatatagtttgcaaaggcattggtgacaagagtgtagcatgtttggatgggaggttattagatgtagttgcta

SEQ ID NO: 550644 - DNA, 201 bp, Homo sapiens
gttaaagcattcacatggacacttgggtgcttggaatccactttcatttttttacgtaaaatagtttcatataaatgcccatgtgctgcttttaatggackaatttgtaaagctttaccccctcaattccagtgtagcgaaggggcatggctctggaggcaggcaagcctaggtcccaccctttacatagcaccttaatag

SEQ ID NO: 550645 - DNA, 201 bp, Homo sapiens
gttaaattaataggctttggctttatatggaacttagagagtgacttggaaaatagagtgaagaatgttaaagtgctgtgttgaatagccttattaaatgmtgagttcagcaccaaggcataccatcatatttggaattgtatttgaatgcagtacaaaacctgtaatgagaagataagtctatgctatagagagaataaa

SEQ ID NO: 550646 - DNA, 201 bp, Homo sapiens
tagagtgtaggcttacctagcttcacttagttaaattaataggctttggctttatatggaacttagagagtgacttggaaaatagagtgaagaatgttaamgtgctgtgttgaatagccttattaaatgctgagttcagcaccaaggcataccatcatatttggaattgtatttgaatgcagtacaaaacctgtaatgaga

SEQ ID NO: 550647 - DNA, 201 bp, Homo sapiens
tattttggggttctaaattaaacacagctaggaaactgaaacacattggttttatataaggggtacccagtcaaattttgcttattcatttttaaaataaygtactacgtttccaagctgatattgactgttttgcttccccgtttcctcaaggcacattgatggagctagggatctctcctattgtcacgtctggcctta

SEQ ID NO: 550648 - DNA, 201 bp, Homo sapiens
gtagagtgtaggcttacctagcttcacttagttaaattaataggctttggctttatatggaacttagagagtgacttggaaaatagagtgaagaatgttaragtgctgtgttgaatagccttattaaatgctgagttcagcaccaaggcataccatcatatttggaattgtatttgaatgcagtacaaaacctgtaatgag

SEQ ID NO: 550649 - DNA, 201 bp, Homo sapiens
ctcagaatcttccgtctgtacaataattaatgtttgttaagccctctaaagccattaatgtagtgtaggcagcaggtattagtgaagacactcagtttcasaggcagaaaacctggaagagttcccactctactctttagtgacagaggttttgggtgggaggttttctaatgatacttaatacttaatagtcatctttac

SEQ ID NO: 550650 - DNA, 201 bp, Homo sapiens
actaacatctgtgaaaccatcgtatggaaggcattcagccccactactgtcaacactggccgaggtaagggccctgtgctcccctggtggcgacagctttyagcaaaaacaattgagcaatgcaaagcagaagacaaaaatccccccattccacagaaaaataatgtcagttttaggtttatctcttctggtttttgggtc

SEQ ID NO: 550651 - DNA, 201 bp, Homo sapiens
attatatactaatcgttgatattttggggttctaaattaaacacagctaggaaactgaaacacattggttttatataaggggtacccagtcaaattttgcktattcatttttaaaataatgtactacgtttccaagctgatattgactgttttgcttccccgtttcctcaaggcacattgatggagctagggatctctcct

SEQ ID NO: 550652 - DNA, 201 bp, Homo sapiens
aaccatgactgtcctcatatgttcatctttgtatattttggcagctgctctcagtgaataagtttctaaaaatgaaattcctaaaccaaagcacttggtcrtgcaaggggcagctttctgaaaaaggcctgaacttggagcttagcacctgcgttcaaatcctggctgttcctgttagtcatacatacgtggctttgggca

SEQ ID NO: 550653 - DNA, 201 bp, Homo sapiens
acagaaaaataatgtcagttttaggtttatctcttctggtttttgggtccatctgcaaagttttaaaaacacaaataggcttgtaattatgatgatacctmacttgcacttttcatataaaaatatctcctggacgtttggcacgtcagaatacacaatcctgcctcacttttcttagcacagtataagcttatattgcaa

SEQ ID NO: 550654 - DNA, 201 bp, Homo sapiens
ttcagtggatgacccctttcagctagagttcagcagagtctgcttttatttttataaattatcatcgttccacacctctggtggccactgactcatgtgcmtaagaaatgagaccaattaattttaaaaagtggaatagtggttgggtgctgtggctcacacctgtaatcccaacactttgggagggtgaggcgggaggat

SEQ ID NO: 550655 - DNA, 201 bp, Homo sapiens
tgatcagttgctccagtgtttgaaataagaagactcatgtttatgtctggaataagttctgtttgtgctgacaggtggcctaggtcctggagatgagcacyctctctctggcctttagggagtcccctcttaggacaggcactgcccagcagcaagggcagcagagttgggtgctaagatcctgaggagctcgaggtttcg

SEQ ID NO: 550656 - DNA, 201 bp, Homo sapiens
ttagttcaagagaagcaaaaagtactctagctctgaaacctcattgctctcttatagaaagtttgtatgatatttataggtaacttctgcatctcggaaayggcctatcttcttaagctgtcttacctttaaaagtattccatctcttaaacttgcttctgagtaagagacctgaactgctattgttttcctgtaattgga

SEQ ID NO: 550657 - DNA, 201 bp, Homo sapiens
aaagttggaagatttgttctatgaaaggaaaatcagggagcagaacctactcctgacagcatccagagacacaatctggagatgtcacacctgcagcaccsaaactcaatgtcaggcacttggggtctggatggctcctgagctgaactacagatttgggccacctctctaggctcaccatccagatctgggtccagagga

SEQ ID NO: 550658 - DNA, 201 bp, Homo sapiens
gggcattgagtaatgggagccagagtttggaagaagtgatttgctctgcactgaaaggcagagagagcagctaggtgcgtgcagcagtaatccagccccarttaagccatcctacaggagagcactgtgtgagggcatttggaggaagcaagttgagagaggggaccagagaggcactttcaaggtgggggaaaactaaga

SEQ ID NO: 550659 - DNA, 201 bp, Homo sapiens
acttcctttctgcgtcaccagtgtcgtcagcagagagaggacagcacaggctcaaggttggtagtgaagtcaggttcggggtgcatgggctgtggtggtgktgatcagttgctccagtgtttgaaataagaagactcatgtttatgtctggaataagttctgtttgtgctgacaggtggcctaggtcctggagatgagcac

SEQ ID NO: 550660 - DNA, 201 bp, Homo sapiens
ccagagaccatattatctcattaatgagatggaaaactggtccccaaacaagtgaaggctgcatgtgcctaacaggttacaaaggagagtggagcttgagrtagggagccatagagaagagtgggcaagatcacatttgatgcttccttgagtactttgtataaatttaggaaatccaaggtaaattgggagaagcaggtc

SEQ ID NO: 550661 - DNA, 201 bp, Homo sapiens
agaacttcttccaaaagagagggatggctttcccagaagacactcctggccatctgtggatttgtctgtgcacctattggctcttctagctgactcttctsgttgggcttagagtctgcctgtttctgctagctccgtgtttagtccacttgggtcatcagctctgccaagctgagcctggccaagctaggtggacagacc

SEQ ID NO: 550662 - DNA, 201 bp, Homo sapiens
agcttagcacctgcgttcaaatcctggctgttcctgttagtcatacatacgtggctttgggcagattcctgcaccactgaatcttggttaccaggatgcartgagaagcaacatgaaattacatgatgcctggctcctggtagatgtgtatcaaacattggcatgctgtgctacatccaccaagtgccgtggaaatcttgt

SEQ ID NO: 550663 - DNA, 201 bp, Homo sapiens
gaatctcaagcacacctaaaaggaactcctactgaaaggaagcagaagcctaagactctgggttagccctctgaattcagcagagaaaggctttactgacygctctctggggctgaggatgtgatctcattccgtcttcagcgtttatatcagagaacccaattactgaaggacggaaccatgtccatggggagcagtaac

SEQ ID NO: 550664 - DNA, 201 bp, Homo sapiens
tcaaatgtgtccattcccttgtgcctaacagtgaaatagagtgagttgtaagaaatgaagacaccctacaaaaaggaaagcttttgccaggcgtggctcaygtctgtaatcccagcactttgggaggctgaggtgggtggatcacgaggtcaggagttggagaccatcctggctaacacagtgaaaccctgtctacactaa

SEQ ID NO: 550665 - DNA, 201 bp, Homo sapiens
tcctggctgacttcctaggcgccattgggtctggaaccgggatcctgctcgcagtcacaatcatctaccagtactttgagatcttcgttaaggagcaaagygaggttggcagcatgggggccctgctcttctgagcccgtctcccggacaggttgaggaagctgctccagaagcgcctcggaaggggagctctcatcatgg

SEQ ID NO: 550666 - DNA, 201 bp, Homo sapiens
aaaaactagaatactttttgaatacctgaaatgatgacatttccattgataacattcttcagaatatgtaatttgtttttcagctgtatctttttcatatstataggttacatatagtgtcaaaaaatatgtaacagtgttttatatcctctaaccagttacttatgggactggggaggattctgaatgtgtaggttgata

SEQ ID NO: 550667 - DNA, 201 bp, Homo sapiens
gtgatccgcccgcctcagtctcccaaagtgctgggattacaggcgtgagccaccacgcccgactcctatttgacttttttaaaagtgctcctcagagtacygataccatgaccccacactgcccacagagaccctgtctctggaagtaatgccagcttcctgccagtagaagcagcgtgagttgccaggcttccattatgg

SEQ ID NO: 550668 - DNA, 201 bp, Homo sapiens
agccattaatgtagtgtaggcagcaggtattagtgaagacactcagtttcagaggcagaaaacctggaagagttcccactctactctttagtgacagaggytttgggtgggaggttttctaatgatacttaatacttaatagtcatctttacagtgattcttgtcacctatgcaacctatgtacctgagaagatgtgaaaa

SEQ ID NO: 550669 - DNA, 201 bp, Homo sapiens
agagaggacagcacaggctcaaggttggtagtgaagtcaggttcggggtgcatgggctgtggtggtggtgatcagttgctccagtgtttgaaataagaagactcatgtttatgtctggaataagttctgtttgtgctgacaggtggcctaggtcctggagatgagcaccctctctctggcctttagggagtcccctcttag

SEQ ID NO: 550670 - DNA, 201 bp, Homo sapiens
taataatgtttttgaatttcgtattctttcattccactgtgtaaagtgctagacattttccaatttaaaattttgctttttatcctggcactggcaaaaaraactgtgaaagtgaaattttattcagccgactgccagagaagtgggaatggtataggattgtccccaagtgtccatgtaacttttgttttaacctttgca

SEQ ID NO: 550671 - DNA, 201 bp, Homo sapiens
gctaagtgctggacactggagacgtaaaaataaacacttacagcccctttcctccagagggagccactgggtaaggagatggaagcatgtggccaggcggrtaggagacagtgcagtaagggtcctgagagcaacagctgtgactggcagcgggaccctcaccctggctcatgccggtggggtgctgaagagagcgccctg

SEQ ID NO: 550672 - DNA, 201 bp, Homo sapiens
gaggctcttgagacctgatgccctcctacccacatggttctcccactgccctgtctgctctgctgctacagaggggcagggcctcccccagcccacgcttrggaatgcttggcctctggcaggcaggcagctgtacccaagctggtgggcagggggctggaaggcaccaggcctcaggaggagccccatagtcccgcctgc

SEQ ID NO: 550673 - DNA, 201 bp, Homo sapiens
agagagaggacagcacaggctcaaggttggtagtgaagtcaggttcggggtgcatgggctgtggtggtggtgatcagttgctccagtgtttgaaataagaagactcatgtttatgtctggaataagttctgtttgtgctgacaggtggcctaggtcctggagatgagcaccctctctctggcctttagggagtcccctctt

SEQ ID NO: 550674 - DNA, 201 bp, Homo sapiens
aagatgtaagtagaagcaaaactttctggaagggtgatgaaagtgtgactggtataaggggtgtggacttgtcacctcatcataaataatggtctgtgacrtgtgcagatagatcgtcgtcctttagggggcagttcagaagctttaagggctgacagatggagtccagcagtagatcagctgtgggtatgagaatctgaa

SEQ ID NO: 550675 - DNA, 201 bp, Homo sapiens
acatggttctcccactgccctgtctgctctgctgctacagaggggcagggcctcccccagcccacgcttaggaatgcttggcctctggcaggcaggcagckgtacccaagctggtgggcagggggctggaaggcaccaggcctcaggaggagccccatagtcccgcctgcagcctgtaaccatcggctgggccctgcaagg

SEQ ID NO: 550676 - DNA, 201 bp, Homo sapiens
tatgcggctgcagccgtctcacctgtttccccacaaagggaatttctcactctggttggaagcacaaacactgaaatgtctacgtttcattttggcagtarggtgtgaagctgggagcagatcatgtatttcccggagacgtgggaccttgctggcatgtctccttcacaatcaggcgtgggaatatctggcttaggactg

SEQ ID NO: 550677 - DNA, 201 bp, Homo sapiens
tgtcagtgctcgaagaggcgatctgtaactgttcagtaccacttggaatgcctatttccccttcagcctccaattccaacttctcccctgtgggcaccctrcaggttgcaaagcagctgaaggagcagcagatggtgatgagaggccaccgagagacctccatggtccatgaactcaaccggtgagtggtggccccaggtc

SEQ ID NO: 550678 - DNA, 201 bp, Homo sapiens
gcatgttcattgagtcatgggacctgccattaacgaaacaaaattaaggcagttctaacgtaagtgaaatcatgttcctctgggttgggcctatcgacagrtaagatacatttttaagttcttagttcaagagaagcaaaaagtactctagctctgaaacctcattgctctcttatagaaagtttgtatgatatttatagg

SEQ ID NO: 550679 - DNA, 201 bp, Homo sapiens
aatttctcactctggttggaagcacaaacactgaaatgtctacgtttcattttggcagtagggtgtgaagctgggagcagatcatgtatttcccggagacrtgggaccttgctggcatgtctccttcacaatcaggcgtgggaatatctggcttaggactgtttctctctaagacaccattgttttcccttattttaaaag

SEQ ID NO: 550680 - DNA, 201 bp, Homo sapiens
aaggctttactgactgctctctggggctgaggatgtgatctcattccgtcttcagcgtttatatcagagaacccaattactgaaggacggaaccatgtccrtggggagcagtaacacatagtcttgtatttttgaatttttacagctctttgttgctggcttaattgtcctacttttggatgaactcctgcaaaaaggata

SEQ ID NO: 550681 - DNA, 201 bp, Homo sapiens
tagggggcagttcagaagctttaagggctgacagatggagtccagcagtagatcagctgtgggtatgagaatctgaatccacactgtaaagttagactttktcatatgacttccttgcggcagttttaaagttctctgtatgaatattgtcagtgctcgaagaggcgatctgtaactgttcagtaccacttggaatgccta

SEQ ID NO: 550682 - DNA, 201 bp, Homo sapiens
cacatggttctcccactgccctgtctgctctgctgctacagaggggcagggcctcccccagcccacgcttaggaatgcttggcctctggcaggcaggcagstgtacccaagctggtgggcagggggctggaaggcaccaggcctcaggaggagccccatagtcccgcctgcagcctgtaaccatcggctgggccctgcaag

SEQ ID NO: 550683 - DNA, 201 bp, Homo sapiens
aagcaattctcccacctcggcctcccaaagtgctgggattacaggtgtaagtcaccacgcctagccttcagtgtatttttaaaccagcttttctgggcccyttctggatgtgccaagtgcaggagtgcagtggtgggtaaggagtgggcacaagctctcggaactgggagccccagaaccagcacacaggatttcctccct

SEQ ID NO: 550684 - DNA, 201 bp, Homo sapiens
cttgcttaataaaaagctatctctttaggggctttgccagaatttgcagtcagatcattaagaattttttttttttttttttttttgagacggagtcttgstctgttgcccaggctggagtgcagtggcgcgatctcgactcgactcactgcaacctccgcctcccaggttcaagcgattctcctgcctcagcctcccgag

SEQ ID NO: 550685 - DNA, 201 bp, Homo sapiens
aaagaagggacagagatgaaaggcagtttgatgtttgtgaaaggtatttatacgagctacatgcttttcccattccttctgctgagactaagccacattcytgcttaataaaaagctatctctttaggggctttgccagaatttgcagtcagatcattaagaattttttttttttttttttttttgagacggagtcttgct

SEQ ID NO: 550686 - DNA, 201 bp, Homo sapiens
aggtttccagatgagctggacaagcatgttcattgagtcatgggacctgccattaacgaaacaaaattaaggcagttctaacgtaagtgaaatcatgttcytctgggttgggcctatcgacaggtaagatacatttttaagttcttagttcaagagaagcaaaaagtactctagctctgaaacctcattgctctcttatag

SEQ ID NO: 550687 - DNA, 201 bp, Homo sapiens
tgggcaccatgagtctaataacttaagtttgttttcctctttttatttgtctgctaagaaggctagaagcaaattgagttgcctgttcgttccttcatatwtgtctcctcctctgccaacaggaatggaatttgaaggtgctatcatcgcacttttccatctgctggccacacgcacagacaaggtccgagcccttcggga

SEQ ID NO: 550688 - DNA, 201 bp, Homo sapiens
atgccagcttcctgccagtagaagcagcgtgagttgccaggcttccattatgggatggttatgctgtcctggaacggcagaggttatcacttgtttctttytttcgctttttagttttttaacgtaagtaaatttcttgctgatgtctaaaacttaggccttaataatgcaccacactccccgccttcctctcacttgtta

SEQ ID NO: 550689 - DNA, 201 bp, Homo sapiens
acagctttcagcaaaaacaattgagcaatgcaaagcagaagacaaaaatccccccattccacagaaaaataatgtcagttttaggtttatctcttctggtktttgggtccatctgcaaagttttaaaaacacaaataggcttgtaattatgatgatacctcacttgcacttttcatataaaaatatctcctggacgtttgg

SEQ ID NO: 550690 - DNA, 201 bp, Homo sapiens
caaggtatagcagtggctcaggaagggattaactctgggagacatgatgtcttatggtggttttgaaggagaaatagaagtctccttgaaggaacggaaargaattccaaataaaaggagtatatagtttgcaaaggcattggtgacaagagtgtagcatgtttggatgggaggttattagatgtagttgctattgataga

SEQ ID NO: 550691 - DNA, 201 bp, Homo sapiens
aataccatgaggaattgatctgccaagggcggtcttgtctcaaagcaagtggattgctggggtaaagaatctagagaccagcttaggactctgggaggaaraaaaaaaaaaaaagaatagcatagtcctaaggaactgcaaggatcaccagattaacccttcatacctggggaaattaaggccagacatgacacaggcctt

SEQ ID NO: 550692 - DNA, 201 bp, Homo sapiens
gcctcggcctcccatagtgctgggattacaggcgtgagccaccatgcccggcccgaagcagggatttttttccccatttgctttggaacagtcatgaagcycacagtggtgctcagtcagtgcctcctctgtgtccatcatgggtagatgctttcacttatagactctgacctgcgggcagtttggggagctgtgtccctc

SEQ ID NO: 550693 - DNA, 201 bp, Homo sapiens
tagagaccagcttaggactctgggaggaagaaaaaaaaaaaaagaatagcatagtcctaaggaactgcaaggatcaccagattaacccttcatacctgggraaattaaggccagacatgacacaggcctttcccaaggctctgtagcaagggcaatagcaggccagttgctgccactgcggtcctgtggggcatgttctca

SEQ ID NO: 550694 - DNA, 201 bp, Homo sapiens
actgtttctgcgtttggcaaaggtgtgggttgtcagcagagatcaaagttctgttcctggcagggtgagcacctgtgacacaccttgcccctccccctgcrccaatcccagagaggcggtggcatttctgacccttcccttccacggcaggtggagctcacgggcaacagtatttatgaatacatccatccttctgaccac

SEQ ID NO: 550695 - DNA, 201 bp, Homo sapiens
ctcggggacactagtgacagtataaagggcaaaggaaaaccgagtatctggccttcacgtaaatcctggccacattcaccaaccaaagggggacagtgatkttcaaaaccagctcccatgtgctgagaacaccccagctgcatttcttttgcaagattcctttccactccaaccagaagtgaatatttgagacaaacggcc

SEQ ID NO: 550696 - DNA, 201 bp, Homo sapiens
gtcgctacttgtccgctcaatggtgaccccttggcagagaactagggatgattccactccggttgatgttttaggggaaattaaaagaacattcggttttmtgagtctccttccggggaggcgtggtggtaactggtttgctgggaagagccgttccttaaccgcatgcaacaaagcaggtgtggaatccggacgagaggg

SEQ ID NO: 550697 - DNA, 201 bp, Homo sapiens
ccgttccttaaccgcatgcaacaaagcaggtgtggaatccggacgagagggcactcactgccttctgccccctttggaaatagaaaaagccttcgaagcarcaatccaaagatcaaatgatttgcggtcaatgatttcaattaaaccagaaattagtaagggagggccgagaagacacggctgctcagaagctgttcgctg

SEQ ID NO: 550698 - DNA, 201 bp, Homo sapiens
gcatgcaacaaagcaggtgtggaatccggacgagagggcactcactgccttctgccccctttggaaatagaaaaagccttcgaagcagcaatccaaagatyaaatgatttgcggtcaatgatttcaattaaaccagaaattagtaagggagggccgagaagacacggctgctcagaagctgttcgctgtttgagggatttc

SEQ ID NO: 550699 - DNA, 201 bp, Homo sapiens
acacagagagactctgtctcaaaaaaaaaaaaagagaaagaagagaagaaagaaagaaagagagaaagaaagaaagaaagaaagaaagaaagaaagaaagaaagaaagaaagagaaaatgccactcaccatagattagccggtgtcacctgttggcctttcatttttttttttttttagataaaattcacctttctcacca

SEQ ID NO: 550700 - DNA, 201 bp, Homo sapiens
aacacagagagactctgtctcaaaaaaaaaaaaagagaaagaagagaagaaagaaagaaagagagaaagaaagaaagaaagaaagaaagaaagaaagaaagaaagaaagaaagagaaaatgccactcaccatagattagccggtgtcacctgttggcctttcatttttttttttttttagataaaattcacctttctcacc

SEQ ID NO: 550701 - DNA, 201 bp, Homo sapiens
caacacagagagactctgtctcaaaaaaaaaaaaagagaaagaagagaagaaagaaagaaagagagaaagaaagaaagaaagaaagaaagaaagaaagaaagaaagaaagaaagagaaaatgccactcaccatagattagccggtgtcacctgttggcctttcatttttttttttttttagataaaattcacctttctcac

SEQ ID NO: 550702 - DNA, 201 bp, Homo sapiens
caccacggggcttaaccttggagatgtgggctggtggctgttctgtaggatcccagccctcctgagcttgcctggctcaccagacccacaaggtgattttmtttgaggggtcttctgtggtttatatgatgaagccactttatctcacaggaagtttccagatattgaagttgtccaaggggactctgaaagggcaagcag

SEQ ID NO: 550703 - DNA, 201 bp, Homo sapiens
gcaacacagagagactctgtctcaaaaaaaaaaaaagagaaagaagagaagaaagaaagaaagagagaaagaaagaaagaaagaaagaaagaaagaaagaaagaaagaaagaaagagaaaatgccactcaccatagattagccggtgtcacctgttggcctttcatttttttttttttttagataaaattcacctttctca

SEQ ID NO: 550704 - DNA, 201 bp, Homo sapiens
gttggctgacaggagcgtccttacacccacaccactgctgtgtgagggctgagggaagcccatcccccacactctccagctctgtctccactcctggcttygtaccaatagctgctgcctctcctcttggggacatgtgccccactgctgcttggccccacagagtcccaaccaagggacctcaggtctggacgatgcttt

SEQ ID NO: 550705 - DNA, 201 bp, Homo sapiens
cacttgaggtcaggagtttgagaccagcctggccaacctggcaaaactggggaggctgaggcaggagaattgcttgaacccaggaggcaggtttcagtgaratcatgccactgcactccagcctgagcaacacagagagactctgtctcaaaaaaaaaaaaagagaaagaagagaagaaagaaagaaagagagaaagaaag

SEQ ID NO: 550706 - DNA, 201 bp, Homo sapiens
ggtggggcttgatggagactggattcctgcctcccaacccccacaatcttctctcccatgtaaaaaacaaaaccatttcattctggttaaacctcctcctcgttggaaatttagaaagtcaaggaaagctgaaaagaagaaagtgaaaattatctgtcattttcagtcagataaaagttaatatgtattgagcccttcagc

SEQ ID NO: 550707 - DNA, 201 bp, Homo sapiens
accaggcactctactcgaaatcggaaagctcgaccttttgcgttcgcctctgccaagcctgttatttgtgctggccgctgggtctggagctgcgcttctcrgcccctccccggtggagcgcagagggctggtctgcaagcgcggcctccagccccgcggctccccggcccaggagccaggcgcgggctgacccgggagcac

SEQ ID NO: 550708 - DNA, 201 bp, Homo sapiens
tggtggggcttgatggagactggattcctgcctcccaacccccacaatcttctctcccatgtaaaaaacaaaaccatttcattctggttaaacctcctcctcgttggaaatttagaaagtcaaggaaagctgaaaagaagaaagtgaaaattatctgtcattttcagtcagataaaagttaatatgtattgagcccttcag

SEQ ID NO: 550709 - DNA, 201 bp, Homo sapiens
cttccaaggttgttgagaatttcacccggctctctaggtaggctcctgcccagaatgggccaagcccagaccacaaagagaacacaggccatgtgcagctrttaaaacatttcaatgtccactttgggaggccaaggcgggcgggtcacttggggtcaggagtttgagaccagcctggccaacatggtgaaaccccgtctc

SEQ ID NO: 550710 - DNA, 201 bp, Homo sapiens
gtggtggggcttgatggagactggattcctgcctcccaacccccacaatcttctctcccatgtaaaaaacaaaaccatttcattctggttaaacctcctcctcgttggaaatttagaaagtcaaggaaagctgaaaagaagaaagtgaaaattatctgtcattttcagtcagataaaagttaatatgtattgagcccttca

SEQ ID NO: 550711 - DNA, 201 bp, Homo sapiens
tggaagtagacaccatgtatcttttcattagagaagcaaacccccaaaggagaagcattgtcaggcttctctctttgccatggcctttgcctatacccttsagcagtgatctgagtcggctgagatgcagatgttaagcctgggcagaaaagcgctgctctctgcatggtccgggagagacccctctccagccggtggcat

SEQ ID NO: 550712 - DNA, 201 bp, Homo sapiens
ggcaggttcctccctttcctactcggaacgtggcaaagataccccagtcccagcccctccagctgagagctgttgcccaaggtcgtcgctacttgtccgckcaatggtgaccccttggcagagaactagggatgattccactccggttgatgttttaggggaaattaaaagaacattcggttttctgagtctccttccggg

SEQ ID NO: 550713 - DNA, 201 bp, Homo sapiens
gatctgcctttgagttaaacaagggagttgggcatttgttcatcattttgcccattatatttattctttgatctttgcctatattgcttttagggtctttstgtttttatcaatctgtacgaaccccctatatattaaggtgaataactccgtgcagcattttcttttgcaccaaaatattttgatgtggatgagaaagag

SEQ ID NO: 550714 - DNA, 201 bp, Homo sapiens
tcacagcctgtcctcagcttcctccctgctgggccttcatccaggctgtgttaagatgttctctgttctaaccttccacaagtttctcccttccgagcccygtctgtcatctttcccttgtccacagaggccacgcctctctctgggggtccctgttggctgacaggagcgtccttacacccacaccactgctgtgtgagg

SEQ ID NO: 550715 - DNA, 201 bp, Homo sapiens
tttgaggccccattgtcatgcagcgctactcggccttggtctccttatctgtaaaatgggcccattagcaatgcacagggttgctgtgatgaagggtgagrtcccacaagcaaaagctgtgcagtgaggggggaatcctaagcattgttcctatgccattcaccccttcctgtgagctccccatattccctggctcaaagg

SEQ ID NO: 550716 - DNA, 201 bp, Homo sapiens
gaccaccagaaccagggtaagcaccccacttggtagccagttcaaggacttggggatgttttcaacatttacagcgaggtttgaggccccattgtcatgcwgcgctactcggccttggtctccttatctgtaaaatgggcccattagcaatgcacagggttgctgtgatgaagggtgaggtcccacaagcaaaagctgtgc

SEQ ID NO: 550717 - DNA, 201 bp, Homo sapiens
cctccttacgccctggcacaggttcccggcgactggtgttcccaagggagccccctgagcctaccgcccttgcagggggtcgtgctgcggcttctgggtcrtaaacgccgaggtcgggggtggcggagctgtagaggctgcccgcgcagaaagctccaggatcccaatatgtgcttgcgtggagcagggagcggaagaggc

SEQ ID NO: 550718 - DNA, 201 bp, Homo sapiens
gccattgccctgcctcagcctcccaagtagctgggactacaggcgcccgccagcaagcctggctaattttttttgtatttttagtagagacggggtttcaycgtgttagccaggatggtctcaatctcctgacctcgtgatccgcccgcctcggcctcccatagtgctgggattacaggcgtgagccaccatgcccggccc

SEQ ID NO: 550719 - DNA, 201 bp, Homo sapiens
ttaaggccattagaagcaataggacagatgtctatctggggccatatattactttccacccaccatagctattgtacgttcaatcaccttgctccaggctstgacccttgccatgccgccagccccatgatgaaaagagttctcgtttgcactttacatggggtgaggatttaggctctaggtttgttcatagaatgactg

SEQ ID NO: 550720 - DNA, 201 bp, Homo sapiens
ggtaagcaccccacttggtagccagttcaaggacttggggatgttttcaacatttacagcgaggtttgaggccccattgtcatgcagcgctactcggcctyggtctccttatctgtaaaatgggcccattagcaatgcacagggttgctgtgatgaagggtgaggtcccacaagcaaaagctgtgcagtgaggggggaatc

SEQ ID NO: 550721 - DNA, 201 bp, Homo sapiens
gggtcgtgctgcggcttctgggtcgtaaacgccgaggtcgggggtggcggagctgtagaggctgcccgcgcagaaagctccaggatcccaatatgtgcttkcgtggagcagggagcggaagaggcagccggtcctcaccctcctctcccgccacgcacatatccttcttgacttcgaagtggtttgcaatccgaaagtgag

SEQ ID NO: 550722 - DNA, 201 bp, Homo sapiens
gcctctgcccatcggaggtcagaggcagggcctccagcaccagactcagcagtgccactgcaaacctggcacaacaggctggtcccaggactcagctcagyagtgaagttggaaaccaaggttgagtctccccatctccctttccccaacccgaaagacccaagatgggtgtgggtgaaagagggagaaagaattgctact

SEQ ID NO: 550723 - DNA, 201 bp, Homo sapiens
tgcctttgggaaaacaaggagttgccggagaagcagggaaagaaaggagggagggaaggagggtccttgggggaatatttgcgggtcaaatcgatatcccsgtttggccacgagaatggcgatttcaaagcagattagattactttgtggcatttcaaataaaacggcaatttcagggccatgagcacgtgggcgacccgc

SEQ ID NO: 550724 - DNA, 201 bp, Homo sapiens
gggccccgtcgggacggttcttgcagggccggaaggcagcttcctgccggcccctcgctggcccttcatccatcttctttgccatgcagcaatacagctcrttccaaatggacaaactggaatgcggccagctcggaaactggagagccagtccccctgcaagcgctgctgctcctccagaactgcagccccactcagaaa

SEQ ID NO: 550725 - DNA, 201 bp, Homo sapiens
  misc_feature (1)...(201): n = A,T,C or G
ggactctcacgtcttcagcagcaaaaagccaatgttgccggccaagttcgggcagccccaaggatccccttgtgaggtggcacgctttttcctgagcacantgccagccagcggtgaatgccagtggcattatgccaaccccctagtgcctagcagctcgtctccagctaaaaatcctccagagccaccggcgaacactgc

SEQ ID NO: 550726 - DNA, 201 bp, Homo sapiens
cagtttggctccttgtcgacacccttcaggaccactcagaagcagggtgagtgtgtcagggtcaccagcatcttcccagaaactccaagcagacaggaaasagcgctctttggggaaagctgccagcacctctggggacggccaagagcgacaaatgccattttcctgccatgcagagggaggcgctgcagggagagaagg

SEQ ID NO: 550727 - DNA, 201 bp, Homo sapiens
tgttcctgccatatcaggaaacttctagcaaagccttgaggccttttctgagctgcagtcacatgggaggggctgaaaggggtcagaagaatgctgcagargccttcccagtcaccacagtcagtctgtgaccaaggggatggggcctgggctggcccagccctgggaggacagcagagtggccaagcagggtgggagatg

SEQ ID NO: 550728 - DNA, 201 bp, Homo sapiens
catgctttgagtttcttctcaggctgggcactgggactccccttggtggtggaggaagtcctaccactgcccctgggcctcccctgaacaatgctggggtwcaccgactcactgtccttgtctgccaccctcagcactattgattatagctctaaaaataggatccacccaccactgctcagaaggctgctctgctagtca

SEQ ID NO: 550729 - DNA, 201 bp, Homo sapiens
cctcccgcagggcacgcacagccccagccacacccctgggcgggagccacagaattagcacagtcatctcggactgggagggccagagactcattgctggyaatgtgagagaggcctggcagcgcctgaggggcacagctcagagtcgacgaagaaagggcctttgtctgagttcatgtcctcctcgggcgcagtggcgcc

SEQ ID NO: 550730 - DNA, 201 bp, Homo sapiens
tgggattacaggcatgagccaccgcacccagccacacactttcagaatccaaatggaggcaaagactaatttggatggagtggaatgcctcatcctcctgytgtccagccctgccacgcccatggccagtcgggggtgctttataatggggtgcagacagttagaggagctgggtcttctgcagtgtggcccagatggcat

SEQ ID NO: 550731 - DNA, 201 bp, Homo sapiens
gccgctaggtccacagatgcgtggtgtgctgggctccgtgtggactgggacccgggaactcgatactcccagggtgtcgctgttgctcttccctccccaartctctatggacagaaacccgtgacaaccaggacttatggctgagcaggcacagacggcttcttccttgctccttgactcatgtggagacttggaggtgtg

SEQ ID NO: 550732 - DNA, 201 bp, Homo sapiens
cagtggtgctcagtcagtgcctcctctgtgtccatcatgggtagatgctttcacttatagactctgacctgcgggcagtttggggagctgtgtccctctcktgcccttttcccaggtgatcagggtgagactcaggggacacttgtccaagggcagcagtggagctggggcaggaccaaagtccagcccattggctgtcgt

SEQ ID NO: 550733 - DNA, 201 bp, Homo sapiens
tttctgtcttctttacttaaatagtaaaataaagtattgaataggatgtcaaatacccaactggtcttttaaacatttttgcaccttttagattatttttwaaaagtcaggcaaatgtatcaagcatgagacctttattaaaatgggcttaaacattttttttaagtcatgagagataaaagtgttaataaaattttaccc

SEQ ID NO: 550734 - DNA, 201 bp, Homo sapiens
ataacttgaaccctgaaacccaaaccatcttgttttaaaatccttaatttaccatactcagcaaaacaccccagagtaacgtgcattttcagagtgccaarcaactctccccttccacacagaatatatgcatttagtgctgtatttatcatgtgtaggtttcttggcaagaagaaaagctattcagcaaaacataaaaaa

SEQ ID NO: 550735 - DNA, 201 bp, Homo sapiens
tttctctattttgttattttttcatttttaaaataaactgttgaaattgtgagtcactatatattttcttttctttctttcttttctttttttttttttttgagacagagtcttgctctgtcgcccaggctggagtgcagtggtgcgatgtcggcttactgcaaactgcgcctcccgggttcagacgattctcctgcctcg

SEQ ID NO: 550736 - DNA, 201 bp, Homo sapiens
tcctgtcatttgtctctgccatcgaaaaatgcctaccgagagctgctctgcatttccgccctctattttgtgttttactttaaaataataataaaaaaaaatgttggctgcaggacgccatgacttaggtcagcgagtcagccgctagctctgcatttccaaaaagcagatcttttcacaactctcttgccccaagtgccc

SEQ ID NO: 550737 - DNA, 201 bp, Homo sapiens
gtccaggtttaggagacgcgtggggacagccgagccgcgccgggcccctggacggcgtcgccaaggagctgggatcgcacttgctgcaggtagagcggcckcgccgggggaggagcgcagccgccgcaggctcccttcccaccccgccaccccagcctccaggcgtcccttccccaggagcgccaggcagatccagaggct

SEQ ID NO: 550738 - DNA, 201 bp, Homo sapiens
acgcgtggggacagccgagccgcgccgggcccctggacggcgtcgccaaggagctgggatcgcacttgctgcaggtagagcggcctcgccgggggaggagsgcagccgccgcaggctcccttcccaccccgccaccccagcctccaggcgtcccttccccaggagcgccaggcagatccagaggctgccgggggctgggga

SEQ ID NO: 550739 - DNA, 201 bp, Homo sapiens
ctcgcggcaccaccgcactcaggacggcagtggggggctggggctggggctgggcctggcccgcagttcctggggtggggagcgggcatcgtgggttggggcgggggacgcgccagcagcgcccgcagctcgctccgcaggggtcgcagccaggggtcgggagctaggctcgtgggccgggagacgccgggcgcgttgtcc

SEQ ID NO: 550740 - DNA, 201 bp, Homo sapiens
gctcgcggcaccaccgcactcaggacggcagtggggggctggggctggggctgggcctggcccgcagttcctggggtggggagcgggcatcgtgggttggggcgggggacgcgccagcagcgcccgcagctcgctccgcaggggtcgcagccaggggtcgggagctaggctcgtgggccgggagacgccgggcgcgttgtc

SEQ ID NO: 550741 - DNA, 201 bp, Homo sapiens
tgctcgcggcaccaccgcactcaggacggcagtggggggctggggctggggctgggcctggcccgcagttcctggggtggggagcgggcatcgtgggttggggcgggggacgcgccagcagcgcccgcagctcgctccgcaggggtcgcagccaggggtcgggagctaggctcgtgggccgggagacgccgggcgcgttgt

SEQ ID NO: 550742 - DNA, 201 bp, Homo sapiens
agtgctcgcggcaccaccgcactcaggacggcagtggggggctggggctggggctgggcctggcccgcagttcctggggtggggagcgggcatcgtgggttggggcgggggacgcgccagcagcgcccgcagctcgctccgcaggggtcgcagccaggggtcgggagctaggctcgtgggccgggagacgccgggcgcgtt

SEQ ID NO: 550743 - DNA, 201 bp, Homo sapiens
cagtgctcgcggcaccaccgcactcaggacggcagtggggggctggggctggggctgggcctggcccgcagttcctggggtggggagcgggcatcgtgggttggggcgggggacgcgccagcagcgcccgcagctcgctccgcaggggtcgcagccaggggtcgggagctaggctcgtgggccgggagacgccgggcgcgt

SEQ ID NO: 550744 - DNA, 201 bp, Homo sapiens
tcagcagtgccactgcaaacctggcacaacaggctggtcccaggactcagctcagcagtgaagttggaaaccaaggttgagtctccccatctccctttccscaacccgaaagacccaagatgggtgtgggtgaaagagggagaaagaattgctactccagaaactgtcatttgcccacacgaaacgaggtggggttcaagg

SEQ ID NO: 550745 - DNA, 201 bp, Homo sapiens
tggttcagtgctcgcggcaccaccgcactcaggacggcagtggggggctggggctggggctgggcctggcccgcagttcctggggtggggagcgggcatcgtgggttggggcgggggacgcgccagcagcgcccgcagctcgctccgcaggggtcgcagccaggggtcgggagctaggctcgtgggccgggagacgccggg

SEQ ID NO: 550746 - DNA, 201 bp, Homo sapiens
cagtgagagaatcgtctaacctggtgttcctaccacagtccaggccctgtgtcctgggctggacccacagcccctgccaccacccagaggaaggcgcgaasctggctgcctcctttacgggtctcccttaggtgccctcatgaagggggacggccacctcacagtgcaggaactatctccccgtttgctcccaaatagtct

SEQ ID NO: 550747 - DNA, 201 bp, Homo sapiens
ttggttcagtgctcgcggcaccaccgcactcaggacggcagtggggggctggggctggggctgggcctggcccgcagttcctggggtggggagcgggcatcgtgggttggggcgggggacgcgccagcagcgcccgcagctcgctccgcaggggtcgcagccaggggtcgggagctaggctcgtgggccgggagacgccgg

SEQ ID NO: 550748 - DNA, 201 bp, Homo sapiens
aaaaggaacgcgggcctgacctgcagcggatacaaggtacggggagtcatgggtgcggggaggagctggctaagggtcttcaatgtgtgttttcaagagcrtctgcagaaaggaaggcacgggagcacaaactcgtcatccccactaatgtagagctctccagcaacgtggtgcacagtctcttggaggctcatgtgagag

SEQ ID NO: 550749 - DNA, 201 bp, Homo sapiens
agtgagagaatcgtctaacctggtgttcctaccacagtccaggccctgtgtcctgggctggacccacagcccctgccaccacccagaggaaggcgcgaagstggctgcctcctttacgggtctcccttaggtgccctcatgaagggggacggccacctcacagtgcaggaactatctccccgtttgctcccaaatagtctt

SEQ ID NO: 550750 - DNA, 201 bp, Homo sapiens
ggggctggggctggggctgggcctggcccgcagttcctggggtggggagcgggcatcgtgggttggggcgggggacgcgccagcagcgcccgcagctcgcyccgcaggggtcgcagccaggggtcgggagctaggctcgtgggccgggagacgccgggcgcgttgtcctccggggaggttggggtgcaggcggtgcaccga

SEQ ID NO: 550751 - DNA, 201 bp, Homo sapiens
ctgctaggcacagcctggtgccaagctacgaaggtgggtcaggtctgctcgtggggaaggtgggaggactgcgcacggccgggagccgaagcagccatggyggtgggtggcagatggagacagaaccctcacgctttgggcaaacttgccctctttctgcttctaagtagggcttgctgtgctttcttgctctcaatgcag

SEQ ID NO: 550752 - DNA, 201 bp, Homo sapiens
gaagctgtgatgtgcctactcccaaggacacgacacacagtagggacctgccctgtacatgctagttcaacagaaaggaatggcctttcaccttctcctgstggcaggcaagcagatgtcctctgcggagataccgccagctccccaggacgcagactgactcctgtttgctcgctggaccaaccccaggcagaaggtgga

SEQ ID NO: 550753 - DNA, 201 bp, Homo sapiens
ctgtctcaaaaaaaaaaaagaaaaagaaaaaggatgatgtgcctcagaaaagcagcacaccagcccctgcttaagaagacagctcttggaagttcctccaygcctctctcgaggcaggtagggctctgctccttctgggcctcatcctgctttttctgcaaatcctaggaatctcttgctctgtattgtgacttgaggctg

SEQ ID NO: 550754 - DNA, 201 bp, Homo sapiens
ggaagacaaattttgccatatagtgtttaaaaacaaacaaacaaacaaagacaaaaaaaacccacaagccagggagctacttaatgtcaggcatcggactgagtagatgggagtggttatttttcattatgacacggcgaaaccgatcggggtggttaccacccctctccactaagggacgggcagaagaaatcagagcag

SEQ ID NO: 550755 - DNA, 201 bp, Homo sapiens
aatcctttcataaagcaccagcagtgtttaaaaaatgagcttccattaatttttactttttatgggttttgcttaaagatctcaacatggaaaaatcctgycatggctctgaactgcacaatgcattgaaccgccgtccttcaattttcttcacactatcaacactgcagcattttgctgctttatcaaaatggtttattt

SEQ ID NO: 550756 - DNA, 201 bp, Homo sapiens
ggggcgacggcgagagcacagatggcggctgcggagccggggaggcggcggggagacgcgcgggactcgtggggagggctggcagggtgcaggggttccgmgtgacctgcccggctcccaggcatcgggctgggcgctgcagtttaccgatttgctttcgtccctcgtccaggtttaggagacgcgtggggacagccgagc

SEQ ID NO: 550757 - DNA, 201 bp, Homo sapiens
taccctgggggatgctcttcccacagctcatgggtgccctgtctacatctgggctgggaggaggggattggatgaggtcatttctcctggccttggggagkacctctctccagacccgtgctggagtggccttcactctcccctagaaccggctgcagtcccagttttttaactgagtctgcagttaaagtctgagttttt

SEQ ID NO: 550758 - DNA, 201 bp, Homo sapiens
cgggggctcctgcctttggttcagtgctcgcggcaccaccgcactcaggacggcagtggggggctggggctggggctgggcctggcccgcagttcctggggtggggagcgggcatcgtgggttggggcgggggacgcgccagcagcgcccgcagctcgctccgcaggggtcgcagccaggggtcgggagctaggctcgtgg

SEQ ID NO: 550759 - DNA, 201 bp, Homo sapiens
ccgggggctcctgcctttggttcagtgctcgcggcaccaccgcactcaggacggcagtggggggctggggctggggctgggcctggcccgcagttcctggggtggggagcgggcatcgtgggttggggcgggggacgcgccagcagcgcccgcagctcgctccgcaggggtcgcagccaggggtcgggagctaggctcgtg

SEQ ID NO: 550760 - DNA, 201 bp, Homo sapiens
cccgggggctcctgcctttggttcagtgctcgcggcaccaccgcactcaggacggcagtggggggctggggctggggctgggcctggcccgcagttcctggggtggggagcgggcatcgtgggttggggcgggggacgcgccagcagcgcccgcagctcgctccgcaggggtcgcagccaggggtcgggagctaggctcgt

SEQ ID NO: 550761 - DNA, 201 bp, Homo sapiens
tgcccgggggctcctgcctttggttcagtgctcgcggcaccaccgcactcaggacggcagtggggggctggggctggggctgggcctggcccgcagttcctggggtggggagcgggcatcgtgggttggggcgggggacgcgccagcagcgcccgcagctcgctccgcaggggtcgcagccaggggtcgggagctaggctc

SEQ ID NO: 550762 - DNA, 201 bp, Homo sapiens
ctgcccgggggctcctgcctttggttcagtgctcgcggcaccaccgcactcaggacggcagtggggggctggggctggggctgggcctggcccgcagttcctggggtggggagcgggcatcgtgggttggggcgggggacgcgccagcagcgcccgcagctcgctccgcaggggtcgcagccaggggtcgggagctaggct

SEQ ID NO: 550763 - DNA, 201 bp, Homo sapiens
cgctgcccgggggctcctgcctttggttcagtgctcgcggcaccaccgcactcaggacggcagtggggggctggggctggggctgggcctggcccgcagttcctggggtggggagcgggcatcgtgggttggggcgggggacgcgccagcagcgcccgcagctcgctccgcaggggtcgcagccaggggtcgggagctagg

SEQ ID NO: 550764 - DNA, 201 bp, Homo sapiens
gcgctgcccgggggctcctgcctttggttcagtgctcgcggcaccaccgcactcaggacggcagtggggggctggggctggggctgggcctggcccgcagttcctggggtggggagcgggcatcgtgggttggggcgggggacgcgccagcagcgcccgcagctcgctccgcaggggtcgcagccaggggtcgggagctag

SEQ ID NO: 550765 - DNA, 201 bp, Homo sapiens
cccgcgctgcccgggggctcctgcctttggttcagtgctcgcggcaccaccgcactcaggacggcagtggggggctggggctggggctgggcctggcccgcagttcctggggtggggagcgggcatcgtgggttggggcgggggacgcgccagcagcgcccgcagctcgctccgcaggggtcgcagccaggggtcgggagc

SEQ ID NO: 550766 - DNA, 201 bp, Homo sapiens
tcccgcgctgcccgggggctcctgcctttggttcagtgctcgcggcaccaccgcactcaggacggcagtggggggctggggctggggctgggcctggcccgcagttcctggggtggggagcgggcatcgtgggttggggcgggggacgcgccagcagcgcccgcagctcgctccgcaggggtcgcagccaggggtcgggag

SEQ ID NO: 550767 - DNA, 201 bp, Homo sapiens
aaatgctgccgccacgaggcctgggaggaaggacccgctggtgagagcacagggagtgctgctgtgatcacggtggtgatgcggggtgagcgcgatttcccgggattaaaaagccaccgctgcccccgtggtggaggctgggggcccccgaataatgagctgtgattgtattcccgggatcgtgtatgtggaaattagcca

SEQ ID NO: 550768 - DNA, 201 bp, Homo sapiens
actgctggcaacttttagaatttaattatgataattttcctcttttcctcattatcccagatatggctggttgtgagatactttttcactaaatgtgtctytttaatgattttggaattaagcaagcatgccaaatgcgccaagacatttataactttagaaattgctgtatagtatatatttttggaacaccacaggttt

SEQ ID NO: 550769 - DNA, 201 bp, Homo sapiens
tatgataattttcctcttttcctcattatcccagatatggctggttgtgagatactttttcactaaatgtgtctctttaatgattttggaattaagcaagyatgccaaatgcgccaagacatttataactttagaaattgctgtatagtatatatttttggaacaccacaggtttagttgggaaaatattttgcagctgag

SEQ ID NO: 550770 - DNA, 201 bp, Homo sapiens
accttctgtacacgccatcctacagcctgcccttctcctaccattacggacacttccctctggactctcacgtcttcagcagcaaaaagccaatgttgccrgccaagttcgggcagccccaaggatccccttgtgaggtggcacgctttttcctgagcacactgccagccagcggtgaatgccagtggcattatgccaacc

SEQ ID NO: 550771 - DNA, 201 bp, Homo sapiens
agctcggggctggggcagcgctgaggtctgatggtcagccagccctccccaaagtgtggccctccgttctggagataggggctttggaaactgcaaaagcrtcctggcaggccagctctggttgctccctggccatagctgctctgactacaggcagcaggacgcaggtcggcctctgcccatcggaggtcagaggcaggg

SEQ ID NO: 550772 - DNA, 201 bp, Homo sapiens
cctgacgggcaggtccctctttcccctggtgcgcaacactggttggtagcttttgcggaggtggtgaagaagggcaggaggcctgttgagcggaggagtcsggggatccctaattatgtgacaggagaccctttccagttcggcctgtggcccatccctctctcaccgccggcagattggagtctgctctcggggagcccc

SEQ ID NO: 550773 - DNA, 201 bp, Homo sapiens
tggtttattttttaaaatgcatgcctgcggaagagaagacccggggaatattcgaaaccccgagcttttacaacataaagcgcatggtgtggccgcggcgrgtaatggcgctctgggagccctgcccaggcggcctctgctcgccctcctccacttccagctccgagctgggtgtgttgcaagtttcatactcctacatat

SEQ ID NO: 550774 - DNA, 201 bp, Homo sapiens
attgatctgccaagggcggtcttgtctcaaagcaagtggattgctggggtaaagaatctagagaccagcttaggactctgggaggaagaaaaaaaaaaaaagaatagcatagtcctaaggaactgcaaggatcaccagattaacccttcatacctggggaaattaaggccagacatgacacaggcctttcccaaggctctg

SEQ ID NO: 550775 - DNA, 201 bp, Homo sapiens
gttcagagctctgagctctgttgagaaaagaaaactgtttctgcgtttggcaaaggtgtgggttgtcagcagagatcaaagttctgttcctggcagggtgmgcacctgtgacacaccttgcccctccccctgcgccaatcccagagaggcggtggcatttctgacccttcccttccacggcaggtggagctcacgggcaac

SEQ ID NO: 550776 - DNA, 201 bp, Homo sapiens
cagagggctggtctgcaagcgcggcctccagccccgcggctccccggcccaggagccaggcgcgggctgacccgggagcacccggcagcggagggggctggaagcggaccctaggcctctcctgtgccacccggccctaccgcgcggccgcggggcgctctcctctcgggcgcagcggtccttcagcccagggcaggttcc

SEQ ID NO: 550777 - DNA, 201 bp, Homo sapiens
gccaatcccagagaggcggtggcatttctgacccttcccttccacggcaggtggagctcacgggcaacagtatttatgaatacatccatccttctgaccaygatgagatgaccgctgtcctcacggcccaccagccgctgcaccaccacctgctccaaggtattccatccagagggaaaaaaaaaaacagactaaaagcaa

SEQ ID NO: 550778 - DNA, 201 bp, Homo sapiens
actcacgtaagtcacacgtatttgtttctctccttgctcttttctcttccctgtcccacatcggatggctccaataagcaccatctctctttctctctttytcaaactgttcatttgtcttctgttttttttcttttttttaattttttttttttaggaatctggtcattttggaaggtgcaaactatttctatgctcagc

SEQ ID NO: 550779 - DNA, 201 bp, Homo sapiens
acctccgctacgcacaccacctccgtgagtagcacgcccaccccagccacgggaggtagctggtcagggaggaggcgctgaggacagagccgggggacgtrtcccttttgttggtgcaataatcatccatgatacacacttgaatctcaagccccaagtgtggcttcctccaccccgtgattaagtacggctgcctgttgt

SEQ ID NO: 550780 - DNA, 201 bp, Homo sapiens
cagcctcccaaagtgctgggattacaggcgtgagccaccgtgcctggcctgaaaattgcacagtatgttaactgtatgggactgggctttctccccctacycccggtttcattttaccctgcctgggtcataacctcccaaagagggattataaatgagagcaaatgagtcttgggaatatcatgagaccctttcatgccc

SEQ ID NO: 550781 - DNA, 201 bp, Homo sapiens
ggaggttgtgcctaaaggaggcctggacagggcctggatggggctttgcagcgccagagggggctcccgcgtctcagggtgtaggggctgcacccctggartgaacagaaaagaaggctggtggtcttgaaggagacatcctgcctctcccagatctctggttgttcctgccatatcaggaaacttctagcaaagccttga

SEQ ID NO: 550782 - DNA, 201 bp, Homo sapiens
gtgctaggaagatacagaaggacttattccaggggccctggccttttaactccctccaaccatccagtgaggccaacaggcctcttgacaaatgggtcttrtgtgtgctttggactatggcacccagcttggccagaataccccagtggaacaaaatgcaaaagaagaggctttaagggtgatgagaatggggtagctggc

SEQ ID NO: 550783 - DNA, 201 bp, Homo sapiens
ttttagccctaaagatgatgaatgcattcagaaatcctggagaaagagttttggaacagagaacttaaggctaagattcttcactgttgtcatgatgatawtgaccctgtcaagatttcacagactgcagcttgaataaatgcttccagtagtgacgctcgaggctgtacagatgtttctgtttgacaccgaaacactgca

SEQ ID NO: 550784 - DNA, 201 bp, Homo sapiens
tggctgcggggttggaataggatctgtctgagctgccagggtcagggtggtggccctagggaggttttagggccagggtggtcccgggctgtggcaggggytctcagatcgcctcgggctctcagctgcaaggtgaaaaataccatgaggaattgatctgccaagggcggtcttgtctcaaagcaagtggattgctggggt

SEQ ID NO: 550785 - DNA, 201 bp, Homo sapiens
tacagtcctttttaagaccctgggcttcatttttgcatttagcaagtatgtgttgatggtcatatttgatgcatccctccatcccagtgactgtaccattrttagatttaactctaatgtagaatgatcatctcttattctgacactttatcttttacagactttggatggatttgtttttgtggtagcatctgatggcaa

SEQ ID NO: 550786 - DNA, 201 bp, Homo sapiens
gattaactccatagaaggaaatctaggcagaatcacaatgtgtatttttttctgtcttctttacttaaatagtaaaataaagtattgaataggatgtcaartacccaactggtcttttaaacatttttgcaccttttagattattttttaaaagtcaggcaaatgtatcaagcatgagacctttattaaaatgggcttaaa

SEQ ID NO: 550787 - DNA, 201 bp, Homo sapiens
tgagacctttattaaaatgggcttaaacattttttttaagtcatgagagataaaagtgttaataaaattttacccagtagtcagagtaaccttttaaaaaraatttctgatgaataacgatagtagtaatagctgatacatgctgctcttttgtgttccaaaaactttcaattaccttcaatgacattatcttattaagta

SEQ ID NO: 550788 - DNA, 201 bp, Homo sapiens
ggggtggtccatgacatttcatggggaaaattacatatgtgtttcctccagttgaaatttggcatttcctttgcttctgatgatagatgataaaccatctyggggtccctagtacctgtggctttgccaacaatagaaatcacagatgttttccatatcataggaaagttttgcaggtttaaacatatcgcttatgcccac

SEQ ID NO: 550789 - DNA, 201 bp, Homo sapiens
cagggtgggccctgccaaagaaaggcctcagtgggggagaacaggtcaggccagtggatgtggctgggccagagcaaggctgatgtcttcacagcctgtcstcagcttcctccctgctgggccttcatccaggctgtgttaagatgttctctgttctaaccttccacaagtttctcccttccgagccccgtctgtcatctt

SEQ ID NO: 550790 - DNA, 201 bp, Homo sapiens
ggccagtggatgtggctgggccagagcaaggctgatgtcttcacagcctgtcctcagcttcctccctgctgggccttcatccaggctgtgttaagatgttytctgttctaaccttccacaagtttctcccttccgagccccgtctgtcatctttcccttgtccacagaggccacgcctctctctgggggtccctgttggct

SEQ ID NO: 550791 - DNA, 201 bp, Homo sapiens
ccggcaacgcgccgaggtcacgctccccagaaacacccctctcccctcccctaccccagctccccctggggcgggtggtaattgggggaggagaggccgcmggcagggaaggggtgggaaagccagagagggaggcacaaagtgatggcagcccggcaaacactggggcttcgggctgggccgcgctcgtttaatcccaca

SEQ ID NO: 550792 - DNA, 201 bp, Homo sapiens
aggccgtgcagtgtgaggaacggcaggcagggtgtgggaccaacatgcacacactcgcaggtgctggggccagggaggaatgaggcgctggctccctttcyctccatttctccctgggggtcccagcaacctggccatccctgacttccaacagcacagcgtccccacaggtcctgcagtgctctgcaggggtgcagggag

SEQ ID NO: 550793 - DNA, 201 bp, Homo sapiens
gtctgtgacctgcatctggagttacccccaggaccagcttcggaagaggagggatcgcttggaggccgtgcagtgtgaggaacggcaggcagggtgtgggmccaacatgcacacactcgcaggtgctggggccagggaggaatgaggcgctggctccctttccctccatttctccctgggggtcccagcaacctggccatc

SEQ ID NO: 550794 - DNA, 201 bp, Homo sapiens
ttggccccctctctccctccctccttccttccttcctttgccaatgcattggtttgttttctttccttttctgctttccttcctttctttggaagttcacyctggttttgctttctttctttccccatcccttcctttctttatccctccttcccttcctccttttctttctacgattccctttatttttccttcattcct

SEQ ID NO: 550795 - DNA, 201 bp, Homo sapiens
cctgtcaagatttcacagactgcagcttgaataaatgcttccagtagtgacgctcgaggctgtacagatgtttctgtttgacaccgaaacactgcattctygtctgtatggcttttggctatagcaattggaagggcttctgtagggccactctggcttattattatgaggaaataaaatcttgaattataaataaaggaa

SEQ ID NO: 550796 - DNA, 201 bp, Homo sapiens
gtaattccagtactttggaaggctaatgtgggaggattgcttgagcccaggggttcgagaccagtctgggcaacataatgagaccttgtctctacaaaaamttttttaaaaaattagccaggcacggtggcacatgcctgtggtcccagctactcaggaggctaaggtgggaggatcacttgagcctgggaggtcaaggct

SEQ ID NO: 550797 - DNA, 201 bp, Homo sapiens
tccaggagtgaaccactgtgcccagcctaaaactgaattgaatttttaagtgacaaacgctaactgcgtttggttttcagggttttgtggtgtttgtgggktacattgtgatgctttgacacatgtccactctgtggaaccatcaaacccctcccaagtcttgaggccacgtgctagtcaggcctcttccatgttcttatt

SEQ ID NO: 550798 - DNA, 201 bp, Homo sapiens
tattcagcctcctgccctcccaggttccaccagggtccccactgtggccactgcagacctgagactcaagtctttcaactccatcagctagagctggcccygtggctgcccgagggatgcggggacacaggcagcctgccagcttcccttccatctgccacaaccgagtgtagctggaggtagccagcagtgacagcaacc

SEQ ID NO: 550799 - DNA, 201 bp, Homo sapiens
tcccctcttctggggcctcgctttccccacaccggtagccaaaagccaggaacctctggggtcagtgccaagggctctgcagaggcctgattggaggtaakaggtggtggtccgggagggccagacagcccgatggtttgcacacgttcttcagaatattatcttcactgggagcaagagtccacaggggctgaagaaatc

SEQ ID NO: 550800 - DNA, 201 bp, Homo sapiens
gcccgagggatgcggggacacaggcagcctgccagcttcccttccatctgccacaaccgagtgtagctggaggtagccagcagtgacagcaacccccgccygggcccctcaggactcctcacagtgagatgcccagacgcatctgtcgtgggcagtgggtgaggtcaccgagagcaggaacaaagcagacagctgccaaca

SEQ ID NO: 550801 - DNA, 201 bp, Homo sapiens
ggccaacatggtgaaaccccgtctctactaaacaatacaaaacttagccgggcgtggtggcattcgcctgtaatcccagctattcaggagtctgaggcagkgagaatctcttgaacccaggagacggaggttgcagtgagccgagattgtaccactgcactccagcctgggcaaaagagcaagaccctgtctcaaaaaaaa

SEQ ID NO: 550802 - DNA, 201 bp, Homo sapiens
tggcaagaagaaaagctattcagcaaaacataaaaaagctcttagtaggaaagctatccattttgtagttagcagggttttgcaaatactaaaatatcacrtggaaggtctgttttaataaggctgatgcatgagacccagggagttttatagcgacaaccataattttttttttttttgtgaggtagtcacatttctctc

SEQ ID NO: 550803 - DNA, 201 bp, Homo sapiens
agggccggtgcgacccagttgctgggggcttggtttcctcaccttgaaatcgggcttcacgcgtcttgccttgtccccaacgttccacaacagtcccgctrggggattgaagcggtttcactccgcaaatatcctccactttcaggagggaaaacccaccctaccacagtccgctcttccaagtggacggcagacctggga

SEQ ID NO: 550804 - DNA, 201 bp, Homo sapiens
tgcggaagactcggaacaggaagaaatagtggcgcgctgggtgggctgccccgccgcccacgccggttgccgctggtgacagtggctgcccggccaggcamctccgagcagcaggtctgagcgtttttggcgtcccaagcgttccgggccgcgtcttccagagcctctgctcccagcggggtcgctgcggcctggcccgaa

SEQ ID NO: 550805 - DNA, 201 bp, Homo sapiens
ggactttgaagacccctgctttctgggtgaccaccttttcttccctttgacagtgaactaatacattggaggtagatagtgctgggaagaggacaggagascacggctgactttggacatgggctcgaaattgataacttgatgagtcttggagggtggttaagataagctcggggctggggcagcgctgaggtctgatgg

SEQ ID NO: 550806 - DNA, 201 bp, Homo sapiens
gcccaggcggcctctgctcgccctcctccacttccagctccgagctgggtgtgttgcaagtttcatactcctacatattataagtgacactaatatcaggracaactaagtgctggggaacttcaatgaaaacctggctggtaaagtcaacacccccagacttctctgtgctacatttctttaattaattccggagtggtg

SEQ ID NO: 550807 - DNA, 201 bp, Homo sapiens
tgcaaggggcgcaaggacggagagacagcatcaataatacaatattaacaggagcacttgtccagagcttactgcaagccacattcagttccggaccttaytgacttccccctcccatctagagtggattctggtttttcaatttgttttgttttgttttttgtttgtttgtttgtttttgagacggagtctcactctgtg

SEQ ID NO: 550808 - DNA, 201 bp, Homo sapiens
gctcgccacttccaggtgggctgttggcgctggctggggacacatcccgatctttcaaatgccctttacagagcctcatcaacgacccgattcattccccyctcctgtcatttgtctctgccatcgaaaaatgcctaccgagagctgctctgcatttccgccctctattttgtgttttactttaaaataataataaaaaaa

SEQ ID NO: 550809 - DNA, 201 bp, Homo sapiens
acttaggaaaaatcagaatttcatttgggtagttttcatttttcagaagttgatacttttcctccttgaattttgcaaaggttatttgatctcttgcaaawtctaaataattaattctgtagacatagtctggtaaaataaccaggtattttgttttattttctgggcagtggtagtgttcggaatttattattccaacgg

SEQ ID NO: 550810 - DNA, 201 bp, Homo sapiens
cagaatgttctttggggagagagaatggggaggggtagatttatgagtgttcgcatggaattcggggtcatttttcctgactttttccagttcagtggtcrtttcagcaaagcattttatatgcttgtgatagaaactcataaaactcagtttactactgttttgaacagcaaggtttctttagaacatctgaatattacc

SEQ ID NO: 550811 - DNA, 201 bp, Homo sapiens
gcccgccccctttgtcaagttctcagaggtgtccttgggacagaggtcaccgttgggggcagcatcccagaggtggggcctgcgaagcgtctgaggactcmtgtcaccttgtgcttgcagtgttggtgaagggccaggtcaccaccaagtactaccggctgctgtccaagcggggcggctgggtgtgggtgcagagctacg

SEQ ID NO: 550812 - DNA, 201 bp, Homo sapiens
cactccgcacctggacaggccttcccagggcatagtcattgccaccctgaggaaaaaaggaaatggtcctgtcccaaatggctggcttacctgttgccagyttatttaaactttttaaggattaacaggaatgactcgaaagaagaatatttagttttattatttttcttaaatgaaatcctgtaataaacttttcaggga

SEQ ID NO: 550813 - DNA, 201 bp, Homo sapiens
gggtttgatgggggatttgggggctccctgggcccattgaatgtctgaaaggggatagtgtaactgatcattctcattcacatgcctgacttaacaaatgyggatcatgattttaaaagtcacattttaaactacatatagggactaaatatttcttcacattgtgtactatcagagtgatttttcaccgtgactgaagac

SEQ ID NO: 550814 - DNA, 201 bp, Homo sapiens
gaggtggaggttgcagtgagctgagacagtgccactgcactccagcctgggtgacagagcaagactccatcacttgttctgtgccaagtgaactttggtartgtggtcattagcagatagaccagttgaacgtcacggcctccacattatgacaaaaaaaaaaaaaaaaagaaagaaggaaaagaaaggaagggagggagg

SEQ ID NO: 550815 - DNA, 201 bp, Homo sapiens
aaatgatatggaagtttttctcttcctcttctctgcttttatcaaaccaagtctcccaaatacagtttactaaggcttggcacttgtgcctatgtgactcrtgggattagtgtacttgtagaatgggaactactgttgggaacaggaaatttactattttccataattattaggttgatgcaaaagtaaatgcggtctttc

SEQ ID NO: 550816 - DNA, 201 bp, Homo sapiens
gatagattacgggagaatgccgcctttctggaaatcactaggacatgttttttcagaagtagctaacttagaaaagaccacattggtgaccagggccaggmcccctgccttttgacctggcctgtcccaggagccacggatcccttagatttgcatctgccatacccgtgaacatcttgggcccctcatataaccaaggaa

SEQ ID NO: 550817 - DNA, 201 bp, Homo sapiens
gagcccggcggccccggcccaggcgggaagcgcaagccagcccgcccagaggggttgccgcggcctggcgtccagagctggggcgtctgagggaggttgcstgagggtcttcggcttcggcgctggcttggggcgaggggccagggccttggcggcccaggcgaccaaaccctctcctggtccagggctgggtgagggcga

SEQ ID NO: 550818 - DNA, 201 bp, Homo sapiens
aactatttctatgctcagcggtgaaagccaagtgctaggctgcagggggagccaggaggagggggcctgccctgggcatagcttcggatcccatcacagarcctagtgaggagcatgggggcggatggtgatgccccccatcctgaatagggtgcaaagagggtgcacaccccccatcaagaatataaacttgtgctatcc

SEQ ID NO: 550819 - DNA, 201 bp, Homo sapiens
gcagccaagctgccccagccagggtggacccctctgctccctcttttctgacttgggagccacttctgagaggtggctggaaggacatcagctgcccaaartcattatcagagacatctaggaggatccaactggtttcccccttgtttcgtctcctagttttcctctgggccttctaggaaacccctgagactgatgaat

SEQ ID NO: 550820 - DNA, 201 bp, Homo sapiens
aaaaatgttactccaagtagggatctgtaggttttgtgctgtggcacaaatcattaagaagccctggtcattacacaaatgactccttaaatttcaattgygatgagtgctaggaagatacagaaggacttattccaggggccctggccttttaactccctccaaccatccagtgaggccaacaggcctcttgacaaatgg

SEQ ID NO: 550821 - DNA, 201 bp, Homo sapiens
atttttctctttttatgtggaaaatagaattgattgattataaacacaataattaagaaggaccaaaatattggataggtgacaaatctgcctccggttcrtgatcggctccacggaaggaaatccaggcagcctcacaagttgaagtactctatttcctcatgatcataatgcagcaggaaaactttgcatcataatttt

SEQ ID NO: 550822 - DNA, 201 bp, Homo sapiens
caggtgggtattgcctaattttatgtgcaaccaaaatattaaacgaagtgacagcagattttgacagcctcacccaacttgaaaatgagtctgtttaagtktttgcttttgtgtaagaacataaccctaaattgcaaaatcctcttctcaggacatcctgcaggggttttcttctccatattacgttttacttttttactt

SEQ ID NO: 550823 - DNA, 201 bp, Homo sapiens
gaaagaggttttcacaaatgttttaaactcatcgttctaaaatcaagtgcacctacaccaactgctctcaaaatgtgaactgacttttttttttttttttttgccaaccctgtgtcacttagtgaggacctgacacaatccctacagggtgtctgtcagtgggcctcatggtaagagtcacaatttgcaaatttaggaccg

SEQ ID NO: 550824 - DNA, 201 bp, Homo sapiens
ggcctggcagcgcctgaggggcacagctcagagtcgacgaagaaagggcctttgtctgagttcatgtcctcctcgggcgcagtggcgcccctgccgtggayggctggtcggcctcggagtggacaacacttccacagggagcactatgtggacaggacagctggccttctggccacccagtcccctcagatcgccagcaag

SEQ ID NO: 550825 - DNA, 201 bp, Homo sapiens
ggaaagaggttttcacaaatgttttaaactcatcgttctaaaatcaagtgcacctacaccaactgctctcaaaatgtgaactgacttttttttttttttttttgccaaccctgtgtcacttagtgaggacctgacacaatccctacagggtgtctgtcagtgggcctcatggtaagagtcacaatttgcaaatttaggacc

SEQ ID NO: 550826 - DNA, 201 bp, Homo sapiens
attaattaatttttttgagacagagttccgctcttttgcccaggctggaatgcaatggtgcgatctcagctcactgcaacctctgcctcacaggttcaagygattctgcctcagcctcccaagtagctgggattccaggcacccaccaccatgcccagttaatttttgtatttttagtagagatgcggtttcactatgttg

SEQ ID NO: 550827 - DNA, 201 bp, Homo sapiens
tgggtactgagagccacttttcttcaaagagccgaagtgggaaattaatatgcccagggctcgatgagaacacaaaggggttgtgtcacataagccccagraaaatgcttccatttctctagagagcttaaggctttccttttagtcacaatatcttagggcgttatcctgtcttctggggggtctgaaccaatcctcccc

SEQ ID NO: 550828 - DNA, 201 bp, Homo sapiens
aggatcacttgaacccgggaggtggaggttgcagtgagctaagatcacatcactgcactccagcctgggtaacagagtgagactgtctcaaaaaaaaaaaagaaaaagaaaaaggatgatgtgcctcagaaaagcagcacaccagcccctgcttaagaagacagctcttggaagttcctccacgcctctctcgaggcaggt

SEQ ID NO: 550829 - DNA, 201 bp, Homo sapiens
tcccttttgttggtgcaataatcatccatgatacacacttgaatctcaagccccaagtgtggcttcctccaccccgtgattaagtacggctgcctgttgtyggttctcaagcagccacgcgcaccctttcagggagactctagcaggtgtaggatcaggaagttgcctggattctagattgtggatgtggaacctaaactc

SEQ ID NO: 550830 - DNA, 201 bp, Homo sapiens
gacagagcaagactccatcacttgttctgtgccaagtgaactttggtaatgtggtcattagcagatagaccagttgaacgtcacggcctccacattatgacaaaaaaaaaaaaaaaaagaaagaaggaaaagaaaggaagggagggagggagggaaggaaagacggaaggaaggaaggaagggaaggaaggaagaaaagaa

SEQ ID NO: 550831 - DNA, 201 bp, Homo sapiens
ggcccagatggcatgtcctctgttcttgctctgccttctgttggctcagggacgttagaggacaggttgccagtgtcgagtgggagggggacggcaggccygcaggccgctaggtccacagatgcgtggtgtgctgggctccgtgtggactgggacccgggaactcgatactcccagggtgtcgctgttgctcttccctcc

SEQ ID NO: 550832 - DNA, 201 bp, Homo sapiens
gagatggagtctcgctctgttgcccaggctggagtgcagtggcatgatctcagctcactgcagcctctgcctcctgggttcaagcaattctcgtgtctcakcctcccaagtagctgggattacaggtgcccaccaccacgcctggctaatttttttagttttaatacagacagggttttgccatgttgagcaggctggtct

SEQ ID NO: 550833 - DNA, 201 bp, Homo sapiens; identical to SEQ ID NO: 393819

SEQ ID NO: 550834 - DNA, 201 bp, Homo sapiens; identical to SEQ ID NO: 393825

SEQ ID NO: 550835 - DNA, 201 bp, Homo sapiens; identical to SEQ ID NO: 393851

SEQ ID NO: 550836 - DNA, 201 bp, Homo sapiens; identical to SEQ ID NO: 393852

SEQ ID NO: 550837 - DNA, 201 bp, Homo sapiens; identical to SEQ ID NO: 393860

SEQ ID NO: 550838 - DNA, 201 bp, Homo sapiens
ccttcatctctcctagcctctggaactatgagacaatgtctgttatataagccactcagtttgtggtagttgtttttctggtttgtttgtttttctgagacagagtctctctctgtcagccaggctggagtgcaatggcacgatctcggctcactgcaacctccacctcccgagttcaagcaattctcctgccttagcctc

SEQ ID NO: 550839 - DNA, 201 bp, Homo sapiens
tctccactgctacccttctacgtagaactgaaagaagtccaagaattccacatttcaacctgccttccaggtctttatgaaggtatatttgttaagacagkatgatagagccttggttgtttggaaccctggaacgtgggttgaatctggcacatgtaattagccgggcatggtggtacacccctgtagtccaagctactt

SEQ ID NO: 550840 - DNA, 201 bp, Homo sapiens
aatatatttatggagtcttttctatcagcccacatatttaacaattccaatggttttctttttttcttttctttttttttttttttggtgacggagtctcrctctgtcgcccaggctggagtgcagtggcgtgatcttggctcactgcaacctctgcctcctggattcaagcaattctcctgccccagcttcccgagtagc

SEQ ID NO: 550841 - DNA, 201 bp, Homo sapiens
ccccatcacctgggccatattggcttcaaattggctatatttgaagaattgtcttgggccacacataaaatacgttaacactaatgatagctggtgagctaaaaaaaaaaaaaaaaaaaaaaaaatcgcaaaggcaatctcacattttaagaaagtttatgaatttgcattgggctgcacccaaagccttcctgggccaca

SEQ ID NO: 550842 - DNA, 201 bp, Homo sapiens
gtagttgggactacagggacgtgccaccaggcccagctaatttttttgtttcttcactagagacggggttttgccatgttggccaggctggtctcaaacgmctgacctcaggtgatccacccacctcggcctcccaaagtgctaggattacaggcatgagccactgtgcccagctggaaactcccatttttaaaaccacca

SEQ ID NO: 550843 - DNA, 201 bp, Homo sapiens
gcatggtggcacacccctgtaatcccagctactcgggaggctgaggtggaagaattgcttgaacctgggaggtggaggctgcagtgagccaagatcgtgcyactgcactccagcctgggtgacagagtgagaccctgtctcaaaaaacaaacaacaaaaaaaatgatatataaggtcgggcatggtggctcatgcctgtaa

SEQ ID NO: 550844 - DNA, 201 bp, Homo sapiens
tgatccacccacctcggcctcccaaagtgctgggattacaggcatgagccaccgcacctggttgagatcggatgtttttaaaaaaggggagtttccctgcrcaagcttctctctctttgcttgctgccattgcacgtaagatgtgacctgctcctccttgccttctgccgtgattatgaggcctccccagccatgtggaac

SEQ ID NO: 550845 - DNA, 201 bp, Homo sapiens
atcttgattcaacagaatgtatgctaagtacccaggccttctagggtatgcttgcttatcttattttctctttttttttttttttttttttttttggagamagggtcttgctgtgttgcccaggctggagtgcagtggcacaattacagctcactgcagcctccctctcccaggctcaagagatcctcccaccttagcctc

SEQ ID NO: 550846 - DNA, 201 bp, Homo sapiens
tggagaaagggtcttgctgtgttgcccaggctggagtgcagtggcacaattacagctcactgcagcctccctctcccaggctcaagagatcctcccacctyagcctctggagtagctgggactacaggtatgtgccaccacgtctgaaaaaaagtacttttgtacttttttgtagagatggggtttcaccatgttgcccag

SEQ ID NO: 550847 - DNA, 201 bp, Homo sapiens
gcaaacatggccgcccccacgtatccccacgtgtgtagaacatcatggtgctctgcatttgcatattaaaaggctagggtgggtggaccagctttttcccgggctgcgtgaatgacatgcctggtcaaaccaatcccctgagccctgtgcaaatcagacaccgcctcctccagcctctatataaacttagctggttttcac

SEQ ID NO: 550848 - DNA, 201 bp, Homo sapiens
cgggcggatcacgaggtcaggagatcgagaccatcctggctaacacggtgaaaccccgtctctactaaaaatacaaaaaattagccgggcgaggtggcggkcgcctgtagtcccagctactcgggaggctgaggcaggagaatggcgtgaaccccagggggcggagcctgcagtgagccgagattgcgccactgcactcca

SEQ ID NO: 550849 - DNA, 201 bp, Homo sapiens
gccttctcccttcttgcctattaaacttgcctattaaaaccactccacggccgggcgcggtggctcacgcctgtaatcccagcactttgggaggccgaggygggcggatcacgaggtcaggagatcgagaccatcctggctaacacggtgaaaccccgtctctactaaaaatacaaaaaattagccgggcgaggtggcggg

SEQ ID NO: 550850 - DNA, 201 bp, Homo sapiens
gtgctgccatgtccagcctactattttcatagcatatctttttccatgtttttactttccacctatttgtgtctttgaacctaaggtgtaactcttgcagrctgcctatagttagattttgccttttttatccaatccaaatatcttgttttttattggaatgtttagaccattcacatttaatgtaattaataagtttgg

SEQ ID NO: 550851 - DNA, 201 bp, Homo sapiens
gtcaaaccaatcccctgagccctgtgcaaatcagacaccgcctcctccagcctctatataaacttagctggttttcactccacttggtgtctactctttcrgctttggagcctctctgcctcttgtctctgtacgagggagcttcttccttctgccttctcccttcttgcctattaaacttgcctattaaaaccactccac

SEQ ID NO: 550852 - DNA, 201 bp, Homo sapiens
agggggttgtttgtttgatttttgagacagggtctcgctctgtcacccaggctggagtgcagtggcgccatcatagctcactgcagcctccacctcctggrttcaagccatcctcctgcctcagcctcccaagtacctgggaccacaggcatgtgccaccacacctggctgatttttgtattttgggtacagatggggttt

SEQ ID NO: 550853 - DNA, 201 bp, Homo sapiens
gatcacgaggtcaggagatcgagaccatcctggctaacacggtgaaaccccgtctctactaaaaatacaaaaaattagccgggcgaggtggcgggcgcctstagtcccagctactcgggaggctgaggcaggagaatggcgtgaaccccagggggcggagcctgcagtgagccgagattgcgccactgcactccagcctgg

SEQ ID NO: 550854 - DNA, 201 bp, Homo sapiens
ccatgcctggctaagtttttgtatttttagtagagatggggtttcaccatgttggccaggctggtctcgaactcctgacctcaagtgatctgccagcctcrgcctcccaaagtgctgggattacaggtgtgagccaccacacccggccaagaaccactgtttagaacaccacttgagtacccggatcctggaatttcctgc

SEQ ID NO: 550855 - DNA, 201 bp, Homo sapiens
gtggcaaatacctgtagtcccagctacttgggaggctgaggcagtaagatttatagagccagggagatcaaggatgcagtgagctatgattgcaccactgygctccagcctgggcaacagagtgagactccatctctgaaaaaactaaattaaattaaaaataaaaatactacataccaaaacttatgggttgaatcaaaa

SEQ ID NO: 550856 - DNA, 201 bp, Homo sapiens
cactgacttcaagaatgaagccgtggaccctcgcggtgagtgttacagttcttaaaggtggcgtgtccggagtttgttccttctgatgttcagatgtgttyggagtttcttccttctggtgggtttgtggtctcgctggctcaggagtgaagctgcagaccttcgcggtgagtgttacagctcttaaggcagcgcgtctca

SEQ ID NO: 550857 - DNA, 201 bp, Homo sapiens
aaaaattggccaggcgcagtggctcacacctgtaatcccagcactttgggaggctgaggcgggcaggtcacaaaggctgaggtgggagtatcgcttgagcycaggagttcaagaccagcctaggcaacatagcaagaccccgttcaatatttaggaacaaatttaactaaggggtgaaacacttataaacagaaaactaca

SEQ ID NO: 550858 - DNA, 201 bp, Homo sapiens
gtgttacagttcttaaaggtggcgtgtccggagtttgttccttctgatgttcagatgtgttcggagtttcttccttctggtgggtttgtggtctcgctggmtcaggagtgaagctgcagaccttcgcggtgagtgttacagctcttaaggcagcgcgtctcaagttgttcattcctcccggggggttcgtggtctcattgg

SEQ ID NO: 550859 - DNA, 201 bp, Homo sapiens
tagaaaacttaatgttgttaaaatgtccaatgctacccaaagtcatctacagattgaatgcattccctatcaaaactgcaatggcattttttacagaattaaaaaaaaaaaagcaattctaaaattcatgtgaggccaaaaaagaccccaaatagccaaactaatcttgaaaatgaagagcaaagctgaaggcatcacact

SEQ ID NO: 550860 - DNA, 201 bp, Homo sapiens
gcgtctcaagttgttcattcctcccggggggttcgtggtctcattggcttcagcagtgaagctgcagaccttcgtggtgagtgttacagctcataaaggcmgtgtggacccaaagagtgagcagcagcaagatttattgcaaagaaagacaaagcttccacagtatggaaggggacccaagcagcttgccactgctggctc

SEQ ID NO: 550861 - DNA, 201 bp, Homo sapiens
attcaacagaatgtatgctaagtacccaggccttctagggtatgcttgcttatcttattttctctttttttttttttttttttttttttggagaaagggtyttgctgtgttgcccaggctggagtgcagtggcacaattacagctcactgcagcctccctctcccaggctcaagagatcctcccaccttagcctctggagt

SEQ ID NO: 550862 - DNA, 201 bp, Homo sapiens
aattccagcacttcgggaggccaaggtgggcgaatcacctgaggtcaggagttccagaccagcctgaccaacatggtgaaaccccatctctactaaaaatmcaaaaaaaaaaaaaaaaaaaaaaaaaattagctgggggcatgcctgtaatcccagctactcagaaggctgaggcagaagaatcgattgaacccaggaggt

SEQ ID NO: 550863 - DNA, 201 bp, Homo sapiens
cccacgcacacctggagctccagctggcccggaagtgcccgcacagcccctgttcccgctcatgcctctccctccacacctccttgcaagctgagggagcyagctccggccttggccagcccagaaaggggctcccacagtgcagcggtgggctgaagggctcctcaagtgctgccaaagtgggagcccaggcagaggagg

SEQ ID NO: 550864 - DNA, 201 bp, Homo sapiens
tgaaaccccatctctactaaaaatacaaaaaaaaaaaaaaaaaaaaaaaaaattagctgggggcatgcctgtaatcccagctactcagaaggctgaggcaraagaatcgattgaacccaggaggtgggggttgcagtgagccgagatcgtgccattgcacatcagcctgggcaacaagagtgagactccttctcaaaaaaa

SEQ ID NO: 550865 - DNA, 201 bp, Homo sapiens
ctggagtgcagtggtgtgatcttggctcacttcaagctcaacctctcaggttcaagtgatcctcccgcctcagcctcccgagtagctgggattacaggtgygcaccaccacacctggctaatttttgtatttttagtagagatggggtttcaccatgttggccaggccagtctcaactcctgacctcaggtgatccacctg

SEQ ID NO: 550866 - DNA, 201 bp, Homo sapiens
caaattcattttataggtcattatacccaaacattatccaggatatagagactatagaatccacctagcggtgtggccgacacagcttgcagaggattcartaccactctgaaaatagtaaaggtgtctatggtttacagtacgatgatgaaaaaattatcagtggcctacaagataattaagatttgggataaaaccagc

SEQ ID NO: 550867 - DNA, 201 bp, Homo sapiens
gagtaaattgtagtgttaggccactgccttcatccatgttgtgctgctgtatgagaatagctgaggatggataatttgtaaagaatagacattgattactmacaactctgaaggctgggaagtgaaagatcaaggtgctggggtgctgcgaagtttggctgcatccttcagaggggaagaacgctgctcctcacatggcaa

SEQ ID NO: 550868 - DNA, 201 bp, Homo sapiens
ttactaaatgttcctcgttgtctccagtaatatttcttgacttaaagtttatgttagctgatagccacataactaatgactgcaactctcttatggttacttttttttttttttttttgagacacggtctcactctgtctctgtcacccaggctgtagtgcagtggcccaattacggctcactgcagccttgatctctgag

SEQ ID NO: 550869 - DNA, 201 bp, Homo sapiens
gacccttatgaagggcagtcataattttgatcatgtcacgttcatgctggagaaagagtgagccaactatgaaatggccactgggacaaatatggtcttakgtggtcaatctacggacccctagatttgaaagaccataacagactcttgtctgaggatgtcagctgaagcctcaaaccgagaatataagtgacaagtgac

SEQ ID NO: 550870 - DNA, 201 bp, Homo sapiens
tgagatacaaattgctcaaagtatatatgccagctcacaagttgttgccaaattgtgtttcaaaatggttgtgcttacagcctggccaacatgacaaaacygcatctctactaaaaaatacaaaaattagcggggcttggtggcgcaccgctgtaatctcagctactcgggaggctgaggcacaagagtcacttgaaccca

SEQ ID NO: 550871 - DNA, 201 bp, Homo sapiens
tatggatggacttgtagatgttttcaattatttgctattagaacagatgtgtattttctatggacatgtatatattcttatggacttgtggaatgcttctsagatacaaattgctcaaagtatatatgccagctcacaagttgttgccaaattgtgtttcaaaatggttgtgcttacagcctggccaacatgacaaaaccg

SEQ ID NO: 550872 - DNA, 201 bp, Homo sapiens
taggggtgagctgaagacccccacccaattctggtattgacccagagggaaactcagttggaaacttctgggatatgttcttttccttttaaaaaagatayacaggccgggtgcggtggctcatgcctgtactcccagcactttggaaggccgaggcagacgaatcacgaggtcaggagttcgagaccagcctggccaaca

SEQ ID NO: 550873 - DNA, 201 bp, Homo sapiens
tctgatagacctgattttgttctagtgtctatccttccttatgtggccagcggaaatttcagttgtctaaaccagccatggtcattcattctgcttatcartgatgagtttaggggtgagctgaagacccccacccaattctggtattgacccagagggaaactcagttggaaacttctgggatatgttcttttcctttta

SEQ ID NO: 550874 - DNA, 201 bp, Homo sapiens
ggtgggcaaaaaggtagaccagaaatttttttttttttagatggagtgttgctctgtcgcccgggctggagtgcggtggtgcagtcttgactcactacagmctcaccccgctgggcttaggcaattctccaacctcagcctcccaagtagctgggactgcagtttcaataattctctctagacctcagctgcaaatcaaag

SEQ ID NO: 550875 - DNA, 201 bp, Homo sapiens
attatgggttgaattgtgccccatccccaaatacatatgttaaagttttatttttttggacggagtctcgctctgtcacccaggctggagtgcagtggcgkgatctcggctcactgcaagctctgcctcccaggttcatgccattctcctgcctcagcctcccaagtagctgggatgcccgccaccacgcccggctaattt

SEQ ID NO: 550876 - DNA, 201 bp, Homo sapiens
gtttataggcctcatatgtggtggggctgctgttttaaaagtctcatcagtgcagattttacttattgcatgaagattggtatttaagttgagatgaaggrtagtatattttgtttgagatcattacacttgtgaagagttaattgagttgcatgtttttcacgtattatttagtcatacctttatcatgacaggatgatt

SEQ ID NO: 550877 - DNA, 201 bp, Homo sapiens
accttcatctctcctagcctctggaactatgagacaatgtctgttatataagccactcagtttgtggtagttgtttttctggtttgtttgtttttctgagacagagtctctctctgtcagccaggctggagtgcaatggcacgatctcggctcactgcaacctccacctcccgagttcaagcaattctcctgccttagcct

SEQ ID NO: 550878 - DNA, 201 bp, Homo sapiens
acagaagaaaggttggtgtttctgaatttatcattttttttcaaaatatcaatatacctaattaaaaccaggaaacaagtcatagttcttttggactgtcwttttttaactgttctcagtattttagggaataatgtattgttttatttcctctgacttaatgtggttgtagctgagagggaaagacagttttaaactaat

SEQ ID NO: 550879 - DNA, 201 bp, Homo sapiens
attgtgtttttagcatattgttgctttgaaatccagggtaaaaaatgtaactgttagcacttacatctttaacatttagcattgtagaacaaacctacgcrccagctgaatgtgtaagccaggccatagacatcaatgaaccaataggcaatttaaagaaactgctagaaccaagactacagtgttctttggatgctcatg

SEQ ID NO: 550880 - DNA, 201 bp, Homo sapiens
tcgatttttattaacatagcttatattttgtagagggctgtgtgccagtcattgtatactaagcactttacaaagattatccctttaatcctcaacaatgrtatgagggtataagcactgttaacctcactttatagatgaggaataaaagctttgagaaaatatgactcctgtggtctcaaaaatgttaggttttgaatc

SEQ ID NO: 550881 - DNA, 201 bp, Homo sapiens
caagggacttaatctaatgattgcactgaaataatcttactcattttatccatggttagctggatccagaacgaagtttatttgaccaaggagtaaaaacrgatggaactgtacagcttagtgtacaggtaatttcttaccaaggtaagttacttttcatgatagttatttaaaattttagctcatgtttttctgatacaa

SEQ ID NO: 550882 - DNA, 201 bp, Homo sapiens
agcgtttacatagtgaaataataaagatgaagacatgacttcatcatataggattctttacaagacagaaaagaagtggaatatatgtattaatttttttkatattatcgatttttattaacatagcttatattttgtagagggctgtgtgccagtcattgtatactaagcactttacaaagattatccctttaatcctca

SEQ ID NO: 550883 - DNA, 201 bp, Homo sapiens
catctctatagaatgcagcagtaaactagatttctagaatgattgccggaactctgcttgtgtacgtttagaaacattgtctctttgcaatgtcctttacstgtttttctgtatcctctgtttcttttagaccttttccttagacttaaagctccctattgggcttggataatttatctgaaatttggaaagcgtttacat

SEQ ID NO: 550884 - DNA, 201 bp, Homo sapiens
gtgtcttattttttataaaattattttaaacttgtagaaaagttgcaagactagtaaaagaattcttgaatatccttcacccagattccccaaatgttaayttttactacatttgctttattcgatgtagtttttctctaccatttgggaacatataaactaaattattttttggtgacttctgcgttttcatttagattt

SEQ ID NO: 550885 - DNA, 201 bp, Homo sapiens
ggtaccaccacagttgctgtctcttaaacatctttcattaaaacattactgtctagtttgagaatacttttaagcctgctgagctcttttggggcattttyccccccttttcagcatgcatctttcttttccgcttatgccataagcttttagctatgttttacctgaggtacgaacacacacgtcacaagatcatcccaa

SEQ ID NO: 550886 - DNA, 201 bp, Homo sapiens
attttctcttggcatgtttgggtttgggtaccaccacagttgctgtctcttaaacatctttcattaaaacattactgtctagtttgagaatacttttaagmctgctgagctcttttggggcatttttccccccttttcagcatgcatctttcttttccgcttatgccataagcttttagctatgttttacctgaggtacga

SEQ ID NO: 550887 - DNA, 201 bp, Homo sapiens
taataactggatattaggtagcatccaattgaaatatcagtataggttggatacagcagagaaaatattcaagtgtccaaaacaaacttgaggagttacartgggtttgaaatgaagaaaaaaggccaagttaaaataggaaaacaaatagttttcatttggtgggagttgcaatcaaagtatacagttgtatacattcta

SEQ ID NO: 550888 - DNA, 201 bp, Homo sapiens
ttatttgataccgcaaggtaataaaaaggaaaattatttaaaaaaattttttttctacacacaaaatatcttttgttctgtggaatgaaagctcgacacargtactttataagatccactcatgtgtttttaaatgatacgattaacataacagcttgctttgtatctcagttcaccaaaatttgttaggacatcatttgt

SEQ ID NO: 550889 - DNA, 201 bp, Homo sapiens
ttacaaaacactctaattctctcacgtaatcttcacatcagtctttgaaatcagcatatttttagtcacattctgcagatgtagaaacagatttaaagagkttaaataatttgcccaatgtgtggctacaaaagggtatactggaatttgaacccagacctctgtggctccagaactctcttcacttgtttgagacgaaaa

SEQ ID NO: 550890 - DNA, 201 bp, Homo sapiens
gttttcccggtgtccacatgtgtggggtgcactcatttaactggccccccaaatgaaagagagaccctggaggttctaaccacaccatctactttaaatcwgtctccttattttcagctttaagcctcttgctactcagaaccaccatgacttgaaccagtgaagggggttctgcaggcaggaattctctcacttcttact

SEQ ID NO: 550891 - DNA, 201 bp, Homo sapiens
tagccagactgtctccaaaaaatagaaaaaagagctgggcatggtggcatacaccaatatcctaggaggctaagctgggaaaattgcttgagctctggagyttgaggctatagagagctttgatggcaccactatactccagcctgggtggcaaagcaagactgtctaaaaaaaaaaaaaaaaaaaaagggcaaagaaaag

SEQ ID NO: 550892 - DNA, 201 bp, Homo sapiens
ctgagaaagtcaaagaatgctgactgatatctattaaatttgatgatcagaggattattcttaaatttagacagaagtaactagagttggcgagacaaaayagaattataagaaatagatatcttagaaatgggggcagatgaggaagaatgctggggtaacaaataaataatactgatcttccaagagttggcggggacc

SEQ ID NO: 550893 - DNA, 201 bp, Homo sapiens
ccttcagttctggatgttcttactgcattattttgataaatacctgtgttctttttgctggaactcctgttgaatctcttgagttgatctgctgcatcttwtttcttgtttatttttcatcttacctatctgcactactttctgccagattttcttgtgtttttaatataacctatctgatttttaatttacaagggctct

SEQ ID NO: 550894 - DNA, 201 bp, Homo sapiens
atatatgtgtgtgtatgtttttaaagctaaaaacattacttttagatccctagaatgaaaatttttttctcatctatgcaattcccatatggtttttttttaaatcatattttattcattttctccctttagcaattttcattttatttctcataatttgaacagagacagttctcatacatgatcagatgcttttttttt

SEQ ID NO: 550895 - DNA, 201 bp, Homo sapiens
ttcatattattaagctcttcctgcagttgatatctgagcagagtaagatttgtatttccatttttacttttttgaaagagaatatatggacagattattartacaatttgggcactgtggttttaagaatatctgagtaaaataacaatatgaaataataaacagaagctctaacgtcaggtaacaaatagacagcaagaa

SEQ ID NO: 550896 - DNA, 201 bp, Homo sapiens
aatcctaagaggcagggatcttaaggacaaggaagagaagagagagagggagggatctttgatctctttctctggtaatcttaatgcataattttactaawacatgttctcaattcattcatattattaagctcttcctgcagttgatatctgagcagagtaagatttgtatttccatttttacttttttgaaagagaata

SEQ ID NO: 550897 - DNA, 201 bp, Homo sapiens
gtattgagagtacagttgagatttaaaatcttaaatttttaatagagcttttcaacttgtttatcccagtttttccagcataagaaagagggaatgcatgyttctgtggaatttcatgtatagatatttgtgttagaaattaccccaaaattcagaaactaaaaatgcgtaacattcagccagatgcagtggctcatgcct

SEQ ID NO: 550898 - DNA, 201 bp, Homo sapiens
ataaatgaagtatctctaggaaacagtctggcttaactatttttgaaaatataactgtttcccctctctgctgctttagatgttgctttacatagaaccagaaaatggaatttctcagctaaagcatgtgtgcctgtttcatctaatcaagcagagctaaaatgttcataccgaataaatttatattaataaattactaaa

SEQ ID NO: 550899 - DNA, 201 bp, Homo sapiens
aggttcattgtggaatagtttaacagtcaggaaggctaaactggtcagtattaatgtgtagccctaccaaaaatagccagtagtatctgaaaatgaaaaawaaatgaagtatctctaggaaacagtctggcttaactatttttgaaaatataactgtttcccctctctgctgctttagatgttgctttacatagaaccaga

SEQ ID NO: 550900 - DNA, 201 bp, Homo sapiens
ttattgtaagaagtctcattttttctgaagtctctaatttttttttctctttttgaagatattattacgatggggacatgatttgtaaagttcaaggcaaragatttgtgtacaagtttgtctgtgacttgaagactcttattggatacagtgcagcggagttgaaccgtttggtcacagaatgtgaacagaagaaacttg

SEQ ID NO: 550901 - DNA, 201 bp, Homo sapiens
ttctttttttctaatgatgtttataggtagggtttgtgtgtgtgtcttattttttataaaattattttaaacttgtagaaaagttgcaagactagtaaaakaattcttgaatatccttcacccagattccccaaatgttaacttttactacatttgctttattcgatgtagtttttctctaccatttgggaacatataaac

SEQ ID NO: 550902 - DNA, 201 bp, Homo sapiens
gcagctgacttcctaagagtacctcagccacactgcagaactggactgctaaggaagctgctgccctgccatgatctggaaaatacaacacctggaagctrccatggtagctgtcactttaaccatgttgcctttacagtgatccacactagtcaaaaaaatagatgtctgctggctgcgggggctcacgcctgtaatcct

SEQ ID NO: 550903 - DNA, 201 bp, Homo sapiens
atcagagagagtactggaagtcagcaggttgcagctgacttcctaagagtacctcagccacactgcagaactggactgctaaggaagctgctgccctgccrtgatctggaaaatacaacacctggaagctaccatggtagctgtcactttaaccatgttgcctttacagtgatccacactagtcaaaaaaatagatgtctg

SEQ ID NO: 550904 - DNA, 201 bp, Homo sapiens
cgtacacagtttgtcttctcccctgttcaagttagattcatagtcatttgtcatgtgtttgtgccatgacgacaccatcagttgaattcttgggaatgcgwgtaggacatgcagctttatgacatgcagacacagttataaattatgcaagatgattataatggaagcctgtctttaagctgatgacagaaagtgtctgaa

SEQ ID NO: 550905 - DNA, 201 bp, Homo sapiens
ccgtacacagtttgtcttctcccctgttcaagttagattcatagtcatttgtcatgtgtttgtgccatgacgacaccatcagttgaattcttgggaatgcsagtaggacatgcagctttatgacatgcagacacagttataaattatgcaagatgattataatggaagcctgtctttaagctgatgacagaaagtgtctga

SEQ ID NO: 550906 - DNA, 201 bp, Homo sapiens
tgtctacaaggttacaaggtttttttttgttttgttttgtttttttggagatggagtcttgctgtattgcccagactgagtgcagtggcgctcactgcaaygtccgcctaccgggtctaagcaattttcatgcctcagcctcccaagtagctgggattacaggcatgcgccaccactcctagctaatttttgtatttgtgt

SEQ ID NO: 550907 - DNA, 201 bp, Homo sapiens
cagtgtcactggactttgcctggttttgctcatatgtaaaataaaggagaatctggacttgatctcttagttgtctttcagctgtaacatttattgctttytttataacacttgacctatccaaaatgaaagtatggcctgcagattacccaggctcttccaagttctcagaaaataatagttggataaatggtaatattt

SEQ ID NO: 550908 - DNA, 201 bp, Homo sapiens
aacagtaggaagcccattgacttttgaagctgaagtgtatttctagccagcttttaacttctcaaacgtatcatttaactaaatgatttctacatttctgwtttacctttattttctctaacagtaagttttggataagaatttaaatatcaactgataggtcctggaatttattgtaaaaggattttacccatggtagta

SEQ ID NO: 550909 - DNA, 201 bp, Homo sapiens
caacaagaagactgaggaaagtagtagttaatggtccctattgtactccgtgaagtaggaggtgagataataagctgaaagtaaaagggattgaaaagtastagagatctctgtggagtaacaaaggtttagaagtttctgcagtggaactggacaagataattaaggttaaggaggatactgagtattgagagtacagtt

SEQ ID NO: 550910 - DNA, 201 bp, Homo sapiens
aagaccatggaggtcttatagctgttattgctttgtctttaccctcttgtatcttgaggtccatgaagatatcttgtcacctggttttatgtaaatgttcrtgggtttttggttttgttctccagtcacttttttatgtttatgtgtacaattcagaaaaattaaaaaactttgccaccatcttcctagaatcctcactta

SEQ ID NO: 550911 - DNA, 201 bp, Homo sapiens
ttttgctagaacttcttactgataaggacgctcgagactgcatttcttgggttggtgatgaaggtgaatttaagctaaatcagcctgaactggttgcacaraaatggggacagcgtaaaaataagcctacgatgaactatgagaaactcagtcgtgcattaaggtaagcctttattacttttttttctgttatcaaaaata

SEQ ID NO: 550912 - DNA, 201 bp, Homo sapiens
gtattactgtaaaatttaagtgtttagaaataaaaaggtttttaagcaaagttttctccatttaaagttatattttaaatatttagtactaaaacaaatgraacatttgttttttactttcacaaatataaaacgagaagtttaaataaattagaatcaaagcttaaatataagtagtaacagtaggaagcccattgactt

SEQ ID NO: 550913 - DNA, 201 bp, Homo sapiens
taccaatttaggaaacaatggccaaatccaactatggcagtttttgctagaacttcttactgataaggacgctcgagactgcatttcttgggttggtgatraaggtgaatttaagctaaatcagcctgaactggttgcacagaaatggggacagcgtaaaaataagcctacgatgaactatgagaaactcagtcgtgcatt

SEQ ID NO: 550914 - DNA, 201 bp, Homo sapiens
gctaatgctttgttcctcttaccaatttaggaaacaatggccaaatccaactatggcagtttttgctagaacttcttactgataaggacgctcgagactgyatttcttgggttggtgatgaaggtgaatttaagctaaatcagcctgaactggttgcacagaaatggggacagcgtaaaaataagcctacgatgaactatg

SEQ ID NO: 550915 - DNA, 201 bp, Homo sapiens
ggaccagtttgttgtctttgccttgggctaatctataacactatagctaatgctttgttcctcttaccaatttaggaaacaatggccaaatccaactatgrcagtttttgctagaacttcttactgataaggacgctcgagactgcatttcttgggttggtgatgaaggtgaatttaagctaaatcagcctgaactggttg

SEQ ID NO: 550916 - DNA, 201 bp, Homo sapiens
aaaaaaaatttctccttgtctgtctttgcagctgtgcaaattattccagcatcagtgcaatctgctacacctactaccattaaagttataaatagtagtgygaaagcagccaaagtacaaagagcgccgaggatttcaggagaagatagaagctcacctgggaacagaacaggtatttttgtattttcttgtatttataaa

SEQ ID NO: 550917 - DNA, 201 bp, Homo sapiens
aaattatttggatatactctttaagattaaacaagtgtatgagcaaggcactgttaggttctaaagatagaatggtttacaagacacatttcttgtatttmttagtgtgttgtgaggggacagctgagtaaaacaggcaattaccatgtttatttatttattggaaatgcatcataagggtaaatgcaggagcagccagct

SEQ ID NO: 550918 - DNA, 201 bp, Homo sapiens
aggaggcagaacatgggtggacaattagttatgttaaaccagaagtcctgatatttgagaaaacaaatcagacaaattatatttttccctgagttttttttatttttaaatttttatgtgaaattaactttgtttttcttttaaaagaggtgtgtttcaggatagcttttctatttaactctgcttctgttgttttcaagt

SEQ ID NO: 550919 - DNA, 201 bp, Homo sapiens
aaggaggcagaacatgggtggacaattagttatgttaaaccagaagtcctgatatttgagaaaacaaatcagacaaattatatttttccctgagttttttttatttttaaatttttatgtgaaattaactttgtttttcttttaaaagaggtgtgtttcaggatagcttttctatttaactctgcttctgttgttttcaag

SEQ ID NO: 550920 - DNA, 201 bp, Homo sapiens
gactctgacaatggtagttacgtacttctgatccttaattccctcaggactgattattgggaataggaaataaattagtagtttttatctttaaaagcctmgtgacctcttgatgcaagtatgtttaagaagagttcgcttaaagccattaaagtatgaaatctagatgaaggattaggaaatagattttaacaaaaaata

SEQ ID NO: 550921 - DNA, 201 bp, Homo sapiens
aaaggaggcagaacatgggtggacaattagttatgttaaaccagaagtcctgatatttgagaaaacaaatcagacaaattatatttttccctgagttttttttatttttaaatttttatgtgaaattaactttgtttttcttttaaaagaggtgtgtttcaggatagcttttctatttaactctgcttctgttgttttcaa

SEQ ID NO: 550922 - DNA, 201 bp, Homo sapiens
taagaaatagatatcttagaaatgggggcagatgaggaagaatgctggggtaacaaataaataatactgatcttccaagagttggcggggacctgagtgtrtttgtaaatgaaacagtattgtcgggtttttgtcctttttttattttttatttttagagacaaggttgtacctggggagcagggctgatgacagaaaggc

SEQ ID NO: 550923 - DNA, 201 bp, Homo sapiens
gaaaggaggcagaacatgggtggacaattagttatgttaaaccagaagtcctgatatttgagaaaacaaatcagacaaattatatttttccctgagttttttttatttttaaatttttatgtgaaattaactttgtttttcttttaaaagaggtgtgtttcaggatagcttttctatttaactctgcttctgttgttttca

SEQ ID NO: 550924 - DNA, 201 bp, Homo sapiens
attggatacagtgcagcggagttgaaccgtttggtcacagaatgtgaacagaagaaacttgcaaagatgcagctccatggaattgcccagccagtcacagyagtagctctggctactgcttctctgcaaacggaaaaggataattgagccccaggacattctgagactccaaagtctttcttaaaatgtttagagcaagta

SEQ ID NO: 550925 - DNA, 201 bp, Homo sapiens
aagctgtactttgattgaattttgatatagattgtaatagattcagtaagaaacagaagcagttatgtaatatgacagtgtcttagagctgtcattttagwctgaggttatttcgtaaagggctaattccattttgaatagataaataaaagtatatcttatagagagtactgcacacataatgaaataactgtttttatg

SEQ ID NO: 550926 - DNA, 201 bp, Homo sapiens
agtatacccttctggtatatcatcaagagcttaagaatcttggctttcatatttaaaatgcttttggggagacatatattaaaattttagccaagatgatrgacatgtctcaattatatatgtgtgtgtatgtttttaaagctaaaaacattacttttagatccctagaatgaaaatttttttctcatctatgcaattccc

SEQ ID NO: 550927 - DNA, 201 bp, Homo sapiens
tttcaggagaagatagaagctcacctgggaacagaacaggtatttttgtattttcttgtatttataaaatatatctatctaattaggtatattttgttgtwttttactgtatgaaaaatgtgaatttggactatccctctggcagtttttagacagcatttctagaaaaacaaaaattgtttttgccatggctgagattta

SEQ ID NO: 550928 - DNA, 201 bp, Homo sapiens
cagttttttaaaaaattagtttataaatgtcatttgtggattttctttattttatttttcaaacagggtctcttgtcgcccatactggagtgcagtggtgygatcatggctcactgcagcctcagcctcctgggctcaggtgatcctcccacctcagcctccgaagtattaatagctgggactacaggcgcgtgccaccac

SEQ ID NO: 550929 - DNA, 201 bp, Homo sapiens
cgttaaattcaagtttagtttgtatcccatcttgtgaaacattccgaaccccaggttggatttaatccagcagaaccagagtgtcaaagtatatgaaattkttctgtgcagttctggcgggggcagcccttagacggagaaactgcaagtaattttctctcagttttcctaagtattgacatagaagcctgaggaattggt

SEQ ID NO: 550930 - DNA, 201 bp, Homo sapiens
tgtcttcaaaacattagattaaatctttcatccatgcctgtcactttgtactcatgttcctatgattttgcatcttttaaaaattcctttactgttgtttyactagagtcttagagaaaggaggcagaacatgggtggacaattagttatgttaaaccagaagtcctgatatttgagaaaacaaatcagacaaattatatt

SEQ ID NO: 550931 - DNA, 201 bp, Homo sapiens
ttctaggctgtacagtctgatgcatgatttttttataaatatttcatactcttgtgaatttggatctttttactttgagcatatattttagaatatgtgtrtgttaaaggatctccacaatgtctgcagtgtgaaggcaggttcattgtggaatagtttaacagtcaggaaggctaaactggtcagtattaatgtgtagcc

SEQ ID NO: 550932 - DNA, 201 bp, Homo sapiens
cttgagctctggagcttgaggctatagagagctttgatggcaccactatactccagcctgggtggcaaagcaagactgtctaaaaaaaaaaaaaaaaaaaaagggcaaagaaaagagtttcaaacgtgtcaatatttatagatctttttgcagatacctgtcagcagtagaagataggggtgagcatttggggtaggtgtg

SEQ ID NO: 550933 - DNA, 201 bp, Homo sapiens
gcttgagctctggagcttgaggctatagagagctttgatggcaccactatactccagcctgggtggcaaagcaagactgtctaaaaaaaaaaaaaaaaaaaaagggcaaagaaaagagtttcaaacgtgtcaatatttatagatctttttgcagatacctgtcagcagtagaagataggggtgagcatttggggtaggtgt

SEQ ID NO: 550934 - DNA, 201 bp, Homo sapiens
ggcaggtgggtcacttgaggccaggagtttgagaccagcctggctaacatggtaaaacctgtttctactaaaaacacaaaaattagctgggcgtggtggtrcatgcctgtaatcccagctacttgggaggctgaggcacaagaatctcttgaacctgggaggcggacgttgcagtgagccgaaattgcaccagtgcactcc

SEQ ID NO: 550935 - DNA, 201 bp, Homo sapiens
cttcatttttgtttgttcctttctgtagcattctgatcttatattgccaatatcgtgttttctcctacttctctgagtatattgattatatatttttttttaacttttaaaaagctttaccgtggtatatctgtttcttgtggattctgtttttcttgtggtttttgtttgtgttgtttttaacctttcccaagtatctaa

SEQ ID NO: 550936 - DNA, 201 bp, Homo sapiens
tttaaatgtgttttaaactatccagaattaaatcaaaatcagaattttgatttaattctggatagttgaggagcctttgtattaataaattatttatttttattttttattttttccataggaattacagttcttaacacctttatactaggagcttaaaatattcaggatttgggtttttcttcatctcatttaaaatga

SEQ ID NO: 550937 - DNA, 201 bp, Homo sapiens
gtttaaatgtgttttaaactatccagaattaaatcaaaatcagaattttgatttaattctggatagttgaggagcctttgtattaataaattatttatttttattttttattttttccataggaattacagttcttaacacctttatactaggagcttaaaatattcaggatttgggtttttcttcatctcatttaaaatg

SEQ ID NO: 550938 - DNA, 201 bp, Homo sapiens
ggaaatctagtgctcagttcagaattgggagatgggcaggatgatgtgtaagggtatttctaacagactttctagaattcacaagtcttacttctcagaayagggttttttgagctcagtgtagttagtactctggtcccttctgtagagagaagtctgcagcctatctgcgaaaggcactgattctgggacagaactgtt

SEQ ID NO: 550939 - DNA, 201 bp, Homo sapiens
ggtttaaatgtgttttaaactatccagaattaaatcaaaatcagaattttgatttaattctggatagttgaggagcctttgtattaataaattatttatttttattttttattttttccataggaattacagttcttaacacctttatactaggagcttaaaatattcaggatttgggtttttcttcatctcatttaaaat

SEQ ID NO: 550940 - DNA, 201 bp, Homo sapiens
aatttaagctaaatcagcctgaactggttgcacagaaatggggacagcgtaaaaataagcctacgatgaactatgagaaactcagtcgtgcattaaggtawgcctttattacttttttttctgttatcaaaaatagaaactttctaaaaaatagtttcttattctagatgtaataagcattgttatgtaatgatattaaaa

SEQ ID NO: 550941 - DNA, 201 bp, Homo sapiens
ataggtttaaatgtgttttaaactatccagaattaaatcaaaatcagaattttgatttaattctggatagttgaggagcctttgtattaataaattatttatttttattttttattttttccataggaattacagttcttaacacctttatactaggagcttaaaatattcaggatttgggtttttcttcatctcatttaa

SEQ ID NO: 550942 - DNA, 201 bp, Homo sapiens
atgtatgaaaggtagcagcctaaataggattgcccatacagttttccatgaccttccttaaacatatgattaaatactagagttttatactttttttttttcttttttttgaaatggagtctcgttctgtcacccaggctttagtgcagtcgtgtagtttcgggtcactgcaacctccacctcccaggttcaaacgatcct

SEQ ID NO: 550943 - DNA, 201 bp, Homo sapiens
tttaatatagttaacagacccttaacttaattttgaggtaacttgttgattgcaattggtcccgaaaacatctcagtaaatccagtagattaatgaagttrtcatgtcaggttaataaacaccagttttttaaaaaattagtttataaatgtcatttgtggattttctttattttatttttcaaacagggtctcttgtcgc

SEQ ID NO: 550944 - DNA, 201 bp, Homo sapiens
tgcaacgtccgcctaccgggtctaagcaattttcatgcctcagcctcccaagtagctgggattacaggcatgcgccaccactcctagctaatttttgtatytgtgtatagacagggtttctccatgttgcccaggctggtctcgaacttcagacctcaggtgatccacctgccttggactcccaaagtgctgggattacaa

SEQ ID NO: 550945 - DNA, 201 bp, Homo sapiens
tggcgcatgcctgtagtcccagatactcgggaggctgaggcaggagaatcgcttgaactcgggaggcggaggttgtagtgagccaagatcgcgccactgcmccccagcctaggaacagagcgagactctgtctcaaaaaaaaaaaaaaaaaaaaacctaccaggctatagctgaagagtttggtaaaaaggcttacttaaa

SEQ ID NO: 550946 - DNA, 201 bp, Homo sapiens
ggagtctagcatgcatatatttatacatgcatgcacacagatggtccacaaagtctaaagtatgtactatctgaccttttgtggatagtctaggttaggcracagattggtaattaatatgtatgacctatgtgaaggaggcagtaattgtcgttcacctaacgtagatttttgctgtgcaagaatttaggtctagtagta

SEQ ID NO: 550947 - DNA, 201 bp, Homo sapiens
aatcttaagagtaattgttacaaaaaaagaaaaaactggcctgacacagtggctcatgcttgtaatcccagcactttgggaggccaaggcaggtgaatcaygaggtcaagagatcgagaccatcctggccaacatgccagtctctacaaaaaatacaaaaattagctaggcatggtggcgcatgcctgtagtcccagatac

SEQ ID NO: 550948 - DNA, 201 bp, Homo sapiens
acatacaaaaaaaaaaaaaatagcctggcctggtgacatgtgcctaagtcccagctactctggaggctgaggtgagaggattgcttgagcccaggagttcraggctgcagtgagccatgattgtgccatcgttgtgccattgcattccagctttagtgacaggacaaggtgcggtctcaaaaaaaaaaaaaaagcccaaca

SEQ ID NO: 550949 - DNA, 201 bp, Homo sapiens
tattaattgctattgtggcggatgcagtactctactaggcttctgcttatggaatagtctgtaaattattgtaagaagtctcattttttctgaagtctctratttttttttctctttttgaagatattattacgatggggacatgatttgtaaagttcaaggcaagagatttgtgtacaagtttgtctgtgacttgaagac

SEQ ID NO: 550950 - DNA, 201 bp, Homo sapiens
ggaggctgaggtgggcagatcacttgagcccaggagttcaagaccagcctgggcagcatggcaaaaccctgtctctacaaaacatacaaaaaaaaaaaaaatagcctggcctggtgacatgtgcctaagtcccagctactctggaggctgaggtgagaggattgcttgagcccaggagttcaaggctgcagtgagccatga

SEQ ID NO: 550951 - DNA, 201 bp, Homo sapiens
ttgagctctggagcttgaggctatagagagctttgatggcaccactatactccagcctgggtggcaaagcaagactgtctaaaaaaaaaaaaaaaaaaaargggcaaagaaaagagtttcaaacgtgtcaatatttatagatctttttgcagatacctgtcagcagtagaagataggggtgagcatttggggtaggtgtgt

SEQ ID NO: 550952 - DNA, 201 bp, Homo sapiens
ttttgaggtaacttgttgattgcaattggtcccgaaaacatctcagtaaatccagtagattaatgaagttgtcatgtcaggttaataaacaccagtttttwaaaaaattagtttataaatgtcatttgtggattttctttattttatttttcaaacagggtctcttgtcgcccatactggagtgcagtggtgcgatcatgg

SEQ ID NO: 550953 - DNA, 201 bp, Homo sapiens
agtgcagtggtgcgatcatggctcactgcagcctcagcctcctgggctcaggtgatcctcccacctcagcctccgaagtattaatagctgggactacaggygcgtgccaccacgccctgctcatttttgtatttttagtagagacaggatttcgccaagttacccaggctgatttcaaactcctgggctcaagcaatctgc

SEQ ID NO: 550954 - DNA, 201 bp, Homo sapiens
gtgcttataggggtgtgtgtgtgtgtgtgtgtgtgtgtgtgtgtgtgtgtgtgtgtgtgtgtgtgtgtgtgtgtgtgtgtgtgtgtgtgtgtgtgtgtgtrtgtgtgtgtagggggggactgtataattcacatttttaaaataaaagtgcttaaaaatcaaaagcattgggtaaagaaataatagtatctaagtatttgt

SEQ ID NO: 550955 - DNA, 201 bp, Homo sapiens
ttataggggtgtgtgtgtgtgtgtgtgtgtgtgtgtgtgtgtgtgtgtgtgtgtgtgtgtgtgtgtgtgtgtgtgtgtgtgtgtgtgtgtgtgtgtgtgtrtgtgtagggggggactgtataattcacatttttaaaataaaagtgcttaaaaatcaaaagcattgggtaaagaaataatagtatctaagtatttgttcac

SEQ ID NO: 550956 - DNA, 201 bp, Homo sapiens
ggagcaatgacagtctttattcggagctttaaggtagttatgtaggccgggcatggtggcacatgcctgtaatcccagctactcatgaggctgaggcagargaatcgcttgaacctgggaggcagaggtttcagtgagccaagattgcactactacactccagcctggtgacagagtgagactccatctcaaaaaaaaaaa

SEQ ID NO: 550957 - DNA, 201 bp, Homo sapiens
agtctttattcggagctttaaggtagttatgtaggccgggcatggtggcacatgcctgtaatcccagctactcatgaggctgaggcagaagaatcgcttgracctgggaggcagaggtttcagtgagccaagattgcactactacactccagcctggtgacagagtgagactccatctcaaaaaaaaaaaaaaaaaaaaaa

SEQ ID NO: 550958 - DNA, 201 bp, Homo sapiens
ttaaaataaaagtgcttaaaaatcaaaagcattgggtaaagaaataatagtatctaagtatttgttcactttataacccagaaaataaaacaccacgtttwttccagagaagtttgtatttgggccttaagcttttgaaaataaagtttagagacatagcatatgaataccactgtaatacacatgaaatattctatcaga

SEQ ID NO: 550959 - DNA, 201 bp, Homo sapiens
ccaggagcaatgacagtctttattcggagctttaaggtagttatgtaggccgggcatggtggcacatgcctgtaatcccagctactcatgaggctgaggcrgaagaatcgcttgaacctgggaggcagaggtttcagtgagccaagattgcactactacactccagcctggtgacagagtgagactccatctcaaaaaaaa

SEQ ID NO: 550960 - DNA, 201 bp, Homo sapiens
ttgacggccacccgggatcgccgctgcgggctgcgtctcgcgggctgcccactgcgcatgctccgctcggaaccggcgggggcggaggcggggccgcgtcsggggcgggagctcggcgaggcgccacgtcaggggcgggcccggcgcgcgcgggaagtctctgtagggcggccggctaccctcagccgccgcgcgtcatgg

SEQ ID NO: 550961 - DNA, 201 bp, Homo sapiens
tttactacagtagcatctaaggttttaaatgtgttttactattttcagattagatttttagatataaagatgaaaaactcagataactcaaatgagatatytatatccctacaacctaattgtatattgagcagaaactgaattaatatgcttccttgcaaatgggaaatcacatagcagttaccccatggcattgtgact

SEQ ID NO: 550962 - DNA, 201 bp, Homo sapiens
cccaacaacaaattcccgcttcccataggtaaccatggttaaaagtttagtgtgactcctttcagacttttttacagtgtgtaatgtatttttcatgttayttattatacagcttatatgatttttacttttcagtgatcatgttagctgataaaatctttaggttgaaggttttttcttgatactcgactaatttttgca

SEQ ID NO: 550963 - DNA, 201 bp, Homo sapiens
ccctttcggtgcccggctactcaccgggcttccgaaagccgcccgaggtagtgcggctccgacggaaaagggcccggagccgtggagctgccgcctccccsccccgtgagctgacggagccggcggcccgccgagccgccctggtggcggggctgcctcttcgccctttccctgctgcggggggcagaggcggtggcagcg

SEQ ID NO: 550964 - DNA, 201 bp, Homo sapiens
gttatgtaggccgggcatggtggcacatgcctgtaatcccagctactcatgaggctgaggcagaagaatcgcttgaacctgggaggcagaggtttcagtgrgccaagattgcactactacactccagcctggtgacagagtgagactccatctcaaaaaaaaaaaaaaaaaaaaaaagttacgtaattagtatactgcatg

SEQ ID NO: 550965 - DNA, 201 bp, Homo sapiens
ctttggaaattgttgagaaaaaccaaggaagataaaacaagttgcatttttaagcacgtttctctgctaagacaagatgctcagttgacacatttgaaaartgtttgaaaaattcttgtgcaaatgatcaagataattctataattaacatcttaagggaatttttctaaaaaccttttcattgtttctatatattttgcc

SEQ ID NO: 550966 - DNA, 201 bp, Homo sapiens
tctgcctttaataaaagaaagtggccataagaaggagacagcatctggaacaagcttgggatatggggagtatgtgattaaaataactttatatcatccaytgacttatggactcatgaaatagatttgcacaggaacagcttgtgaaatagggactctaactgtagcaatttcctagggagcaagccatcagtgatgagg

SEQ ID NO: 550967 - DNA, 201 bp, Homo sapiens
aaggagacagcatctggaacaagcttgggatatggggagtatgtgattaaaataactttatatcatccactgacttatggactcatgaaatagatttgcasaggaacagcttgtgaaatagggactctaactgtagcaatttcctagggagcaagccatcagtgatgaggatgaagaggaaagtttttcctggctggaaga

SEQ ID NO: 550968 - DNA, 201 bp, Homo sapiens
tttggaaattgttgagaaaaaccaaggaagataaaacaagttgcatttttaagcacgtttctctgctaagacaagatgctcagttgacacatttgaaaagwgtttgaaaaattcttgtgcaaatgatcaagataattctataattaacatcttaagggaatttttctaaaaaccttttcattgtttctatatattttgccc

SEQ ID NO: 550969 - DNA, 201 bp, Homo sapiens
atgggaagagaagtttcctgaaagaacaactgttactgaattacctcaggtaatactttttaaatatcattagaatgtgtatttgtataaacttttttttyataggatttgagcctatttttaaaaatacatttatacttctcagaagcattttgcttggaaagtagttttacagagaggcttgatcatctcaaccaggga

SEQ ID NO: 550970 - DNA, 201 bp, Homo sapiens
ttcattatggagaaaaggagtctcaggtgattcagaatcaagataactgctttccacattaggtgagatttgcttttgcaatttccttgattgtcatcttyaggcgtaaagagaaacatgaagtacaaatggatcacagacctgaatctgttgtgttggtaaaaggaatcaacacctttacattgctcaattttttgatta

SEQ ID NO: 550971 - DNA, 201 bp, Homo sapiens
actatgttttcgttcctataacaattattaatgctttcctatagaaagcaataaagattcttagacctaagtgtttggtaaagattgtctttaataaaatkctctatttctcaatgggcaaaaactgcccactgtcacctttggattttaggatcccaaactctcctctgagctccgttgtaccttccagcagagccttat

SEQ ID NO: 550972 - DNA, 201 bp, Homo sapiens
tacttttcttaaatgtgtctagtcatatatgtgtgatatgtataaaggccagttccctccaggagcaatgacagtctttattcggagctttaaggtagttatgtaggccgggcatggtggcacatgcctgtaatcccagctactcatgaggctgaggcagaagaatcgcttgaacctgggaggcagaggtttcagtgagcc

SEQ ID NO: 550973 - DNA, 201 bp, Homo sapiens
ggcgcgagtctcggctcactgcagccttagcctcctgggttcaaacagttctcctgcctcagcctcccaagtagctgagattacaggcatgtgccaccacmtctggctattttttgtatctttattagagacgggggtttcaccatgttggccaggctggtcttgaactcctgacttcaggtgatctgcccaccttggcct

SEQ ID NO: 550974 - DNA, 201 bp, Homo sapiens
gtatcctttcagttgttgttaactagaattaattttcattgaatgacgttagtgagaagtttaacattggcagttttatatgattataatcttaaattatyttcaggtcatattaaaactaattctccattgtaatactaaataagcccctaagtatcaacaaatggtgaactattaaaccttttttaatcaaaacgttca

SEQ ID NO: 550975 - DNA, 201 bp, Homo sapiens
gaaaaaatggtattctctggaatatacttcacctgaaaatctcttaatatggaaaggttgctgaaaatttactaagtatttgtactcacataacattgttyagatgtcttgggaaatagttttattccataattgttaaaagagaggaaaccccaaatggaaatatattgaacatatttttggctaggcaaaaggttgaga

SEQ ID NO: 550976 - DNA, 201 bp, Homo sapiens
ctttctatcaagctgtatcctttcagttgttgttaactagaattaattttcattgaatgacgttagtgagaagtttaacattggcagttttatatgattayaatcttaaattatcttcaggtcatattaaaactaattctccattgtaatactaaataagcccctaagtatcaacaaatggtgaactattaaacctttttt

SEQ ID NO: 550977 - DNA, 201 bp, Homo sapiens
ggtctatccaagatagttcccccttctctgatattttattgtgatataaaagaatgcttggccgggcacagtggctcatgtctgtaatcccaacactttgrgaggctgaagcaggcggatcacacctgaggtcaggagttcgcgaacagcctggccaatatgacgaaacccccgtctcgactaaaaatacaaaaaaattag

SEQ ID NO: 550978 - DNA, 201 bp, Homo sapiens
cttatctattggctccaccctgctttgtcttggctaccactgttccctcgtattggagctgatagaaaaatggctggaaagacaagtccttggtcaaatgrtgcaaccctgcagcatgttttaatgagtgactggtaagattagtaagagaaacttgtataattcaatagtgaattttattttagcagcattctctatcat

SEQ ID NO: 550979 - DNA, 201 bp, Homo sapiens
ttttttttttttttttttttttttttgagggggaatctcactctcacccaggcgtgtgccaccacgcctggctaatttttttttttttttgtattttttgkagagacgggttttcaccatgttggtcagggtggtctcgaactcctgacctcatgatctgccctcggcctcccaaagtgctgggattacaggcatgagcca

SEQ ID NO: 550980 - DNA, 201 bp, Homo sapiens
gtctttattcggagctttaaggtagttatgtaggccgggcatggtggcacatgcctgtaatcccagctactcatgaggctgaggcagaagaatcgcttgarcctgggaggcagaggtttcagtgagccaagattgcactactacactccagcctggtgacagagtgagactccatctcaaaaaaaaaaaaaaaaaaaaaaa

SEQ ID NO: 550981 - DNA, 201 bp, Homo sapiens
tttaatgtgcttataggggtgtgtgtgtgtgtgtgtgtgtgtgtgtgtgtgtgtgtgtgtgtgtgtgtgtgtgtgtgtgtgtgtgtgtgtgtgtgtgtgtrtgtgtgtgtgtgtgtagggggggactgtataattcacatttttaaaataaaagtgcttaaaaatcaaaagcattgggtaaagaaataatagtatctaagt

SEQ ID NO: 550982 - DNA, 201 bp, Homo sapiens
ttgtccttggaaatttaggctctattacaccaccaactctcaaatcatttccctgttgtagagctaaacttgacgtcctacagaatttctctaacttaacrtgttgagtctctgagagtgcaaaacttgaaacaagagaaagtggcctgcctggcatcctctgcttattgaatggttttatttaattctcctttacattgc

SEQ ID NO: 550983 - DNA, 201 bp, Homo sapiens
tgtaggccgggcatggtggcacatgcctgtaatcccagctactcatgaggctgaggcagaagaatcgcttgaacctgggaggcagaggtttcagtgagccragattgcactactacactccagcctggtgacagagtgagactccatctcaaaaaaaaaaaaaaaaaaaaaaagttacgtaattagtatactgcatgtgtt

SEQ ID NO: 550984 - DNA, 201 bp, Homo sapiens
accaaaaatgcttccaaatattataaaatgtaccctgaagggcacaatcattcctggttgaggcccactagtttatctgattctcatgcatatttttatgwagatataatagatctggaaagagattattgagtcccacagcacaccttggacaggacataagattcctgagttgctgtttggtcagataatgaattcgag

SEQ ID NO: 550985 - DNA, 201 bp, Homo sapiens
atgagtatgcctccctcacagagttgttgtagggacaggttaagtgaggatgtatttaatcaagtggcatggggcctggccccaaagcagcagtccatagsggttcctgagtattgtatcaaaaaatctttctatgaggcaatatcatccaaactctgtttggaaggtaagcagagttacctacctagaagggtaagtttc

SEQ ID NO: 550986 - DNA, 201 bp, Homo sapiens
tttgaaagtctcactagctggtatttaagggatcaaaagaaaggtgttgtgttttgttttgtttttaaacattaatgcaaaaatgataaaaaaatgagatrtataaattgggcttaaaggcttaaaaaaggtgtttttaaaagactagcttgatatactagtattacacaaagtgagagtcaacgttaatattcttgtaca

SEQ ID NO: 550987 - DNA, 201 bp, Homo sapiens
atggcccagtatgtattgttcgattacttccctagcccttccttccatgttaattcaaattcttgcttcctgctgctttgtatatataatacatgcaagcwaacatacatctccttctgttgagggaacatctcatcattctgttgagggaacctcctgcaaaaatgctcattctgcttagtctagccaaatggacacttt

SEQ ID NO: 550988 - DNA, 201 bp, Homo sapiens
tgaacactctcatttatgtttcagacctaagtaagaacagacatattcaaaggaatgttttctgaagaattgactcatcaatcaaaaaggtgacatttgtsttaatcagaatggcccaagtttccatttcaataaagaaaactagtatttataaacacacatcttagacatttaggtctctagtttttctccatgtttcaa

SEQ ID NO: 550989 - DNA, 201 bp, Homo sapiens
atggttgaactagtttacagtcccaccaacagtgtaaaagtgttcctatttctccacagcctctccagcacctgttgtttcctgactttttaatgatcacygttctaactggtgtgagatggtatctcattgtggttttgatttgcatttctctgatggccagtgatgatgagcattttttcatgtgtcttttggctgcat

SEQ ID NO: 550990 - DNA, 201 bp, Homo sapiens
atctcatttgtccaagggtgaaacaaaaaaaaaaatcttgaaatatatgagtgtaaccaaagagaaccagaacccaagatcttagatttggtgggcggggsgggggcacactggggcctgagtggggatcagatccaacaagaacatttctaaagagtctgtgggactatgtacaacctgctttgagcagttgataccatg

SEQ ID NO: 550991 - DNA, 201 bp, Homo sapiens
ctttaggtacctgctttggcatggctggcatagacatatttatattaggtaattaagaactcagatgaaaacaatttgatactattgttaagcacaatatrttttaattattatagtcataattatataattatacctttatatatagtataacaatgcattcttttctacagtttgcagtttgattccttttatccttga

SEQ ID NO: 550992 - DNA, 201 bp, Homo sapiens
gagtctcactctgtcacccaggctggagtgcagtggtgcagtctcggctcactgcaacttccacctccccagttcaagcgattctcccatctcagcctcaygagtagctgggattacaggcacctgtcactacgcctggctaatttttgtatttttagtagagagggggtttagccatgttggccaggttggtctcgaact

SEQ ID NO: 550993 - DNA, 201 bp, Homo sapiens
tcatgcaagagactttaaacaaaaatccgaatgtccagattgcagcctatgaaaatgaaccagaatctctgaggggtggcccaggcatagttgttcttcargctcccaggtgattccaaggggctggtgagtctgacagccagtgggccagcacctattgtttggcattctacccttggaggcctcctccaacaagtctga

SEQ ID NO: 550994 - DNA, 201 bp, Homo sapiens
ccaggagccccgaggtgacaccaggaaccaactggagcagctccgggatgcctgagtccaccacccctgtccacctctactcctttcttcaaaaaaacaattttttttttttttatgttggggactggattttggaagacacgaattccagacagttaactgtctttgcctgattataaatattaatgattcttgtcaact

SEQ ID NO: 550995 - DNA, 201 bp, Homo sapiens
acattctgtcccgccacaaagtaggagggaaatgcactccctttctaaggagtgaaacggctgcaccccaacgctcccggcagcatttcttcagcaaatcyactcgccgcacactgagatcatgaagcggccctgcctcctgtccagtcttattctcgtcctttcaacatatctgactgaaggctgaatgagcgacctagg

SEQ ID NO: 550996 - DNA, 201 bp, Homo sapiens
cccccagaggccgcggagttcaggtgtgcgcggcagctgcgagctctgcggccagccccagggacaggctgtacaggccaggacaggaggggatgctgacrtattctccgcgatccctcctgctcccacaggagactcggggcgggccagccccacgcttcttgaacccaccatcccgatagctctcctttcacacaccct

SEQ ID NO: 550997 - DNA, 201 bp, Homo sapiens
caaggtcttttaagcttttttattccaaacactgcagcaacaactatttttgatcctgggagtcaagagacgacaaagttaactatctctgggtcttcttrctttctttacatttaagatgaggcattaggaataagacaagtaacattaatgttacataagacataaatgtacatttggctccctttagcttcctcaagc

SEQ ID NO: 550998 - DNA, 201 bp, Homo sapiens
ggcatccaggcgggcgagtagcagtgcccacccttgattgtccgaaacaggtgcacaccgggtgactcccactgagatagctggggagatcctctgtcatyccacagctcttccggccacacggggtcgctgggggacccaggagcagggccgagctctgtctcaatggctccgcgaggatcccccagaggccgcggagtt

SEQ ID NO: 550999 - DNA, 201 bp, Homo sapiens
ctaaatcccttttcaattgcccttcttacacccagaagcatcaaagagaggtctggggatgactgctccctcttactgtagcaactctctcctccagagarggcaggggttaaagttatcttttttaaattatctaataaaaccgtagttgatcaacatattttttccaaaagtatttacggagtgcttattacatccaag

SEQ ID NO: 551000 - DNA, 201 bp, Homo sapiens
ggaatgaatgccaagatgagagacgctgacttacattagggaagcctatacaactgattatcctcattacctctgtttaacataagctcagactttttttwaaaaaaatctcagaacctatatggacattatcagttttaatctagtgtcttttttgcctttataactttctagtatgagcgcatagaatatcctacttaa

SEQ ID NO: 551001 - DNA, 201 bp, Homo sapiens
agagaaacaaaaacacatgtacacacaaaaacttgcacataaatgttcacagcattattcataatagctaaaaagtggaaataacccaaatgtccatcagytgatgaatgaataaacaaaatgtggcgtacccatacaacgaaagattattcagccacaaaatgaaatcctgatacatgtacaacatagatgagccttgaa

SEQ ID NO: 551002 - DNA, 201 bp, Homo sapiens
tttgcatctcccattgctaatctgtcttgtccccctaccattgcaaatcatctcaacttttggcttaagaacctatgagagtagcaggcagcccaggatcraggtcatccttgcatcaaagccttaaaatccgattctacataatccagccaagcaagagattccaaaggcaagcacgagaatcattaataatgaagtagt

SEQ ID NO: 551003 - DNA, 201 bp, Homo sapiens
ttactgtatgattattacatatccataagaaaaaaatgacaatttaaaaaattttaatggcaagctctggcatattaattggaaatccttggttcttagtstaaacattgaattgttgtgtaatcaatttctagtcaaataatcaatttctacttcagtttcattaataattatgattaagtcagtagcaaaaaagcatgt

SEQ ID NO: 551004 - DNA, 201 bp, Homo sapiens
gttaagacgtcttcattcaaagggtcacaagaatgtggaagagtcagccaaaagaaacatcacaaagtgtaagacagggctacttcctttggcacaacacyggctgcattggcaggacccagagatggctcacccccagctcttgtggctgagcgctcagcaagccacacggagtttaaagaacaggagactggtgttttt

SEQ ID NO: 551005 - DNA, 201 bp, Homo sapiens
gatattataccaccaagggttatactaatatgaaaaacaatgggtcgcacttaataaagaacattctctggacacgtgactgattcagagctgctgctttmtcatcctaaagtatgcataggaaacttcagagagcccgggtgacttattccaacctggaatcccaacaaattccctctggaatcttcctttttatagtct

SEQ ID NO: 551006 - DNA, 201 bp, Homo sapiens
caaattgacccagtactttcatgtggaactagctataacaaaggatatttaaagttttaagtgagcttgttttaacctcacaaagtattatatataaatartatggtcatttaaaatttcccaattattgttatttgttctggatcttaagctcatatcataagaacattgatggggctaagtttctggaagtgacagatc

SEQ ID NO: 551007 - DNA, 201 bp, Homo sapiens
agaggggacacaagtggatttccctgtccaacattcagggtctctctgttcccaacagcccatctgccattgccctttttctacctaaaacctctgctgcygcctagctggtctttttctgcacaccaagcatgctctgcccattcccgtttctctttcttccaatgactcagccctgtgaggaaatagcctctatgtcta

SEQ ID NO: 551008 - DNA, 201 bp, Homo sapiens
atacacactttgtgtgaacgtaggttttcaatgattttgggtatataactagaagtggaattgctggatcatatggtaactatgtagccaaaaacaaaaamaaaaaacgtagacaacatgactccaaatagcaagattcaaacacttattttagtgcaaaacttgttttccgcctcattccattcacatgagatatcaaca

SEQ ID NO: 551009 - DNA, 201 bp, Homo sapiens
aatcaaaacagctacacccaaagtaattcactcggatgggtggttcatgaaatgcacccattcattaaatcaacatgttagcagcctcaagtggactctgygagagactcaactgcaatgcaatattcctgaataaatcaagagaccataaaagacacttttttttggcccatcattagcaaacgttttctgagtgctcac

SEQ ID NO: 551010 - DNA, 201 bp, Homo sapiens
acagacagtaagtaaatgaataggcatggctgtgttctagtaaagctttatttacaaagacggctggtgggccacccctgctataaattacatcttcttgygcctgtatcttcaacctctttttttctactagatattttgtactaaatttattcaagcagctatttcttaaaaaaataaacaaccttcgacccactcttt

SEQ ID NO: 551011 - DNA, 201 bp, Homo sapiens
tacaatgttgtatatatgtgggaaactgtattctggattcgaataaaccattaagagacagtcttttgaaatagcctgttgataagccaagaaaaacccaygccagtacatgaggggagaaaataaatgtgataataggtgacgcggggaagagttaatccgtgatacctatacccacccatcagacttcataggagcagt

SEQ ID NO: 551012 - DNA, 201 bp, Homo sapiens
aagaggaggggtgggaatgtttaaatgtcagctatttttccagaaaactctaacgtcaccgatacgtccctcctatgtaaccatcacactcatctcccccygaccctgccccatctcagctattttcttgactcttatttaaacattggaaagctatttgattatctatatttgtgccttttctccctggctagactgtag

SEQ ID NO: 551013 - DNA, 201 bp, Homo sapiens
ttggctccagctacttaagaagactcactgttgaaattattccagaatattggataaccctggggatgctttaaaagaaggctcaagagttgaactcttayagatgataggaaaggctttgcaaactcataatacctgacttatccaaaggccaccctcataccccgagtgctgttgaaacccaggcagtaagccagtgga

SEQ ID NO: 551014 - DNA, 201 bp, Homo sapiens
cggtgtttggtgtttctgtccttgcgatagtttgctgagaatgatggtttccagcttcatccatgtccctacaaaggacatgaactcttcattttttatgrctgcatagtattccatgatgtatatgtgccacattttcttaatccagtctatcgttgttggacatttgggttggttccaagtctttgctattttcttgga

SEQ ID NO: 551015 - DNA, 201 bp, Homo sapiens
acaagtcatacttttgtccttaaaacttatcttagtcaaacacgctagtaaaatgaacaaagagaaagtatgaggggacttcaaaaagttcatagaaaatmtgcattatgaaagaactatacaaaaatttcaaatgtatattacaccaaaataaattcttactaacttgttataacctgccttaacaagatctagtttgag

SEQ ID NO: 551016 - DNA, 201 bp, Homo sapiens
atagggtaggattcattgaaaacactgggcgtgggggtgggatgctgtccaaagatcactggagaataaatgtgtgctggtttctgcttccaggtctccarccataaggctataaccccaggaacagtcatttagctgttctgaacctctttaaaataaaaggtctcctcttctatacagcacatttgttcaaactaaaaa

SEQ ID NO: 551017 - DNA, 201 bp, Homo sapiens
tcctcaagggcaaaaacgtcagagcaaaaggtcaatttcatttctgtgtagtcccagttgaattgtggacttttctaatggccatcaatttaattctcagytctaagcttctctcgagtcttggatgggaggaagaaggtaagatggcctgcacaaatctcagggttgcaaaaactggaaacactggcatgaattagaaat

SEQ ID NO: 551018 - DNA, 201 bp, Homo sapiens
aggagagggttctacaaatagataaccacaaataaatccctatgatcatcctaatgtgacagagaacagaaatgtgagcttgactatgtgtccattttcaytgtatcatgattttcattatatcctattaggtttggcatcatttctttaggctttaggtcctggctacagtatttattttcctgtgaaaattattcacac

SEQ ID NO: 551019 - DNA, 201 bp, Homo sapiens
tgatagagggagagttgggcagggcatatatgttggtggagggggggcggttatgatgactggctgtggaatttcagctgggactgagttaccggagcacrtgggggtgggcattgggcagtgaaaagtgctccatccattgggtgttgggtccctacagattcctgagctgtagtactgaagtgagtgacctacagtgac

SEQ ID NO: 551020 - DNA, 201 bp, Homo sapiens
caactatggtttttccttaactaggtgttctttgtaatcactgcttgctgtaagaactgctaatgatcaaattatgccctagaaggatcttttacttgctktcatttttccacagtcaagttatatgattttttttaaagaagatttttttttcaaagctttcagcacatgtctcaaaggggcagctctgctgctgacttt

SEQ ID NO: 551021 - DNA, 201 bp, Homo sapiens
gtgtagctgagcacattgatagagggagagttgggcagggcatatatgttggtggagggggggcggttatgatgactggctgtggaatttcagctgggacygagttaccggagcacatgggggtgggcattgggcagtgaaaagtgctccatccattgggtgttgggtccctacagattcctgagctgtagtactgaagtg

SEQ ID NO: 551022 - DNA, 201 bp, Homo sapiens
accattagcagacaataaaatgcattaaaaatcattcatgtctttgtgttgaatgaaacttaaattttcctatcatttgagatgatatattatgaatgagyattcttgaatcaggtaggaactgctcatttagtcatacaaattcaccatttggcaagcaaataaggaatatatttctttttagagaaaatttaaattata

SEQ ID NO: 551023 - DNA, 201 bp, Homo sapiens
gtggaacagcacccctggcctcagcccactagatgccaggagcacccctgccctcaacccacagttgtgacaaccagaattatctctagacatggtcgcakgtcccctgtggggtaaaattgctcctggttgagaaccactggtctatgtgaatttttatttctcttgtcaatatcagttgagagtcaggataagtatggg

SEQ ID NO: 551024 - DNA, 201 bp, Homo sapiens
actgataagaagcgagtctaggcagcaataaaacaagctgactctaggaattctttctttatgagagtccctctctttttccaataaatatggatccccaraaaattaagcccaagattatagctggagaaatacctttgagtacagagtgtgaaatttgcatctcattttaggtgcccaggagggttgacctagagaaaa

SEQ ID NO: 551025 - DNA, 201 bp, Homo sapiens
ttgtgcatggtagcttcaacttaagtagtcacaataaacaataagaataatagagaagtcctgcagaggggaaatcataactcggagtacctcctaaatayacttgctataatctcacctccttctattttttatttttttttaattttcagaccatctctccatatcactcgaattccccagaatatagttgggacatgc

SEQ ID NO: 551026 - DNA, 201 bp, Homo sapiens
gttgtaccaaagtggagagagagttaagtgaagtatttcttttgggaaatcttacgggatgaatggctatgatattcttgaacctacttatgagaacccayatgttatttagtttgaggaaatgaaaagtaaactgctgttagagaaaattattgtttctgggaaatttatagtgcagtaaactctcctttgttttcagca

SEQ ID NO: 551027 - DNA, 201 bp, Homo sapiens
tcagaggtcatccacataaccctggctttacacaaggatattgcaaggatttcacagggttgaattgtttgaaagaaatcaatttccagagtgccattttyctaacaaactcaaactgctcttttcaggggaactcttactgtgattcagtcacgccacaataatcaatgccggcacagaggaaatccagttcatcacatt

SEQ ID NO: 551028 - DNA, 201 bp, Homo sapiens
gccacctgtgcaccccatgcagcccctgccgccacagccacctctgcctccgatgttccccatgcagcccctgcctcccatgcttcctgatctgactctgkaagcttggccatcaacagacaagaccaagcgggaggaagtggtgagtatattttgaagccactacaatgcaaatcctgtgaaaatggtgcagcaaaatag

SEQ ID NO: 551029 - DNA, 201 bp, Homo sapiens
ggaatatatgatcagtttattaagaaggcaggcccttgagccagactgcttgggtttgaatcttagccacgccagtcactagctgtgggacccttgacaaygtacatcgacaaggatcttcctagatctcagtttgctcacgtgtaaaatggggataacaacagtactcaccacgaagcattgctatggtgattaaatgac

SEQ ID NO: 551030 - DNA, 201 bp, Homo sapiens
ggtctctaacaggctgatcagcacttcgttctggagatctgggggaacctgaaggagccaaatgttgaggcataaataaaaccattccagaaacaggcaamatatggtcactgacaattttactgtagcacaaaacagagccctaaaagctgcaagacagcagaatgatttgctggttaaaaccaaacctacgccaaccca

SEQ ID NO: 551031 - DNA, 201 bp, Homo sapiens
aaatatctggtgggaggcccaggaaacaatttgttaaatcctttagtaaggagaatttggggaaaggggcatagtgcagaaatcaatggctttatttggaracatacatagagttcctttctgaatttctgtcgtaaatctgtttgtatacatgtaccttggatccttagggccaggagttttattggcaatattttagat

SEQ ID NO: 551032 - DNA, 201 bp, Homo sapiens
agcaaaatgagtaaaattaaaatcatccataatccaacaatcattgattatgtcttaatgaatattatcccctatattttttgcatattgaaattttcttctcaaaaagtatcatattattttgcaatctactatatttaaaacatccccttttatcagatatttagctgttacttattcatccccattgtaaacagtgct

SEQ ID NO: 551033 - DNA, 201 bp, Homo sapiens
cctcacgagtagctggaactacaggcacccgccaccacacctggctaatttttgtatttttagtagatagcaggtttcaccatattggccaggctgatctsgaactcctgacccgtgatccacccaccttggcctcccaaagtgctgggattacaggtgtgcgccacctcgcccagctgggaacagtttttaaaaattgta

SEQ ID NO: 551034 - DNA, 201 bp, Homo sapiens
agtaaattcacaaacaatggctccatccttcttactagcaatagactaatgtagattatgtgtgttttatggagcattcattacatccatgtttcagaagmgataagaaaagtggatgttgacttacatttcagaaccatcaagaaatggggacctggattttatttgcctgcctcctgggagcagcttttgccatgcctg

SEQ ID NO: 551035 - DNA, 201 bp, Homo sapiens
ggcagtttagggtactgtaatttactataatttagccttacagtaatctattgtcactgcttcttgacttaagcaccacccctcagcctgccatttaaggrcttctaccttcactgctggccagcctctttattgtgaccccagctagccaacatatttactgttatgtccaggtcctggtgcaagctccccaaatatcca

SEQ ID NO: 551036 - DNA, 201 bp, Homo sapiens
aaacctgcctctctgtttctcaccagtacccttcctatggttacgagcccatgggtggatggctgcaccaccaaatcatccccgtgctgtcccaacagcaycccccgactcacaccctgcagcctcatcaccacatcccagtggtgccagctcagcagcccgtgatcccccagcaaccaatgatgcccgttcctggccaac

SEQ ID NO: 551037 - DNA, 201 bp, Homo sapiens
ttataatacactttcccttcagaagtgaaaaaaaattgcataaaatactgaagcgtatcgccatctgctggtcaaaaatagttatgcacttgaaaaacttyaaactactaaagtacggtagaacattttacaatacacataaaattacgaaagaaaacatttcctcagcctttggcacaatgtaagtacaaagctgtaggc

SEQ ID NO: 551038 - DNA, 201 bp, Homo sapiens
tgacttaagcataccttttcaggaattaggatgctgtaaaaaaaaatctgactgaggcaacagcccctgaaatccagttttggctctgctgtttataattratataaacttggacacatcaatcaccttctttaggattctgttcccacatctgaaaacatatgcatattcattttacttaatggggggtgttacgggaat

SEQ ID NO: 551039 - DNA, 201 bp, Homo sapiens
tcatttgtccaagggtgaaacaaaaaaaaaaatcttgaaatatatgagtgtaaccaaagagaaccagaacccaagatcttagatttggtgggcgggggggrggcacactggggcctgagtggggatcagatccaacaagaacatttctaaagagtctgtgggactatgtacaacctgctttgagcagttgataccatgtga

SEQ ID NO: 551040 - DNA, 201 bp, Homo sapiens
gcaacattaatgataatgtgcaacattctgtcccgccacaaagtaggagggaaatgcactccctttctaaggagtgaaacggctgcaccccaacgctcccrgcagcatttcttcagcaaatccactcgccgcacactgagatcatgaagcggccctgcctcctgtccagtcttattctcgtcctttcaacatatctgactg

SEQ ID NO: 551041 - DNA, 201 bp, Homo sapiens
tattcaaataattatttttaaaatattttaaatttaatttagcacacagagaatgcctctgtgtgaagtaagtggtggcaatttaaaataactaatgatcrtaattattggaatctagtctcctgggcattttctacttcataatttacagggagcctatgagagttcaaacacactgtattttcgccaaaggagtctcat

SEQ ID NO: 551042 - DNA, 201 bp, Homo sapiens
ggacgtggggcgtgctgcaggcgcgcgacaccgcagggtgggccctgccctccgtcgcgggggctgcggcctgagtcctccgagccccctgcgtgtcgctstccagctctgcggggctcccctgccaccgaggccaatttggggacaggttcccttgagaaagggagcagggccccgctcttagggagctgctttcaaaaa

SEQ ID NO: 551043 - DNA, 201 bp, Homo sapiens
acctgatattttcttctttaaaactgggatcacatccatatattattttgtaacttgcttactatctcttaacaacatgctacaataatctttccactacaaaaaaaaaaaaaatcctgtcttcaggcttcattggcccctagaatcccactgcacgaataaaccatgatgttttttaaccacagtcaactaataggcatt

SEQ ID NO: 551044 - DNA, 201 bp, Homo sapiens
agttacatacctagacagtgaggaaaagaaaacatgatacaatatgctttcaccaaaaagaacagtgccagaattgaactctttccagattgtatgtagayacatatatggcataatctgaaaatgtcctggcaggggttgtggggggtacaatctcccagagttacatcatagtaaaacctattccccatgtgctcagtt

SEQ ID NO: 551045 - DNA, 201 bp, Homo sapiens
actgagcatctggatctgtgtgtgtgtgtgtgtgtgtgtgtgtgtgtgtgtgtgtgtgtgtgtgtgtgtgtgtgtagcctggtccacaggaaatactcagmaagtattggctggtattcttagctattatgggtaaagttgcttggaggtcagttagcagagaagttgactgagtttctggtcacctggcaggagttggca

SEQ ID NO: 551046 - DNA, 201 bp, Homo sapiens
gctatttaatgtggagcaaaattaaaagttgtatgagctatttgtatatagtgttacttcacagctcacatacagttacatacctagacagtgaggaaaasaaaacatgatacaatatgctttcaccaaaaagaacagtgccagaattgaactctttccagattgtatgtagatacatatatggcataatctgaaaatgtc

SEQ ID NO: 551047 - DNA, 201 bp, Homo sapiens
gagacagttgtttaaatttattttttattcattgatgattgcaactgtaatgtcccagtcataaaaataaccttatattcaataaatcccactcagaaatattctgcatggggctctgcttagcatattgatgtgaaatttatacccaagtctattttggaaaacatcaaattaaacttgtaagtataaaggaaataagag

SEQ ID NO: 551048 - DNA, 201 bp, Homo sapiens
aacaattactaacccctttagacattattatgttaggttctacactggctctatctatgggtcactgcatctgttctacactggctctatctatgggtcaytgcatctggctatttagatggcaaggaaatgtaattgaactaaaaatcctagtcattgagcaacgggctgtttttgttttgctttttacctgccagctgg

SEQ ID NO: 551049 - DNA, 201 bp, Homo sapiens
gttctcaaacaaaattgtgccccctttcctctcttttagtggttctgtacctctcaaaccctgtattgtggctgttatttactgaactgttaccctagagwgtaaaaactttatcatagtcctaattttatttttggaaactggtatgttcccagccatacaggaggtgcacaatacacacgtactaaataaagtaatggt

SEQ ID NO: 551050 - DNA, 201 bp, Homo sapiens
cccttgtagccacagctggagctgaagcagctggaactcagggcaccatgtcctaaggctgcatagagccggggggccctgggccaggcccaggaaaccawttttccctcctaggcctttgggcctgtgatgggaggggctgccgtgcaggtctctgacatgccctggagacattttccccattgtcttggtggttagcat

SEQ ID NO: 551051 - DNA, 201 bp, Homo sapiens
ctgttgttcggaatagtttcagaaggaatggtaccagctcctctttgtacctctggtagaattcagatgtgaatccgcctgatcctgggatttttttggtkggtaggctattaattactgcctcaaattcagaacttgttattggtctattcagggattagacttcttcctagtttagtcttgggagggtgtatgtgtcca

SEQ ID NO: 551052 - DNA, 201 bp, Homo sapiens
gggcactggcaggtgttgcaattctaggacatgagaagggaatattgctaacttctcagtcatcaaacaagatagtaatagtgaaagtaataacttgtaawgaagattgacttattaaagttacccatttaatgcataactcatgtgtctatagactgcatggtggcatcagttgtttaaaccagtcataaaaatattgac

SEQ ID NO: 551053 - DNA, 201 bp, Homo sapiens
agggtttttatggttttaggtctaacgtttaagtctttaatccatcttgaattgatttttgtataaggtgtaaggaagggatccagtttcagctttctacrtatggctagccagttttcccagcaccatttattaaatagggaagcctttccccattgcttgtttttctcaggtttgtcaaagatcagatagttgtagata

SEQ ID NO: 551054 - DNA, 201 bp, Homo sapiens
gtaaggaagggatccagtttcagctttctacatatggctagccagttttcccagcaccatttattaaatagggaagcctttccccattgcttgtttttctyaggtttgtcaaagatcagatagttgtagatatgcggccttatttctgagggctctgttctgttccattggtctatatctctgttttggtaccagtaccat

SEQ ID NO: 551055 - DNA, 201 bp, Homo sapiens
gtgataaggaacacaatccttcagtttcttttgctttttacagtctgatgaatatgagtgtcttgaaaaatttagaggtttctagtattcttttttttttwaaaaaaaaattagccctgtaatggctataccacaaagagtagattaactaatttaatcatttatgtttatattttaactctaaagactaattgttgatat

SEQ ID NO: 551056 - DNA, 201 bp, Homo sapiens
tagctggacaacccttagccctcattattccagcagcagattctgctgtgacagaatgtggcctggtgagtatcctagttaatatggatcaaaattcttakctagaagttgcactttagacgctcttaaaaacacccatgcctgaggtatccctgaagaacacgaactcagactccctggggtgtgggtcttggacttctt

SEQ ID NO: 551057 - DNA, 201 bp, Homo sapiens
tcatcctagaataaaccaagtttaaaagagaatacattactaataccaacctgagtgatccctttaatatgctctatacatatggaaaattgctctaatcyggagacataaaagtgctctactgcaggaatagaatgagcaaaaactctagtttaaaagagcaatgctggctattaatatttaggtcattacaaaaataag

SEQ ID NO: 551058 - DNA, 201 bp, Homo sapiens
cttcaaaactttttgaaaaagatagctcaataattaaacaacgttttcattttctgcttctgggatttttgtatatagcaaaatgggaactaaggagaagsgtagcgaaagacatattacattttttaaaaaatcaagcaattctgcatgttaaaaagaagaaacgaaacccagcccaaagtgattcttcatttacaattc

SEQ ID NO: 551059 - DNA, 201 bp, Homo sapiens
gtaagtggattgatgggacccgaagcattttctggttagatggactgatcagaattgccaaagagttgccaaaattccacttcaggtcaccctgcatgtasttatgtaaacctttccaatttctcagaaatggaaatagaaatctccaatgcggctttagaagatggaacactggaatactcacgatgattgggaagcctt

SEQ ID NO: 551060 - DNA, 201 bp, Homo sapiens
ttgagtaaagcctcaccatggaaaatgacagcctcatttggaagcatacttgaaacatataaggaggctcatggcccatgcacttttaggaactgtgcctycagagaaggccctgcattagtctcttcctacagagacagctaggttggagaaggggagacatcattacctccaggcaaaatggccattttggtggtatgc

SEQ ID NO: 551061 - DNA, 201 bp, Homo sapiens
aatttctaatttagaattctgtggctctccaaaatgggttttacctaattcaatttaaggtttaattttagataatcaaaccccaaaccaagcctgtgtayatgttgacatcttttgaacctagactaagtctccgagacttcccttcttaagtagagaaaataagagaaaaagaaccttcctagattttcagctgggtgt

SEQ ID NO: 551062 - DNA, 201 bp, Homo sapiens
ccatctgtaaatattaaaaggagaagttataaagataaacatataagtgatattttacagtatcgataattacatttgagcaaaagcatggcttttctctyacttcacttataatttgacattttaagcagagtaacagctctgagaatacatgaaaatcctgacttggataccacatattaccagaattttggtgtatat

SEQ ID NO: 551063 - DNA, 201 bp, Homo sapiens
aaactttttgaaaaagatagctcaataattaaacaacgttttcattttctgcttctgggatttttgtatatagcaaaatgggaactaaggagaagggtagygaaagacatattacattttttaaaaaatcaagcaattctgcatgttaaaaagaagaaacgaaacccagcccaaagtgattcttcatttacaattcattgt

SEQ ID NO: 551064 - DNA, 201 bp, Homo sapiens
gttgggggaggggggcaggggcagttaatgcttcataatttccagggtattgaggccaacagctaccgccactcaataggactctttgctgttacattgtrctggtaaagttagatttcttgtctgaaaatttcctgaaaccctttctgatatgaaaaatcctagtaaaagaaaaacagaaattataatctgtcacataac

SEQ ID NO: 551065 - DNA, 201 bp, Homo sapiens
ttggtgaaatttttcccctcatttttagtccttattaattccctcctaatgtctctggcaaatggagcacttatgacaggtgaagatcagacagtgttgtyttcattatttacagagggcctgataaaaacatcttcaaattaacattctgcaaatttataaagaagctgtgaatcatagtgaaggtgtgaggaaggaagg

SEQ ID NO: 551066 - DNA, 201 bp, Homo sapiens
catttgtccaagggtgaaacaaaaaaaaaaatcttgaaatatatgagtgtaaccaaagagaaccagaacccaagatcttagatttggtgggcggggggggrgcacactggggcctgagtggggatcagatccaacaagaacatttctaaagagtctgtgggactatgtacaacctgctttgagcagttgataccatgtgac

SEQ ID NO: 551067 - DNA, 201 bp, Homo sapiens
agctatgaggatgcaaaggcataagaatgacacaatagacttcagggactcagggagaaagggtgggaaaggggtgagggataaaaaactatgaattgtgytcagtgtatactgcttgggtgatggctgcaccaaaatctcacagatcaccactaaagaacttattcgtgtaaccaaataccacctgttcctaaaaaacca

SEQ ID NO: 551068 - DNA, 201 bp, Homo sapiens
gggataaaggtaccccacttcaaagaggaactgacatggctctaaactctccactggatgatgaagctaacaccctgggcataagcctttggtgaaatttktcccctcatttttagtccttattaattccctcctaatgtctctggcaaatggagcacttatgacaggtgaagatcagacagtgttgttttcattatttac

SEQ ID NO: 551069 - DNA, 201 bp, Homo sapiens
tttctgtgggttcatagtaggtttatatatttatggggtacatgagatgttttgatacaggcaggcaatgcataataatcatcatggagaatggggtatcygtcccctcaagcatttatcctttgaattacaaaccatccaattccactctttaagttattttaaaaatgtacagttaagttattgttgactatagtcacc

SEQ ID NO: 551070 - DNA, 201 bp, Homo sapiens
taaaagttaccactttaaagtgtatagttctgtgtttctttttagtatactcatagatagtgtacaaccatcatcactgattccaaaacattttcatcacmccaaaaggaaagcccatacccagtcactccccattcccctctcaccccagcccctgggaaccactaatctactttctgtctctatggttttgcatgtttt

SEQ ID NO: 551071 - DNA, 201 bp, Homo sapiens
cctttgcttaactttttattcatcatggcacaagatagaaccttaagaaacaccactgggaatttcatcaccaacatgaaaattaagagtagcatgttttwtaaaaaaaaaaaaaatctttttttataatacactttcccttcagaagtgaaaaaaaattgcataaaatactgaagcgtatcgccatctgctggtcaaaaa

SEQ ID NO: 551072 - DNA, 201 bp, Homo sapiens
tttgcatgtttttgacatttaatataaaagtagaatcatataatatgtgggctttttgtgtctggtttctttcacttagcatgtttttggagttcatccaygttgtagcatgtgtcattacttcattcattcttatggcaggataatattcactgtatagatatactaaattttgcttgtccattcttcagttgatgggca

SEQ ID NO: 551073 - DNA, 201 bp, Homo sapiens
tctccttaaaaataaattcagcttgatttagaagaattctgtatgtaaaaaaatgggtaaattccccattcattaataactctttgttataatattatctsttatggcatctccttataaagcaaacacctcaggtactaggtattacaaataatttcttccttgtgtgaatgtcaagtcctctgagagctgatggtatga

SEQ ID NO: 551074 - DNA, 201 bp, Homo sapiens
ttggagaaatgacaccggccccaccttagagcaggattccatagtacagctttacatgaaggatggcaagtagaatggctcatttttccatttcataattrttgcttatacactgttgttatggaattatagaattttagagcaggaaggaattttagggatggagaattaagctaaaaccaatgtctatgtttatcttca

SEQ ID NO: 551075 - DNA, 201 bp, Homo sapiens
agtttgagagaacacttcctttaaactgagaacaacaaagataccagttattacctcaatcactttgtgattcccactctgagcaggacagatcctaagarctagaaaggaccacagtcatgatttctttagcccgtttatttacaaatggatttaccagggaggatgacagcttccttcacttacacaattctgaaaaga

SEQ ID NO: 551076 - DNA, 201 bp, Homo sapiens
ctctatgtgtgtctcttgcttgcctctgctgaaatattagtgactaagtggtataggagagactccgcagaacagcggaatgcatgagttttggacgtcgrgtttgaggttctcctcaacctcttactaactttgtgattttgggcaaatcatttcctctttctggaaccctggtttcctcatctggagaaaggaaataat

SEQ ID NO: 551077 - DNA, 201 bp, Homo sapiens
gcccttttcccactctctaagatggtattgttcaagagggtataggacctgactaaaaccattcacatccagatgagagagaataaaccttcccatgaaaygtgagcatttttaaagaatataatagagccaatcctaaatgaggccaatgtctgagggagattttctgcatgaccgtctctcctccctggaccccaggca

SEQ ID NO: 551078 - DNA, 201 bp, Homo sapiens
atgcttaatatctgctcaatgagccatcattagcattaaacacccaggatgctgtcatataaaagtaatgataataataacactgaacatttactgggctyattatatttcaggcactattctaagcacatgacatgtattagctcatttaattctcacaacgttatagaattgtctctatcaccaatttacaaatgaggg

SEQ ID NO: 551079 - DNA, 201 bp, Homo sapiens
aacatatgcattacctacatagctgtcactttttgtggtgagaatacttaaaatctactctgttagtgattttcaaaataaaatacattgctgttaattayagtaaccatgttgtacaatagatctcttgaatttattccttttgtctaagtaaaatattgcatcctttgaccaacatctctccaaccctcagccccaccc

SEQ ID NO: 551080 - DNA, 201 bp, Homo sapiens
ctagttgcaaatacttcagcaaatagtccctgaataaaagatatagtcagccaacattgaaataaagctgttactacaaagaaaaatattttgcaaaagaracagctcatagactgctacaatacaaaagtctgcattttaagagccataactgtatatggatgtaagcggtgtttttaatgttaaatacatgttcaatat

SEQ ID NO: 551081 - DNA, 201 bp, Homo sapiens
ccctcccaaatgtgaccacaaaagtctccagacattggcaaatgtgtcctggggggaggtacaaaatttccccagtgaaaaacactgatagcatatttttyttttttgagacagagtttcactcttgttgtccaggctggagtgcaatggcatgacctcagctcactgcaacctctgcctcccaggttcaagcaattctcc

SEQ ID NO: 551082 - DNA, 201 bp, Homo sapiens
tataatctttacttttcacttacttgtctcactctcttttttgagcttccaactcggaatatccccactgtctggaggcctgcaaataagcaaacaaaatsaacagtcttgtttcatggcttgagaccctggaggaaatcaaaatacagagcagaatgccagcacagtgccgtaacatgtagagcaatagtaacttgacag

SEQ ID NO: 551083 - DNA, 201 bp, Homo sapiens
tctcctgtcctcctctcagtcccattttgccctaaggatagccatggaaactagaatcccttttccccaagatagatcatacaaatcagaaccccttttcytgaaagtcagtcataaaacctaaaaatattctacgtaaaaactggccatgaagaaatgatctgacctaactggtttgactgtagatcctaagactcctgt

SEQ ID NO: 551084 - DNA, 201 bp, Homo sapiens
gatggttaccctcatgttgttctcgtgatagtgagttctcacgagatctgatggttttataaggggcttttgccccttttgctcagcaagtcttcttgctsctgccatgtgaagaaggacttgtttacttccccttccaccatgattgtaagtttcctgaggcctccccaaccatgctgaaccatgagtcaattaaacctc

SEQ ID NO: 551085 - DNA, 201 bp, Homo sapiens
ttgcagtggcataattgacaagttttttggtgctatgagtttctcacacatgtaaaccctttcggaaaagttggagataaaaagatgggggagagtttggyttagagtcacaaagttccagataccagccacagatgcctctgcccaatgtcgctacatgttcttttctgagaaatgcattcaatcactcagtattacgca

SEQ ID NO: 551086 - DNA, 201 bp, Homo sapiens
cgttcatactatgcaccagtgatgctctgaatatatactataaaatcaatattctttctattcttttgcctctcaataaccaattttaataagtggaaaakaattcagattcctctgacaatagcctctttagaaagaatggggaaaattcttgggttacaattgtgtcaatgaaagggattctttattttaaaaaagata

SEQ ID NO: 551087 - DNA, 201 bp, Homo sapiens
ccataaattagatgtttgggaaaaataggccaggcactaagcttctcttactctcaaattgtattacccttagatatgtggataactcctgttattcctgtttttttttttttttggtataatagtgataacaatgggttccataaagggtggatgggaagatatcataaggatagagacagagttaggataagcatttta

SEQ ID NO: 551088 - DNA, 201 bp, Homo sapiens
aaaagtataaagcacttatgtagtacctggcacatggaaagagctctctctctctctctctctctctctctttctctctctctctctctctctctctctcwatcatatatatatatatatatatatatatatgttcatcagcatcatcataatcattataaccatgatcaccaccaccactatcatcaccaccatcattgt

SEQ ID NO: 551089 - DNA, 201 bp, Homo sapiens
tatttatacagagttaattatgtggcaggcactgtactaagctactgttaacaactctcctttttcctgacctgagtctgggattgagtgaaagaaacaargagctgactgaatgctgaataccatgctctctagcagcagaggcagttagggttgggattcttctagaatttatttggtagatagtgttcaacattatta

SEQ ID NO: 551090 - DNA, 201 bp, Homo sapiens
aaagtataaagcacttatgtagtacctggcacatggaaagagctctctctctctctctctctctctctctttctctctctctctctctctctctctctctmtcatatatatatatatatatatatatatatgttcatcagcatcatcataatcattataaccatgatcaccaccaccactatcatcaccaccatcattgtc

SEQ ID NO: 551091 - DNA, 201 bp, Homo sapiens
agcacttatgtagtacctggcacatggaaagagctctctctctctctctctctctctctctttctctctctctctctctctctctctctctatcatatatmtatatatatatatatatatatgttcatcagcatcatcataatcattataaccatgatcaccaccaccactatcatcaccaccatcattgtcatcatttat

SEQ ID NO: 551092 - DNA, 201 bp, Homo sapiens
atatccttaaacaaaggcttaaaattctactaggtggtcaccaccgtttatacacatatgtatttccctctttttatttgggaaactgatggtcgtatttycttttcagggtggaagaaggaattctccattaagagaagggaaggaaaatataggaaaaataaccactctttgaaagcatctattgtccaaatcatgagg

SEQ ID NO: 551093 - DNA, 201 bp, Homo sapiens
gtgccatgttggtgtgctgcccccattaactagtcatttaacattaggtatatctcctaatgctatccctccccgcttcccccaccccacaacaggccccrgtgtgtgatgttccccttcctgtgtccatgtgttcttattgttcaattcccacctatgagtgagaacatgcggtgtttggttttttgtccttgcgatagt

SEQ ID NO: 551094 - DNA, 201 bp, Homo sapiens
tgtctgtatcagttctttctctgtgcctccaggccacagaccatctcctctgaagtcagtgctgaggcccctggatccagctcaatcacttagctcaccakgggaactcagcacatcatttactggaaataaaataataagcaccttgccatttgatctgaggtcgtcatttagtcatttgaacatttatttttctgtttt

SEQ ID NO: 551095 - DNA, 201 bp, Homo sapiens
cttgccatttgatctgaggtcgtcatttagtcatttgaacatttatttttctgttttgttttgttttgagacggggactccctctgttacccaggctggartgcagcaatgtgatcttggctcactgaagcctcgacctcctaggcttaagcgattctcccgcctcagcctcccaaactgctaggactccaggtgggcacc

SEQ ID NO: 551096 - DNA, 201 bp, Homo sapiens
aattagggtttaaaacagtatgagatcagatgtcttcatatgtctctgggttgaagaaacacttcaggagcttgttttaaaaaggtatattctcaaatgcygctaccaaaaattctgatttggtacagctggggcggggcccaggactctgcatttttataagcaccccaggagattctgttggaactgttagcttgtaaa

SEQ ID NO: 551097 - DNA, 201 bp, Homo sapiens
ctccctctgttacccaggctggaatgcagcaatgtgatcttggctcactgaagcctcgacctcctaggcttaagcgattctcccgcctcagcctcccaaaytgctaggactccaggtgggcaccacacctactaattaaaaaaagttttttttaagagacagggtctcactatgttgcccaggctggtctcaaactcctgg

SEQ ID NO: 551098 - DNA, 201 bp, Homo sapiens
cctcccaaactgctaggactccaggtgggcaccacacctactaattaaaaaaagttttttttaagagacagggtctcactatgttgcccaggctggtctcraactcctgggctcaagcaactctcctgccccagcctcccaacatttcaatatttctgagattcaagattctcctccataaattagatgtttgggaaaaat

SEQ ID NO: 551099 - DNA, 201 bp, Homo sapiens
aaggtccagaatcacaggccactgtacattgctttcttccagggcatcatactgcttggagaaatgacaccggccccaccttagagcaggattccatagtrcagctttacatgaaggatggcaagtagaatggctcatttttccatttcataattattgcttatacactgttgttatggaattatagaattttagagcagg

SEQ ID NO: 551100 - DNA, 201 bp, Homo sapiens
agagaaatcctaaaaggaagaaaaataatgaccttattaaaaaatcacactggctagcattttggaggaggctttacatttatagcttaatctcaaattgwttgtctcatttgatgcctatgaaaaactcatagggtggggattttccccattctcaaggtaggaaaactgagtttttgagatgccaaagagcacaaaatc

SEQ ID NO: 551101 - DNA, 201 bp, Homo sapiens
caaaacaaaaatgttctagaggacacatacattcccttatccacagtgcagggccacagggtacagacagcagaaagtcatgtgttttggcttgctggtamtaccagagatcttcatccctatgctttgtgaagtgaatacatcaaagtgcctctcttccaagatggtttgactcaagttcatgttgatgaatgcatttta

SEQ ID NO: 551102 - DNA, 201 bp, Homo sapiens
cataccctagattgttggttatttaaccaaactcatgttatcaaagtttttgcttattaacttatacttaacagttcttccactaactttaattgaaatasacaaaggcagataggaacagggtgattggttcacttttgttggtataagtcccagtgaattaaacactttctttttcctgctagcactttgtgggctagg

SEQ ID NO: 551103 - DNA, 201 bp, Homo sapiens
aaacctaaccaacccatacaatgttgtatatatgtgggaaactgtattctggattcgaataaaccattaagagacagtcttttgaaatagcctgttgatamgccaagaaaaacccatgccagtacatgaggggagaaaataaatgtgataataggtgacgcggggaagagttaatccgtgatacctatacccacccatcag

SEQ ID NO: 551104 - DNA, 201 bp, Homo sapiens
ttctctggttggagtcacctgagccaatggtaaacctgcctctctgtttctcaccagtacccttcctatggttacgagcccatgggtggatggctgcaccwccaaatcatccccgtgctgtcccaacagcaccccccgactcacaccctgcagcctcatcaccacatcccagtggtgccagctcagcagcccgtgatcccc

SEQ ID NO: 551105 - DNA, 201 bp, Homo sapiens
cgtgtaaattaatcagtgtttgccaaacccagctgatattggaaccacccccaaagctttttcaaaggattgattccaagtctggtccttagagattctcrtttagtaagaattcagtgaaactggaaagctaatttttagtctcgtctctccctctgacctcaatcatcaactaataaagggttaagtttggaaagtcct

SEQ ID NO: 551106 - DNA, 201 bp, Homo sapiens
aaaacaatttttctcccagagtaggagttggcaaactacagcccctgggacaaatccagtccactgtctgtttctgtgaatacagtattaatttaacacakcccagtccattcgtttgcatattatctatggcttctttcagctacaacatcagagttgagtagttgtgacaaaatctgtatagcctcaaaagcctgaaat

SEQ ID NO: 551107 - DNA, 201 bp, Homo sapiens
ggggctgggactctgcagccacattgcttgggatccaactccagtttgaccattgctagcttggaaatatgggcaaattatttatctctgtgcctcagttrccttatctatgaaaggagacatggtaagagtacctacctcagagttgtttgaaggattaaagggttcttatgtaatgggtttatttaaaattttcaggat

SEQ ID NO: 551108 - DNA, 201 bp, Homo sapiens
tcatagtgaagagaagaaaactttccccatacaatttggaagaaactgttactacttatttgtatctcatctgatgcttccttcaggactgcagaggattrtgttttctctaggagatagtcagtatcttagaggctgggcagctagagtttgcctcactgaacactaaatgatctttgcttatattttccaactcagaca

SEQ ID NO: 551109 - DNA, 201 bp, Homo sapiens
attagaggacactggaggagaaacagctctattcgttccttttagtgtacacacattaagtcacatatcagtttttttagcttttattttaggtttggggktacatgtgcaggtttgttatatagataaattgcgtgtcacagtggtttggtatacagatacttttgttattttgttattttgtattttgttacctaggtt

SEQ ID NO: 551110 - DNA, 201 bp, Homo sapiens
tttgcctgcctcctgggagcagcttttgccatgcctgtgagtaaaacaccccttgcataagtcagtgtccaatttcacaaacttggacataaaaatctgcycatagttggtgaaattagggtttaaaacagtatgagatcagatgtcttcatatgtctctgggttgaagaaacacttcaggagcttgttttaaaaaggtat

SEQ ID NO: 551111 - DNA, 201 bp, Homo sapiens
aaaagtgatatcagaaacttggataattttcttactagaaaatctctacttagtcattgtaaaactggatgttgagtttgaagtgacaatgtgctataggyttacctcctacaattcaaagctcactatagactataattttccattgattaattcattgacttattcattgtacacttgcttagaccatagtacctatgg

SEQ ID NO: 551112 - DNA, 201 bp, Homo sapiens
tgccactaattacaactttgctcaattagatcaatctaatcaaattccagaatgaaagaaaaagcccatgtgttataccaaggtagaggggtaaaacacayatgaatttaataggtagatgatcagaggttcttttagaaagtgaatagctttggtcattgcttagggaaaggggaggctgctgagaacatggaaacaaag

SEQ ID NO: 551113 - DNA, 201 bp, Homo sapiens
atcatttctgctggttactaagttccacaaatagctaatgaggccaaccacctttgaaatcaaagtgctgtgccccatctcctaatggagccacagtatgmtaagggaagtgaaacttctagagtcagcacccagatggtgttgacaaagaaacccacgtgcatggtgcagtgcagactattttttaaattggcctcaaac

SEQ ID NO: 551114 - DNA, 201 bp, Homo sapiens
ggacagtgacgtacaaactacctaaacacagatgttttatctgacatttttatcctttacaatacatccttgcctataatgtatgccccacaaaaatcacrtaaaataccaagtgatgagcaattattgaagagagacccatataaaaataattatttcactggctctcagaagacaatttgtgattagaaaaatgcacaa

SEQ ID NO: 551115 - DNA, 201 bp, Homo sapiens
caaattcgggctgggcccagtggctcatgcctataatgctagcactttgggaggtggaggctcaaggatcacttgagcccaggagttcaagaccaacatgrgcaacaaaaaaatattaaaaattagccaggcctggtgccatatgcctctagtctcagctattgagaaggctgagggagaaggatcacttgaacctgggag

SEQ ID NO: 551116 - DNA, 201 bp, Homo sapiens
gtggatggattgcttgagtttaggagtttgagaccagcctaggcagcatgacaaaatcctgtctctacaaaaaatacaaaaagtaatagggtgtgttggcrtgtgcctgtaggaccagctacttgggagtctgaggtgggaggatggcttgagctcaggaggctgagcctgcagtggacggagatcgtgctactttactcc

SEQ ID NO: 551117 - DNA, 201 bp, Homo sapiens
caacgagactctgtctcaaaaaagaaaaaagaaaagaaaagaaatgggctgcatatctgacccactgtctcaaaatctgcatttttaccatgcccacccgcccccctccccaacctggtgattcgttttctcattgaaactggagaagcactaatctggttcacctacttcccatccagttttacagatggaggaaatgaa

SEQ ID NO: 551118 - DNA, 201 bp, Homo sapiens
tgttcctttttttttttttttttttttttggactcattcactctgctctgattccacctctcagcataatttgatgaaaatctgggtgggggatatcaaartagaaaagtagcttataagatgaggttaaacaaaagttggtgagtcaaatgtttggaaagaaggggaaacagaaatgggcgggatagaaagatggtcttg

SEQ ID NO: 551119 - DNA, 201 bp, Homo sapiens
taatgatatttttcaagtaaattcagtaaataattctcagtttgtaaatactttgtttcttatatgctttctgtttcttctttccccatactttaaaattrtaattttgtttttcaaatgcaaaagccaaaacaaacaaaaatctcatgacatataccaggtgcaggtataaaatgcaaagggatccttcaactctaaaac

SEQ ID NO: 551120 - DNA, 201 bp, Homo sapiens
tgtattggctatgaaaaattttcttctgataactattgccaaagaatctcttcagttggagggctgacttcttgcttgccgtagggaagggaacagggatragtgtttgactgactgacttctgggagtatgcatagaaaaacccttgggtggggcaacatattactatttttaggataaaggtttaaaaataccactctc

SEQ ID NO: 551121 - DNA, 201 bp, Homo sapiens
atactagaaattacatataaaacataacatgttttatgttacctatagtatatgtagtaataatatctagtggcttcccttgagaaaaatagtttcctggyatggggagtggacaatatataaatatcagtattcatcaagactggagacaaaattggtttaatgtacttaacaattttatgtacgtatcttcatttccct

SEQ ID NO: 551122 - DNA, 201 bp, Homo sapiens
ttataggccccagtctgtgaaaatatagaatgtacttttttttaagagacagtttctttaacattcatttagagacagtttcttgctctgtcccccagacygaagtgcagtggtatgatcatagctcactgcagcctcaaactcctgggctcaattgatccttctgcctcagcctcccaagtagctgggactacgggtgta

SEQ ID NO: 551123 - DNA, 201 bp, Homo sapiens
atttgccagagtgtggattattctaataatgttcatgaagtcagggtaagtacattaaaaatactcttaatcagtaaaagtggtttgatttttataggccycagtctgtgaaaatatagaatgtacttttttttaagagacagtttctttaacattcatttagagacagtttcttgctctgtcccccagactgaagtgcag

SEQ ID NO: 551124 - DNA, 201 bp, Homo sapiens
taatgattccatgccttgtacattttgtgcaatatacaaatgtttattttggacttacttacaatgagtataaacccatacaatagtgtcattttggtgtwtataacacgctttccctttttacagatagctgctgctctgtggtggtactttgtatctaaaggagttgagtatttggacacagtgttttttattctgaga

SEQ ID NO: 551125 - DNA, 201 bp, Homo sapiens
ttctaaagtaacccttattagctgttctggcattgaaagttatttaacttttcttagcctcgttttccccacttaaatacctaccatctcaggttattatyggagtaaagtaagataatttttgcatagtgtttggcacgtattaagcactcagtaaacagtagcagctatttatttataattcttattcagtagtttctg

SEQ ID NO: 551126 - DNA, 201 bp, Homo sapiens
gatacagcataccacactgtacatcaaaaagaatgagcacttttacttactcttaatttctggcagaggtttggacctatttctttaattttttttttctwcccgctactcagaactttctttgaagtcagtaggaattctgtgtgtggtaagggtgagagataatctatgatgttaggaattaaaatctcctcacagata

SEQ ID NO: 551127 - DNA, 201 bp, Homo sapiens
ccagtcaccagtctacttactggtagggtcttgtgtgctttctctgatgcctctgttatttcctgtttctctttacttttttactcttctattggcctctrttagtgtttcatattgtaagatcttcagcttctcactagtgtctctttccctctctcctgtggtagtcctctctttaaatttctctgttgaatgaaaacg

SEQ ID NO: 551128 - DNA, 201 bp, Homo sapiens
ctctgttgaatgagagaacaacagtgcaccacactatatataaaaaagaatgaacatttttatttacttataatttgtggcatcagcaactcaggaggctkaggcaggtggatcacttgagccctggaggtggaggctgcagtgagccatgtgtgcaccactgccctctagtctggacaatagaatgagactccatttctt

SEQ ID NO: 551129 - DNA, 201 bp, Homo sapiens
tctctacttctcctaagtgaaaggaatatacagttgtttttagaatattttagctgtttcaccacagtttacttccctctacccttgaatgaggagttgaygtgagtactgtcagagtatttggagaggcatactagggcaaaaggtgtcaaaggcaaggggaacagcttgactgaaaaccatggaaactgggaaggtgct

SEQ ID NO: 551130 - DNA, 201 bp, Homo sapiens
tgacttgaggataaagttattatgccaacatagaggaggatctgggaaaagctctaggaagggttcttggacactgaggaaaccttgaatatcaacaaatrtgcttttggatttggcagaaaggatagagaatagaggaatagtgtgaaaaaattatctactctttatttattcatcaaatatatttttaggtactttgat

SEQ ID NO: 551131 - DNA, 201 bp, Homo sapiens
ggcttatgataccatttctttccgtatttacttgccatgtacaggcacagttctaggctctggaaaggaaaggaggacacttggtcactgccctcatgcakcttgcaaagtctagggggtcactgtcattcccctttccttgatatcatggtctggaggcagtgtgatctgtcagactcaggactagctggggcctaggga

SEQ ID NO: 551132 - DNA, 201 bp, Homo sapiens
tttgtttctaaatagctgttgttcacagggtatgggtgctgtctgttggttgggggtggtaatgattggcattggccctcttttcgcagatacagtacccygcattttggtgaaaaaaattgtctacttggtagttgcagttagaacataacttgctgggtccttgaattaactttggaggggtcagaaagaagggatgag

SEQ ID NO: 551133 - DNA, 201 bp, Homo sapiens
aattaaatactttttccccaaaggcatgcagtcatgagaattacagaaaatttgcaacatataaagtagtttgatctaagaggattcaacacctttgtttkgttgctcagtgtgtaatgactgagatttgtaaatctttgtgaacattctgtactggttcccaagagctattcattccctgctacctgatttcagcacaat

SEQ ID NO: 551134 - DNA, 201 bp, Homo sapiens
tctgaccatttgtttctaaatagctgttgttcacagggtatgggtgctgtctgttggttgggggtggtaatgattggcattggccctcttttcgcagatayagtaccccgcattttggtgaaaaaaattgtctacttggtagttgcagttagaacataacttgctgggtccttgaattaactttggaggggtcagaaagaa

SEQ ID NO: 551135 - DNA, 201 bp, Homo sapiens
ggagtatttttcaggtccaggccgaatagacctgaagtctgtggtgtcccatttacgtttactctccctcattctatgcccctcgtgttcctttttttttttttttttttttttggactcattcactctgctctgattccacctctcagcataatttgatgaaaatctgggtgggggatatcaaagtagaaaagtagctta

SEQ ID NO: 551136 - DNA, 201 bp, Homo sapiens
atatggtaaaacctcaaatctaaactttaaaaatatctagcttaatctgaagggaaaactttttcattagtactactttatatttttcatttctaatctgkactcaagattaaatattaaaaaataatgtgtattcatttattgtacatctcagtggcttactgcctaataaaattttctgtatcttgtaattacctgttg

SEQ ID NO: 551137 - DNA, 201 bp, Homo sapiens
ttcagaagatctcaactttgacactgggaaataagctatttaataagccattacagctgaaaatggttaaaaggcagttttcaatggagtgtttcttcagtttttttttttgtttctatgcgctattacactgatgttacactgtacctgcaaaaactgggaaagatgtgcccttcccttcacgtctgtgatttcggttct

SEQ ID NO: 551138 - DNA, 201 bp, Homo sapiens
taaggaatgaagtaaaaggtcattgagctttgtagagcacatatattcactaaatactaggttgatgagttgttgacttgaggataaagttattatgccarcatagaggaggatctgggaaaagctctaggaagggttcttggacactgaggaaaccttgaatatcaacaaatgtgcttttggatttggcagaaaggatag

SEQ ID NO: 551139 - DNA, 201 bp, Homo sapiens
agtgtattcaaagtgaattatgaaagtatttgccaaattgcataatacaagagctagaaacttgttagtgaaaggataatgaaattcattcaggactaacmgtattttacccagtggctattcaacttatagaactgttagagtcaagggaagattttggctaaagttcccattaactcacacactcacacactctaatgg

SEQ ID NO: 551140 - DNA, 201 bp, Homo sapiens
gtataaaaagttaacccttgttaacattatgtcttgacccattcttttattgatacatcagaatctatttcattttaatcatctcactttgggcttttttscttttaaaaattcttaaagttgaaagtgattctttttgtatttattctgaaatatctactaaattttatccaaatattatttttttctttttttgggacg

SEQ ID NO: 551141 - DNA, 201 bp, Homo sapiens
tcccatatcatataaaatttcagggaaaacagaagcaaaggagagcttgggggtggggagaaaagacaaatgtgctctatgtcctagtaactcttagactsagtaaagtgttaataccatacccagatgttttatttatgaagtttttattttaaacattttttttaaaaattagccttgatattctccagaccaaagcaa

SEQ ID NO: 551142 - DNA, 201 bp, Homo sapiens
gagccaccacacccagccatcatttcattttttaaaaaatttgaggcaagtataacttttgctttttatctgtgactactttaatacctaaagatttgccycagagatgagcataaaccaagactaaaggtagaaaacaatattttgatggggaacgggtctagtagttctgatccaaagaataccaagacacagcccctc

SEQ ID NO: 551143 - DNA, 201 bp, Homo sapiens
taaagaactaatataatagtgaatattaactatagtgttgctgggagtagttaactatttcaagcttattttcaaccaattcatatcatttttaatgatawttttcaagtaaattcagtaaataattctcagtttgtaaatactttgtttcttatatgctttctgtttcttctttccccatactttaaaattataattttg

SEQ ID NO: 551144 - DNA, 201 bp, Homo sapiens
gtgaaaagccctgcctttgtggggctggcattttagtgagggtgagaaggcagacagcagccatgtaaacaaatgactaaggaggaaataaaacctagaakgtgactgagagaaaatgagagactactcagatgtattggctatgaaaaattttcttctgataactattgccaaagaatctcttcagttggagggctgact

SEQ ID NO: 551145 - DNA, 201 bp, Homo sapiens
cagggtcttgctatgttgcccagtctggtcttgaactcccagccgcaagggatcctcttgcctcagcctcccaaagtgctgagattacaggtgtgagccaycacacctggcaaaatgtactttaatatgatagtgaaattatactagattgttatgagtcagtaaaactatgcttttttaaaaagtacttaatttaaaatt

SEQ ID NO: 551146 - DNA, 201 bp, Homo sapiens
cgaatcctcgtctctacaaaaaacacaaaaattagctgggtgttgtggcatgcacctgtagtccaagctacttgggtggctgaggcacgaaaatcgcttamgccctggaggtggaggctgcagtgagctgagatcatgccactgcattctagtctgggcaacagagccagacccagtcccaaaacaaacaaacaaacaaac

SEQ ID NO: 551147 - DNA, 201 bp, Homo sapiens
ataatatggaagacaaatgtttccttaacatatttattttctgtgtatgaagtttttcattaacttttcatcccaagataaccacctctgtttttagtgcrctttatttcttgtttttgttctgtagggtctctgtaaaacataatgtgtgacataagtaatgaagcataattttcaaaagccacttgcaggagtcagtat

SEQ ID NO: 551148 - DNA, 201 bp, Homo sapiens
ctacattcggacatacaaagagcctaagaaaccaaaagctggaaaaacagccatgaatggtatttcagcaaatggtgtgagcaaatcagaaaaacaactcrtgatagaaaatggaaaaaagcagaaaaatggaaaagcaaaaggagattaaattgaactgggccttaactgttgttgacagtgaggaaaaactcccatatc

SEQ ID NO: 551149 - DNA, 201 bp, Homo sapiens
ctatgcacagtagcagagccagtgttagaactcagccagtcagctggtcatggtggcttcttactagtgcctctttccttctctcttttggaaattctctrttgaatgagagaacaacagtgcaccacactatatataaaaaagaatgaacatttttatttacttataatttgtggcatcagcaactcaggaggctgaggc

SEQ ID NO: 551150 - DNA, 201 bp, Homo sapiens
tttttagtagagacagggtttcaccatgttggccaggatggtctcgatctcttgaccttgtgatccgcctgcctcggccttccaaagtgttgggattacargcatgagccaccacacccagccatcatttcattttttaaaaaatttgaggcaagtataacttttgctttttatctgtgactactttaatacctaaagatt

SEQ ID NO: 551151 - DNA, 201 bp, Homo sapiens
gcttggccctgccttctgccgcatccccgccgccgcggcgccttgaggagcaggagaagacgcagccgggccgccgccgttagaggggttcccggccgccsctcgccccgtcggccgccaccgcctccggggtcagccctctctctgggtctccgctttctcctgccgccagcgcccgctcatcgccgcgatggggctcct

SEQ ID NO: 551152 - DNA, 201 bp, Homo sapiens
atttatcttcctttctttgttacatggagtatggcattaatcagagtacttttgctctttgtataagtctcatgggaaaaacagcgcctgccttaaagttkgtggaaaagaacaggataccacagcaactccttctctgtgacctagaacagagagtttgtctaaatgtttcttctctaatatagggggtttgtctaaatc

SEQ ID NO: 551153 - DNA, 201 bp, Homo sapiens
agtgtttgactgactgacttctgggagtatgcatagaaaaacccttgggtggggcaacatattactatttttaggataaaggtttaaaaataccactctcacttacagatgtaaattttcaagtctttaaaaaatgagctattatgagaactgtaatctaggaggataaagaacctgagatttgcaacagatttcatttga

SEQ ID NO: 551154 - DNA, 201 bp, Homo sapiens
gtgtttgactgactgacttctgggagtatgcatagaaaaacccttgggtggggcaacatattactatttttaggataaaggtttaaaaataccactctcacttacagatgtaaattttcaagtctttaaaaaatgagctattatgagaactgtaatctaggaggataaagaacctgagatttgcaacagatttcatttgaa

SEQ ID NO: 551155 - DNA, 201 bp, Homo sapiens
tgcaaattgtttgattaaatattgtgtttcgtatcttgtatcttactgtctattgacagtatatagacacagattaattttttaagtaaggtattttaatrcctagttcactaatccagaagcattttgcatatacaggctttagtaaaaatgacagtttaaatagggagttattatgatcaacaattaagttaaattcat

SEQ ID NO: 551156 - DNA, 201 bp, Homo sapiens
tgtttgactgactgacttctgggagtatgcatagaaaaacccttgggtggggcaacatattactatttttaggataaaggtttaaaaataccactctcacttacagatgtaaattttcaagtctttaaaaaatgagctattatgagaactgtaatctaggaggataaagaacctgagatttgcaacagatttcatttgaaa

SEQ ID NO: 551157 - DNA, 201 bp, Homo sapiens
gtttgactgactgacttctgggagtatgcatagaaaaacccttgggtggggcaacatattactatttttaggataaaggtttaaaaataccactctcacttacagatgtaaattttcaagtctttaaaaaatgagctattatgagaactgtaatctaggaggataaagaacctgagatttgcaacagatttcatttgaaat

SEQ ID NO: 551158 - DNA, 201 bp, Homo sapiens
atctctgtagaatcttagaggcttgatgatgatggtgttggtgaaaataagaaagaattgcagtaaagtcttgtctggtgacccagagatcaccatgactygaggcacaaatcactgtggggaaacaattttttgtgatgaaaaggcagcatttgaatactcctgttagtagcagaaatatattatgaaaattaagattat

SEQ ID NO: 551159 - DNA, 201 bp, Homo sapiens
ttgacactatgtaacatctacctatggaatagacagaaaatgttctctaacttattggcactgtatagatagagctttggactctttcttttctatttttcccatggagagatgcttaggtttttcaaacctacttagccattaatgattccatgccttgtacattttgtgcaatatacaaatgtttattttggacttact

SEQ ID NO: 551160 - DNA, 201 bp, Homo sapiens
tttgttttgcaatctactgctgtgtactgttatggaaaaagaagaagttttaaacatgcttaagttattaatgtaaaaatcaaatgctagatgtatttagwtttaattattttttatcctaacaggaattttgtgtgtcttctggaaccgtattatattgatcagtaactgttgctcattttacctgaatcaaaagggcca

SEQ ID NO: 551161 - DNA, 201 bp, Homo sapiens
ttctttaacattcatttagagacagtttcttgctctgtcccccagactgaagtgcagtggtatgatcatagctcactgcagcctcaaactcctgggctcarttgatccttctgcctcagcctcccaagtagctgggactacgggtgtaccccaccatgcctagatatttttttactttttgtagagacagggtcttgctat

SEQ ID NO: 551162 - DNA, 201 bp, Homo sapiens
atttagattttaattatagaacaaattaatgcacagtaacttctagcaatcggaatgcatgaaatttttaatgcatttgaaatttttaaagaaaatattgygtttaaaataatttgaaaggctacattttgtatataattgtgtttttaatgctgtgtttactaaaactttactacaaatattattactctttttccagtt

SEQ ID NO: 551163 - DNA, 201 bp, Homo sapiens
tcaaaggaaatcctaaaggctagattgacacagccattttttaaattgcatatgtataaagaatttgtttcctaagagactcattaaaattctgtatgaasccagagaactgactagtaatgctaggaaaataaacaataactcttcttagaaaaagaaatatttctttacttgaaaacttagcctcgagtctcaacttca

SEQ ID NO: 551164 - DNA, 201 bp, Homo sapiens
aagttgtttaaagtggaattttgaataagaccaactggattctaaagtaacccttattagctgttctggcattgaaagttatttaacttttcttagcctcrttttccccacttaaatacctaccatctcaggttattatcggagtaaagtaagataatttttgcatagtgtttggcacgtattaagcactcagtaaacagt

SEQ ID NO: 551165 - DNA, 201 bp, Homo sapiens
cccagacataactgttagctactctaaaagtacatttttgacatttttcacttttgaataacaaaaatattaaacatgaggtataggaaagttgtttaaartggaattttgaataagaccaactggattctaaagtaacccttattagctgttctggcattgaaagttatttaacttttcttagcctcgttttccccactt

SEQ ID NO: 551166 - DNA, 201 bp, Homo sapiens
gcagcctccaagctgccctgataaatttcacgtgtataatatggaagacaaatgtttccttaacatatttattttctgtgtatgaagtttttcattaactwttcatcccaagataaccacctctgtttttagtgcgctttatttcttgtttttgttctgtagggtctctgtaaaacataatgtgtgacataagtaatgaag

SEQ ID NO: 551167 - DNA, 201 bp, Homo sapiens
acattatagaattgtaattaaccctaacttaatctctcagtgcccctgtactcttgtcttcagtgtctcgagatatttcagcaaatggctaccatcgcccygtacgtacctctccagttacattcttgcctgctttaggagtggacacacagagcagcctccaagctgccctgataaatttcacgtgtataatatggaaga

SEQ ID NO: 551168 - DNA, 201 bp, Homo sapiens
ataattggcagcttaggaattcatacatatattattgggggcccagtttaaaacaatacagttaaaggcaacttctgtaattttaaaagaaaattagtaamtctgaactgacttagatcactttatgacaaaaattaattattattacatctataccttgattaaattaatattctgaaaagaaagaatgtcattgagttt

SEQ ID NO: 551169 - DNA, 201 bp, Homo sapiens
tgagggagaaggatcacttgaacctgggaggtgaaggcttcagtgaaccataattgtgccactgcactccagcctgggtgacagagtaagatcctggcccwataaataaataaataaataaataaataaataaataaagtagtcaaattaatagaaacagaaagtagaaagatgtttgctagggcctggggagaaggagaa

SEQ ID NO: 551170 - DNA, 201 bp, Homo sapiens
gcgagatgttcaacattcacctgatcagtttctcccagatctgctcctcttcctttactctgttatggatcatgacttcactgtctgtgttgccagatagrccagaaatctgggagtaatcctgaacttttctttgactctcttctctcacatccacaacagtcgtggagtctgtagattttacccacgaaaccttcgtat

SEQ ID NO: 551171 - DNA, 201 bp, Homo sapiens
tagaaacagaaagtagaaagatgtttgctagggcctggggagaaggagaactgatgacttgtttaataggtatagagtttcagtttttcaagatagaaaasttccagagagtcacaacaatgtggatatgcttaatgatactggactgtacacttaaaaatgattaagatggtatattttatgttatgtgcttttcttttt

SEQ ID NO: 551172 - DNA, 201 bp, Homo sapiens
atttctttaattttttttttctacccgctactcagaactttctttgaagtcagtaggaattctgtgtgtggtaagggtgagagataatctatgatgttagraattaaaatctcctcacagatacatttatcttcctttctttgttacatggagtatggcattaatcagagtacttttgctctttgtataagtctcatggga

SEQ ID NO: 551173 - DNA, 201 bp, Homo sapiens
tatggaccctctactgtagtcaaattcgggctgggcccagtggctcatgcctataatgctagcactttgggaggtggaggctcaaggatcacttgagcccrggagttcaagaccaacatgggcaacaaaaaaatattaaaaattagccaggcctggtgccatatgcctctagtctcagctattgagaaggctgagggagaa

SEQ ID NO: 551174 - DNA, 201 bp, Homo sapiens
atagattctgttctgcaccctttccttttggaaatttctcggtctttgtgacatggttttctcttttcctgcctctctggcttatttgctgccatttcacycactcatcttcaactgtcctcagagtcattcctttttcatgttattctctcactgtacatgctccttcccttgtgacctcaaactctggtgtgattgtca

SEQ ID NO: 551175 - DNA, 201 bp, Homo sapiens
cacagatgtgtgtttttaactaattttatatattttttcacacacgtacatagcagcattattcacagtagttaagaggtggaaacgacccagatgtccartgttggataaatggataaacgcaacgtggtatatacatacaatggaatattattcagtcttaaaaaggaaagaaattctgacatgtgctacaacatagat

SEQ ID NO: 551176 - DNA, 201 bp, Homo sapiens
taaacaaatgtagatggttttagaagatgaggaagtggctgatttattcggatagaatctaggaagaaatcaagtcaactttattttgtgacttaattgcmtgttaaagtaggctcacatttctgagtagaccagagcagtgctccttagactttaatgtgtaaagtcactgtggaatcttattaaaatgcagattctgat

SEQ ID NO: 551177 - DNA, 201 bp, Homo sapiens
ctagaaagtaacagagttggaataggatcaagatctttctccttcccaacagtgacctttttataatgcaacatagcctacttatttattcaataaatacmattttattgcccagtaataatagtgaacatttattggatgcttactaagtgtcaggcactgtgtccagtgttttatatgtattatcacatttagtcctca

SEQ ID NO: 551178 - DNA, 201 bp, Homo sapiens
cgcccccgcgcgcggccacgtgacgccggctgaggagattggaggggcggctgcgcgaggctgcagactggtgcagcgcactgtgctggcggctgggcctyctccacctcctcgtctttctcccgggaaccttgacgacgccttccgcttggccctgccttctgccgcatccccgccgccgcggcgccttgaggagcagga

SEQ ID NO: 551179 - DNA, 201 bp, Homo sapiens
cctagcccagtgctcttgtcttcccgtcacactagccaagcaagaaagaaataatcaggcctgtaatctgtgtttctcttttattttaccttttcttttaytgttatctacagagtatcactgtttagaatactaaatctgaacaaagtcataatattaccaaagatcatctaaagaaagacatctaaatattcaaaggtg

SEQ ID NO: 551180 - DNA, 201 bp, Homo sapiens
tatattacatttattttgtgatactcagcttttgaggatggcatattatgtcgttttaggcaagttattcatgactctttgggtctcttatttctacctgygctgtgagagggttgaactacataacctttaaggcttagtttattgaatccttataacatctcctaaaacagcagcctagatatcagtctaaactcagtc

SEQ ID NO: 551181 - DNA, 201 bp, Homo sapiens
agtgagtcatccaggtttgatgaagctgggggctagtgggaggggatgtttaactcagctcaaataagctgaagtaaaagcaggtttgtcttagggattgstaggtcccagaggagcatgtattttaagtattgtacagtatgcttacattaattttattattcgtcacagttaatgtttagtttttcatctatgttatta

SEQ ID NO: 551182 - DNA, 201 bp, Homo sapiens
agttattatgatcaacaattaagttaaattcatttaggttggttctaagaagttgaattttcttttactactttaaaaatacattatttcttcaaaatacracataaaatgttttgcattgccaagaataaactagaaattagatttgcaaccttcaactgttgtttagcttttagaaatataaaaattaatattaatata

SEQ ID NO: 551183 - DNA, 201 bp, Homo sapiens
tttccgtatttacttgccatgtacaggcacagttctaggctctggaaaggaaaggaggacacttggtcactgccctcatgcatcttgcaaagtctaggggktcactgtcattcccctttccttgatatcatggtctggaggcagtgtgatctgtcagactcaggactagctggggcctagggaagatcagaaaagtccttc

SEQ ID NO: 551184 - DNA, 201 bp, Homo sapiens
tctaagcacgctacaaagtacgtagatttatgtatgaatagaaaaataatatgtattttttccctacaggtgattttcttaacttaaaattttattacctytcttcatcttgtccttgcttaaaaattttgttttttatttcatttttcagtctttaacatatctcatatatttagactaaacagctgaaaagaaagcaca

SEQ ID NO: 551185 - DNA, 201 bp, Homo sapiens
ttttcttctgataactattgccaaagaatctcttcagttggagggctgacttcttgcttgccgtagggaagggaacagggataagtgtttgactgactgasttctgggagtatgcatagaaaaacccttgggtggggcaacatattactatttttaggataaaggtttaaaaataccactctcacttacagatgtaaattt

SEQ ID NO: 551186 - DNA, 201 bp, Homo sapiens
attccaccatgctatgtgatcttaagataaaaatcagattaagaataaaaacttattggtggaagatattcaagggaaaccccatttcaggtggactctatttttttttttttgagaaggagtctctctctctctctctgtcacccaggctggagtgcagtgcgtgattccagttcactccaacctccacctcccggattc

SEQ ID NO: 551187 - DNA, 201 bp, Homo sapiens
ttgattaattttaaagtgcaatgtcattttagacaattttctattatgaaattaactttatcctccagctatatcgcagttatgcccacttgactctagawgacctattcatagacttattggtcccagcaaatctttgtttttataatatgcttaaaagactagacatagcccttactcctctaaggaaaacattctcta

SEQ ID NO: 551188 - DNA, 201 bp, Homo sapiens
gttgttgcacatattggtgcagtcggagaggtgagggagagagggaggtgaggggagagggtgggcagacaggcagacacttgtagagaccagttgctacrtgaacttacttgcaagtttttctgaggtagtataatgtaggctaagcatgaacaactaaaatcattttacaaagtaaacatcttagttcctctaccaagt

SEQ ID NO: 551189 - DNA, 201 bp, Homo sapiens
cttatacattcagttctctcagggtattcagatattctcatttgcttatatcttgtcattgtactaagggaacttttgtaggtctttctaattctgccccstgaaaaaagacttttctccctgtctgcttgtcaaattcctcttctttgaaaaaaagttcaaatgtctgtgtttataccctgccttctccccttttctgtc

SEQ ID NO: 551190 - DNA, 201 bp, Homo sapiens
catcacattttagatttgaacctaggagaggcctttaagatgtatagagtttactccgtttgttagaaataagctctttcccagactcttcttgacaaccrttgtctacagttttcattgaaaatttcttttaacaaatgttttgaagactcttacatacctgacattgttaacagagatacagcaaggaacaagggctgt

SEQ ID NO: 551191 - DNA, 201 bp, Homo sapiens
gcttgaggaatatattaagcatcacattttagatttgaacctaggagaggcctttaagatgtatagagtttactccgtttgttagaaataagctctttccmagactcttcttgacaaccgttgtctacagttttcattgaaaatttcttttaacaaatgttttgaagactcttacatacctgacattgttaacagagatac

SEQ ID NO: 551192 - DNA, 201 bp, Homo sapiens
aacttttctttgactctcttctctcacatccacaacagtcgtggagtctgtagattttacccacgaaaccttcgtatctacctatcctgttcattgccagygcagctccctaacccaggtttccatcatctcttatgtcctagtggtctccaagtctgcctgcctgtcagaatcacctgggggagctcagatcatagtgtc

SEQ ID NO: 551193 - DNA, 201 bp, Homo sapiens
ttccctcctgtctgcccatcacattctgacttctttgccattttttagcccagcctctgccttatctacccctgcattctgcaaaagctaccctttcctcscattcatccaggtgctcttccaaactcaaaccttccatcctcttttttgagtacataggggttagaacagaaattttccctgctaatcatgctgactata

SEQ ID NO: 551194 - DNA, 201 bp, Homo sapiens
tccctcataccttgagacattgcagctttcccctctttcactggtgaaggtctctgttccctcctgtctgcccatcacattctgacttctttgccattttktagcccagcctctgccttatctacccctgcattctgcaaaagctaccctttcctcccattcatccaggtgctcttccaaactcaaaccttccatcctctt

SEQ ID NO: 551195 - DNA, 201 bp, Homo sapiens
aagaaatcagaaaaaaaattggtctattagaggtttttaaggaagttgctttaataaacatactgataatttgttgtaagtattaattatagttgtttgtrtattaagtagaagttacctgggttagttgaaaactattagattacaggcattttattatttattaaaatctggtttatattgtcatgaaaaggagttttt

SEQ ID NO: 551196 - DNA, 201 bp, Homo sapiens
tccctctgctttttaactctgtcctccattctttcaggctcttgggtaactgttatagaactgagttagaggagacatcttgttttaaccctgtgctgaaygactctcagggcacctgctccctcataccttgagacattgcagctttcccctctttcactggtgaaggtctctgttccctcctgtctgcccatcacattc

SEQ ID NO: 551197 - DNA, 201 bp, Homo sapiens
taccattttattgcccagtaataatagtgaacatttattggatgcttactaagtgtcaggcactgtgtccagtgttttatatgtattatcacatttagtcytcatattccattgggctcggtaccgttattatccccattttccaggtgagtaaactgactttccctgaacctgattcatctaatactaaccctgtcaaat

SEQ ID NO: 551198 - DNA, 201 bp, Homo sapiens
gctttatggttttacaaacaacttcacaataactctgggagataggccttgaaggcattttttccatatatttagaagtctttgagatttacagaagttaygtaacttttgtaggtggtcactatagtgcaaatgaatgtgcatgggttgttttgtccctagcccagtgctcttgtcttcccgtcacactagccaagcaag

SEQ ID NO: 551199 - DNA, 201 bp, Homo sapiens
gtaaacttaagagccacagagcacttggtcatcctttaaaaattcaatttgttttcttatttttttgctcaagtcctgtggataatgtcacctgtaaatgmtttaacattattaacgtaagtattttcatttgttaagccacttattattctgaattaggcatatattagcacaccgaaatgagtagtgtaacagtctatc

SEQ ID NO: 551200 - DNA, 201 bp, Homo sapiens
cttttccttcaccacagtttgatttttggtggtagactgctagactttaatagctaatgctcttatccattccccaatgatagcataaagtaaaacatccwattgcagatggaattccaggagggtaaacaatgcaggttctaaaacgggtgtcaggacacagttttaactattttaacttagattctttggcttaggaag

SEQ ID NO: 551201 - DNA, 201 bp, Homo sapiens
ataatgctagcactttgggaggtggaggctcaaggatcacttgagcccaggagttcaagaccaacatgggcaacaaaaaaatattaaaaattagccaggcytggtgccatatgcctctagtctcagctattgagaaggctgagggagaaggatcacttgaacctgggaggtgaaggcttcagtgaaccataattgtgccac

SEQ ID NO: 551202 - DNA, 201 bp, Homo sapiens
ggggccggggctacggggaccccgtgggaggagctggagaggtgcaggcccagggcgtcgtccgagtgagcagcggtgctggccgtgtgggacccgggccygcttagcaccatggacggggtgggctcacgaccctcgactgcggggcccgggcggcggcgctagcagatccagcggatgaagcggtcgaagaagccgggt

SEQ ID NO: 551203 - DNA, 201 bp, Homo sapiens
gcctgtttcacccatagctccttcccggtgcctgtagctgccgctctgagcacggggtctctcggtccccctgaggccacccacacatgggtaggacctcrtccacttcctgggaggaagccccttcacctgatgtcaaggggagctggtggccggggttttaccacacagcccttcagcatcacccctgaggtcacgtgg

SEQ ID NO: 551204 - DNA, 201 bp, Homo sapiens
gaggagagaggggcattagtgaggagctctgcagagacacaggcagggaagggccagccctgcaggctgaggggagtgctcggtgggccgctggcatctartgttctcgacaaacagtctgcggaggaggctgagccctgggtcgggctggaggctgggttttgggacggccatcaagttatcgaggtgcttctgttcctt

SEQ ID NO: 551205 - DNA, 201 bp, Homo sapiens
gccaggagctcccagggggagttcctcacatgactccgacccggcagaatgctgggctggggctgctgggctggggctgctgggctgccgggagaacccaygctcccactgcagcagcaactaccctcccacccggtcaggcacccacaccccctgggccgaggctgaaggaggggtgcaaacggcccttacccggtttcc

SEQ ID NO: 551206 - DNA, 201 bp, Homo sapiens
agtgaccaagaggccaggcctggatctgctgctcagggaaatggagctgtccagtgacaccgaagtttgggatgcatcaggtctccaggccacggggatcygccaggagctcccagggggagttcctcacatgactccgacccggcagaatgctgggctggggctgctgggctggggctgctgggctgccgggagaaccca

SEQ ID NO: 551207 - DNA, 201 bp, Homo sapiens
cgcccaagccctggttagaagctgatgaagcaacgggcagggcaccctccaccacatcccacggccattggctcctcactgaccagtgtttccagaaaggycctctctgctcagcttctcagctggggctgcctccaggaggcccctggaagctggtgaccccgcctgccccgtaccctgacaaggccacttaccttgccg

SEQ ID NO: 551208 - DNA, 201 bp, Homo sapiens
ggccattggctcctcactgaccagtgtttccagaaaggccctctctgctcagcttctcagctggggctgcctccaggaggcccctggaagctggtgacccygcctgccccgtaccctgacaaggccacttaccttgccgccttggtctcctcgctcccctggactccctgcttcccccgggtaaccgtcggggccctgaga

SEQ ID NO: 551209 - DNA, 201 bp, Homo sapiens
gcagggggagggaggccgggcagcctgcggagggcctggggagacctggggctgggcgggggccggggctacggggaccccgtgggaggagctggagaggygcaggcccagggcgtcgtccgagtgagcagcggtgctggccgtgtgggacccgggcccgcttagcaccatggacggggtgggctcacgaccctcgactgc

SEQ ID NO: 551210 - DNA, 201 bp, Homo sapiens
ggctgcagggggagggaggccgggcagcctgcggagggcctggggagacctggggctgggcgggggccggggctacggggaccccgtgggaggagctggaraggtgcaggcccagggcgtcgtccgagtgagcagcggtgctggccgtgtgggacccgggcccgcttagcaccatggacggggtgggctcacgaccctcga

SEQ ID NO: 551211 - DNA, 201 bp, Homo sapiens
aaggctgggtggctgagtctctcccaggccactgcccactgatacgtgggtccaccgtgggcagaaccacgaggcttgggtgtgtgttggcctggcaggtyggggggagggcatggggactggccaccaacctacctcgggtcctgggactcctcttggcccccgagggcctggctcaccagggggaccaggatccgcctg

SEQ ID NO: 551212 - DNA, 201 bp, Homo sapiens
gatgaggaaaccaaggcccagtgaggtaacttgcccagggcactcagctaatagctgaggtctgaagcctggcagtgtgggctcaagtctgccctcttgayactgagctcccacatatgaccatcattacaacaaaagcaatatgagcagactggaagcagactgagagccagcaacaatcttcccagtgtaagatataaa

SEQ ID NO: 551213 - DNA, 201 bp, Homo sapiens
gtttgcaaaatgaatccaagttttacttggtagaaaaagcaagaagagttgagcaaaataaaaaatagagtgatgagaaagcttgtgctatcaaatgaaaygataaaattacagttttggttttggtgctggaacaggccaacactccacacaaccatgggcataacaacacacgagaacttaggctatgacatggtggcc

SEQ ID NO: 551214 - DNA, 201 bp, Homo sapiens
gagtcagatggaaagtaagtcacagcatatagggttagataaaaccatctgatgagaatttatggtttgtagggcatgactccccagaccccttagataasaatataggcaagataaaaaaatcagagcttagtcctcaacatacaaaaagttattgattttcttctatcagttagaagaaacattttctaacaaccagtt

SEQ ID NO: 551215 - DNA, 201 bp, Homo sapiens
gtgtagtgtcatgccagagtcagatggaaagtaagtcacagcatatagggttagataaaaccatctgatgagaatttatggtttgtagggcatgactcccyagaccccttagataagaatataggcaagataaaaaaatcagagcttagtcctcaacatacaaaaagttattgattttcttctatcagttagaagaaacat

SEQ ID NO: 551216 - DNA, 201 bp, Homo sapiens
cggggctacggggaccccgtgggaggagctggagaggtgcaggcccagggcgtcgtccgagtgagcagcggtgctggccgtgtgggacccgggcccgcttmgcaccatggacggggtgggctcacgaccctcgactgcggggcccgggcggcggcgctagcagatccagcggatgaagcggtcgaagaagccgggttgcgc

SEQ ID NO: 551217 - DNA, 201 bp, Homo sapiens
tcctcactgaccagtgtttccagaaaggccctctctgctcagcttctcagctggggctgcctccaggaggcccctggaagctggtgaccccgcctgccccrtaccctgacaaggccacttaccttgccgccttggtctcctcgctcccctggactccctgcttcccccgggtaaccgtcggggccctgagagaggagtgag

SEQ ID NO: 551218 - DNA, 201 bp, Homo sapiens
caaggtcctggcctgggggtcccgggacattccagcccacgtgtggaggcagccatgcggggaggctggcgggtcctgtccctaccaacctcgctgccacyctcctccccccaccaaccttgccctgtgaccttccccaaccaagcttgctctctgaccttgccctctgacctcctccactgatcttgctctctgaccgtg

SEQ ID NO: 551219 - DNA, 201 bp, Homo sapiens
gatttctcccgggggccctctgcgtcctgggcggccagggtccccctggaagggtttgcagaatcagcctcacgtcttttggcaggggaaggggggtgcasgatgcccgctgcgggggcaggacccacggtcgggcttgggactgcacctccctgatgtccacggggcacctgggatgccagatgctggctgggggctgct

SEQ ID NO: 551220 - DNA, 201 bp, Homo sapiens
tcagcctcgtgaggagggcacaggtcagaggggctggtggctcagggcacatggcctgttcttcctgtccctccccgtgtccccagagcccaatgcggcamcatggtgacagcagagatggtggccagcgtgactgttcatctgggccatgggcgtgagtgtggccagctcagctgcaggcgaagaggcagaggggctcac

SEQ ID NO: 551221 - DNA, 201 bp, Homo sapiens
ctccctgatgtccacggggcacctgggatgccagatgctggctgggggctgctggaacctccgtgccagctgagggcagagtgtgtgtcacgggcaggacrcctgtgcatctgcacagaggactcagccagacttgggcttgggctgagggaaggtggacagaaagtgggaagccctaagtccaagctcccagaaaaaagc

SEQ ID NO: 551222 - DNA, 201 bp, Homo sapiens
cctccctgatgtccacggggcacctgggatgccagatgctggctgggggctgctggaacctccgtgccagctgagggcagagtgtgtgtcacgggcaggaygcctgtgcatctgcacagaggactcagccagacttgggcttgggctgagggaaggtggacagaaagtgggaagccctaagtccaagctcccagaaaaaag

SEQ ID NO: 551223 - DNA, 201 bp, Homo sapiens
gtgcccttcccccatggtcctcctcaagctgcaaggaggatgcccagagcggggccctgaggcaggggcaggagggactcaccggctcgcctttgggtccrcggggcccaggcccgcccttggctcctttcacaccaggacttcctggggctccattgttgccttgatacccctgaagaaggagaggacagcacagtcacc

SEQ ID NO: 551224 - DNA, 201 bp, Homo sapiens
atgggggcctggctgtgccttgccagcaggggatcctgcctacagcccaggtgcccttcccccatggtcctcctcaagctgcaaggaggatgcccagagcrgggccctgaggcaggggcaggagggactcaccggctcgcctttgggtccgcggggcccaggcccgcccttggctcctttcacaccaggacttcctggggc

SEQ ID NO: 551225 - DNA, 201 bp, Homo sapiens
gtgaactctggagagtgaggccctggggttctgttgttctctgggaggaatggggttggggccctcgtcagcagggcccatgggcaccacagtgagacccygggctgcctccacacgaggactcaccttctcccccttggggccatcgctgcctgggctgcccttggtgccggggtctcccctgcgcccctgcagagaaca

SEQ ID NO: 551226 - DNA, 201 bp, Homo sapiens
gctgtgcggggtgtgcctgggtgggtagtggagcttcctcagcagagaatggggtgtggggatctcagggctgcattcccagactctgcagagagtgaackctggagagtgaggccctggggttctgttgttctctgggaggaatggggttggggccctcgtcagcagggcccatgggcaccacagtgagaccccgggctg

SEQ ID NO: 551227 - DNA, 201 bp, Homo sapiens
gggggagggaggccgggcagcctgcggagggcctggggagacctggggctgggcgggggccggggctacggggaccccgtgggaggagctggagaggtgcrggcccagggcgtcgtccgagtgagcagcggtgctggccgtgtgggacccgggcccgcttagcaccatggacggggtgggctcacgaccctcgactgcggg

SEQ ID NO: 551228 - DNA, 201 bp, Homo sapiens
ggaagaaaggggaggaatttggggttctcttgactgacagcagcaccctggagtccccagtatcaatcctgtggacactgcagggcctcgggggtaagacrggtctggccccggcccctatgaccctccccggaggctgtggctccacttgaccttcagccctgagcacactgagtggagtaggctgggttctgggtgtag

SEQ ID NO: 551229 - DNA, 201 bp, Homo sapiens
tgactgacagcagcaccctggagtccccagtatcaatcctgtggacactgcagggcctcgggggtaagacgggtctggccccggcccctatgaccctcccsggaggctgtggctccacttgaccttcagccctgagcacactgagtggagtaggctgggttctgggtgtagcccctgcctaagcacccctatcttgggttg

SEQ ID NO: 551230 - DNA, 201 bp, Homo sapiens
atttcaaaatgtggcaaagaaacatgttttggggtaaaatatttttattttcttcttggtcgtgtagtgtcatgccagagtcagatggaaagtaagtcacrgcatatagggttagataaaaccatctgatgagaatttatggtttgtagggcatgactccccagaccccttagataagaatataggcaagataaaaaaatc

SEQ ID NO: 551231 - DNA, 201 bp, Homo sapiens
aggaaatgctcaggttaagataaaagactgtggagaccaaggttcttctgaagtctcatagtggctgcccttagagacaatcaatgacaagtgtttcctaytgagacctttaaaagctgctagactctcggttaatctcttcagaattgggagggcctggaagaaaaagagctagctatgttaacagagattccttacaga

SEQ ID NO: 551232 - DNA, 201 bp, Homo sapiens
caatgggatgacctgcctgcagagaggagccacccactccagggccttctctctgctgagagctgaacatttgacaagacaacccgccgacaagacaaccygcctacagagaggggctgccccctgcgggtctcctgtgagctcccctaacactcaataaagcttctctgtcttgcacaccctccacttgtctgtgtacct

SEQ ID NO: 551233 - DNA, 201 bp, Homo sapiens
gagaaggaacaagaacaggtgcgcttcagtggccccagggacagtccctgcacacagcagggccccctgtgctgtccccaaccacgggtcctcccttggcggggggggagctaacaggtgcaaggagtaagacaaggctgtgcctcctccttccctatgctggcaccagagctagaaaggccatgagtggccaccgtcaga

SEQ ID NO: 551234 - DNA, 201 bp, Homo sapiens
gcacaggcccgtcctgaggcacgtctgccggcaacagggtcccccaggccggccccctgtcctgctcctcaggcagctgccccgaacccctaatacgtccygctgggggaggggcacgtaccttggggcctggctgtcctgagtctccacggggtcctgcatcaccggggtctccccgagatccctgagggcaggagagaa

SEQ ID NO: 551235 - DNA, 201 bp, Homo sapiens
catgccccgtccagccctgaccaccaggccacatggccgcagctcctcctgctgcctgtgggggccgtggacctctgtcttgagggtcccagctcctcctytccctgtggcccatccaggacctcaggcccactgccttgcccctgactccacaacctgggtccttcagggcaggatggggggctggggctgagggtgggt

SEQ ID NO: 551236 - DNA, 201 bp, Homo sapiens
cctgctgtggcttgtcgcaggcgatggagtagaggttttcactctcgtgcttctcgtggaacatgtccccgatgccgatggccgtcactgtgacgtcgcgrtcgcacagcgcccgcaagttgaggtcatcgtcccgagggtcgtggcgcccgtccgtgatgaccaccgcaaacacacgtgtcttctggcgccggctctcct

SEQ ID NO: 551237 - DNA, 201 bp, Homo sapiens
agagaaagaccctgtctctaaaaaaacaaatataaaagaataaattttacaaaaggatggaagagcaaggggcactggtgagggaggcaccatttgtacayggcaatgaaaccactgttactgagcagcgattctgaggcagggcacgtttttgcaggaagcctcacgggggagatctcagatgcctgctccccttcctga

SEQ ID NO: 551238 - DNA, 201 bp, Homo sapiens
agcatcacccctgaggtcacgtgggtgagcaatgcctcagtgggctgggggtaagaggtgtagcgggggtgtgagcggtgcctagtgggggctggggggtgagcggtacctcagtgggggccggggggtgtgagtggtgcctcagtgggccgggggtgaatggtgcctgcacagctgtgcggggtgtgcctgggtgggtag

SEQ ID NO: 551239 - DNA, 201 bp, Homo sapiens
tggaattaaaattttaacctatgatacagaactttattaaataaattcatctatttattgatatgctcccaatttaagtgcaaagaggagcagaggaaagrggaagaattaagaggtcaaaaggaagaaaagggaggaaactcagggcaggggatgaggtgggcagaggcttctggaacatcacagctgtgccctgtcctg

SEQ ID NO: 551240 - DNA, 201 bp, Homo sapiens
gcatcacccctgaggtcacgtgggtgagcaatgcctcagtgggctgggggtaagaggtgtagcgggggtgtgagcggtgcctagtgggggctggggggtgagcggtacctcagtgggggccggggggtgtgagtggtgcctcagtgggccgggggtgaatggtgcctgcacagctgtgcggggtgtgcctgggtgggtagt

SEQ ID NO: 551241 - DNA, 201 bp, Homo sapiens
catcacccctgaggtcacgtgggtgagcaatgcctcagtgggctgggggtaagaggtgtagcgggggtgtgagcggtgcctagtgggggctggggggtgagcggtacctcagtgggggccggggggtgtgagtggtgcctcagtgggccgggggtgaatggtgcctgcacagctgtgcggggtgtgcctgggtgggtagtg

SEQ ID NO: 551242 - DNA, 201 bp, Homo sapiens
atcacccctgaggtcacgtgggtgagcaatgcctcagtgggctgggggtaagaggtgtagcgggggtgtgagcggtgcctagtgggggctggggggtgagcggtacctcagtgggggccggggggtgtgagtggtgcctcagtgggccgggggtgaatggtgcctgcacagctgtgcggggtgtgcctgggtgggtagtgg

SEQ ID NO: 551243 - DNA, 201 bp, Homo sapiens
tcacccctgaggtcacgtgggtgagcaatgcctcagtgggctgggggtaagaggtgtagcgggggtgtgagcggtgcctagtgggggctggggggtgagcggtacctcagtgggggccggggggtgtgagtggtgcctcagtgggccgggggtgaatggtgcctgcacagctgtgcggggtgtgcctgggtgggtagtgga

SEQ ID NO: 551244 - DNA, 201 bp, Homo sapiens
gtacccaatgctctcggagctgtcgatgacgaagaccacgtccagggcgccacagcgcttctcacagtctgggggggtggcagggtcatcggggggtaccrgggagacctcagaccctagggtcacgtgcacatgcaggacccagcgatgacccagccctgctgcactcccgccctccacccggtgcatgggccccgaccc

SEQ ID NO: 551245 - DNA, 201 bp, Homo sapiens
ccctatgaccctccccggaggctgtggctccacttgaccttcagccctgagcacactgagtggagtaggctgggttctgggtgtagcccctgcctaagcamccctatcttgggttgcagccctcacctgggttccctactttggggtgcagcccttgccttggtcccttaccttggggtgcagcacccgcctgggtcccct

SEQ ID NO: 551246 - DNA, 201 bp, Homo sapiens
ctgccccgaacccctaatacgtcctgctgggggaggggcacgtaccttggggcctggctgtcctgagtctccacggggtcctgcatcaccggggtctcccygagatccctgagggcaggagagaaattcagaagtcagcacaggcagggactggccatgcccaggggtcacctgacatgccccgtccagccctgaccacca

SEQ ID NO: 551247 - DNA, 201 bp, Homo sapiens
aggctgtgactcacgggtgctcctcggggtcctgggtagctgaatccaggcctgccggggtctccctggaggaggacgttgagtcggtcagcatggtcatrggacggggtggggctggggggctgtgctcaacagggcgcaaggtgcacactggggtggaagtgggctaggggtgccgtcgagttctggctgtgagcagag

SEQ ID NO: 551248 - DNA, 201 bp, Homo sapiens
gggtgggcacaggtggccaggacccacacatacctcggggccgcgtgggccgggctcgcctttttctccctgtgaagcaaacagaagccagggtgactcarcctcagatcccagtgctccttcctccctctgggcagctttctgcagccccgtttccctccctcgctcattcacactctgggtgaggccactgtgctgcgt

SEQ ID NO: 551249 - DNA, 201 bp, Homo sapiens
gatttttatgtggaaaaatcgatctggcattttggggtcctttaaacgggagcatctatgtggtttttttggcaaagcctgaactttggttgaaaagggaycagccagtggctgacagctcccccagagctcagcataggtgacatggctgggccttggggagccaggaccatctcaagacaggggtggtcctgtcagtga

SEQ ID NO: 551250 - DNA, 201 bp, Homo sapiens
cctcgggtcctgggactcctcttggcccccgagggcctggctcaccagggggaccaggatccgcctgagaaggaacaagaacaggtgcgcttcagtggccmcagggacagtccctgcacacagcagggccccctgtgctgtccccaaccacgggtcctcccttggcggggggggagctaacaggtgcaaggagtaagacaa

SEQ ID NO: 551251 - DNA, 201 bp, Homo sapiens
gccctgaagtcctgcaacaggggtgggggtcgctcagacacccccagtgcctctcccctggcaccctcccccatggcaggcgcacgcacagcaggtcagcrggattgggggcactgccctcagtcttcaaggaagcggggtctgcgcccagcacacaccgtcaccagcatctggactggggggcttgcgccctcttgcccc

SEQ ID NO: 551252 - DNA, 201 bp, Homo sapiens
accagtgagatttttatgtggaaaaatcgatctggcattttggggtcctttaaacgggagcatctatgtggtttttttggcaaagcctgaactttggttgraaagggaccagccagtggctgacagctcccccagagctcagcataggtgacatggctgggccttggggagccaggaccatctcaagacaggggtggtcct

SEQ ID NO: 551253 - DNA, 201 bp, Homo sapiens
ctgtgggcttcgggacggcgacactcacaggctctcctttctctcctttcctcccaggttctcctttcaagccaaagtcgcctcggcctccctgtgacagrgaacacatgttagcctgggacagaggagctgtctctaccagggacaccagtgagatttttatgtggaaaaatcgatctggcattttggggtcctttaaac

SEQ ID NO: 551254 - DNA, 201 bp, Homo sapiens
ggccccctgtgctgtccccaaccacgggtcctcccttggcggggggggagctaacaggtgcaaggagtaagacaaggctgtgcctcctccttccctatgcyggcaccagagctagaaaggccatgagtggccaccgtcagagcctggcccaccagaggggtaggggcctggcagagctgggtgtcccagaaatggcagcca

SEQ ID NO: 551255 - DNA, 201 bp, Homo sapiens
gggctcaccctggggaaggaaggatgaggctgagactctggggccaaggctgggtggctgagtctctcccaggccactgcccactgatacgtgggtccacygtgggcagaaccacgaggcttgggtgtgtgttggcctggcaggttggggggagggcatggggactggccaccaacctacctcgggtcctgggactcctct

SEQ ID NO: 551256 - DNA, 201 bp, Homo sapiens
tcttgctctctgaccgtgccagctgaccttcccccacccctgctgctcttggtgtctagttttggcaggagaaggacactggttctgccccatgtgacacytaccgtgagaccggggtctccaggggggccgggctcaccctggggaaggaaggatgaggctgagactctggggccaaggctgggtggctgagtctctccc

SEQ ID NO: 551257 - DNA, 201 bp, Homo sapiens
ggcaaacagatccagcccttgaacgtccatcctccctgatgccctgtggcttggcctaagctccagctccaggaggccatcaggacgggcctcactgtgcygctgactccgcagagtggagctggaggccatcaggacgggcctcactgtgctgctggctccgcagagtggggctggcagcagccgggcagctgggcagaa

SEQ ID NO: 551258 - DNA, 201 bp, Homo sapiens
aagggccagcctctgtcagacaagggtttgctttgacccatttctcccagctctgagggaagcttcccacaaagccacctgcaaaatggagccagaagagmcccctggggtgggggtgcctggcccgtgggggtcccttctgcacccagtagctgtgactgtggccaacactgggctctgattctccagcgatgcctgggt

SEQ ID NO: 551259 - DNA, 201 bp, Homo sapiens
gtccttctgccctgagcagcaggaaggaggggctctgcctacccagccagcctaccttgcgaccgtcggctccaaattcaccctgtgtaggaggaaagccrgcgcagtgagctcggtgcctcaaagcatcatgggcactgctgcctctggggggcaaagcccttgggccaaactcaaggccacaggaccccccaggagccc

SEQ ID NO: 551260 - DNA, 201 bp, Homo sapiens
gcagagtgtgtgtcacgggcaggacgcctgtgcatctgcacagaggactcagccagacttgggcttgggctgagggaaggtggacagaaagtgggaagccytaagtccaagctcccagaaaaaagcccttggggatcctggggccgccaggggcggggcgacactgcaggcggcccaggagggcagagcccctggggcacc

SEQ ID NO: 551261 - DNA, 201 bp, Homo sapiens
acccctgaggtcacgtgggtgagcaatgcctcagtgggctgggggtaagaggtgtagcgggggtgtgagcggtgcctagtgggggctggggggtgagcggtacctcagtgggggccggggggtgtgagtggtgcctcagtgggccgggggtgaatggtgcctgcacagctgtgcggggtgtgcctgggtgggtagtggagc

SEQ ID NO: 551262 - DNA, 201 bp, Homo sapiens
cccctgaggtcacgtgggtgagcaatgcctcagtgggctgggggtaagaggtgtagcgggggtgtgagcggtgcctagtgggggctggggggtgagcggtacctcagtgggggccggggggtgtgagtggtgcctcagtgggccgggggtgaatggtgcctgcacagctgtgcggggtgtgcctgggtgggtagtggagct

SEQ ID NO: 551263 - DNA, 201 bp, Homo sapiens
cctgaggcaggggcaggagggactcaccggctcgcctttgggtccgcggggcccaggcccgcccttggctcctttcacaccaggacttcctggggctccaytgttgccttgatacccctgaagaaggagaggacagcacagtcacccagaggcaggggccctgaggcatggtcacgcctgtgcggtgtgtggtgtggagcc

SEQ ID NO: 551264 - DNA, 201 bp, Homo sapiens; identical to SEQ ID NO: 394819

SEQ ID NO: 551265 - DNA, 201 bp, Homo sapiens
gtcacgtgggtgagcaatgcctcagtgggctgggggtaagaggtgtagcgggggtgtgagcggtgcctagtgggggctggggggtgagcggtacctcagtgggggccggggggtgtgagtggtgcctcagtgggccgggggtgaatggtgcctgcacagctgtgcggggtgtgcctgggtgggtagtggagcttcctcagc

SEQ ID NO: 551266 - DNA, 201 bp, Homo sapiens
tcacgtgggtgagcaatgcctcagtgggctgggggtaagaggtgtagcgggggtgtgagcggtgcctagtgggggctggggggtgagcggtacctcagtgggggccggggggtgtgagtggtgcctcagtgggccgggggtgaatggtgcctgcacagctgtgcggggtgtgcctgggtgggtagtggagcttcctcagca

SEQ ID NO: 551267 - DNA, 201 bp, Homo sapiens
tccctcgctcattcacactctgggtgaggccactgtgctgcgttctgagctgtgctcttttcctgatgctgggctggacctatccttcactgagtcacccraagccttctcaccactctgtcccgcaggagggacctcacactttcttctgcacagaggaggccttgagggaactactaggaatcttcagggcccttggga

SEQ ID NO: 551268 - DNA, 201 bp, Homo sapiens
ggggccaagctgcctggcgttctcctgtactcatagatgcacacgctcagcctcagggcccctccctgcctctgcccagctgctgtgggcttcgggacggygacactcacaggctctcctttctctcctttcctcccaggttctcctttcaagccaaagtcgcctcggcctccctgtgacagggaacacatgttagcctgg

SEQ ID NO: 551269 - DNA, 201 bp, Homo sapiens
cctatgctggcaccagagctagaaaggccatgagtggccaccgtcagagcctggcccaccagaggggtaggggcctggcagagctgggtgtcccagaaatrgcagccaaaacagctcattccaatccatgggtattccaccccattatcatgtacccaccaactccacgcccacccatccacccattcgcccattcgccca

SEQ ID NO: 551270 - DNA, 201 bp, Homo sapiens
gggtgagcaatgcctcagtgggctgggggtaagaggtgtagcgggggtgtgagcggtgcctagtgggggctggggggtgagcggtacctcagtgggggccggggggtgtgagtggtgcctcagtgggccgggggtgaatggtgcctgcacagctgtgcggggtgtgcctgggtgggtagtggagcttcctcagcagagaat

SEQ ID NO: 551271 - DNA, 201 bp, Homo sapiens
ggccctgaagtcctgcaacaggggtgggggtcgctcagacacccccagtgcctctcccctggcaccctcccccatggcaggcgcacgcacagcaggtcagygggattgggggcactgccctcagtcttcaaggaagcggggtctgcgcccagcacacaccgtcaccagcatctggactggggggcttgcgccctcttgccc

SEQ ID NO: 551272 - DNA, 201 bp, Homo sapiens
cttggggtgcggcccaccctgctcccctaccttggctcctttgttgccaacctctccagccaggccgcggggcccctcagggccagggtccccctgtgggragggaagggaggccccacgggtctcagctgaggcctccggcctgggtcccatgtgagaggcgggtgtggccgggggttggggaagggggcctgggaggaa

SEQ ID NO: 551273 - DNA, 201 bp, Homo sapiens
cacaccgtcaccagcatctggactggggggcttgcgccctcttgccccaccctgggtggggtcacagatgtttagtgggtgcctctgggctcagttttggktgggatttggatggttgaggcccttccatgtcctccagggctgggtggagtgggtagctgggcgcgtcggcatggaagggaatggagcaccactgtctgg

SEQ ID NO: 551274 - DNA, 201 bp, Homo sapiens
cctcaacatacaaaaagttattgattttcttctatcagttagaagaaacattttctaacaaccagttagaaaatgttgcagaaaaatgctatttacactaktaagaaaaacaacataaacccaaggaatcaactgaataaaaatgtgcaggacttatgaaaaaaactcaaaaaaatttttgagaaatatattggaaagaca

SEQ ID NO: 551275 - DNA, 201 bp, Homo sapiens
gaaaacacaaatttaaaaacttgttcgacagtgaaagcagtgctaagggggaaactgatggctatacatgcttatattaaaaaagacaggtctcaaatagsagcttaaccttacaatgtaaggaactagaaaaagaacaagctagcagaaagaaggaaaaaataaagatcagagcaaagataaacaaaatggagaacagac

SEQ ID NO: 551276 - DNA, 201 bp, Homo sapiens
gaagacggaggagagactggaagatgcagccgcagcaagggacacggtggccaccagcatgggaagaggctgggagctgccccagagcccctggaaggacygtagccccgctgaccccgattccagatctctggcctccactgagagccagcctgtcgggggcagccctgggaagctagtgtggcagggagggcccagccc

SEQ ID NO: 551277 - DNA, 201 bp, Homo sapiens
agaaggacactggttctgccccatgtgacacctaccgtgagaccggggtctccaggggggccgggctcaccctggggaaggaaggatgaggctgagactcyggggccaaggctgggtggctgagtctctcccaggccactgcccactgatacgtgggtccaccgtgggcagaaccacgaggcttgggtgtgtgttggcctg

SEQ ID NO: 551278 - DNA, 201 bp, Homo sapiens
cctcactgtgctgctggctccgcagagtggggctggcagcagccgggcagctgggcagaaagggcaccgggcctggttcagagcgtgcagttccaggggtratgcagggattggagtgccgccctctcctcggtgcagatgggaggagtgtccaagcaccgggactaggggaggcgctgccaggagagggccctgaagggt

SEQ ID NO: 551279 - DNA, 201 bp, Homo sapiens
ccggggtctccaggggggccgggctcaccctggggaaggaaggatgaggctgagactctggggccaaggctgggtggctgagtctctcccaggccactgcycactgatacgtgggtccaccgtgggcagaaccacgaggcttgggtgtgtgttggcctggcaggttggggggagggcatggggactggccaccaacctacc

SEQ ID NO: 551280 - DNA, 201 bp, Homo sapiens
gcctcccaaagtgatggggttacaagcatgagccactatgcctggctgagatctttacttcttcacttgaattactgtctatcaccctttatttcaacccrcaggactccctttggcgtttcctatagggcaggtctagtggtaaggaacattctcagcttttgttgatctaagaatgtgttaatttctcccttactttta

SEQ ID NO: 551281 - DNA, 201 bp, Homo sapiens
cacgtccagggcgccacagcgcttctcacagtctgggggggtggcagggtcatcggggggtaccggggagacctcagaccctagggtcacgtgcacatgcrggacccagcgatgacccagccctgctgcactcccgccctccacccggtgcatgggccccgaccctgccgtgggcagtgcctcaccgcagcacccgcaggt

SEQ ID NO: 551282 - DNA, 201 bp, Homo sapiens
ctgtgacgtcgcggtcgcacagcgcccgcaagttgaggtcatcgtcccgagggtcgtggcgcccgtccgtgatgaccaccgcaaacacacgtgtcttctgscgccggctctccttgatgaggcggtcgtaggcaaacttgagggctgagggtgtccaggtgccacctgcaatccactcgaggttcttgacagcctccttga

SEQ ID NO: 551283 - DNA, 201 bp, Homo sapiens
tcactgtgacgtcgcggtcgcacagcgcccgcaagttgaggtcatcgtcccgagggtcgtggcgcccgtccgtgatgaccaccgcaaacacacgtgtcttytggcgccggctctccttgatgaggcggtcgtaggcaaacttgagggctgagggtgtccaggtgccacctgcaatccactcgaggttcttgacagcctcct

SEQ ID NO: 551284 - DNA, 201 bp, Homo sapiens
ggccaccaacctacctcgggtcctgggactcctcttggcccccgagggcctggctcaccagggggaccaggatccgcctgagaaggaacaagaacaggtgsgcttcagtggccccagggacagtccctgcacacagcagggccccctgtgctgtccccaaccacgggtcctcccttggcggggggggagctaacaggtgca

SEQ ID NO: 551285 - DNA, 201 bp, Homo sapiens
cggggcacctgggatgccagatgctggctgggggctgctggaacctccgtgccagctgagggcagagtgtgtgtcacgggcaggacgcctgtgcatctgcwcagaggactcagccagacttgggcttgggctgagggaaggtggacagaaagtgggaagccctaagtccaagctcccagaaaaaagcccttggggatcctg

SEQ ID NO: 551286 - DNA, 201 bp, Homo sapiens
agtagaggttttcactctcgtgcttctcgtggaacatgtccccgatgccgatggccgtcactgtgacgtcgcggtcgcacagcgcccgcaagttgaggtcrtcgtcccgagggtcgtggcgcccgtccgtgatgaccaccgcaaacacacgtgtcttctggcgccggctctccttgatgaggcggtcgtaggcaaacttga

SEQ ID NO: 551287 - DNA, 201 bp, Homo sapiens
gccccgaccctgccgtgggcagtgcctcaccgcagcacccgcaggtctccctcacgtaggtcatgacgtcacactcctgcaatgcacacggcaggcagggyagtccccccggggccccagaagagtttccacagcaaggtcctggcctgggggtcccgggacattccagcccacgtgtggaggcagccatgcggggaggct

SEQ ID NO: 551288 - DNA, 201 bp, Homo sapiens
gcggtcgtaggcaaacttgagggctgagggtgtccaggtgccacctgcaatccactcgaggttcttgacagcctccttgaagctcgacagggagtcgataygttcgtcgtccagctggatggcctcaaaggtgccctcgtggctgtactgcaccacgcccacacgcgtccctgcaagccgcacgcgtgaggtcgttgccag

SEQ ID NO: 551289 - DNA, 201 bp, Homo sapiens
agtcgatatgttcgtcgtccagctggatggcctcaaaggtgccctcgtggctgtactgcaccacgcccacacgcgtccctgcaagccgcacgcgtgaggtsgttgccagaggcctcggggtctggggcatccccagccatgcagaggccctcgttggagggacgcgtctggacttctcccatctcatcgcctcccacgccc

SEQ ID NO: 551290 - DNA, 201 bp, Homo sapiens
ccgtgatgaccaccgcaaacacacgtgtcttctggcgccggctctccttgatgaggcggtcgtaggcaaacttgagggctgagggtgtccaggtgccaccygcaatccactcgaggttcttgacagcctccttgaagctcgacagggagtcgatatgttcgtcgtccagctggatggcctcaaaggtgccctcgtggctgt

SEQ ID NO: 551291 - DNA, 201 bp, Homo sapiens
ccccgagagggcccgaccccttcccacccacagcccaagatcctgggctgcacattcatccctcaggtgaggggtgtccctggggctcacgctagacagcrgctggggcctgctgctcctcggccgactgccccgcgcccacacgctcacccgggcagaggacgtcctccatgtcatcgatgaacttctcagcgaccaggt

SEQ ID NO: 551292 - DNA, 201 bp, Homo sapiens
cgtccgtgatgaccaccgcaaacacacgtgtcttctggcgccggctctccttgatgaggcggtcgtaggcaaacttgagggctgagggtgtccaggtgccrcctgcaatccactcgaggttcttgacagcctccttgaagctcgacagggagtcgatatgttcgtcgtccagctggatggcctcaaaggtgccctcgtggc

SEQ ID NO: 551293 - DNA, 201 bp, Homo sapiens
tgcagccccgagagggcccgaccccttcccacccacagcccaagatcctgggctgcacattcatccctcaggtgaggggtgtccctggggctcacgctagrcagcggctggggcctgctgctcctcggccgactgccccgcgcccacacgctcacccgggcagaggacgtcctccatgtcatcgatgaacttctcagcgac

SEQ ID NO: 551294 - DNA, 201 bp, Homo sapiens
tgtccccgatgccgatggccgtcactgtgacgtcgcggtcgcacagcgcccgcaagttgaggtcatcgtcccgagggtcgtggcgcccgtccgtgatgacyaccgcaaacacacgtgtcttctggcgccggctctccttgatgaggcggtcgtaggcaaacttgagggctgagggtgtccaggtgccacctgcaatccact

SEQ ID NO: 551295 - DNA, 201 bp, Homo sapiens
ctgcctagacaggctcagggtgcagctggcctctgccctgcagccccgagagggcccgaccccttcccacccacagcccaagatcctgggctgcacattcrtccctcaggtgaggggtgtccctggggctcacgctagacagcggctggggcctgctgctcctcggccgactgccccgcgcccacacgctcacccgggcag

SEQ ID NO: 551296 - DNA, 201 bp, Homo sapiens
tcagcggccgttcactgatctgcctagacaggctcagggtgcagctggcctctgccctgcagccccgagagggcccgaccccttcccacccacagcccaakatcctgggctgcacattcatccctcaggtgaggggtgtccctggggctcacgctagacagcggctggggcctgctgctcctcggccgactgccccgcgcc

SEQ ID NO: 551297 - DNA, 201 bp, Homo sapiens
gatgagagccgcagctgcagctccgaggcaggccagggttggagcaagacctgctggtgctggggggtgtcagtgcttccaccccgggatggtttcactcmctgaatccagggcttcctccgagtggcacatgcacggccagcccatgggagctgggcggcagctgagggagactgcaaggcccatggtgggccttcaaga

SEQ ID NO: 551298 - DNA, 201 bp, Homo sapiens
ctccctgtggtcctccaggtcggaccctcccaccctgtctccatggcatccccaccctcacactcctggaggggacggctcactgagggggactcagctcmtaacgcccccggggacctcctgtgggcccaggtacggtgcagcagtgcaccatgggggcagcaccacgtccagcagagcctggacggcacccccagctcc

SEQ ID NO: 551299 - DNA, 201 bp, Homo sapiens
ccgcgtgctgaggaagcgctgacttcgtaccgcagaccctgaggtttcctccctgtggtcctccaggtcggaccctcccaccctgtctccatggcatcccyaccctcacactcctggaggggacggctcactgagggggactcagctcctaacgcccccggggacctcctgtgggcccaggtacggtgcagcagtgcacca

SEQ ID NO: 551300 - DNA, 201 bp, Homo sapiens
acccgcctgggtcccctaccttgaggtatagccctcacctgggccccccttaccttggggtgcagcacccacccgggtcccctaccttggggtgcagtccyggccaccctaccttggggtgcagcccccctgcaccccctcagatcccctaccttggggtgcggcccaccctgctcccctaccttggctcctttgttgcca

SEQ ID NO: 551301 - DNA, 201 bp, Homo sapiens
cttgaccttcagccctgagcacactgagtggagtaggctgggttctgggtgtagcccctgcctaagcacccctatcttgggttgcagccctcacctgggtyccctactttggggtgcagcccttgccttggtcccttaccttggggtgcagcacccgcctgggtcccctaccttgaggtatagccctcacctgggcccccc

SEQ ID NO: 551302 - DNA, 201 bp, Homo sapiens
acaagaacaggtgcgcttcagtggccccagggacagtccctgcacacagcagggccccctgtgctgtccccaaccacgggtcctcccttggcggggggggrgctaacaggtgcaaggagtaagacaaggctgtgcctcctccttccctatgctggcaccagagctagaaaggccatgagtggccaccgtcagagcctggcc

SEQ ID NO: 551303 - DNA, 201 bp, Homo sapiens
aggggtgggggtcgctcagacacccccagtgcctctcccctggcaccctcccccatggcaggcgcacgcacagcaggtcagcgggattgggggcactgccstcagtcttcaaggaagcggggtctgcgcccagcacacaccgtcaccagcatctggactggggggcttgcgccctcttgccccaccctgggtggggtcaca

SEQ ID NO: 551304 - DNA, 201 bp, Homo sapiens
cagtgcctctcccctggcaccctcccccatggcaggcgcacgcacagcaggtcagcgggattgggggcactgccctcagtcttcaaggaagcggggtctgygcccagcacacaccgtcaccagcatctggactggggggcttgcgccctcttgccccaccctgggtggggtcacagatgtttagtgggtgcctctgggctc

SEQ ID NO: 551305 - DNA, 201 bp, Homo sapiens
ttctcacagtctgggggggtggcagggtcatcggggggtaccggggagacctcagaccctagggtcacgtgcacatgcaggacccagcgatgacccagccytgctgcactcccgccctccacccggtgcatgggccccgaccctgccgtgggcagtgcctcaccgcagcacccgcaggtctccctcacgtaggtcatgacg

SEQ ID NO: 551306 - DNA, 201 bp, Homo sapiens
atcttgtatgtagaaaaccctaaaaattccacaaaaactgttacaactaataaacaaattcagcaaaatagcagaatacatagtaaacacataaaaatcasttgtatttctattcactaacaatgaacaatccaaaggaaattaagaaaacaattctatttactatagtatcaaaaataataaaatacttaaaaattgact

SEQ ID NO: 551307 - DNA, 201 bp, Homo sapiens
gctcggagccgtccagcaggaagacgatgtccacgggccgctgcgtgcactgtgccacggacagctctgtggggagacgcaggtgcgggctgggcggaggrgaggtgggcaggaccgggcaggtgccagccccgcacctgtgcccttccattcgcaccctgcctgcaacctcacagaccactgggctctgcgggggcgttt

SEQ ID NO: 551308 - DNA, 201 bp, Homo sapiens
ctcagggtgccctgcattacctgtttggcagggaaggtctgggcacacgatctgagggtctggaagagaggagagaggccgggccaggccagggtcagtcyctagcgaaccctcagcggccgttcactgatctgcctagacaggctcagggtgcagctggcctctgccctgcagccccgagagggcccgaccccttcccac

SEQ ID NO: 551309 - DNA, 201 bp, Homo sapiens; identical to SEQ ID NO: 394765

SEQ ID NO: 551310 - DNA, 201 bp, Homo sapiens
acattttcccttagttatttgagtatctttaagatagttctttcaaagcctttgtctagtagatctaccaccaagtctttttcagtgacagtttctgttgtttttttttcctttgaaataggaaagtttctttgtatgccttgtgaaatcaaaatctctttcttccccagagtttgctggtttttcttgtttttataattt

SEQ ID NO: 551311 - DNA, 201 bp, Homo sapiens; identical to SEQ ID NO: 394769

SEQ ID NO: 551312 - DNA, 201 bp, Homo sapiens; identical to SEQ ID NO: 394772

SEQ ID NO: 551313 - DNA, 201 bp, Homo sapiens
gccagaggctgcccgcctgctgaagggcagccagacccaggtgcaagccctaggttctctgtcgcagcacgtatggggaacctcggctctgagtccacggytcctcccctggggcagcctcagggcctgtgaatgtgctcagtggcccagctcacccaccgggagctccccatggaacgcccgaacgcacaccgcgacccg

SEQ ID NO: 551314 - DNA, 201 bp, Homo sapiens; identical to SEQ ID NO: 394776

SEQ ID NO: 551315 - DNA, 201 bp, Homo sapiens
ggccacacaccacggccaggtgggtttatcccgggcacgcagggctggctcaacactggaaattcaatgacgctcaacgggctaactaactcccaactacratgataggctaaagaggaaaggtcacgtgacatccacagacgcagcacccacccactcacgatagaacctggagtggaggggaagccatagcggccactc

SEQ ID NO: 551316 - DNA, 201 bp, Homo sapiens; identical to SEQ ID NO: 394778

SEQ ID NO: 551317 - DNA, 201 bp, Homo sapiens
tggaagatgcagccgcagcaagggacacggtggccaccagcatgggaagaggctgggagctgccccagagcccctggaaggactgtagccccgctgacccsgattccagatctctggcctccactgagagccagcctgtcgggggcagccctgggaagctagtgtggcagggagggcccagcccggctgggcgggtgcccg

SEQ ID NO: 551318 - DNA, 201 bp, Homo sapiens
gaccccgtgggaggagctggagaggtgcaggcccagggcgtcgtccgagtgagcagcggtgctggccgtgtgggacccgggcccgcttagcaccatggacrgggtgggctcacgaccctcgactgcggggcccgggcggcggcgctagcagatccagcggatgaagcggtcgaagaagccgggttgcgccaggctgtcata

SEQ ID NO: 551319 - DNA, 201 bp, Homo sapiens
ctctgcagacgggagtgagttaagggtcttgcgaggtcattctggacttggggtgggccttaaattcaatgaccagggttcttataaagagagcggccacwggaagacggaggagagactggaagatgcagccgcagcaagggacacggtggccaccagcatgggaagaggctgggagctgccccagagcccctggaagga

SEQ ID NO: 551320 - DNA, 201 bp, Homo sapiens
gagttaagggtcttgcgaggtcattctggacttggggtgggccttaaattcaatgaccagggttcttataaagagagcggccacaggaagacggaggagaractggaagatgcagccgcagcaagggacacggtggccaccagcatgggaagaggctgggagctgccccagagcccctggaaggactgtagccccgctgac

SEQ ID NO: 551321 - DNA, 201 bp, Homo sapiens
gtccccaaccacgggtcctcccttggcggggggggagctaacaggtgcaaggagtaagacaaggctgtgcctcctccttccctatgctggcaccagagctrgaaaggccatgagtggccaccgtcagagcctggcccaccagaggggtaggggcctggcagagctgggtgtcccagaaatggcagccaaaacagctcattc

SEQ ID NO: 551322 - DNA, 201 bp, Homo sapiens; identical to SEQ ID NO: 394781

SEQ ID NO: 551323 - DNA, 201 bp, Homo sapiens
aagaggaaaggtcacgtgacatccacagacgcagcacccacccactcacgatagaacctggagtggaggggaagccatagcggccactcacactggacccrgagtggagaggaaggccccccacctgatagcaaagcacccacagtgaccatcgccatgtcgcccatcatggggtcccgagacttccctgccccatcagga

SEQ ID NO: 551324 - DNA, 201 bp, Homo sapiens
gggcgggggccggggctacggggaccccgtgggaggagctggagaggtgcaggcccagggcgtcgtccgagtgagcagcggtgctggccgtgtgggacccsggcccgcttagcaccatggacggggtgggctcacgaccctcgactgcggggcccgggcggcggcgctagcagatccagcggatgaagcggtcgaagaagc

SEQ ID NO: 551325 - DNA, 201 bp, Homo sapiens; identical to SEQ ID NO: 394786

SEQ ID NO: 551326 - DNA, 201 bp, Homo sapiens; identical to SEQ ID NO: 394797

SEQ ID NO: 551327 - DNA, 201 bp, Homo sapiens
aaaattttcaaaaaacttgaagagaagggaacactatttaactcattcttacgaggccagcattactctgataccaataccagacaaagatattgcaagaraagaaaactacaatccagtcttccttatgaacattgatgcaaaaatcctaaacaaaatactattaatagtaaactaaatttggtataatttgatgcaatt

SEQ ID NO: 551328 - DNA, 201 bp, Homo sapiens
tcctccagggctgggtggagtgggtagctgggcgcgtcggcatggaagggaatggagcaccactgtctggcgccccccactgcctggggctgccctggaarcagtgcagaggggagggcgggagagagatcccagcttccccagaccggctcccctgcagagctaggcactctctctccagcctggctccattccctttaa

SEQ ID NO: 551329 - DNA, 201 bp, Homo sapiens
tgtgggtgagtttcacagcttcaaggacaagcacttcatgctatttaacttgttttagaacataaaaagataaactttttcccaattcatttttaaatgtkgcataacctgtgaccaaagcttgataaaaaaaaaagtccctaaaagtaactctacagataaatatcactataaatattactgatggcagcggcagcccat

SEQ ID NO: 551330 - DNA, 201 bp, Homo sapiens
cggagccacaggggcaggcgcggccccagccccgcgaggaggagccccgaacccgccgagccccccgccgtccctggggctggagtcccccttcccggggrcccgagggacggagccgccgccgccgccttcccaggactcggggtcaccccccgcgggccgagcggcttccagggtgcggggtccgggaggcgctcacct

SEQ ID NO: 551331 - DNA, 201 bp, Homo sapiens
gggatggagggacacctgagtggcccaggccctgcccggagcttcctccttcggcctccgcactcacagaggggtaaagtgaggcccggagtgggtggacrgcccaccgtggccacccctggcgcgtggacggtgctcccgcccgcggctcaccatgaccttgatgatgcggttgatggtgtcctggtcgatctcggtgga

SEQ ID NO: 551332 - DNA, 201 bp, Homo sapiens
taaattcaatgaccagggttcttataaagagagcggccacaggaagacggaggagagactggaagatgcagccgcagcaagggacacggtggccaccagcrtgggaagaggctgggagctgccccagagcccctggaaggactgtagccccgctgaccccgattccagatctctggcctccactgagagccagcctgtcgg

SEQ ID NO: 551333 - DNA, 201 bp, Homo sapiens
gactgcatggtgacgctctccgaggtgtccagcacgaagtacacgtggatggggcagtcggtcttctctgtggggcacaggacctgtcacgagccagcctyaggagggactgctgttggagccccgtttcctggccccgtgcctgtttgtgggtttgacctcactgcccccgaatgccagagcccccggcccccaacccct

SEQ ID NO: 551334 - DNA, 201 bp, Homo sapiens
ggcggaaggagctgatgccctgcaggttcttgatgaaggaggcccggtcgctgcccggtgggctgaacacctccacctggtcagagaagtgcaggccgccrtagcgccagctcagcgccacctggtccaggtagaactcgttctgcagctggctgatgaactgcggcacgaactgcttcatgtggaagagcaggatgtccg

SEQ ID NO: 551335 - DNA, 201 bp, Homo sapiens
caccgtggccacccctggcgcgtggacggtgctcccgcccgcggctcaccatgaccttgatgatgcggttgatggtgtcctggtcgatctcggtggagtcrggcagcatggtggcgtagtcgttgcggtagagctcgtgcggcgtgctggcgatgtcccgcaggccctgctccttcaggttctggttgggggccacggcga

SEQ ID NO: 551336 - DNA, 201 bp, Homo sapiens
gagtgggtggacagcccaccgtggccacccctggcgcgtggacggtgctcccgcccgcggctcaccatgaccttgatgatgcggttgatggtgtcctggtygatctcggtggagtcgggcagcatggtggcgtagtcgttgcggtagagctcgtgcggcgtgctggcgatgtcccgcaggccctgctccttcaggttctgg

SEQ ID NO: 551337 - DNA, 201 bp, Homo sapiens
cctccttcggcctccgcactcacagaggggtaaagtgaggcccggagtgggtggacagcccaccgtggccacccctggcgcgtggacggtgctcccgcccrcggctcaccatgaccttgatgatgcggttgatggtgtcctggtcgatctcggtggagtcgggcagcatggtggcgtagtcgttgcggtagagctcgtgcg

SEQ ID NO: 551338 - DNA, 201 bp, Homo sapiens
ttcccctgagcagacctggcctctgcaacgtctctgccttttctttccaccgactggagctcaggttacgctgtggcccctatgcagctcttatcgctgaktgcgccctgccctgactgccttcagctgcgtctggtttgtttctccagcaccctctggtccccacgcaactgagaactccacaggcctgctgcaggccca

SEQ ID NO: 551339 - DNA, 201 bp, Homo sapiens
ccaggccctgcccggagcttcctccttcggcctccgcactcacagaggggtaaagtgaggcccggagtgggtggacagcccaccgtggccacccctggcgygtggacggtgctcccgcccgcggctcaccatgaccttgatgatgcggttgatggtgtcctggtcgatctcggtggagtcgggcagcatggtggcgtagtc

SEQ ID NO: 551340 - DNA, 201 bp, Homo sapiens; identical to SEQ ID NO: 394810

SEQ ID NO: 551341 - DNA, 201 bp, Homo sapiens
gtctgggtggggatggagggacacctgagtggcccaggccctgcccggagcttcctccttcggcctccgcactcacagaggggtaaagtgaggcccggagygggtggacagcccaccgtggccacccctggcgcgtggacggtgctcccgcccgcggctcaccatgaccttgatgatgcggttgatggtgtcctggtcgat

SEQ ID NO: 551342 - DNA, 201 bp, Homo sapiens
gccccgcaggcagtgagcaaagctctgaacacagcagggtgacctcacgctgcaccgcagccttcacagaacgcttgagacatggacgccgtctgagcacrcacgagctggcagatggggttccctcagtgagcttatgagtgacgcagctcattcagtgaaaggaagggcagcctccctgttaaggccacacctaggaac

SEQ ID NO: 551343 - DNA, 201 bp, Homo sapiens
ggggcaaggacactcacctgtcttcccttctggccaggctctcccggctcacccatgttgcccttggcaccctaaaagcagagaaaagagtacatcgaggyagggtagggtgggcggtaggcagctggggaccctgccacagctcctctgagaggtgacacagcagaggttactgattcccctgcccaagtggagaagtct

SEQ ID NO: 551344 - DNA, 201 bp, Homo sapiens
aggacaacgcagcagtgtgagcccagccctggggcgctgggctgcaggcggggcgggcgtggggcaaggacactcacctgtcttcccttctggccaggctytcccggctcacccatgttgcccttggcaccctaaaagcagagaaaagagtacatcgaggcagggtagggtgggcggtaggcagctggggaccctgccaca

SEQ ID NO: 551345 - DNA, 201 bp, Homo sapiens
attagtgaggagctctgcagagacacaggcagggaagggccagccctgcaggctgaggggagtgctcggtgggccgctggcatctagtgttctcgacaaayagtctgcggaggaggctgagccctgggtcgggctggaggctgggttttgggacggccatcaagttatcgaggtgcttctgttccttggtaactgggggga

SEQ ID NO: 551346 - DNA, 201 bp, Homo sapiens
tcttttctaagcccgtgacttcccctgagcatgtgcaatgacttttttattttctccacatatatggttgcttttgaatgtgctagtcttcaatgtctacstctcaaaagaggaaaaagagaaaaatgaagggagaaaagggtgccagccctttaaatctcctggaagtcacttcaaccagacggagaagggcttgcaatg

SEQ ID NO: 551347 - DNA, 201 bp, Homo sapiens
ttatgttggtttgcttgatggtatcccacagaccccttaggctctgatcacctttattcaatctttttatttctgctcctcagactcaataatttccattkttgtatcttcaagttccctgattctttattctgcctgctgaaatctgcctttgcatttctctagtgaattttaaatttcagttattgtacttttcagctc

SEQ ID NO: 551348 - DNA, 201 bp, Homo sapiens
gggacacctgagtggcccaggccctgcccggagcttcctccttcggcctccgcactcacagaggggtaaagtgaggcccggagtgggtggacagcccaccrtggccacccctggcgcgtggacggtgctcccgcccgcggctcaccatgaccttgatgatgcggttgatggtgtcctggtcgatctcggtggagtcgggca

SEQ ID NO: 551349 - DNA, 201 bp, Homo sapiens
ggcaccctcccccatggcaggcgcacgcacagcaggtcagcgggattgggggcactgccctcagtcttcaaggaagcggggtctgcgcccagcacacaccrtcaccagcatctggactggggggcttgcgccctcttgccccaccctgggtggggtcacagatgtttagtgggtgcctctgggctcagttttgggtgggat

SEQ ID NO: 551350 - DNA, 201 bp, Homo sapiens
gctggacgtgcctagagacccgaagcctgcccacacgcggggaggaccctactcaggccacgtagctgccctcaggccctgcctcaggaaggatgtgccaygcacacccaagggtcactgctgaagaggagagccaggggggcttcctggaccccggaggcatcccctcactccagagctgagaacaggaggcacaggccc

SEQ ID NO: 551351 - DNA, 201 bp, Homo sapiens; identical to SEQ ID NO: 394817

SEQ ID NO: 551352 - DNA, 201 bp, Homo sapiens; identical to SEQ ID NO: 394818

SEQ ID NO: 551353 - DNA, 201 bp, Homo sapiens
ctttgaagccaggaacgccctgggggcaggaggagagaggggcattagtgaggagctctgcagagacacaggcagggaagggccagccctgcaggctgagrggagtgctcggtgggccgctggcatctagtgttctcgacaaacagtctgcggaggaggctgagccctgggtcgggctggaggctgggttttgggacggcc

SEQ ID NO: 551354 - DNA, 201 bp, Homo sapiens; identical to SEQ ID NO: 394822

SEQ ID NO: 551355 - DNA, 201 bp, Homo sapiens; identical to SEQ ID NO: 394823

SEQ ID NO: 551356 - DNA, 201 bp, Homo sapiens; identical to SEQ ID NO: 394824

SEQ ID NO: 551357 - DNA, 201 bp, Homo sapiens
tgggatttggatggttgaggcccttccatgtcctccagggctgggtggagtgggtagctgggcgcgtcggcatggaagggaatggagcaccactgtctggygccccccactgcctggggctgccctggaaacagtgcagaggggagggcgggagagagatcccagcttccccagaccggctcccctgcagagctaggcact

SEQ ID NO: 551358 - DNA, 201 bp, Homo sapiens; identical to SEQ ID NO: 394827

SEQ ID NO: 551359 - DNA, 201 bp, Homo sapiens
ctgtgcccttccattcgcaccctgcctgcaacctcacagaccactgggctctgcgggggcgtttctgcagggcagccctgggtgtgggtccttagcccaaracactttcaggcggcactgctgggagccgccatctcctctgctggtgctcccaggcctgagaccctgacacaggccccaggccctgtccacctgctgagc

SEQ ID NO: 551360 - DNA, 201 bp, Homo sapiens
tttttttttttttttttctgggggttatctttgtaggaatttgacatcagagttgtgacaaattttgaaacctaattgagcatcttttaacctgttctacrgttccagcctcatttgtatgatgtcgggattatgacttgtttgggaacttggcacactcacccacagaccatccaggcctgcagccctctggggaataat

SEQ ID NO: 551361 - DNA, 201 bp, Homo sapiens
gttttgcatttgctgaggagtattttacttccaattatgtgattgaatttagagtgtgtgccatgtggcaatgagaagaatgtatattctattgttttggrgtggagagttctgtagatatctgtcaggtacatttgatccggtgctgagttcatgtcctgaatatcttttttaattttctgtctcaattatctgtaatac

SEQ ID NO: 551362 - DNA, 201 bp, Homo sapiens
tatttgtgttattgcatgtgagatgggtctcttgaagacagcataccaatgggtcttggttctttatctagcttgccattctgttttttttttttttttgttttgttttttgagacagagtcttgctctgtctcccaggcaggctggagtgcagtagcacaatctcggctcactgcaacctctgcctcctaggttcaagtg

SEQ ID NO: 551363 - DNA, 201 bp, Homo sapiens
tgtgttattgcatgtgagatgggtctcttgaagacagcataccaatgggtcttggttctttatctagcttgccattctgttttttttttttttttgttttkttttttgagacagagtcttgctctgtctcccaggcaggctggagtgcagtagcacaatctcggctcactgcaacctctgcctcctaggttcaagtgattc

SEQ ID NO: 551364 - DNA, 201 bp, Homo sapiens
gtgctctgcacacctccccgctttgtgctctgcacaacccccgcctcacgctctgtgcatcctccgcctcacgctctgtgcatcccccgtctcacgctctktgcatcccccgcctcgtgctttgcataccccggcctcatgctctgtgcatcccccgcctcatgctctgtgcatcccccgcctcatgctctgcactcctgc

SEQ ID NO: 551365 - DNA, 201 bp, Homo sapiens
ccgctttgtgctctgcacaacccccgcctcacgctctgtgcatcctccgcctcacgctctgtgcatcccccgtctcacgctctgtgcatcccccgcctcgygctttgcataccccggcctcatgctctgtgcatcccccgcctcatgctctgtgcatcccccgcctcatgctctgcactcctgcctcatgctctgtgcaca

SEQ ID NO: 551366 - DNA, 201 bp, Homo sapiens
gctctgtgcatcccccgcctcgtgctttgcataccccggcctcatgctctgtgcatcccccgcctcatgctctgtgcatcccccgcctcatgctctgcacycctgcctcatgctctgtgcacactcctgcctcgtgctgtgtgttcttgatcatgtttggatgagactttgtgcaattatttttggcctggccatggtttt

SEQ ID NO: 551367 - DNA, 201 bp, Homo sapiens
cagtcctcatgagggtgtggggccaggaggtgttggtgggcatggaccctcccccttggtgtggaaagcaaagaaagtgaacacacctgagcccagcgtcrgaccacagaggatgttcacagagcaggaggctcctccccatccacaaaggatgttcacagagcaggaggctcctccccatccacagaggatgtttacaga

SEQ ID NO: 551368 - DNA, 201 bp, Homo sapiens
ctcaccaggctggtctcctcccccaggctgatctccccgcccaggctggtctcccccgcaggctggtctcccccacaaggctggtctcctcccccaggctrgtctcctcaccaggctggtctcctcccccaggctgatctccccgcccaggctggtctcccccgcaggctggtctcccccgcaagctggtctcccctgcag

SEQ ID NO: 551369 - DNA, 201 bp, Homo sapiens
ttggcaatggattcttagagatcacatcaaaagcatgagcaaaagagagaaacagacaaattggacttcatcaaaagtaaaacaaaacaaaaaaacaaacytttgtgcttcaaaggacagtatcaaaaaaatgaaaagccaacccggagaatgggagaaaacatttgtaaattgtgcgtttgaaatgggactagtatgcag

SEQ ID NO: 551370 - DNA, 201 bp, Homo sapiens
tgcatcctccgcctcacgctctgtgcatcccccgtctcacgctctgtgcatcccccgcctcgtgctttgcataccccggcctcatgctctgtgcatccccygcctcatgctctgtgcatcccccgcctcatgctctgcactcctgcctcatgctctgtgcacactcctgcctcgtgctgtgtgttcttgatcatgtttgga

SEQ ID NO: 551371 - DNA, 201 bp, Homo sapiens
ggaagagtccttcctgttcttatttttggaaaacagaaaatttgagaaatggctcatcttgttcggtgtttgtgagcctatctctgtaccagtggaggtawctcagcttcttgccagggaccgtatctggtatcttgctacgctgcacagccactgggttctgcacaccctgcctcttgctctccaccccaccgcctcgtg

SEQ ID NO: 551372 - DNA, 201 bp, Homo sapiens; identical to SEQ ID NO: 394744

SEQ ID NO: 551373 - DNA, 201 bp, Homo sapiens
acatagtaggttttggtgtgttgtgtttccattatcatttgtttcaagacatttttaaaatttccttcttaatttcttcactgatgcactggccatccagragcgtattgtttaatttctatgtgttggtataatttccaaaattccttttgttattgatttcattttattccattatggtcggagaagatacttgatata

SEQ ID NO: 551374 - DNA, 201 bp, Homo sapiens
actacctcaatggtatggccgggtgcgggggcacctgggggggcccccagtgcaggctggcagctgtggggagggcatgactgggtggtcaggcagggccrtttctccatccagtcacacagagtggagggaggagagccaggctgggaggctggggtccaaggctgtgtctgtcctagtcttttgtccatctttaaagat

SEQ ID NO: 551375 - DNA, 201 bp, Homo sapiens
cccgctttgtgctctgcacaacccccgcctcacgctctgtgcatcctccgcctcacgctctgtgcatcccccgtctcacgctctgtgcatcccccgcctcrtgctttgcataccccggcctcatgctctgtgcatcccccgcctcatgctctgtgcatcccccgcctcatgctctgcactcctgcctcatgctctgtgcac

SEQ ID NO: 551376 - DNA, 201 bp, Homo sapiens
ccatggtttttttttttttttttttttttctgggggttatctttgtaggaatttgacatcagagttgtgacaaattttgaaacctaattgagcatcttttracctgttctacggttccagcctcatttgtatgatgtcgggattatgacttgtttgggaacttggcacactcacccacagaccatccaggcctgcagccct

SEQ ID NO: 551377 - DNA, 201 bp, Homo sapiens
tttattctaaaaggtttgggaaaaacattacccgttcctgcatgtgatttggggtggggctgacagatgtacccttgactttttgttgggatggtgggcasaggacagagtccctgacccagcactgcctgggattcccacggccaacctcagcttcccaccgggccgggcccggaaaggacgtggtcagcctgcctggtc

SEQ ID NO: 551378 - DNA, 201 bp, Homo sapiens
ttcggtgtttgtgagcctatctctgtaccagtggaggtaactcagcttcttgccagggaccgtatctggtatcttgctacgctgcacagccactgggttcygcacaccctgcctcttgctctccaccccaccgcctcgtgctctgcacacacccctgcctcatgctctccacccccatcttgtgctctgcacacctccccg

SEQ ID NO: 551379 - DNA, 201 bp, Homo sapiens
gcagggggctcctcctcatccacagaggatgctcacagagcagaaggctcctcccgggaggccgattacagctgtgtgtttgcacggaaacatggaaacargccctgtccatcaatagggcaagggttaaaaattcagtgtgtgtgtctgtatgtgtgctcatgtgtacagagttgccaggaaacagttaaatgaaccagg

SEQ ID NO: 551380 - DNA, 201 bp, Homo sapiens
gccggccatcccgcccttccaatccacatgaacttcttatttctgtctttgtccttattactcagaactcgggccttggccttgactttcatggggcctcstccagggaaggtgagagagggttttggccgcatcctggtcctcctgaccagctgtgggaaggaccaacggtcccatctgcccagaggagggaggtttgca

SEQ ID NO: 551381 - DNA, 201 bp, Homo sapiens; identical to SEQ ID NO: 394759

SEQ ID NO: 551382 - DNA, 201 bp, Homo sapiens
caactgcagacatcctccctggaggacctgctgtgctcacatgcccccctgtccagcgaggacgacacctccccgggctgtgcagccccctcccaggcacycttcaaggccttcctcagtcccccagagccacatagccaccgaggcaccgacaggaagctgtccccgctcctgagccccttgcaagactcactggtggac

SEQ ID NO: 551383 - DNA, 201 bp, Homo sapiens; identical to SEQ ID NO: 394760

SEQ ID NO: 551384 - DNA, 201 bp, Homo sapiens
cagggtgggggaggatccactgttctctgctcagtgttaggtcaaaggcagggttctggtgggtatggggcttgctggctctgtgtctgccaaggcttcayctgcaatggaagtctgtagggaaaggggaggcccactggactcctgcatgctggtgggggaaggaaatcaaaacccacctgtgcagacatcagcagagtg

SEQ ID NO: 551385 - DNA, 201 bp, Homo sapiens
tccttttacacttgaggcctgaggggaaggaggatgctctgaagccagggaaaccccggcaggtgttgaagcttggggtggggtgcataggggttgttaayatgttctttatacttcccaggaatgttttaggagcatcagcctgatttctcatccctttcctccccgcctcagttccagatttcggaaggttcacgagtg

SEQ ID NO: 551386 - DNA, 201 bp, Homo sapiens
acccccatcttgtgctctgcacacctccccgctttgtgctctgcacaacccccgcctcacgctctgtgcatcctccgcctcacgctctgtgcatcccccgyctcacgctctgtgcatcccccgcctcgtgctttgcataccccggcctcatgctctgtgcatcccccgcctcatgctctgtgcatcccccgcctcatgctc

SEQ ID NO: 551387 - DNA, 201 bp, Homo sapiens
tccttggcattctcgggccctggtcataatgtgggagtggctgcctgtgcacgccacgggcctccagcttcactgcctcaacggggccatgagccatcgcrggggcaggcagggtgctgggcacctcatcactagggcagtgacatcacaaggcgtggaaggcggtggtggctacggaactccgtgcctgggctgtttctg

SEQ ID NO: 551388 - DNA, 201 bp, Homo sapiens
agcaggtgcgccccgtggggagggcgcggccaggagggtgcggggcgctcggtccgtccctgtgcggcccccagatcttggctcctggccgggcactgtcygcaggaggggaccccggggacccaggcgggcggggcagggatcggccctgggcctggaagtccccgtccgagggccccgagccccccacccccatccatg

SEQ ID NO: 551389 - DNA, 201 bp, Homo sapiens
ctgtgcatcctccgcctcacgctctgtgcatcccccgtctcacgctctgtgcatcccccgcctcgtgctttgcataccccggcctcatgctctgtgcatcycccgcctcatgctctgtgcatcccccgcctcatgctctgcactcctgcctcatgctctgtgcacactcctgcctcgtgctgtgtgttcttgatcatgttt

SEQ ID NO: 551390 - DNA, 201 bp, Homo sapiens
cggctctacggcttcacggtggccaacatccccgagaagatcgagcaggtgcgccccgtggggagggcgcggccaggagggtgcggggcgctcggtccgtycctgtgcggcccccagatcttggctcctggccgggcactgtccgcaggaggggaccccggggacccaggcgggcggggcagggatcggccctgggcctgg

SEQ ID NO: 551391 - DNA, 201 bp, Homo sapiens
cacaacccccgcctcacgctctgtgcatcctccgcctcacgctctgtgcatcccccgtctcacgctctgtgcatcccccgcctcgtgctttgcataccccsgcctcatgctctgtgcatcccccgcctcatgctctgtgcatcccccgcctcatgctctgcactcctgcctcatgctctgtgcacactcctgcctcgtgct

SEQ ID NO: 551392 - DNA, 201 bp, Homo sapiens
acctccccgctttgtgctctgcacaacccccgcctcacgctctgtgcatcctccgcctcacgctctgtgcatcccccgtctcacgctctgtgcatcccccrcctcgtgctttgcataccccggcctcatgctctgtgcatcccccgcctcatgctctgtgcatcccccgcctcatgctctgcactcctgcctcatgctctg

SEQ ID NO: 551393 - DNA, 201 bp, Homo sapiens
gtagacatcctccacctccctagttagctgtattcctaggcattttattctttttgtggcagttgtaaatgggagttcattccatttgatttggctcttgkcttgattgttgttggtatataggaatgttagtgttttttgcacattcattttgtatcctgagactttgctgaagttgtttatcagcttaagaatctaggt

SEQ ID NO: 551394 - DNA, 201 bp, Homo sapiens
gcgttgctgtcctcctcctcaagaaggaatcaccctgggccggacctcagggctggacagagtgctggtgcctcccctggcaggagaggggcagaccctcracccttgcccaggctgtgcagtccccagagggacccttgtcaggggctgagtccgggcggggtctccatgaccacggctgctgcccctgcccttgggtca

SEQ ID NO: 551395 - DNA, 201 bp, Homo sapiens; identical to SEQ ID NO: 394639

SEQ ID NO: 551396 - DNA, 201 bp, Homo sapiens
ctaggtgccttttctgtgccctgcaagcaggagtgatcgctcagggtgggggaggatccactgttctctgctcagtgttaggtcaaaggcagggttctggygggtatggggcttgctggctctgtgtctgccaaggcttcatctgcaatggaagtctgtagggaaaggggaggcccactggactcctgcatgctggtgggg

SEQ ID NO: 551397 - DNA, 201 bp, Homo sapiens
cacagggctggaggtgtggccggcccactgggttgtgctttctgccgtacgtcccttcccatgaggatgagatgacccatctgttgcatcccggctgctgwtaaaacaagaccctcggagccaagaaacaacactgaggtgatttactttcccaagtaattgaagcagggagtcagggtgggtttcaagtcggtcgcactg

SEQ ID NO: 551398 - DNA, 201 bp, Homo sapiens
tttctctaatatgtatttgctttattgctaggagaatacacatgacatggaggtagaatagaatttcataagccataaaggcatagataagctaaatttgrccagggattggggaaatgccacatgacctcatcagcctggttggggaatattcagtcctcatgagggtgtggggccaggaggtgttggtgggcatggacc

SEQ ID NO: 551399 - DNA, 201 bp, Homo sapiens
tataattttttgatatggctccgaacactttctctaatatgtatttgctttattgctaggagaatacacatgacatggaggtagaatagaatttcataagycataaaggcatagataagctaaatttggccagggattggggaaatgccacatgacctcatcagcctggttggggaatattcagtcctcatgagggtgtgg

SEQ ID NO: 551400 - DNA, 201 bp, Homo sapiens
gaaattttaattaatacataattgtacataatattcttttataatttgaaaagtgtctggggtggggggtctgtgaagcctgaggactccaggcctcccaygtggcaggaggccgggcacacgctgatgactttgcttctttcgaactttttttccttggaaaacatttcagagggaagattagttggttcctttgtaggc

SEQ ID NO: 551401 - DNA, 201 bp, Homo sapiens
aatgtctgttttccactggaagagaattctaaatattctaaatatcaaggggcaggggaatgtggaatacattaccattttcttttttttttttaattaarctacatttttagtccaacttataacaggttatagtgagataagtaccacaaagcctgtttgattttgtgaaaggtctgagatacctagaagcatttcttt

SEQ ID NO: 551402 - DNA, 201 bp, Homo sapiens
tatgaagtttttggattcaaaagagaccgggaagcttggccccacactgttatgaggtgtgatctgctggtggtggggttctggctgggttttttttcctygcttttctctgcttattctaaaatttccacaataggcatgcattgcttttattttgaaaaatatatagatacctgtatacatggttttaaaatatatatg

SEQ ID NO: 551403 - DNA, 201 bp, Homo sapiens
ttttgggtcaacaactgaaacacctttatcagtgcctaggagtgttcagggaccaacttgggtccaagcctacaaaggaaaacctgcagctggttgggtcrcagtgagaggaaaaagggggagacctgaggagtctacagagggatgcaagggcggaaggaagggccgactttggagttgggcagcaggagggggtgtgag

SEQ ID NO: 551404 - DNA, 201 bp, Homo sapiens
caccctaacagcggtggcagggagttcccaccagggagcgccccaaaccatcccaagatggggctggttgggattccaaagaacaaagcactaaatgctgrgtgatcaatttaaagcatgtattaggggaacttacatactgagggctgcagtgtatggtcgcaacacacagcgggacagggcgttccacctaggtctgtc

SEQ ID NO: 551405 - DNA, 201 bp, Homo sapiens
aagaatgctgtctgtcagtgccccggcagggagactgacatgcagagcccttgggagtcactctgtcttcatgtggataagtttgagatgttttatcttgmgaaagatttgaccacttaggggttggagggtgtgtcctccagctgaagccccagctgcagtcaccctaacagcggtggcagggagttcccaccagggagc

SEQ ID NO: 551406 - DNA, 201 bp, Homo sapiens
aggtattgtgctgtgatggcggctaaagactgttaagtctgttccctgctgtgaagctggagactttttaccacccccctcgaggctgttttagtgaggcrctaagcatcccttatgccaccaggtccccagacagctctagaagataagacaccaaagagggtagctgtttagtgaatcgcattgctgttcagaaggatc

SEQ ID NO: 551407 - DNA, 201 bp, Homo sapiens
atctagtggctagaaaccagggtgctgctaaacatcctacaacacacaggacagcccctaacaccacagaattaccggagccaaagtatcaatagtgctgrggttcagaaagcctgctttaagtaaataaactggtttcttgttgcttatttacggtaaagataattcttatgcaacttgtcagtaaggttattaaaacaa

SEQ ID NO: 551408 - DNA, 201 bp, Homo sapiens
tgccagaccttctccactttgaggtcaaatgtttatattccccacactgcagtcttactgaacacaaataatctgtggtataaaaagacccaaagtgggartgtgtttttctcagttactggaaaactgcatttaaatctggttctcagctgggggcagttttgtctcctaggggacatttagtaatgtctagagacattt

SEQ ID NO: 551409 - DNA, 201 bp, Homo sapiens
gtggttggtgcccaggcaggcagtgtctgctgttggaggagagtgcatagctctccctttattgaacgtgtgtatttgcctcctgctgcagaacttgtctragtgaacaaatgaataataaagatttggaatcccagagtgtgtggtgtgcagcagaccaggagcctagctggagagtgtggtgtgtacctggggcttcct

SEQ ID NO: 551410 - DNA, 201 bp, Homo sapiens
cctgagacctgcccagagtgtaggatcatcaagacctgggcccccctaccccgctcagagccctggtgggtggttggtgcccaggcaggcagtgtctgctrttggaggagagtgcatagctctccctttattgaacgtgtgtatttgcctcctgctgcagaacttgtctaagtgaacaaatgaataataaagatttggaat

SEQ ID NO: 551411 - DNA, 201 bp, Homo sapiens
tagcagtgagcagggcatacaaaacagacacagcacaggggtgacgttgctttatagcaaccagctctcacctctcacaatagctcatcagtcctgagagmgcggccactcactcctgcggattcattccttcgtcaaggcggatccctcatgacccaaatgcccttcaaagctccctgtacctctcaacacagttatact

SEQ ID NO: 551412 - DNA, 201 bp, Homo sapiens
tttgaataaattatcacaagtccgtattatgaaatgtgcaggtccctaaaagaattcatcacaggcaaaccagttgactcagaaacatttccaggaggtaytttgagtaagaagttaacatgtgcataaggatgtatagaatgattccatttttgagaagtaaacaatgaccaagaagctcctccatctatttctgtatcc

SEQ ID NO: 551413 - DNA, 201 bp, Homo sapiens
aatcacaacattaaaaatgtagatgcgcagctgggagaagcaaccccttatcccagggactctcggaaacgctgcctttctttgtcctgtgtaggacgccrccttaggtaattattgattcaggttgttggtggcgccatttgaagtctcttcccaggccacaagcaggacaggttctccagggtagggagatgtgcctag

SEQ ID NO: 551414 - DNA, 201 bp, Homo sapiens
gactgcagtctgcaattcggtctgactctgctgtgaaaccctgttcttaaagctaacttggcgctctactggcaaccccgattgctgttttaaaagcagargatcagcataaaaaaagagaaggaaatcatgaactaggtgaaaaaacacatttttcttcatattctcaaaatgagagggaagcagaagtctgtggctaag

SEQ ID NO: 551415 - DNA, 201 bp, Homo sapiens
cagggtggccgttgccatgtcatgtgacacacggcctggttctgagaagcggcaggcagggtggccgttgtcatgcgacacacggcctggttctgagaagyggtgggcagggtggctgttgctcagaaagccacactttggcttttgctgttcaccaaagtgagaccagaccagcctcgtctctgcccttcatgttggttc

SEQ ID NO: 551416 - DNA, 201 bp, Homo sapiens
ttttcttttttttttttaattaaactacatttttagtccaacttataacaggttatagtgagataagtaccacaaagcctgtttgattttgtgaaaggtcygagatacctagaagcatttctttgtaagaccttgaacctcatagctcactcatgaagaatatttttattttattttcattcttttttgagacagggtctt

SEQ ID NO: 551417 - DNA, 201 bp, Homo sapiens
gtgagataagtaccacaaagcctgtttgattttgtgaaaggtctgagatacctagaagcatttctttgtaagaccttgaacctcatagctcactcatgaaraatatttttattttattttcattcttttttgagacagggtcttgcccgggctgaaggacagccgcacaatcacagctcactgcagcctccacctcctggg

SEQ ID NO: 551418 - DNA, 201 bp, Homo sapiens
ggagaggtcctgtcctggacgcctctgcagagagagaggggccacgaagaggcgctgggggattcggcccttctcatccaggtaccatgccctgccttggwcacctttgtattggacgtgtcctgaaactgcctgagtgtgcgtgagcatgcagacttgtgtctacatgggcatggaaaattctggaaggatccacatcag

SEQ ID NO: 551419 - DNA, 201 bp, Homo sapiens
tctcctgccactggaacggaagctccaggaggacgggatttgcctgattctttgctgtatcccagtgaactgaatgagctgctcccagacagttagaatcrcagccggggcccaggcggctgactgcacagtgaggagccaggccggacaggccccaggcgcccccgcccagccctgggtggcgggaaccccagctccacg

SEQ ID NO: 551420 - DNA, 201 bp, Homo sapiens
tgctgggtttaagtaaaaagatttgtttttaattgtgtccttaatgctagtgaccttttctgctgtaccttcctctgtagctacccccaaatacttgtacyaaaagtagggtgcacactagcataaaaatacaggtttttatatagtggaggtatagacagtatgggcttcagaggtcccgctcaagcctccccctgccac

SEQ ID NO: 551421 - DNA, 201 bp, Homo sapiens
acgccttggtcattgttccttccatgagtgagtgctgcccagcaagacaaagtacaggctccagtgggaaggccaccatgtcagccaagtcccttcccgarggaggtgcccgcatgcttattcagtgtcactgtccactccttggcagtgactcgggtggaggcgaaacatgactaatcgtaaatcacccctgccttctcc

SEQ ID NO: 551422 - DNA, 201 bp, Homo sapiens
aggatgaagtgaggtcatttaatgacaactaagcacaatgccaggcccatgaaaggcatacggtaaattacacgtacacatcctcatcaactgtgaagacrtcaactcgtttcattttagaatgacttggcaaagtagagcgctgggttcccccggcccccattctgattgatttccagtgcacagacggctgggggattc

SEQ ID NO: 551423 - DNA, 201 bp, Homo sapiens
ttcattttagaatgacttggcaaagtagagcgctgggttcccccggcccccattctgattgatttccagtgcacagacggctgggggattcagtgccacartgttactggatttctcactctgaattttcagatggcatctggaatttttatctcacaagtgccacctctttctaaaagtagacataaaacaaacacaaac

SEQ ID NO: 551424 - DNA, 201 bp, Homo sapiens
atgcggtagcctgtacgcctgtgtgctgacacaatggtcggaattgtttcatctgtgtgtttccaggtggcttgataatgtacaatgatttcagttccagrgaagaagaaggagccattcgatactcagtccactgcacccggctatacgagaactcttttaatagctaagttttccaggcgatgtagtatgaaaatcaaa

SEQ ID NO: 551425 - DNA, 201 bp, Homo sapiens
acctcatggagggcaccctgagctggtgccgggaggcctctgtgtcctcatctgcagttctaaagccgtgtgacaggatgatcgagcatccaggcgccttscacacctccacttctgtcctgtgttaatctaactttatggcggaggggcccctgggggggtctctgaaccaaaggtgggataattagactgagcagagga

SEQ ID NO: 551426 - DNA, 201 bp, Homo sapiens
tcctgccaatcctgggacgtggtcattcaggaacagaggactagtttcctgttcagcagagcccaacctctcctgtggttcagaggttgccatctgtttayatgccccaaataacgaatttcacctgatgatcgaaacagttgacacaggatgtgctgaacagctctacctggatgcccagcttggccccagaactctgag

SEQ ID NO: 551427 - DNA, 201 bp, Homo sapiens
accaccttgcagtgggttagaaacaatgcacatggttactgtttttatcatcgtaacattagaggtaacaggcttgtcagtggacgctgtagctctgcgcrtctgcccctccgctagccccagaacaaggcctggctttcagccatcttggggttctggacatggcccaacacagaacatgaaagaatgctgagtgaagaa

SEQ ID NO: 551428 - DNA, 201 bp, Homo sapiens
ctgcctcccgacacatgagctttcctctctgcccagggtttgtttcacaagggccgtgtcatcctaagctctgtgcaaaaagcctggtgttcagcgtcacrggtcccagtgacttctgtaactgggcagcagccttgtctgcagagggggagaccgaggcaggggcagcaagtaacatgctcacacagccagtcaccaaac

SEQ ID NO: 551429 - DNA, 201 bp, Homo sapiens
ctgggggtgtaaggtgggagcaccctgcagacttccccaggtcgcctggggtgcttggtccaaagccctcgtggtggggacaaggctcagtacctgagacrggagggggcgtggccgtcacgcttttttaggggtttccactcttgggatggctgcctgagaatcacccgccgggtttttgagaagtagatttccagcaat

SEQ ID NO: 551430 - DNA, 201 bp, Homo sapiens
gtgttgttcctcttcccaaggaatgccctgaggaagagcccacttaggcccctctgcctcccaacgagaagcacccactcaggcccctctgcctcccaacragaagcacccactcaggcccctctgcctcccgacacatgagctttcctctctgcccagggtttgtttcacaagggccgtgtcatcctaagctctgtgcaa

SEQ ID NO: 551431 - DNA, 201 bp, Homo sapiens
cagagcacattctgtcttcctcagtttcccccgcaacaagacgagcccctgccacatgtggcgctgtcctggaagtgttgttcctcttcccaaggaatgcsctgaggaagagcccacttaggcccctctgcctcccaacgagaagcacccactcaggcccctctgcctcccaacgagaagcacccactcaggcccctctgc

SEQ ID NO: 551432 - DNA, 201 bp, Homo sapiens
tctgcaccaggttaatgttagaaacttcagcttctccctgcacatgattctccctcagccggggaatgtcctgtattcctgccctagctgtggctttcttyagtcagaggtgaattgtagtggcgatgcttaggccctttgggcgtggccagattgacttccatgggaggcagcagggaaaggtgggcagaaacacctggc

SEQ ID NO: 551433 - DNA, 201 bp, Homo sapiens
tttatgaaaaaaagggaacatttctaatcggatatgttttccacaggtggttcctccccagaaatattaaatcacaaaggatataaaattctgttttaagyggcggcctgcagaatctctttttcctttcttctgcaccaggttaatgttagaaacttcagcttctccctgcacatgattctccctcagccggggaatgtc

SEQ ID NO: 551434 - DNA, 201 bp, Homo sapiens
ccagagaggcgcccggactcacagtggccctttcctggacccttcccaggggcggagggccagagaggcacactccgattatggtccatctttatagtaaygctgggacacaggcattgtcatgccaactccataactgatggccagggagtgtaagtgatgtcaccaaggccagaagccacagagaggcaccaagatccc

SEQ ID NO: 551435 - DNA, 201 bp, Homo sapiens
atagcaatgttgttgaaaacctgtggttatgtaaatatcctcagaactctttgtgctggagtaatatgaaatctcgatggctttggcagcagccttccaayaggtctgcggggtgcgggtgaaggtgacctttccaacatcaaggagaagggccagagaggcgcccggactcacagtggccctttcctggacccttcccag

SEQ ID NO: 551436 - DNA, 201 bp, Homo sapiens
ttgtctctggaacgccacgtttgggggataaaactcatagaaatactgaaatatagcaatgttgttgaaaacctgtggttatgtaaatatcctcagaactstttgtgctggagtaatatgaaatctcgatggctttggcagcagccttccaacaggtctgcggggtgcgggtgaaggtgacctttccaacatcaaggagaa

SEQ ID NO: 551437 - DNA, 201 bp, Homo sapiens
ggcacttgtgtaaaaaggtgtaaagaaagctgcttttatgaaagcagacgtttcccaaaggacttgaccccctccccaagtatttccgcagggatggtgtrgctatgcagaggtgagggtgcttccctgaagtgctttggtgagaatttgctcacctggcgaggggtttgcttaccagttcatcttaacctaattaagttt

SEQ ID NO: 551438 - DNA, 201 bp, Homo sapiens
acgtcagtgtcactgccctcctgcaccttctgacgggatactctgaacaggacatggcatcgcttctctgtctcagaaaacatagacagaattacaaaatraaaaaggattttgggagggctgtttggcttctgggggtttgagcccatccatgctgcagagtgaagcagaggatgtctttggactaatttctgcaccaaa

SEQ ID NO: 551439 - DNA, 201 bp, Homo sapiens
cttcttgagtacagaatgcgctcagagcaagaggtagaatgggtgatggcacagcctgaggccacataaacacatcagctctcgtgagcatcgcgagtccygcatggcacagaagcagggtctgcatggccccccgttgattctgcgccgactccctactttgcaggcactgctgcgccctgcactgctggactcgtttca

SEQ ID NO: 551440 - DNA, 201 bp, Homo sapiens
agcttacaagtgcgtgatggctggattctgctctcgcctgaggcaatgtggacgtggaaacaccttctcttcagaacccccgtcttccagcctccattgcygtcactgacacgttcacagacattctgaccccagcccttgctttctgaccttctcttttttctcttagatctccaggttcccttccttaccccgggagcc

SEQ ID NO: 551441 - DNA, 201 bp, Homo sapiens
tttggaactggagacttcgtcatagagccaggaccctcgaagagccatgcttgcagtgaaagagtatactagatgatatctgcacactggcacaggaagamaatgggaatctgcccatcttagccagattagggggaagaaatctcccttgaaaatttttagccatagacctccccacagtcagctttaatctttgagctt

SEQ ID NO: 551442 - DNA, 201 bp, Homo sapiens
tttcccctcctattgtcctcattttggcttttttcccattgtctatgcaacattttcaaaaccagagctcctggcggctgctcaccgaggacctgcgccasccttggtttctcagctctcccctcctcccttcttcccctggcgtttgctattgatcaggttgaattttaggtcctgcagagacatctgacaggggtccca

SEQ ID NO: 551443 - DNA, 201 bp, Homo sapiens
ttcccctcctattgtcctcattttggcttttttcccattgtctatgcaacattttcaaaaccagagctcctggcggctgctcaccgaggacctgcgccagscttggtttctcagctctcccctcctcccttcttcccctggcgtttgctattgatcaggttgaattttaggtcctgcagagacatctgacaggggtcccag

SEQ ID NO: 551444 - DNA, 201 bp, Homo sapiens
aaaccagagctcctggcggctgctcaccgaggacctgcgccagccttggtttctcagctctcccctcctcccttcttcccctggcgtttgctattgatcakgttgaattttaggtcctgcagagacatctgacaggggtcccaggaaggccctggctgtcgaggaatccagcagacacgtggatgtgtctgggaaggaagg

SEQ ID NO: 551445 - DNA, 201 bp, Homo sapiens
ttctagaggcagccaatttcagctgcctctctctgcttacctacgtatttccatgtttcttggttcatcatctgaacgtcatcagctgtgctcctcttacrgaagaggggacctggctcccttccaccccgacattgcccacccctcctcctcctcagttataccagccatgcttctgcccttcactttccagccaagaaa

SEQ ID NO: 551446 - DNA, 201 bp, Homo sapiens
ttccagccaagaaacaaactttaattatgcaccctcaatagatacatcttgttttttcccgggtaagtaaacatctcttttcctctttttcacatttccgrcaaagttcttccttccctgcaccgtggtcgccatcctgccctgccccacccctttcacgccatcagcctcactccgcccactgcgcggcttggccccaga

SEQ ID NO: 551447 - DNA, 201 bp, Homo sapiens
ctgccctttcagtgcatcctgttttatttcatgttagactgaatcatgtgaaattgataacaggttttcagccacacacacacaaaaaaaaaaaaaagagwgtgtcctgaggttcagcttagtcttctgttggctctctggggggaggttcaacttagtcttctgttggctctctgtgggtgctgtgagctctgggaatgt

SEQ ID NO: 551448 - DNA, 201 bp, Homo sapiens
gtctttccccagatcccctgtcgcctgttaggtgagcatccctgtcctgcactgggcttagtgtccccacgggttaagctgcgctgtcctgcacgggggcrtcaggaggagtctctttatcagtgaggatgagaaaagagacctgggatccgaggtgcggcagagggaatgtagctaacagtttgtgataaaagactcaac

SEQ ID NO: 551449 - DNA, 201 bp, Homo sapiens
gatatttgcattacactggttgagcatctcaaatcccaattctgaaatgccccagtgagcatttcctttgagtgtcagcactcaaaaagttacaaattctrgagattttggatttcaggttttcagatttggaaggctcaacctatactaggccttgtacccgctcccaatctgataggccaggatgaggtagtgtagttc

SEQ ID NO: 551450 - DNA, 201 bp, Homo sapiens
aaagtcttatattttaattccaggaaattctaaaactcaacttccccaccacatacaaaatcaaataccgactctcaacctatgaacttactaggtttaartggctgttctttggatcatctgtgggttcttttaatgcctgaatgttctaatgaagcctccagatggatttccactaagtagcagtaaaattcctgtcat

SEQ ID NO: 551451 - DNA, 201 bp, Homo sapiens
cttgccatcaaggagccagttatgtaagtaaaggcactggcaggccttatttcaggctgagggtgacgaccacaaccgggcgcatgctgacctcgcttacrtggcatcccctttcggcgggcctgccattgctcttgggtcagggtaggcggggagagtccccatgaggttggctggacaccctggatgtcccctttccca

SEQ ID NO: 551452 - DNA, 201 bp, Homo sapiens
ccccagaaggctgcgggaaaggtgcaagggtttatccagcatccagcacccctgcaggagaggaatccctgctgggccgggagggcagctggctccccatrggatttgcacatggtgtgtgaagttcagcatctcttgctgagccactgctggctgttagagcagctcttctttcaacctttctttcagatttaaggaaca

SEQ ID NO: 551453 - DNA, 201 bp, Homo sapiens
ccttctgcacctggctttcctgaaagaaagaaaacgcgtggcttatcttttcacggcacgccaccttcactctcactttttcttttctaataaatacctcyggatgggttagtggtaatctctcctcaaaccctgagtggaaaatgtgagggaattgccgtctttggcattctgttggagctgcagccccccgagctctcc

SEQ ID NO: 551454 - DNA, 201 bp, Homo sapiens
cttctgtcctatctgccttctgcacctggctttcctgaaagaaagaaaacgcgtggcttatcttttcacggcacgccaccttcactctcactttttctttkctaataaatacctctggatgggttagtggtaatctctcctcaaaccctgagtggaaaatgtgagggaattgccgtctttggcattctgttggagctgcag

SEQ ID NO: 551455 - DNA, 201 bp, Homo sapiens
ctccaaagtgccttctgtcctatctgccttctgcacctggctttcctgaaagaaagaaaacgcgtggcttatcttttcacggcacgccaccttcactctcrctttttcttttctaataaatacctctggatgggttagtggtaatctctcctcaaaccctgagtggaaaatgtgagggaattgccgtctttggcattctgt

SEQ ID NO: 551456 - DNA, 201 bp, Homo sapiens
cagggtcagctacgggggaccaagttccgtaagtcccactcgggccctgtctccgtgcgtgaaagccggctccaaagtgccttctgtcctatctgccttcygcacctggctttcctgaaagaaagaaaacgcgtggcttatcttttcacggcacgccaccttcactctcactttttcttttctaataaatacctctggatg

SEQ ID NO: 551457 - DNA, 201 bp, Homo sapiens
caagcacctaagaaaatagaagagtttctgccttctagagctctggcctgaggcttggtggtggggccatgtgtttggtttttaagtagcccctcgagacyctccagcaccccttccctgcctcccctggaccagtgatccaccctgggtctgagggcatctgctgccctctaagaacgaggggccacgtccagggagagc

SEQ ID NO: 551458 - DNA, 201 bp, Homo sapiens
aatagacaagtgtttcctcccgagtctggagctgagaacctccatgatctgagcaggtgtcctggggggccagagggcaccatgcttcctgcctcacaacrcacactgatggccagctccagggcctgcaggactgcctggcgcacgaccgaaggcctcaggtctccagtgcgtgtcgcctgggctcctggagttggtagg

SEQ ID NO: 551459 - DNA, 201 bp, Homo sapiens
tttcagaaatatcaactcactcaattaaatgaaagtcttatattttaattccaggaaattctaaaactcaacttccccaccacatacaaaatcaaataccractctcaacctatgaacttactaggtttaaatggctgttctttggatcatctgtgggttcttttaatgcctgaatgttctaatgaagcctccagatggat

SEQ ID NO: 551460 - DNA, 201 bp, Homo sapiens
cagtgctagcttcaggactgaatatggctgcagtgatatttgttcgcctcataccatgtttaaattttttttgaaattcgttttctccatttagaaattcrggttcatagaaaaatggggctccctgccttcactggaaaaacggaaagcctggcaccctgggcctgcccccatgtgacaggttggggaactgaggccctg

SEQ ID NO: 551461 - DNA, 201 bp, Homo sapiens
ccccccatgtcatgtgtgaacacaggacagacaagaggagatgaacagtgcttaagggaaggagccgttgagtggggaaattggaaccctggctgagaggmagcggggatggtccaggagcacgtggagggctcttcgccccgggagccagagagagcgagaggaaggagaagacacacgctgggccgtcagggaggggca

SEQ ID NO: 551462 - DNA, 201 bp, Homo sapiens
ggagatgaacagtgcttaagggaaggagccgttgagtggggaaattggaaccctggctgagaggaagcggggatggtccaggagcacgtggagggctcttygccccgggagccagagagagcgagaggaaggagaagacacacgctgggccgtcagggaggggcagaatccggcaatgtctcaaagaggaggcctttgaga

SEQ ID NO: 551463 - DNA, 201 bp, Homo sapiens
cccctgtgcatggcttcatgccaaaggtgatatattccaaccaattagaacagtgccaggcacagagttgatgcttaataattatttgttgaatgagtgartgaatgattggtcagtggctgctggagctccagccattacatctgtattccagccagcaggaaggagggaaaggacattagggacaggccccttcccttt

SEQ ID NO: 551464 - DNA, 201 bp, Homo sapiens
gcatgccagctggactcaggggctcatgcctgttatccagcactgtgggatgctgagttgggaggatcgcttgaggtcttcttgttatgaagaccaacccrggcaacataacaagacccctctctacaaaaaaaaaaaaaaaagcatagctgggtgtggtggctcgagcctgtggttccagccttgggaggctaggatggg

SEQ ID NO: 551465 - DNA, 201 bp, Homo sapiens
gggcaagggggatgaacaagcagtttacagacacggaattcagatcgccaggaaatatgtgaatggtgttcgagtctgccggtattccatatgcaaattamggcaacactgtgctcagtggctggcacagcattgcccagggcagtaagcgctattcactggtcgtgaggggagaggagttttcatgcgttcttgatggga

SEQ ID NO: 551466 - DNA, 201 bp, Homo sapiens
attcttttgacttcttttggggaactctgcttttcagtagctaagagaattcaggaacgcaaatgccttctgctcaaaatgattttgatgccacagcggcrgattctgggcccattcatctcctccacgccaaccccctggcagcccccagccctgtgcagcttctcagccctgctggttggtggagcatccacagggtgt

SEQ ID NO: 551467 - DNA, 201 bp, Homo sapiens
cataatcataggcctcttcgggctagcacttttcatacatcacacttggcaggatgtagatgtgggtaaggtaccagctcaaacacaataagcctgtgccrgtagttggagctagaggttcagattcacacagatggatttatttaacaaaaatcttgctattgtcaccagcactattgttcgtacctgccgtgttcccac

SEQ ID NO: 551468 - DNA, 201 bp, Homo sapiens
ccagcatgccagcaacacagtgacaataaatggacttaaactcatcagttaggagcagagattgtcaggttgcttttaaaaatacaggcactggttatttrcaagaaacacacctgctacactggaattccgaaaagacaaaagtaaaagaatgggaaactacacgacaggtaaataataaccagaggaagccggatttgc

SEQ ID NO: 551469 - DNA, 201 bp, Homo sapiens
accatttacagttcatcccgtacccacagataacacttgctactatattcttcatctttttctctcttaatgatcagcttttcataatcataggcctcttygggctagcacttttcatacatcacacttggcaggatgtagatgtgggtaaggtaccagctcaaacacaataagcctgtgccggtagttggagctagaggt

SEQ ID NO: 551470 - DNA, 201 bp, Homo sapiens
gttcgtacctgccgtgttcccacgacctttaccacctaattgtcgcaaacacctttcatgcaccaagcagagcagctggatgcatcttatctgtaggaggsgcccctgttctctccagcttgaactcacctcatacaagggactcctaagctcctacttgaaccacaagcacctaagaaaatagaagagtttctgccttct

SEQ ID NO: 551471 - DNA, 201 bp, Homo sapiens
gacctttaccacctaattgtcgcaaacacctttcatgcaccaagcagagcagctggatgcatcttatctgtaggaggggcccctgttctctccagcttgawctcacctcatacaagggactcctaagctcctacttgaaccacaagcacctaagaaaatagaagagtttctgccttctagagctctggcctgaggcttggt

SEQ ID NO: 551472 - DNA, 201 bp, Homo sapiens
ctattttaaaggagacatattgctgaacagcagtgagaaaagtctgcaggaactgctgcctgagccaagccagagaaccgaagacccggccggccctggcytcacaggcgtgtgcccatgcagccacccaaatgcacgcgtgacaacaaggccgggagggtggggggggtgcacaggtagccccgaccctctcaggcattc

SEQ ID NO: 551473 - DNA, 201 bp, Homo sapiens
agctttacaggtgggagaactgccttgagtgctacgtgcagggatgggcatctccatgaaggcaccacctgttgggctggggggctgttggggcagatgtwgcgtgtaaggtgggctggcctttgggggaatctttgtcaggccacagctgttggggtccacctgatgactatgagggcccctgtgagccaggagcaagtg

SEQ ID NO: 551474 - DNA, 201 bp, Homo sapiens
tgcacaggtagccccgaccctctcaggcattccagccacagaacatcaaagtgagcgagtactgcgctggctgtggcttcagagaacctgtatgtgccacrtggaaaaacaggacaccagagcccaccagacagtgccggccagcagagaagcagagagccagcgccacacaacatcaagaaggccgacaaccaggttgga

SEQ ID NO: 551475 - DNA, 201 bp, Homo sapiens
tgtttccaggtcagcctccctaagcacctcccaaggcctccaccccacagtgtcgcacagaacttgacacataccagatgctccaattattaaatattacygagtacttttagaaaattgggaacatacaataaagtataatgaagaaaataaagaaaaccaataatctcacttcccaaagataataactactgccatttt

SEQ ID NO: 551476 - DNA, 201 bp, Homo sapiens
accttcttttcttctttcttcctcacactcatgctgactctttcggctgcttttctcccagccaaactgagcgaggggctttgtaccagtgtttctgtcaytggcctattgagagcctgccagcgtcactgcctttttctctttgagggccgtgaaatatttatatgtctgccttgcttgtgtgcttctgaaaagttgcat

SEQ ID NO: 551477 - DNA, 201 bp, Homo sapiens
aggtgcttggtagtcagagggggctgcagaggtggagcgagaagcagtagggctggtttcccgcagcacctagaggcctggggtctgactctgggttcccrcattgctcggggcaggttgctggtgtctgtaaaggacacgctgaagcctcacttctggttctgttccttttcaagtttcctcccttccttgcatttacac

SEQ ID NO: 551478 - DNA, 201 bp, Homo sapiens
agcccagtggcccctcgctcactctccgggagttggcagggacccagctccaggactgcaattctgtgacctttggagctgtgcttcctccactcctgccrgtggctgagccctgggtggctgccctctgcagccctggtcggcagaggcaatgcagaggctggctgttttgtgacggtcctaggttccccactctccagc

SEQ ID NO: 551479 - DNA, 201 bp, Homo sapiens
cttgggcatctcagtaggaagtcgggggactgcggggctgagctcagttctggttgacgttgtgactgcgtggccttctcttggccttgtgcctcagtggmctgcagtctgcaattcggtctgactctgctgtgaaaccctgttcttaaagctaacttggcgctctactggcaaccccgattgctgttttaaaagcagagg

SEQ ID NO: 551480 - DNA, 201 bp, Homo sapiens
tatagaatgattccatttttgagaagtaaacaatgaccaagaagctcctccatctatttctgtatccttcatgagtggagcatttgcgtgtctgtccctgrgtgtgtataatgcatttcacgtggcacctgtgactcatcgcaggaggctggccgtgggcaggtgctgttgtctgtgggggagagcctggctggtcgctcc

SEQ ID NO: 551481 - DNA, 201 bp, Homo sapiens
ccggtattccatatgcaaattaaggcaacactgtgctcagtggctggcacagcattgcccagggcagtaagcgctattcactggtcgtgaggggagaggarttttcatgcgttcttgatgggatgtcaagcgttagcgccttttggtgacacccagtgaaataaaaaacactacagccttcagacatacttctgggaattt

SEQ ID NO: 551482 - DNA, 201 bp, Homo sapiens
cccgtgtgtgtgagcagaggatgccaagagtgagggggaggatgcagggaccaagggaagaacgagtagcacaggcgggagaagccctcagaagctggacygggctggtcctcggtggtgctgctggccttgcctccagactagaagggcgtgatcagcgggtgatcagtatcgggaacaaggtgacttggagcagatgag

SEQ ID NO: 551483 - DNA, 201 bp, Homo sapiens
ctgcagccttgggcgggatagcacaaaggccaggagcgtggagctccgtggctctagatcctgcctgtcacctgtcatgtgtgtgacttgggcaggtttcrtaacctctgctccacagtttccacagctttaaaatgggcatgataatggcacccagtgacaagattgttgtgggaattaaagcagatgatacacagagcc

SEQ ID NO: 551484 - DNA, 201 bp, Homo sapiens
aagccgagtgtttggtagatgaaggtggctcggtagacccaggtcagccagaacctggtgctggagccttcccactggctcgtgcagggagctgatgttgytcttggctgcccctggccttggtgccagcaggctggaaacatcacagcacgtttctgggtgcccactgctgtctcagtgatgcagaatgcaaagccctcc

SEQ ID NO: 551485 - DNA, 201 bp, Homo sapiens
cccagacagttagaatcgcagccggggcccaggcggctgactgcacagtgaggagccaggccggacaggccccaggcgcccccgcccagccctgggtggcrggaaccccagctccacgctgctgctgctgcgtttccttgttctgcgtttccttgttctggccttgttctgagaagcggcgggcagggtggccgttgccat

SEQ ID NO: 551486 - DNA, 201 bp, Homo sapiens
gggagcctttcttcatccaccgtcctggggcacctggtggcaccttcagtctggaaacacctgcccttcactttaggggaattgggcccctgttcgtttgmtaagttttcctaccattttctgatttgttttttctttctggaaaatgtattagtcagatgtaggcttttctggattaatccttcaactttcctttctttc

SEQ ID NO: 551487 - DNA, 201 bp, Homo sapiens
gaagttctgagaattaaaaaaaaaaacatacaattgctcctgggattataaaatagtaagtgcactttgtgaacacttgaaaaaaacaagtgcctagggcrtgaaagaccctggttatcttacctctcagagttgaatatgtcagttcataggttggtggaaattcttcatgctttttcccatgcatctaccaaaacaggc

SEQ ID NO: 551488 - DNA, 201 bp, Homo sapiens
acactggaggctgtgttagctgtcagcccttctgtgtccatcttccaaaactacgtgcccttcggtgggaggatttatcatctttagaagtcagtgatggygcagttcatgttgcttgggggtgtggagataacacatgagtagccgaccatgtttacctggaagttctgagaattaaaaaaaaaaacatacaattgctcc

SEQ ID NO: 551489 - DNA, 201 bp, Homo sapiens
cctctgaggatgctcagtggagcagggaacactggaggctgtgttagctgtcagcccttctgtgtccatcttccaaaactacgtgcccttcggtgggaggwtttatcatctttagaagtcagtgatggcgcagttcatgttgcttgggggtgtggagataacacatgagtagccgaccatgtttacctggaagttctgaga

SEQ ID NO: 551490 - DNA, 201 bp, Homo sapiens
gatcaggagggtccttcctacatgggggacgttatggggggctgcctggtgtggctgtcacagctaataaggaggacctggggtgccaacctgtgtgtcasttgctgcgtgggggtctccagtaaagccgagtgtttggtagatgaaggtggctcggtagacccaggtcagccagaacctggtgctggagccttcccactg

SEQ ID NO: 551491 - DNA, 201 bp, Homo sapiens
aactgcatctataacattgggtgggccggcttcttactatacgagcagatgagcaggggacatcggcacacagagatggtcacgcatgcctgggtggcttsagagagacgggcgtgtgactagctgtgcgtgtccaggttttcacccgaggcagtggttggcaaactacagcccgtgggctaactcaggtccactcattat

SEQ ID NO: 551492 - DNA, 201 bp, Homo sapiens
accctcacgatgagttgttttgcagagcagtttgagtaaatggtcatacagaggcttaggtttacttctcatgctgtggcgataactgcacgtctgttttycctctcttctaggggactcataaaagtctgaaaggcaacgcgcacgccctctccaccgtgacggccatcattgacgggacgggctctgtaggtgcgcaga

SEQ ID NO: 551493 - DNA, 201 bp, Homo sapiens
aaaagtggcctccattactgttagtaaaactgcatttgcagaagcacgtttttggcagctcacctacacctgtggtctccagccttcccgcacctgccccsctgctcacccttctcctaaaatcatgggcaggttggtgcaaaactcaccgttcagcacaacaaaaggctcttgggcgccatcctcatgactcaggcgcct

SEQ ID NO: 551494 - DNA, 201 bp, Homo sapiens
gagcgagaggaaggagaagacacacgctgggccgtcagggaggggcagaatccggcaatgtctcaaagaggaggcctttgagaatgggggaggctgaggarcacagaccacctattctggggatgcagatcccaccagaggaggatgctggcagcacgaggctggagactgaataccctgggagggaagttgaggaggcgg

SEQ ID NO: 551495 - DNA, 201 bp, Homo sapiens
taaagtagagcccttggctagtttttggggacagtgtttaattatagcagaacagcccagtgatgacggcagagtcacgtgaccgtggagcagctgcatcmcgtgtgacatgccgggactcagtgacgtggcccacgtgctgccagctgtaaatcagggtgtctagctccgattcaaaagccctggccttttgaaagtggc

SEQ ID NO: 551496 - DNA, 201 bp, Homo sapiens
ctaggttaagggatggaccctttctggctcccagacagctccccatcccctgtcccacattgtccccctttaggtaaccgtgactctcacctctagccgcrtggattcgttgcccatgcttggacttcctatgagtggaatgctgcagtctgtactctttcatgtctgcctccttctgcttcatgttatgtttgtgaggtt

SEQ ID NO: 551497 - DNA, 201 bp, Homo sapiens
atgtcatgtgacacacggcctggttctgagaagcggcaggcagggtggccgttgtcatgcgacacacggcctggttctgagaagtggtgggcagggtggcygttgctcagaaagccacactttggcttttgctgttcaccaaagtgagaccagaccagcctcgtctctgcccttcatgttggttccttcctttcactggat

SEQ ID NO: 551498 - DNA, 201 bp, Homo sapiens
tgtaccccttcttccttgtggacaggtggtcaaggatgacaggcagtcggctttcagcttggagctcttagaactaaaactgctcccgaggctcgtcttcyggtggcatatgaagatggcttatgttcgtcacgtgctcaggagtggggttgctggagagtcctgctgaaacgtcaccagcaggcattcttgtgggtcctg

SEQ ID NO: 551499 - DNA, 201 bp, Homo sapiens
tgcacaatggggattttatctcatctgaatgacgcctgtattatatttagtgattatttgaaactgcggtgacttcattttcctttgcaagaaactgaacrgaaaatgcaccgccttgttttctatgtggaaaaccacgcgtttcactaagtacaccccgatttcgggaacagatgctttgtgttttatagccgtgctcta

SEQ ID NO: 551500 - DNA, 201 bp, Homo sapiens
tgctctgacttgaaatcccactctaggttggggaatcactcttctttgctttaatgaatgtacactttgtcctttaggaacgtctagacaatcagaattcrtaaatatcagaataggtgtattttaaaataatgttggtgtattttaaaataatgttatttctggtcatatatggccattgtgaactcctaaaaaatgcag

SEQ ID NO: 551501 - DNA, 201 bp, Homo sapiens
gtagtggtgtccaggccactcaagacttagggcttctgaggaggcggcgtcagggtcagctcttagttcagtgtcataagtaacaatataaataactgccrcttacagagccctggggtatgacaaactgccacatacattacccctgtgatcctcacagcaaccctgcgagtgcccctgtgaggaaattgaggctcgggt

SEQ ID NO: 551502 - DNA, 201 bp, Homo sapiens
tgacaaaagtggcctccattactgttagtaaaactgcatttgcagaagcacgtttttggcagctcacctacacctgtggtctccagccttcccgcacctgycccgctgctcacccttctcctaaaatcatgggcaggttggtgcaaaactcaccgttcagcacaacaaaaggctcttgggcgccatcctcatgactcaggc

SEQ ID NO: 551503 - DNA, 201 bp, Homo sapiens
cctgggagggaagttgaggaggcggtctggggactgtcccacagcctagcagggacagggcctgccccaagggccagtgactggggaggcagcaaggagcrcccttggatcctgaggttccttccctgccttgtgacccccgcctcactttggccagtgagctgcacacagctgggccttctttctcccttcttcccctgt

SEQ ID NO: 551504 - DNA, 201 bp, Homo sapiens
attgagctggtttaactggagcacatggtgtggctaaaattgtccgtgtcctcctttgggcaagaccatctggagaggccggggtctcctctccccagtgygaggcttgccattctgtgggtttcactgtgagctggaagtgtgcaagcctggtctggggcagtggccctgggcactcagtggagaagccagatgtgacct

SEQ ID NO: 551505 - DNA, 201 bp, Homo sapiens
ggtttttgagaagtagatttccagcaatctcgcactgcttgcagccagccatggctttgaccttgtgtcttgatgtccacagctctacatcttctccaccrtcagcaagatggggcttgaggccaccatcggtgagtatggaggccttcctgcttttcttccacacacgtttttaaagttcacacagctggcaagatgaaa

SEQ ID NO: 551506 - DNA, 201 bp, Homo sapiens
aagatgctcccagcaaaaattgctaaacaatgtatttagagaaggaagatagatccagaaggaaagtctgagatgcaaggagaaatgcaagcaaaaaaaaagtgatattcctaaggatgaatctaaaggagtattgaccatataaaataggggccagctaactgtggcctatttttgtgtgatcctccagctgggaatggt

SEQ ID NO: 551507 - DNA, 201 bp, Homo sapiens
tgagttccttggttcctttttatccaccatcagaacattatttgaaattcatttccaggttctcagaacaaaccgcctcaagggtagatactccacctcaytccccctcttcctagtaacactgctggtgggggcccctgcttgtatcagacgtgcagctttgatcaggactgggtactgctactgtacgtgtgtggttac

SEQ ID NO: 551508 - DNA, 201 bp, Homo sapiens
ccaaagatgctcccagcaaaaattgctaaacaatgtatttagagaaggaagatagatccagaaggaaagtctgagatgcaaggagaaatgcaagcaaaaamaaagtgatattcctaaggatgaatctaaaggagtattgaccatataaaataggggccagctaactgtggcctatttttgtgtgatcctccagctgggaat

SEQ ID NO: 551509 - DNA, 201 bp, Homo sapiens
gcctgaggacttggcagtcagactcgcaaatcaggagctcaagaaggcagccccttggctgggtaggagctcaggaaggctgcccttggctgggggtgtarggtgggagcaccctgcagacttccccaggtcgcctggggtgcttggtccaaagccctcgtggtggggacaaggctcagtacctgagacgggagggggcgt

SEQ ID NO: 551510 - DNA, 201 bp, Homo sapiens
catttaaaaacacatcttgacataatttcagactttgagaaagttgcagaaatagtacaaagaattcagacattttagtacatgtggttcatcatgcaccygtgtttttacacacacacatgcacacacacatatatgcacacacacatgcataatttttctgaaccacttaagagtaagatgcacacatgctgccccttt

SEQ ID NO: 551511 - DNA, 201 bp, Homo sapiens
cccaacacagaacatgaaagaatgctgagtgaagaaatgcttgggtgggccccttgctgccactggggggtgggcagcctgaggacttggcagtcagactmgcaaatcaggagctcaagaaggcagccccttggctgggtaggagctcaggaaggctgcccttggctgggggtgtaaggtgggagcaccctgcagacttcc

SEQ ID NO: 551512 - DNA, 201 bp, Homo sapiens
ccatgcttctgcccttcactttccagccaagaaacaaactttaattatgcaccctcaatagatacatcttgttttttcccgggtaagtaaacatctcttttcctctttttcacatttccgacaaagttcttccttccctgcaccgtggtcgccatcctgccctgccccacccctttcacgccatcagcctcactccgccca

SEQ ID NO: 551513 - DNA, 201 bp, Homo sapiens
cctctcatgcctcctgtcccccgacccctcccttggcacctgcaggcctccaccaggctccctctgccacgtgcacagctgctgctggtttagcatgggcygcgcgcaagctgctcctctctttggggtgcccccttgccccagacaagctcctgcccatcctttgggatccgcaacacctccccaacctcttaggcatcg

SEQ ID NO: 551514 - DNA, 201 bp, Homo sapiens
acacgtttttaaagttcacacagctggcaagatgaaatactaaaatcaacaggcgcattgagctggtttaactggagcacatggtgtggctaaaattgtccgtgtcctcctttgggcaagaccatctggagaggccggggtctcctctccccagtgcgaggcttgccattctgtgggtttcactgtgagctggaagtgtgc

SEQ ID NO: 551515 - DNA, 201 bp, Homo sapiens
gccttccctgggccccaaagcctgcagacagtcccccactgtcctcctcgccagccagcatccttccatctggcccgtgctccactttcctgacaagcccrcttcattccctctcatgcctcctgtcccccgacccctcccttggcacctgcaggcctccaccaggctccctctgccacgtgcacagctgctgctggttta

SEQ ID NO: 551516 - DNA, 201 bp, Homo sapiens
tgggatgctgagttgggaggatcgcttgaggtcttcttgttatgaagaccaacccaggcaacataacaagacccctctctacaaaaaaaaaaaaaaaagcwtagctgggtgtggtggctcgagcctgtggttccagccttgggaggctaggatgggagaatggcttgagtctgggaggttgaggctgcagtgagccatgat

SEQ ID NO: 551517 - DNA, 201 bp, Homo sapiens
tcgcaaggcgcatgatctctgagttgattcactgctcaggggaacagggttccccaaggtctcatatcccctgagtgggcccagcccaagagggtcaggcygtcacctgggggtggttttattgtctcccgtccctccccagggccctgactctgcacttgaacagcttccctcagaaatagcatgccagctggactcagg

SEQ ID NO: 551518 - DNA, 201 bp, Homo sapiens
gatgctcgccagcggagccttcaccgccctgttcggcttagggtatttctacaacatccacagtttcggattctacgtggtaactcaggtaagggtttggrtccgtggctcaccatgtacggggtttccttggtgaatagggtggagtgtttatgtcacgtcacctctgtcaaggtgttgggaaggggcagaagtgcgtcc

SEQ ID NO: 551519 - DNA, 201 bp, Homo sapiens
gtcagggtcagctgacgtaacaaagtccttccctttctcttctgcttagaaattccagcaaccaggaggttttccttaatttcaggagttgcctcgtaaaraatgctgtctgtcagtgccccggcagggagactgacatgcagagcccttgggagtcactctgtcttcatgtggataagtttgagatgttttatcttgcga

SEQ ID NO: 551520 - DNA, 201 bp, Homo sapiens
ccctttctcttctgcttagaaattccagcaaccaggaggttttccttaatttcaggagttgcctcgtaaagaatgctgtctgtcagtgccccggcagggaractgacatgcagagcccttgggagtcactctgtcttcatgtggataagtttgagatgttttatcttgcgaaagatttgaccacttaggggttggagggtg

SEQ ID NO: 551521 - DNA, 201 bp, Homo sapiens
ggccggggaaactgttgaaaccaccctggggctgccttctgtattttccacaaccttccaggcccacctcccagctggaggccctgcagcttggcagttgycatggcgactgagtccctaagtgtgtctcttctgagctctcctggacagtgtggagaaaaggccttaagaactgaggggcttcagtaaaatgcaaacaga

SEQ ID NO: 551522 - DNA, 201 bp, Homo sapiens
tagaaaaagttctatctacatgtagaatcgaaaactttttaaaatagtgttggtagtatcacacattgccatttagtggatagagacagacccgagattgsagccctagctccgtatacttctttctgaagtcagtctactcatctgtaaaatgggctgttgtgaggtcaaaattagatattcataatgagagtagcatag

SEQ ID NO: 551523 - DNA, 201 bp, Homo sapiens
cgccacacaacatcaagaaggccgacaaccaggttggaaaccaagacggagctcagacccaccacatcgccccagaggcttttccagcacccatgatgttycggactgacctaaaaactaattgtcgagaagccaagggtgaggaggcaggaagcacctccggttggaggcacccaggcttgccagccacagagcgcccca

SEQ ID NO: 551524 - DNA, 201 bp, Homo sapiens
acctgggaatacaggtgcctaccaccacacctggctgattttttgtattttttttgtagagacagggttttgccatgtcgcccaggctcaacaacatgtgratcaagagatccactcacctcagcctcccaaagtgctggaattacaggtgtgagccaccacacccagcctccattttgtttttaagaaaacaatgtgtcg

SEQ ID NO: 551525 - DNA, 201 bp, Homo sapiens
cctagaggaacccagggcatgcgccttctgatggccacagtgagtgctgaggtcttcagtgtaggctgtgagggggactggctgcctaaactgtcagcctstggtaagtagggtagattaagctgatggagcagaaagcctcaccatccaaagccatcctttcccagactccatgtctggtgggaatagataggcaacccg

SEQ ID NO: 551526 - DNA, 201 bp, Homo sapiens
ttcccctgatgctgtaggacagacaggtctgtcccacccacggtgactcagtcattgttgttcatggccgctgcccgttcttcacgatcaaggaggagaawtctttggaggaaacagagctttcatacgtgaatcgactgggaagcgagtcaaaagtactgcaactggaagtgtggcatggggagggggccgtggccagtc

SEQ ID NO: 551527 - DNA, 201 bp, Homo sapiens
cagagcatgcttaataatcagaggcttttcattgtatttcttatcaacaacactagtaactgaatataaatcacccttcctcgccagtcagtgcaccatamcattagaattcttgctttttgatcagtggagataaaatgagtttcttttctccatgttaagtaatcaggttctgattttcccttttctttctctctaata

SEQ ID NO: 551528 - DNA, 201 bp, Homo sapiens
atcaggttctgattttcccttttctttctctctaatagtgtttaatgctctaatgctttctaagcatgaggtattttcttgagctctgaagcccagtatcytcaaagcccccttcagggaaacctcagttccctgtcagtcaaggcctgtcactggctttgccttggccttctctgggagaatgtctgctccttaagttga

SEQ ID NO: 551529 - DNA, 201 bp, Homo sapiens
acttgaaattgaaccagaggctgtgaattagaaagtgagtcttattctgttatgtcatttatagaatgacacggcacaccaggtcacatttaagttagttraatggaatgtttagacttacctttgatcactgctgattaattgtatttttctcgatgatgatgataaaaccagggctgggaggatagtggtgttataagt

SEQ ID NO: 551530 - DNA, 201 bp, Homo sapiens
aggccatttccaccacctgttttcttccgctctggttcctagaacctggagttctgtgcccctgcgctccaagtgtttgagacaccagccacccggagaasaatgtgcctctctttgttagcgcacaggggcccctgggtgtctcctgcctgagggtagagtccatggggtcttctgttctcttccttaactggaaagggg

SEQ ID NO: 551531 - DNA, 201 bp, Homo sapiens
cagggtgagccccaaaggacagggcgtcccctgctcctttctcaggcctctctgagtctcctttctgaagctgttctcaaatgtgtcccagccaagggacrtgtgtgcccaagtccctgaaggtgaaagtccaggaagagccatatcaggggaagcccctggcttacccctgggggcatcacactgtgagtggataccgat

SEQ ID NO: 551532 - DNA, 201 bp, Homo sapiens
atgcctctcctcctccttgtagagagcagagccactgccagaaggaaggggacaagacccagcaggacaccttctttccacgctttccagcctgtgggagyggcaggggcaacagagagaggatctggagccaggattaatgactcatttatgaagcatcttattctgcgaccgaggctcagtggtcagtggcgacgtaaa

SEQ ID NO: 551533 - DNA, 201 bp, Homo sapiens
ctctcatggcccagggcttgactcccgcagacacaccccccgccccaaataccattcctggcacactcatgtagtattggtggctgtcttggaagaaagtmcctctggccctcatgcctgctcccagccgccccgctccccatgtccactggcatgacacccctcctgtctgcaggccaccgccacctcacgggaacagcc

SEQ ID NO: 551534 - DNA, 201 bp, Homo sapiens
ccatatgatgttcttaaaactatggttgatattttaaaatgttttaaaaagccgtgttcctgccctgagcatgaatttcagtttccaagcttgtacagtcrtgccgtgaagtagcttaaagctgcccggaccagccgtcttgagactggggagaacttcgcacacaccttccgccctggaacaccttctgtcctctaagaa

SEQ ID NO: 551535 - DNA, 201 bp, Homo sapiens
tggcagggccgacagtttgctttatgtttcagaagccccgcagtggctgcagctatagattatcagaaaacgtgccagtgaaatagtaacatgccccccccatgtcatgtgtgaacacaggacagacaagaggagatgaacagtgcttaagggaaggagccgttgagtggggaaattggaaccctggctgagaggaagcgg

SEQ ID NO: 551536 - DNA, 201 bp, Homo sapiens
cttgaacccgggaggcagaagttgcagtgagccaagattgtgccactgcactccagcctgggtgacagagcaagactctgtctcaaaaaaaaaaaaaaacmcaaaaagtgccttcagtgccacagcccgtggtctgattgcccgtgtgtgtgagcagaggatgccaagagtgagggggaggatgcagggaccaagggaaga

SEQ ID NO: 551537 - DNA, 201 bp, Homo sapiens
ctgtagtcctagctactcaggaggctgaggcgggagaatcgcttgaacccgggaggcagaagttgcagtgagccaagattgtgccactgcactccagcctrggtgacagagcaagactctgtctcaaaaaaaaaaaaaaacccaaaaagtgccttcagtgccacagcccgtggtctgattgcccgtgtgtgtgagcagagg

SEQ ID NO: 551538 - DNA, 201 bp, Homo sapiens
cttcacttgaaaagtagaaaatctggccacgctgggcctgcaccccatgtgacagtggccgaggagctgcagctggggccccacccttctcagaggccccrcccctccctggtgcccctgctcggggtgagcgctccactgttcccgcgtcctcactacaccacacagcggtgcagcaccctccccagtacgtgtctggag

SEQ ID NO: 551539 - DNA, 201 bp, Homo sapiens
gacttgaacccagaagtagttcaggctgcatctctcccaaaagccttgttttcagggcagctcctggttcttcgtgggccttcatcagacagccctgcccwcatcagacagccctgcccacaggagcccaggcctccggctgagcatgcaagccccgctgctcttgcagggaggccaccccagggaaggtgctgtggggag

SEQ ID NO: 551540 - DNA, 201 bp, Homo sapiens
agagaattctaaatattctaaatatcaaggggcaggggaatgtggaatacattaccattttcttttttttttttaattaaactacatttttagtccaacttataacaggttatagtgagataagtaccacaaagcctgtttgattttgtgaaaggtctgagatacctagaagcatttctttgtaagaccttgaacctcata

SEQ ID NO: 551541 - DNA, 201 bp, Homo sapiens
ctgtcttcacttgaaaagtagaaaatctggccacgctgggcctgcaccccatgtgacagtggccgaggagctgcagctggggccccacccttctcagaggycccgcccctccctggtgcccctgctcggggtgagcgctccactgttcccgcgtcctcactacaccacacagcggtgcagcaccctccccagtacgtgtct

SEQ ID NO: 551542 - DNA, 201 bp, Homo sapiens
actccccgctggcattcgcttcatcatctcattctccagggatcagtggtgagtcctggtggggcaggcccttggcatggagctgtgtataggtgagggcyactgtgcaggtagttgtgttgccccagtttcattataaaacacataaaacttgaatcactgacctcacccataaccgttgaattgctttttggtggtgga

SEQ ID NO: 551543 - DNA, 201 bp, Homo sapiens
gtttccaaatgtctgttttccactggaagagaattctaaatattctaaatatcaaggggcaggggaatgtggaatacattaccattttcttttttttttttaattaaactacatttttagtccaacttataacaggttatagtgagataagtaccacaaagcctgtttgattttgtgaaaggtctgagatacctagaagca

SEQ ID NO: 551544 - DNA, 201 bp, Homo sapiens
agataaacagggcttcctgtcttcacttgaaaagtagaaaatctggccacgctgggcctgcaccccatgtgacagtggccgaggagctgcagctggggccycacccttctcagaggccccgcccctccctggtgcccctgctcggggtgagcgctccactgttcccgcgtcctcactacaccacacagcggtgcagcaccc

SEQ ID NO: 551545 - DNA, 201 bp, Homo sapiens
caccaagctgcagcgggcattttaaatttgagtttaatcattgaagttataagctgttctctttctagatcaggtttttgtttgtttggttggttggttgkttttttttttttttttttttgagacaagatcttactctgtcgcccagtctggagtgcagtggcatgatctcggctcactgcaacctccgcctcctgggtt

SEQ ID NO: 551546 - DNA, 201 bp, Homo sapiens
ttcagttccagggaagaagaaggagccattcgatactcagtccactgcacccggctatacgagaactcttttaatagctaagttttccaggcgatgtagtrtgaaaatcaaacccgtccatgtttgcattgactcgactctgatgtaaagacactgggttttgatcctgaactccatttcgaaattcagaaacgccgtaga

SEQ ID NO: 551547 - DNA, 201 bp, Homo sapiens
tgcctaggacacagaagagctgcccctcgccttccactcctgtcaaatacttctttctcccaacccattttgttgccccaaaaagtatttttctatgcggyggttgagactcttagactggagttgccctttgtcttctttctaaggcaccttcttttcttctttcttcctcacactcatgctgactctttcggctgcttt

SEQ ID NO: 551548 - DNA, 201 bp, Homo sapiens
acagcctaatgagccacgtaaagttgactagacagatcgtcaaatgcagatgatacacacacacacacacacacacacacacacacacacacacacacacacacacaccccctctgtgttggctgaaggtggagtgaaactggcctaaccccactgtcctccagggggattcagtgaggcctgaatcccctgctcctgtcc

SEQ ID NO: 551549 - DNA, 201 bp, Homo sapiens
tggcgagggagtctgtagacagaagacattgccagctcccagccccaccgccttccccgcacactcgtcgcgctgtgactcccggccccgccgccttcccygcacactcgtcgcgctgtgactcctggcggttttctgtgttcttccagaagattggcacctttcttctcccacccccaccctccacccgcgatggcatct

SEQ ID NO: 551550 - DNA, 201 bp, Homo sapiens
acacagcctaatgagccacgtaaagttgactagacagatcgtcaaatgcagatgatacacacacacacacacacacacacacacacacacacacacacacacacacacaccccctctgtgttggctgaaggtggagtgaaactggcctaaccccactgtcctccagggggattcagtgaggcctgaatcccctgctcctgt

SEQ ID NO: 551551 - DNA, 201 bp, Homo sapiens
tttagtagagggaacccttttctctttgaaagtgtaagccctaagcgtggagtgcactggccacagaagcccccacacccaccgggggctccacagatccyatttggggctcttgggacacagactggaaactgcttgtttagaggcagaggtgcctcttggcctccagccttgtcttggtccacccagtggcttcttgtt

SEQ ID NO: 551552 - DNA, 201 bp, Homo sapiens
tcggactgacctaaaaactaattgtcgagaagccaagggtgaggaggcaggaagcacctccggttggaggcacccaggcttgccagccacagagcgccccraagtcaccgtcatcccagcccctggccttcctgctgccctccggggccatggcactgctgttcagctcaggcacaggggcacagcagaggtttgggaagc

SEQ ID NO: 551553 - DNA, 201 bp, Homo sapiens
cctttcggcgggcctgccattgctcttgggtcagggtaggcggggagagtccccatgaggttggctggacaccctggatgtcccctttcccagagtgacckctgggctcagtggggtgtcacccagcccctgacctccactccttttcagacagagctgctacactatgtcacgtagcaggcagtttctcagtggcctctt

SEQ ID NO: 551554 - DNA, 201 bp, Homo sapiens
agggtgaggaggcaggaagcacctccggttggaggcacccaggcttgccagccacagagcgccccaaagtcaccgtcatcccagcccctggccttcctgcygccctccggggccatggcactgctgttcagctcaggcacaggggcacagcagaggtttgggaagcggtctccccaccggcactgggattggcgggtccaa

SEQ ID NO: 551555 - DNA, 201 bp, Homo sapiens
gttatgtaagtaaaggcactggcaggccttatttcaggctgagggtgacgaccacaaccgggcgcatgctgacctcgcttacgtggcatcccctttcggcrggcctgccattgctcttgggtcagggtaggcggggagagtccccatgaggttggctggacaccctggatgtcccctttcccagagtgaccgctgggctca

SEQ ID NO: 551556 - DNA, 201 bp, Homo sapiens
atactggggaccaagcctcaacacaagttttgatggagaccaaccatagtcacaccacagccagagactgaggcatgtggtcccaagaggcttttgttcasagacagaggtctttaccgcctggagaaacccagggatccccataaatgtttagctgcttccctgagacctgcccagagtgtaggatcatcaagacctggg

SEQ ID NO: 551557 - DNA, 201 bp, Homo sapiens
ggagttgcctcgtaaagaatgctgtctgtcagtgccccggcagggagactgacatgcagagcccttgggagtcactctgtcttcatgtggataagtttgaratgttttatcttgcgaaagatttgaccacttaggggttggagggtgtgtcctccagctgaagccccagctgcagtcaccctaacagcggtggcagggagt

SEQ ID NO: 551558 - DNA, 201 bp, Homo sapiens
agctgaagccccagctgcagtcaccctaacagcggtggcagggagttcccaccagggagcgccccaaaccatcccaagatggggctggttgggattccaamgaacaaagcactaaatgctgagtgatcaatttaaagcatgtattaggggaacttacatactgagggctgcagtgtatggtcgcaacacacagcgggacag

SEQ ID NO: 551559 - DNA, 201 bp, Homo sapiens
aataaagggcttgacgcgccggaaagtcccctcgccgctggccaccagccttccagcccttacggcccacgccgtaatcctggtgaccgagaaggtacgtwcagtctaaggatttgcatttgaacgaaggatactggccaagccccttaccacccccactccccgctaacaccccagcccgcggccccaggtttgaatttc

SEQ ID NO: 551560 - DNA, 201 bp, Homo sapiens
cacctccggttggaggcacccaggcttgccagccacagagcgccccaaagtcaccgtcatcccagcccctggccttcctgctgccctccggggccatggcrctgctgttcagctcaggcacaggggcacagcagaggtttgggaagcggtctccccaccggcactgggattggcgggtccaagcccagcaaccggcttcgc

SEQ ID NO: 551561 - DNA, 201 bp, Homo sapiens
cagtcagtggagagaacaggagagatcatgaaggtgctagaaggggagaaggcctgaggacagcgcgcgctggctttgcccttggagctggagcccttccrgaatctcctggcttctgcccttcccagcagtcctgtggatcaatattcagcagccgagggaagctgctgaaataatgatgctcatctcgggctttgtgat

SEQ ID NO: 551562 - DNA, 201 bp, Homo sapiens
aatattttagacttcccccgttgtttttttattaatcccctttgagagcaagcttgaaaacacctggccccagacctgtgattcaccaagtcattttggamctgcatttacacgttctgtttcatgcagcccacctgtgatgttctctttgttgggggttggaggcaggtaagggaggtggtgcaaatggaattcaggttc

SEQ ID NO: 551563 - DNA, 201 bp, Homo sapiens
ttaatacatagcaacagactgggttatttatttaagatgtgtattgtgtcatatgaagtttaagagacataaatggcattttgttatttattaagacaaaytccaattgttctctggctgtttttttcagttgtgtctagcaaaatacttatctgccctttgaaataaaatgtttttgtttaaaaaatctcagaacactca

SEQ ID NO: 551564 - DNA, 201 bp, Homo sapiens
ccctgctctagagagctggcttactgcagtgaggtagtcggagctgccaggctggccctggtttcgtgcagtcttgtagagccacccccgagtctcaagaygctagagcgtcctcagcaatacattccccaagtcccttcatgaaactcaagtcagggattcttcaaaagtgcagagatactttgtccaggcgcgaagtca

SEQ ID NO: 551565 - DNA, 201 bp, Homo sapiens
ctggagccatcgtggcagccatggggatagtgtgctttctcttcctcattgaacgtaagtgcacgtggccttggagaccacccaccaagggaggcctcggrtttccctgcctgggtgggccttgggggcgagtgtgagagctgcgtggcctagcgccctgtttgcccgtggctgcctcagcgctcttcttaccagggagac

SEQ ID NO: 551566 - DNA, 201 bp, Homo sapiens
aggaggtggctcagagaaacaggacaaactggaatctgccccacttatccagctgacccaggcgagccgcctagcctcatttttctcccttgtgaaaagarcgccctgcctcttcagggtggtcacggggctcaaatgagagcatgtcagtcatggttcgtgcttccagaggtcttgacccactcaaaatgaagtggtctt

SEQ ID NO: 551567 - DNA, 201 bp, Homo sapiens
cttgtcccgaatcactgatcctgggcaggtactaaaggcatcagatgtgccattcttgcggtcaacagaggatgtggctttctctgctgctccttcactcytgtctcctgcccagggtgagccccaaaggacagggcgtcccctgctcctttctcaggcctctctgagtctcctttctgaagctgttctcaaatgtgtccc

SEQ ID NO: 551568 - DNA, 201 bp, Homo sapiens
gattggctttggaggacgcagtgactcaggaatgtcatgagtttgacattgggatgggagaccaggcctgcctgctgtgctgggccccttctcagttctcyggcctccctccccattccttcctatattgctctgccttcagccctgacttcataatcaggtcattttctgtgacctctgaggtgaccacaggagatgaaa

SEQ ID NO: 551569 - DNA, 201 bp, Homo sapiens
ccaccatcagaacattatttgaaattcatttccaggttctcagaacaaaccgcctcaagggtagatactccacctcactccccctcttcctagtaacactsctggtgggggcccctgcttgtatcagacgtgcagctttgatcaggactgggtactgctactgtacgtgtgtggttacttctgccagtaacgctgaaggtg

SEQ ID NO: 551570 - DNA, 201 bp, Homo sapiens
catcacattagaaaggaagatagtaagggagtaacaaagcaacaaaggaactacaaaccgccagaaagcaattttttaaatggcagtagtaagtccttathaataattaatgtaaatggattaaattctgcaatcaaaagatagaagtggctgaatggatattaaaaaaaaaaaatctaggtgctgcctgcaggagactca

SEQ ID NO: 551571 - DNA, 201 bp, Homo sapiens
atcagaacattatttgaaattcatttccaggttctcagaacaaaccgcctcaagggtagatactccacctcactccccctcttcctagtaacactgctggygggggcccctgcttgtatcagacgtgcagctttgatcaggactgggtactgctactgtacgtgtgtggttacttctgccagtaacgctgaaggtgtgaat

SEQ ID NO: 551572 - DNA, 201 bp, Homo sapiens
tgcagggggttttggggaggagcagctcttcctcacacacagcttttaggaatatgagagctcatctaggcgagaggcattgcttctgctcctcgtgtgtrtgagtttggggctgaagcctgtgtttcattctccccgttcaaatcctctccgagcagttcactgagatctactggtgcccaggtgtccccgacgtgccct

SEQ ID NO: 551573 - DNA, 201 bp, Homo sapiens
agatgtgcctaggacacagaagagctgcccctcgccttccactcctgtcaaatacttctttctcccaacccattttgttgccccaaaaagtatttttctatgcggtggttgagactcttagactggagttgccctttgtcttctttctaaggcaccttcttttcttctttcttcctcacactcatgctgactctttcggct

SEQ ID NO: 551574 - DNA, 201 bp, Homo sapiens
aataagacattctcttataaaaccacagcaaaaagatcaaaatcaggaaatttaacaccgataagatactgttatctaacccacagtccatgttaaaaacratatcaaatgtcaaatatctgtgatagcatttcttcttctgttcaggatctagttcgggttcatacattgcgtttaattatcctatgggtctcgtctctt

SEQ ID NO: 551575 - DNA, 201 bp, Homo sapiens
aacttactaacatctgtaagaatgttcctgtagaaccgctgtatgtcaaagattaacatttagcctcatctgcttctctccctgcccctccacagtgtgtktgtgtgtgtgtgtgtgtgtgcatgtgtgtagatgtatgtttgtacacacacacttttctgaaccacttgagagtaagttgcagacatcataccctcttat

SEQ ID NO: 551576 - DNA, 201 bp, Homo sapiens
ctaaaggtatataacaacaaacagtcgggcctggctttatcccttcaactcctctgtctcattcccctaccattttctactcttttacccatttcttctggtagttccctatatttctaaataatatgagtaaactatgatttttatgtccaattttaaagcttttctatggacctctggttttagagacaacatctagtt

SEQ ID NO: 551577 - DNA, 201 bp, Homo sapiens
ggtcagaagtccaaagtcaaagtgtcagcagggccacacttcctctgcaggctccggggacagacccttccttgcctcttccagctcctgctgctgccgcygttcttggctggtggctgcatcacaccagtctctgcctgtgtggccacgtggcctcccttcctgtctctgagtctttgcgtggccttctggtgaggacgc

SEQ ID NO: 551578 - DNA, 201 bp, Homo sapiens
acatgtgcaggttttacaggttgtaataaagatgctctaatgggctgtttcctaagttactatctttttatatttttttaagacagggtctcgctctgtcrcccaggctggagtgtagtggtgcaatctcagctcactgcaacctccgcttcccaggttcaagtgattttcatgcctcagccacccgagtagctggaatta

SEQ ID NO: 551579 - DNA, 201 bp, Homo sapiens
tatgagagctcatctaggcgagaggcattgcttctgctcctcgtgtgtatgagtttggggctgaagcctgtgtttcattctccccgttcaaatcctctccragcagttcactgagatctactggtgcccaggtgtccccgacgtgccctgaggcaggtggtccagagaaacagcttctcgtcctctctcctctccatgttg

SEQ ID NO: 551580 - DNA, 201 bp, Homo sapiens
caatctcacggccattcagaaaagttaagttggcttaatgggtatttttacatttgattacacctctgtcttagctctttcttcaagagaggattttatgytcacattctattatctgagagtctggagtgttgagatcaaccattattctgtttaaatcagttgtcttatgtcctcttggtagcttttttgggacgatag

SEQ ID NO: 551581 - DNA, 201 bp, Homo sapiens
gttgccatgtcatgtgacacacggcctggttctgagaagcggcaggcagggtggccgttgtcatgcgacacacggcctggttctgagaagtggtgggcagsgtggctgttgctcagaaagccacactttggcttttgctgttcaccaaagtgagaccagaccagcctcgtctctgcccttcatgttggttccttcctttca

SEQ ID NO: 551582 - DNA, 201 bp, Homo sapiens
agctgttgaatcagtatcgctctaatgaaacttttttttttaccagcactcaaaaggctatgagaatggtacaaacagattgagactccagaagcaaatcytgaagagcgaaaagaacaagcctctggtaagtcacacacaacttccacttcctagaatgtcggagctgcaggaaaactcctttgagccacgtcggctctc

SEQ ID NO: 551583 - DNA, 201 bp, Homo sapiens
aagttaatctgccttgtcatccgcggtagcagggaggcctcagtgcaggtctggcccacccctagcacctgagcctcctgtgccctacccttcccatcatygatccttgtagaggctcctcacattgctgctgcttagctgaccacaccaagctgcagcgggcattttaaatttgagtttaatcattgaagttataagctg

SEQ ID NO: 551584 - DNA, 201 bp, Homo sapiens
tgagtgtagatgcaaaactcaatagcagcaaccagaattcagccacctacaaaaggattatttaccatgatcaagtgggatttatcccaggaatacacagytggcttaacaggtaatgttaatgtaatacaccatttgaatggataaaggacaaaagctgcatgatcatctcagtagaagcaggcaaagcactggacaaaa

SEQ ID NO: 551585 - DNA, 201 bp, Homo sapiens
caggcgtgcagggggttttggggaggagcagctcttcctcacacacagcttttaggaatatgagagctcatctaggcgagaggcattgcttctgctcctcstgtgtatgagtttggggctgaagcctgtgtttcattctccccgttcaaatcctctccgagcagttcactgagatctactggtgcccaggtgtccccgacg

SEQ ID NO: 551586 - DNA, 201 bp, Homo sapiens
gaaacaaaatgaagtttgaaaaccagtgccttcaggaaggtcaaacaccatatgatgttcttaaaactatggttgatattttaaaatgttttaaaaagccrtgttcctgccctgagcatgaatttcagtttccaagcttgtacagtcgtgccgtgaagtagcttaaagctgcccggaccagccgtcttgagactggggaga

SEQ ID NO: 551587 - DNA, 201 bp, Homo sapiens
gaatctcttcttcacaccgcacttgcagagactgtattgatacagacgccagagcacatcagcccttgcacaacacagtccagtggctccatgtcgccccrtgtgaaatcctcaccagtccatctggttggtctctgtcaccctcacagaagggtgcgagcccctcgggcctggatcatcactgggtcccggcacctgggg

SEQ ID NO: 551588 - DNA, 201 bp, Homo sapiens
cgtctgacccaatgcttccctccctctgggggtcagctctcttccctccctctgggaaaggctcccctacccgggctaacatgttagtcacgtctgtgcckagtgtcagaccccagatgtgggggtgcccccaggctgccctgcggcctcctctctccttgtctgcccgctcactgcaggagagcgcgctcgggcctttca

SEQ ID NO: 551589 - DNA, 201 bp, Homo sapiens
gaaacgaatgccaatttagtaaaggtataagatggcatcttgtgttttattaaattttattgtgtatatttaaggtatgcaacatggtgttacagatacayagagatagtaaaaaggttactagtaaagcgaagcaagttaacatagccatcgcaactcacagctgcccgcttttgtttttgtggcaagagcagctcaaat

SEQ ID NO: 551590 - DNA, 201 bp, Homo sapiens
ttatcaacaaaacccagacaagaggtttgatgctggcctcgaggccagcaggagtgtgctcggcagctgcatgtccctctatgatgtcaccctgtgttgtrtgggaatggacttggctgtggggagcctgcagccctgtagctcagtttgggttgcaaggcagtaaccagtttcatccaaggtgataaagagaccaaggtg

SEQ ID NO: 551591 - DNA, 201 bp, Homo sapiens
gcatcacactgtgagtggataccgatggggtgagttggctgatgtcctttaaattggtgaccatacatcacaggtggaccattgggactgcccaacatgcmgaccatgtgtccttggtcagtggcctcgccctatgggctgtgcccaggacaggagggcgacgcaccccacagccagccacggacctctgggtgcagaccc

SEQ ID NO: 551592 - DNA, 201 bp, Homo sapiens
cctggttttgctggatttcctactctcccctgattctggagtgacccatgtccccattccttcctcccgtcctcctgtcctcccttgccccggcatcaggmgttcatgcatgggagtcttccatcttcccacaggctgttccttctcatgcccatcttgccaccacagcctgaattggacccagtcagctctttgccttct

SEQ ID NO: 551593 - DNA, 201 bp, Homo sapiens
ggtccaggagcacgtggagggctcttcgccccgggagccagagagagcgagaggaaggagaagacacacgctgggccgtcagggaggggcagaatccggcratgtctcaaagaggaggcctttgagaatgggggaggctgaggagcacagaccacctattctggggatgcagatcccaccagaggaggatgctggcagcac

SEQ ID NO: 551594 - DNA, 201 bp, Homo sapiens
ggctgcatcacaccagtctctgcctgtgtggccacgtggcctcccttcctgtctctgagtctttgcgtggccttctggtgaggacgccagtcattggaatkagggctcactctatctaatatgacctcacctgagctaatcatgtctacatgaccctatttccaaataaggtcacgttctgaggttttgggtggacatgaa

SEQ ID NO: 551595 - DNA, 201 bp, Homo sapiens
cattggaatgagggctcactctatctaatatgacctcacctgagctaatcatgtctacatgaccctatttccaaataaggtcacgttctgaggttttgggyggacatgaaattatgggggatgatattcaacccagtacaaaatgaacaaaaggaaacatatcatccaaaacatctgctttataaatgataaagaaaacgt

SEQ ID NO: 551596 - DNA, 201 bp, Homo sapiens
tatctaatatgacctcacctgagctaatcatgtctacatgaccctatttccaaataaggtcacgttctgaggttttgggtggacatgaaattatgggggaygatattcaacccagtacaaaatgaacaaaaggaaacatatcatccaaaacatctgctttataaatgataaagaaaacgtagatagaattacgaaataaga

SEQ ID NO: 551597 - DNA, 201 bp, Homo sapiens
agatgaagaaatgagagaggaaagacgaatttggaaatagaagtagagttggcctgacaccagctaaataaatacagcgttttcctcttcagtctttaggracattccagtttgctgtgtaaatggacccttcacccaattctacaggacggcttctgtcagcctggctacaccgtggcagtgactcttcccaaagggtct

SEQ ID NO: 551598 - DNA, 201 bp, Homo sapiens
tggcctgacaccagctaaataaatacagcgttttcctcttcagtctttaggaacattccagtttgctgtgtaaatggacccttcacccaattctacaggayggcttctgtcagcctggctacaccgtggcagtgactcttcccaaagggtctcattcattaaggtgtctccctccacacaaggctgaactaaaggttccag

SEQ ID NO: 551599 - DNA, 201 bp, Homo sapiens
gcactcttcagacctcagcccgacaaagggagacagccttccttctgggctgtctgggtggagagtggagatgtgaacccacagcccataggacagagctkctcttctcaaaatccttcctagctgggtgataacacctgtagaactggcactgtggttggagaatcctcctgcatggagcaggagagatggtccatggac

SEQ ID NO: 551600 - DNA, 201 bp, Homo sapiens
gtggagagtggagatgtgaacccacagcccataggacagagctgctcttctcaaaatccttcctagctgggtgataacacctgtagaactggcactgtggwtggagaatcctcctgcatggagcaggagagatggtccatggacttgtctgagactggggaggtgctggaggcaacttggcctgagaactttgttcacctg

SEQ ID NO: 551601 - DNA, 201 bp, Homo sapiens
aatcttcctgcaccagcagtcgaaggcgtgagaagcagtggtggcctaacagagagcttcatccaaagcgctgagactttctttccttgccagaaaggatrgttttcagaaacacgaggacagaggccggggcttctggagcaaatccactgtacccacatagcctttgttctttgggctttgggataaatgataggctcg

SEQ ID NO: 551602 - DNA, 201 bp, Homo sapiens
cacgtagtgttagaagtatggtatgttgtgtgttgtgcatgagggtaggaaaagcagtctggtttttcctgtctcttacagtgttcagtttccatttggayaaagcaaacgtggcaatattttttaatgttccaatattatagtgacataagtaatattgataatggctgtagaactgaatgaataatacacagcataaga

SEQ ID NO: 551603 - DNA, 201 bp, Homo sapiens
tagggcttctgaggaggcggcgtcagggtcagctcttagttcagtgtcataagtaacaatataaataactgccgcttacagagccctggggtatgacaaastgccacatacattacccctgtgatcctcacagcaaccctgcgagtgcccctgtgaggaaattgaggctcgggtcttcgttccccaggcagggctgccaca

SEQ ID NO: 551604 - DNA, 201 bp, Homo sapiens
gttcacgttcacagtgttggcactggctggcggtgatctgccataccccccttgcacacaagtgggctgccaggccgagtgactggggacaggccggggcrtgtgcgggagtcactggtgggacagccaagctgtgcccttgccctcacctggcatgctatggcgatggcttttttctgaaacgaatgccaatttagtaaa

SEQ ID NO: 551605 - DNA, 201 bp, Homo sapiens
actcacagctgcccgcttttgtttttgtggcaagagcagctcaaatccactcatttaatgtgaatcctgcatacagtccagtttcacacccggtgctcccrtgttgccctgtcctcgggttacgtagcttacttggcattgccatggtggtggacctgctcagcctcactcatgtttgctctttcagatccgaacgacgtc

SEQ ID NO: 551606 - DNA, 201 bp, Homo sapiens
gccccgctccccatgtccactggcatgacacccctcctgtctgcaggccaccgccacctcacgggaacagcccatcagatcccagcaacgtcacccggacrcatagggtggtcagctctctggcctcaccctgctgggcccgtcgcccgcgtctgacccaatgcttccctccctctgggggtcagctctcttccctccctc

SEQ ID NO: 551607 - DNA, 201 bp, Homo sapiens
tgaaaattccagtaagtaaacgtgcccaggaggagtttcagaaagggctgctgtgctggctgtgggaagtctggtcggttgatgattaagcttaaaaagamatctgtggttgtagaacccggggattcgaatccatagccaaagctagacgctgcacagtgctagcttcaggactgaatatggctgcagtgatatttgttc

SEQ ID NO: 551608 - DNA, 201 bp, Homo sapiens
aaaaagacatctgtggttgtagaacccggggattcgaatccatagccaaagctagacgctgcacagtgctagcttcaggactgaatatggctgcagtgatrtttgttcgcctcataccatgtttaaattttttttgaaattcgttttctccatttagaaattcaggttcatagaaaaatggggctccctgccttcactgga

SEQ ID NO: 551609 - DNA, 201 bp, Homo sapiens
catctgtggttgtagaacccggggattcgaatccatagccaaagctagacgctgcacagtgctagcttcaggactgaatatggctgcagtgatatttgttygcctcataccatgtttaaattttttttgaaattcgttttctccatttagaaattcaggttcatagaaaaatggggctccctgccttcactggaaaaacgg

SEQ ID NO: 551610 - DNA, 201 bp, Homo sapiens
ccccatctcagtcaggaagctgctgtccaccctgtggacaggccagacccgaggagccagcccaacaccccctcccttcagccccgcaccccatccttggscatgttctgtcagttctgctctgttctgtgaggggatgtggaatggaaaccctctcacctcctccgcctctaccaccctggtccccgtcaccaccgtcag

SEQ ID NO: 551611 - DNA, 201 bp, Homo sapiens
cgtttctgtacatttcatgcagagcaattaaatagggcactgcatttttcttcaagttaatttttatttattaaagtaaaacataatgtaccttagaagcyagacagtcctacaagcttattatgttgtacagcggcgttccgtccccctccccagccctctctttctagaggcagccaatttcagctgcctctctctgct

SEQ ID NO: 551612 - DNA, 201 bp, Homo sapiens
gctccgcacctttcaatgtcccaggcactattccaggtgttgggggcggtgctggtgtagacggaacgcaggcagagacatcccccaagcggtgccaagcrgcaggaagacaggctgagcaggctctattttcagctggccttgggaggcttccctaggcaggcagtgttgaaacagagctgtgagggactggagggagag

SEQ ID NO: 551613 - DNA, 201 bp, Homo sapiens
tttttgtttttcctgtgtcatactattagtatcagtctagtcaagtgacttgtaaataccaataaatagaatgtatccatttttaaaaatccaacaggagmacaataataaggaaaaagttaacttttgactaaagccgaattcctgattctaagatttaaaggtcacctaccaggattaagatttggtcctcacaactgt

SEQ ID NO: 551614 - DNA, 201 bp, Homo sapiens
agtcagagaacagcagctgtgtggcccagagggctcggcacccacagaaagccgggtcctctcttcctcttgtcaaggacgtcaggcagaggcctgtggamacctgccaatgggagcagtcgccagacctagaagagccaagcccggtgtgccctcgcctggagttgtgagaaaagtccctgtagccccagatctagggcc

SEQ ID NO: 551615 - DNA, 201 bp, Homo sapiens
gtgcagggtcgaaaaacccaatcctaatgtacttaaaagggcagatgagagacatttgcctgaaattaaaacataaagtaattctgttctgggactttatytgaaaatccagaagaagcccttggccggaagcatcagcctccagggcctcttcaccctgacattcctgaggctgcagcacagtctccccatacccctggt

SEQ ID NO: 551616 - DNA, 201 bp, Homo sapiens
atgcaggctcagggcaaggaaagggaatgtgctgctagcactggacctcagctccgggcaaggctgcaccttctgaaccgacggcccaggagcgaagtgayccatacttcctccaaagcatcactctccagacatggtaatccaggcccagaagcaaaggtcagtcccactgtgcctgtcacacactctgctcctctacac

SEQ ID NO: 551617 - DNA, 201 bp, Homo sapiens
gttttgacatctttaagacttgggctccatcaagaaaaaaaaaaattaaaggtacaaaaatgtgtgataatgaattactcctattttacaggaatgggagrcttgatttataaaatagttttttaaattattattcaggtaaagggttagatttaagctataaagagcttgactggttttcctctgccttgtctgctctgt

SEQ ID NO: 551618 - DNA, 201 bp, Homo sapiens
ccgtagaaaccttgagagcagaaacacaagcagacatagtgctcggggctgcttccatgtacagaggatgttccctgatctggcggggcgcctggcagcamgtgagtgaggctgatggtagtggtgccaaaacaaccaaatgtatctccccaaaacctatcattcaaaagtatcctaggggattaatcaaaaactctcaaa

SEQ ID NO: 551619 - DNA, 201 bp, Homo sapiens
gcagacaaataattggatcaatcacaatcacctcaatcaatgactaacaaatcaccagtaaaaacgaagtgctaaaaagcgagttatttaattttattttwtcagacacttctctgaggagcccccatgtgctgtgcagggtcgaaaaacccaatcctaatgtacttaaaagggcagatgagagacatttgcctgaaatta

SEQ ID NO: 551620 - DNA, 201 bp, Homo sapiens
tctaagatttaaaggtcacctaccaggattaagatttggtcctcacaactgttacctgaaggtaagagtaaattccaatggtataactatataaaaaaaawagataacagatatttccataaaaattgtttatgttcatttttaaaatctctctcatcaaacagttgtaatgcagtagagagaatgagaagagagagaggt

SEQ ID NO: 551621 - DNA, 201 bp, Homo sapiens
ctgtacagtcctgttgagacactgattgagaccaggacgaaatacaggccactgaccttaacaagagacagatcattagtgactagcaagacccatttcaragggatggaaggccaaaacttgaacagaacagactgaaatgtcaaggaagtcgtgatagtggagaaggtgcccagcacatgggcagcagaatgaggctgc

SEQ ID NO: 551622 - DNA, 201 bp, Homo sapiens
ctgaaatgtcaaggaagtcgtgatagtggagaaggtgcccagcacatgggcagcagaatgaggctgccagctttgggcaaggagactgagtgcaaacctcrcctctcagtgagcgtccaggcccctcggctgatggaggtcctcaattggtcttccttcatcacagttatgactttacatctgcttgtgtgagtacttgat

SEQ ID NO: 551623 - DNA, 201 bp, Homo sapiens
ttgaatgtttctgaacaaataatttgatatattctatttctcaaaagaccctcactttttaaacacaaagtcatcaaaaaaccatcttatgaaagagaacrttaaatataacattaagatcaagaaactatcttttaaaatcctgtaaataaaaaaagttacaatcaggatgggcagacaaataattggatcaatcacaat

SEQ ID NO: 551624 - DNA, 201 bp, Homo sapiens
ctgggctgggggcaggtaggctgcacctgcagggctcctggtgactgggggacctgcacagaagactgagccagaaggatgccagggtggcactgcccacrgaatccaagaggttggctagttctgtacagtcctgttgagacactgattgagaccaggacgaaatacaggccactgaccttaacaagagacagatcatta

SEQ ID NO: 551625 - DNA, 201 bp, Homo sapiens
aactatataaaaaaaatagataacagatatttccataaaaattgtttatgttcatttttaaaatctctctcatcaaacagttgtaatgcagtagagagaakgagaagagagagaggtcagaaagtcacccagtaaacaaaaggaccacagatttttctccatcctcaacagagattccagttgatgaagaaggctgccatg

SEQ ID NO: 551626 - DNA, 201 bp, Homo sapiens
gcgggatgcagaaccctgaaacagcgggatgcagaaccctgaaacagcaggatgcagaaccctgaaacagcgggatggagagacagaagcctcgggaaacrtggacgacaatgtgaggcccctgtcccagccccacaccactgggggaagagctaacagaaaaagggggcagagaaaaaacactgggttgagttccaggca

SEQ ID NO: 551627 - DNA, 201 bp, Homo sapiens
aacacaaagtcatcaaaaaaccatcttatgaaagagaacgttaaatataacattaagatcaagaaactatcttttaaaatcctgtaaataaaaaaagttayaatcaggatgggcagacaaataattggatcaatcacaatcacctcaatcaatgactaacaaatcaccagtaaaaacgaagtgctaaaaagcgagttattt

SEQ ID NO: 551628 - DNA, 201 bp, Homo sapiens
gagacatgacccaaggagccaagcccgagaaggaaacgtgcaccctgaaacagcgggatgcagaaccctgaaacagcgggatgcagaaccctgaaacagcrggatgcagaaccctgaaacagcgggatggagagacagaagcctcgggaaacgtggacgacaatgtgaggcccctgtcccagccccacaccactgggggaa

SEQ ID NO: 551629 - DNA, 201 bp, Homo sapiens; identical to SEQ ID NO: 395773

SEQ ID NO: 551630 - DNA, 201 bp, Homo sapiens
ggcggatgaattcacctgaaacaggaggagagggaggccaggcgagaaaggctccgggaggcacagggcctggggctgtggggggagcgtggggggctgcsgggggaaggggacgctcctagacctccactccagctcctggccctgggcattactgctccccccacaaggcaggacaatgaagggggggatgtcccagca

SEQ ID NO: 551631 - DNA, 201 bp, Homo sapiens
gagcccaggacctacggggcggatgaattcacctgaaacaggaggagagggaggccaggcgagaaaggctccgggaggcacagggcctggggctgtggggrgagcgtggggggctgcggggggaaggggacgctcctagacctccactccagctcctggccctgggcattactgctccccccacaaggcaggacaatgaag

SEQ ID NO: 551632 - DNA, 201 bp, Homo sapiens
aggagccacccgtggagaccccggtatggccacgccccctcctagccgggccacccctcctgtccacatggccacgccccctcctaggctgggccaccccctcctgtccgtctgtcccctggagtcctgtgggacaggactgccccagccatagcactatgtcccccatgcccaagcccggtccttgtggtctcctgcagt

SEQ ID NO: 551633 - DNA, 201 bp, Homo sapiens; identical to SEQ ID NO: 395777

SEQ ID NO: 551634 - DNA, 201 bp, Homo sapiens
tggggcctacacgactgccaaggcaggtcctgctgggcgggtgagccaggaccagccggcatctcctcccaggcggctccaagaagtgcatccaggttggyggggagttctacactcccagcaagttcgaagactccggcagtgggaagaacaaggcccgcagcagcagtggcccgaagcctctggttcgagccaagggag

SEQ ID NO: 551635 - DNA, 201 bp, Homo sapiens
ccatggcgacggacgcggcgctacgccggcttctgaggctgcaccgcacggagatcgcggtggccgtggacagcgccttcccactgctgcacgcgctggcygaccacgacgtggtccccgaggacaagtttcaggtgggctccccgcccgccccccgctgcccccaggccctgtgagccagggatagtccccggggaagtt

SEQ ID NO: 551636 - DNA, 201 bp, Homo sapiens
gccacagccatgtgcaccctcgctgctgaggctgcccccattgctgacgcccctcttccttgcagggtggaggtgaggctaggctgggccagcagggcagsgttcccgcccctctggccctccccagtgacccccagctccaccaggtaatgccctagaccacaggagaggcccctgtctgcccttgctcccctcgggtgg

SEQ ID NO: 551637 - DNA, 201 bp, Homo sapiens
gtcctgctgcctctgcctttacctgggcactcagggatgagcaccggggcctgagcccctacccacagggtacagctctttttctttaatagacagtattyttttcctgataatacgcaatggtaatagtttaaatgagtcagagaaagtgaggtcttctcaggctcttaagagcatggcgtttggtccaggctgtacccg

SEQ ID NO: 551638 - DNA, 201 bp, Homo sapiens
cgggccttccacctggcctgcctgtcccctccgctccgggagatccccaggtgagcctgcacctctgccagcgcaaccaggccaccccggttcacggccgmctccacccactgaccctgaagggaagccaccccaagcctctcccatccaagatggaaaggggttctgagtcaggtcactgggccgtggggccggggcctg

SEQ ID NO: 551639 - DNA, 201 bp, Homo sapiens
cctggaggtgctccagctgcctgcaggcaacagtccaggaggtgcagccccgggcagaggagccccggccccaggagccacccgtggagaccccggtatgrccacgccccctcctagccgggccacccctcctgtccacatggccacgccccctcctaggctgggccaccccctcctgtccgtctgtcccctggagtcctg

SEQ ID NO: 551640 - DNA, 201 bp, Homo sapiens
tggatggtgacttcttgtaacgatggccatgattctgtggctgcggcgggggcgcacctggaggttctcaccgtcactctgtcccgcagcacaccttcgayggcatcctgcagtgggccatccagagcatggcccgtccggcggcccccttcccctcctgaccccagatggccgggacatgcagctctgatgagagagtgc

SEQ ID NO: 551641 - DNA, 201 bp, Homo sapiens
gtgctgcaccccagcccagtctgcatgggcgtctcttgcctgtgccagaagaatgaggacgagtgtgccgtgtgtcgggacggcggggagctcatctgctrtgacggctgccctcgggccttccacctggcctgcctgtcccctccgctccgggagatccccaggtgagcctgcacctctgccagcgcaaccaggccaccc

SEQ ID NO: 551642 - DNA, 201 bp, Homo sapiens
gaaggaaaaggagggctgcccccaggccttccacgccctcctgtcctggctgctgacccaggactccacagccatcctggacttctggagggtgctgttcraggactacaacctggagcgctatggccggctgcagcccatcctggacagcttccccaaaggtgggtcctggtggactcagccatgctgggggcctggggc

SEQ ID NO: 551643 - DNA, 201 bp, Homo sapiens
cctcagccagccccggaaggggaggaagcccccggccgtccccaaggctttggtaccgccacccagactccccaccaagaggaaggcctcagaagaggctygagctgccgcgccagcagccctgactccaaggggcaccgccagcccaggtaccctccctgcaggggaagccagccagggtctccagtcttcccgggcttc

SEQ ID NO: 551644 - DNA, 201 bp, Homo sapiens; identical to SEQ ID NO: 395808

SEQ ID NO: 551645 - DNA, 201 bp, Homo sapiens
acatcgaggtgtctcggggccacactccctctggaggctccagggaagaatccttccttgtgtctcccagctgctggtcattatgggggtacccctgtgcyccttgttcctgggctcaggacccaccgctccagcctctgcttctgtggtctcacagctgtctcccacgtgtcctctttataaggacaccagtcattgaac

SEQ ID NO: 551646 - DNA, 201 bp, Homo sapiens
cggggcttaggtcggcgggagaggaggtaagaggtccacctggggaacccctagccggcatggacacgactcttgtctacaagcacctgccggctccgccytctgcagccccgctgccagggctggactcctcggccctgcaccccctactgtgtgtgggtcctgagggtcagcaggtgagcggggagtgggggtcagggt

SEQ ID NO: 551647 - DNA, 201 bp, Homo sapiens
ctcggggccacactccctctggaggctccagggaagaatccttccttgtgtctcccagctgctggtcattatgggggtacccctgtgctccttgttcctgrgctcaggacccaccgctccagcctctgcttctgtggtctcacagctgtctcccacgtgtcctctttataaggacaccagtcattgaacttatggtccagt

SEQ ID NO: 551648 - DNA, 201 bp, Homo sapiens
gtaatgccctagaccacaggagaggcccctgtctgcccttgctcccctcgggtgggtcctgctgcctctgcctttacctgggcactcagggatgagcaccrgggcctgagcccctacccacagggtacagctctttttctttaatagacagtatttttttcctgataatacgcaatggtaatagtttaaatgagtcagaga

SEQ ID NO: 551649 - DNA, 201 bp, Homo sapiens
tctgcccccaccctgctgccctgggtttcagggtcccagcagtcactgactcctgggtggtgccgggcaggcgcccgctgcccctctgatgctgacccttsggttccagctccccccggggcttaggtcggcgggagaggaggtaagaggtccacctggggaacccctagccggcatggacacgactcttgtctacaagca

SEQ ID NO: 551650 - DNA, 201 bp, Homo sapiens
gtcctgcagcctgcgtggcaccgtgaggctcctcacttgcgcctagacccgccgtccagccctgggtggtcccaggggagagcgcacagggctcgggttcrggttcagctacatttcccccggccccccgcgtcaccccgcgctgttgcctcccacagaacctggctcctggtgcgcgttgcggggtgtgcggagatggta

SEQ ID NO: 551651 - DNA, 201 bp, Homo sapiens
gcctagacccgccgtccagccctgggtggtcccaggggagagcgcacagggctcgggttcgggttcagctacatttcccccggccccccgcgtcaccccgygctgttgcctcccacagaacctggctcctggtgcgcgttgcggggtgtgcggagatggtacggacgtgctgcggtgtactcactgcgccgctgccttcca

SEQ ID NO: 551652 - DNA, 201 bp, Homo sapiens
cgcagccctgtgcccccacccccagtggagctgggtgtaagaattcccatctcagtgtgggggaaacacccccgcggcccctaggccctgcggcctctgtrcccccaccagggctgtgggagttgggctgacctcttctctttactgggttccaggatgacactgccagtcacgagcccgctctgcacagggatgacctgg

SEQ ID NO: 551653 - DNA, 201 bp, Homo sapiens; identical to SEQ ID NO: 395822

SEQ ID NO: 551654 - DNA, 201 bp, Homo sapiens
cattgctcggctcctgaagccgttcctccttgccgtctctttctgcccttgatcacctccccattctgctgggtgccattccccttaacaggtgggtcagyttagggaggcccccggcagggcccagccctgagaggcaggcaaagccaccagggctcgcaggtgttggggattcctggggttcatcagagagcacgccaa

SEQ ID NO: 551655 - DNA, 201 bp, Homo sapiens
cgggtgaccccaatgggtgttccctttcccagggattcagaccatgtcagcttcagtccagagagctgtggccatgtcctccggggacgtcccgggagccygaggggccgtggaggggatcctcatccagcaggtgtttgagtcaggtagacgctgtggcggggagatggggctgatggggagacccaggctccaagatgg

SEQ ID NO: 551656 - DNA, 201 bp, Homo sapiens
tcttgagccgtggaaactcaggctgtccctgctccacccaccaggagccccagtgctgctgagcacctggcaccccccacaggagcccccctagccccctygcaggagccccccccggcccctccccctgcgggagcccagtgctgctgagcgcccccagcccctccccaacaagagcccccacacggcccctcccctgag

SEQ ID NO: 551657 - DNA, 201 bp, Homo sapiens
caggccttccacgccctcctgtcctggctgctgacccaggactccacagccatcctggacttctggagggtgctgttcaaggactacaacctggagcgctrtggccggctgcagcccatcctggacagcttccccaaaggtgggtcctggtggactcagccatgctgggggcctggggcagctgctgtcacctgctcagcc

SEQ ID NO: 551658 - DNA, 201 bp, Homo sapiens
cccccactgagaggggaggccaggctgcccccagctcccccattcaggctctcaactgaaggccaagccccccaagaagccggagagcagcgcagagcagyagcgccttccactcgggaacggtgagcggggcccagtgggagcgcctcccttctccctggccaggggcaaggggtcaggggtcagagcagggcctgccct

SEQ ID NO: 551659 - DNA, 201 bp, Homo sapiens
cagaagaatgaggacgagtgtgccgtgtgtcgggacggcggggagctcatctgctgtgacggctgccctcgggccttccacctggcctgcctgtcccctchgctccgggagatccccaggtgagcctgcacctctgccagcgcaaccaggccaccccggttcacggccgcctccacccactgaccctgaagggaagccacc

SEQ ID NO: 551660 - DNA, 201 bp, Homo sapiens; identical to SEQ ID NO: 395838

SEQ ID NO: 551661 - DNA, 201 bp, Homo sapiens
agaggagccccggccccaggagccacccgtggagaccccggtatggccacgccccctcctagccgggccacccctcctgtccacatggccacgccccctcmtaggctgggccaccccctcctgtccgtctgtcccctggagtcctgtgggacaggactgccccagccatagcactatgtcccccatgcccaagcccggtcc

SEQ ID NO: 551662 - DNA, 201 bp, Homo sapiens
ggctgcggcgggggcgcacctggaggttctcaccgtcactctgtcccgcagcacaccttcgatggcatcctgcagtgggccatccagagcatggcccgtcyggcggcccccttcccctcctgaccccagatggccgggacatgcagctctgatgagagagtgctgagaaggacacctccttcctcagtcctggaagccggc

SEQ ID NO: 551663 - DNA, 201 bp, Homo sapiens
gccagtgtcccgggacccaccgcgtccgccccagccccgggtccccgcgcccaccccatggcgacggacgcggcgctacgccggcttctgaggctgcacckcacggagatcgcggtggccgtggacagcgccttcccactgctgcacgcgctggctgaccacgacgtggtccccgaggacaagtttcaggtgggctccccg

SEQ ID NO: 551664 - DNA, 201 bp, Homo sapiens
cacaccccacactcccacccacaccctacacccaccccacaccctacacccaacccaaacccacccaaacccaccactcccactctccacccacacccacmccccttcctcacaccccacacccccatcccccactcaccacccacgcccacaccccacaccccataccccggaggtggcactcctgctcccccccagggc

SEQ ID NO: 551665 - DNA, 201 bp, Homo sapiens
aaggagggctgcccccaggccttccacgccctcctgtcctggctgctgacccaggactccacagccatcctggacttctggagggtgctgttcaaggactrcaacctggagcgctatggccggctgcagcccatcctggacagcttccccaaaggtgggtcctggtggactcagccatgctgggggcctggggcagctgct

SEQ ID NO: 551666 - DNA, 201 bp, Homo sapiens
ccatcatgcccacgcagccctgtgcccccacccccagtggagctgggtgtaagaattcccatctcagtgtgggggaaacacccccgcggcccctaggcccygcggcctctgtacccccaccagggctgtgggagttgggctgacctcttctctttactgggttccaggatgacactgccagtcacgagcccgctctgcaca

SEQ ID NO: 551667 - DNA, 201 bp, Homo sapiens
gctctgatgagagagtgctgagaaggacacctccttcctcagtcctggaagccggccggctgggatcaagaaggggacagcgccacctcttgtcagtgctyggctgtaaacagctctgtgtttctggggacaccagccatcatgtgcctggaaattaaaccctgccccacttctctactctggaagtccccgggagcctct

SEQ ID NO: 551668 - DNA, 201 bp, Homo sapiens
cagcacaccttcgatggcatcctgcagtgggccatccagagcatggcccgtccggcggcccccttcccctcctgaccccagatggccgggacatgcagctstgatgagagagtgctgagaaggacacctccttcctcagtcctggaagccggccggctgggatcaagaaggggacagcgccacctcttgtcagtgctcggc

SEQ ID NO: 551669 - DNA, 201 bp, Homo sapiens
gtgccatggggcctcgggcctcagtttccccacctttgacttagagggaaggttggatggtgacttcttgtaacgatggccatgattctgtggctgcggcrggggcgcacctggaggttctcaccgtcactctgtcccgcagcacaccttcgatggcatcctgcagtgggccatccagagcatggcccgtccggcggcccc

SEQ ID NO: 551670 - DNA, 201 bp, Homo sapiens
agtgtcccgggacccaccgcgtccgccccagccccgggtccccgcgcccaccccatggcgacggacgcggcgctacgccggcttctgaggctgcaccgcayggagatcgcggtggccgtggacagcgccttcccactgctgcacgcgctggctgaccacgacgtggtccccgaggacaagtttcaggtgggctccccgccc

SEQ ID NO: 551671 - DNA, 201 bp, Homo sapiens
caagaagccggagagcagcgcagagcagcagcgccttccactcgggaacggtgagcggggcccagtgggagcgcctcccttctccctggccaggggcaagkggtcaggggtcagagcagggcctgccctctgagaccctgtcctaggggctggggacgtgctggcctggtgtgtcattccaagggcctaagctgcaccacc

SEQ ID NO: 551672 - DNA, 201 bp, Homo sapiens
agagagctgtggccatgtcctccggggacgtcccgggagcccgaggggccgtggaggggatcctcatccagcaggtgtttgagtcaggtagacgctgtggyggggagatggggctgatggggagacccaggctccaagatggaaggaggaccacgcccctttgcatcctggtggtcccacagcagaccggactgttgctca

SEQ ID NO: 551673 - DNA, 201 bp, Homo sapiens
aacttatggtccagtgtgacctcatcttaactaatcacatctacaaagaccctgatttcaagtaaggtcacactctgaggttctgggtggacgtgaacttygggggacgctgttgaacaccctggtgtagatccaggacaatccccgggccccagactcgactggggtgggggcgggctggaggaatgcaggctgtgggaa

SEQ ID NO: 551674 - DNA, 201 bp, Homo sapiens
tgcagcccagtgctgcctgcttctggcatagagtatgtgcttgggaacagtcttccccacgggtgaccccaatgggtgttccctttcccagggattcagamcatgtcagcttcagtccagagagctgtggccatgtcctccggggacgtcccgggagcccgaggggccgtggaggggatcctcatccagcaggtgtttgag

SEQ ID NO: 551675 - DNA, 201 bp, Homo sapiens
gtcccctccttggcctgccctggctggaaggaaagggctctgcagcccagtgctgcctgcttctggcatagagtatgtgcttgggaacagtcttccccacrggtgaccccaatgggtgttccctttcccagggattcagaccatgtcagcttcagtccagagagctgtggccatgtcctccggggacgtcccgggagcccg

SEQ ID NO: 551676 - DNA, 201 bp, Homo sapiens
gcttcatctgaaggaaaaggagggctgcccccaggccttccacgccctcctgtcctggctgctgacccaggactccacagccatcctggacttctggaggktgctgttcaaggactacaacctggagcgctatggccggctgcagcccatcctggacagcttccccaaaggtgggtcctggtggactcagccatgctgggg

SEQ ID NO: 551677 - DNA, 201 bp, Homo sapiens
ggtgtttgagtcaggtagacgctgtggcggggagatggggctgatggggagacccaggctccaagatggaaggaggaccacgcccctttgcatcctggtgrtcccacagcagaccggactgttgctcaggtagccagagtttctgcctgtggttctgctgactttggaggaggagggtgagcactgaagtctccctgtcgg

SEQ ID NO: 551678 - DNA, 201 bp, Homo sapiens
ggctccaagaagtgcatccaggttggcggggagttctacactcccagcaagttcgaagactccggcagtgggaagaacaaggcccgcagcagcagtggccygaagcctctggttcgagccaagggagcccagggcgctgcccccgtaagcacctgaccttccctggggagcctggctcttgatgccccccgccccaggaac

SEQ ID NO: 551679 - DNA, 201 bp, Homo sapiens
ggagacgcttcatctgaaggaaaaggagggctgcccccaggccttccacgccctcctgtcctggctgctgacccaggactccacagccatcctggacttcyggagggtgctgttcaaggactacaacctggagcgctatggccggctgcagcccatcctggacagcttccccaaaggtgggtcctggtggactcagccatg

SEQ ID NO: 551680 - DNA, 201 bp, Homo sapiens
agggtcccagcagtcactgactcctgggtggtgccgggcaggcgcccgctgcccctctgatgctgacccttgggttccagctccccccggggcttaggtcrgcgggagaggaggtaagaggtccacctggggaacccctagccggcatggacacgactcttgtctacaagcacctgccggctccgccttctgcagccccgc

SEQ ID NO: 551681 - DNA, 201 bp, Homo sapiens
aaatgtaacgccatgtcagaggaaaagttctggctggccttggcctcccccctcagcctgcccccttcctccagggtggttggacgtggccccagaccccrtcctgagcagctctcccaccccctgggagcatccttaggaccggggagcatccaggggctttcccctccagaccgggcagcccctccctcagccatgcag

SEQ ID NO: 551682 - DNA, 201 bp, Homo sapiens
aaggccagcggtccaggcccacatccccacccgggatgtacagcactccccagtcacctccatccatgtgcatgggccctcctgggccatggggttgcatycttagaaagttctgcctgtgctgctgagaccctccagggtatcggcattcttcaaccaggacagcctgtagcatagcgtccttgccccccataccctggc

SEQ ID NO: 551683 - DNA, 201 bp, Homo sapiens
ggcttttgtggaacagtggcgtggcccacagctgtcactgtccccttccttctagaagcctccctcctcacaccacccatctggagtcaggagcccagccrggcatatacgcagatgcccctccctaaccccaggcagctttcctgcaactgctcccgcagcgggtacctcgtcattaacctcctgggttctgtctctgaa

SEQ ID NO: 551684 - DNA, 201 bp, Homo sapiens
cacctctgccagcgcaaccaggccaccccggttcacggccgcctccacccactgaccctgaagggaagccaccccaagcctctcccatccaagatggaaasgggttctgagtcaggtcactgggccgtggggccggggcctggggttttcccaccctgccacctgcctcccggtctggccacacctgctgcccagcctgga

SEQ ID NO: 551685 - DNA, 201 bp, Homo sapiens
tccccccggggcttaggtcggcgggagaggaggtaagaggtccacctggggaacccctagccggcatggacacgactcttgtctacaagcacctgccggcyccgccttctgcagccccgctgccagggctggactcctcggccctgcaccccctactgtgtgtgggtcctgagggtcagcaggtgagcggggagtgggggt

SEQ ID NO: 551686 - DNA, 201 bp, Homo sapiens
gcctaaacccagctctcctggctgcgggtccaccccggggggcactatgagcattgataacggccccggaagatgtgttccttgttctgctgctgtgaggrtagtaggtctactgtgcacagacccagtgttccctctgacagccctgagggccagggggccccccgtgtgtagacgggggaggagggaggaccacagagc

SEQ ID NO: 551687 - DNA, 201 bp, Homo sapiens
ccccgcgcccaccccatggcgacggacgcggcgctacgccggcttctgaggctgcaccgcacggagatcgcggtggccgtggacagcgccttcccactgcygcacgcgctggctgaccacgacgtggtccccgaggacaagtttcaggtgggctccccgcccgccccccgctgcccccaggccctgtgagccagggatagt

SEQ ID NO: 551688 - DNA, 201 bp, Homo sapiens
accgcgtccgccccagccccgggtccccgcgcccaccccatggcgacggacgcggcgctacgccggcttctgaggctgcaccgcacggagatcgcggtggycgtggacagcgccttcccactgctgcacgcgctggctgaccacgacgtggtccccgaggacaagtttcaggtgggctccccgcccgccccccgctgcccc

SEQ ID NO: 551689 - DNA, 201 bp, Homo sapiens
ggctggccctggtggtgcttgtcgggggcgggggtggcatggaccaggcactttcctctctgggcctcagacttcccctctcagagtgggactccttgctrgttccctgagctccctcgttttccccaggaggccacacagtgtggaggctgtctgggggccgtgggcagctggccgtgggcaggaccctggggaggcagc

SEQ ID NO: 551690 - DNA, 201 bp, Homo sapiens
catgcagggctgccgggcctcgcagcgccagtgttcacccgagtggaggagctgggatgtggctgtttggggccacaaatggggaattccacagggttcartgtaatatggtctcctctctgctgggggtgcctgcctggggaccttctcccactctggtcgctcacctatagtgtgggctggccctggtggtgcttgtcg

SEQ ID NO: 551691 - DNA, 201 bp, Homo sapiens
ccctctaagatttgcttgcccctcccaactcaggcctctctacgctaagatgggcaggtagaatctgtggggaaaatgtgacttttaagggctctgtctgtttttgccaagaggataagctccttcagcctccacgggttctcctcagtgtctgatgtggcacccgggggtcccagctgaccatggggcaggggttctgcc

SEQ ID NO: 551692 - DNA, 201 bp, Homo sapiens
tccctctaagatttgcttgcccctcccaactcaggcctctctacgctaagatgggcaggtagaatctgtggggaaaatgtgacttttaagggctctgtctgtttttgccaagaggataagctccttcagcctccacgggttctcctcagtgtctgatgtggcacccgggggtcccagctgaccatggggcaggggttctgc

SEQ ID NO: 551693 - DNA, 201 bp, Homo sapiens
gtccctctaagatttgcttgcccctcccaactcaggcctctctacgctaagatgggcaggtagaatctgtggggaaaatgtgacttttaagggctctgtctgtttttgccaagaggataagctccttcagcctccacgggttctcctcagtgtctgatgtggcacccgggggtcccagctgaccatggggcaggggttctg

SEQ ID NO: 551694 - DNA, 201 bp, Homo sapiens
ggtccccgcgcccaccccatggcgacggacgcggcgctacgccggcttctgaggctgcaccgcacggagatcgcggtggccgtggacagcgccttcccacygctgcacgcgctggctgaccacgacgtggtccccgaggacaagtttcaggtgggctccccgcccgccccccgctgcccccaggccctgtgagccagggat

SEQ ID NO: 551695 - DNA, 201 bp, Homo sapiens
cgtccctctaagatttgcttgcccctcccaactcaggcctctctacgctaagatgggcaggtagaatctgtggggaaaatgtgacttttaagggctctgtctgtttttgccaagaggataagctccttcagcctccacgggttctcctcagtgtctgatgtggcacccgggggtcccagctgaccatggggcaggggttct

SEQ ID NO: 551696 - DNA, 201 bp, Homo sapiens
gcacctctgccagcgcaaccaggccaccccggttcacggccgcctccacccactgaccctgaagggaagccaccccaagcctctcccatccaagatggaarggggttctgagtcaggtcactgggccgtggggccggggcctggggttttcccaccctgccacctgcctcccggtctggccacacctgctgcccagcctgg

SEQ ID NO: 551697 - DNA, 201 bp, Homo sapiens
ccaggcagggcacaaggacggtgggggctgcaggtggaggattcagcaggcgctgaggtcgggagagacctccctgggcctggccccactgccctgtgagraagggttcatgtggttggtgtacagttccggggcccctggaacgcagcagcctgcaagaaaccgggttttcttcccaatagggatggccccggggggtgt

SEQ ID NO: 551698 - DNA, 201 bp, Homo sapiens
ctgccctgcaggagcacccgggctggtgggcgtctgggggattgttagaatgagtgaggtcattgccgtgcaggaccagcctagcctggctgtctgggggsattctggaggaagtggtacctgggagacccctgaaggcacagcaggcaccatccaggcagggcacaaggacggtgggggctgcaggtggaggattcagca

SEQ ID NO: 551699 - DNA, 201 bp, Homo sapiens
tttcttaatggggtagaagcagtgtggggggtgcctgccgtggtgggttacagatcttgaccacttggcaccaggggctctgtggggccctggcacttagsagtgacaggagccagtcctgccctgcaggagcacccgggctggtgggcgtctgggggattgttagaatgagtgaggtcattgccgtgcaggaccagccta

SEQ ID NO: 551700 - DNA, 201 bp, Homo sapiens
gcagcatcctcgcccgccattccctggccagccgctgaccccatgcaatcaccagtgccatctgaccagggcacagcagggccgctggtggcagacccacygtgccatcggggcattccatctcaagtccctgacacggtgtctcctcggtgctggacatgggctgggaacaccaagcacagccagggccctggtcttgca

SEQ ID NO: 551701 - DNA, 201 bp, Homo sapiens
gagctgtggccatgtcctccggggacgtcccgggagcccgaggggccgtggaggggatcctcatccagcaggtgtttgagtcaggtagacgctgtggcggkgagatggggctgatggggagacccaggctccaagatggaaggaggaccacgcccctttgcatcctggtggtcccacagcagaccggactgttgctcaggt

SEQ ID NO: 551702 - DNA, 201 bp, Homo sapiens
ttgggaacagtcttccccacgggtgaccccaatgggtgttccctttcccagggattcagaccatgtcagcttcagtccagagagctgtggccatgtcctcyggggacgtcccgggagcccgaggggccgtggaggggatcctcatccagcaggtgtttgagtcaggtagacgctgtggcggggagatggggctgatgggga

SEQ ID NO: 551703 - DNA, 201 bp, Homo sapiens
ggggccggggcctggggttttcccaccctgccacctgcctcccggtctggccacacctgctgcccagcctggacagctgggcccctgagggcagcaaagcagaacagaggcccagggcgaagatgccaccctgtccaagctcatcccaggctgcagcccacgcccccatgggtagccggcccccacccccaagccccaccc

SEQ ID NO: 551704 - DNA, 201 bp, Homo sapiens
cagggcccatgtcatgggggggtgggtctggtcattggtcatgccttcctatccattgtgccagctctgctgacactgccaccccccagcacacgcacacwtgggtgcacacacgaacacacacattctcatgtctctgcacttacctgtgggctgtctgcacatggcagggctgggtcccctccttggcctgccctggct

SEQ ID NO: 551705 - DNA, 201 bp, Homo sapiens
cctgagggcagagcctaggaactctgtgtccctcccggcacaatacagggcccatgtcatgggggggtgggtctggtcattggtcatgccttcctatccaytgtgccagctctgctgacactgccaccccccagcacacgcacacttgggtgcacacacgaacacacacattctcatgtctctgcacttacctgtgggctg

SEQ ID NO: 551706 - DNA, 201 bp, Homo sapiens
cccctgcccaccggcactcacccccactgagaggggaggccaggctgcccccagctcccccattcaggctctcaactgaaggccaagccccccaagaagcyggagagcagcgcagagcagcagcgccttccactcgggaacggtgagcggggcccagtgggagcgcctcccttctccctggccaggggcaaggggtcaggg

SEQ ID NO: 551707 - DNA, 201 bp, Homo sapiens
caccccttcctcacaccccacacccccatcccccactcaccacccacgcccacaccccacaccccataccccggaggtggcactcctgctcccccccaggsctggcagcccctcatcctctgctgcaggacgggcctgcgctgcagatcctgctcaggagacgtgaccccagcccctgtggagggggtgctggcccccagc

SEQ ID NO: 551708 - DNA, 201 bp, Homo sapiens
ccaccccacaccccacactcccacccacaccctacacccaccccacaccctacacccaacccaaacccacccaaacccaccactcccactctccacccacwcccacaccccttcctcacaccccacacccccatcccccactcaccacccacgcccacaccccacaccccataccccggaggtggcactcctgctcccccc

SEQ ID NO: 551709 - DNA, 201 bp, Homo sapiens
gttcccccagccccaccctcaacacccctacaccaccacctgactccaccacaagccgaggagatgggcgtggagctgtccaggtcgccagcgcctctgcytgggagctccaccctctagtcatgatggagatgggcaggccgcagggtgtgggggaccatggcagggaccctcatgccaccccactgcaggagacgcttc

SEQ ID NO: 551710 - DNA, 201 bp, Homo sapiens
ccttgcaccccaccccacacccatgccctgcacccacaccctacactccacagccacactccaccacacccccacccacaccctactccccacctcatacyctgcacctcaccacactccacagccacaccccaccccacaccccacactcccacccacaccctacacccaccccacaccctacacccaacccaaacccac

SEQ ID NO: 551711 - DNA, 201 bp, Homo sapiens
cactgcttttcctctccagggcttgtcagtgagactaatggccactgcttttcctttccagggcttgccagtgagactaatggccactgcttttcctttcyagggcttgtcaatgaggcagatcagattcaggttcgacgggcagccaatcaatgaaactgacactccagcacaggtacggagctggcttcgcgtggttcc

SEQ ID NO: 551712 - DNA, 201 bp, Homo sapiens
ctggcagggcacagtttctagagggcccgtccccagcccgggccgtccatcctcgcattgctgttgaatggtgagcacgtgaccatgccgaccacaaaggygtctgcggaaactcgaggacattcaccacgatgattttcctctctttgatgtacttcaagtgcaactcaaaactatatctgcagggatgaatctgtaact

SEQ ID NO: 551713 - DNA, 201 bp, Homo sapiens
acccaccgcctccatcgcgtcccccggtgtgcgcccacccctccccatcgcgccccccggtgtacgcccacgcctccccatcacgccccccatggtgtgtrcccactcctccccatcatgccacctggtgtgcgcccacccgtccccatcatcgcgtccctggtgtgcgcccacccctccctattgcgtcgccctctccat

SEQ ID NO: 551714 - DNA, 201 bp, Homo sapiens
tggggtactaacatctgtgaagtctgtgatgctgaaggctcttgggggccctgctcaggtctggccattctggggctgcaggtggcgtgtgccccacgccgctgtcaccctgtcctcgcgtatgagctggcctgaccctggagagacactgccctcatgtgcggtgtggttttccattttgttaggaaaggcaagaaagcg

SEQ ID NO: 551715 - DNA, 201 bp, Homo sapiens
gggtactaacatctgtgaagtctgtgatgctgaaggctcttgggggccctgctcaggtctggccattctggggctgcaggtggcgtgtgccccacgccgctgtcaccctgtcctcgcgtatgagctggcctgaccctggagagacactgccctcatgtgcggtgtggttttccattttgttaggaaaggcaagaaagcgcg

SEQ ID NO: 551716 - DNA, 201 bp, Homo sapiens
ggtactaacatctgtgaagtctgtgatgctgaaggctcttgggggccctgctcaggtctggccattctggggctgcaggtggcgtgtgccccacgccgctgtcaccctgtcctcgcgtatgagctggcctgaccctggagagacactgccctcatgtgcggtgtggttttccattttgttaggaaaggcaagaaagcgcgt

SEQ ID NO: 551717 - DNA, 201 bp, Homo sapiens; identical to SEQ ID NO: 116394

SEQ ID NO: 551718 - DNA, 201 bp, Homo sapiens
gtactaacatctgtgaagtctgtgatgctgaaggctcttgggggccctgctcaggtctggccattctggggctgcaggtggcgtgtgccccacgccgctgtcaccctgtcctcgcgtatgagctggcctgaccctggagagacactgccctcatgtgcggtgtggttttccattttgttaggaaaggcaagaaagcgcgtg

SEQ ID NO: 551719 - DNA, 201 bp, Homo sapiens
gaattttagacatttcagtttatcttctagactcagtttttctctcagttaacattttagctttgaatctgcttttgtgagttttgttaggggaagcttgytgaaccgtaagggctgtagtgagcatacagcaatgcctcttccatgcgtgctgagctgcagtgaggggacggacaagagccaaggtgtgaccaggtgatg

SEQ ID NO: 551720 - DNA, 201 bp, Homo sapiens
attttagaggtacatgagtttggatgttagtctaggacgtctcttgtgttctggtgtttgaatgtaagtcggctttccttctgccatggaccacttacctrtctgctttgaaactgaactgccactggtttggctttaagaagttcccagtatgcaatggtgtaacaaaacctgggttgaaaatgagccgttttagctcat

SEQ ID NO: 551721 - DNA, 201 bp, Homo sapiens
cgtgattctttccccttcttccccagtttcaggataatgagctgccccactggcagtgcccagctgggtggatgccttctggctgctgtttgtgacgtggkgtgtgtgtgtctgttgttcttggtaacgctgtggcggactcaccctgggccagggggtccctctctaggccacttttatgggctttgcccaccagctgct

SEQ ID NO: 551722 - DNA, 201 bp, Homo sapiens
aatgatattgattattagattatttatttttcacattttaaatttaaattttcaaatgagaaaactgctttgcagacatcattcttgctgtttggagatgragccaagtgctgggcccgtcctcactgtaagggaagcgggggtgcaaggaccactcagcggccccttcccactcattgtctggacgcttgctgttgtagc

SEQ ID NO: 551723 - DNA, 201 bp, Homo sapiens
ggctgctgtttgtgacgtggtgtgtgtgtgtctgttgttcttggtaacgctgtggcggactcaccctgggccagggggtccctctctaggccacttttatrggctttgcccaccagctgctgcctggtgtgttgggggcccggccctgcagccaggcgcccttccccagggagccctgcttgcctgagtgggacctagagg

SEQ ID NO: 551724 - DNA, 201 bp, Homo sapiens
ctaggacgtctcttgtgttctggtgtttgaatgtaagtcggctttccttctgccatggaccacttacctatctgctttgaaactgaactgccactggtttrgctttaagaagttcccagtatgcaatggtgtaacaaaacctgggttgaaaatgagccgttttagctcatcagagagaagatggtagaagagtgggttctg

SEQ ID NO: 551725 - DNA, 201 bp, Homo sapiens
agccctgcctgggggctctccctccagcccatagtgtcggtggcagggtgagggtggccgacagccctgatgggactcctttccatctgggagcatgactrcttccagccttgctgagtctgtgtaggaactggcagaagcttcctcttgcttagaggatggaagaagatcagggtgggtgttttgcgcccactgtgtcag

SEQ ID NO: 551726 - DNA, 201 bp, Homo sapiens
gtgtgccagctcaccactcaggctgccgccaagccactggcatcccgggagtgggcaggggtgtctggcccaagactggagtcggggggtgagtgccgccycaggacacgcaccttcaggctcgcagctggagcccctcactgccaaggccccttgcaggccactctagctcccttgacagagcaccatgcctccccaggg

SEQ ID NO: 551727 - DNA, 201 bp, Homo sapiens
gactgagtggctgccacctcacaggccccgcttctggtgggtcccctctgagcccatgtgggagcagctctgccctctggggctctgacgaaggggaagargtggactctggggcccggtggtgctggaaagaagagcttttaggtcaggcaggagaatggttctgacttccctggatagctgaggtggaggattgactgt

SEQ ID NO: 551728 - DNA, 201 bp, Homo sapiens
cccagcccacaagaataactttaaaataaagatggattttctcttatttttccctagactttgtttttttctttgaattaacaatgtcagaggaccctagrcttgcattgttttacacatggatgcttaacaagtggaagttaaaaataaattctgtgtaaaaataaaaccatcacgagtgactctgaattgctggagaat

SEQ ID NO: 551729 - DNA, 201 bp, Homo sapiens
gcacacgccgctgagcaagctgatgaaggcctactgcgagaggcaggtgcggcaccttgctcccccgcagagcctccccgtgtgcgcactggtcctgtgckttccaggcatccccagagcacgagcgtctcggggctggacccagatgcagctgcccgaggtgccctcttcgtggatgggcaggcgggggcttgtgctgta

SEQ ID NO: 551730 - DNA, 201 bp, Homo sapiens
ctccgtggtgcagttcaagatcaagaggcacacgccgctgagcaagctgatgaaggcctactgcgagaggcaggtgcggcaccttgctcccccgcagagcstccccgtgtgcgcactggtcctgtgcgttccaggcatccccagagcacgagcgtctcggggctggacccagatgcagctgcccgaggtgccctcttcgtg

SEQ ID NO: 551731 - DNA, 201 bp, Homo sapiens
tttgctgatgtcagggcagcgagaaggagcctggccgcctgctgtggggagtggccgtcctcagttggattcccgaaatcaccacttgaatgtcccatagrgttcctctgagtcacaaatgttttcttctgtttttggtttcttttactagtgctgtatagctgcatgacttttggatatgtgtttttactggtttcataa

SEQ ID NO: 551732 - DNA, 201 bp, Homo sapiens
cttgactttcagagtgagccggagggccctgcctcattgcttcactcacaaacgactttatcccagcagtgcaggccggcagaggggtgccccacttttcrgctcagactgagctgccccgaagttggctcccagtctcttgacatcagctttttgcctcaactcaaaatgcattttcaggcaacaagacaccccgattgt

SEQ ID NO: 551733 - DNA, 201 bp, Homo sapiens
tcattggcacacaacctgttccttgctgagaactttgtaaaggggggaagtagtggtgccagcattgtagaagttctactcggcttctggaaagatgggarggatgacccaggacaggtcagggcaccaggacagagaagattcagtgtttgaattgaccattccacacggccactgcactgagaaactttgattgaaaag

SEQ ID NO: 551734 - DNA, 201 bp, Homo sapiens
agagaacaggcgtgtgatgtacagtgcttcctgagggcagcagctcagcatggggtgaaagggtaccaggacgccccagacttgactttcagagtgagccrgagggccctgcctcattgcttcactcacaaacgactttatcccagcagtgcaggccggcagaggggtgccccacttttcggctcagactgagctgccccg

SEQ ID NO: 551735 - DNA, 201 bp, Homo sapiens
cactgccaaggccccttgcaggccactctagctcccttgacagagcaccatgcctccccagggtctccccagggtgcataccccagggaagcaagcatggrtgcagtccctgggttcaccctcaggcgagccttctacatcccactccctgtatttaggcatcgctgggacagttgtccctctcccagccagggaaggaaa

SEQ ID NO: 551736 - DNA, 201 bp, Homo sapiens
ttttatgtggaaatatttttgcaaaacatttaagattttaaatatttactattcagtatttaataaatattgaaaacatctttgcaacaagtatccatttktacctacttgaggaaacctacacaccgctgaggcagtggcagctctgggagtgttcaccagggagaagctgctgagagcagctgagcagggagggcctcg

SEQ ID NO: 551737 - DNA, 201 bp, Homo sapiens
aacatctttgcaacaagtatccatttgtacctacttgaggaaacctacacaccgctgaggcagtggcagctctgggagtgttcaccagggagaagctgctragagcagctgagcagggagggcctcgtggagtctctggggcttgactgggggtcagggggctggctgtggacaggtggaccgagaggcagagggagccct

SEQ ID NO: 551738 - DNA, 201 bp, Homo sapiens
accagtgtccacgcctcagtagcctctggctcagcccagcattgacatatctgcccatccccactcccgttttctttgtccttcctgtttgtgcctttttsatttacttcatttcagtggggtttcaggagggagcagagatgcacgttttaaccccgtctgtcctgtttcagttaaatcaaaactgctcgttgaggaaat

SEQ ID NO: 551739 - DNA, 201 bp, Homo sapiens
ttgtcaatgaggcagatcagattcaggttcgacgggcagccaatcaatgaaactgacactccagcacaggtacggagctggcttcgcgtggttccagggcracttccgatttgtgcggggtaactgccatttgggatacgcttatttgagaattgtaggtgggagctcatacagaatgccttaatgatattgattattaga

SEQ ID NO: 551740 - DNA, 201 bp, Homo sapiens
gtgtgggcatgtgtgggtgtgggcatgtgtgtgcctgtgttgggagtgttctcctgcctccttcctgtccgttctcctctgcgctcctcccctcctctctrggctgctgcacagtgagcctttccctgactgctctcacgcaggctgacttctgtgcaagcatggagcaccgagaagctgctgaaaagctgtgtacatgga

SEQ ID NO: 551741 - DNA, 201 bp, Homo sapiens
ccgcgtgaaagagattgtaggcccactggtgagtttttaatactgagctggatcataaatctgcatatcagaatgctgatacttggattaaaatatttggyttttgaattaagccgtatctggaaatgtttaatggccactgcttttcctctccagggcttgtcagtgagactaatggccactgcttttcctttccagggc

SEQ ID NO: 551742 - DNA, 201 bp, Homo sapiens
gtggctgccacctcacaggccccgcttctggtgggtcccctctgagcccatgtgggagcagctctgccctctggggctctgacgaaggggaagaggtggastctggggcccggtggtgctggaaagaagagcttttaggtcaggcaggagaatggttctgacttccctggatagctgaggtggaggattgactgtagcaaa

SEQ ID NO: 551743 - DNA, 201 bp, Homo sapiens
ctctatgttacatcccagtggaagatgactagagctgaaggctctgtaaagaggctgtctctgatactggcctggtcctggaggtgaccaccctccctttrcagatgagggtggaggctcagtgccagacactggcgggaagtgggatggaaccgtcaggaaccatggtcgcggcctctatggaagtctgcactctgcttg

SEQ ID NO: 551744 - DNA, 201 bp, Homo sapiens
ggagggccctgcctcattgcttcactcacaaacgactttatcccagcagtgcaggccggcagaggggtgccccacttttcggctcagactgagctgccccraagttggctcccagtctcttgacatcagctttttgcctcaactcaaaatgcattttcaggcaacaagacaccccgattgtgccattgttgagtagcttca

SEQ ID NO: 551745 - DNA, 201 bp, Homo sapiens
caggacgccccagacttgactttcagagtgagccggagggccctgcctcattgcttcactcacaaacgactttatcccagcagtgcaggccggcagagggrtgccccacttttcggctcagactgagctgccccgaagttggctcccagtctcttgacatcagctttttgcctcaactcaaaatgcattttcaggcaacaa

SEQ ID NO: 551746 - DNA, 201 bp, Homo sapiens
ttgttatctttgttcaggtaaaatgagttgcaagatattgtgggtacttttgtgtgctcatttgtgttttccccccctcctacaacatttttttaaccccmaaattatagcctgaatgttcgcttttagtctggccagggatctgactcctgagttggttgcctctcccctgctcactccagtcacatagagaattggtgt

SEQ ID NO: 551747 - DNA, 201 bp, Homo sapiens
cccgggcgacgcggggaggcgggcaagggtccccagggcccgggctccccgtaaacgctcctggcccgcgccccacagcgccctagggcttccgcgcccgmcggggtcgcgcgggacccgccccgtgacgcatctccaaccgcccagagccgcggcccggcctgcgcgcgcccgacgccccggggagcgcgcctcgtgaac

SEQ ID NO: 551748 - DNA, 201 bp, Homo sapiens
ccaaggggcgcgctctgaggggcctggcccctgtgagcagcactgccgtccttccagggcgcccatcgcgaccccggtattcacccacttctccgcatcgygtcccggccatcgcgtcccccagtgtgcgcccacccctctccttcgtgtctccccaatcgtgccctcagtgtgcacctactcccacccatcgcgccccgt

SEQ ID NO: 551749 - DNA, 201 bp, Homo sapiens
gaccaggtgatgtcgctagtgtcagggaacactcatgccagtgaggatcttcccactctctgatgaaaactaacaggctcccctctctctcgctgtgcctkttgtgacaaccatgacagctggagatggaggacgaggacaccatcgacgtgttccagcagcagacgggaggtgtgccggagagcagcctggcagggcaca

SEQ ID NO: 551750 - DNA, 201 bp, Homo sapiens
ggaggacgaggacaccatcgacgtgttccagcagcagacgggaggtgtgccggagagcagcctggcagggcacagtttctagagggcccgtccccagcccrggccgtccatcctcgcattgctgttgaatggtgagcacgtgaccatgccgaccacaaaggtgtctgcggaaactcgaggacattcaccacgatgattttc

SEQ ID NO: 551751 - DNA, 201 bp, Homo sapiens
gttcaagatcaagaggcacacgccgctgagcaagctgatgaaggcctactgcgagaggcaggtgcggcaccttgctcccccgcagagcctccccgtgtgcrcactggtcctgtgcgttccaggcatccccagagcacgagcgtctcggggctggacccagatgcagctgcccgaggtgccctcttcgtggatgggcaggcg

SEQ ID NO: 551752 - DNA, 201 bp, Homo sapiens
cggctccgtggtgcagttcaagatcaagaggcacacgccgctgagcaagctgatgaaggcctactgcgagaggcaggtgcggcaccttgctcccccgcagrgcctccccgtgtgcgcactggtcctgtgcgttccaggcatccccagagcacgagcgtctcggggctggacccagatgcagctgcccgaggtgccctcttc

SEQ ID NO: 551753 - DNA, 201 bp, Homo sapiens
aataaaaccatcacgagtgactctgaattgctggagaattttaagaattaggttggttttgatgactttaaaaagccaacaattacctaaagacttgcccwttcaagtcgcggttattttgagacacagttttgaggccagtctctggtgtcttctgcaggagggtgtgaagacagagaatgaccacatcaacctgaaggt

SEQ ID NO: 551754 - DNA, 201 bp, Homo sapiens
tacacatggatgcttaacaagtggaagttaaaaataaattctgtgtaaaaataaaaccatcacgagtgactctgaattgctggagaattttaagaattagrttggttttgatgactttaaaaagccaacaattacctaaagacttgcccattcaagtcgcggttattttgagacacagttttgaggccagtctctggtgtc

SEQ ID NO: 551755 - DNA, 201 bp, Homo sapiens
ttctttcccaagagaatttttaagttgacaaaactgcacctatcaattcagtcccacacttggtactttgttcacttagcggttttcattctgcagaaccrctaatggaaaaacaattctctagtgccaggcttattttgcagttcccgtcaacatccctataaatgaaacaccctttgtcacttggtcgcagaggagggg

SEQ ID NO: 551756 - DNA, 201 bp, Homo sapiens
tgcagcagactgtgggcagccggctgcaggccctgcgtggggaagaggtgcaggagcacgccgagtgaccgcaggacctgaacgccgctccagcctccacrgggaccccagcgtcttccccagcccccgggagctggagggtggctgccatggccgcagccccggccccacacaaaagcctccccggtttgccacatcggc

SEQ ID NO: 551757 - DNA, 201 bp, Homo sapiens
atgagccaccatgtccagcgcaattatttatctctttattttcctttgtttttttaatttgaactgtaccttttcttaaagacaaaaaaaagcctggataygtggcatctgggtgtaatctgttttgtgctgtaactgaaatactgcatgtttagcagtgaatatacaaacgtaccatgtccatagacacgagtcacttat

SEQ ID NO: 551758 - DNA, 201 bp, Homo sapiens
ccgtgcagcagactgtgggcagccggctgcaggccctgcgtggggaagaggtgcaggagcacgccgagtgaccgcaggacctgaacgccgctccagcctcyacggggaccccagcgtcttccccagcccccgggagctggagggtggctgccatggccgcagccccggccccacacaaaagcctccccggtttgccacatc

SEQ ID NO: 551759 - DNA, 201 bp, Homo sapiens
ataccaattgtttctttcttttttttttttttttacacggagtctctctctgttgcccaggctggagtacagtggcacgatcttggctcactgcaacctcygcctcccgggttcaagcaattttcctgcctcagcctttgagtagctgggactacaggcacccaccaccatgcctggctaatttttgtactttttagtaga

SEQ ID NO: 551760 - DNA, 201 bp, Homo sapiens
caccctgggcacactggctgagtaaggccgtgcccctcaggccccggaagtgggttggccgtggcttcgacagttctctgtggctgatggcagtgcggccrcgatgccctgctgtgccatgcttgctagtcatgttcttttcctcctagatctccatttgccaggagatgcccagcctggaggtgatcacgctcaggtacc

SEQ ID NO: 551761 - DNA, 201 bp, Homo sapiens
agacaattttattgatattaataatataaacttcagggaaattgatatatgagagaaatggaataaattcaatatggtctgttcctttttctattgtgtcktagttgaggttttgaggagtatttgcttctggccaaggctggtgttgagattcctgagcagccctccaccatctgttgtgtgtcagcctgtgccaggctg

SEQ ID NO: 551762 - DNA, 201 bp, Homo sapiens
ctgtcttctgtctttcatcccaaagctgtgacggaggaggagctgtcccgtgcactgagtgagggagaggagatcactgcggccccagagagagagggcayaggccacggcggccccaagctatgctgcacactgagctccctcagctccgctgctgagactggccgggacccgctggacagcgaggaggaggcaacgtga

SEQ ID NO: 551763 - DNA, 201 bp, Homo sapiens
atggggtggtcagtactcccactaagctgggagaaacaacaaccctgtttcaggcttttaaagtttgcttcataagttgcctgttcaccctttgaacttgrcctcttataaagacgcccttgtttatgtctgtcagtgagagaaatgaaccttctgctactcagggaccatgaggaagagttcatctttttgtgtcttaca

SEQ ID NO: 551764 - DNA, 201 bp, Homo sapiens
cctctcctgctgtcctggtctgtggaatgtgggcccgggccctgctgggctgagggcaacaggagtcacgtggaagaggtgccacacacgcgtccacaggyggggctcctctgctcagattctccgagtgtgccggtcagtcacttggacggcccacacccccgggaccagtcgctccgtggtggggcaccgctggccagg

SEQ ID NO: 551765 - DNA, 201 bp, Homo sapiens
tcatccgtgcaagctctccagaagggatgcaagctctccagaaggggtgtgatctctgagcagtggggagtggagtcaccactcgggacatagagggtggrcagttcaggcctgtgtctgcctccttgggactgtggagtgggtgccctcagtaaagcgctttgttggaatggttgaggtcgttttaaattgagtcccttc

SEQ ID NO: 551766 - DNA, 201 bp, Homo sapiens
cccctcaggccctgggcattcaccctgggcacactggctgagcagggccgctcccctcaggccctgggcattcaccctgggcacactggctgagtaaggcygtgcccctcaggccccggaagtgggttggccgtggcttcgacagttctctgtggctgatggcagtgcggccgcgatgccctgctgtgccatgcttgctag

SEQ ID NO: 551767 - DNA, 201 bp, Homo sapiens
gttcagccctccttcctcagagcctcacctgggcctcctgatggctcctgtcccctgcctgccctgctgtacgcctgcccacccttggcctgtgtgctccrataagccattgctgtgttcactgggccagtcggtggtggagccctcctaaggattcacggtggcccgccctggccgcccccacggtggccacatctgccc

SEQ ID NO: 551768 - DNA, 201 bp, Homo sapiens
accaatgtgatctgagatccagtctcaagcctgtcttccttttggcctagacctgttatcaagaagggatttccatcctttccttgctttctatccctgcrtaggggacattggggtccccttacctgatgtcctttgagggcatctaaagtaatgaatgctctgtctccactgctggcagcatctgacagcaacgatgct

SEQ ID NO: 551769 - DNA, 201 bp, Homo sapiens
ctcaacccaaatgttgtagcttctttcccaagagaatttttaagttgacaaaactgcacctatcaattcagtcccacacttggtactttgttcacttagcsgttttcattctgcagaaccactaatggaaaaacaattctctagtgccaggcttattttgcagttcccgtcaacatccctataaatgaaacaccctttgtc

SEQ ID NO: 551770 - DNA, 201 bp, Homo sapiens
tgtctttcatcccaaagctgtgacggaggaggagctgtcccgtgcactgagtgagggagaggagatcactgcggccccagagagagagggcacaggccacrgcggccccaagctatgctgcacactgagctccctcagctccgctgctgagactggccgggacccgctggacagcgaggaggaggcaacgtgaggctggag

SEQ ID NO: 551771 - DNA, 201 bp, Homo sapiens
ctccttcagtctgcggggcgtctgggctgcaaggtggtgtcagaggagaacctggcatactcgtgggcattcatcctgggcacactggctgagcagggccrctcccctcaggccctgggcattcaccctgggcacactggctgagcagggccgctcccctcaggccctgggcattcaccctgggcacactggctgagcagg

SEQ ID NO: 551772 - DNA, 201 bp, Homo sapiens
agctaaaacaattgtttacacctttgccagttatctgggcaaccttccttttttgccatgccattaaaatcctagaatcttaaggtttgtagggagtcatyggtgatttttggaatttttgtcttcagtgttttttattcaactttaacaaaattaaagtatgtatcttttctctccccaggggcagccgcctcacagatg

SEQ ID NO: 551773 - DNA, 201 bp, Homo sapiens
cgcgcagtcgtcacccgcccgggatcaggaggccgggggcgcccgccggtcgggcctgggcggccgccatgaagctgacgcggaagatggttctgacccgrgccaaggcctcggagctgcacagcgtgcgcaagctcaactgctggtgaggcggggcctggccgcggccgccccggggtggggggaggagccggggcgggg

SEQ ID NO: 551774 - DNA, 201 bp, Homo sapiens
aaggggctgccgcgtctgcgggtgctgtggctggccgagaacccgtgctgcggcaccagcccccaccgctaccgcatgaccgtgctgcgcaccctgccgcrcctacagaagctggacaaccagggtaggtggccgcagcggagtcaccggccctcccaaaacaatccctggaaggggatgtccccagccctcttttctctt

SEQ ID NO: 551775 - DNA, 201 bp, Homo sapiens
ctctcacatatgtgggagctttgcaggttgtgaggctttgtggaccaccccgggcacctcacccctgaattgacagtaccaatgtgatctgagatccagtytcaagcctgtcttccttttggcctagacctgttatcaagaagggatttccatcctttccttgctttctatccctgcgtaggggacattggggtcccctta

SEQ ID NO: 551776 - DNA, 201 bp, Homo sapiens
gtggagggaagcagcctcgccgtgccgggtgggcttagtccgcacccctctgccctcagaacgtcctgactgccatcctgctgctgctgcgggagctggaygcagaggggctggaggccgtgcagcagactgtgggcagccggctgcaggccctgcgtggggaagaggtgcaggagcacgccgagtgaccgcaggacctga

SEQ ID NO: 551777 - DNA, 201 bp, Homo sapiens
ccactgtgaacctagggtggcggtgccatcgcgcccctgccgtggggaggggccgtcccagcaccgcagtgcctgctgctgcgctccacctattggaggcrctcgtgcctcctctagccagcgccagcaccgacacagttttccaggctgtggtttcatgctgtttgttcatccttggcattctcagcacactagtgtctc

SEQ ID NO: 551778 - DNA, 201 bp, Homo sapiens
gtgcagcagactgtgggcagccggctgcaggccctgcgtggggaagaggtgcaggagcacgccgagtgaccgcaggacctgaacgccgctccagcctccayggggaccccagcgtcttccccagcccccgggagctggagggtggctgccatggccgcagccccggccccacacaaaagcctccccggtttgccacatcgg

SEQ ID NO: 551779 - DNA, 201 bp, Homo sapiens
cagcgccagcaccgacacagttttccaggctgtggtttcatgctgtttgttcatccttggcattctcagcacactagtgtctcatccttgtcaggtatacrgacaccactattttctcccagacaattttattgatattaataatataaacttcagggaaattgatatatgagagaaatggaataaattcaatatggtctg

SEQ ID NO: 551780 - DNA, 201 bp, Homo sapiens
ccggtcagtcacttggacggcccacacccccgggaccagtcgctccgtggtggggcaccgctggccaggccccagcccttgtggagggaagcagcctcgcygtgccgggtgggcttagtccgcacccctctgccctcagaacgtcctgactgccatcctgctgctgctgcgggagctggatgcagaggggctggaggccgt

SEQ ID NO: 551781 - DNA, 201 bp, Homo sapiens
agggcaggagtgggtgttaggtactggctaaccggggcggtggagatgcctgtctacaccagtcctgtccccaggactccccttctgtggtctggaggttytaggctggcctgggctcttaaagggaggattttgcaggctgtcctccctaataaaagattttcccaaggttgatctggaggtgacgtttcccaaggcatg

SEQ ID NO: 551782 - DNA, 201 bp, Homo sapiens
tttgccacatcggccgagggcaggagtgggtgttaggtactggctaaccggggcggtggagatgcctgtctacaccagtcctgtccccaggactccccttytgtggtctggaggttctaggctggcctgggctcttaaagggaggattttgcaggctgtcctccctaataaaagattttcccaaggttgatctggaggtga

SEQ ID NO: 551783 - DNA, 201 bp, Homo sapiens
cccaggagttgcctcccttctcttgcccccgtgtgccaggtgggatttgtatgagcccctcctttgcttggatgcgacccgcagacagggtttgcagaggyccccccggtgccacgagccccctgaccctcacacgcctttgtctccctctcagcagcggcgcccaggatgaacgtggcctgaagccgccttcccggggcc

SEQ ID NO: 551784 - DNA, 201 bp, Homo sapiens
cgcatgaccgtgctgcgcaccctgccgcgcctacagaagctggacaaccagggtaggtggccgcagcggagtcaccggccctcccaaaacaatccctggarggggatgtccccagccctcttttctcttctccttttctgcaaatacctggtctggcgggacatagatgtgtcctgtgaagtctcctccagaggctgttcc

SEQ ID NO: 551785 - DNA, 201 bp, Homo sapiens
ccgggccctgctgggctgagggcaacaggagtcacgtggaagaggtgccacacacgcgtccacaggcggggctcctctgctcagattctccgagtgtgcckgtcagtcacttggacggcccacacccccgggaccagtcgctccgtggtggggcaccgctggccaggccccagcccttgtggagggaagcagcctcgccgt

SEQ ID NO: 551786 - DNA, 201 bp, Homo sapiens
tgtcgtagttgaggttttgaggagtatttgcttctggccaaggctggtgttgagattcctgagcagccctccaccatctgttgtgtgtcagcctgtgccakgctggggatgggacagtgaggaaccggctgctactctgggagttgtccctggaggtggatacacgtgcatgcatttcacaagcagactgtgcctgaagcc

SEQ ID NO: 551787 - DNA, 201 bp, Homo sapiens
aaacgtaccatgtccatagacacgagtcacttatacatgggacgcatctgaccaggctgtgagctgctggtgccatgcctggcgtatggtgggctctcacrtatgtgggagctttgcaggttgtgaggctttgtggaccaccccgggcacctcacccctgaattgacagtaccaatgtgatctgagatccagtctcaagcc

SEQ ID NO: 551788 - DNA, 201 bp, Homo sapiens
ctccctctcagcagcggcgcccaggatgaacgtggcctgaagccgccttcccggggccagtttccttccctctcagccagggatgcctcgagcagccacargggcagggtgagtggcgggccgctaggggccgcggctgcctctgcccactgcacccactgcacagaaaccgtggggagggagcatggagcctcacagggc

SEQ ID NO: 551789 - DNA, 201 bp, Homo sapiens
gccgggtgggcttagtccgcacccctctgccctcagaacgtcctgactgccatcctgctgctgctgcgggagctggatgcagaggggctggaggccgtgcrgcagactgtgggcagccggctgcaggccctgcgtggggaagaggtgcaggagcacgccgagtgaccgcaggacctgaacgccgctccagcctccacgggg

SEQ ID NO: 551790 - DNA, 201 bp, Homo sapiens
ggagtggagtcaccactcgggacatagagggtggacagttcaggcctgtgtctgcctccttgggactgtggagtgggtgccctcagtaaagcgctttgttsgaatggttgaggtcgttttaaattgagtcccttccacttcccccgacatgggctgccgtggacatgcggggcttacaccagcgccctcctgccccacatc

SEQ ID NO: 551791 - DNA, 201 bp, Homo sapiens
cccagctactcggaattgcttgaacccaggaggcagagattgcagtgagccgagatcacagcactgcactccagcctggcgacagagcgagactccgtctmaacaaacaaacaaacaaacaaacataaagagacataggaggtttttatgctgaggaatgccctaatgtcacaacctcatgtccactgtgtggagttggag

SEQ ID NO: 551792 - DNA, 201 bp, Homo sapiens
cagtgagctatgatcttgccattgcactccagcctaggtgacagagtgagaccctgtctctaaaataaataaataaatacatacatacataaaggttactrtaggtttcgaagaattacctgtatttaaatgtatagtttctgggatgtgtgtgaaagatttatttggtcattcattcatacacacatggacacaaaccta

SEQ ID NO: 551793 - DNA, 201 bp, Homo sapiens
ctctctggtgcccacccctatcttttcaggacatcacatctcttatcttcagtagcagagttgataggtttccttttcaataaacctatgtgacttgtcakccttctgatagctgttatagaagggaatgtaaataagttcaaatcaatgtgtggatgacagatttttgttttgttttgtttgagacagagtctctgtcac

SEQ ID NO: 551794 - DNA, 201 bp, Homo sapiens
ggatgaggggcctccagttttggggtcaggatcggggcatgagaccctgggcagagctgagggcaaggttccagaagattcagaaacttaaaaaaaaaaamaactgaattatagcaacattcaataaagtgcatagatcttaaattatgctcagtgaatttttaaaagtatactaggccaggcatggtggctcactcctgt

SEQ ID NO: 551795 - DNA, 201 bp, Homo sapiens
ttcagtctggagagaggatgggatttgtgtctgtaaaactgtgaggagctgggatgtgttggcctcggcgggaggcagtgttggagtgaggtagctgagarcactgggtgtggcccgatcccctagatttgaaaatctgctctgccattttattagttggtgacctgccttagaggattgtctcaggagtaaatgacacac

SEQ ID NO: 551796 - DNA, 201 bp, Homo sapiens
taatggattggagaggaaggatgggtcaaggagcacactcgaggcacctctgtttgtgctcaggtgactggacctgagggcatgcgccttgggagtggcaytgggggacagggactgatctgagggcggtgaggctgcaaacttgatggcattgggccattgctgtgcacggaggggaagagagaaggcatgatctgggga

SEQ ID NO: 551797 - DNA, 201 bp, Homo sapiens
gagcaatgtaatttgataataaaagcaaattaaaacagagaaaatagcatcgattccaacaaccatctctgcattaattcctctcagtcctgccactcatmtgagtttcagttccccttgcggaagtctgacagacatcatgtggttccatcacttcaaactcacatctctgaatcacaccccatttgtcttaaaaatcag

SEQ ID NO: 551798 - DNA, 201 bp, Homo sapiens
gggtatagtgtgtgagtgtctctccattcatttataagtttatgtaacagtgactaaaaactctgttagggctgggtgcggtggctcatgcctgtaatccmaggactttgggaggctgaagtgggtggattgcttgaggttaggagtttgagatcagtttgggcaacatggtgaaacctcatctctaccaaaaatacaaaa

SEQ ID NO: 551799 - DNA, 201 bp, Homo sapiens
tattggcttgaagtggcggtgtgaatagtctgatagaggaaaatgaactgagtctggagtgaactaactgcttgggtgtcgggaccacatcctcttttctktgataagaagccacctggctcttgcttggatggtgggacccagccctggctgggtaaaatgtgtccagcaggtttctcctgtctcacggttcctctttct

SEQ ID NO: 551800 - DNA, 201 bp, Homo sapiens
tcccaagtagctgcgattacaggtgtgtgccaccacacctggctaatttttgtattttttagtagagatggagttttgccgtgttggccaggctggtctgraactcctgacctcaagtgatctgcctgccttggcctcccaaagtgctgggattacaggcatgagccactgcacccagcccagcctcctctttacagatgg

SEQ ID NO: 551801 - DNA, 201 bp, Homo sapiens
gtggattttgattcttggacatttaaacatgttcaagttctccagctctcaccacatgcctgggtcctccctaccatgattcttttcctctgagacccggktattcttcctcctaagaacctgggtttccatctcctaagaattcttggttggttttgtctttcctgtgtctaccagcgaggattctgaaggccccccagc

SEQ ID NO: 551802 - DNA, 201 bp, Homo sapiens
tgttgaaggtggagaagggaggacctcgttggaagatggccttttccattgcattacttaactatatgacatctattagtaaccaatttatcccctcagtsttccaagaggcaggcaccaaagccgagaggccgagcagctcacctgtggccatgtgggccaagcccccgcctgctgctgggtcctcccgcctccgtggct

SEQ ID NO: 551803 - DNA, 201 bp, Homo sapiens
attgaccagctccccattcccctctccatccggccctgggaaccaccatgctgttttacgtttccatgattttggctactcttgatatttcatataagtgraattataaagtatactgtccttttgtgattggcttgttttactcaatataatgtccccaggtttcatccatgttgtaacatgtgacaggatttccttttg

SEQ ID NO: 551804 - DNA, 201 bp, Homo sapiens
gtataaggatacagacttagcaaacacactggggtggtcggggctccacttaggtacctgttggctccttgttgggtagtgcaggaattgggaggttttcrgaagcaacctgccgagtatttgtttggaggctctgatttaagattttaagtcctagggattcattccaatgtttagaaagtctcttagtctgttcggaca

SEQ ID NO: 551805 - DNA, 201 bp, Homo sapiens
ggcgctctgttggtgaaattcttccccctcctactcctctaccccctcacctacctggctcccagcgtctccaccctctggctccacctgcttctgaaagycaccgagacctcaggcccaacctacatcaaactgggccagtgggccagcacccggcgcgatctgttttcggaggctttctgtgcccaattttccaagctg

SEQ ID NO: 551806 - DNA, 201 bp, Homo sapiens
gggacgttttaaaattgggacaccaatttcaaatgtaaccctccagtggtggaaggcacaccatggcttcctctgcttggtttgagggtctgttcaaaagmtttgggccaattagggagtaaaaggagggaaggggcctatccattccattgtggaagctgggccaggtgccagggacactctccttcagggaaaatgtta

SEQ ID NO: 551807 - DNA, 201 bp, Homo sapiens
ggagccagcatcacaggctggctgggattaagctgttctctccctggtctttctgaaggagagtgtgcctgtgtccagttaccagcaggcaggaattcccdtggacttgaaaaggaagattgcacggctggggatcaacatgctcctgaagatggtgagctcatggctggagcgggctcaggcccagcatgtggtcagctt

SEQ ID NO: 551808 - DNA, 201 bp, Homo sapiens
atgataaacctggaagtggtcctttgggtctggtgagtggtggttggggagagtagcagtggcagtgtcgatgcggtgggtggagagctgccgcgagatgraggggtagccctgtgtggaagcgcccacagcacgctggccctaatggaaagagagggctgggggctggcctggagaagccagaccccagggagacgggga

SEQ ID NO: 551809 - DNA, 201 bp, Homo sapiens
agaaaggctgctcctccctaaagctgacctggttggatcaaatgcaggggtgtctcgggctcaggtccctggccaccaacctgaggccaccaacctcatcyccgtggcagtgaaagtaagtgttgtgagagctcacagctcacctacccactgagctatcccagatcagaaacaaccgccatgcaaatcgcccccacgttt

SEQ ID NO: 551810 - DNA, 201 bp, Homo sapiens
tcccgagtagctgagaccacaggcgcctgccaccatgcccggctgattttttgtatttttagtagaggcagggtttcactgtgtcagccaggatggtctckatctcctgacctcatgatccgcccgcctcggtctcccaaagggctgggattacaggagtgagccaccacgcccggcctgtgtgttgtctcttaaaaaggc

SEQ ID NO: 551811 - DNA, 201 bp, Homo sapiens
gccactttttgtatttttagtagagatggggtttcaccatgttggccaggctgatcttgaacttctgacctcaggtgatccacctgcctcagcctcccaargtgctgggattacaggtgtgagccactgcacccagccagaatgtctctgtcttgaaacaggacaggtctccttagcccggtcattcttgtcaatgctcac

SEQ ID NO: 551812 - DNA, 201 bp, Homo sapiens
tccattgtgtttgccatcatggtgttggaggggcttggccgctcactggaccccaaactggacatcctggaggcagcgaggcccttcctcctcacgggccyagtgtgccccccgtgatggggcagtggcctctgtgggcccttgtcaagagctggaggccactcccaagagcctctcctatggcagctgggacgttttaaa

SEQ ID NO: 551813 - DNA, 201 bp, Homo sapiens
gtgccctcgcgatgccaggctctgctggcttctgctgggcactttgcccaaggtcgtctccctgtgcggggacgtgggtgagggggcccctgacgttctgrgtcggcgaagggtccgctgcagcggggcggctggcgcggggcccgcggagagcctcccccgagcgggacctctgggcggcgtcttcctgcatctccgcct

SEQ ID NO: 551814 - DNA, 201 bp, Homo sapiens
ccacctgcctcagcctcccaaggtgctgggattacaggtgtgagccactgcacccagccagaatgtctctgtcttgaaacaggacaggtctccttagcccrgtcattcttgtcaatgctcacacttgccagtgtgccagaaacgagtggagggaggcaggaggacaggaggcgaggctgcccttaaggggctttctgttag

SEQ ID NO: 551815 - DNA, 201 bp, Homo sapiens
caggtgccgtggctcacacctgtagtcctagcactttgggaggcggcgtcaggtggatcacttgaggtcaggagttcaagaccagcctggccaacatggcraaacactgtctctactaaaaatacaaaaattagccgggcatggtggcacacgcttgtaatcccagctactcgagaggctgaggcaggagaatcgcttgaa

SEQ ID NO: 551816 - DNA, 201 bp, Homo sapiens
accagccctggatgcccacagaggttgatgataaacctggaagtggtcctttgggtctggtgagtggtggttggggagagtagcagtggcagtgtcgatgyggtgggtggagagctgccgcgagatgaaggggtagccctgtgtggaagcgcccacagcacgctggccctaatggaaagagagggctgggggctggcctgg

SEQ ID NO: 551817 - DNA, 201 bp, Homo sapiens
acccagggattcactcaggaagtggctccatctcagctgcagtgtgaaggtctaggtgtcactacataaggacaggtggcagggagttgtctagagagaayagcctttgctgaggcctggggtgagctactgcatggtgctcttggagagacgaaagcacttagtatggcttggaagagagtttgaaggagggggcagtga

SEQ ID NO: 551818 - DNA, 201 bp, Homo sapiens
ctgtgtgaacttgagcaagttgcttaacctctctgggctttggttcttttatttgttaattagggataacaagatctatctccatgggttgttttgacaatttttttttttttgagacaaggtcttgctctgttgcccaggctgtggtacagtggcatgatctcggctcactgcagcctccacctcctgggctcaagtgat

SEQ ID NO: 551819 - DNA, 201 bp, Homo sapiens; identical to SEQ ID NO: 395978

SEQ ID NO: 551820 - DNA, 201 bp, Homo sapiens
caaagtgctgggattgcaggcatggcccactgtgctagcctaggatttttttttttttttaagaaagaattaagccttaaaaatctattgtgcaagaaccyaacttttactcaggagctgagaaggaagaagcctcaaaccacccatttcctgctttttagagatagagtctagtggaaccatggctctaactgggtcaag

SEQ ID NO: 551821 - DNA, 201 bp, Homo sapiens
cactcaggcttactttctgtctgaaactttttaccatctgcttaatgcatatgcatccctccttcctcagctcaaacatcacttcgaagggaaggcctccytggcactcccactcctaggctaacttagaccctcccagtacatacacaactgtgctaactgggctaattttaactttgttaccattggccttaggtgggt

SEQ ID NO: 551822 - DNA, 201 bp, Homo sapiens
actcccttggcgggccggatggcggaccccggcccagatcccgaatctgagtcggaatcggtgttcccgcgggaggtcgggctctttgcagactcttactyggagaagagccagttctgtttctgtgggcatgtgctgaccatcacgcagaactttgggtcccgcctcggggtggcggcgcgcgtgtgggacgcggtgagg

SEQ ID NO: 551823 - DNA, 201 bp, Homo sapiens
caagtcagaaagctggatgtcatcttgtccctcactttctcccctcacattccagcaatcacccagtcctatgagttaaatgttcttttttttttttttttcctttttgagacagagtctcactctgtcacccaagctgcaatgcagtggcatgatctcggctcaccgcaacatccgcctcctgggttcaaccgattctcc

SEQ ID NO: 551824 - DNA, 201 bp, Homo sapiens
tttgactccttgtcctcacctagacctctgcccttccacctagtggtcagagtgatcttttcaaaataaaactgtaatcatgtattcccaccccaaatctwtcagtggcctcttgttgctttcaggatagaaccaacacctatggcatggcccccaaggtcctgcctccctctttctgtgcctctttctctcttgtttttc

SEQ ID NO: 551825 - DNA, 201 bp, Homo sapiens
ttcaaccgattctcctgcctcagcctcccgagtagctgggattacagatgtctgccactatgcctcactaatttttgtgtttttagtagagacagagtttygccatgttggccaggctggtcgtgaactcctggcctcaagtgatctggccacaacttccagttgtctggggaagtattatcttttcagcatctctagttc

SEQ ID NO: 551826 - DNA, 201 bp, Homo sapiens
taaaaattcttacaatgtcatctccctaggaatgtaaattaacatgtctttgttcatagggacagaactaggtcatattaagggaagcctagccgggcgcrgtggctcacacctgtaatcccagccctttgggaggccaaggtgggtggatcacctgaggtcaggagtttgagaccagcctgaccaacatggtgaaacccc

SEQ ID NO: 551827 - DNA, 201 bp, Homo sapiens
tacccagcacttagaaggttctccaaattatatctactgcatgaatgaaggtttctgagatgctaatctgaccatcttcacccgtttctgcccttaaagcytactgccctcagtatcgaacctgaatcttcttagcatgtcataatcactttccctttgtctcatgtcttgacacttttctcccccttccacatcctctaa

SEQ ID NO: 551828 - DNA, 201 bp, Homo sapiens
taagagaaacaagcttatgagtttccaagggttaggatgtgttttgtaggaagcggggtaggaattagacactgcagacttggaaaaggaaaaggtaaggraaaatttgcttctcttttgtcaagaagcaaaaactacagaggaaacagtttcacaaattataatctaatgggcagaaaaaacctcaaactgaaagcactc

SEQ ID NO: 551829 - DNA, 201 bp, Homo sapiens
tgtacctggaacccaccttccctctgctgctggggaccctccaacacctgtgcaggccccatggcaccatctatctggcctccaagatgagaaaggagcaygggacagagagcttctttcagcacctcctgccccagcatttccaactggagctggctcagcgggatgaggatgaaaatgtcaacatctatagggccaggc

SEQ ID NO: 551830 - DNA, 201 bp, Homo sapiens
tagctggtgtaacaaattctaaaatgtgtttttcatctggagttgcacagaatcatggaattttgtgttgagtgacataataggtatggaaatatgaggggaaatagacattgcaaatgtgaagcatggtggttatttgttaagaatgagaactcctctgactctaaatatttgggcctgtgggctggggaaggctggagc

SEQ ID NO: 551831 - DNA, 201 bp, Homo sapiens
ggggggccggggaggcggctgcggctgggcgcccttcgctggttgctccacccgggacggcgacggcgacgaggaggagtactacgggtcggagccgcggscccggggcctggccggcgacaaggagccgcgggccggacccctgccgccgcccgcgccgccgctgccgcccccgggcgcgctggacgccctgtcgctcag

SEQ ID NO: 551832 - DNA, 201 bp, Homo sapiens
ccccgggccgccagcccgctcggccccgcaagcaccggagccccggcggtggcagcagtgaacggctgtcgcaggccccgaagaccccggcccggctcggmtctctagcgcgcgcccccttcccggccttgtcctctcccctccccccgccgctagcgagccccccttgcacgctgccccccgcccccggtgtccggacga

SEQ ID NO: 551833 - DNA, 201 bp, Homo sapiens
gtcctctcccctccccccgccgctagcgagccccccttgcacgctgccccccgcccccggtgtccggacgatgctcaagtctcggctccgcatgtttctgracgagctgaagctgctggtgctgacaggcggggggcggccccgggccgagccgcaaccccgggggggccggggaggcggctgcggctgggcgcccttcgc

SEQ ID NO: 551834 - DNA, 201 bp, Homo sapiens
gcccggcccgctccagacccagacccgcggggtgcggcaccctgagcccccctccccgccccctgccctggccatggccgcccaccccgccgcccccgggycgccagcccgctcggccccgcaagcaccggagccccggcggtggcagcagtgaacggctgtcgcaggccccgaagaccccggcccggctcggctctctag

SEQ ID NO: 551835 - DNA, 201 bp, Homo sapiens
ttaaagactacccatcccaaattctaggaaaagagaagacccagcccttctcccctctaatccccccatccctttccatctttcatctctttggtatgggragtttcccttgatctccaagggaagcttcttttctgttgcagccttacttagcctcttgccctgtcttgggtgaaaggcctgagttatttaaggtgggaa

SEQ ID NO: 551836 - DNA, 201 bp, Homo sapiens
acacggagtgggaatggggtgaggccgaggggctggcaggggactcctggagcgcttgtttgtgtcggagggtcaagggtccccaggaaggggtggggctytctccccggagagcgcaaaatccctctcacccattaacagggactgctgttctctcctatttccctcgccccagggtctccgtaagctaaggggacctgt

SEQ ID NO: 551837 - DNA, 201 bp, Homo sapiens
cgcaagcaccggagccccggcggtggcagcagtgaacggctgtcgcaggccccgaagaccccggcccggctcggctctctagcgcgcgcccccttcccggscttgtcctctcccctccccccgccgctagcgagccccccttgcacgctgccccccgcccccggtgtccggacgatgctcaagtctcggctccgcatgttt

SEQ ID NO: 551838 - DNA, 201 bp, Homo sapiens
ccgtctttacctcagctcctagggcctccagccccccagctccaccacggtgacttggtgaagggggaccaatgccagaagaaaggggctgtagacccctrttccccaccccatggccacagggcatctggcaataagactagtatacattgacctcccgttccctgcatgagggcggggagttccccctgctccatcccc

SEQ ID NO: 551839 - DNA, 201 bp, Homo sapiens
ctgggtagagacacctggatgacatttcagtacccgctggcagctcctcccactcatccagagacggccggtgggcaggcggggagagcagctttccttcyctggagagaaccgtctttacctcagctcctagggcctccagccccccagctccaccacggtgacttggtgaagggggaccaatgccagaagaaaggggct

SEQ ID NO: 551840 - DNA, 201 bp, Homo sapiens
aagtctcggctccgcatgtttctgaacgagctgaagctgctggtgctgacaggcggggggcggccccgggccgagccgcaaccccgggggggccggggagrcggctgcggctgggcgcccttcgctggttgctccacccgggacggcgacggcgacgaggaggagtactacgggtcggagccgcgggcccggggcctggcc

SEQ ID NO: 551841 - DNA, 201 bp, Homo sapiens
agctgaagctgctggtgctgacaggcggggggcggccccgggccgagccgcaaccccgggggggccggggaggcggctgcggctgggcgcccttcgctggytgctccacccgggacggcgacggcgacgaggaggagtactacgggtcggagccgcgggcccggggcctggccggcgacaaggagccgcgggccggacccc

SEQ ID NO: 551842 - DNA, 201 bp, Homo sapiens
aaccccgggggggccggggaggcggctgcggctgggcgcccttcgctggttgctccacccgggacggcgacggcgacgaggaggagtactacgggtcggasccgcgggcccggggcctggccggcgacaaggagccgcgggccggacccctgccgccgcccgcgccgccgctgccgcccccgggcgcgctggacgccctgt

SEQ ID NO: 551843 - DNA, 201 bp, Homo sapiens
agccccccttgcacgctgccccccgcccccggtgtccggacgatgctcaagtctcggctccgcatgtttctgaacgagctgaagctgctggtgctgacagscggggggcggccccgggccgagccgcaaccccgggggggccggggaggcggctgcggctgggcgcccttcgctggttgctccacccgggacggcgacggc

SEQ ID NO: 551844 - DNA, 201 bp, Homo sapiens
agaccatgtttccagaaaaccctttagccctgattttgaatagaacatgtcagtatgagttcatgaggttttatcttctgtcgctatccaccaaaaagatmtagaaacaatgaccaatccagtatcaatgaacactcctagcatccagattgtggtcttaaaacgccatttccccctgaaagaagccagagcttcttagag

SEQ ID NO: 551845 - DNA, 201 bp, Homo sapiens
aatgtttatgctatggacagtaggtgccaggctctgtgtcagcaactctgcatgcataatctcattctgtttcacaactatattttacatatgtggacacrggcttaaagagtcatttgctcggtcaccctaagggaagaatcaaggaaaaagggaggcaggaccccagaagtatgccaacatataacaccctaaatcaaa

SEQ ID NO: 551846 - DNA, 201 bp, Homo sapiens
ttccaggtttggggaaggaaatgaacacaatgagcatggagcaacttataccagatagccgggaagcaaggagtatgtatcatgtcaaaaggactcagctstttttggcctagcttccatagccaaatgtgggacaatttgaacatttaataaggtcaatttaataaacactaagtatgtttaaatccatgagttcataat

SEQ ID NO: 551847 - DNA, 201 bp, Homo sapiens
catgtcaaaaggactcagctctttttggcctagcttccatagccaaatgtgggacaatttgaacatttaataaggtcaatttaataaacactaagtatgtytaaatccatgagttcataatgtttgtgtgtaactaactggttaccttttcaaaggataataggaaatcaaatcatttttttgaagatgataaataaagat

SEQ ID NO: 551848 - DNA, 201 bp, Homo sapiens
gggattggtggtggcagaggtaccaggggcaaccccaaagaagccgttctcagggttgatggcccggagtcgacctgttaggagaagtgaaagaaaggaargaccaaacaaggaaaacttgagatgtaagaccaaagaaggtcctgctccacccacccctgtcctgagatggacccaagatctgatgaggaaaggctgtct

SEQ ID NO: 551849 - DNA, 201 bp, Homo sapiens
ggacaatttgaacatttaataaggtcaatttaataaacactaagtatgtttaaatccatgagttcataatgtttgtgtgtaactaactggttaccttttcraaggataataggaaatcaaatcatttttttgaagatgataaataaagataaagaattaagcagttatcctgctgtttctatataaacaataccatagggt

SEQ ID NO: 551850 - DNA, 201 bp, Homo sapiens
cacccgagcattctccccaaagcctggccacaggaagtgccctgcctcgtcacgccggaaccagttgacatggaagatacggggcagctgggcccccttgygcccttccatgctcagccagtgttccaggtagtgcccgaagttgtagccaaaaaagggccgcatggcaaatgggtcgtgcatgatgatcttccctggggg

SEQ ID NO: 551851 - DNA, 201 bp, Homo sapiens
ttgatgaagtttgaggtaaagcgggaaccctctgagggccgacctggcccccctacagcctcactgggctccacaccttacagctcagtgcctccttcacycaccttcagtgaaccaggcatggtgggggcaaccgagggcacccggccaggcctggaggagctgtactggctggctaccctgcagcagcagctgggggct

SEQ ID NO: 551852 - DNA, 201 bp, Homo sapiens
ccttctgtaagaatgttcaaaagtccttccttttcctttcattaaaaaaaaatccagcctgtatttattattgagaatttactgtgtatttgtcagtgtgmtaaaccctttttatgcactatttaatcctccaacaatctcatgagataggtactatcacaactaccctcattcaactgatgtggaaactaaagcttaggg

SEQ ID NO: 551853 - DNA, 201 bp, Homo sapiens
ttggtgttggtgggagggtggaacagcagcttgctggcagctcagactcagagggtgttagcctggggaaggaagaaagctcagagcatggatacgggagmttgagtctgtctggggtagaagctggggtggtttccgctaaagcaggatagatgatcagtgtggccccaggggcaggggaggagggctactgggacctgg

SEQ ID NO: 551854 - DNA, 201 bp, Homo sapiens
agaggggattgtcaggaagatggtggccagcaggtttcccttgtccctagacccactttttcaagtccaactttgactccaggtcttctgttggccttatktttccccacccaatcacatctcagtcccttcctccaggctttgtcccatctaaggggtgttccccaaggtcccagccctctgggggtctctgcccctggc

SEQ ID NO: 551855 - DNA, 201 bp, Homo sapiens
tctgctccctttccagttctggcatctccccagtatggaagtcccggtggtctccccaagaagtccccaagacaatctcgccaaaggcacctcctatcctsctgcagtttcccagctgcagcctaggcaggggatgcacagcccaggcgaggaagcctggcttctctgtgagcacatacgtgggtcctcggcagctccctc

SEQ ID NO: 551856 - DNA, 201 bp, Homo sapiens
acaaatacatacttcacaatggcctggaaggccaggttcagatttgtattttatttggaatcctcagggttctgcaccagaatgtgatggtgtagggggaygtagttttggccactggccctcagctgggcccactttgcctcctacccctgacaccatcttggactgcaaggggccttgtgtggaaccatgtggacctcc

SEQ ID NO: 551857 - DNA, 201 bp, Homo sapiens
agtcctagaagatggttggaggttgtggagaaagcttttccaccattaaggtgctgaggcctggaggctgtgccacaccttccccaccgcacataccaggyttccagggtttgcccagccaggaggtcacagtaacaccaggtggaagaggctggtcaatgccctcccagtacacgccaccatcactggtctcagccacat

SEQ ID NO: 551858 - DNA, 201 bp, Homo sapiens
atttggaatcctcagggttctgcaccagaatgtgatggtgtagggggacgtagttttggccactggccctcagctgggcccactttgcctcctacccctgmcaccatcttggactgcaaggggccttgtgtggaaccatgtggacctcccatcaggccatcccaagtctgtccacagtctcctgcaagcagctaccccttg

SEQ ID NO: 551859 - DNA, 201 bp, Homo sapiens
ctccgccccgctggcaggccagctccctcggccccggggctccaggctccaggtcagcccagccgccgccccaacccctgcctccaaaccgccaaacccayctctcccattggaggactgggtccactcttcggcccccgacttcgaggccccgccccccatccgccaccgccctcccagccgcacatgatgtaactttga

SEQ ID NO: 551860 - DNA, 201 bp, Homo sapiens
gggctgagtcctgaagaggccatggagctgctgcagggtcagggcccagtccctgttgatgggccccatggctactacccagggagcccagaggagacagragcccagcacgtccaggtgagtggtcagcaagctggcctgaggggaggcagggcaaggaaggaggactgcccaagagaggaaggggagctcccagagggg

SEQ ID NO: 551861 - DNA, 201 bp, Homo sapiens
agccggggcacaaaatcgagagttgggatgtgcacagggctccttgtcacctggcagaggaaatacaaacactattatttccaaggtcatgtcgacccccracacacacatacatgggcacacattcttgcagggttctttttttttttttgcctcatcagctgcctagaaccttgtgtgataaggagcagagagagggga

SEQ ID NO: 551862 - DNA, 201 bp, Homo sapiens
ttcccaggagaatttcttattagagggaagctgtctacaaaactcccttcctcacagccttgcactttgacccagtaatactgcttccagaaatctaggcyggacatgcataaaaatttatgttctacatagcaattattgataaaagtggaacactggaaacaaagatctaaatatcttgcaatatgggattgttaaata

SEQ ID NO: 551863 - DNA, 201 bp, Homo sapiens
agggagagaggacgtgctgtgtgcacacacaggagagggaggaatggtgagggtgctcacctttgtgttctgctgcagcagtggactcagagcgcatggckctgcccacaaacaccccatgacgccagttgaaggcctcgtataccaggggtacccctagatcaccaatgaacagagtcacaggcagcccttttctttgga

SEQ ID NO: 551864 - DNA, 201 bp, Homo sapiens
cagcttggtgaccacacagagctcctgggacagttccgtgtttggagtgactgatgctcatacatgtgtttgaacattgccttatagtattctctgtgtcratggaaatggagagtgtgctaataatttacctagggacttaaaatgtgttgactagaaagccactaagtaactatgggatgttctaatactctcatgtct

SEQ ID NO: 551865 - DNA, 201 bp, Homo sapiens
accctgcatgcagcctggaaacctctcatccacagctcgctggaaatcagctggggacatccagttgcccagctgcccacgggccccaccaggcgggagtkgtaccgtgtcccgctgagaaggagttacaatcaccgtcttgctctctactcgtgccacatccttggggtctgtgcgggccagccagctgggggagagggg

SEQ ID NO: 551866 - DNA, 201 bp, Homo sapiens
gacttgatgaagtttgaggtaaagcgggaaccctctgagggccgacctggcccccctacagcctcactgggctccacaccttacagctcagtgcctccttyacccaccttcagtgaaccaggcatggtgggggcaaccgagggcacccggccaggcctggaggagctgtactggctggctaccctgcagcagcagctgggg

SEQ ID NO: 551867 - DNA, 201 bp, Homo sapiens
agcccaaggggctcagcccatgccagttaagcctataggagaaacagaggcaatgagctagttgctgtcatcgagagtggacaaggcaggtggtggagagrcagaaagcttgggctgcagcctgctaaaacatgtctgcatgcagggaccatgaagagcaggttgcagttggtgtgtgggatgtgttcaggacacatgtat

SEQ ID NO: 551868 - DNA, 201 bp, Homo sapiens
cttgatgaagtttgaggtaaagcgggaaccctctgagggccgacctggcccccctacagcctcactgggctccacaccttacagctcagtgcctccttcamccaccttcagtgaaccaggcatggtgggggcaaccgagggcacccggccaggcctggaggagctgtactggctggctaccctgcagcagcagctgggggc

SEQ ID NO: 551869 - DNA, 201 bp, Homo sapiens
tctcagggttgatggcccggagtcgacctgttaggagaagtgaaagaaaggaaggaccaaacaaggaaaacttgagatgtaagaccaaagaaggtcctgcwccacccacccctgtcctgagatggacccaagatctgatgaggaaaggctgtctctcgggtggctgggctgccagaggaatggagcagggttgggtgttca

SEQ ID NO: 551870 - DNA, 201 bp, Homo sapiens
cagcaagctggcctgaggggaggcagggcaaggaaggaggactgcccaagagaggaaggggagctcccagagggggttatggactgggacaggggacagarggcaggagaaggggagaaggtcccttgaaagcaatcagatcgagaaaactacattctgcttctcccccttttcttaaaatggagagaaatgagtaggctg

SEQ ID NO: 551871 - DNA, 201 bp, Homo sapiens
ttagaaagtataataggcgtggtagctcacacctgtaatcccagtactttgagaggctgaggcgggcagctcgcttgaccacaggaatttgagatcagccygggcaatgtgacgaaaccccatctctacgaaaaatacaaaaacaaaattgagctgggcctgtagtcttggctacccaggatgctgaggtggaaggatcac

SEQ ID NO: 551872 - DNA, 201 bp, Homo sapiens
ccacggagtgcagacacttgacaaagtcaccatctcccagggcctgaagcacaggtgtccccagtcgggtcataatacgcatgcttgccaccacataggcygagtcagtgagctgcaccccgatgcgggacagcggggagcccacaggacccatgctgaatggaagcacatacatggtgcggcctgtggaggaaggcatcc

SEQ ID NO: 551873 - DNA, 201 bp, Homo sapiens
gtctcccggggctcacgtacccttgtccccagggccctgctgcctctcgaagtaccctggggcgctggctgagagcccgttagaggtccgagggaggtatytgggaaggaaaggaggatatgcggagacctggctcagcagagaggagcgaggagagagaggaagttctgagagtggcagatagagatcgcgcggtcagag

SEQ ID NO: 551874 - DNA, 201 bp, Homo sapiens
aaggttgaccactggggaatgagtgtcactggctggggttcatgggcttaattctcaggaggtcagcgtcctgttgtctgtcctctcatggccctgggagmcagagaagcaacgtctgctctgattggcctggactcaaggtggagtaaacccgagagagcaaagaccatgaaggggatgttactctcctcctctatcaag

SEQ ID NO: 551875 - DNA, 201 bp, Homo sapiens
atagacacagaaataccaggtagctattaaaatggtgttgtagtcttcaatttttttttaaggtacctattcctggtataggtttgttgtagccttctatktttataccataggaaattgtgcaaactacattgtcaagttaaaaaaataaagataatcatttcttctggtgacatgtaatagatgcaaaaacgatgtggt

SEQ ID NO: 551876 - DNA, 201 bp, Homo sapiens
gggagagaggacgtgctgtgtgcacacacaggagagggaggaatggtgagggtgctcacctttgtgttctgctgcagcagtggactcagagcgcatggcgstgcccacaaacaccccatgacgccagttgaaggcctcgtataccaggggtacccctagatcaccaatgaacagagtcacaggcagcccttttctttggac

SEQ ID NO: 551877 - DNA, 201 bp, Homo sapiens
aagggagagaggacgtgctgtgtgcacacacaggagagggaggaatggtgagggtgctcacctttgtgttctgctgcagcagtggactcagagcgcatggsgctgcccacaaacaccccatgacgccagttgaaggcctcgtataccaggggtacccctagatcaccaatgaacagagtcacaggcagcccttttctttgg

SEQ ID NO: 551878 - DNA, 201 bp, Homo sapiens
gtgcctgccactatgcccagctaatttttgtatttttagtagagatggggtttcaccatgttggccaggctggtcttgaactcctgacctcaagtgatccrcccaccttggcctcccaaaatgctgggattacaggcgtgcctggcctttaaactttcaagcatgtcagacttgctggaagggccttaaaacacagatttc

SEQ ID NO: 551879 - DNA, 201 bp, Homo sapiens
caaagctttgggccttcaagtagagtccccgcccaccagcctggcacctggcaggagggaggtgaggctgaggcagactggccaggccccacccctgccckgtccccggcagctgccctgcttctcaccaggccctcaccagcatgtgctctgccagccagccctcatcccgggccagccgagaggcgatgcgtagggcaa

SEQ ID NO: 551880 - DNA, 201 bp, Homo sapiens
gagcccagcacgtccaggtgagtggtcagcaagctggcctgaggggaggcagggcaaggaaggaggactgcccaagagaggaaggggagctcccagagggsgttatggactgggacaggggacagagggcaggagaaggggagaaggtcccttgaaagcaatcagatcgagaaaactacattctgcttctcccccttttct

SEQ ID NO: 551881 - DNA, 201 bp, Homo sapiens
agctaaaccggcagctgcggggctgcgggcgcgacgaggcgctgcggctgaagcagaggcgccgcacgctgaagaaccgcggctacgcgcaggcctgtcgmtccaagcggctgcagcagcggcgcgggctggaggccgagcgcgcccgcctggccgcccagctggacgcgctgcgggccgaggtggcccgcctggcccggg

SEQ ID NO: 551882 - DNA, 201 bp, Homo sapiens
gaccgcgcaaatatccccaaagcttttgggtcctcaagtcatgcccgaatttagatgctggtcattttctggagaggggtcccctccccttacgaacacaraaacccagcccacatgactagcacgctgagctctgcagggaccagtgccaggcactggggggtggaagtgtggtgacacagtgaatgggaggtggaggag

SEQ ID NO: 551883 - DNA, 201 bp, Homo sapiens
tgccctggttaccctgcatgcagcctggaaacctctcatccacagctcgctggaaatcagctggggacatccagttgcccagctgcccacgggccccaccrggcgggagtggtaccgtgtcccgctgagaaggagttacaatcaccgtcttgctctctactcgtgccacatccttggggtctgtgcgggccagccagctgg

SEQ ID NO: 551884 - DNA, 201 bp, Homo sapiens
agtagacctccataccgtccttccgggcttagcttttggaagccttgctcttgggacggtccccttttagacctccctttatccggtctgacaattttttwagacaatccctggctttccgccgcggtctttgcagacgttccctaatacacgcgtctttctgtcaaagcttttccggttccgctgtcccctttgacgctc

SEQ ID NO: 551885 - DNA, 201 bp, Homo sapiens
agagctttggtgttggtgggagggtggaacagcagcttgctggcagctcagactcagagggtgttagcctggggaaggaagaaagctcagagcatggatasgggagcttgagtctgtctggggtagaagctggggtggtttccgctaaagcaggatagatgatcagtgtggccccaggggcaggggaggagggctactggg

SEQ ID NO: 551886 - DNA, 201 bp, Homo sapiens
tattagagggaagctgtctacaaaactcccttcctcacagccttgcactttgacccagtaatactgcttccagaaatctaggccggacatgcataaaaatktatgttctacatagcaattattgataaaagtggaacactggaaacaaagatctaaatatcttgcaatatgggattgttaaataaattatggtccatgtag

SEQ ID NO: 551887 - DNA, 201 bp, Homo sapiens
agggtctggatgctacggcatgatggccagcccaaggggctcagcccatgccagttaagcctataggagaaacagaggcaatgagctagttgctgtcatcragagtggacaaggcaggtggtggagagacagaaagcttgggctgcagcctgctaaaacatgtctgcatgcagggaccatgaagagcaggttgcagttggt

SEQ ID NO: 551888 - DNA, 201 bp, Homo sapiens
gcacgatgattgataggtaggcgggagaatgcgcgaggtgcctgaggggaggagaaagtgcacacccaaggagggctgttagctcttgctggggaggagtwagtgggaactgccagcttcctgaatcagagacagccgaactaggcgtaacggctgagaggcggggcttaaaaaagaaacgtttggtggttcgctaccgag

SEQ ID NO: 551889 - DNA, 201 bp, Homo sapiens
ttgacctgctctgtcaggtagctccgaatgtcacgaacctcctgttcccagaagtccttggggagggagaacagctgagtggtgtctatagctctgaggcygctgagatccaaggctccttcctttggcaccagcccaatgggtgtctctcgggcactgtcctccccctctaaccgccggcagatccagtctagcacccga

SEQ ID NO: 551890 - DNA, 201 bp, Homo sapiens
agaaccttgtgtgataaggagcagagagaggggagccagggcatctccaagagctcaggttgtttagccatgaaggtgcggccagctgagctatgtgagawaagagtgggagaggaattggggtttggcagggcactaatgtttgtgccaagctactggcacttggcactgaccagggctcaagggaatggggttagatat

SEQ ID NO: 551891 - DNA, 201 bp, Homo sapiens
aagatagaagtgggaagaggtggggccatatcagactccaggggtggacaaaaggaaggtctggctcaggaagggagagaggacgtgctgtgtgcacacasaggagagggaggaatggtgagggtgctcacctttgtgttctgctgcagcagtggactcagagcgcatggcgctgcccacaaacaccccatgacgccagtt

SEQ ID NO: 551892 - DNA, 201 bp, Homo sapiens
aagcactgacctgattttgtttgtaggaaggattggggtgaatgctttggagggacaggggaagggtgacggtaacaatactgacctttagacagtggttrttatacaggggacagtgggagccaagtggcaggaggagagttggagcagaggaggcagctttcctcttttcctaatgggccaaactttatggatagtgct

SEQ ID NO: 551893 - DNA, 201 bp, Homo sapiens
gggataacctcaggagcccaggtcacacttggcaccttcaggtgtcctggaggggggttgggactaagtcagtggcacatgtatgaagcaccactgtgtgscccctgagtggacatggtgccttctctgctggaggttgctggtcagacctggggagtggggaagccacggggccaaaatccccaccctctcccatccgcc

SEQ ID NO: 551894 - DNA, 201 bp, Homo sapiens
accttgtggtgtagtgggggctgggtggggtggctccgcccaggaggcggctgcacggttctctgcatcgttaccagagcgccttctggtcctagccacgmcctgtatgaccgcgcaaatatccccaaagcttttgggtcctcaagtcatgcccgaatttagatgctggtcattttctggagaggggtcccctccccttac

SEQ ID NO: 551895 - DNA, 201 bp, Homo sapiens
gcctcttgagatgacagacctctcggcatgtctcagcactagggttgggagcactgccatactgctcttgcttttcatagatcctgaggcatcagtggggygagaggctgtgctgtcctcttcctccttcaggaattcagctgcttgtcccctgtcaggagcccctgccctctgaaaggttactcttcagcctggtgggga

SEQ ID NO: 551896 - DNA, 201 bp, Homo sapiens
gaggcaggagaatcgcttgaacccgggaggcggaggttgcagtgagccgagatcgcaccactgcactccagcctgggcaacacagtgagactctgtctctaacacacacacacacacacacacacacacacacacacacacacacaggccttttctgttcgtcccttagaatgaacatctatttcatctgtgttgcttcta

SEQ ID NO: 551897 - DNA, 201 bp, Homo sapiens
tgacttgatgaagtttgaggtaaagcgggaaccctctgagggccgacctggcccccctacagcctcactgggctccacaccttacagctcagtgcctccthcacccaccttcagtgaaccaggcatggtgggggcaaccgagggcacccggccaggcctggaggagctgtactggctggctaccctgcagcagcagctggg

SEQ ID NO: 551898 - DNA, 201 bp, Homo sapiens
gggttgggagcactgccatactgctcttgcttttcatagatcctgaggcatcagtggggcgagaggctgtgctgtcctcttcctccttcaggaattcagckgcttgtcccctgtcaggagcccctgccctctgaaaggttactcttcagcctggtggggactctgcagtgaacagagctgcaccatccctctggctttccc

SEQ ID NO: 551899 - DNA, 201 bp, Homo sapiens
aggcaggagaatcgcttgaacccgggaggcggaggttgcagtgagccgagatcgcaccactgcactccagcctgggcaacacagtgagactctgtctctaacacacacacacacacacacacacacacacacacacacacacacaggccttttctgttcgtcccttagaatgaacatctatttcatctgtgttgcttctat

SEQ ID NO: 551900 - DNA, 201 bp, Homo sapiens
ggcaggagaatcgcttgaacccgggaggcggaggttgcagtgagccgagatcgcaccactgcactccagcctgggcaacacagtgagactctgtctctaacacacacacacacacacacacacacacacacacacacacacacaggccttttctgttcgtcccttagaatgaacatctatttcatctgtgttgcttctatc

SEQ ID NO: 551901 - DNA, 201 bp, Homo sapiens
attagccaggtgtggtggcttacacctgtagctactcgggaggctgaggcaagaggatcatttgagcccaggaattcaaggctgcagtgagctgtgatcaygctactgcattacagcctgggcaacaaagcaagaccatgtttccagaaaaccctttagccctgattttgaatagaacatgtcagtatgagttcatgaggt

SEQ ID NO: 551902 - DNA, 201 bp, Homo sapiens
caggagaatcgcttgaacccgggaggcggaggttgcagtgagccgagatcgcaccactgcactccagcctgggcaacacagtgagactctgtctctaacacacacacacacacacacacacacacacacacacacacacacaggccttttctgttcgtcccttagaatgaacatctatttcatctgtgttgcttctatccc

SEQ ID NO: 551903 - DNA, 201 bp, Homo sapiens
tcttcggcccccgacttcgaggccccgccccccatccgccaccgccctcccagccgcacatgatgtaactttgaggactcttgctcccgggagagacactrggtggcaaacaagctaggaacgaggggcgaggccaggggcgggagactacaggggccagacgtctagaagttagggggttgggcattgcctttccagttc

SEQ ID NO: 551904 - DNA, 201 bp, Homo sapiens
cccgcgccccgtgccgcccggagccccagcgggcgccccgcagccgtgccagcgtcacgctgtagcagccgagcatcagcccgaaaggaagcacgaaagcrgtcagagtctccaggctcaggtgggcggcggcgtggaccggcgacgggtggcacagctggcatacgcggtccctccacaggtggcggtagacggcggccg

SEQ ID NO: 551905 - DNA, 201 bp, Homo sapiens
gatggtggggtgtaaagggacgtgcacagatctacttaccaagctgggagcaagcaggattgggggcctggagaagctgaaaggttaagcagcagtaggcraggtgcctactcctgtcctgtgcctatcacatttgcagagggtaagacaagaatggggagggacaagatgaggctcatcctgggcctctcctggggcccc

SEQ ID NO: 551906 - DNA, 201 bp, Homo sapiens
acctgcactccatggtctctccctcatccctaatcgataaacctagatctctccctccctagccctctagccactctaccctcatcatgccctttacactmaccaagcccctcctcgccccttcttgacttttcttctcaactaccaggtcagtatctaatataagctcggagtttggacggagggtctggacctcagctc

SEQ ID NO: 551907 - DNA, 201 bp, Homo sapiens
acaactccttcttggaacccagatcccctgctcccagtcagttgacctgccccactcctggcctccttcccagagctcagtggtaaacaggcataaagtcmtcaccccaggctgtcactatctctaccaccactcctctagtctggcccctccttctttgtccagccccattctagcacatctgggcaaaactggatggtg

SEQ ID NO: 551908 - DNA, 201 bp, Homo sapiens
tggagcagagggctgaagtcacacagctgcccctccctctgagggctaaaagcagcggagtgggcctaatgagctctggtcaatttgttcattttccacckagtgagcttttctatgggagcaggggttagcaggagatagggagagttcgagggacggaattcagaagctagtatggaaaggtgatttgtgtgacaaatc

SEQ ID NO: 551909 - DNA, 201 bp, Homo sapiens
gtgtctggtatgaggatctactgcactgacaagggtgtcctacagagtggagtgctgtcatatggcctgggacgggagaggcccaagcacagcaaggacaycgcccgattcacctttgacgtgtacaagcaaaaccctcgagacctctttggcagcctgaatgtcaaagccacattctacgggctctactctatgagttgt

SEQ ID NO: 551910 - DNA, 201 bp, Homo sapiens
gagcatcagcccgaaaggaagcacgaaagcggtcagagtctccaggctcaggtgggcggcggcgtggaccggcgacgggtggcacagctggcatacgcggyccctccacaggtggcggtagacggcggccgggacggcgagcaacagggcggccagccagaccgccagcagcaggcggcgggccagggccgggctgcgcag

SEQ ID NO: 551911 - DNA, 201 bp, Homo sapiens
gcagaggtgacccaaacaactcagtcccccacctgccttatccttgcctgtttccagtctcctggtccggctgagcccctggcctcctacctcctcccacytcttgcctcaggccctgccccagtcactccaccctcagggctctcaccgggctgtcaatgacagcttttccatgtaaggcatggtgctaggttccaggag

SEQ ID NO: 551912 - DNA, 201 bp, Homo sapiens
cccttggactttgcccttcttactggccaggcaggggggccagagtccaggcttgactcattcccaccttgtcctgggctgagatcccaggtttgtaacasaaaacaccactaaagccccagcacaggagagaaccacccagcccagaagttccagggaaggaactctccggtccaccatggagtacctctcagctctgaa

SEQ ID NO: 551913 - DNA, 201 bp, Homo sapiens
aggatgtcacacagtggacagaaagtccaagcgagggagggtctgacccagtgctgatggagattagtggtgggtgtctggtatgaggatctactgcactracaagggtgtcctacagagtggagtgctgtcatatggcctgggacgggagaggcccaagcacagcaaggacatcgcccgattcacctttgacgtgtacaa

SEQ ID NO: 551914 - DNA, 201 bp, Homo sapiens
ctctccctccctagccctctagccactctaccctcatcatgccctttacactcaccaagcccctcctcgccccttcttgacttttcttctcaactaccagrtcagtatctaatataagctcggagtttggacggagggtctggacctcagctccaccaccccagcgacctttccgtgtctgtgatcacaagcggaccatcc

SEQ ID NO: 551915 - DNA, 201 bp, Homo sapiens
tcctctgatcccctcgtgacagaacctttcagcataacgcctcacatcccaagtctatacccttacctgaagaatgctgttctttcctagccacctttctrgcctcccacttgccctgaaaggccaagatcaagatgtcccccaggcatcttgatcccagcctgactgctgctacatctaatcccctaccaatgcctcctg

SEQ ID NO: 551916 - DNA, 201 bp, Homo sapiens
agagcaggtaagcaggaaggccagtgtcccagacaggaccctaatgatcctgaatccatgtatcaggatccatcctctccttacacccttcctggacacastctcacctctcattttccaaagccctgccatgctgccatcccacttccccacactctgccccgggttcccttttcctaaagctgcagcttatggcttctc

SEQ ID NO: 551917 - DNA, 201 bp, Homo sapiens
agctgcagcttatggcttctccagtaggtggcagcacacacagagccactcataaactgcagcttctcagagcctgagagccagaaaccgtccccagaaaktccctccatagaaataaaaaaacaccagaagtcacatttcatccttttacatggttcccatctaccctcacaacacatgtcatcaccaaagacacacata

SEQ ID NO: 551918 - DNA, 201 bp, Homo sapiens
gagtgggcctaatgagctctggtcaatttgttcattttccacctagtgagcttttctatgggagcaggggttagcaggagatagggagagttcgagggacrgaattcagaagctagtatggaaaggtgatttgtgtgacaaatcaagttcaaattctgattctgccacttcctgcctgtcaaaccttgggaagttgttcaa

SEQ ID NO: 551919 - DNA, 201 bp, Homo sapiens
acaagacaagaaaggaaaggatgagtagggacatactaagaagcagccctctcctcttggaaaagtcaagcaaaacttggaaatgaagagatttgaggggkgcctggcagatggatagagctgggggaagggaaaagaaaggcctctgctcaagtaacagccagaacttgaggttgcttggggagggcaccaggagcactg

SEQ ID NO: 551920 - DNA, 201 bp, Homo sapiens
gtgatttgtgtgacaaatcaagttcaaattctgattctgccacttcctgcctgtcaaaccttgggaagttgttcaacctaccaaaacctcagtttcttcarctataaaaaggcaataataatacatcacctcctagggttgttgaaaggagtaagaggataatgtaggtaaagtcctcatacctggcacagagtaaggact

SEQ ID NO: 551921 - DNA, 201 bp, Homo sapiens
cccgcagccgtgccagcgtcacgctgtagcagccgagcatcagcccgaaaggaagcacgaaagcggtcagagtctccaggctcaggtgggcggcggcgtgsaccggcgacgggtggcacagctggcatacgcggtccctccacaggtggcggtagacggcggccgggacggcgagcaacagggcggccagccagaccgcca

SEQ ID NO: 551922 - DNA, 201 bp, Homo sapiens
cggttcctatagcaggggtagccaaggggctccacaacagtggcaacttgtgatgatggagcagagggctgaagtcacacagctgcccctccctctgaggsctaaaagcagcggagtgggcctaatgagctctggtcaatttgttcattttccacctagtgagcttttctatgggagcaggggttagcaggagatagggag

SEQ ID NO: 551923 - DNA, 201 bp, Homo sapiens
catggtaggagcaaagaggaaaaaggtcagcctctagctaggatcccccaaaaactgaagaacacggagagctgcaacctttaggaggtatcaaagtgccrgaaagtcaaagtgggacatcgaccaatgtctagagccaactgatggatgttgggcagctaaagagggaaggggcatgggataagacctgcccttcttgct

SEQ ID NO: 551924 - DNA, 201 bp, Homo sapiens
catactaagaagcagccctctcctcttggaaaagtcaagcaaaacttggaaatgaagagatttgaggggggcctggcagatggatagagctgggggaaggraaaagaaaggcctctgctcaagtaacagccagaacttgaggttgcttggggagggcaccaggagcactgtcttagtttgggttcttccaaagcagagctt

SEQ ID NO: 551925 - DNA, 201 bp, Homo sapiens
ccacctgccttatccttgcctgtttccagtctcctggtccggctgagcccctggcctcctacctcctcccacctcttgcctcaggccctgccccagtcackccaccctcagggctctcaccgggctgtcaatgacagcttttccatgtaaggcatggtgctaggttccaggaggaacaggggatgcatggaggcataatgg

SEQ ID NO: 551926 - DNA, 201 bp, Homo sapiens
ccatttttcctacactgagtctacccaatgtgccccgggttgtttgtttttcctggctggccccagagcaagaagagatgactgctggtaaagagccaggscctggtttactaccaggcctcttttcagataacattcaagcaattcttccactccccagaggaagggggagatgataatgatatgacactattgctaggg

SEQ ID NO: 551927 - DNA, 201 bp, Homo sapiens
gctaaaatattaggctgctgtagcccagttgataagaagcccagagtgaatggcagacaccaagtgcagctgatacatgagattccagacctagatttcaytgcagcacgagagcctcaaactaagctttgcttttttttttcactctctggctcttggaaggaaagaacaactcatgctgctttggggaattccacaagg

SEQ ID NO: 551928 - DNA, 201 bp, Homo sapiens
tgagagaggaaggagaattgcttgaaaccaggaggtggagttgcagtaagccgagatcatgccactgcactcccacctggggacaaagtgagactgtctcaaaaaaaaaaaaaaaaaaaagaaaagaaagaaagaaaaaatgagctggcagagcaggggaaggcacgacatgtttatttggacacattaatgatctgccac

SEQ ID NO: 551929 - DNA, 201 bp, Homo sapiens
ggctcacacttgcaatcccagcactatgggtggctgaagtggaaggaccgctcgaggccaggagttcgagaccagcctgggcaacacagtaagccctgtckcttaaaataaaaaataaaaaataaattaaaaataaagaacttaagtcataccaggcagaagaaaactcatgacaattaaagctgcattctttgttctttt

SEQ ID NO: 551930 - DNA, 201 bp, Homo sapiens
taaatatgaatactagaaacatagagaataaagaccaaaatgtaagtcactgttgtcagcctctgaaatccaatttaaaaatctgatatttaatgatccayagaaaactaaaactaaccaacagaatgtatatttacgccctggttctactctactcaatatatactggaccaggggacacaaatgacattatgcttctgt

SEQ ID NO: 551931 - DNA, 201 bp, Homo sapiens
tttgcaacagctgtcaaaagatgacatttcaagctgggagggaaagtgaaggcgttgtgaaggcaaagtttccacacagaatgagtccaaattagaaaagwgagtggtattcacctccagcatagtcccagactcgatggttggtaagctgcatggcatacgtgtgctgcgtttcctcaaagtgcttataagcatgtcgac

SEQ ID NO: 551932 - DNA, 201 bp, Homo sapiens
cttctactggctcgggcgtttgacagtaccggcaaacaggacacctatccaggacaccaaaagataatggtgcaggttaaatataaaagacagctgttacrgaacccaaaagtcaaacactggattttatatcctcctcctcttatatgctatttttatcataactaaggatatcacttaaaataaaatatacaaaataaa

SEQ ID NO: 551933 - DNA, 201 bp, Homo sapiens
tagagcctgttacaacagaatagaccgattatacctactttctttccacagactgcttttcttttaggagatcatttagtttgtgctctagattatcacayttctcaattgtttctttaaacttggtcttcatgttgttaatctgaaagagcaaagagaaatcagattcatttcacaaaggtaatgtggtgtgctctttgg

SEQ ID NO: 551934 - DNA, 201 bp, Homo sapiens
atttagaaaggctctgcgccatttcattgccttagaagttcatgtttagctcccaaaggcagcggttcccaagtgcctaactcaaatgacaaaccctcagktagatacttctatgtttttagtggaacttcacaaggcactagaaaaccagactgaggtttaaaaaaaaaaaaaaaaagcaaacaaaaccccctaagaccc

SEQ ID NO: 551935 - DNA, 201 bp, Homo sapiens
tttcaaaacatcgtttaattgtcttggtcattgacatttccaacataagattttatatttcgctcccatagcttctggttatcaaaaaacccatgctttcytttattgaaggagtttggtccagctgatgttggtgtatcccttccaatattcttcatcttcatctttgcttctggagatttcctctggttcactatcttc

SEQ ID NO: 551936 - DNA, 201 bp, Homo sapiens; identical to SEQ ID NO: 252737

SEQ ID NO: 551937 - DNA, 201 bp, Homo sapiens
tagctgggtgtagtagcgtgcacctgtagtcccagctacttgggaggctgagagaggaaggagaattgcttgaaaccaggaggtggagttgcagtaagccragatcatgccactgcactcccacctggggacaaagtgagactgtctcaaaaaaaaaaaaaaaaaaaagaaaagaaagaaagaaaaaatgagctggcagag

SEQ ID NO: 551938 - DNA, 201 bp, Homo sapiens
gtggagctgccaccatttttcctacactgagtctacccaatgtgccccgggttgtttgtttttcctggctggccccagagcaagaagagatgactgctggyaaagagccagggcctggtttactaccaggcctcttttcagataacattcaagcaattcttccactccccagaggaagggggagatgataatgatatgaca

SEQ ID NO: 551939 - DNA, 201 bp, Homo sapiens
ctgagtctacccaatgtgccccgggttgtttgtttttcctggctggccccagagcaagaagagatgactgctggtaaagagccagggcctggtttactacyaggcctcttttcagataacattcaagcaattcttccactccccagaggaagggggagatgataatgatatgacactattgctagggagttttcataactc

SEQ ID NO: 551940 - DNA, 201 bp, Homo sapiens
agtccctttgaggcaaagctgcaaaggcacatgtgcgtctatgaaatggacacaggtaaacagaaccttctagtctagccttagtagcaagcaatggagaygattccagtttttaaactcagccaattttttaaggcaagcggggaggccaaggcttgtctggattttattcccatacgggcattaatccaaacacagaaa

SEQ ID NO: 551941 - DNA, 201 bp, Homo sapiens
actgagtctacccaatgtgccccgggttgtttgtttttcctggctggccccagagcaagaagagatgactgctggtaaagagccagggcctggtttactaycaggcctcttttcagataacattcaagcaattcttccactccccagaggaagggggagatgataatgatatgacactattgctagggagttttcataact

SEQ ID NO: 551942 - DNA, 201 bp, Homo sapiens
cctacactgagtctacccaatgtgccccgggttgtttgtttttcctggctggccccagagcaagaagagatgactgctggtaaagagccagggcctggttkactaccaggcctcttttcagataacattcaagcaattcttccactccccagaggaagggggagatgataatgatatgacactattgctagggagttttca

SEQ ID NO: 551943 - DNA, 201 bp, Homo sapiens
ttcctacactgagtctacccaatgtgccccgggttgtttgtttttcctggctggccccagagcaagaagagatgactgctggtaaagagccagggcctggwttactaccaggcctcttttcagataacattcaagcaattcttccactccccagaggaagggggagatgataatgatatgacactattgctagggagtttt

SEQ ID NO: 551944 - DNA, 201 bp, Homo sapiens
tttcctacactgagtctacccaatgtgccccgggttgtttgtttttcctggctggccccagagcaagaagagatgactgctggtaaagagccagggcctgrtttactaccaggcctcttttcagataacattcaagcaattcttccactccccagaggaagggggagatgataatgatatgacactattgctagggagttt

SEQ ID NO: 551945 - DNA, 201 bp, Homo sapiens
caccatttttcctacactgagtctacccaatgtgccccgggttgtttgtttttcctggctggccccagagcaagaagagatgactgctggtaaagagccasggcctggtttactaccaggcctcttttcagataacattcaagcaattcttccactccccagaggaagggggagatgataatgatatgacactattgctag

SEQ ID NO: 551946 - DNA, 201 bp, Homo sapiens
ctggggacccagtccctgcctttacgaagcccatagggaagcaagtgagacaaacacaccactcgactatctcgagagggagacgcgccaggtataaactraatgccctcagacggcacagggagggaggttcggggcagggcttccctgagataacaaacgggaaggcctctcaaaggcggatgggaaagagagggatcc

SEQ ID NO: 551947 - DNA, 201 bp, Homo sapiens
ggtattcacctccagcatagtcccagactcgatggttggtaagctgcatggcatacgtgtgctgcgtttcctcaaagtgcttataagcatgtcgactgacrtaccgtccacatcctatgtggccgcatattaaacaaatccaaagattctgccggaagaggtaagatcttaattagttaaataaaaataaatgatctggct

SEQ ID NO: 551948 - DNA, 201 bp, Homo sapiens
atattttaataacacctcacagcaatgaccaaacattttttttttttttgagacagagtttcgctcttgttgcccaagctggagtgcaatgacccgatctyggctcactgcaacctctgcttcccaggttcaagcgattctctgcttcccgggttcaagcgattctcctgcctcagcctcccgaggagctgggattacagg

SEQ ID NO: 551949 - DNA, 201 bp, Homo sapiens
tttttttgagacagagtttcgctcttgttgcccaagctggagtgcaatgacccgatctcggctcactgcaacctctgcttcccaggttcaagcgattctcygcttcccgggttcaagcgattctcctgcctcagcctcccgaggagctgggattacaggtgtgtgccaccatgcccagctaattttttgcatttttagtag

SEQ ID NO: 551950 - DNA, 201 bp, Homo sapiens
ggggtttcaccatcttggccaggctggtctggaactcctgaccttgtgatccacccaccttggcctcccaaagtgctgggattacaggtgtgagccaccgygtccagcccacaaatgtacttttaagacacttttttttaagcatcagaaagttttcagtagcagaaactattctgtgactgacggtaaaaattctactgc

SEQ ID NO: 551951 - DNA, 201 bp, Homo sapiens
ttttcctacactgagtctacccaatgtgccccgggttgtttgtttttcctggctggccccagagcaagaagagatgactgctggtaaagagccagggcctkgtttactaccaggcctcttttcagataacattcaagcaattcttccactccccagaggaagggggagatgataatgatatgacactattgctagggagtt

SEQ ID NO: 551952 - DNA, 201 bp, Homo sapiens
aaaaacactcacacacaaaaaccacgaacaaaaaaaccccactatttgagatactatttttatgcatcagaacacccaagagctgagacatgagaaaagasgcacttacacactagcactggagcatgaactggtataaactctttcgaagacaacttggcaatatctataaaaacaaaaaatttgggccaggcacggtgg

SEQ ID NO: 551953 - DNA, 201 bp, Homo sapiens
cactccagcctggcgacagagcaagactctgtctaaaaataaagatgggctgggcacggtggctcacgcctgtaatccaagcactttgggaggccaaagcrggtggatcatgaggtcaggagatcgagaccatctggctaacacggtgaaaccccatctctactaaaaatacaaaaaaattagctgggcatggtggcaggc

SEQ ID NO: 551954 - DNA, 201 bp, Homo sapiens
cgtgttagccaggatggtctcaatctcttgacctcatgatccgcccgccttggtctcccaaagtgttgggaattacaggcgtgatccactgtgcccggccraccccccgatctgaataaaattttttttttaaatcagccaggcacagtggcaccctcctgtggtcccagctactagggagactgaggtgggaggatcgct

SEQ ID NO: 551955 - DNA, 201 bp, Homo sapiens
gattgtagtgaggattaaatgagacaaagtgtattgaacacttagcacagtgagtgatacagaagccatcgataaacgttggatattatcatcattatccwtattacatgtgctaccagactgaaatggcttaaggcacgattttcccatggtttgcaaagctccttggcacccttggaaggctttctgatggacagtgaa

SEQ ID NO: 551956 - DNA, 201 bp, Homo sapiens
tacactgagtctacccaatgtgccccgggttgtttgtttttcctggctggccccagagcaagaagagatgactgctggtaaagagccagggcctggtttastaccaggcctcttttcagataacattcaagcaattcttccactccccagaggaagggggagatgataatgatatgacactattgctagggagttttcata

SEQ ID NO: 551957 - DNA, 201 bp, Homo sapiens
ctacactgagtctacccaatgtgccccgggttgtttgtttttcctggctggccccagagcaagaagagatgactgctggtaaagagccagggcctggtttwctaccaggcctcttttcagataacattcaagcaattcttccactccccagaggaagggggagatgataatgatatgacactattgctagggagttttcat

SEQ ID NO: 551958 - DNA, 201 bp, Homo sapiens
cggccttccaaagtactgggattacaggcatgaggcactgcgccagtccacaagtgtattatttatttatttattttttgagatggagtctcactctgttrcccaggctggaatgcagtggcgtgatcttggctcactgcaacctctgccgcttgggttcaagcgattctcctgcctcagcctcctaagtagctgggatta

SEQ ID NO: 551959 - DNA, 201 bp, Homo sapiens
acagagcgagactccgtttcaagaaaaaaaagatgtagtgagctaaggttgtgccactgtactccagcctgggtgacagggaaagaccctgtctccaaaamaacaacaacaacaacaaaaaaaacccgtccggtttttactttgtattctttaacacagttgttcaatttgttagggtgctgaaagtatagggtaattttt

SEQ ID NO: 551960 - DNA, 201 bp, Homo sapiens
agtggtattcacctccagcatagtcccagactcgatggttggtaagctgcatggcatacgtgtgctgcgtttcctcaaagtgcttataagcatgtcgactracataccgtccacatcctatgtggccgcatattaaacaaatccaaagattctgccggaagaggtaagatcttaattagttaaataaaaataaatgatctg

SEQ ID NO: 551961 - DNA, 201 bp, Homo sapiens
aaattttttttttttggtgtttatactttttaaaaaaataaaaatagtcaaatgcttaatatgtacatttaattttttggtggtggtttgtattttaaaaraaacagcttccttatgatttggctcaagttctggtggaaatgcttacagcaactagctaataaacaaaaaacaagagaagcacattcgaaatactgattt

SEQ ID NO: 551962 - DNA, 201 bp, Homo sapiens
gtggctgagaatttaagtcatacagcccagggatcagctagacctttctttttaatcattttccatacagcctgcctagcaagtctctaatagcactagctttaataataataataataataataataataataggccgggcatgatggctcacgcctgtaatcccggcattttgggaggccgagacgggtggatcacgag

SEQ ID NO: 551963 - DNA, 201 bp, Homo sapiens
cactgagtctacccaatgtgccccgggttgtttgtttttcctggctggccccagagcaagaagagatgactgctggtaaagagccagggcctggtttactrccaggcctcttttcagataacattcaagcaattcttccactccccagaggaagggggagatgataatgatatgacactattgctagggagttttcataac

SEQ ID NO: 551964 - DNA, 201 bp, Homo sapiens
tagctggaactacaggtgcatgccaccacacctggataattttttttaaaatttatttttagtggagacaaggccttgttatgttgccgaggctggtttcraaatcctgaactcaagcgatcaagccttgccctcctgaagtggtgggattacaggcataagccaccatgcctggccaataaatattcctttctttttgga

SEQ ID NO: 551965 - DNA, 201 bp, Homo sapiens
acactgagtctacccaatgtgccccgggttgtttgtttttcctggctggccccagagcaagaagagatgactgctggtaaagagccagggcctggtttacwaccaggcctcttttcagataacattcaagcaattcttccactccccagaggaagggggagatgataatgatatgacactattgctagggagttttcataa

SEQ ID NO: 551966 - DNA, 201 bp, Homo sapiens
atttttcctacactgagtctacccaatgtgccccgggttgtttgtttttcctggctggccccagagcaagaagagatgactgctggtaaagagccagggcmtggtttactaccaggcctcttttcagataacattcaagcaattcttccactccccagaggaagggggagatgataatgatatgacactattgctagggag

SEQ ID NO: 551967 - DNA, 201 bp, Homo sapiens
aatgaagctatcaagtccattaaaaaaacaaaatttcaaaaacttgtaggggtagtcttaaacatcctggcttatgctcatgccatgaaccaagccatgawcatctgtgattactgtcttaaatcaatgaaacacatgaaaagggaaacggaatttggagacttaactgaaatatccctaatacatgctctgtcagggcag

SEQ ID NO: 551968 - DNA, 201 bp, Homo sapiens
catttttcctacactgagtctacccaatgtgccccgggttgtttgtttttcctggctggccccagagcaagaagagatgactgctggtaaagagccagggmctggtttactaccaggcctcttttcagataacattcaagcaattcttccactccccagaggaagggggagatgataatgatatgacactattgctaggga

SEQ ID NO: 551969 - DNA, 201 bp, Homo sapiens
cataagccaccatgcctggccaataaatattcctttctttttggagacggagtttcgctcttgtcgcccaggctggagtgcaatggcgccatctgggctcrctgcaacctccgcctcccaggttcaagcgattctcctgcctcagcctcccaagtatctgggattacaggcgcccaccaccacacccaactaatttttgta

SEQ ID NO: 551970 - DNA, 201 bp, Homo sapiens
tacataacgttgtgaggatgccattcacagactcgtccatgcgctccagacacaccgtgcacttggggagttcagtcaggtccatcactgggaggctggcrccctacaggaaacacctcacataagcctcactcttcatctaccagcaatactttatttttccttcttttttctgagacagggtctcgctctctgtcaccc

SEQ ID NO: 551971 - DNA, 201 bp, Homo sapiens
ttttgtatttttagtagaagtggggtttcaccatgttggccaggctggtctcaaactcctgacctcaggtgatccacccacctcagcctcccaaagtgctrggattacaggcatgagccactgtgcccggccagtatttcttgtatgaatagaatgcatgtacatacttaatgtggaggatttactaattctaaatactta

SEQ ID NO: 551972 - DNA, 201 bp, Homo sapiens
tgtttctaaaacaacattttttgaaatttatataaaacatgactcgtggccgggtacggtggctcatgcctataatcccagcactttgggaggctgaggcrggcggaccacgaggtcaggagatcgagaccaccctggttaacacagtgaaaccttgtctctactaaaaatacaaaaaattagctgggcatggtggcacac

SEQ ID NO: 551973 - DNA, 201 bp, Homo sapiens
ttcacagataccttagcattcaattttacaccaatctgatatattttaattaaatataggaacaattcacacttacatcttcagatttgagcacttcagcyctttccacatacactagctggcaaacgtcatcttctattgagttgaactggcggccattgcatgtcatataaaaactatccgcatcagcctatgtacacc

SEQ ID NO: 551974 - DNA, 201 bp, Homo sapiens
  misc_feature (1)...(201): n = A,T,C or G
tttgggaggctgaggcaggcggaccacgaggtcaggagatcgagaccaccctggttaacacagtgaaaccttgtctctactaaaaatacaaaaaattagcygggcatggtggcacacacctgtagtcccagctactcggaaggctgaggcaggagaatcgcttgaacccgggaggcagaggttgcannnnnnnnnnnnnnn

SEQ ID NO: 551975 - DNA, 201 bp, Homo sapiens
actgtgctaggaggaggggggctagtgctctggcttttatgcatatgcagctccctaaagtcaaagacctttgcatttccctccagcagaatcagaaagtytggtaaatgggaaccacaccccacagactgcaacacggggaccctctgcctgtgccagccacagttccctggtgagctctattgagaaggacctgcaaga

SEQ ID NO: 551976 - DNA, 201 bp, Homo sapiens
atcccagagatgggagctggtagtcaagaatcagagtggctccccttggcctctctccagggcctcagatccgcttcatgagcctgcgctgcaccttcccktctgcttcccctgctgcccctcctgcatgtggaacttcagggtgtgctggcccacaccccacaggacctttcagctccagtccccaccatcagtggatga

SEQ ID NO: 551977 - DNA, 201 bp, Homo sapiens
ccgccctgcccctcccacctcaaccaggctgcttatctgggtcctggggcaggggtggaggcactggcccagcctcccaggtgccgaggctctgttccggtttttttttttttttttgccatggaactgggcaagcaacaggagggaagctgggtaagtgtatgagaacacctctccagccttctctccacttcctgcggt

SEQ ID NO: 551978 - DNA, 201 bp, Homo sapiens
caagcaacaggagggaagctgggtaagtgtatgagaacacctctccagccttctctccacttcctgcggtttgggttcatggccaaactgtaagtgatgasagacacttgaggaggtctagggaccctagagagccatggaagcctcacaaaccaggcttcaggcctataggtaggcctgcgggagaaggcaacaaagacc

SEQ ID NO: 551979 - DNA, 201 bp, Homo sapiens
gagaagggatgtgacccaaacaaggtcccatgcgaagtcagaaactagatttcttattgggcttttcttcccagaccacgttcatatctggcctcttgctktattctctttggctcaggagggaaaggaggggcagggcaagacaaagatgccgtgtcttggtcataggtgggaaaactgaggcacagagtgacttcgcag

SEQ ID NO: 551980 - DNA, 201 bp, Homo sapiens
cctagccacacagctgggaagagcaatcctgctaggagctcagaagaggggaaagggctgcagagtttggtgccagagatgctcaggtctggagtgcccayttcccccctaacctggtccctgatcacctgctggcccctctaagaaaccttccctgaccaccctgggtcttgggtgttttgaggaggcaggaggaccaga

SEQ ID NO: 551981 - DNA, 201 bp, Homo sapiens
acctgttctactccagaaaagattgctgttggcttaatactagcagaattctacctgggactcattgaccccaaaacagacccaccaggactattcaagtgtgtgtgtgtgtgtgtgtgtgtgtgtgtgtgtgtgtgtgtgtgtgtgtgtttgtgtgctggggtagtgggttgtaaggatgtggcaggccaccttgcagac

SEQ ID NO: 551982 - DNA, 201 bp, Homo sapiens
ctccagaaaagattgctgttggcttaatactagcagaattctacctgggactcattgaccccaaaacagacccaccaggactattcaagtgtgtgtgtgtgtgtgtgtgtgtgtgtgtgtgtgtgtgtgtgtgtgtgtgtttgtgtgctggggtagtgggttgtaaggatgtggcaggccaccttgcagacatccggggtc

SEQ ID NO: 551983 - DNA, 201 bp, Homo sapiens
ttgtaccccactgccctggaggatgccactcagtgtctggaactctggcccacttgtgtcaccacagggagcctcaccctctagggtaccctgaggggcaraaggaagcattaggttgaactccctgtaagctgtggtggggatcatgtccttgggcctcgcccaaccctcactccatgccctgcccgctgatgactcagt

SEQ ID NO: 551984 - DNA, 201 bp, Homo sapiens
cagctactcgggaggctgagcacgagaattgcttgaacccaagagacagaggttgcagtgagccgagactgcgccactgcactccagcctggacaacagcrtgagactctgtctcaaaaaaataaattaaaaggccgggcatggtgtctcatgcctgtaatcccagcacttttgagaggccgaagcgggcagatcacgagg

SEQ ID NO: 551985 - DNA, 201 bp, Homo sapiens
cttcagtgaagaagagtctccagggtccctctagtgcaggtcaaagaagtccagtccagctgagttcagctccctagggcctccccagccagtctcctggrccaagagctggctttgcaaggtaaggatccactgtcagcgttggatttcggagtggaggttgagatggagaatgacttcaacctagctcaatttgggggc

SEQ ID NO: 551986 - DNA, 201 bp, Homo sapiens
ctgtggtgccgccgcccttccttcagcctccgaagggtgatggaaatggagagtggaggaccaggcctccagctgtctggcctcgcccttcacgccttaayactaagcccacctcccctgctctccttcccagcattgagcccttggttgcctgggcccaggctgggggttttcagtatttgtaagcatttcagcagaaca

SEQ ID NO: 551987 - DNA, 201 bp, Homo sapiens
gcttagagccagaagggatgaagccgggggatctatggaacagaggaggagcgatgcagttgggagaggaagctagaagggttatggttggagttctgtayagtgttgagtttccgacagggaaagaggattcctccaatgctcctagagagaaagcctgagcaggagatgatgcagcagaggggaagggccctgtggtgc

SEQ ID NO: 551988 - DNA, 201 bp, Homo sapiens
aggcccagagtggcattgcaagcaccacccaaccccctttgtcactgtcgttgaaggaggcagaggccctggagactgagacaaagctctttgaggacttrgagttccagcagttggagcgggagagccgcgtggaggaggagcgcgagctggccggccaggggctgctccggagcaaggctgagctgctccgcagcatcg

SEQ ID NO: 551989 - DNA, 201 bp, Homo sapiens
tcactggaaaagcctttgtgtttgatcctcttgatactcacttttgaacctggggcgccaaggaccagtgccccccttgtcagggtatagctctgtcaggktccagggagtttagagagcccaggactgctgtggtgtgagaagggaacatttcagcctggggctcacatggactggtagggtctaggctctggacctatt

SEQ ID NO: 551990 - DNA, 201 bp, Homo sapiens
aacatggtgaaaccctgtctctacccaaaatacaaaaattagccacacgtggtggcacacgcctgtagtcctagctactcgggaagctgagataggagaaycgcttgaacctgggaggcagaggttgtagtgagctgagatggcaccattgcactccagcctgggcaacagagcaagactccgtctcaaaaaataaataaa

SEQ ID NO: 551991 - DNA, 201 bp, Homo sapiens
cccctgcatgttgtgagcagggtatgcttctgttgtccagtctttccaatgcatcatttagctccctgagaaggggagagcctagggctaagatggaattytgaagcatttcctgtggccccagtgacccttcccgactcttctccagccagaggcctacccagccaagtatgtaccctcccactctcttctgaccctaaa

SEQ ID NO: 551992 - DNA, 201 bp, Homo sapiens
ggcagtcccctccttaggacccacctccctcagatggggttaaagagtcctggttagaatgaggggagtctaccttatggccaaggagggtctctgatagraaggaccaaggcccttcctcccatattcccttcactcggtctccctttggacaatccattctatttgtgtgaccaggagggcagtgacagtagctctgag

SEQ ID NO: 551993 - DNA, 201 bp, Homo sapiens
gagctgagatcgtgccactgcactctagcctggcgatagagcaagacgccgtctcaaaaaaaaaaaaaaaaggaaatctcagtggcttacaagtactaggyttccttatgcccaatacatgtcgactgcacattgtgagttggtgggggctttgctgtgcatcagcgttgtctttgcttcagcatggcttttgggaacatt

SEQ ID NO: 551994 - DNA, 201 bp, Homo sapiens
cactgcagcctctgcctcctggattcaagcaattctcttgcctcagcctcccaagtagctaggactacaggcgcacgccaccacccccagctaagttttgyattttgagtagagacggagtttcaccatgttggccaggctggtctcgaactgctgacctcaggtgatccgcccgccttggcctcccaaaatgctggaatt

SEQ ID NO: 551995 - DNA, 201 bp, Homo sapiens
taagctccagggctttctaggggctgggaggggaaagggcagatagggaggcaggtgagaatattcctgggcatgggtgagccccatcttagaccttcctstcttcctttggcagagcccgaacccagccctcaccttctgcgtaaagacccatgaccggctgtactacatggtggccccatctgcagaggccatgcgtat

SEQ ID NO: 551996 - DNA, 201 bp, Homo sapiens
ccagggcctgatcaaccaccccatctcctttaggagcgcctggccatcctggacagtcaggctgggcagatccgggctcaggccgtgcaggaatcagaacrcctggcccgggacaagaatgcctccttacagctgctgcaaaaggtagggtccctgaggttgggccgggagatttggagtagggtaagtgggaggggagtg

SEQ ID NO: 551997 - DNA, 201 bp, Homo sapiens
gaggaaactctggtcctcactggaaaagcctttgtgtttgatcctcttgatactcacttttgaacctggggcgccaaggaccagtgccccccttgtcaggktatagctctgtcagggtccagggagtttagagagcccaggactgctgtggtgtgagaagggaacatttcagcctggggctcacatggactggtagggtct

SEQ ID NO: 551998 - DNA, 201 bp, Homo sapiens
caaggggagtgcccagtgcctgcaggctctgtctggtggctggtttcatggctggtgtagcacatgtctgtggtctggaagttgtaccctgactgtttctytttgcccttagtacattcagggcaactgttgtctcactgtttttctcttctttttcttgatgctctcctttctcccttccttcctccccttcttccttca

SEQ ID NO: 551999 - DNA, 201 bp, Homo sapiens
attcccccttgggcctgggtggagctagggggacagaagggtctgtgttcgacagtgagggagaagggcagcctgcataaggggaggttgggagtggtttytttttttccctggggccttgggagctttctttagctcctatggcctggggaggggcacgccttctgctctaggatgagggtgtcgagttgagaggactct

SEQ ID NO: 552000 - DNA, 201 bp, Homo sapiens
ctagattcccccttgggcctgggtggagctagggggacagaagggtctgtgttcgacagtgagggagaagggcagcctgcataaggggaggttgggagtgktttctttttttccctggggccttgggagctttctttagctcctatggcctggggaggggcacgccttctgctctaggatgagggtgtcgagttgagagga

SEQ ID NO: 552001 - DNA, 201 bp, Homo sapiens
gagcgggtgccagggaggcttgccactgtccatggcagagtctctgccagggctcgagcaggccagctggcagagcaggagaggccctcaaacagggcttsggcttctcaaggttccccacctccaggatacactttagtgatcaatatcttatggttctggtgccgtgaagaagaaattcctttgaaatctctaagactt

SEQ ID NO: 552002 - DNA, 201 bp, Homo sapiens
aactgtaagtgatgagagacacttgaggaggtctagggaccctagagagccatggaagcctcacaaaccaggcttcaggcctataggtaggcctgcgggaraaggcaacaaagaccaggaatgtgattgtgtcatccctcctttacctcctaggcccctgagaggtgactgtatctgggtgggtgtgtatgtggagagggg

SEQ ID NO: 552003 - DNA, 201 bp, Homo sapiens
cccggctcactcagggtaaggctggacacctccagatggagggggcctctgtttaaaggcttgtgtgtattaggcacaggggaggctggctgtggtggttsccatggtaactgcctgagtgaccatactgggaatggagtactcaggtgcatctggatgtgcctaaacaacatcccaaaccctttcagcatccagacatgt

SEQ ID NO: 552004 - DNA, 201 bp, Homo sapiens
caaaagttaacttcgtcttttgtgcctggatttccttgtctgtaaaatgagaattacaacaggctgttgtgagaattaaacaagatgtaaagacagaatargatgtgattgtaatgagcactcggtgaagaataactattattaagctctgactcccctcagtcttccagtggaaagtggattctgctcccattcagagct

SEQ ID NO: 552005 - DNA, 201 bp, Homo sapiens
ccccgcctgggccggcggggcctggacagtatgcgagaactaccccccttaagtccatctctgtcccggcgagctctctccccgctgcccacccggaccaycccagatcccaagctaaacagggaagtggcagagagtcctcggccccggcgctgggcagcccatggggcttcaccagaggacttctccctgacgctgggg

SEQ ID NO: 552006 - DNA, 201 bp, Homo sapiens
tgggcaagagccaggaccttctgtgcccccgctggtacctgcccgttcctccagctaccatctggccctacagcccccacagtcccgcccaagtggtgctygctccgagagtcctcggctgagcaggaaagggggccatgagaggcctcccagccctggcctccggggtctgctgacagacagccctgcagctactgtctt

SEQ ID NO: 552007 - DNA, 201 bp, Homo sapiens
tcagatcttgggactcactcaccagtgctttttctactctgtcttgtgctgcggagccctggaggtgcccatctcaagcacaggcaaggtcaggtgtggaytgtgtggactctgagagcagatgaggatgggtctttagagctgaggtgagcctgctagtgctgtgaggtggggtaacttcagtcctgcctgcccttccaa

SEQ ID NO: 552008 - DNA, 201 bp, Homo sapiens
cactcggtgaagaataactattattaagctctgactcccctcagtcttccagtggaaagtggattctgctcccattcagagcttggcactggcccagcagkaaggtgaaagatggaggaggaggaggcttgcccctgtgcttgcagagctcttgtctggtggaagtgctgggacacacagaaagatttgagatctggatat

SEQ ID NO: 552009 - DNA, 201 bp, Homo sapiens
cttagctaaaattgggaaattatgtgcctcgagggatggcaagctctgccagcttgtaccccactgccctggaggatgccactcagtgtctggaactctgrcccacttgtgtcaccacagggagcctcaccctctagggtaccctgaggggcagaaggaagcattaggttgaactccctgtaagctgtggtggggatcatg

SEQ ID NO: 552010 - DNA, 201 bp, Homo sapiens
ttcctgcccacttctggggcaccttgtttccctctgcctcccctaggtcttggggtcaggcctctcctgacttgacactgatgtcctagccccctgtaacmctgctctccctcctgacaggatactgaacctggctctatccccaccagggctcagcttcctccccttcatgtcctgctctgtccatcctccccaggaacg

SEQ ID NO: 552011 - DNA, 201 bp, Homo sapiens
tgaggacgacctcctggagtaccaccggcgacagcgccaagagcggctccgggagcaggagatggagaggctggtgagcgggtgccagggaggcttgccastgtccatggcagagtctctgccagggctcgagcaggccagctggcagagcaggagaggccctcaaacagggcttgggcttctcaaggttccccacctcca

SEQ ID NO: 552012 - DNA, 201 bp, Homo sapiens
cttcgctttctctgtggggaagagaggttattcgaggctgtggtagtgatggtggtggtggtgatggtggtagtgatggcaatggtgtggagggttcactyggcttccctcccctgccctcagcccatggctccactctggctttggaatcagtaaccacagtttctcctctgcctgtcctttgaggggtgactcaccaaa

SEQ ID NO: 552013 - DNA, 201 bp, Homo sapiens
gggccaacaccccaccccgaccctgggcaggaggggagggaggccaagggtgttgggttggggtcccctctgccacactgctttaacatcctcagctcctrattgacgcccaaccctggatttaaccctcaccatcactaccctttttccctgggttaaattttggtctctgggctgtagtagaaggggagggatgagagc

SEQ ID NO: 552014 - DNA, 201 bp, Homo sapiens
ggatctgacagtatttttccaataatttaattttccttctggattttttgagtttcttcctcctgccctcaattttgagaatcttaaaaattctttgaccyttttttttttttttggagctttggctctggcccccaaaaccacactcccaaattctgtgccaaattaactccacgcttgccaactaggcctacactaacg

SEQ ID NO: 552015 - DNA, 201 bp, Homo sapiens
gaggccagtgacctgggtttgaatcccaatgacctcacaaaagttaacttcgtcttttgtgcctggatttccttgtctgtaaaatgagaattacaacaggytgttgtgagaattaaacaagatgtaaagacagaataggatgtgattgtaatgagcactcggtgaagaataactattattaagctctgactcccctcagtc

SEQ ID NO: 552016 - DNA, 201 bp, Homo sapiens
tggatattagagccagctaggggccctagaaagggcattcatttcggttccagccatggctcagccctgccttggctgagctataaaacaagggttattgrgtattgtggcctggccagctgtgacacgctagctagatactgtgatcacctgctcttgatctcagccagaccacaggatggtggcacaggtgactgtgta

SEQ ID NO: 552017 - DNA, 201 bp, Homo sapiens
ctgtctccccagggcctgatcaaccaccccatctcctttaggagcgcctggccatcctggacagtcaggctgggcagatccgggctcaggccgtgcaggartcagaacgcctggcccgggacaagaatgcctccttacagctgctgcaaaaggtagggtccctgaggttgggccgggagatttggagtagggtaagtggga

SEQ ID NO: 552018 - DNA, 201 bp, Homo sapiens
atgggagagatttgaggaggaatggccccaagctctgggatttgattttccatggctgccagctgcctctgtttagttgcctctggggttcccaggagccyacagatttcactgtttttggtggctgaatatatgtggggggactcaggggcctgggttgggtgggtagacagctcagaggcttggtaggggccgggctgg

SEQ ID NO: 552019 - DNA, 201 bp, Homo sapiens
ctaggcttttagctgttcttgctaaggcctctttctcacagcccatcttgctcaggccctggtgatgtctccaccttcccccacctgtttctagctcctgyccaggctgatggggtgtgaggggaccctggggaatggtgtgactggtgctcaatgctgcatgtgtgtgccccactggggactgccaggttgttggggacg

SEQ ID NO: 552020 - DNA, 201 bp, Homo sapiens
ctaggcagctgtcctggagatggcatctgagctgggtgggggccaggattccccagatagctcagggagcttaaggggctctggctggtgtgtacacagtygagcccatgtacagaagaatggattctgccctctgtcccttacgagcagaacagggttctttggaaggtgggcaggaaccctgggattggtttgaggaag

SEQ ID NO: 552021 - DNA, 201 bp, Homo sapiens
actggctgtcgtgctgccccagcactacttgggtaggtttggtgtcctatatggactcagggtgcgaaagagcactgaagccagactgtgcatctgtggcyggttgtgcaggcgactgaagcattggcagagcagccaggcctggagctgcaggggccttagggaagctgcggggagagggggctgctctgtgttaacctc

SEQ ID NO: 552022 - DNA, 201 bp, Homo sapiens
atggatgtcaggtacacctagtggggtggtatcagcagcctaagtggatagcctggggacctgaagaaaggtgagtgatcactgggattatcagtatccayggcatcccctctgactatatcccacacagtctccataattttggacccaaactcagtcttgcaaaggctttcccttctcttttccctaccctcgatcttt

SEQ ID NO: 552023 - DNA, 201 bp, Homo sapiens
ggctcagccctgtctccccagggcctgatcaaccaccccatctcctttaggagcgcctggccatcctggacagtcaggctgggcagatccgggctcaggcygtgcaggaatcagaacgcctggcccgggacaagaatgcctccttacagctgctgcaaaaggtagggtccctgaggttgggccgggagatttggagtaggg

SEQ ID NO: 552024 - DNA, 201 bp, Homo sapiens
ggggagagggggctgctctgtgttaacctctccctgcttgcccctccctctgtgtgttgtgctgccagtggcctgctccttagctgcgtggggagcccacygtgactcccatctgtctctccttcaggacaacaagtgattgaagagcagcggcggcgactggctgagctgaagcagaaagcggcagctgaggcacagtgc

SEQ ID NO: 552025 - DNA, 201 bp, Homo sapiens
agcactgaagccagactgtgcatctgtggccggttgtgcaggcgactgaagcattggcagagcagccaggcctggagctgcaggggccttagggaagctgyggggagagggggctgctctgtgttaacctctccctgcttgcccctccctctgtgtgttgtgctgccagtggcctgctccttagctgcgtggggagcccac

SEQ ID NO: 552026 - DNA, 201 bp, Homo sapiens
actggcaggccggaggccctcacgaggccttgcaggggcctctgggcggagcagcgaggagcctggcgttgccacccaacgcctatgggagagtatggagsgctcagatgaggaaaatctcaaggaggagtgcagcagcactgagagcacccagcaggaggtgagatggaggggtaggcaagacaaagaggctgaagttgg

SEQ ID NO: 552027 - DNA, 201 bp, Homo sapiens
ccaccgcagcattggcactggcaggccggaggccctcacgaggccttgcaggggcctctgggcggagcagcgaggagcctggcgttgccacccaacgcctrtgggagagtatggagcgctcagatgaggaaaatctcaaggaggagtgcagcagcactgagagcacccagcaggaggtgagatggaggggtaggcaagaca

SEQ ID NO: 552028 - DNA, 201 bp, Homo sapiens
gggcctctgggcggagcagcgaggagcctggcgttgccacccaacgcctatgggagagtatggagcgctcagatgaggaaaatctcaaggaggagtgcagyagcactgagagcacccagcaggaggtgagatggaggggtaggcaagacaaagaggctgaagttggacctgctgggggcagaggaggctggtgtatccaat

SEQ ID NO: 552029 - DNA, 201 bp, Homo sapiens
ccctgggcctctggttcctacattgggaggccctgacatcctattagactaggagcccctggaacttctggccagctctgcagcaggcgcccatcttcttkgtataatgccttctgttttcttttttctttttttttgttttgagatggagtctcactctgtcgcccaggctgcagtgcagtggcgcgatctcggctcact

SEQ ID NO: 552030 - DNA, 201 bp, Homo sapiens
tctaggagggctgcctgggggtgtccaggagatgggaagcccgcctggggcctcccaggcactccccaaggccccacgtcctcgggggccggggaggccgcctggggcgccttgccacgcccgcgcggtccctattggaatccctagcggagttccccgagcggaggctgacccaagtcatccgggctcccccgggatagg

SEQ ID NO: 552031 - DNA, 201 bp, Homo sapiens
tgattggacgaagtggtgcagcacacacccctcacccagccctgcaggcttttttctttttctttttttttttttacccctgggcctctggttcctacatkgggaggccctgacatcctattagactaggagcccctggaacttctggccagctctgcagcaggcgcccatcttctttgtataatgccttctgttttcttt

SEQ ID NO: 552032 - DNA, 201 bp, Homo sapiens
caccggacacccaagcaacagccctcgctccatccgcgctctcccggctccccctctcctcgggccgcccatctctcctctcttccgcctttggggtcccsgtgggccccagcctccctctccttcgccccatctccccgcccgtcagcctcccctccgctgccctcgcgcatccccagtgttcccgtctgtcgtcgcctc

SEQ ID NO: 552033 - DNA, 201 bp, Homo sapiens
acctctcgtcctgggactccgtgggagcccgggagctgtgtcagtgcccgttggtgctggagccagtcggcccttccttggcctccttcaggcgggggccragacccccgagagttcactctgggtgctccactcggcggagagggcttcagactggtgtcccgcgtggctggggtgtcggcgcattcccgcgggggagga

SEQ ID NO: 552034 - DNA, 201 bp, Homo sapiens
caggagaatcgcttgaacccgggaggtggaggttgcggtaagccgagatagcaccgctgcactccagcctgggcaacaagagtgaaactccgtctcaaaawaaaaaaaataataataataataataataaatggcattaagtgctttgctttcacagaatgccatttaatataatacctgaatttcagacagtccttttta

SEQ ID NO: 552035 - DNA, 201 bp, Homo sapiens
cgcttgaacccgggaggtggaggttgcggtaagccgagatagcaccgctgcactccagcctgggcaacaagagtgaaactccgtctcaaaaaaaaaaaaawaataataataataataataaatggcattaagtgctttgctttcacagaatgccatttaatataatacctgaatttcagacagtcctttttaaaaaactga

SEQ ID NO: 552036 - DNA, 201 bp, Homo sapiens
tggcatctgagctgggtgggggccaggattccccagatagctcagggagcttaaggggctctggctggtgtgtacacagtcgagcccatgtacagaagaayggattctgccctctgtcccttacgagcagaacagggttctttggaaggtgggcaggaaccctgggattggtttgaggaagagaaccagaactgatgagaa

SEQ ID NO: 552037 - DNA, 201 bp, Homo sapiens
aacttcgttccctccctccctccctccctgcctcactacacaaacaatttaggcctgcggtggggaactgggccaagtgtgagggatgcagcccctcaccrtgtcccctctctgtaggccgagctgctcatctccgagtcctcagagatggggctggggactaaggctctgggccttttcccagggtcttctcaggctggg

SEQ ID NO: 552038 - DNA, 201 bp, Homo sapiens
tggtctctgtcactccctgcagccatctatgggcatagcaggcaccctacccctgccttggattttgtattgacatggagtgatggccctgtggcctggcrtggagtttggggtgttgggcaccttattgaaccctgttaaccccttctttgcccacccctaccccttctactgggcaccccaggaatatgtgaccctggc

SEQ ID NO: 552039 - DNA, 201 bp, Homo sapiens
ggagaagggcagcctgcataaggggaggttgggagtggtttctttttttccctggggccttgggagctttctttagctcctatggcctggggaggggcacrccttctgctctaggatgagggtgtcgagttgagaggactctggctttcctaggctgcaggctctgtactttctgccctttccctcccttcccctgtgggt

SEQ ID NO: 552040 - DNA, 201 bp, Homo sapiens
agatgaagttaactcattttatagatgaaacactggggcctagagaagataagtaatctctccaaggccacacagctaggaagtagcagagcttatgccasgtcagggtttgtgacactaaaggccatattcaccacatgctagtgctgcaggggagcttggccattatttagtctagtcctacccccttcttttgcagat

SEQ ID NO: 552041 - DNA, 201 bp, Homo sapiens
tagacctacttaggccttggttgtgagctggagccaactggctgtcgtgctgccccagcactacttgggtaggtttggtgtcctatatggactcagggtgygaaagagcactgaagccagactgtgcatctgtggccggttgtgcaggcgactgaagcattggcagagcagccaggcctggagctgcaggggccttaggga

SEQ ID NO: 552042 - DNA, 201 bp, Homo sapiens
ggctgagctgggttggggtgtctgctggcctcacccctccagctggcctctcttctgccctcatctgtgctctaccgtgtctcccctgccttctttcttgygtttgttgcttttgcttctgcattgcaggggggtctgcattggcagtctgggtgctcatggggtttctgccatctcttccttctcccttctccagcaggc

SEQ ID NO: 552043 - DNA, 201 bp, Homo sapiens
cagaaggagaaattggtttgggctgggaaatctgcccatgtctctggtcccaaatcctaactcccacaaccccccatgagaatctgtaggacttagatagsctgtcccttctgattagtaggcttccccaggttgggagtcccctggaatctttcccaagcagtgatcacagttccctcatttcctacagtgcaacaaaat

SEQ ID NO: 552044 - DNA, 201 bp, Homo sapiens
tatgacctgcctttccatggggccccacccaggcctggcactcagtggtaaatattctcttccgcagagcccttattgctcccctcaaaggtgggggttgsgggggggcagggaattagcctcctgtctcagtccagctattcctcagcaagtgcctggaggaacaggtgatccattttcttagtctgattccaaaaggct

SEQ ID NO: 552045 - DNA, 201 bp, Homo sapiens
tctgatggctgaggcatgagaatcgcttgaatccaggaggtggaggttgcagtgagccgagatcatgccactgcactccagtctggatgatggagtgaaaytctgtctcaggaaaaaaaaaaaagaaaaaagaagctctgtgaattttacccccgtggttggaatatttgtaaaatgcttggcttccctttcctgcttcag

SEQ ID NO: 552046 - DNA, 201 bp, Homo sapiens
tcattcagcaatgttactaagcatctagtaagttctaggcactgttctaggctctggtgatgagtaagatggccacagcgctctcatggagcttataatcrgggaagcagacaagagtgataaccacgcacaatgggtatgctgataggagacatccaggcactgcaggagcatggggtcttatggtcagagttgggctgg

SEQ ID NO: 552047 - DNA, 201 bp, Homo sapiens
gaggaggagcgatgcagttgggagaggaagctagaagggttatggttggagttctgtacagtgttgagtttccgacagggaaagaggattcctccaatgckcctagagagaaagcctgagcaggagatgatgcagcagaggggaagggccctgtggtgccgccgcccttccttcagcctccgaagggtgatggaaatggag

SEQ ID NO: 552048 - DNA, 201 bp, Homo sapiens
atttcctgtatggaaacttccagtttttgcatgtttacttctgtagactttttggcaactacaggaattttgattcctgtctacccgtatggcaggccatycctcttggggctgattaggaaaagcaggaactatgagtgaagtatagaccagaagaggaggcagatgtccaagtcagtgtagaggtgttggcaggggaac

SEQ ID NO: 552049 - DNA, 201 bp, Homo sapiens
tgtatggaaacttccagtttttgcatgtttacttctgtagactttttggcaactacaggaattttgattcctgtctacccgtatggcaggccattcctctkggggctgattaggaaaagcaggaactatgagtgaagtatagaccagaagaggaggcagatgtccaagtcagtgtagaggtgttggcaggggaaccttggg

SEQ ID NO: 552050 - DNA, 201 bp, Homo sapiens
gccataggtgctgaccccttggctttgggggcaggagcgggagatggagctgcggcggcaggccctggaggaggagcggcggaggcgtgagcaggtagaayggaggctgcagagtgagagtgcccggaggcagcagctggtcgagaaggaggtcaagatgcgggagaaacaattttcccaggtgaatgggcagtggggcac

SEQ ID NO: 552051 - DNA, 201 bp, Homo sapiens
atttgagtgattatttaaaggactgactttattatgaccaatagggacgtgtgaaactgccagttcaagtacatgaattctgtgggtgaattgttactgaygatatgtgaatactgtggtcaacggaagcttttcttttactcctacataactgtaacaccataccacagtttattcttttccaagtgattttatatatat

SEQ ID NO: 552052 - DNA, 201 bp, Homo sapiens
attgtacatgttcctcttagattaagttcttagaggctagtaactttcttttttcttttatacttcttttaatgctgggtaatatatgttgatgaattgaattatgtcttaatgtaggacatctaacattttgtagttaaaatttttgtgataagattataagcttttggtaactgtttactttttgacggacttctaata

SEQ ID NO: 552053 - DNA, 201 bp, Homo sapiens
gcatcaataaggctattttgatgaaaacaagatgcacaaaaattttgaccacagaatcagactaacattgtaaatgtaaacactcaatccttcctaagcakttctttgaatatgtagttaatccgttggaataaaattttgcaatggtttgttctttctagcgctttatcatttgataccttcataagccatgcatttttc

SEQ ID NO: 552054 - DNA, 201 bp, Homo sapiens
agtttctttaaacattttgcttcccgccccttaaaagatttttgaaaaactatatacccttttcccatattttatattgacatataaagtttttattttaagtttaaatagttgtaaagaatacaatacccaacatattgtaaatgttgacacttaaagtttcattgtatttacacatatattcttctaagtatgtgtctt

SEQ ID NO: 552055 - DNA, 201 bp, Homo sapiens
cagtttctttaaacattttgcttcccgccccttaaaagatttttgaaaaactatatacccttttcccatattttatattgacatataaagtttttattttaagtttaaatagttgtaaagaatacaatacccaacatattgtaaatgttgacacttaaagtttcattgtatttacacatatattcttctaagtatgtgtct

SEQ ID NO: 552056 - DNA, 201 bp, Homo sapiens
tatccaaatttaagatcttcatgtatattttaaaatattcaaattatttttctgagaatactatgggaaaatctaggaattttatcagtaccacatttagmtcataactctctaatatgaagttcaaaatatatttgcatataattacattagtttgcatgttttactgcttctttcaatttatacctttcccacattaca

SEQ ID NO: 552057 - DNA, 201 bp, Homo sapiens
ttactcctaccccttggagttcatggtggtggtggtggtggtggtggtggtggtggtggtggtggtggtggttgtggttgtggttgtggttgtggttgttgttgttgttttaggatatgaatttccaggtcctcaacttccacacatacttgttcctaaaattgatttgctttccttaagacttgcctcaatcccctctgg

SEQ ID NO: 552058 - DNA, 201 bp, Homo sapiens
agagttactcctaccccttggagttcatggtggtggtggtggtggtggtggtggtggtggtggtggtggtggtggttgtggttgtggttgtggttgtggttgttgttgttgttttaggatatgaatttccaggtcctcaacttccacacatacttgttcctaaaattgatttgctttccttaagacttgcctcaatcccct

SEQ ID NO: 552059 - DNA, 201 bp, Homo sapiens
gtgcggtgctagtcttcaaagaatgcacaatttataaaggaaaaatttagttacatatatatatatatatatatatatatatatatatatatatatatatacacacatacatataaacactatataatagctagccatttaactgagactttaagcaagactttcagccatttaactgaaactgataggctgatttagcag

SEQ ID NO: 552060 - DNA, 201 bp, Homo sapiens
aaagagttactcctaccccttggagttcatggtggtggtggtggtggtggtggtggtggtggtggtggtggtggtggttgtggttgtggttgtggttgtggttgttgttgttgttttaggatatgaatttccaggtcctcaacttccacacatacttgttcctaaaattgatttgctttccttaagacttgcctcaatccc

SEQ ID NO: 552061 - DNA, 201 bp, Homo sapiens
atgtgcttagctgataggtagtttcctacatggatgtttcctacatattaatgagggaaaatatcaaaatttaagaactgaatatcagctgattttttttygttattgtaatactacgatagacttataggctgaagctacatgttttgcttagttaacagttgaaagttgagttcaataataatttagtttttcaaattt

SEQ ID NO: 552062 - DNA, 201 bp, Homo sapiens
ggtgcggtgctagtcttcaaagaatgcacaatttataaaggaaaaatttagttacatatatatatatatatatatatatatatatatatatatatatatatacacacatacatataaacactatataatagctagccatttaactgagactttaagcaagactttcagccatttaactgaaactgataggctgatttagca

SEQ ID NO: 552063 - DNA, 201 bp, Homo sapiens
tggtgcggtgctagtcttcaaagaatgcacaatttataaaggaaaaatttagttacatatatatatatatatatatatatatatatatatatatatatatatacacacatacatataaacactatataatagctagccatttaactgagactttaagcaagactttcagccatttaactgaaactgataggctgatttagc

SEQ ID NO: 552064 - DNA, 201 bp, Homo sapiens
aaaagagttactcctaccccttggagttcatggtggtggtggtggtggtggtggtggtggtggtggtggtggtggtggttgtggttgtggttgtggttgtggttgttgttgttgttttaggatatgaatttccaggtcctcaacttccacacatacttgttcctaaaattgatttgctttccttaagacttgcctcaatcc

SEQ ID NO: 552065 - DNA, 201 bp, Homo sapiens
atggtgcggtgctagtcttcaaagaatgcacaatttataaaggaaaaatttagttacatatatatatatatatatatatatatatatatatatatatatatatacacacatacatataaacactatataatagctagccatttaactgagactttaagcaagactttcagccatttaactgaaactgataggctgatttag

SEQ ID NO: 552066 - DNA, 201 bp, Homo sapiens
ttcaaaagagttactcctaccccttggagttcatggtggtggtggtggtggtggtggtggtggtggtggtggtggtggtggttgtggttgtggttgtggttgtggttgttgttgttgttttaggatatgaatttccaggtcctcaacttccacacatacttgttcctaaaattgatttgctttccttaagacttgcctcaa

SEQ ID NO: 552067 - DNA, 201 bp, Homo sapiens
tcttcaaaagagttactcctaccccttggagttcatggtggtggtggtggtggtggtggtggtggtggtggtggtggtggtggttgtggttgtggttgtggttgtggttgttgttgttgttttaggatatgaatttccaggtcctcaacttccacacatacttgttcctaaaattgatttgctttccttaagacttgcctc

SEQ ID NO: 552068 - DNA, 201 bp, Homo sapiens
gtcttcaaaagagttactcctaccccttggagttcatggtggtggtggtggtggtggtggtggtggtggtggtggtggtggtggttgtggttgtggttgtggttgtggttgttgttgttgttttaggatatgaatttccaggtcctcaacttccacacatacttgttcctaaaattgatttgctttccttaagacttgcct

SEQ ID NO: 552069 - DNA, 201 bp, Homo sapiens
aggccgaggtgagtggatcacctgaagtcaggagttcgagatcagcctggccaacatggtgaaaccctgtttctaccaaaaaaaaaaaaaaaaaaaaaaaattagccgagaatggtggcatgtgcctgtaatcacagctactcgggaggctgaggcaggagaattgcttgaacctggtaggtggaggttgtagtgagcaag

SEQ ID NO: 552070 - DNA, 201 bp, Homo sapiens
gtttatctaagggttcctggcaaaggagagccatcgtccgaggctccgattgcctgaccatttggagtttgatggcttctaggcatgggagaaaaaaaaaacaagttctataaggttaagtatgcatgggttaaatgtgtattacacaaagaaagaatttggtgccaaagactacagagataagaaatgaaatatactaac

SEQ ID NO: 552071 - DNA, 201 bp, Homo sapiens
gcagtgttcttatgttatttacatttagaagttttaatttatctcttttttaggttataggttgagtcctcaaacattaactactattgttaaacgttatrgcaagaatggcagaattttctttgatgattatgttgcttgctgtgtgaagcttcgagcattgacaggtattgactatttaaaactaagtgcacagtgtta

SEQ ID NO: 552072 - DNA, 201 bp, Homo sapiens
tttccttagctttgactttattacaaagttagaattgtgatatttatataccgattaacaggattaacagtgaagcctttgtctgatgaatttcaatattmatgtgttttgtttctaattatatttttgtggaatgaattttgaaagttattttatgacttaatgagaaagcaatcttgcagtgttcttatgttatttaca

SEQ ID NO: 552073 - DNA, 201 bp, Homo sapiens
agttgtaaagaatacaatacccaacatattgtaaatgttgacacttaaagtttcattgtatttacacatatattcttctaagtatgtgtcttgaggtttasttcttagttttactttaggtaaaatcttgcattgttttactttttgtttacttcagtgatgttggtaaacattttttaaaattgtacatgttcctcttag

SEQ ID NO: 552074 - DNA, 201 bp, Homo sapiens
tgctgggattacaggcatgagccaccacacctggccttcctttccttctttccacaaaaaactcagggtatgatggagagagaaagcaagcgtcctccctycactctccaccccttatccctgagccccagagaccttggcaggtgccagccataggtaaaaatgaggtatgtacccatgaggtagggaaaacctggagaa

SEQ ID NO: 552075 - DNA, 201 bp, Homo sapiens
tttattttcttactttttttgtccctgtaattaaaatgtttaaaaaattatcacagttatacatgcacatagtttaaggagtcaaataactgtaaaactcrttatgaaaataactgttcattgtgtattcctgtctccttaacattaactgctcatagaggacacttcttttgacttttaaaaatctgattcttttgaaat

SEQ ID NO: 552076 - DNA, 201 bp, Homo sapiens
agtgttcactaggtctaatgtgcttttctaggattagacaatatacacagaattaatatacgtggcagacattctgttttggctaccccaatttcatttamaacccccttttaccttttattatgtaatagaggctggggaactataatagtcaccatcccagatacctttgtagctattaaaggcagccatgtgccgtag

SEQ ID NO: 552077 - DNA, 201 bp, Homo sapiens
ataactgtaaaactcgttatgaaaataactgttcattgtgtattcctgtctccttaacattaactgctcatagaggacacttcttttgacttttaaaaatmtgattcttttgaaatttgcttccagatttcaagatagaatatttttttcacgattgatttttggattttatgattatctattgatatcctgctatgaaag

SEQ ID NO: 552078 - DNA, 201 bp, Homo sapiens
cattatataaaatacacaacttctgctgggtgtggtggctcacgcctgtaatcccagcactttggcaggccgaggcaggcagatcatgaggtcaggagatygagaccatcctggctaacatggtgaaaccctgtctctactaaaaatacaaaaaattagccgagcatggtggcgggcacctgtagtcccagctactcggga

SEQ ID NO: 552079 - DNA, 201 bp, Homo sapiens
tattgattttttcttccttttttctccccccaacccccgagaaaaaccagttgcttcaattcagatgctcattttttcttacttggtctattacaataaaytaccaatggacttacctatttccaatatcatctcactttatattttattcattgtaaactaagtttctaaaatggaaattttagaatttcccttctgctt

SEQ ID NO: 552080 - DNA, 201 bp, Homo sapiens
ctcactttatattttattcattgtaaactaagtttctaaaatggaaattttagaatttcccttctgcttctgaaaacacttcagtggcttttcattggccyaaactttttgggggtagtattcaaaagtttcatgatttggccctcatttgcctttctgatgtcatcatatgtcactctctcccatatactttaatgcaag

SEQ ID NO: 552081 - DNA, 201 bp, Homo sapiens
ttttccccttttgttgaaattataataggaagtttattttcttactttttttgtccctgtaattaaaatgtttaaaaaattatcacagttatacatgcacrtagtttaaggagtcaaataactgtaaaactcgttatgaaaataactgttcattgtgtattcctgtctccttaacattaactgctcatagaggacacttct

SEQ ID NO: 552082 - DNA, 201 bp, Homo sapiens
ccatacatgcatacattctgaatttcttctgttgtgtttaaatttatttctttgttagtacttaccagttagattgtattcttttataacttggcaggatmtctaattgggagccaaagcttgcctcagtcagtcaaaagtctgtacaaaataggttttcagtggtagaaaccatgtttttgtcttttttttcttagatag

SEQ ID NO: 552083 - DNA, 201 bp, Homo sapiens
cctgacatagtcacttagtatcacaggcgtctcaaatttaacatctccaatattaattcttgatttggcactatcccaaactgctccttccccagtcttcmccatgtaatttaagggcaaatccaaaacaccagtaaaccctgctggctataccttaaaaacagaataatcatctcactacttctcaccatctcaactgct

SEQ ID NO: 552084 - DNA, 201 bp, Homo sapiens
gtggtcttcaaaagagttactcctaccccttggagttcatggtggtggtggtggtggtggtggtggtggtggtggtggtggtggtggttgtggttgtggttgtggttgtggttgttgttgttgttttaggatatgaatttccaggtcctcaacttccacacatacttgttcctaaaattgatttgctttccttaagacttg

SEQ ID NO: 552085 - DNA, 201 bp, Homo sapiens
ttgtggtcttcaaaagagttactcctaccccttggagttcatggtggtggtggtggtggtggtggtggtggtggtggtggtggtggtggttgtggttgtggttgtggttgtggttgttgttgttgttttaggatatgaatttccaggtcctcaacttccacacatacttgttcctaaaattgatttgctttccttaagact

SEQ ID NO: 552086 - DNA, 201 bp, Homo sapiens
gttgtggtcttcaaaagagttactcctaccccttggagttcatggtggtggtggtggtggtggtggtggtggtggtggtggtggtggtggttgtggttgtggttgtggttgtggttgttgttgttgttttaggatatgaatttccaggtcctcaacttccacacatacttgttcctaaaattgatttgctttccttaagac

SEQ ID NO: 552087 - DNA, 201 bp, Homo sapiens
ggctatggttgtggtcttcaaaagagttactcctaccccttggagttcatggtggtggtggtggtggtggtggtggtggtggtggtggtggtggtggttgkggttgtggttgtggttgtggttgttgttgttgttttaggatatgaatttccaggtcctcaacttccacacatacttgttcctaaaattgatttgctttcc

SEQ ID NO: 552088 - DNA, 201 bp, Homo sapiens
gtacatgttcctcttagattaagttcttagaggctagtaactttcttttttcttttatacttcttttaatgctgggtaatatatgttgatgaattgaattatgtcttaatgtaggacatctaacattttgtagttaaaatttttgtgataagattataagcttttggtaactgtttactttttgacggacttctaataatt

SEQ ID NO: 552089 - DNA, 201 bp, Homo sapiens
gggctatggttgtggtcttcaaaagagttactcctaccccttggagttcatggtggtggtggtggtggtggtggtggtggtggtggtggtggtggtggttgtggttgtggttgtggttgtggttgttgttgttgttttaggatatgaatttccaggtcctcaacttccacacatacttgttcctaaaattgatttgctttc

SEQ ID NO: 552090 - DNA, 201 bp, Homo sapiens
gactttgggctatggttgtggtcttcaaaagagttactcctaccccttggagttcatggtggtggtggtggtggtggtggtggtggtggtggtggtggtggtggttgtggttgtggttgtggttgtggttgttgttgttgttttaggatatgaatttccaggtcctcaacttccacacatacttgttcctaaaattgattt

SEQ ID NO: 552091 - DNA, 201 bp, Homo sapiens
tgtacatgttcctcttagattaagttcttagaggctagtaactttcttttttcttttatacttcttttaatgctgggtaatatatgttgatgaattgaattatgtcttaatgtaggacatctaacattttgtagttaaaatttttgtgataagattataagcttttggtaactgtttactttttgacggacttctaataat

SEQ ID NO: 552092 - DNA, 201 bp, Homo sapiens
cattttcaatttttagtctaaatatttagactgtattttttcatatattgagttctacctagctttgagggatcaggtgcaacatctgacttaggtatacygctcctggaacccaactactgaacttacatctacagccatatccttttttgatgggcctcataattaataatgctctatgaaaaacacctgattaaaggt

SEQ ID NO: 552093 - DNA, 201 bp, Homo sapiens
ttgtacatgttcctcttagattaagttcttagaggctagtaactttcttttttcttttatacttcttttaatgctgggtaatatatgttgatgaattgaattatgtcttaatgtaggacatctaacattttgtagttaaaatttttgtgataagattataagcttttggtaactgtttactttttgacggacttctaataa

SEQ ID NO: 552094 - DNA, 201 bp, Homo sapiens
cttgactttgggctatggttgtggtcttcaaaagagttactcctaccccttggagttcatggtggtggtggtggtggtggtggtggtggtggtggtggtggtggtggttgtggttgtggttgtggttgtggttgttgttgttgttttaggatatgaatttccaggtcctcaacttccacacatacttgttcctaaaattga

SEQ ID NO: 552095 - DNA, 201 bp, Homo sapiens
aaattgtacatgttcctcttagattaagttcttagaggctagtaactttcttttttcttttatacttcttttaatgctgggtaatatatgttgatgaattgaattatgtcttaatgtaggacatctaacattttgtagttaaaatttttgtgataagattataagcttttggtaactgtttactttttgacggacttctaa

SEQ ID NO: 552096 - DNA, 201 bp, Homo sapiens
acttgactttgggctatggttgtggtcttcaaaagagttactcctaccccttggagttcatggtggtggtggtggtggtggtggtggtggtggtggtggtggtggtggttgtggttgtggttgtggttgtggttgttgttgttgttttaggatatgaatttccaggtcctcaacttccacacatacttgttcctaaaattg

SEQ ID NO: 552097 - DNA, 201 bp, Homo sapiens
ccctgagtgatagataacacaaagctaagtaggtttagcctgcacattcttttatagcatgcaaaaatgactattggaaattttaggaaagtaggaagcaytttaaaaaattataaggaacaatatttctaacttgggcctcactcccattttttaaaaaaaactcagttaaaacctaagtatgtcaaacaatatgattgg

SEQ ID NO: 552098 - DNA, 201 bp, Homo sapiens
aggcggagcttgcagtgagccaagatcgcatcactgcactccagcctgggcgacagagcaagactccatctcaaaaaaaaaaaaaaaatatatatatatawaatatataatattatttatatattatatgatatataaattatataatatatataaaaatatataacttcatggcagtagccccctggacactttggagca

SEQ ID NO: 552099 - DNA, 201 bp, Homo sapiens
cggctggtgaatgtaggcaggcctggctgagggtggtgagactgcgagggacaggtgagagatgaagctcagaagacatctttgcagagatgtggagaagmcaggaggaagtccttcctaaaataaacctgacctcctgtgggttcccaaacactaacttgtttccctgggaatttggaggtgggttcgaaaaagtgagta

SEQ ID NO: 552100 - DNA, 201 bp, Homo sapiens
tcttttctgctggttgccatagtgcctctcttaatgggtggctcaagtccttactataatcctggaagttgaataaaaacctaagtatatctctctctctytttctgtcttctatatagcctagttgctcagtgaaatatttggatttaattaagtatcaattaatcattcagtataattactctataaatatgtacttta

SEQ ID NO: 552101 - DNA, 201 bp, Homo sapiens
tacctgcaaatgtttttgtgaaaaacagtacttttacctcaaaggctagattgtaattgttttattttactttatttatttatttatttatttatttatttattattatactttaagttttagggtacatgtgcacaatgtgcaggttggttacatatgtatacatgtgtcatgctggtgcgctgcacccactaactcgtc

SEQ ID NO: 552102 - DNA, 201 bp, Homo sapiens
tagatatcttcctgaatcattcataattcattttggctaaagctgtgatataagtggacacatattttcagcaatttatgaaaggacatgtagtctggaasattcatctgctaaattcattggcctgggcattgtcacataattgcttagaacaaataaaacctattaggcattatataaaatacacaacttctgctgggt

SEQ ID NO: 552103 - DNA, 201 bp, Homo sapiens
tttaggaaaagagaccacttgcaacaagggtctgcgaatttcatatatgacgatgtgagtatcctgcttttgatatttatactgcattctagatagttctyagttagtaaaaaaatttaagtgatcccaagtaccagtactggaaataatatatttggtatgccacatacttttccatatttttcagtgtaacacaaatat

SEQ ID NO: 552104 - DNA, 201 bp, Homo sapiens
aagatagaatatttttttcacgattgatttttggattttatgattatctattgatatcctgctatgaaagatgaggatttcactttattttaaccttaaastctcccctgtctctgcactccacagaggaacatttcccatcctcctgtccttccaatgtagttataatatatagtaacttttgttaggtatgttagtctt

SEQ ID NO: 552105 - DNA, 201 bp, Homo sapiens
gattatgttttttagatatcttcctgaatcattcataattcattttggctaaagctgtgatataagtggacacatattttcagcaatttatgaaaggacaygtagtctggaacattcatctgctaaattcattggcctgggcattgtcacataattgcttagaacaaataaaacctattaggcattatataaaatacacaa

SEQ ID NO: 552106 - DNA, 201 bp, Homo sapiens
taatatgcttttatacaactgcacattaaattaggtcataattatttttaaacaggatggtgaagtggatgctgaagaacttcagagatgtttgacacagkctggaattaatggaacttactctcgtgagatcttttttccccttttgttgaaattataataggaagtttattttcttactttttttgtccctgtaattaa

SEQ ID NO: 552107 - DNA, 201 bp, Homo sapiens
acgtttcctctgaagatgtaattggtgctacttatttcacaagattgttgtgaaagtcaaatgtgataatgtgcaaaatagctgtgaaaaatatcaagtgytatataaaagaataaattgtaatttttaaatttttattaccaggttttatttccaccaataattgtacataaatatgaaggggggcactcttattttaca

SEQ ID NO: 552108 - DNA, 201 bp, Homo sapiens
ttgtacataaatatgaaggggggcactcttattttacacatacacaaaacacctgaggattaatgtggaaatgagatgatctcagcttttagttggccaakaatatatttaagaattgggccacttttatgtttttgatgaaacgatttttaattttttgtaacaggactactctaacttaactgacactacacagaagcg

SEQ ID NO: 552109 - DNA, 201 bp, Homo sapiens
attgaggattttaatcatactgttgctgttcttattcagcattagttgtggacacatactgtgatcaacattatctacatatatataatttctcaagaagytttcattgagtccaaattgcttaatagacttaataatcaaagtgaggatgtatatatgcagaaagtataccaatcatcacctttctgaagagccttgtta

SEQ ID NO: 552110 - DNA, 201 bp, Homo sapiens
gaaccgtgcagggcggggctggcctgcggaagggggcgggttcggaggagtgaactgtgcggttagtgcgcctttcagcctcacctgcagctgcgcctccytgcacctgcgcctgtgctttttctcccagcactgcggacgcgactcgagggtgacgctcgctccgctcgtcccgctcgtcatggcctacccgggatacgg

SEQ ID NO: 552111 - DNA, 201 bp, Homo sapiens
gacttttaaaaatctgattcttttgaaatttgcttccagatttcaagatagaatatttttttcacgattgatttttggattttatgattatctattgataycctgctatgaaagatgaggatttcactttattttaaccttaaactctcccctgtctctgcactccacagaggaacatttcccatcctcctgtccttccaa

SEQ ID NO: 552112 - DNA, 201 bp, Homo sapiens
cctcttcctcgcggggtgtggcgcccccgggggcggtgccaacgtgcgggtccgcccttggctcctgctccctgcgtccgcgcctggtactcggcggcgcsggattccggggctgttgggggccagggcctgggcgagcattgatcctgggctgacttggagccgcaggttttctggtcgttgaggaccctcgaggagcgt

SEQ ID NO: 552113 - DNA, 201 bp, Homo sapiens
taaagctgatactatttatattctcttctgaaatccatgctttatggttctttaacaaaaagtttttcaagaatgtttgcccttcacgtaaaaaaaaaaawtccaaagaatgtggtgaaaatacaaaaatctcgtactgttctaaacccctaatgccctttgccagaggcagtcagttagcagtttcttgggcgtctttca

SEQ ID NO: 552114 - DNA, 201 bp, Homo sapiens; identical to SEQ ID NO: 404029

SEQ ID NO: 552115 - DNA, 201 bp, Homo sapiens
gaccttctcttgattagggtgccttggaatgtacagaacctaacttgaatatacagcactggtttcttggataagaagtgtacagtgatctaaacttgcamaccaaaatacagagatgatgggaccaaaaattatcaacaggaatgtccaagaaatatgatcagtgtagccatggatacgtgtcatatttgactctatgtg

SEQ ID NO: 552116 - DNA, 201 bp, Homo sapiens
tgctgggagaggaggctatggaaaactggcacagaaccagtgagtggtgagagctctgtcagtgacaaacactcctttggcctgttgaatttgctgaagarcatcacctaaagtctgcacacgagcccatttttaccaagatttgatcagtgtctttactgagctggaagcctctgaaagttattaaaggacagaatccaa

SEQ ID NO: 552117 - DNA, 201 bp, Homo sapiens
tctgaatttttaaaagagctgtaactagttgtaagtgcttaggaagaaactttgcaaacatttaatgaggatacactgttcatttttaaaattccttcacmctgtaatttaatgtgttttatattcttttgtagtaaaacaacataactcagatttctacaggagacagtggttttatttggattgtcttctgtaataggt

SEQ ID NO: 552118 - DNA, 201 bp, Homo sapiens
tcctgcagcagatgcctcttttagccatttctcatttttttcctcaaattttacctactgaggctcaagccttcacagtgagctgatggtctctacaggggaggggagtctagggaatttatttggtatttgtaaggcaagaggtgatttctctctaatatatctgagttattgctcatttaaaactgttaagtccagtat

SEQ ID NO: 552119 - DNA, 201 bp, Homo sapiens
gagacgggaaggccctgggcaagaacgctgagaaacggtttgctcttgtctcattgtgtcgcctcccattcagctgaaatccgcaaacgccaagtggggcmccggtgcctgctggcgaggcagggaatgggtgctggaagggcgcttggatatcactgaagccacttgctctggaagacggggaactggaggctcgcttat

SEQ ID NO: 552120 - DNA, 201 bp, Homo sapiens
gtaaagctgatactatttatattctcttctgaaatccatgctttatggttctttaacaaaaagtttttcaagaatgtttgcccttcacgtaaaaaaaaaaattccaaagaatgtggtgaaaatacaaaaatctcgtactgttctaaacccctaatgccctttgccagaggcagtcagttagcagtttcttgggcgtctttc

SEQ ID NO: 552121 - DNA, 201 bp, Homo sapiens
taatcccaacactttgggaggctgaggaggaaggatagcttgaggccaggagtttgagactagactgggcaacatagcaagaccccgtctctacaaagcamaacgaaaaacaacaaatggagttgtgctatgttgtattgctttgcacaaaattaggaacaggtgtttgacaattgaatttgttttctgtgaattctaacc

SEQ ID NO: 552122 - DNA, 201 bp, Homo sapiens
aatctgaatttttaaaagagctgtaactagttgtaagtgcttaggaagaaactttgcaaacatttaatgaggatacactgttcatttttaaaattccttcmcactgtaatttaatgtgttttatattcttttgtagtaaaacaacataactcagatttctacaggagacagtggttttatttggattgtcttctgtaatag

SEQ ID NO: 552123 - DNA, 201 bp, Homo sapiens
taaaagggccctttgtcatatattgggtcaaggtccagagtctacacttgggtttaaaggatgcactgctgaggatatggtgtgtgcagggaaaagggaarccgcttgcgtggcagtcgggcgtagaagtgactttgttgtatgtggtataacttttgagccctgtctctactaagagtctggacttcgcataagtgcttc

SEQ ID NO: 552124 - DNA, 201 bp, Homo sapiens
tcatttttaaaattccttcacactgtaatttaatgtgttttatattcttttgtagtaaaacaacataactcagatttctacaggagacagtggttttattyggattgtcttctgtaataggtttcaataaagctggatgaacttatcgttgttgctgcctgtttcctggcctataaagagggttgtgttctggaattcctg

SEQ ID NO: 552125 - DNA, 201 bp, Homo sapiens
tttaagtattggacctcttggatttatcctatgttctttttactgtatgttttggtcattcaatttaatattctgagaaattttgcaggcccaatttaatrtatcttttgaattttttcctgtgccctgaattatgtttgtttcggttgaaatttttccttaagtgtctggtgatccctggatttctgctcataattaagg

SEQ ID NO: 552126 - DNA, 201 bp, Homo sapiens
tcttctgaaatccatgctttatggttctttaacaaaaagtttttcaagaatgtttgcccttcacgtaaaaaaaaaaattccaaagaatgtggtgaaaatayaaaaatctcgtactgttctaaacccctaatgccctttgccagaggcagtcagttagcagtttcttgggcgtctttcaagaagtaaccctgtgggtgtgcg

SEQ ID NO: 552127 - DNA, 201 bp, Homo sapiens
cccttcacgtaaaaaaaaaaattccaaagaatgtggtgaaaatacaaaaatctcgtactgttctaaacccctaatgccctttgccagaggcagtcagttascagtttcttgggcgtctttcaagaagtaaccctgtgggtgtgcggtagtgtatttcatgtgctgtttttaaaatcatttttttattttttattgttccat

SEQ ID NO: 552128 - DNA, 201 bp, Homo sapiens
ggtagtgtatttcatgtgctgtttttaaaatcatttttttattttttattgttccatttcagcatatgtaggtctttttttaaaatagctgtacagctggscatggtggctggtgtttgtagtgccagctgctcaggaagctgaggcaggaggatcagttgagcccaagatttcaaggctgcactgagttgtgactgtgtt

SEQ ID NO: 552129 - DNA, 201 bp, Homo sapiens
cagtttctgcgctctgcgagctcataatcccctgtagtgaggattcagaaaagggaaaaatccccttgtgactgggaaaggaaggggcgcatatagcagarggtaagtgtggagaatgtgtgaaatgtgttactagagtagggaaagggaaattttgtttgacgctaaattagggaagctcttacatttatttagtcaagg

SEQ ID NO: 552130 - DNA, 201 bp, Homo sapiens
ttaattaaagggaggtctctgatgaagtaggtttgggaactgctaccttggtgacagcttgagtctttcctttagtgaagtgcagcacaattccacgtgcwcggtgaccttctcttgattagggtgccttggaatgtacagaacctaacttgaatatacagcactggtttcttggataagaagtgtacagtgatctaaact

SEQ ID NO: 552131 - DNA, 201 bp, Homo sapiens
gggcgcatatagcagaaggtaagtgtggagaatgtgtgaaatgtgttactagagtagggaaagggaaattttgtttgacgctaaattagggaagctcttasatttatttagtcaaggctgggaacggtggctcacgcctgtaatcccagcactttgggaggctgaggcgggtggatcacgaggttaggagttcaagactag

SEQ ID NO: 552132 - DNA, 201 bp, Homo sapiens
cctcaaattttacctactgaggctcaagccttcacagtgagctgatggtctctacaggggaggggagtctagggaatttatttggtatttgtaaggcaagmggtgatttctctctaatatatctgagttattgctcatttaaaactgttaagtccagtataattttccctgatatgaaaaaatgtgcatttttttcactta

SEQ ID NO: 552133 - DNA, 201 bp, Homo sapiens
aagggccctttgtcatatattgggtcaaggtccagagtctacacttgggtttaaaggatgcactgctgaggatatggtgtgtgcagggaaaagggaagccrcttgcgtggcagtcgggcgtagaagtgactttgttgtatgtggtataacttttgagccctgtctctactaagagtctggacttcgcataagtgcttcaca

SEQ ID NO: 552134 - DNA, 201 bp, Homo sapiens
aaaatgaagaaaacagcatgtggattctgttttgtggagtatccttcccatggatctaatgtagctgctgaaccagggtagagctgagagtggtagctcayaagcgtccctgcactcgtccctacgttttccttcatctccctcctactttccacccagtgtgtctctgcccttatactgtaaagctgatactatttatat

SEQ ID NO: 552135 - DNA, 201 bp, Homo sapiens
atttatattctcttctgaaatccatgctttatggttctttaacaaaaagtttttcaagaatgtttgcccttcacgtaaaaaaaaaaattccaaagaatgtrgtgaaaatacaaaaatctcgtactgttctaaacccctaatgccctttgccagaggcagtcagttagcagtttcttgggcgtctttcaagaagtaaccctg

SEQ ID NO: 552136 - DNA, 201 bp, Homo sapiens
gaaaaaatgtgcatttttttcacttagcaacaaagtaccttctaatttccaatagtccgtgaaagttggggctgaagtacctaagtgtgaatgtctctccygttaaactgagtgtagaaatctgaatttttaaaagagctgtaactagttgtaagtgcttaggaagaaactttgcaaacatttaatgaggatacactgttc

SEQ ID NO: 552137 - DNA, 201 bp, Homo sapiens
tgaaattctagggtgacaatgaagaacaagaaaaattactgaagaaaagctgtacgttatatgttggaaatctttctttttacacaactgaagaacaaatytatgaactcttcagcaaaagtggtgacataaagaaaatcattatgggtctggataaaatgaagaaaacagcatgtggattctgttttgtggagtatcctt

SEQ ID NO: 552138 - DNA, 201 bp, Homo sapiens
cttcacagaaggtcgacatccccctttttgggcaagggatttctggtaggctgggatgagagaagttgatttccaaaccagaattaatgaatgtctctacygtacttagaaatactatttaagcaaggctctgaagttgcttaacttttgtctctatttgaaattctagggtgacaatgaagaacaagaaaaattactgaa

SEQ ID NO: 552139 - DNA, 201 bp, Homo sapiens; identical to SEQ ID NO: 404051

SEQ ID NO: 552140 - DNA, 201 bp, Homo sapiens
ttcagcaaaagtggtgacataaagaaaatcattatgggtctggataaaatgaagaaaacagcatgtggattctgttttgtggagtatccttcccatggatytaatgtagctgctgaaccagggtagagctgagagtggtagctcacaagcgtccctgcactcgtccctacgttttccttcatctccctcctactttccacc

SEQ ID NO: 552141 - DNA, 201 bp, Homo sapiens
tgacgacactgccgccctcggattgggtccaatgagatgctcgcctccgcgcgtttccgcttccgccatcgcggacgcagcctcgtgccgggagtcgccgyattgtggtccgcttctctgcactatgtcgggtggcctcctgaaggcgctgcgcagcgactcctacgtggagctgagccagtaccgggaccagcacttccg

SEQ ID NO: 552142 - DNA, 201 bp, Homo sapiens
tcgtcttccgccccgcggcgcccgacccggacgtctatgcccccgcgcagcttgatgacgacactgccgccctcggattgggtccaatgagatgctcgccyccgcgcgtttccgcttccgccatcgcggacgcagcctcgtgccgggagtcgccgcattgtggtccgcttctctgcactatgtcgggtggcctcctgaagg

SEQ ID NO: 552143 - DNA, 201 bp, Homo sapiens
gacccgactccactccaggaaggccatctgaccctgtgacaggcatagctcataaactacccctccctgggatcccgctcctcttcagcctccttccccaygaagctgggctaactttctaagtcattttgcttagaaattcagtgtggcccataccctttgtcctcccagcctggcatccaggcagggacaccctcacac

SEQ ID NO: 552144 - DNA, 201 bp, Homo sapiens
tgttcgggaccaatcttagggcttactctagtcccacaagtcattgttgggagctcagcataatctctacagacagacacccctcactccttagctagacrgagcaggaccactggagtcaggtctggtgacagtaaaatcccacaaaaacaaaatgcttctagacatggccaacacccctttatttcaaacaaagttgca

SEQ ID NO: 552145 - DNA, 201 bp, Homo sapiens
tatggttgtgtccagccagtagggcctggaggctgtgggggcttcctcagcccttagtgggcaggtaggcaggtgaggctgccattctccaggcagtcccrctctccgctgggaggtagagggagccgagagacaccccagctctgctcagggcctcccacaagaggagggcccatgtaaccagcccctgcctcctccctc

SEQ ID NO: 552146 - DNA, 201 bp, Homo sapiens
ggagctcagcataatctctacagacagacacccctcactccttagctagacagagcaggaccactggagtcaggtctggtgacagtaaaatcccacaaaamcaaaatgcttctagacatggccaacacccctttatttcaaacaaagttgcaacgtggcagagcatcagaagcatccctttgggttttcgtaggaatctgg

SEQ ID NO: 552147 - DNA, 201 bp, Homo sapiens
acgttctcagcggtctcatagtggtgtgttcagacacatcagaggttctgtttcatctttgtcttggagacatgcccctgggtctcgtttctgttagtctraggttagacctccaggactgacctcctaattctttcctcttagtgtctctggctttatccttttgttctactttctcagaagttttatttttcacctttt

SEQ ID NO: 552148 - DNA, 201 bp, Homo sapiens
cagaatcgcagctcagccctgtcctctaccgtgcaaaccactgcaggaagatggccctttcttctgcctgcatggggacggagatggatttggggatcttyccagtgcttccgcccactggtttcagctttccccctctccttggttaacgctcacctgtgacctttctaccctaaaatttttgactttttttttctggtc

SEQ ID NO: 552149 - DNA, 201 bp, Homo sapiens
caggaagatggccctttcttctgcctgcatggggacggagatggatttggggatcttcccagtgcttccgcccactggtttcagctttccccctctccttrgttaacgctcacctgtgacctttctaccctaaaatttttgactttttttttctggtctgctgacctcacttctcccattctttttccccttatgggttta

SEQ ID NO: 552150 - DNA, 201 bp, Homo sapiens
gggacggagatggatttggggatcttcccagtgcttccgcccactggtttcagctttccccctctccttggttaacgctcacctgtgacctttctaccctmaaatttttgactttttttttctggtctgctgacctcacttctcccattctttttccccttatgggtttatgcttttttttttaattcctctgcagtcatg

SEQ ID NO: 552151 - DNA, 201 bp, Homo sapiens
tcagcatcctggcctatcatggtcatagccaaagagcagacttactgggaaattcaactccctgtcttcccccatctagttcactggtggtgagaatcctyctctcttcccagccatgactgccccatctcccctcgccagagcttgtccagccggtcaactttaaaaatgcagtgctaggcaggcctcctaggctgaaag

SEQ ID NO: 552152 - DNA, 201 bp, Homo sapiens
ctgggaaattcaactccctgtcttcccccatctagttcactggtggtgagaatccttctctcttcccagccatgactgccccatctcccctcgccagagcytgtccagccggtcaactttaaaaatgcagtgctaggcaggcctcctaggctgaaagcatgttttgttccagcagaacaaagatacttatgagcctttctg

SEQ ID NO: 552153 - DNA, 201 bp, Homo sapiens
agcaggacaccatgctgaaggccatgttcagcgggcgcatggaagtgctcaccgacagtgaaggtaagctcacccaccacgtgcctgcctctggccatgcrttatgtggtcaaggagggcttccctgaagaagtgacatttaagtcgagacctgaagatgtgtaggaggcagcttgttggggactcccaccatcttgactt

SEQ ID NO: 552154 - DNA, 201 bp, Homo sapiens
gaataacttttgaaataaaaacatgtataattgcctgagtgaggcctgataatgggttcacagtgggaagctacaggtcatcttttgtgcccctgctattkggtcatgtggtccccctctccagccagcaagctatgcttgtctgcctcttctgatgcagggcagggccccagccctatgggaagctagtagttcattgca

SEQ ID NO: 552155 - DNA, 201 bp, Homo sapiens
acaacaaatactcatataccaggtaaggcgtcagccgggaaagacagctccatttactaggaaaacctccactcacaccagccaggcccagctcttcttcrtaccttcagatgaggatgacccctctgtacctctctgcctggatagataagtagacagatggatacaggggtataactctgagctataattcacacatat

SEQ ID NO: 552156 - DNA, 201 bp, Homo sapiens
tgcgtaggagcagaactttccatggcagtaagtgtccagctctgtttctggttctttccccaactccagccccgtccagttgttctcctgattgacccgastccactccaggaaggccatctgaccctgtgacaggcatagctcataaactacccctccctgggatcccgctcctcttcagcctccttccccatgaagctg

SEQ ID NO: 552157 - DNA, 201 bp, Homo sapiens
gggaagcagggctaattctgtgattgggtctcagtgattcctgacttgaaagcaggaagaatggaaggaggctaaacctctcattggtaaagcagcagctrtaactcctattagccaggataggggatctttggtcatttttgtattttggataatgtttatgtttttgtctgtgtccggacatgatgactgaatggtcct

SEQ ID NO: 552158 - DNA, 201 bp, Homo sapiens
tttgctctgtgttggatgctgctgggaagcagggctaattctgtgattgggtctcagtgattcctgacttgaaagcaggaagaatggaaggaggctaaacytctcattggtaaagcagcagctataactcctattagccaggataggggatctttggtcatttttgtattttggataatgtttatgtttttgtctgtgtcc

SEQ ID NO: 552159 - DNA, 201 bp, Homo sapiens
aacactggcccaagatttggtaaagagatttcattgcaatgtaataactacagttttttacaaattggaacagctttggtgtgtcgtaatcaagggttttktttgtttgtttgtttcaaataagccatctgattgtggtgactggggcccatgtccaagacaattcctggcatattctgtcaccctcccgtggggcgatca

SEQ ID NO: 552160 - DNA, 201 bp, Homo sapiens
cagggtcacctggggttatggttgtgtccagccagtagggcctggaggctgtgggggcttcctcagcccttagtgggcaggtaggcaggtgaggctgccaytctccaggcagtcccgctctccgctgggaggtagagggagccgagagacaccccagctctgctcagggcctcccacaagaggagggcccatgtaaccagc

SEQ ID NO: 552161 - DNA, 201 bp, Homo sapiens
ctataccaccatgcagacgctgaccaagcaggacaccatgctgaaggccatgttcagcgggcgcatggaagtgctcaccgacagtgaaggtaagctcaccsaccacgtgcctgcctctggccatgcgttatgtggtcaaggagggcttccctgaagaagtgacatttaagtcgagacctgaagatgtgtaggaggcagctt

SEQ ID NO: 552162 - DNA, 201 bp, Homo sapiens
gaagggctttgggtggagaattaggggcgggggtggtggtagggaggctccctggcggttaggaatccgggaagcacatttgggcttgcggagtagatacktgtgtgcgtgaggaaggggtgtctccaagtgagtcctgagtgctggttggagatgggagttggtgattgcgaggagaacaaagagatatcaattgaaaac

SEQ ID NO: 552163 - DNA, 201 bp, Homo sapiens
taaggggtacagtgctttttagaatagtgggctctaatcttggtgggctttaaaatctcctgagggagttttaaaaattctgttgcctagtccacatcccrgaccaattacatcagaattttcatggtaggacctaggtgtcaggagttttgagctcccagctgatttcgattgtcaccaactggagagccactgtttaga

SEQ ID NO: 552164 - DNA, 201 bp, Homo sapiens
tgtactgtagcctgggcaataagagcaaaactcagtctcaaaaaaaaaaaaaaaagcaggattccagtagcaacagtggggagagtcctccctagagaggwttgctatggtgggggtctctggtccactgcctcgtgtcctaagttcactgtaacttgggctcaaggacacgaatgctgccaaaacttttcccccaagggc

SEQ ID NO: 552165 - DNA, 201 bp, Homo sapiens
cctccctagagaggtttgctatggtgggggtctctggtccactgcctcgtgtcctaagttcactgtaacttgggctcaaggacacgaatgctgccaaaacytttcccccaagggccttgcctactattaggttgactgacctttggagagggtgagctctgaaaaggtttagagcttttgttgcctaatctgtagtctcat

SEQ ID NO: 552166 - DNA, 201 bp, Homo sapiens
ccaccttgggctggtctttggcctggtgctcactgggaccccatatgtctgcgtaggagcagaactttccatggcagtaagtgtccagctctgtttctggktctttccccaactccagccccgtccagttgttctcctgattgacccgactccactccaggaaggccatctgaccctgtgacaggcatagctcataaacta

SEQ ID NO: 552167 - DNA, 201 bp, Homo sapiens
ccaaaaaaggtacagtcatgcgcacataatgacagtttggttagtgacagactgcgtatataacagtcccttaagattataatggaactgaaaaattcctrtagcccagtgatagtgtagctgtcatttcagtggtagcacaacatattacgtgttcgtggtgatgctggtgtaaacagaactactttgctgccagttgta

SEQ ID NO: 552168 - DNA, 201 bp, Homo sapiens
ctaggaggtctaattttgcaataacttggttccaaaagtttccatgtctgttgtttagtcctcagaaacaccttctccctacaggaagtgataggagtgcsagctggaatcccattcaacttcataaagcttatttcatctgtgatgcagctgaaaaatgacacttagctagctattgagtggtacatggcaataaggaaa

SEQ ID NO: 552169 - DNA, 201 bp, Homo sapiens
acacttagctagctattgagtggtacatggcaataaggaaatgtaaagagacctgggcagtgctttaggctgttttagggtgcagccagggtgttcatgtrtacaggtgctaggcagaaaggaagtgcttataacacaagagttaggggcacccttgtgcctgcagggtcgacaggcagggtcagtgtatgaggctttttg

SEQ ID NO: 552170 - DNA, 201 bp, Homo sapiens
tgttcacagaccattttttaattaatttgtatcaaaattcttcctataatacaagatacattttaaagattcagctccctctgcttttaacatgtcgttttcagcaaaactggatcaaaacaagctccgtgtactagcagccagcgaggaccactgggaccctcagcccagcatgggcacagtcagggaaggcagcgtact

SEQ ID NO: 552171 - DNA, 201 bp, Homo sapiens
ccaccatgcagacgctgaccaagcaggacaccatgctgaaggccatgttcagcgggcgcatggaagtgctcaccgacagtgaaggtaagctcacccaccaygtgcctgcctctggccatgcgttatgtggtcaaggagggcttccctgaagaagtgacatttaagtcgagacctgaagatgtgtaggaggcagcttgttgg

SEQ ID NO: 552172 - DNA, 201 bp, Homo sapiens
aattcacacatatcataaaagtcatctttctagagtgtacagttattattatattcacaatatgtggtttttatatattcacaagttgtgaggccataacsactatctaattttagaactttttcactgcctgaaaagaaaccctctattcgttagcagtcactccccattttccctcaaccattgcttccccaaccccac

SEQ ID NO: 552173 - DNA, 201 bp, Homo sapiens
attgttgtggtttttctcataccctacccactctctggaggggctcaggaaaggctgctgagttgcctcgaaagctgaggctcttctcctcgaaaggcctygccttggtggcctgatgccatatcaaaaaagaaacggactcctctgtccccctgtccccgactggacagagcatacgagtggtactggcaggactgctca

SEQ ID NO: 552174 - DNA, 201 bp, Homo sapiens
atagagtctcccttgggcagtgccattctgctcctcttggggctcggtgaggtgctctcctccacctggtgcctgtgcccagaggctgtcactcaagcacratggttaggagcactcaggcttaggggccagggctgtcttttggggggcgtgtctgccatttattaggttcagccttgagcaattacctaatttctctga

SEQ ID NO: 552175 - DNA, 201 bp, Homo sapiens
aggtgctctcctccacctggtgcctgtgcccagaggctgtcactcaagcacaatggttaggagcactcaggcttaggggccagggctgtcttttggggggygtgtctgccatttattaggttcagccttgagcaattacctaatttctctgatcctcactttccttcttgagtgatggagattggagtgcctttgtcatgg

SEQ ID NO: 552176 - DNA, 201 bp, Homo sapiens
tcttttgcagcaattctgacgacaatatgttgaaaaacattgaactgtttgataagctgtctctgcgctttaacggaagggtcctgttcataaaggatgtyattggggatgaaatctgctgctggtccttttatggtcagggccggaagattgctgaagtctgttgtacctccatcgtctatgccactgagaagaaacaga

SEQ ID NO: 552177 - DNA, 201 bp, Homo sapiens
taaaatgctttgcttgccttgtgattgctcatccttaaaatatttatcttttaggccctgcaaggagccaaatgtagggttcatctggcattcctttagckccctaccttgctggcttccttccaagcatgcttgactccctgactgggctggactctggggatgtgtttttatatcatcctctccaaaccagtaggcttg

SEQ ID NO: 552178 - DNA, 201 bp, Homo sapiens
catccttaaaatatttatcttttaggccctgcaaggagccaaatgtagggttcatctggcattcctttagctccctaccttgctggcttccttccaagcaygcttgactccctgactgggctggactctggggatgtgtttttatatcatcctctccaaaccagtaggcttgacctatcctttgacttctcccaccatgcc

SEQ ID NO: 552179 - DNA, 201 bp, Homo sapiens
cacagtgtagagtggccagcagtgaacaggttgaggatgtgcgggtagatagataactttgggtctggtttgtgtctgtgttcatgtttgtttaagggatrtgtgtgactgtgggtggggacgtgtgcttgtggggcacaggtggcccctgctggagcccggctgggcgcagcgcctatgtaggacgggtgttctcagtga

SEQ ID NO: 552180 - DNA, 201 bp, Homo sapiens
gacttctcccaccatgccgttccacaaagctggattgctctgcatagtgctgctagagatctggcccccccttaattgaatttgcctgcccttttggggcyctgcaattgggttttctgtctttttaaacttttaattcacattatacactctgtcatttctttaacgtgtctaagggaattctggctatccagtgacatg

SEQ ID NO: 552181 - DNA, 201 bp, Homo sapiens
agagtgactgaccctgatggggctgtggcatccaaatccacaaaatggaaataactatagctgtcttccagcattgtttgaatttgtaaaaggcatgtggkagaaatgcagtggtcaagggacaccgaggggctttctggaggcatggaaatgttccaagacagcttgattggagtgggggctacacaggtgcaagtattg

SEQ ID NO: 552182 - DNA, 201 bp, Homo sapiens
catcacaaagtagaaaccagagtcttttttttttttaacttattattgaaaattgaagccatacacagaattatagtgtggtgatttcccctgtgccatcrcgccacgtcaagggccatcagcttgggcactctcactcagtctgtatctactcctcctccccagcactcacaggatgaatttgacaacatattttattcc

SEQ ID NO: 552183 - DNA, 201 bp, Homo sapiens
ttacaggcatgagccactgcacccagcccatatcactctcctctcctgtctcatctccactctgttattgagccctgctggtaagttgtgtttttgtttgrggttgttggttattgtatttgtcagttctcaagtgctcatttggtttttctgtctccttgctgagactccctatgtttccatttgctctaagagcattgg

SEQ ID NO: 552184 - DNA, 201 bp, Homo sapiens
cctgctggtaagttgtgtttttgtttgaggttgttggttattgtatttgtcagttctcaagtgctcatttggtttttctgtctccttgctgagactccctrtgtttccatttgctctaagagcattggcccttacttactggaacaggttaataatagctgctgccaggtctttgtcaggtaattccaaaaccttgtgtca

SEQ ID NO: 552185 - DNA, 201 bp, Homo sapiens
gggaggccgaggcagatggatcacttgaggtcgggagttcgagaccagcctgaccaatgtggagaaatcccgtctgtactaaaaatacaaaattagccagkcgcggtggctcacacctgtaatccgagcactttgggatgccgaggcagaaggatcacctgaggtcaggagtttgagaccagcctgaccaacatggtgaaa

SEQ ID NO: 552186 - DNA, 201 bp, Homo sapiens
tgattgaatcagatccgtagccagtatctcaagtattcattgcctctctgtttcatgtaaccaattttgctgtctcctgcttcacctccccagcttcattrgtaatgaaatcaaacctttgaaacaagtcaaaaagcaggatcctggccaggcacggtggttcatgcctgtaatctcagcactttgggaggccgaggcaga

SEQ ID NO: 552187 - DNA, 201 bp, Homo sapiens
atgaaaaaggaactgtttcttgagaaaacatttctttccaggaggccgttctttctctgtttcactctgcagggccctgacatggcaggtgatatccaggmcactgttgggtgccatggagttggggagagttggccagaagagttggataaccttgaattgaatattgtccatgactgtcgcgttgcttctgctgttgca

SEQ ID NO: 552188 - DNA, 201 bp, Homo sapiens
gtgctaaagccctctggtgggggccctcgtgaaggcctgggctggtaggctgggtatctggccttccagctgttgtctgtgtctggcagagcgatcctgtyggtccttggagagagcactgcatagcctgacccatggcctgcatgttgcctcaaatgcacccttgggtctacaaactgggatagactccctgcatcctgc

SEQ ID NO: 552189 - DNA, 201 bp, Homo sapiens
agaaatgccaagtgcagctcagccaggcagtgaatccagcagtacagcttgctggttaaaggacaggggctttgaaggtcctgaacaggggatgtgtcatrttgcccaagaaagtgattgcttcaggagaggggacctggcatccagcatggggggaatagtctcctttttgctctgggcccttctacctgattgagtttt

SEQ ID NO: 552190 - DNA, 201 bp, Homo sapiens
gcaagtaactcctaaaccaagaagaacttggatgttgatgttagccaggcctgggttcaacacctggctctgctgcatgtcacagtcacagccgacatttrtggagctctgtctacatgttgtgctaattttggcctatttgccatttactggtcatgtgacattggacaagtggctttttctctgaacctctttcctcct

SEQ ID NO: 552191 - DNA, 201 bp, Homo sapiens
ccagaaatgatggaggttcttctgaataacttttgaaataaaaacatgtataattgcctgagtgaggcctgataatgggttcacagtgggaagctacaggkcatcttttgtgcccctgctattgggtcatgtggtccccctctccagccagcaagctatgcttgtctgcctcttctgatgcagggcagggccccagcccta

SEQ ID NO: 552192 - DNA, 201 bp, Homo sapiens
tgtgctaattttggcctatttgccatttactggtcatgtgacattggacaagtggctttttctctgaacctctttcctccttccccagttatgaatgatartgttttgcagagttggggattgagtgaggacatgagaaagcgcttgccacagggcctgagatgttgggagaactcagtaaatgggaactgtcaattatgg

SEQ ID NO: 552193 - DNA, 201 bp, Homo sapiens
ggtgtgtttttaaacgtgatgtaaatggtgctgtacagtttgtatgttttgcttttgcttacgtagcattatgcttgtgagatcaatccacaactaaatasctctcgttcagacattttccggtggtagagtgtccattctagaagcatacagccgctgccggagccatattctgttgatgatcatgtagagggtttgcgg

SEQ ID NO: 552194 - DNA, 201 bp, Homo sapiens
tgagatcaatccacaactaaatagctctcgttcagacattttccggtggtagagtgtccattctagaagcatacagccgctgccggagccatattctgttgatgatcatgtagagggtttgcggtgttcactgtgacgaatgtgaacatccttgaacgctttccccgtgcgtgggagtttctctgtgcgatgctgcccagc

SEQ ID NO: 552195 - DNA, 201 bp, Homo sapiens
ccggagccatattctgttgatgatcatgtagagggtttgcggtgttcactgtgacgaatgtgaacatccttgaacgctttccccgtgcgtgggagtttctytgtgcgatgctgcccagcctttgccacatcatggggcacgtagacaatcatattttcactttggcaaatgagggggctctggactccctagatcccaccc

SEQ ID NO: 552196 - DNA, 201 bp, Homo sapiens
tagcaatgtccagagacatttttgttgtttcttggggatgatggtgctcctggcgtcaagtgagtagaggccagggatgcaactaaataccctacaatgtrcggggcagcctcttacaactaagaattatctggtccaaaatgtcaaagtgctcaggttggagaccctgccctagggattctgatcaggaatgaggcaggt

SEQ ID NO: 552197 - DNA, 201 bp, Homo sapiens
tagactctgttggcctccctggccactagagaccttctggaggtcttctgtcctggtgccatttcagggtttcaggctgcatcagtgctggcagcagcaarcagtaaactcactgttgggcattactccaaattctgttgtttcccccatctgcctgccatgatttacttctgagtccacagttagctgctgtgtgcatcc

SEQ ID NO: 552198 - DNA, 201 bp, Homo sapiens
gtggcatttatgatcaggggtgtttgggaaccacaaaaatatagagtataaataccttaggatggcaaagagaggtcagtgaaggttccctggaggtggtrggagaggggaaaggagaggtcagacatccagggagagaggaagcacatggtatgctcacggggcggggaggaggggagcctagtggcccaatcctcctga

SEQ ID NO: 552199 - DNA, 201 bp, Homo sapiens
ggggctggaacttgctgcctctggacgctgctgctctgcttccagcaataatgatgaaagatgagattgttaaagacccatagctgcttttgagtgctgtyggtagacccagcattgtgctgtgtgccttctgtacgttctttcatcatatttttatgtcaaccctgtgagatcgtttgtagaagagaaaactgctagaca

SEQ ID NO: 552200 - DNA, 201 bp, Homo sapiens
tggatgtaaacaagagttaaattcctacagcatgttgctgggcacaaaaacatcacccaatttctaaataaagaccaaagcacttctcatattaaactgtgaaatacatgagctacacgtatatttaattaaatcaaaaataagaccatattacctaagttttggtgaatcggtaagtgatggtggtcacagtggtggccg

SEQ ID NO: 552201 - DNA, 201 bp, Homo sapiens
atggatgtaaacaagagttaaattcctacagcatgttgctgggcacaaaaacatcacccaatttctaaataaagaccaaagcacttctcatattaaactgtgaaatacatgagctacacgtatatttaattaaatcaaaaataagaccatattacctaagttttggtgaatcggtaagtgatggtggtcacagtggtggcc

SEQ ID NO: 552202 - DNA, 201 bp, Homo sapiens
tttccccttatgggtttatgcttttttttttaattcctctgcagtcatggtagtggggttttaggagcttttgattaaaacacgtttctgctgccacgtcragggtttatttttgagtggcttcctgggctgtggaaaatgtgtcatcattgttagtacttactcagcatcctggcctatcatggtcatagccaaagagca

SEQ ID NO: 552203 - DNA, 201 bp, Homo sapiens
ccgatgggtattgtttcatttaatcctcaccataacccttcgaggggtggatactgttgttgccattccaagtgaggagtccccatttcagaggtgaaatsctttttcaaaagctgatgggactagaaaaggtgaagctgctgaacccaggacttgctgcctcttactgtctgctgtccatggctagttgtgggcctggtc

SEQ ID NO: 552204 - DNA, 201 bp, Homo sapiens
cttcagagtgaaactcaagcctgggggagagagaggtatcttccctggacccttgtcctcccaagatggggtcttgacaaagacttgccaacctgggtttsagtctcagctccccattagtatctggtgatcctaaccaagtggccgaagcttttggtctcattttcttcctctggtgaaatgggcatgacaataccctcc

SEQ ID NO: 552205 - DNA, 201 bp, Homo sapiens
ataccccagctctgaccagttgttcccctgctagcccagttggcctctgattttaggagaagccagaagtccagatttttctgtgagctctccttagttgwccacattggaagcaaacttttaaatgctgtgtatgcgtggcccaagcaaaacacatctggaggccagattgaatccacaggctgaaagcagtcaaccagg

SEQ ID NO: 552206 - DNA, 201 bp, Homo sapiens
ggcctggtggaagagtgccaggcggccctacaagtaggcatcaccctttcttcccatatgggtggagaggcaccaagcctacctgccttcctcattttccytctctgcaaaatgggggcagtttctgtctgactgagatgttgtgagagttaatgagtttgccctggagcccgattccttcggttggagtgacccctgaga

SEQ ID NO: 552207 - DNA, 201 bp, Homo sapiens
cagtcgatgattttcccccttcagctgatttttgtattttcatgcatgcatacagttgcttcctccctgtggctctgaagctgtgaagtgggggctggctktggtttatggtgttttggtttgtttttaatgtgtcaggtcaggaattcactgggccaagaccgtggagttaatggtagcttaaataaggggtacagtgct

SEQ ID NO: 552208 - DNA, 201 bp, Homo sapiens
catttgctctaagagcattggcccttacttactggaacaggttaataatagctgctgccaggtctttgtcaggtaattccaaaaccttgtgtcaccttggygctagcatctgtgagttatttcccacaggagttgagaatttcttggttcttgtgtattgagaaattttgattgtatcctaaacattttgaatattgttaa

SEQ ID NO: 552209 - DNA, 201 bp, Homo sapiens
tgcctctgcttgggaatggcactgcacctctctgagcctctgttttatttgtggaaaatgcaagggaatgagctcccctcaaaaaagaactggtagaaagrtaatacggtctttccctgccttgtcagccttctgagaaaaaattacttggtgtagggtagcacagaggcctcaagctggtagcctgcaggcccagttcaa

SEQ ID NO: 552210 - DNA, 201 bp, Homo sapiens
ggcaattgacccagttgggctcaggctgcaagctctaaccagccttctgtagtttgtagttgcggtgacagtttgattttcaaagccttcaaatctgtccyagctgtgtgccatgctgtggcccgtctgtcctgggcagtatctcttgcagcattcagttctttcagtctgcgtatgcagtttaggggtagatcttgcagc

SEQ ID NO: 552211 - DNA, 201 bp, Homo sapiens
gttggataaccttgaattgaatattgtccatgactgtcgcgttgcttctgctgttgcaagctgcctccctttactcccagtcccatttacaaaaataacgyttgtgttttaccagttatagttgtagtacccattcattatagaaaatctggaaaagctagacaattctttttcagtttcagggaatagttcaaacaagtt

SEQ ID NO: 552212 - DNA, 201 bp, Homo sapiens
cagctctgtttctggttctttccccaactccagccccgtccagttgttctcctgattgacccgactccactccaggaaggccatctgaccctgtgacaggsatagctcataaactacccctccctgggatcccgctcctcttcagcctccttccccatgaagctgggctaactttctaagtcattttgcttagaaattcag

SEQ ID NO: 552213 - DNA, 201 bp, Homo sapiens
acacactcatctctacaaaaagttagttgggcatggtgatgcatgcctatagtctcaactacttggggaggctgaggtgggagaatcatttgagcctaggygttcaaggctgcagtgagctatgattgtgccactgcactccagcctgggtgacagagcaacactccctctcaaaacaaaaaagagaaaagaaagaggccc

SEQ ID NO: 552214 - DNA, 201 bp, Homo sapiens
ctggtgctcactgggaccccatatgtctgcgtaggagcagaactttccatggcagtaagtgtccagctctgtttctggttctttccccaactccagccccrtccagttgttctcctgattgacccgactccactccaggaaggccatctgaccctgtgacaggcatagctcataaactacccctccctgggatcccgctcc

SEQ ID NO: 552215 - DNA, 201 bp, Homo sapiens
tgagtccacagttagctgctgtgtgcatcccattctggctttgtagtgtcagtgaggaagacggggtagagtgtgcctgctccatttttcccagaacctcygaattccaccctgaaagtggagtctagtctgatcaaatgtgtgggacctgcttatgtggccctcttcctgttcatcacaccttaaccctgaagggcaatg

SEQ ID NO: 552216 - DNA, 201 bp, Homo sapiens
ccagctggaccctgtacaaaaaactgctttagagactgctttaaggtgtggaaggacttctgtgcaaggttgcagctctgttaggagaagcatattagcastgacctaaatggccatccaagtatggttaattgcattgtcgtatttataattccttgatacagaatgatctctaggttaagttaggcacaagaggaagac

SEQ ID NO: 552217 - DNA, 201 bp, Homo sapiens
atccccactgctttgctagacgtgctttctgccatgtggctttgggcctagagcttgttgataattgcagcttgtggcagtggaaatatggctgaatgagygtctaaatcgttgagaccagtgcaactttgggtgcaaggctttgtttagggatcaagccttttgccaccttgggctggtctttggcctggtgctcactgg

SEQ ID NO: 552218 - DNA, 201 bp, Homo sapiens
ccccagttaaagtgtgtctctgtaccttacaacagcgattcaggacccaagtgtgaacaacactcagcccgccctctggagcgtgtgctgtctttagggcyctacccaaagtcactgtaacagttaagtgtgtcattaacctttctgtctctttgcgccataaaaaaatgctcaaagttttagatgtagccactgtatgtt

SEQ ID NO: 552219 - DNA, 201 bp, Homo sapiens
cttctgttttctggctcttttcaggcatgcccggcataaccaggcccctaaaatcggtttacaacaaaggcagggcccccacgttctgcctcagccccttraagtcgctccaggtggaagggaaaagacagtcatgtttctgtagtgtttgtttgaattcaaacaccaaaaggaagtcttggggtcaaaggctgcctggct

SEQ ID NO: 552220 - DNA, 201 bp, Homo sapiens
tctcctgattgacccgactccactccaggaaggccatctgaccctgtgacaggcatagctcataaactacccctccctgggatcccgctcctcttcagccyccttccccatgaagctgggctaactttctaagtcattttgcttagaaattcagtgtggcccataccctttgtcctcccagcctggcatccaggcagggac

SEQ ID NO: 552221 - DNA, 201 bp, Homo sapiens
tgcttccagcaataatgatgaaagatgagattgttaaagacccatagctgcttttgagtgctgttggtagacccagcattgtgctgtgtgccttctgtacrttctttcatcatatttttatgtcaaccctgtgagatcgtttgtagaagagaaaactgctagacagaggttaattgaagcaccaatgtcatccagcaagaa

SEQ ID NO: 552222 - DNA, 201 bp, Homo sapiens
gcattcttgagccggagcccagtgtcacggtctgcctgttcatttatgggaactctgggctgtcatttggataattgatttcagggccctgggtcttcccmagcagctgagttctgcagacatcaaaggcagaacgtggaaggttccttccctgcgcagctgagttgaattctatttatcttttcaattctggtgaaagga

SEQ ID NO: 552223 - DNA, 201 bp, Homo sapiens
ctttctagagtgtacagttattattatattcacaatatgtggtttttatatattcacaagttgtgaggccataaccactatctaattttagaactttttcrctgcctgaaaagaaaccctctattcgttagcagtcactccccattttccctcaaccattgcttccccaaccccacagccctaggtaaccactaatctgtt

SEQ ID NO: 552224 - DNA, 201 bp, Homo sapiens
cctcaagctggtagcctgcaggcccagttcaactgcagatgtgttttgtttgccttgtggtgggttgatgacagttttgttttgttttaattagtttaccrtcctttaaaaatcagggaattcacagaaaaatctgggtttctggcattgcatggaacatcagagctcacagctcttgggcccacattcctgcctggccac

SEQ ID NO: 552225 - DNA, 201 bp, Homo sapiens
gatggacatttgggttgtttgcactttttggctattgtgtgtaatgctgttatgaacattcatgcaaagtctctatgtggacttacgttttcatttctctrggaacagaattgctgggtcatgtggtaattctatgtttaatcattcgaggacctgccaaactgttttctaaagtggctgcaccattttacattcccacca

SEQ ID NO: 552226 - DNA, 201 bp, Homo sapiens
tatggtgttttggtttgtttttaatgtgtcaggtcaggaattcactgggccaagaccgtggagttaatggtagcttaaataaggggtacagtgctttttaraatagtgggctctaatcttggtgggctttaaaatctcctgagggagttttaaaaattctgttgcctagtccacatcccggaccaattacatcagaatttt

SEQ ID NO: 552227 - DNA, 201 bp, Homo sapiens
gagtggctgttctgaaacacacacctatagaacttcctttcacttgagcccaatacagagggaaatgcttttaaaatgctttgcttgccttgtgattgctyatccttaaaatatttatcttttaggccctgcaaggagccaaatgtagggttcatctggcattcctttagctccctaccttgctggcttccttccaagcat

SEQ ID NO: 552228 - DNA, 201 bp, Homo sapiens
gaggcccctgttggatgtccttgtgtaagggatatttgagggtacttcagaagtgtacttttgggcctcaagagtcgggatgtctaacagagcctcagacyagggtcacctggggttatggttgtgtccagccagtagggcctggaggctgtgggggcttcctcagcccttagtgggcaggtaggcaggtgaggctgccat

SEQ ID NO: 552229 - DNA, 201 bp, Homo sapiens
ttgagggtacttcagaagtgtacttttgggcctcaagagtcgggatgtctaacagagcctcagaccagggtcacctggggttatggttgtgtccagccagyagggcctggaggctgtgggggcttcctcagcccttagtgggcaggtaggcaggtgaggctgccattctccaggcagtcccgctctccgctgggaggtaga

SEQ ID NO: 552230 - DNA, 201 bp, Homo sapiens
gtgatgtgctgtgaaaaactgttgatgttcaatgggaatggtagggccagccgtgggggctaccccagattcagcaaagattctgcccacccttgcacatytccacctctacagttttacctgttcatttcagacatgtttgctctgagtacacatgtgccggataccaatctcactttccaggcctgcgtaaatcagcca

SEQ ID NO: 552231 - DNA, 201 bp, Homo sapiens
tttaacttatattctcatctaaaacggcttacttccctcccagagacggccactcaccactgttaattgtccatttttatttttatagacttgttcttccrgtccagtgtcgaaaactattgtgccttcttttcccggactaataaaaaactgtaaacttaaaatacacaaagtgacacattactgacatactgtattttc

SEQ ID NO: 552232 - DNA, 201 bp, Homo sapiens
cctctattcgttagcagtcactccccattttccctcaaccattgcttccccaaccccacagccctaggtaaccactaatctgttttctgtcttgatgaatktgcctgttctggacatttttatgtgaatggaattgcataatatatggccttttgtgaccagattccttcattcagcataatgagattacctaagaggttt

SEQ ID NO: 552233 - DNA, 201 bp, Homo sapiens
accagagcacccagaagaaacccagagacatggggagaacatacagactccacccagacagtggccctgcccaggaatcagatgtcttatcaacatataaygaaatgttatttgagaacttgctgtacacagtatttcatcatgtctcagggcagcttgacagaggtagagaatcttgcccaccctctaatgacacgttgg

SEQ ID NO: 552234 - DNA, 201 bp, Homo sapiens
tttgggaagtgtctcatgtcagcttctggttcactgacaaggatggttaagctttttttcttttctcattcagtgtttagatgtgtgtatctctatatcartttcttcctgtcttacagatgtagaattaggaatagagggcagaaatgaactattaatagcttatgattccagtcaatctacaggactgaaattggtaga

SEQ ID NO: 552235 - DNA, 201 bp, Homo sapiens
tgtgccttcttttcccggactaataaaaaactgtaaacttaaaatacacaaagtgacacattactgacatactgtattttcttctctcaacctttggtctrcagaagaaattcacttattaaattctactagtttcaagatcaaattcctgttttattacagtgttttattgcatatttgaggaaaggaagaatgctgttg

SEQ ID NO: 552236 - DNA, 201 bp, Homo sapiens
tcagccctcctctaaccaccccatctgaagtgaccttcccttaaacccacccagggttctccaccagggtgattctgccccaggggacaggtattgggggrtgggggacactacttgcaatctagtggatggaggccagggatctgctcaacatcctgcaaggcacaggtcagccccaacaacaacgaatgactgggccca

SEQ ID NO: 552237 - DNA, 201 bp, Homo sapiens
aaagtcaactgtccacccctttaaggaggaaggacccataactgacctcgctgccccccaccagtgttaaaatagatcagtctagtgatgctcaagtggayacgattcagaagcgagacgcaaagaggttaaacacgggtaaaccgcacgcaaaattctgatatcactgcaacacgtccgtggggtgggggtggcaagagt

SEQ ID NO: 552238 - DNA, 201 bp, Homo sapiens
tgaaaatgtgtaggtcagcccagcgtcgccatacgttgcctgcttcctgggcacactgtgccacttcccgaatacctggactctggccagtgctcctgtgmagaggaaacatggcagttcctttctacctgacccccatctagaaatccagatgccccccccaacccgcactgccatcaccagaaatccagtgccccacat

SEQ ID NO: 552239 - DNA, 201 bp, Homo sapiens
aaaaatgtttttattttttagtaagcaaaattttacgaaaagtcagattcacccgtggagccagaaccttctttctcacgggaagactgtggtaccagtgygtgttggtcgggtggttcatcattagtaagctcccgtgggccagcggcagcctgaccaccgccaccctcctggaggggcttttcccacgggaatccttat

SEQ ID NO: 552240 - DNA, 201 bp, Homo sapiens
gaaaagagaaaaactgttaaaaatgtttttattttttagtaagcaaaattttacgaaaagtcagattcacccgtggagccagaaccttctttctcacgggwagactgtggtaccagtgcgtgttggtcgggtggttcatcattagtaagctcccgtgggccagcggcagcctgaccaccgccaccctcctggaggggcttt

SEQ ID NO: 552241 - DNA, 201 bp, Homo sapiens
ccccgtcattccatgcaatttaaacccctcttcaatcatcattttggcttgccccaaattttctttttgttttgttttctttgagacagggtctccctgtrtcacccaggctggagtacagtagcacaatctcagcgcacttcaacctccacctcccgtgctccagcaatcctcccgcatcagcctcctgaatagctggga

SEQ ID NO: 552242 - DNA, 201 bp, Homo sapiens
gccaaacaggactgtgtaactgcagtccaggccctcagcccgaatgtgccgccagctagggcctgctgagtggcctccattccctggggcctctctcctgrgcctcttccttgtgctttctttgtctcctcccaacacagctggctcttctccagttggctcttgctcctcctgcttcctcaaaaggcccccttgagcccc

SEQ ID NO: 552243 - DNA, 201 bp, Homo sapiens
tcagtggcgaggccaagacagaaattgctcaagttctatccccagtgcaaaaatctgtttgtccaaggggtctcacagcaacattcctagtttcacatttycattttaaagtttaaaaccatgtcctagaaaggaaacagaagatgttaaagccggaagggaccctagggacaatctgatccagggtctcccacgtccacc

SEQ ID NO: 552244 - DNA, 201 bp, Homo sapiens
gtggtaccagtgcgtgttggtcgggtggttcatcattagtaagctcccgtgggccagcggcagcctgaccaccgccaccctcctggaggggcttttcccaygggaatccttatgccggaagacaaagtctctgcaggcaccgaaggagacagaggcaatggggctcccaggggccagttctctttcatcatctcggtgctc

SEQ ID NO: 552245 - DNA, 201 bp, Homo sapiens
ggactataggtatgcaccaccccacctagctaatttcttttcttttgcagaaacagtttcaccatgttacccaggctggtctcaaactcgggctcaagcamttcactctccttggcctcccaaagtgttgggattacaggcatgagtcaccacgcccggccagttcatgtgctttaaaactgaagacacccaaagccaaaa

SEQ ID NO: 552246 - DNA, 201 bp, Homo sapiens
agtttcaccatgttacccaggctggtctcaaactcgggctcaagcacttcactctccttggcctcccaaagtgttgggattacaggcatgagtcaccacgyccggccagttcatgtgctttaaaactgaagacacccaaagccaaaatcacgtcttactgtagttcccctggccagtctatgtaaacctttatcacatgat

SEQ ID NO: 552247 - DNA, 201 bp, Homo sapiens
gtccagtcaccccagagacgtgatcccggatgcgctctagaactgggatccagggctttggagacagcgtgaggcctgaaaatgtgtaggtcagcccagcrtcgccatacgttgcctgcttcctgggcacactgtgccacttcccgaatacctggactctggccagtgctcctgtgcagaggaaacatggcagttcctttc

SEQ ID NO: 552248 - DNA, 201 bp, Homo sapiens
agtgattttcctgcctcagccttccgactagctgggattacagatgtgcacaaccatgcccacctaatttttgtatttttagtagaggtgggatttcgccytgttggccaggctggtctcaaactcctgacctcaagtgatccgcccacctcggcctcccaaagtgctgggattacaggtgtgagccactgtgcctggcca

SEQ ID NO: 552249 - DNA, 201 bp, Homo sapiens
tgctccttcagaggagtgggagccagcctgcctggaagtgaatcctgcccctgccaactctgtgacctttcacatgtatccgctagtattgggcagcagtrctgtgtgataaaccagccccaatccagcagcttaaaccaacaacattgattctcatggatccgtggggctgctggggcagctctacttcatgctgcagct

SEQ ID NO: 552250 - DNA, 201 bp, Homo sapiens
tcccgggtgggcccagccccgggagccgggtgcttaccatcctggagcagatcccgtgcgtaccctgggagggaggggtgggggctcggggcagaggggaytgccagggtgaaggcccagagccgtgctggcgctgtgcaggaagtgaacgatctcaggagggtgtggctggaagagaaggtgtccctggtgggggctgaa

SEQ ID NO: 552251 - DNA, 201 bp, Homo sapiens
gatgcaggcatgggaagaattagagctatttttgcaaacaaccaattgcaaggattgcatgaatacattcttcctgtcaaatgtgaaaactggctgggcayggtgacccatccccgtaatcccagcgccttgggaattcgaagcaggaggattgcttgagcccaggaggttgaggctgcagtgaacagtgatcacgccatg

SEQ ID NO: 552252 - DNA, 201 bp, Homo sapiens
gcacgtgagtgggcttctggccctgtggcttcccctgcaccaagagatagaccaacctcccctttaacactcacactcctggggaccagatgtggcatccrggccacacaccccacgccctcctttgtttcatacatggggagactgaggctagggaaggaaaggatttgcccctcccctgcaggctcctcagcctaggaa

SEQ ID NO: 552253 - DNA, 201 bp, Homo sapiens
ggctggtcttgacctcctgacctcaagtgatctgcccactttggcctcctaaagtgcttggattacaggtgtgagccaccgcacctggcttgacacagcattttttttttttttttttgagacagagtcttgttctgttgcctaagctggagtgcagtggcacaatctcagctcactgtgacctctgcctcctgggttcaa

SEQ ID NO: 552254 - DNA, 201 bp, Homo sapiens
tgttcattttattatcatgcttcataacttagaatatgttatatattttttctgtgtatcagatagtacctagtgtaattttctttttcttttcttttttytttttttttttttttgagacagagtctcactctgtcacctagactggagtacagtggcgtgatcttggcttactgcaacctctgcctccctgggttcaaa

SEQ ID NO: 552255 - DNA, 201 bp, Homo sapiens
cctcctaaagtgcttggattacaggtgtgagccaccgcacctggcttgacacagcattttttttttttttttttgagacagagtcttgttctgttgcctargctggagtgcagtggcacaatctcagctcactgtgacctctgcctcctgggttcaagtgattctcctgcctcagcctcccaagtagctgggattataggc

SEQ ID NO: 552256 - DNA, 201 bp, Homo sapiens
tctgtccctgctctgctgctttcgcccctgctgaccctcgtcagggtcacccccgtcccaaggccaccggacttctaactccagcccctcctgggggcttygttctctgatctggggtctgagtcatctcctcctagagtgggtcacgaacctgatggggctcagaactgaccccctctctcccccgaggtgggtgggcac

SEQ ID NO: 552257 - DNA, 201 bp, Homo sapiens
cccattcatttattcattaccctgatggttggccttagggacacagctgagcagctgtctctactcagtgggaaacacagacagcgatagaagagaaatcagagtcagtgggagtgggaaggatcagcttcaaagccttgtcagcagggcccagacgctggatcaggctgtgctgggggatcctagggaacccggggtgca

SEQ ID NO: 552258 - DNA, 201 bp, Homo sapiens
ccattcatttattcattaccctgatggttggccttagggacacagctgagcagctgtctctactcagtgggaaacacagacagcgatagaagagaaatcagagtcagtgggagtgggaaggatcagcttcaaagccttgtcagcagggcccagacgctggatcaggctgtgctgggggatcctagggaacccggggtgcat

SEQ ID NO: 552259 - DNA, 201 bp, Homo sapiens
tacaggtgtgagccactatacccagctaattttttttttttttttgtaattttaatagagatggggtttcaccatgttggccaggctggtcttgaactccygacgtcaggtgatctgcccacctcagcctcccaaagtgctgggattacaggtgtgagctattgtgcctggccgaagagtagtctttaataagcacatcta

SEQ ID NO: 552260 - DNA, 201 bp, Homo sapiens
tggtatacagacagatacaaaaaaaaaggctctctccctgtctgatctcatgcagcctgccttggagacaagactctcccagtgctgtgtgcttggagagrggaaagcacacagccctggagtcagagacctgggtttcaattctgtctccacctcttattagctagctatggactcctctctgagcctcgattacctcat

SEQ ID NO: 552261 - DNA, 201 bp, Homo sapiens
ggagagaggaaagcacacagccctggagtcagagacctgggtttcaattctgtctccacctcttattagctagctatggactcctctctgagcctcgattrcctcatctgtgaaatggggtaatggtgtgagcagcgtttccctgggggatgtgatgcagcccacttggggcctcatgcactcagcatctctttattagca

SEQ ID NO: 552262 - DNA, 201 bp, Homo sapiens
tccatccatctacctatccatttatcatccatccactcacccatccaaccacccatccaaccattcagccatctccatctgtccattttctttcttcttcttttttttttgtttttgttttttctgagtgggagtttcactctattgcccaggctggagtgcaatggcataatctctgctcactgcaacctctgcttcctg

SEQ ID NO: 552263 - DNA, 201 bp, Homo sapiens
cggcggctctgagctggcaggattgattcctgcggcaagtggggaccaggctgcagcccagtgctgggtgccatgtaggagccaggggtgcagtggaggaygaggtggacgctgccccacctgccattcagagcccagactcgcccttcccctgctctggggacttggaccaccacaagggcgtgtttaaacatagacccc

SEQ ID NO: 552264 - DNA, 201 bp, Homo sapiens
acatcctgggcagtgggctggtgagtccctttctcatgtctcctctgttcctggggtgtttgtcacacggcggctctgagctggcaggattgattcctgcrgcaagtggggaccaggctgcagcccagtgctgggtgccatgtaggagccaggggtgcagtggaggatgaggtggacgctgccccacctgccattcagagc

SEQ ID NO: 552265 - DNA, 201 bp, Homo sapiens
ccatcccggaaaggctcagcccaagcccggccccgcccgccctcggccccgcccatggcagagcgcagtcacgtgacccgggctgcggggcgcagcattgygcggtcatggtgggccagatgtactgctaccccggcagccacctggcccgggcgctgacgcgggcgctggcgctggccctggtgctggccctgctggtcg

SEQ ID NO: 552266 - DNA, 201 bp, Homo sapiens
ctggccgctcagttactactggggctcgcggctgcacagcttttttggttttacgcagtttgtccgaggtctcctttgatccactgccagcttttatcacraggggatctgcatattgggccctgttataatcttcctcccatcatcacactcgccgggtctcctcaaactcctaccccctcagattcttttttttttttt

SEQ ID NO: 552267 - DNA, 201 bp, Homo sapiens
caccatgcccggctaatttttgtattattagtagagatggggtttcaccatgttggccaggctggtctcaaactcctgacttcaggtgatctgcccatctyggactttctggcttgttttcggcaccctctctcatcccctcctcttacgctcacatgcccctttccctttgagtttgccagcccttgaggctctgatgca

SEQ ID NO: 552268 - DNA, 201 bp, Homo sapiens
ttttttttttttttttgagacggagtctcgctgtgtcgcccaggctggagtgcaatggtgcgatctcagcttgctgcaacctctgcttcccgggttcaagygattcttgtgcctcagcctcccaagtagctgggattacaggcacgtgccaccacgccggctaattttttttttttttttttgagacggagtctcgctgtg

SEQ ID NO: 552269 - DNA, 201 bp, Homo sapiens
ttctttgaacaatcacaggagatgaatctataccatcaagaatgagaaaggaggacaggcgctgtagctcatgcctgtaatcccaatgttttgggagaccraggcaggaggatggcgaggggccaggatttcgagaccagcttgggcaatgtggtgaaaccctgtctctgcaaaaaaaaagtaaaaaattagctgggtgtg

SEQ ID NO: 552270 - DNA, 201 bp, Homo sapiens
acagcatgagcaaggactcaggtggccacaccagcagcctccgctctggggcagcctgggtggggggctctcagggaagagagcaccccagctgcccgccyttgcctcgcccaccccctaccccacagctcatctacatgcactggatgaacacggtggtgaattactgcggccccttcgagtatgaagtcggctactgcg

SEQ ID NO: 552271 - DNA, 201 bp, Homo sapiens
tgtttttggccctgcatagcagaatcaagaggacatgacagaactgttcaggcgaggaggggcaggagcgaggcccagcatggggagggggctttggcctytggaggcccctcctgggctgtgttgctcttgactatggtaaacatggaagtggagagaaggcttccttgattgtgctggatggaaagttcttccaggctc

SEQ ID NO: 552272 - DNA, 201 bp, Homo sapiens
gctgtatgagcatccggccagggaatgggttcctaaccactgcccgtctccggggcctcagtgccgaggccttggctgagcccacccttgctagaaggggyagctctcaccaggtgtgccctggaggaggccactggccgctcagttactactggggctcgcggctgcacagcttttttggttttacgcagtttgtccgag

SEQ ID NO: 552273 - DNA, 201 bp, Homo sapiens
actgtgcaaagcctgcaacccccagcccaatggggagaatgctatctccgcccgctccgacctcaacccggccaatggctcctaccccttccaggccctgygtcagcgctcccatgggggtatcgatgtgaaggtgctgcctcctccctagggcctgagctgtgggtgggggaagtcaccatcaccagctttggggaaggg

SEQ ID NO: 552274 - DNA, 201 bp, Homo sapiens
cctcgcctgttcccgggaccggcctcttgccgggtgggaacgcccgtttctctgggggtcagctactcccgaggctgcagcaccgccctgcgggccaagtmccctgtttgggagctggctactgcggcatccctcacctcatggggccagtcccttgccttcagccagtggtgacagtacttctgtccccaagaagccagt

SEQ ID NO: 552275 - DNA, 201 bp, Homo sapiens
ggaccggcctcttgccgggtgggaacgcccgtttctctgggggtcagctactcccgaggctgcagcaccgccctgcgggccaagtaccctgtttgggagckggctactgcggcatccctcacctcatggggccagtcccttgccttcagccagtggtgacagtacttctgtccccaagaagccagttccctaccaccgagg

SEQ ID NO: 552276 - DNA, 201 bp, Homo sapiens
gatgagtgcctgagcagagagctgaataatgaaggcagagtgacttaggtgaaggggtccgggccccaggcagaggaactgtcgggggtagtgtgcagtgkgaggggctcatcaagttgaaggctggcagctgttaacggggctgcctgtgaggattttggcccccgtcttagcctctccttcctgggatgactgatgttc

SEQ ID NO: 552277 - DNA, 201 bp, Homo sapiens
catctctcttctcggtctcagcggcatggtggtggtggctgacaagacctcggagctctaccagaagacctactgggccagctacaacataccgtgcgtgycttctcactccgctccccgtcaccctccagggcatccacctcactccttgcccagctccttcctaggcaatgtttttaaacccacagaacaaagaatccc

SEQ ID NO: 552278 - DNA, 201 bp, Homo sapiens
cagtggagcacctcgcccttcagcggcctgctgcacatgggccagccagacctctggaagttcgcgcctgtcaaggtttcatgggactgaagttctgtccstgctctgctgctttcgcccctgctgaccctcgtcagggtcacccccgtcccaaggccaccggacttctaactccagcccctcctgggggcttcgttctct

SEQ ID NO: 552279 - DNA, 201 bp, Homo sapiens
ttggctcattgcaacctccgcctcctgggttcaagtgatcttcctgcctcagcctccctagtagctgggattacaggtgtgagccactatacccagctaattttttttttttttttgtaattttaatagagatggggtttcaccatgttggccaggctggtcttgaactcctgacgtcaggtgatctgcccacctcagcct

SEQ ID NO: 552280 - DNA, 201 bp, Homo sapiens
gtttattgagcacctgtgttctgggtcctatttgggagccttgttaaccaccaagaccttcctaagccatattgtggtatacagacagatacaaaaaaaarggctctctccctgtctgatctcatgcagcctgccttggagacaagactctcccagtgctgtgtgcttggagagaggaaagcacacagccctggagtcaga

SEQ ID NO: 552281 - DNA, 201 bp, Homo sapiens
gcctcagcctccctagtagctgggattacaggtgtgagccactatacccagctaattttttttttttttttgtaattttaatagagatggggtttcaccaygttggccaggctggtcttgaactcctgacgtcaggtgatctgcccacctcagcctcccaaagtgctgggattacaggtgtgagctattgtgcctggccga

SEQ ID NO: 552282 - DNA, 201 bp, Homo sapiens
tgtgctggatggaaagttcttccaggctcagcccctctgctgtgtgaccttgggcaaatcccttcacctctctgagcatgttccctcatatcaaggtaggrccaaaagggtcatggaaattcactggggtcacagaaagcactgtttatttatttttatttgtattttattttttgagacacagtttcactccgttgccca

SEQ ID NO: 552283 - DNA, 201 bp, Homo sapiens
accgtgcctggctaatttttgtatttttagtggagacagggtttcaccatgttggccaggctagtctcaaactcctgagctcaggtgatctgcccgcctcrgcctcccaaagtattgggattacaggtgtgagccactgcacccagcctgaatgtcgtagttgtaagtaataatgtcctggtgtgactgcccctcccctcc

SEQ ID NO: 552284 - DNA, 201 bp, Homo sapiens
acctggctggggtggtggcatggaggccttccctgaggatgagtgcctgagcagagagctgaataatgaaggcagagtgacttaggtgaaggggtccgggycccaggcagaggaactgtcgggggtagtgtgcagtgggaggggctcatcaagttgaaggctggcagctgttaacggggctgcctgtgaggattttggccc

SEQ ID NO: 552285 - DNA, 201 bp, Homo sapiens
atcccagcactttgggaggcggaggtgggcggatcacttgaggtcaggagttagaccagcctagccaacatggagaaaccctgcctctactaaaaatacamaagttagccaggcgtgggggcacgtgcctgtaatcctagttactagggaggctgaagcacgaaaattgcttgaacttgggaggcggaggttgtagtgggc

SEQ ID NO: 552286 - DNA, 201 bp, Homo sapiens
tctttaaagagaaaaaagaaaaaatcacatttatggatacagctatcttttagctgttctcagctttttggtgggggtggtggtggtggtggttttttgtgtgtgtgtgtgtgtgtgtgtgtgtgtgtgtgtttttttttttttttttttttagataggctctctctctgttgcccaggctggagtgcagtggcacgatct

SEQ ID NO: 552287 - DNA, 201 bp, Homo sapiens
cctctttaaagagaaaaaagaaaaaatcacatttatggatacagctatcttttagctgttctcagctttttggtgggggtggtggtggtggtggttttttgtgtgtgtgtgtgtgtgtgtgtgtgtgtgtgtgtttttttttttttttttttttagataggctctctctctgttgcccaggctggagtgcagtggcacgat

SEQ ID NO: 552288 - DNA, 201 bp, Homo sapiens
agcactttgggaggccgaggcaggaggattgcttgagcccaggagtttgagaccagcctgggcaacatggtgagaccctatctctgcaaaaaatataaaaractagctgggcacggtggtgcgtgcctgtagttccagctactcagaagctgagacgggaggactgcttgagtccaggtgaggctacactgagctgtgatc

SEQ ID NO: 552289 - DNA, 201 bp, Homo sapiens
ctcagcttgctgcaacctctgcttcccgggttcaagtgattcttgtgcctcagcctcccaagtagctgggattacaggcacgtgccaccacgccggctaattttttttttttttttttgagacggagtctcgctgtgtcgcccaggttggagtgcaatggctcgatctcagctcactgaaacctccaccttccaggttcaa

SEQ ID NO: 552290 - DNA, 201 bp, Homo sapiens
tttttgagttggggtcttgctctgttgcccaggctggagtacagtggcacagtcatggctcactgtagccttgacttcccaggctcagattatcctcctgyctcagcctcccaagtatctggaactacaaatgtgtaccaccacactcagctaatttgtttatttttttatttttaagagatggagtctcactatgttgcc

SEQ ID NO: 552291 - DNA, 201 bp, Homo sapiens
gactcttcttcttgtctgatccttgcttttttctgagtgtggaacgaggcaagagagggccaggcggtgggtgagggaacccccatgctgtggcccaggtrgggaaggggactgaggcagctggggagggacacgtgaaatggttccacctggttaccaggaaagggtctgggcaggaaacttcccttccatcagggtccc

SEQ ID NO: 552292 - DNA, 201 bp, Homo sapiens
catctccatccctcctagccgacctgccactcatccatctgcccagtctccatctgtccacttgctggaactccagccatccatcctagcctacctacagytaaataatgaccaaaaacaaatagtcagttgttagcatggtgttttgcttgtgtacatatggtgttttgcttgcatacaagggaggttgcttggtagatt

SEQ ID NO: 552293 - DNA, 201 bp, Homo sapiens
cagtggtgaatgagacacggttcagtctctcaaggggctcacggcctgctggggacactgaggcaaggccacaagtggctcttatgtcaggaatcccaggyccatgtgccaggcactttgcccacaaagtctcactgagcctccaccctaaacccctgagggaagcatgtgcacctcccctggatggatgggcaggcttgg

SEQ ID NO: 552294 - DNA, 201 bp, Homo sapiens
gagcagtggaaatgggtgaatctgagatgcctggaggcgagggggaaagagcacatcacagaggacaacgtccagtgggacacccttttataaaactcacrctgctccttctgacacccagtcgcagttgtgggtggccctctgggaccttagtgtctggggaagtggtcagatgctgggccagggctgttgtgggtgctc

SEQ ID NO: 552295 - DNA, 201 bp, Homo sapiens
ttgaggggttgttcatcccccagctcatggcgtttatcttccatttgccagacccatcagccacaccccgtcttactgtgatgagtcgctgtttggctccygatctgaaggcgccagcttcggggccccgcggatggcgaagggggatgccgcaaagctccgtgctctcttgtggacgccaccacctacccccaggggtag

SEQ ID NO: 552296 - DNA, 201 bp, Homo sapiens
tctccagccctgtctcaaccatactccaaattagtgccaacccaggggcctggcacctcccacatcatccattgtcttgctgccaagtgcgaataaacggygtgattgccaacctggagggtcccctcttatcccttcaagccaagcttcctgctcaggattagtttccagctaagtctgcaagccctagaggagtttttc

SEQ ID NO: 552297 - DNA, 201 bp, Homo sapiens
tcggcttctggctaatgccactaacttgtggttggccggctcttccttagctcagagtacagacaatagtatttttttagttttgtttttaagtttgtttktgtgtgtgtgtgtgtgtgtgtgtgtgtgttaaggtgggaaataaaacacaatggctaggactttgccaagtggagggtccaagaaagccagacagtgaca

SEQ ID NO: 552298 - DNA, 201 bp, Homo sapiens
gacccatcagccacaccccgtcttactgtgatgagtcgctgtttggctcccgatctgaaggcgccagcttcggggccccgcggatggcgaagggggatgcygcaaagctccgtgctctcttgtggacgccaccacctacccccaggggtagccactcgccccgccccagggaggcaccactgcgagccattcacccagctg

SEQ ID NO: 552299 - DNA, 201 bp, Homo sapiens
gcatttcagtgccatctaccccacgacgaggtggggccacccagaaaccaaagcccccttggaaatgatactctttcatcagggttgcctatggggccacrgcgacaggtatggccccttgccagggtaggaggacattcatcacccagggaaccccaggtattaaagaagcccctgtgggggcagacagacatagcaggg

SEQ ID NO: 552300 - DNA, 201 bp, Homo sapiens
tggactcagatttcacttccaccgttttagctttataggtgtgacctacacatgtgacttcacctcagttttgtgatccgtaaaatggacaaattcgaagmtacttcacagtgctgttgagaggattaaatgaaacaatgcttgtaaagctctttgcaggaggtaggcatgggatccacgctggctgtcattgcccccacc

SEQ ID NO: 552301 - DNA, 201 bp, Homo sapiens
ccagggctcgctcagttagcatttcagtgccatctaccccacgacgaggtggggccacccagaaaccaaagcccccttggaaatgatactctttcatcagrgttgcctatggggccacggcgacaggtatggccccttgccagggtaggaggacattcatcacccagggaaccccaggtattaaagaagcccctgtggggg

SEQ ID NO: 552302 - DNA, 201 bp, Homo sapiens
gggttacactcttcacgccccctgaagcggggactttcccattccctcacccacctgaatgtccccagcactggtcatccagccaccagtgccccccacamaaatgggcctcaggatctcaggccttccacgtcaggggtgaccttccggagccccctggtgacttccagggctcgctcagttagcatttcagtgccatct

SEQ ID NO: 552303 - DNA, 201 bp, Homo sapiens
acacacccctgatgtctcttcctctcataaggacaccagttctattggattaggatcccctacccttataatgttatttagccttagttaccttttttttkttttttttttttttttttttttttttttttttgagatggagtctggctctgtcgcccaggctggagtgcagtggcaccatctcggatcactgcagcctcc

SEQ ID NO: 552304 - DNA, 201 bp, Homo sapiens
atttcagtgccatctaccccacgacgaggtggggccacccagaaaccaaagcccccttggaaatgatactctttcatcagggttgcctatggggccacggygacaggtatggccccttgccagggtaggaggacattcatcacccagggaaccccaggtattaaagaagcccctgtgggggcagacagacatagcaggggt

SEQ ID NO: 552305 - DNA, 201 bp, Homo sapiens
tttcaaagacttgcagtttggggatagaagcactttcagtcctggccaaaaaaactatgggcgtggaatcttgcaggtatgccgtgaatatctgttgaataaaaaaaaaaaaaaaaaaaaaggccagacaggctgactcaggcctgtagtcccagcactttgggaggctgaggtgggaggatcgcttgagctccagagttt

SEQ ID NO: 552306 - DNA, 201 bp, Homo sapiens
tgcaaagtgctgggttctgggtttctggattcgcgggccgttcacacgtagcctgtgccggctcctcgggtgagtccgtccgcgcgcggtgccccgggackgcctaggctgccgggggtccggggccccaggcattccgggctgcagattgacggggatcccggatgcaccgcgcgcccccgcgccctcaccgacgggtcc

SEQ ID NO: 552307 - DNA, 201 bp, Homo sapiens
taaggaagccataggggtcctttgcagcccattccacaacatactcagcccaagcctttatatcaaacatcttcacagcagtcttatgaaaactggggctrggggaggcgggtggagaacacagaggaaaaaaacaggagaaaagactatgtggttaatcaaattttgaaaaagtttcctcacacaaccagttaactcagg

SEQ ID NO: 552308 - DNA, 201 bp, Homo sapiens
agtattttactaagttacttatttcaataataaaatttttttagttcattgacatacgggagacaagttggctcactgactgacttacacagcgtatccgytcctagattttcaatttttatactaaaaatgttgccactcatttatttactggattaggtacaccactacaaaatcaaacagctcatcttactctttata

SEQ ID NO: 552309 - DNA, 201 bp, Homo sapiens
ctgctagacaattttttgtaatttaaaattcattaatgggtacagaaaacattaataagctgacagtgaattaaatactaacagtgaataaaattattggmccatgcatttataaaagccatgtttaatagtaaaacgttccagttctactaaactgaaagaaacatcctttagctccctacttccaattacagcacattc

SEQ ID NO: 552310 - DNA, 201 bp, Homo sapiens
catttttaaactgtagctgctagacaattttttgtaatttaaaattcattaatgggtacagaaaacattaataagctgacagtgaattaaatactaacagkgaataaaattattggaccatgcatttataaaagccatgtttaatagtaaaacgttccagttctactaaactgaaagaaacatcctttagctccctacttc

SEQ ID NO: 552311 - DNA, 201 bp, Homo sapiens
gccagaatagtgacacttcaaagaggtaaagttatagaagatttaaaaaagccatgtgactctgtcataaggactatgcattctcacatgcctcctatatycaagacaaactttatttaggaggaggcttttataaaaatcttgagttttctgtggtcattccaggaaacagctgaatacagtttgtcattttttgacata

SEQ ID NO: 552312 - DNA, 201 bp, Homo sapiens
aatttccaagacagtacagcacttgctaggaacagtggagtaagggccaaaataacggttgtaaggaagccataggggtcctttgcagcccattccacaayatactcagcccaagcctttatatcaaacatcttcacagcagtcttatgaaaactggggctgggggaggcgggtggagaacacagaggaaaaaaacaggag

SEQ ID NO: 552313 - DNA, 201 bp, Homo sapiens
agttttaattatatcttccccacgattttcaactgaacacacatgaaagtgcctaatacgttaaatatcttagctcctggacttcatacgacctcacccayacagttagaattaggtactactgagatcgatctgccttcaccttctccagcccagtagcgaataaacaatgtaagtttcagaaataagcaaaagaacttt

SEQ ID NO: 552314 - DNA, 201 bp, Homo sapiens
agtactattgtaataaggactagtatctctggttaggaaaaagtaattcatctagtacagccagaatagtgacacttcaaagaggtaaagttatagaagawttaaaaaagccatgtgactctgtcataaggactatgcattctcacatgcctcctatattcaagacaaactttatttaggaggaggcttttataaaaatct

SEQ ID NO: 552315 - DNA, 201 bp, Homo sapiens
aaacaaattatagtaattcacccacagtcccattaccccaagaaaactgtgactagttttaattatatcttccccacgattttcaactgaacacacatgaragtgcctaatacgttaaatatcttagctcctggacttcatacgacctcacccatacagttagaattaggtactactgagatcgatctgccttcaccttct

SEQ ID NO: 552316 - DNA, 201 bp, Homo sapiens
actaaaaatgttgccactcatttatttactggattaggtacaccactacaaaatcaaacagctcatcttactctttataaaggtttttttgggtccatcayacaatttgtgtcctttacttaaaaaattagaagacataaccaaacaaattatagtaattcacccacagtcccattaccccaagaaaactgtgactagttt

SEQ ID NO: 552317 - DNA, 201 bp, Homo sapiens
cattaccccaagaaaactgtgactagttttaattatatcttccccacgattttcaactgaacacacatgaaagtgcctaatacgttaaatatcttagctcstggacttcatacgacctcacccatacagttagaattaggtactactgagatcgatctgccttcaccttctccagcccagtagcgaataaacaatgtaagt

SEQ ID NO: 552318 - DNA, 201 bp, Homo sapiens
gattttcaatttttatactaaaaatgttgccactcatttatttactggattaggtacaccactacaaaatcaaacagctcatcttactctttataaaggtktttttgggtccatcatacaatttgtgtcctttacttaaaaaattagaagacataaccaaacaaattatagtaattcacccacagtcccattaccccaaga

SEQ ID NO: 552319 - DNA, 201 bp, Homo sapiens
agggtcctgggagatcctgggttggcccagccacaccttgcgccgccgccgtttctgctggacaccaggagaaaaccacggcagctgcagccaccaacttyccctacatagccccacgggatcggatcccactccccactcaccgccagaccggaagcaggaaggcggaagtcgcggcctttgcgtcccgcccacaggcga

SEQ ID NO: 552320 - DNA, 201 bp, Homo sapiens
gctcactcttccctccttaccctatcggggctgcagacccacggaggccacgttcactcctgcccgtcggccttggcaagcgcgggccccttgtcgcgcasagcggagggtcctgggagatcctgggttggcccagccacaccttgcgccgccgccgtttctgctggacaccaggagaaaaccacggcagctgcagccacc

SEQ ID NO: 552321 - DNA, 201 bp, Homo sapiens
agtaaaagagccatggtccacaggccacacatctccctgcaactcaacttcggacccaaacgctcgcgcctccacactttcaggaataaatcctactcttycgcccaaaacggatcgaccaggctcgatctcccaaccagacccgcgtggcccctgcggctgcaacgggtagcacttgacggccgtccgcacttcctcctt

SEQ ID NO: 552322 - DNA, 201 bp, Homo sapiens
ccaaaacggatcgaccaggctcgatctcccaaccagacccgcgtggcccctgcggctgcaacgggtagcacttgacggccgtccgcacttcctcctttgtstttcccttattccttacgtttctcccttgctcactcttccctccttaccctatcggggctgcagacccacggaggccacgttcactcctgcccgtcggcc

SEQ ID NO: 552323 - DNA, 201 bp, Homo sapiens
actgagatcgatctgccttcaccttctccagcccagtagcgaataaacaatgtaagtttcagaaataagcaaaagaactttgcagtaaaagagccatggtscacaggccacacatctccctgcaactcaacttcggacccaaacgctcgcgcctccacactttcaggaataaatcctactcttccgcccaaaacggatcga

SEQ ID NO: 552324 - DNA, 201 bp, Homo sapiens
attatagtaattcacccacagtcccattaccccaagaaaactgtgactagttttaattatatcttccccacgattttcaactgaacacacatgaaagtgcmtaatacgttaaatatcttagctcctggacttcatacgacctcacccatacagttagaattaggtactactgagatcgatctgccttcaccttctccagcc

SEQ ID NO: 552325 - DNA, 201 bp, Homo sapiens
tactgagatcgatctgccttcaccttctccagcccagtagcgaataaacaatgtaagtttcagaaataagcaaaagaactttgcagtaaaagagccatggkccacaggccacacatctccctgcaactcaacttcggacccaaacgctcgcgcctccacactttcaggaataaatcctactcttccgcccaaaacggatcg

SEQ ID NO: 552326 - DNA, 201 bp, Homo sapiens
gcttttgcaatgttttcttggcgtttttgcttcttcttttgctccttctccctggcctcaatcatcttggccaatttccaagacagtacagcacttgctargaacagtggagtaagggccaaaataacggttgtaaggaagccataggggtcctttgcagcccattccacaacatactcagcccaagcctttatatcaaac

SEQ ID NO: 552327 - DNA, 201 bp, Homo sapiens
taagtttccctctttggaacacttgaattgctgtcattaggaaacaggtacatcatccacttaagtaaaaagcgttttaaaaaactaaattttaaggcatycaaactttatttaatcacttgtactggaaaacttgtgacagggttacattttgccttgacttcttaaatgaaggacaccatatagaacttattttttgtt

SEQ ID NO: 552328 - DNA, 201 bp, Homo sapiens
tacttgggaggttgaggcaggagaatcagttgaacctgggaggcggaggttgccgtgggccaagactgcaccattgcactccagcctgggcaacaaaagcraaattccatctcaaaacaaacaaacaaacaaacaaaaaaaccattttataactagttgtttttcaatgaaacaaagattctaatcattttactctatgaa

SEQ ID NO: 552329 - DNA, 201 bp, Homo sapiens
ctctgtatcttactatattcagtggtataagaaatataacacaacacacctcatagagttctgaggattaaatgacctaatatatgttaagtgtttagaakagtaactagtaacataatcaatgctatagaaacattagttgctgctgctactaacattgctatcaaagaccttttcttcctgaaagggccagaaaccaca

SEQ ID NO: 552330 - DNA, 201 bp, Homo sapiens
gagtgcaatgtgctgccaaaatgttcacggagattttaattttggttatcatttttcttttctaaaagtcccatttggtactccttaaatctgctatgtcmctttttatagtttactgttctctgcaattattgttcatgtttattttgttaaatacagtaagcatatttactttatatctgtgcttgaaaactacgccaa

SEQ ID NO: 552331 - DNA, 201 bp, Homo sapiens
tcttattttttaaaacttattgaagacatacaacttgttgcacaacttttatacagaatttaacagataaagtgaacacccaggcaacctccacacacaasccacacgaaagcacggccagcatcctggaagtccccattcatccttccctgatcataaacccctcccttctccaaaagcttcttatggttatcattttcc

SEQ ID NO: 552332 - DNA, 201 bp, Homo sapiens
ttgtgatccacctgcctcggcctcccaaagtgctgggattacaggcgtgagccaccgcacccagccgtgttctatatttttaaatgtttgtgattttaaaraaaaaccacatgtaagataatagtcttatattactatttaagttcttttagaaatatttctttgacacatttcagaaagcaagcagggcaattcaaaagc

SEQ ID NO: 552333 - DNA, 201 bp, Homo sapiens
gaccttgtgatccacctgcctcggcctcccaaagtgctgggattacaggcgtgagccaccgcacccagccgtgttctatatttttaaatgtttgtgatttwaaagaaaaaccacatgtaagataatagtcttatattactatttaagttcttttagaaatatttctttgacacatttcagaaagcaagcagggcaattcaa

SEQ ID NO: 552334 - DNA, 201 bp, Homo sapiens
ggaagacagtgtggcgattcctcatgaatctagaaacagaaataccattcgacccagccatcccattactgggtatacacccaaaggattataaatctttytactataaagacacatgcgcacatatgtttactgcggcactattcacaatagcaaagacttggaaccaacccaaatccctgtcaataatagattggataa

SEQ ID NO: 552335 - DNA, 201 bp, Homo sapiens
ctgttgagtgcaatgtgctgccaaaatgttcacggagattttaattttggttatcatttttcttttctaaaagtcccatttggtactccttaaatctgctrtgtccctttttatagtttactgttctctgcaattattgttcatgtttattttgttaaatacagtaagcatatttactttatatctgtgcttgaaaactac

SEQ ID NO: 552336 - DNA, 201 bp, Homo sapiens
catagcgaagtgttctcaaggttcttccacaatgtactactgtgtcaagatttcttcctttctaaagctgaatataaaccacattttgttcatccattctwctcatgctggacacttgagtcttttctacagattttaaatccctgacttaaccaataaaaggtttgaatcacaaacttaatttccaggtaaagagcaatg

SEQ ID NO: 552337 - DNA, 201 bp, Homo sapiens
cttcagcagatcccaagtgaattcattatcatctctcaaaaatgcattcttctttttcaagtactctggtcaatgacaggaccagctccaaaaagctaaamcccccaaatgtccatgttctaatcccttgaatttgtgaatgatacctttatggctttgcagatgtgatgaaatatcttggaatggggagattatcccaga

SEQ ID NO: 552338 - DNA, 201 bp, Homo sapiens
aatgtgttcgccatcttgcaaattcaatgtctgaaaacaaactcaaattattacccaactaacataccactacagaatttcttaatctgttaatcatggayaccttcaattgctcagtcacccatagcttaaaatctagtactcatttttgattctccatgccccatccctcacctcccatcaaaactgggtatcatccat

SEQ ID NO: 552339 - DNA, 201 bp, Homo sapiens
tttgtgaccgaatgtcatgaaaggtctgccttctctgctctgcagtgcctcctgtgttgtatgtcatgtataaatacataggtctgttttcgggttttctrttagttccatctgcttatctgtccttgtattaatgccaatctttagttactgtagctttataataaatcttgctatcaagtagagaaagttctctgccct

SEQ ID NO: 552340 - DNA, 201 bp, Homo sapiens
ataatattagtgaaaaaattaatttaacactcaatgtggccttcaagcataatacaaatctaatgtatttttttaatttttaaaggcacacatacaatcaytattttaaatcctatggcttggaatatttctagctcattgcttaaaatggggtgaagtatttctactataaagaacaaagaaaaactaatgtaactttta

SEQ ID NO: 552341 - DNA, 201 bp, Homo sapiens
ttctacatcaagagaagataaattaatgtacattgaataactcccaccaagtgtcactatctcactctggactcacaaactctggtaaaaggattttttawatccagttataggccgggcacggtaactcacacctgtaatcccagtactttgtggggccgagatgggtggatctcttgaggccaggagtttgagaccagc

SEQ ID NO: 552342 - DNA, 201 bp, Homo sapiens
agtacggtagaaagtacacgaaagtacatctatactggaattatatttgggttgaaatctaaactatcttactagttgtgtgccctaaggcaagttgtaaytcttcgtatcactaagtttgtcacttctataaaattcaagtaataatatctgcatcattaggttgttctgagaattaaataattacaaatgcaaaaatgc

SEQ ID NO: 552343 - DNA, 201 bp, Homo sapiens
gtatctacaaattccttgccaaatacaaagtcatgaagatttactaatatctttttttttttttcaaggagttttaaagtttcaggcctttaacctatttkgagttattttttgtatatggtcccacctcgttcttttgcatgtagctatttagttgtcccagtaccatctgttaaaaagcgtattcttttaccactgaaa

SEQ ID NO: 552344 - DNA, 201 bp, Homo sapiens
actcctgcgcaagaagatcaagaagcagaaactcaaactgcggcaccagaacctaaagttgcaggggcctcaaatctgaccctgtcagaaactcaaaatgsagatgtgtctgaagaaacaatgagaggtagaagggttaaaaaatgaaaacattctatgaatgtgggcttatcagaagctccaaatggagacatgtctcaa

SEQ ID NO: 552345 - DNA, 201 bp, Homo sapiens
aacacatgccgaaatatttgaggattacagtgtttgcagcttactttcaaataattacacacatacagagaaagacaggaaacaatatggcaaaaatgctwatcactgagttggttattcattgcattgattagcatttttattcattgcatgaataaccgatcacaattgtatagaacgaacctctatacgactaaaatt

SEQ ID NO: 552346 - DNA, 201 bp, Homo sapiens
ggtggcatgggcctgtagtcccagctattcgggacgctgatgtggaaggatcacttgagcctgggaggtggaggttgcagtgagccgagactgcaccactrcactccacccttggtgacagagtaagaccccgtctaaaaaaatataagtcacagactattctaacttgagaagacaaaatgatcaatttgagactgttcc

SEQ ID NO: 552347 - DNA, 201 bp, Homo sapiens
aggatctcttgaacccggtgagcccaggagatcgaggccataatgagccacgatcacaccactgcactccagcctaggcgacagagggagaccctgtctcaaaaaaaaaaaaaaaagtaataataatcattagtttatagttaatacttacatagtacccaatatgtgccaagtattgttctaagtacgctttacatatta

SEQ ID NO: 552348 - DNA, 201 bp, Homo sapiens
acactgctccctcttaaaacttcatttgagatcacataattatgaatttatatcaaatttggtccaacccaaacaaaatgtgttatctccactgatcacayatccaaatgcctttttatctgtacatagcatatttatgccagttttgttgtagatggagtcacctgggcgcagtggctcacgtctgtaattccagcactt

SEQ ID NO: 552349 - DNA, 201 bp, Homo sapiens
aaatatctgcatgtttttgtttttatccctttaatgtagactccttactacctaccactaagataaaatccaagcttacttggcctacttgtggcagacaytgctagttgcatactcaatatccattttgctctaattttgttcaaggcatttaggtacccaactaatatacattatcttcccagattcccttgcagctag

SEQ ID NO: 552350 - DNA, 201 bp, Homo sapiens
gacagggtttcactgtgttagccaggatggtctcgatatcctgaccttgtgatccacctgcctcggcctcccaaagtgctgggattacaggcgtgagccamcgcacccagccgtgttctatatttttaaatgtttgtgattttaaagaaaaaccacatgtaagataatagtcttatattactatttaagttcttttagaaa

SEQ ID NO: 552351 - DNA, 201 bp, Homo sapiens
aactaccatttgatccagcaatcccactactgggtatctacccaaaagaaaagaagtcattatgtgaaaaagacacatgtacacacacttacagcagcacrattcacaattgcaaaaatatagaaccaacctaaacgcccatcaaacaacgagcagataaagaaaacgtggtatatttacaccatgaaaactgaatgaaat

SEQ ID NO: 552352 - DNA, 201 bp, Homo sapiens
tgggaatctcacttatcttttctactgcttttgaaatgacactgcttgatcatcatccaagcacaatttacacagaagtgaccttgataatttactctcamaactggattcccaccaccttccactgattttcatacggcactaactacatttaatagatgctaaaatgctattgattcatatgattgccattattctcta

SEQ ID NO: 552353 - DNA, 201 bp, Homo sapiens
gtttaacattttaatttaattaatccttttctcattgttatggctttttggtcttgtttttaaaaaatctttccctgtctgaaattatcttatgaaaagtmtcatgttttgtgccttatgttttttctttaacccattggagttgactttgtgaccgaatgtcatgaaaggtctgccttctctgctctgcagtgcctcctg

SEQ ID NO: 552354 - DNA, 201 bp, Homo sapiens
tgcagcggggtggtcttggctcactgcaacctctgcctcccgggttcaagcaattctcctgcctcagcctcccgagtagctgggattacaggcacccgccmtcatgcctggctaagttttgtatttttgtagagatggggtttcaccatgttggccaggctggtcttgaactcctgacctcaggtgataggcctgcctagg

SEQ ID NO: 552355 - DNA, 201 bp, Homo sapiens
taccaggccaatatacctgatgaacattgatgtgaaagtcctcaataaaatactgacaaactgaatccagcagaatatcaaaaagcttatccaccaggatygagttggcttcatccctggaacgcaaggctggttcaacacacgcagatcaataaacgtaatccatcacgtaaaacagaaccaatgacaaaaaccacgatt

SEQ ID NO: 552356 - DNA, 201 bp, Homo sapiens
cacaaggtcaggagatccagaccatcctggctaacacggtgaaaccccatctctactaaaagtacaaaaaattagccgggcgtggtggcgggtgcctgtartcccagctactcgggaggctgaggcaggagaatggcgtgaacatgggaggcagagcttgcagtgagccaagattgcgccactgcactccagcctgggcga

SEQ ID NO: 552357 - DNA, 201 bp, Homo sapiens
tgactacaggtgcatgccaccacacttggctaatttttgtatttttagtagagacagggtttcactatattggtcaggctggtctcgagctcctgaccttmggtgagccacccgcctccgcctcccaaagtactgggattacaggcatgagccaccgtgcgcaaccctgtaataccatatttttactgcaccttttctagg

SEQ ID NO: 552358 - DNA, 201 bp, Homo sapiens
ttgggaggctgaggtgggtggatcacttgaagtcaggagtttgagaccaacctggcccacatggtgaaactccatctctactaaaaatacaaatattagcygggtgtggtggtgtgtgcctgcagtcccagctacttgggaggctgaggcaggagaattgcttgaacccaggaggcagaggttgtagtaagctgagatcat

SEQ ID NO: 552359 - DNA, 201 bp, Homo sapiens
ggagggacatccgccattactgaggcttgagtagttggttttcccctgacagcgctaaaaaggcctggaagttccaactgggcagaactcaacacagtgtkgcacagtggctatggccagactgcctctttagattcctcttcattgggcagggcatctctgaaagaaagacagcagccccagtcagggcttatagataaa

SEQ ID NO: 552360 - DNA, 201 bp, Homo sapiens
aaatgtgaaatgccctttatacatttatgtggaaatatcaagcagggagggagttatgggtatacagatcagactttggcagatgtttttcacagcagtcygtacagcacacattctgactttgcacaccatacagtctgtttcaaccactcaactctgccatccacaaacaatatgtcagcaaatgagcctggttgtgtt

SEQ ID NO: 552361 - DNA, 201 bp, Homo sapiens
cataagaaaaaaattaaaaattaaaaaaataaataaaagtgtgcattgaaaaattgctgaataaatgttcttgatttacggtgcttatttttgggataagygtattattcttttatgttcaatcacattattattaaaagcttaattgcaaatgataaacaaaacatataaattagtattttaagagtgtaacatacacaa

SEQ ID NO: 552362 - DNA, 201 bp, Homo sapiens
ctgccagcacagcagtctgaagttgacctgggacgatcaagcttggtcgggggagggacatccgccattactgaggcttgagtagttggttttcccctgayagcgctaaaaaggcctggaagttccaactgggcagaactcaacacagtgtggcacagtggctatggccagactgcctctttagattcctcttcattgggc

SEQ ID NO: 552363 - DNA, 201 bp, Homo sapiens
attttggctgctacatggaaaatggattaggggaagaatgcaatcagaggctactttgaaggttattgcagtagtcaaggcaaaagatggtggtgacttakagtagggtggctacagtacagattagaaaagtagacagggatatattttataggcagagttgacaggacttaaggattaactacgagggagatgaagagt

SEQ ID NO: 552364 - DNA, 201 bp, Homo sapiens
ttaggccagcaataaaacgactagatgcagagtgatcctcaggaaggaaaggaaaagaggtgtgtgtgtgtgtgtatgtgtgtgtgtgtttgtgtgtgtgwatatatatatatatatttttttaaagaagtgccatctttttctttctgtaccagagaaaaagcagaaggggaaaggaggaaaaaaaacaggtctgagcct

SEQ ID NO: 552365 - DNA, 201 bp, Homo sapiens
actacgcttttcccacagtttttgcaatccgcagaccaggagattccctcgtgtgctacatcactagggccccgggtttcaagcacaaaactgggcggctstttgggcagacaccaagctagctcttcttttttcacacaccagtggtgcctggaaccacagtgagacagaaccattcacagaacctttgcagccccctgc

SEQ ID NO: 552366 - DNA, 201 bp, Homo sapiens
taggccagcaataaaacgactagatgcagagtgatcctcaggaaggaaaggaaaagaggtgtgtgtgtgtgtgtatgtgtgtgtgtgtttgtgtgtgtgtatatatatatatatatttttttaaagaagtgccatctttttctttctgtaccagagaaaaagcagaaggggaaaggaggaaaaaaaacaggtctgagcctc

SEQ ID NO: 552367 - DNA, 201 bp, Homo sapiens
aacgactagatgcagagtgatcctcaggaaggaaaggaaaagaggtgtgtgtgtgtgtgtatgtgtgtgtgtgtttgtgtgtgtgtatatatatatatatwtttttttaaagaagtgccatctttttctttctgtaccagagaaaaagcagaaggggaaaggaggaaaaaaaacaggtctgagcctcccgggttcgaccag

SEQ ID NO: 552368 - DNA, 201 bp, Homo sapiens
ctttaatgtagactccttactacctaccactaagataaaatccaagcttacttggcctacttgtggcagacattgctagttgcatactcaatatccatttkgctctaattttgttcaaggcatttaggtacccaactaatatacattatcttcccagattcccttgcagctaggaaagactatgtgacacagactagcaga

SEQ ID NO: 552369 - DNA, 201 bp, Homo sapiens
ctcctggggaacataaacagtctcacaaaacaacataaaatcaagtcactctgtgacccttatttaaagcgagactaaaaaacacttttatttgtgcaatsacaaatataccagtcatccccatctctcgctggctaatgagtcactactgctatagattcactttagtctgcattcctagatagtatttattaagatatt

SEQ ID NO: 552370 - DNA, 201 bp, Homo sapiens
ccttggcctacccactcaaagtctgtgttgtaacaatttgtaagtggtctagcagtaacttctcagggatgtgttttcctctctttttccttttctagtcygctcattgccaaggcaggtttttctacagtcccctggagtttggaggacagggagcaggtttagttctgacagtacaatcccaaaggacaatgcacatga

SEQ ID NO: 552371 - DNA, 201 bp, Homo sapiens
atatcagagttgtgttgctccatatccttaccaacacttggtattgcaggatttttaaattattaccaatcaggaacgtgttacaatacacacattaagcrgggagcaggtttagttctaatgtaaacctgctccctgcttaacgtgtggggcaacttttctaagactttacaacttttacacactctgagctttcagttt

SEQ ID NO: 552372 - DNA, 201 bp, Homo sapiens
gttttcaatacagacaacacagccttacactggaaacagacacatttaggaatttcacagctagagagaagtcaatgcctggcttcaaaacttcaaaggaygggatgcctctcttgtaagcggctaatgcagctggtgacttaactggaagccaatattcatttaccattctgaaaatcctagaccccttaacgattaggc

SEQ ID NO: 552373 - DNA, 201 bp, Homo sapiens
atcccatggctttttttttcaccctttctaatggcttcttctgatgaacaaagtttaacattttaatttaattaatccttttctcattgttatggcttttkggtcttgtttttaaaaaatctttccctgtctgaaattatcttatgaaaagtatcatgttttgtgccttatgttttttctttaacccattggagttgactt

SEQ ID NO: 552374 - DNA, 201 bp, Homo sapiens
tgaacatggctcactgcagcctcaacctcctgggctcaagtgatccacctgcttcagcctcctgagcagctgggaacacaggcacacaccaccacgcctgkctaatttttttattttttatagagatggggtctcatcatgttgcccaggctggccttgaactcctgggctcaagcaatccttccacctcggcctttcaac

SEQ ID NO: 552375 - DNA, 201 bp, Homo sapiens
ttgaaaatctctttaagtctggcttattggaaatcagctgaattctcacatgtgttaagtctgttacagtatcacacttcagctgagcacagtggctcacrcctgtaatctcagcactatgggaggctgaggcaggcagatcacctgaggtcaggagttcaagaccagcctggccaacatggtgaaacccccgtctctacc

SEQ ID NO: 552376 - DNA, 201 bp, Homo sapiens
ttacagcttcctgatgaaatgacccttttatccttataaaacgtctctagtaacactttttgttataaagtctatttgctggatacgagtaaaaccactcycgctttctggtggttgctgtttacatgatatatttatttccatccttttactttcaatctatttttctttgaatgacaattatgtctcctttagctagca

SEQ ID NO: 552377 - DNA, 201 bp, Homo sapiens
tccaggaagctggagaactaactccacagaagaaataaaatggctcatgagtacctcccgtaagtcatgcttgttcacatatatggtacgaagtctgatayacttagaagtatgggatgagaagaaggtgatgatgaggaaatgcattctctaccatatatttatcacatgcatttcccaatatgtctgcagaaactcagg

SEQ ID NO: 552378 - DNA, 201 bp, Homo sapiens
gctacttgggaggctgaggcaggagaattgcttgaacccaggaggcagaggttgtagtaagctgagatcatgctactgcattccagcctgggtgacagagygagactcagtctcaaacaaaaacaaaactatcataaaggcaaaacctgaactgattatatatacttgggagtggtaaaggatgactatttcacatgccta

SEQ ID NO: 552379 - DNA, 201 bp, Homo sapiens
tccagtctgcagctcccagtgagaccaacacagaaggcaggtgtctgcatttctaatgaggtaccctgttcatctcactgggactagttaggcagtgggtrcagcccacagagggtgagcagaagcagggtggggcgttacctcacccaggaagtgcaaggagccaaggaaagcagtgagggactgtgctatctggcccag

SEQ ID NO: 552380 - DNA, 201 bp, Homo sapiens
ttgtttgtgtgccacactttacaggactttcaggagacataacaatgtagcttttgcgctttctccgggattctcggcagacaggaatggttctttctacmacactgcactctgaggacacgggagaaatgctcccatctcgagaagtaaaattgcagttagaattattttcttgtccagcatctagacccttttcaggtt

SEQ ID NO: 552381 - DNA, 201 bp, Homo sapiens
ggaagctaagaaccttgacaaaaggttacagcaactgctaactagaataacccgtttacggaagaacataaatgacctgacagagctaaaaaacacagcaygagaacttcacaaagcatacacaagtatcaatagctgaatggatcaagcggaagaaagataacagagaatgaagatcaacttactgaaatgaggcatgaa

SEQ ID NO: 552382 - DNA, 201 bp, Homo sapiens
tgatctccttgccttcagtctcaccggccttatattaatctttactgttatttaaactgtctctaaaatacaattatctgagtccagacacttattagccyacagcttgataatcacgctgaactatcaacagtacttggtacttttcagtactatcctacactctatcacatctgacatggactgatttaaatacataaa

SEQ ID NO: 552383 - DNA, 201 bp, Homo sapiens
ggggctgcaatcatagtctctgataaaacagtctttaaaccaacaaagatcaaaaaagacaaagaagggcattatataatggcagacggatcaatgcaacwagaagagctaactatcctaaatacatatatacgcaatacagaagcacccagattcataaaacaagttcttagagacctacaaagagacttagacccccac

SEQ ID NO: 552384 - DNA, 201 bp, Homo sapiens
gacctggtcaccaagacctatctcaaatccatcccttcctttctccactgccactgcctctgcctctgccttggactactgaaacagcatcctgattgatytccttgccttcagtctcaccggccttatattaatctttactgttatttaaactgtctctaaaatacaattatctgagtccagacacttattagcccacag

SEQ ID NO: 552385 - DNA, 201 bp, Homo sapiens
ggtaatttatagattcaatgccatccccatcaagctaccaatgactttcttcacagaattggaaaaaactactttaaagttcacatggaaccaaaaaagarcctgcattgccaagttaatcctaagccaaaagaataaagctggaggcaccacactacctgacttcaagctatactacaaggctacagtaaccaaaacagc

SEQ ID NO: 552386 - DNA, 201 bp, Homo sapiens
ggaggttgcagtgagccgagatcccactgcacttccagctccagggcaatagagcaagactctgcctcaaaaaaaaaaaaaaaaagatttaggtaaaagayggtggtcaagagaatgtttatctggccaagaaaaatagaagctaatgggtagcttcagaagttaggtttccttgcagactttaaaaaaaaaaaggtgggg

SEQ ID NO: 552387 - DNA, 201 bp, Homo sapiens
aacatatgaagatgatatacctacatgataactgataatagtaagagaaggaaataatgattggagaaatggaaaaactttggagtatgtggttagagtgrgattaacactagacagcggattttaaactcgaatctcaggcctctttacactcttaaaatttattgagaacccaaaagagcttttatttacatgaactat

SEQ ID NO: 552388 - DNA, 201 bp, Homo sapiens
aaaaccagcagtcttttttctcctttaaatttgttgtatttattgcttttatttgctgcaagttgatactgaattttacaacctttccatgggcaagtggmaacaaaaggaacttaaaacagcaggtaaaatcctatctgaactaatttcatggataatcaaattattattttggaaatttgaaaataatacactaaacat

SEQ ID NO: 552389 - DNA, 201 bp, Homo sapiens
acaccctcccaagactaaactaggaagaagctgaatccctgaatagaccaataacaaattctgaagttgaggcaaaacctcaaaaaaaaaaaaaaaaaaamaacaccccttcatgctataaactctcctgaaatagcctaccaaccaaaaaaagcccagcaccagacagattcaccagacagattcacagctgaattctac

SEQ ID NO: 552390 - DNA, 201 bp, Homo sapiens
aatgttgaattgtctgtttcttcatttctgtttttgcttcatgtattttggtattctgttattacatatatgcaacataactgttacagcttcctgatgaratgacccttttatccttataaaacgtctctagtaacactttttgttataaagtctatttgctggatacgagtaaaaccactctcgctttctggtggttgc

SEQ ID NO: 552391 - DNA, 201 bp, Homo sapiens
aatgagaggatgaacataggttggattagttcatctgaactggccctggaggccaagttcagatctctgactggcaaaaccatttcaaaactttacaaggyataacacagatgaactgtgaaaacattatggtaaaaacataagccagtgagaaaaaaaaacccacgtatttcatgatcccactgatataaaatatccaga

SEQ ID NO: 552392 - DNA, 201 bp, Homo sapiens
gttggccaggctggtcttgaactcctgacctcaggtgataggcctgcctaggcctcccaaagtgctgggattacaggtgtgagccaccatgcccggcctgkgaaccagcgttttaatgagctgcagggctgcaacagtttgtaaataatgacaattatagagtgtcttctatgtgccagacagtatttgaaatgcttcaca

SEQ ID NO: 552393 - DNA, 201 bp, Homo sapiens
taggagtgcaccaccatgcctggctaatttttgtatttttagtagagatagggttttaccatgatggccaggctggtctcaaactcctaagtgatctgtcygcctcggcctcccagagtgctgggattacaggtgttagccactgtgcccggcctgttctatacattattaaaagcggtatactgaagtctccaactacta

SEQ ID NO: 552394 - DNA, 201 bp, Homo sapiens
atcctggatgagagggcagatataaaatcccttttgaggtgccacctgcccttggctgggatgtaagttcatgctgaattaagctcaaatagttcaatgawgcccttcactgtcaggtttgttttgttttcctagaaacagtcttttgaaaatattttggttattcagattgtgttgctccttggtgaaactgttttctag

SEQ ID NO: 552395 - DNA, 201 bp, Homo sapiens
atcaaattttaaaatgtctatttttcacagcattttaaaaacctgtattttgatatatagattagctgataaaaattatcagaagatttgagattaaaacraagtagctcttagcatataaagtgacgtggctgcttaacatgatgaaagagaaagtaatgagactgttaaccttggaagtaattttagttggatgggaaa

SEQ ID NO: 552396 - DNA, 201 bp, Homo sapiens
gatgctgttgaggatgtggagaaataggaaatgcttttacactgttggtgggactgtaaactagttcaaccattgtggaagacagtgtggcgattcctcawgaatctagaaacagaaataccattcgacccagccatcccattactgggtatacacccaaaggattataaatctttctactataaagacacatgcgcacat

SEQ ID NO: 552397 - DNA, 201 bp, Homo sapiens
aagcaattctcgtgcctcagcttcctgagtagctgggattataggcgcgtgccaccatacccagctaatttttgtatttttagtagagacagggtttcacyatgttggccaggctggtctcgagctcctgaccttgggatccgcccacctcggcctcccaaagtgctgggattacaggtgtgagccaccgcgcccggccag

SEQ ID NO: 552398 - DNA, 201 bp, Homo sapiens
gggaacataaacagtctcacaaaacaacataaaatcaagtcactctgtgacccttatttaaagcgagactaaaaaacacttttatttgtgcaatcacaaayataccagtcatccccatctctcgctggctaatgagtcactactgctatagattcactttagtctgcattcctagatagtatttattaagatattcaataa

SEQ ID NO: 552399 - DNA, 201 bp, Homo sapiens
actttgctttattaaactttgcaaatattgtgttttttacaaattggaaatttgtggcaaccctgctgtcagcaagtctactggtgccactttccaccagyttgtgctcacttcacatttgtgtcacattttggtaattcttgcaatatttcaaaatttttcattattattatatctgttatggtgatctgtgatcagtaa

SEQ ID NO: 552400 - DNA, 201 bp, Homo sapiens
aaacagttgaaaatcaggatttcaaggagatatttgcacacacatgttcgtagcagcattattcacagcagccaatggtgaaagtaacccaagtatccacraacggatggataaacaaaatgtggtatatacacacagtggaatattattacttttttaagtaattattttattacctttttaagtggaatatatattacc

SEQ ID NO: 552401 - DNA, 201 bp, Homo sapiens
acactctttaacagaatacatttcaaatactttagttattactctacattactgacagtcacatttgattagaactttagttttcacagtttcttcgagcytattattgcatccaccccaacaactttgtggggcagagagtttatagaaaactgatgttggaaagaacttgctcacggtcacgcagccagggggaagtgc

SEQ ID NO: 552402 - DNA, 201 bp, Homo sapiens
gaaattcaatactaataacatcaaacacttacagagcacttgttaagtgccacacactgttcaaagcacttcatataatccttatagcagcactctaaagyaagcagtagtatgatcatctcttttttgcagaggagaaagcagaaacacagagaggtccagtaactctaccagacctcaggcagaccccagggtacctgc

SEQ ID NO: 552403 - DNA, 201 bp, Homo sapiens
aagccaggccagacaaaggccagttgcagctgcccataacaatgcatcagtgggagaaccaggtaacagaacctcttctttcattctcttagaaaagtggygggagggggaaaggccgggtgcagtggctcacgcctgtaatcctagcactttgggaggctgaggcaggtggatcacgaggtcaggagatcgagaccatcc

SEQ ID NO: 552404 - DNA, 201 bp, Homo sapiens
gcctgggcgacagagcgagactcagtctcaaaaaataataatgaaataaaataaaataaaataaaattaaattaaattttatttgtttttatgaaacattyatgtagttccaaagctaaaacgacgaaaagtctagtttctatcattgtccattttatcctctcttctcccttctgctatgggcatcattttagtaatttt

SEQ ID NO: 552405 - DNA, 201 bp, Homo sapiens
atacacttgccatatgccccttaaagatacacttaccatatgccccagcaatcccattcccaggcatttgcccaggaatgccaatgtatgtttacacaaaygcttgtatgcaaatgtcttagatgcttattcaaaattgctaaaaattgaaaacaactttttttttttttttttttggagacagtcttgctctgtcgccca

SEQ ID NO: 552406 - DNA, 201 bp, Homo sapiens
ccagtagttccagcttgattggccccaggcagtgaatgctggggggcgacaggtacatccgaagcagggacagatacacctgtctcagagagacatgagcyacgtcaggctggcagcaaccctcccagaacccccagcactgagcatgcctaacgattcgaggggctcgcctacagtaacagctatcactgagcatgtaaa

SEQ ID NO: 552407 - DNA, 201 bp, Homo sapiens
gcaccactgcactccagcctgggcgacagagcaagactccatctcaataaataaataaataaataaataaataaataaataaataaataaaataaaaaatwaaaaaaaaagaaataaaaaagaaaggtagggggaaggcaaattctgttttccctaaaattactctaagggaagagttccacatttctagccaatgttgtt

SEQ ID NO: 552408 - DNA, 201 bp, Homo sapiens
tagccagtaatgtccaaatggggagccttgtggtggtggcagccaggattcctaaggccaggtgctccttcacctctctgggagagccaagctgtccatcygctggatccccaggatgctgggctcaagtgtcagctgggtttacctctttggaacagaagtaatggacgaccactccattggggtatcttgcaaatgcac

SEQ ID NO: 552409 - DNA, 201 bp, Homo sapiens
agtaaaactcagcttcttgcaagaactagactatcccatttttaatgaccctaaaatgtcatctacttataagaaggggaactgaaagtgaatgacacaamgtaaaccagtctgctaaagctacgaatgggactccgttctgcaggaatggcacacaacctcaacccaaagtgggaaacagcagctactgttggtctcacc

SEQ ID NO: 552410 - DNA, 201 bp, Homo sapiens
ctttttggagaagttcttattggatttctctagtgtcacttcaaatctgttgcaacctatggaaaacaaataaacactggtagttccaaatacagggatayatagaaaaaccactactagaaaaatactgctccatactgctctcctatataaatctttggaagttcctgaaagactaaaaatcagagatctaaatagcca

SEQ ID NO: 552411 - DNA, 201 bp, Homo sapiens
tgggaggccaaggtcacctaaggtcaggagttcgagactagcctggccaacatggtgaaaccccatctctaatttaaaaaaatacaaaaaatagccggacrtggtggtgcacacctgtagtcccagctacacaggaggctgaggcaagagaatcacttgagcccgagaggcaggggttgcagtgagccgagatcgtgccac

SEQ ID NO: 552412 - DNA, 201 bp, Homo sapiens
tttggagtttagaaagaaatcatcctcatcatgttctctcctgatttctatttcccaggagacagagtatgttgtctctaagacatttacacctcaaataytatttggccctgtgtgacctgcctctggaagttcctggacgaactttccatccaaaggcacaatgtagttaaaaaggggtaatgactagaaagagcaata

SEQ ID NO: 552413 - DNA, 201 bp, Homo sapiens
actgcactccagcctggcgatagaggaagactctgtctcgggaaaaaaaaaaaaaaagaaagaaaaaaaacagaaagccatctggcatagctggcacggtygggaaaggtcctattctcagtaaaagctaaacaaatgcagctgctatgagctttgcttcttcctcataacctattttccccttatacctctttagccaat

SEQ ID NO: 552414 - DNA, 201 bp, Homo sapiens
catctttttatggtccttgatttctaggacctaaacattaagaggaaagttagaaatgatttccttggtctttggcggctggtatcaaaccagtcactcayggataagagcacaatgttcaccgttatccctgaaaccttcatttgtatttcagagcacacaagagatgtctgtcccggccttctgcactagtcaatccca

SEQ ID NO: 552415 - DNA, 201 bp, Homo sapiens
tataaaaagttataaaagttatggttcttgggtaggatggtgagttcatgggtattcactgtattatttttaaaaatgaaaataaaataatataggacaaygcatgagtagaaaaaaaaacagtaagatgctgaaattcagtgctctaagaaagcaatcatctttatggaatattaactatgtcttactattaagatcaga

SEQ ID NO: 552416 - DNA, 201 bp, Homo sapiens
attactgtcccaagcaaagagaatggcccgtgtagccacctaataagtatatctgatgaagcaatgggggaattaatcctttcatgcagtgtcaggtcttycatttaaaaactttttctcctcctctatttaaatgtttaatgagagcatttaatgacagaaattggttttcttgagatgtctggaggaagtaggattctc

SEQ ID NO: 552417 - DNA, 201 bp, Homo sapiens
aggtgggtatgtgctttgtgcattgatggaacaaagaaggctgtgtgggactggtaccagaaaggagtgagaggtaagtacacagaagacagggaagaaaycagggcctgatcatgtcagatgttgccagacagggtgaaaactttggaacttattctagttgtgatgtgataccatgagagggttttgagtagaggatgg

SEQ ID NO: 552418 - DNA, 201 bp, Homo sapiens
atatcagaggataaaaatgtcctggctcaattgttttaatgttaaactaataaaaaagatagaagggctttgtatttttaagattaaattattatgatttytattttttgttatatatacttttattaagatatatatcttcagatatatatttttaaattctgctaaaaagaatatgatgaaagtttataaaatcacaaa

SEQ ID NO: 552419 - DNA, 201 bp, Homo sapiens
gctattactattcatattaacattattcattaaatatatatttaatgaatacccattgagtcaggaaatgttttaggtactgcagatatagcaatgcagaraacaaagatactgccctgagggaacttatattctaatgtggagtgagagaggcaataataattaaatatataaaataacagtagatggtgacccatgatt

SEQ ID NO: 552420 - DNA, 201 bp, Homo sapiens
catacagatactcatatatacatgtgaagtctgcattttttacaggctttgaatatacattcaagtttgagaaccaggctctagaagcagacatgatttayaggacatgtgaccttggaaaaatttcttaaattttctaagccttaggtctttcttctgtaaaatggagtcttattttataaaagcctaatacagattagc

SEQ ID NO: 552421 - DNA, 201 bp, Homo sapiens
aggacagtgcagctgaccccttcccaaactccggaccaacaagtactaacagagatggatgattactgttactttaagccatacagttttggggagatttsttacgtagcattagacagctaatacactagcagagggcaatttttatcaaggatgcaacaacaggggaagtggcagtggcaacggctaagaaggtggcta

SEQ ID NO: 552422 - DNA, 201 bp, Homo sapiens
ttttatcctctcttctcccttctgctatgggcatcattttagtaatttttgacttatctttccattgtttctctggaaaatataggtatgtatgtatatayagacatacagatactcatatatacatgtgaagtctgcattttttacaggctttgaatatacattcaagtttgagaaccaggctctagaagcagacatgat

SEQ ID NO: 552423 - DNA, 201 bp, Homo sapiens
tcctcttaggtaacatgacactcctccatcaagagaggaagtctgatgaacttccttgccttgaacctggcaggacccttgtaaaccaacagaatataggragagtgagagtcacaaaagacattgaagcttctgcctaggtctcttaaacacgccttccggaaagagccagctgttatgcatgaggacactcaagcagct

SEQ ID NO: 552424 - DNA, 201 bp, Homo sapiens
tgccattccatagaggcacctgcctggatacagcagcctgcactcagtcaccagctctgtgggaactgaggatactacagggcttaggctgtggaagcagyagcaacttgctgacctctggatcacagggatgtgcccacatcaatgtccagtagtggaaccctgtcttctgctcattcagctcatccaacaatctgtgtg

SEQ ID NO: 552425 - DNA, 201 bp, Homo sapiens
ttcccatccatttctactcctttatagtccacaggggctataaaactgaaaactacttttatcaaactccctagcagtcagggttctaagtgaaaatctgrttccacccagaaacaggatatgagatttggaaactgaaagtgagatggaagcctccctcttccagctcatgagtgtgtgcagccagactcggcatttcca

SEQ ID NO: 552426 - DNA, 201 bp, Homo sapiens
tcaacgagctgtagacttatgatttgagcactttttatacatatgttaaaattcactaaaacatcacaaaaatgcctgactatattcaaatacacacacakaattagaattgaatatttatcaagcctctgaaagtagagaataaaaaatttctaaggaaaaatgctgatattgaagtagaagagatcaagagactcaaca

SEQ ID NO: 552427 - DNA, 201 bp, Homo sapiens
accaatgaagacagatgcatgaatccaccctcctctccatccactgctgtctcaagtgcaatcagaaccaagtgtttaccagataaatccaagggactccygtggctcaccttcaggccatcttctgggaagtctctcagcacccacactgagtaggagaaaatcaaatgcaggttttctgtgcctagaaggaaaagcagg

SEQ ID NO: 552428 - DNA, 201 bp, Homo sapiens
gcgacccagtaacgtgaggagccatcttctcaattactaaactccattttactaattttgtcccataatcctccaaactctcatagcgactcatgtaattrtggttaaatatctgcatcctggtacttaagcctatttgattgtcctgtggtcacttttgagtttcgctttggaattttttttccaaatgtggctttggaa

SEQ ID NO: 552429 - DNA, 201 bp, Homo sapiens
cctagggacaggaacagagatagggactgggtgaggtgaacaggagtgagaatgaagaaatgtctgcagccgtggagctcttggaccctagtccctttccrcatttcctcttctcattcggtgctccctgcaaacaccctccatctccctaggaacaactcctgaccttggtggtgtccagtttgctgtggtgtagctcga

SEQ ID NO: 552430 - DNA, 201 bp, Homo sapiens
gcccccacggacggcatgcctggggaagcctagtctacttaccatcagcacgttgatctgtcacacagcatggagccatagtttacaaaggaccacggcakgtcaaggacaggccactaaaactgttggtgctgggcaccatcacccaccctcaccaccatcaaagacactggtgcagtgagacttcgagtctgcaaaaac

SEQ ID NO: 552431 - DNA, 201 bp, Homo sapiens
tcttaccagaaaaatgaaattaaaagcatattgttttatattgaattttttattttatttttatgctggcctcattttgaaaagttagtacaattttcttyagtgctaacttgtataacatatgtaaaatttctttctccttttaaaatctgtcccacttgaatacgttctcatttaattaaaaaggtaatctataacaga

SEQ ID NO: 552432 - DNA, 201 bp, Homo sapiens
agagcccctcccagatccaaggaaccactcccacacctttctcgtggagccccttcttctcatacaggatgataagctcactgtacttgtgagccttcttyagcacgtgctcgctctcctcgatgtggcagtgattgttctccaggcgtagcaagggggccaccagggccacatttgtctgcagaaagagcaggagttcag

SEQ ID NO: 552433 - DNA, 201 bp, Homo sapiens
aagtgtaccatcagatacattttgacagatgtgtacatgcatgtaaccacctcagtgaaggaagataacatttctatcactccagaaagttcctcgtgctrttcccaaacaatcccacctactgatctgcttttgatccctggagatgagtttctgcctatcctagaacttcatccagtatgtattctcttgagtctggca

SEQ ID NO: 552434 - DNA, 201 bp, Homo sapiens
agaaagaaatcatcctcatcatgttctctcctgatttctatttcccaggagacagagtatgttgtctctaagacatttacacctcaaatactatttggccstgtgtgacctgcctctggaagttcctggacgaactttccatccaaaggcacaatgtagttaaaaaggggtaatgactagaaagagcaataattactgctg

SEQ ID NO: 552435 - DNA, 201 bp, Homo sapiens
catctttatggaatattaactatgtcttactattaagatcagatttttattttaaatccagaacatatatgtccaaagtaaatgttcttcacgagtagccmccataggtaacttaaagtatctgcattctaaaaaagtgctttccttttagaaatagtttacaggatactctagaaattcagttttattactattatcttc

SEQ ID NO: 552436 - DNA, 201 bp, Homo sapiens
tgttcacagcagtattatctgtaatagctaaaagatggaaacaaaccaaatgtccaccaactgatgaacggataaacaaaatgtggcatgtctatataacrgaatattagctaacaatgaaaagaaaggaagtatggatatatgctacaacacagatgaacctaaaaacatgatgctaactgaaggaagccagacaaaagg

SEQ ID NO: 552437 - DNA, 201 bp, Homo sapiens
ttaccaacgtccttccgaatcctatagagaagaagatgtccttgtttggttcccacaagaagccattcctctggaaaaacaaaacaaaacaaaaacaaaamcaaaaaaaaaccagctttgagaaaggtcaatcagcttgagtataaccctatttttttagctggggcttgtaatcagaaatcaatgtgtcaagaaaatgag

SEQ ID NO: 552438 - DNA, 201 bp, Homo sapiens
tttccatttttattgaaatgtttcttgccaatagattttttaatttactttttttttttcttgtgaacccaaactaagacatgacaaaacattttaaaaartcaaatgtctaggggccgggcatggaggccgaagtgggcgaatcactggaggtcaggagtttgagactagcctggccaacatggtgaaaccccgtctcta

SEQ ID NO: 552439 - DNA, 201 bp, Homo sapiens
cagttatcttagagcagatctctgatgctgtcacactggggcttaaaaaatcctgtgaagctacactaccaaaatatgaagtcaaattcctaaacatgacwttcaagagtctattttccatttttattgaaatgtttcttgccaatagattttttaatttactttttttttttcttgtgaacccaaactaagacatgacaa

SEQ ID NO: 552440 - DNA, 201 bp, Homo sapiens
cttgattcttgacctctgtaaaataaaatcttggataatggtacaaatagataacttttattgagcatgtattgtgttccaggaaatgctaaacgcatctsttatttcactaatcctcacaactatcccttgaagtaagtccttttttcaaatccccattttatagatgaggaagttgaggcctagggaatatataacttt

SEQ ID NO: 552441 - DNA, 201 bp, Homo sapiens
tgaggggggcacatctaaatgagaggctgtgcgtgcagcctgctcgagcagcctaaccacagccaaaactgcgggccaggacggaggcgattcttgctccygcagtggagtatggggagatggccttcttaactctcatctctctgcagggcctgcttttagactgcttaggaggtgggatgttggggcaaacttactcct

SEQ ID NO: 552442 - DNA, 201 bp, Homo sapiens
tgtacattttaaaagatggtctaggctagtggttcttaaactttagtgtatcacaattatttgagagtttgttaaaatacagaatgctaggctctaccccrgagcatctgatttagtaggtttaaaagtaggcccaggaattttcatttctaacaacttcccagatgatgctgatgctggtggttcaaggaccacattttg

SEQ ID NO: 552443 - DNA, 201 bp, Homo sapiens
gttgcccagggctggtgggcttgggggaaaatagaaagtaaatactaatgggtactgagtttcttctgaaagtgatgaatatgttctaaaatttattgtgstgatagttgcataactctgtgaatgtactaaaaaccatttaattgtacacttttttttaacttttatttttttaagatagggttctactctgttgcccag

SEQ ID NO: 552444 - DNA, 201 bp, Homo sapiens
aaaaacaaacaaacaaaacccactgtgagcacatggtgagaattacacaatgaccatcagtacagcttggtaccactgtttttttcgtttttttaaaaaartctctatttgaagttaggtactactgttctgatttgtgttcaggtgctaaccagttttaattaccattccttttgcaccatcattgtaaatgtcaataca

SEQ ID NO: 552445 - DNA, 201 bp, Homo sapiens
catctttacaagaagtgaaaaaactatctgggcatgctggtgtgtgccggtagtcctagctgcttgagaggctgaggcgggaggatcgcctgagcctaggrgttataggttgcagtgagtcatgattgcgccactgcactctagtctgagtgacagaatgagaccatctcaaaaaaacaaacaaacaaaacccactgtgag

SEQ ID NO: 552446 - DNA, 201 bp, Homo sapiens
aaaaaaagaaaagaaaaaataaataaataaaacccatcacttgaggcaaggagtttggggccaccctgggcaagaagagacaactcatctttacaagaagygaaaaaactatctgggcatgctggtgtgtgccggtagtcctagctgcttgagaggctgaggcgggaggatcgcctgagcctaggagttataggttgcagt

SEQ ID NO: 552447 - DNA, 201 bp, Homo sapiens
cagccctctttcaggacagcaggtagaggcttttagagcatttatggaccttcgcacaatgtgttttaatgttctgtgggggagaacatttcttgaaggaratactgtcccagctgactttgtagcactaactgcaatccgaccagagaagatgaatccactgtacaattgtgcattgatatcttgccctatcctcttaat

SEQ ID NO: 552448 - DNA, 201 bp, Homo sapiens
gagcatttatggaccttcgcacaatgtgttttaatgttctgtgggggagaacatttcttgaaggaaatactgtcccagctgactttgtagcactaactgcratccgaccagagaagatgaatccactgtacaattgtgcattgatatcttgccctatcctcttaattccaagagactcacagacatcaggagaagtctata

SEQ ID NO: 552449 - DNA, 201 bp, Homo sapiens
ctaagacattggcagtggagggccttccacaatgccactggctttgggagatagtatgcccaggaatcttttttacttagcacagtgtgtgcagtgtgtakgcagtggcaagtttgtgtgctccttgcaggctgccagccccaggagggtacccctggagcccaatgtcaaggaagggccaaggccacccatgcctgatca

SEQ ID NO: 552450 - DNA, 201 bp, Homo sapiens
agatcacaggctttgtgatgacacaggtgactttacaactttgggataatatacagccatagcaaaaaaagaaattccttaccctcctgaggtaatgaaayggggcctttgcaattcaatgctttggaccagaagcctcggttcaaatgttcggatctcaacatatcgaggcaacactgcaatgatgtagggaggctggtg

SEQ ID NO: 552451 - DNA, 201 bp, Homo sapiens
ggtctcactatgttgcctaggctggtcttgaactcctgggctcaagcaatcctcttctctttggtctcccaaaatgctgggattataggcatgagccactrtacctggccactcccagattgtaacagcaaaatgctgtaagtagccaacatatcccctcactgactgggggctggttatataatttacagtgcatcaatg

SEQ ID NO: 552452 - DNA, 201 bp, Homo sapiens
aatattcagcctcaaaagtcaccaatgagtcaaaaagagaataattatcatcatcatcatcagagcagctatcatgaagcaataactacatactgggttckgggtttaaaaatttatatatatttttttctgtaaactcacaactactcccaagaagtaggtattattattccaagctcatatttgaggggcatgaggggt

SEQ ID NO: 552453 - DNA, 201 bp, Homo sapiens
tgtctaatttgctaatatttctaattatccttttttttttttgagacagagtctctctctataggcccggctggaatgcagtgagtggtgtgatcacggcytactgccgcctccatctcccaggctcaagcaatcctcccacctcagccacccaagtcctgggaatatatgcgtacagcacgatgcccagctaatttctta

SEQ ID NO: 552454 - DNA, 201 bp, Homo sapiens
ggtcttacttcttccatgtgtccctcagcagaggggatgaagaaagggccctaaagttgcagggagtgtgccctggtattctgctgttacatttcatgagraaaaaaaacaattcagacacttcctacacttgaaagcgtcctattattgcatttaatacttctcttttcttatttttttgttttgttttgttttgttttt

SEQ ID NO: 552455 - DNA, 201 bp, Homo sapiens
actattaagatcagatttttattttaaatccagaacatatatgtccaaagtaaatgttcttcacgagtagccaccataggtaacttaaagtatctgcattytaaaaaagtgctttccttttagaaatagtttacaggatactctagaaattcagttttattactattatcttcataaacatctcttctttaaagtatcact

SEQ ID NO: 552456 - DNA, 201 bp, Homo sapiens
ctccagcctgggcgacagagtgagactccgtctcaaaaaaaaaaaaaaaaaaaattggggctgacttgagtaaaagagatctttcacttccaaaacactcttttttttttttttttttttttttttgaggcacggtctcactctgttgcccaggctagagtgcatcaacaaaaggggcatgatctcagctcactacagcct

SEQ ID NO: 552457 - DNA, 201 bp, Homo sapiens
attttactctttgggccccagggtcaacagcgcaaagtgtgagatcagctgctagtcccctgcatgtccagaaaaggcctcactggctgctttctatgaarccatggtttttcacatgagggcctcaacagtgtagccctgctctgtctcttacctgatatcctgccaatctccaccacatatccttagtctggccacaat

SEQ ID NO: 552458 - DNA, 201 bp, Homo sapiens
cctcctacctcagcctcctgagtagctaggactacaggcatgcaccaccacacctggctaattttgtttattttttgtggagatgaggtctccctgtgttrcccaggctggtctcaaactcctggactcaagcaatcctcctgccttagcctcccaaagtgctgggattactggtgtgagccactgcacccagtccaaagc

SEQ ID NO: 552459 - DNA, 201 bp, Homo sapiens
gtgcacttaccaacgtccttccgaatcctatagagaagaagatgtccttgtttggttcccacaagaagccattcctctggaaaaacaaaacaaaacaaaamcaaaaacaaaaaaaaaccagctttgagaaaggtcaatcagcttgagtataaccctatttttttagctggggcttgtaatcagaaatcaatgtgtcaagaa

SEQ ID NO: 552460 - DNA, 201 bp, Homo sapiens
gtactgagtttcttctgaaagtgatgaatatgttctaaaatttattgtgctgatagttgcataactctgtgaatgtactaaaaaccatttaattgtacacttttttttaacttttatttttttaagatagggttctactctgttgcccaggctagagagcagtggtgtgatcatggctcattgcagcctccacctccctag

SEQ ID NO: 552461 - DNA, 201 bp, Homo sapiens
tgtgaaattccgtctcaaaaaaaagaaaagaaaaaataaataaataaaacccatcacttgaggcaaggagtttggggccaccctgggcaagaagagacaaytcatctttacaagaagtgaaaaaactatctgggcatgctggtgtgtgccggtagtcctagctgcttgagaggctgaggcgggaggatcgcctgagcctag

SEQ ID NO: 552462 - DNA, 201 bp, Homo sapiens
gtgtgaaattccgtctcaaaaaaaagaaaagaaaaaataaataaataaaacccatcacttgaggcaaggagtttggggccaccctgggcaagaagagacamctcatctttacaagaagtgaaaaaactatctgggcatgctggtgtgtgccggtagtcctagctgcttgagaggctgaggcgggaggatcgcctgagccta

SEQ ID NO: 552463 - DNA, 201 bp, Homo sapiens
gccatcactgcttacctgctgaatctttttggagaagttcttattggatttctctagtgtcacttcaaatctgttgcaacctatggaaaacaaataaacaytggtagttccaaatacagggatacatagaaaaaccactactagaaaaatactgctccatactgctctcctatataaatctttggaagttcctgaaagact

SEQ ID NO: 552464 - DNA, 201 bp, Homo sapiens
tgtaaggactgccatcactgcttacctgctgaatctttttggagaagttcttattggatttctctagtgtcacttcaaatctgttgcaacctatggaaaasaaataaacactggtagttccaaatacagggatacatagaaaaaccactactagaaaaatactgctccatactgctctcctatataaatctttggaagttc

SEQ ID NO: 552465 - DNA, 201 bp, Homo sapiens
attttgaacgctactgctattatactgatatttttcatcttaccagaaaaatgaaattaaaagcatattgttttatattgaattttttattttatttttakgctggcctcattttgaaaagttagtacaattttctttagtgctaacttgtataacatatgtaaaatttctttctccttttaaaatctgtcccacttgaat

SEQ ID NO: 552466 - DNA, 201 bp, Homo sapiens
accacatggatctggaaaataggaaatcatgagacccaattaaacatttctgacaaggtttagcaaatgttcattcaataacagtaataaaaagggaccayggagcctatccagttacagggatctcactgatttttctgggcactataatttctgtgattatcatttctgcttgtgagagaggatctcaggcacatgata

SEQ ID NO: 552467 - DNA, 201 bp, Homo sapiens
tgatcaatgaacgaatgaatgaataaagtgagactccttggagagaagagttcgagtctatggaggatgctgctgcctttattaaccatgtaccctgttayaccaggtttggaacacgtcagttcattgttaagtaaccactatcaaattaaccatgaaaggattaattaggtcatatcttttcttgttagacacaggata

SEQ ID NO: 552468 - DNA, 201 bp, Homo sapiens
ctatgctagtgcaggatggcccagcctgtcctggctacaaactgatcattgtctggcttcctgttttgtttccagctgggagggcttccagagctcccttygtttccatctattccccagcctaatctcccatcaattttatgaattctttcaactgtcattaccctaatattccaataaactctgcttaatttatccaga

SEQ ID NO: 552469 - DNA, 201 bp, Homo sapiens
ttgtctcatactaaaagttaaaagcccaccctagagtttggaaggcccatacctaccctcaggaattctgcatggagaaggttcttgagcacttgattgamccgtttcttttgtgcattttcttccaagaccttttccaggaagatgcgtatgtcattgatctgagtgtttgctggcagaaggttgagggcctagggacag

SEQ ID NO: 552470 - DNA, 201 bp, Homo sapiens
tcagaggagaaaatcctggggcagtccttcccctatataactcctccctcctttttgctcttaaatgtttcttgctcctggctgtcaatgcatgctgggtyaagggtgaccatgtgccagtgacatcaagcccacttttaagcctttaaagagcaaggaaaagagtattcctaagcataaaatgatgcagtgtcaatgtag

SEQ ID NO: 552471 - DNA, 201 bp, Homo sapiens
gtgtgctgggaggagacatgcagagcaaatgaaaatacaatgactctctctaactgagtgataactaaattagagattgtctaccttgaaattgctactamtctgaaaattccctgtaacacagtcatcctgccaggaaagctgagcagaacaccattctctaagatgcgctaagaaacaagtgactgaggaacacttcct

SEQ ID NO: 552472 - DNA, 201 bp, Homo sapiens
caaggaacagtggacttacctgcaattcatgaaattccctgtccttccagaaatagagctgcagcttcttttttactgccacacacatccgtaacacctcytcaccggtctctgtgtgctgggaggagacatgcagagcaaatgaaaatacaatgactctctctaactgagtgataactaaattagagattgtctaccttg

SEQ ID NO: 552473 - DNA, 201 bp, Homo sapiens
atttgtgaaaaatgctgagcatgaatgataactacacatacaaataacaaatcctgttatgccaaaagctctacttaaagtggtcgcttgacctggagttyggagcagataatcatcttccccaagataaactaatgatatttgcaaaataataagattttacccttattaggtagtagtctctcttgaaacccacacaga

SEQ ID NO: 552474 - DNA, 201 bp, Homo sapiens
gaggctgacttcaatatgagggaattttggggggtgatggtagtgttgtgaatctcgattgtggcattagtcacataaatctaagcatttgtcaaaacacwgaactgtacaccaaaaagaataaattttactgtatgtaaataagtaatttctgaatagcctggtcctaaagcaaggtttcccaccctgaaggtgatgtca

SEQ ID NO: 552475 - DNA, 201 bp, Homo sapiens
ctgagcatgcctaacgattcgaggggctcgcctacagtaacagctatcactgagcatgtaaaactggtcattttcaccttgtaaattggtaaggtcaaacrggcaactgaagatgttaattaaggattgctttttccctgagagaaaaaaccaaatgccttgtattcgtttaccattatgccatttacaaaatgctaccac

SEQ ID NO: 552476 - DNA, 201 bp, Homo sapiens
caaagacagtttgtgagaatggaagataacaagcacagctggccaggaaggcagggcacacatggcaggtcaagttcctgctatccagggaggtggcccaragcttccctgctgctcctggaggaagcagagtccaagctggcccagatgaggccccgggcagcactgcttctgtgtgggtatggccagtcgggacgtggc

SEQ ID NO: 552477 - DNA, 201 bp, Homo sapiens
gtgtgaaggaggctcacctgttcccaatcttcttcttacacaccatgcacaccttctcctctgtgatgatgcacttcacctgctggtgtaaaatccgctcytcctggacctggaagaacagggggattgaggaagaagttctacagtgtggcacccagaaacaggaggcagaggccagcaactgtgtcctctttcagtcgt

SEQ ID NO: 552478 - DNA, 201 bp, Homo sapiens
ctggatttctgtagccatcatctctgtcaaataaccaaacagaggatgaggtgcacacagttaagagtgcatggggtatttttttattatgcaaaacacamggcatattaaagatgggcagtgcaccagcccaaagctcagccctggcttcctgagagccaacaatgttcatcagaacaggtttcaggctaattctgaaaa

SEQ ID NO: 552479 - DNA, 201 bp, Homo sapiens
ataaataaataaataaataaataaataaataaataaataaataaaataaaaaataaaaaaaaaagaaataaaaaagaaaggtagggggaaggcaaattctrttttccctaaaattactctaagggaagagttccacatttctagccaatgttgtttctgctagagattttcacagagaaaaggtgtgatgctccacctgat

SEQ ID NO: 552480 - DNA, 201 bp, Homo sapiens
aactctcgacctcaggtgatccacccacctcggccttccaaagtgctgggattacaggagtgagccactgcccccggcctataattctctttacaaacagwattttctaaggcagagattcttaaacttttttgtctcaaaatcttgataatcttaaaaattactgaggacctcaaagaacttttttgggggttatataca

SEQ ID NO: 552481 - DNA, 201 bp, Homo sapiens
ttatgtgtacttcccattatatcatatgagattactaaaaagatgtgttgccaaaagtcaaaatacaataaaaataacttgtactgcctaaccaagaacayttttaagtgaaactagctttaaaaaaaaacaaaaacaaaaacaaactggccaggtgtggtggttcacgcctgtaatcccagcactttgggaggccgagaa

SEQ ID NO: 552482 - DNA, 201 bp, Homo sapiens
tacaggaagcttatgcccattagtagtatttcttattattggtagtgagtctcaaagaaaagaggaggaaaacaaccacctcctcttttcttagagactcmctaccagtaataagtaattcagtaataagtaaaccagcaattcatcctcacctcccaaatgcaggtagggcaatacaatttggaggagaaaaaccctagg

SEQ ID NO: 552483 - DNA, 201 bp, Homo sapiens
cttgccaatagattttttaatttactttttttttttcttgtgaacccaaactaagacatgacaaaacattttaaaaagtcaaatgtctaggggccgggcayggaggccgaagtgggcgaatcactggaggtcaggagtttgagactagcctggccaacatggtgaaaccccgtctctactaaaaaatataaaaattaggcc

SEQ ID NO: 552484 - DNA, 201 bp, Homo sapiens
ggtcaggcgtttgagaccagcctggccaacatgacgaaaccccgtctctactaaaactacaaaaataagccaggtatggtggtgggtggcagtaatcctarctactcgggaggctgaggcacgacagtggcttgtacctgggaggcagaggttgcagtgagctgagattgcaccactgcacttcagcctgggcgacagagc

SEQ ID NO: 552485 - DNA, 201 bp, Homo sapiens
aattttttgtagacagggtgttgccatgttgcccaggctggcctcgaactcctggcctcaatcattcctcctacttcagtctcccaaagtgctgggattayaggcatgagccacttcacaggccatgagaattaaaaatttaaaacattaaaacaaagatcaacaatgtactgctccagggcctaactgaggcctttgcat

SEQ ID NO: 552486 - DNA, 201 bp, Homo sapiens
gaggttgcagtgagctgagattgcaccactgcacttcagcctgggcgacagagcgagactcagtctcaaaaaataataatgaaataaaataaaataaaatwaaattaaattaaattttatttgtttttatgaaacattcatgtagttccaaagctaaaacgacgaaaagtctagtttctatcattgtccattttatcctct

SEQ ID NO: 552487 - DNA, 201 bp, Homo sapiens
tgcacttaccaacgtccttccgaatcctatagagaagaagatgtccttgtttggttcccacaagaagccattcctctggaaaaacaaaacaaaacaaaaamaaaaacaaaaaaaaaccagctttgagaaaggtcaatcagcttgagtataaccctatttttttagctggggcttgtaatcagaaatcaatgtgtcaagaaa

SEQ ID NO: 552488 - DNA, 201 bp, Homo sapiens
tgcagtgagctgagattgcaccactgcacttcagcctgggcgacagagcgagactcagtctcaaaaaataataatgaaataaaataaaataaaataaaatwaaattaaattttatttgtttttatgaaacattcatgtagttccaaagctaaaacgacgaaaagtctagtttctatcattgtccattttatcctctcttct

SEQ ID NO: 552489 - DNA, 201 bp, Homo sapiens
cagagactccacttccgggagatcttcagtaaatatctgttagaatgaacccgagttccagcagcagaaccatctgactgcagttccagcaaacacacacrcatgtgagcgcagggatcaaacagactttaggagggcaagggtacgagaaggcatctgtaggcagtcagcatgtcagacgaggcacaggcctcctcatgc

SEQ ID NO: 552490 - DNA, 201 bp, Homo sapiens
gggcagagagttgagggaaggaagaatggagcttgggagcatgggatcatgtatgtataccaggaaagaaaacacacattctttattctattgcttcaaasacagtttgtgagaatggaagataacaagcacagctggccaggaaggcagggcacacatggcaggtcaagttcctgctatccagggaggtggcccagagct

SEQ ID NO: 552491 - DNA, 201 bp, Homo sapiens
gtggaaaaaaggcaaagcaatgaagaggagaaaagaggagatgctagtatgatatagagtcaatccaagtatatatagatagattgatccaaattaagcaraactgggatatacagttttgaatatacagtaatgaaattcaatactaataacatcaaacacttacagagcacttgttaagtgccacacactgttcaaagc

SEQ ID NO: 552492 - DNA, 201 bp, Homo sapiens
gaaggcagggcacacatggcaggtcaagttcctgctatccagggaggtggcccagagcttccctgctgctcctggaggaagcagagtccaagctggcccaratgaggccccgggcagcactgcttctgtgtgggtatggccagtcgggacgtggcgccacacactgctcctccgaactctggtgaagggctgcccagcctc

SEQ ID NO: 552493 - DNA, 201 bp, Homo sapiens
ggtcctctgaaaggatcttgaggatccccaggggtctagagaccacattttcagaacactgctctaggatgacagcatgactgaaataaacctagagttgyaaaggcctcagacatgaacaaatctaagccctctcagttcaaaataagagtagactgggctgggcacagtggctcatgcctgtaatcccagcactttggg

SEQ ID NO: 552494 - DNA, 201 bp, Homo sapiens
ccgaaacctagagaagccaataatattccttgtttgacataagaaaatgttacagagtttattataataaccgttgttatcacaatgtaaaacccgttctytaatgcaaaggaaagcatctagcctggcaactgacaatgccaggtgctggcaagaatgcagagcaactagaactcacattcactgctggtgggaatgcaa

SEQ ID NO: 552495 - DNA, 201 bp, Homo sapiens
gaaagcatgtcagtacgtcccacttcacagcagtaactattttagtaatgctcactcttccgactgaaaataaaatggggcaagagtggttatatgcttcyaggcaattccattgtggagagctgggaacctgaagcaagcataagaacagaagcacctaatgcgtagaatagaggctgacaccaaaatcacctaaatgtt

SEQ ID NO: 552496 - DNA, 201 bp, Homo sapiens
tatcaagtcaggctctgtaataccctctcccaaatcggcatgtctttctttggacttctactcatttattgggctttctgcctagattgaatggaaatttytcttcaagccaggttccaaactccctgcctgacctagtccatagttcagtcttacctatgtaatgaaacttcttcctaattaaacaacaaacttcccttt

SEQ ID NO: 552497 - DNA, 201 bp, Homo sapiens
ccagaccttctcacggacatctaccaactggccctatttcactgctctgtaattcagaccacctgtatcaagtcaggctctgtaataccctctcccaaatmggcatgtctttctttggacttctactcatttattgggctttctgcctagattgaatggaaatttttcttcaagccaggttccaaactccctgcctgacct

SEQ ID NO: 552498 - DNA, 201 bp, Homo sapiens
ctactggcctcccagaccttctcacggacatctaccaactggccctatttcactgctctgtaattcagaccacctgtatcaagtcaggctctgtaataccmtctcccaaatcggcatgtctttctttggacttctactcatttattgggctttctgcctagattgaatggaaatttttcttcaagccaggttccaaactcc

SEQ ID NO: 552499 - DNA, 201 bp, Homo sapiens
aaagacagctcaagcatgagccacttggggttgttagccctactgggctggctccataccagggggctgtcacaggccaaccaccgagggacttttatgcyatttggaggaatgaaattgagtgaacacgagcacgggagggaggggagcaaccaaccagaaacagaaacagagggagaccaggtcatttgaacaggagcg

SEQ ID NO: 552500 - DNA, 201 bp, Homo sapiens
tgaatagtacaataaaatttcaaagctatgagggaactcagaaatgagtaacttgagaactaagttatatttctatcattttgaacgctactgctattatrctgatatttttcatcttaccagaaaaatgaaattaaaagcatattgttttatattgaattttttattttatttttatgctggcctcattttgaaaagtta

SEQ ID NO: 552501 - DNA, 201 bp, Homo sapiens
atttgtttttcccttatctgttgagtgtttctggaggaaggccatatgatagttaaactcggccattttgcctcctagtgcgtgtgcccactcgcctatcycctgagaccttatcaggaggctgatcacctgcttcaggtgttgctttttttttttttttttttttttgagaaagagtctctctctgtcacccagattgga

SEQ ID NO: 552502 - DNA, 201 bp, Homo sapiens
gggagcctgcatatgcacagatcagatggcgtgagaggaagagagtaagtgagtgcaagtgcagaggaggcccccaggctcttttcaacaaccagttattrcaggaatgaagagaagtcactcactcccttgagaattccaccaatctatttgtgagggatctgctcccatggcccaaacacctcccaccatgccccacat

SEQ ID NO: 552503 - DNA, 201 bp, Homo sapiens
ccttatgcacttgtattatgtcactgttcacctatgtttgtgcaagcatggctgaaggactaacatcaaaattcagaaactggtttctgtaagaaatttamtctaaatgctgagctgacagagattatgttcagaagaccagtggcagcactgaaaagtcagccatgtgggtgattcttacaagaggcttccatccctgta

SEQ ID NO: 552504 - DNA, 201 bp, Homo sapiens
tgtcatctaccatcaccagtgtttcatgaaataaaggatttttaaaaccagaagcatagaggcatataacctcagcaaaacaacagtttttaaatcaaatstagttttatgaaaatattgtttctatttttctaaattttcatggactcataaaaccatgtatttaacctgccctagaggattgccaatgccctttggggt

SEQ ID NO: 552505 - DNA, 201 bp, Homo sapiens
tgtccatccatcagtccattcttgagttatctctaagcttgtttttcctttagtgcagtggccttaatttatgcttttaagttcttttccatagaaaaatwaaaaaataagtttgagtgactttgacatcctcagttgagaaaaacagcagcaattgggtccttgtgcatggaagggccacctcagacttcagttttataa

SEQ ID NO: 552506 - DNA, 201 bp, Homo sapiens
cagaggcagggagaccagtgtaggtgggttttgcattatgccaagcaagcgatggcagctggaactaaggcattgaccctgtttctggagaggagggattraatcagagaactattgaagagatggaatcaacttgatttgagctgaggtgaggagggaagaggaaacattgatgtcagggtttgtcagggttcaaccaga

SEQ ID NO: 552507 - DNA, 201 bp, Homo sapiens
agtaattcactaaatggatagtaaactgctaaagggagttagtgaattgaaagatatcgcagagaagttgaaatctgcaaggtaaaataagatctaataakagtttatggagaatatctacaaaatagaggagaggcaatatccaaaaagttgatggctgagaatttttcagaagttttcagtttgaaagagtaaaactaa

SEQ ID NO: 552508 - DNA, 201 bp, Homo sapiens
gtaattcaaacatgggttcaaaagtgctcatcttgaagtagtctagaaatccaccagcagccactaaacccaacgtagatgagggaacacgggttgcatgyagctgtaaggcaagaagaaggaatggagagaccgagagtgacatcagctggagaactaagggaggtgggaagtataaagaggagatttgaattggctgca

SEQ ID NO: 552509 - DNA, 201 bp, Homo sapiens
ccttgctcaatagtaggttccttgtctgtgatgttttaagagaagtagtaagggtggcttctcccatcctggtgcttctgtgtttggtttatattacttaraatctaaattgtagtggttattacctcctgagaagaaaagtagtaactggagtccttgtcagtattttcctaccccagtgtgtatcagactgttttcaga

SEQ ID NO: 552510 - DNA, 201 bp, Homo sapiens
gtaaactgctaaagggagttagtgaattgaaagatatcgcagagaagttgaaatctgcaaggtaaaataagatctaataagagtttatggagaatatctasaaaatagaggagaggcaatatccaaaaagttgatggctgagaatttttcagaagttttcagtttgaaagagtaaaactaatttcttaccatgataagtaa

SEQ ID NO: 552511 - DNA, 201 bp, Homo sapiens
cgtgaacctgggaggcggagcttgcagtgagccgagatcccgccactgcactccagcctgggcgacagagcgagactccgtctcaaaaaaaaaaaaaaaargaaaaaaaaagaaattaaccaaaatgaagcattaaaaaaatgaaagcatccttaatgagctatgggacaacctctagggactactacaggtgtaattaga

SEQ ID NO: 552512 - DNA, 201 bp, Homo sapiens
ccccgtctctactaaaaatacaaaaaattagccgggcgtagtggcgggcgcctgtagtcccagctacttgggaggctgaggcaggagaatggcgtgaaccygggaggcggagcttgcagtgagccgagatcccgccactgcactccagcctgggcgacagagcgagactccgtctcaaaaaaaaaaaaaaaaagaaaaaaa

SEQ ID NO: 552513 - DNA, 201 bp, Homo sapiens
ttggctatatatttgtgtgtgtgtgcatgtataatttttttctctttctctttcccacctcatgttataggtcattgttgtgtatctagagcagagggagwacttggtgggttctgccacatgggcaaagctttctactgaggctgaaaagctctatgcctattgtctccatgccatgtttacatagcacctgtttattac

SEQ ID NO: 552514 - DNA, 201 bp, Homo sapiens
gagtacccgctcagctgctctttttctggtgtggtcagaccagctgggtcctctgaaacatgaatccatagtgcttcctttgttatactatttctgactcmgttttctctaaacggctgtaaaatttaactgcctagctgtattttctttctgtggactttatgctctcatatttaggagaaagaataagagaacaccaac

SEQ ID NO: 552515 - DNA, 201 bp, Homo sapiens
cctttgtccgttttttaataaaaaacaaaaagatttttaaaaagtgagtttaatacattgcagtagaaattaaccaaaatgggccgggcgcggtggctcasgcctgtaatcccagcactttgggaggccgaggcgggcggatcacgaggtcaggagatcgagaccatcccagctaaaacggtgaaaccccgtctctactaa

SEQ ID NO: 552516 - DNA, 201 bp, Homo sapiens
acgatatggaatttatgtaatttgttcattatgattcacaaccaggaagcattctgcaaaatctgatggtgagaaacaagatgaggattgttttcctaccyctgtgtgttcctttaagtaattacacaatattgggacatcagagaaacttaatttgtttcagactgacaatttaggtcttagccaagaaacctttgctca

SEQ ID NO: 552517 - DNA, 201 bp, Homo sapiens
tttttttgataatagcgatcctaacaggtgtgaggtgctatctcattgtggttttgatttgcattttcctgatgattattgattttgagcatgttttcatrtacttgttagccacttgcttatctttatttgagaaatgtctattcagatcctttgtccgttttttaataaaaaacaaaaagatttttaaaaagtgagttt

SEQ ID NO: 552518 - DNA, 201 bp, Homo sapiens
tctcacttctctaaagaaatacctgaaactgggtaatttataaagaaaagaggtttaactggctcactggtccacaggctgtacaggaagcatggctgggraggccttagggaaacgttcagtcgtggtggaaggtgaaggggaagcaggcacatcttacatggccagagaaggaagagagtgaagggggaggtgctacac

SEQ ID NO: 552519 - DNA, 201 bp, Homo sapiens
tcgtttgattgttgggcttttgtttatgttgcctgtaggttccttttctttttgtttttcttttacctcctagtgacagccattctaaacaaattgccagyattgtcttcctctgttgacatccttcccagcaaggaatttaaaatagcatctccccctccagaatgtgctgtgagggaagaggtgattagcataaagatg

SEQ ID NO: 552520 - DNA, 201 bp, Homo sapiens
gctgctacctctctctccaccctcatcttgctcctcactctcccactcagccacatggccatggttgagtctatgctcgtgcatcatgcccccattctacygcagggcccttgcacctgctgttgctactgcttgggattctctcccctcccctccttatctcatgaacttccatgcatcctcagcctagtcctcatgtcc

SEQ ID NO: 552521 - DNA, 201 bp, Homo sapiens
atggagcctgccttttatatgcaaatatttggaagccattaattccccagttcctgccactactcaccctcttataagaccctgtctgtaccatccaaatkgcaaattgaagttcccacccaacaagaactattaagaactttaagatacggtgatagcctgcagcctgaaattgacttatttttgacactgttgtgctga

SEQ ID NO: 552522 - DNA, 201 bp, Homo sapiens
ctagagaagaaaaatgttctcaaaattcaaaacatgtctcctggggagactcttcattaggagtgggcatttcaaactcctccgcagttgtctaatgcagsctggcccagcattcagtgacggcactagggctgctccacacacagcttccagaagcatcgggctccggctgccacacagtcccagttggtgtgtaacaga

SEQ ID NO: 552523 - DNA, 201 bp, Homo sapiens
tctactaaaagtacaaaaattagcctggtgtggtggtgtatgccttagtcccagctacttgggaggctgaagtgggataatcacttgggcctgggaggcaraggctgcggtgagccaggatcgcaccactgcactacagactaggtgacagactctgtctcagaaaaataaaataaaggtacagcaaaacctatttgatca

SEQ ID NO: 552524 - DNA, 201 bp, Homo sapiens
gagtgctaggattacaagcgtaagccactgcacctggccaggtgttttctattgggagactgcatttccctggtgccagctgtgaccaattgttattttaragggtttaacaatggcctgactatcacctgatggtcgccagacattcctgggggagggccctcccctgccctgatcatgtctacctaactgcctactcta

SEQ ID NO: 552525 - DNA, 201 bp, Homo sapiens
catttgttgactcaggtgacagtagctgggtgtagagggaggcaagaagttaatttacctctgtttgagggatccatgggaggcgagggagtagatagacsctgaatgtagattattatcaatttctgaggcttaggttcttaggaaagaaaaaaggacatttcaaaggtggagttcggattaggagagtatcatctgttt

SEQ ID NO: 552526 - DNA, 201 bp, Homo sapiens
ggagcagccttttattcatctcattttattatgctaaaattttgttccttgttctgcacatgtgaagaaaataagaattttcttttcttcttagttttttktttgtttgtttgtttgtttttttttgagacagggtctctctctgttgtccagactggagtgcagtggcgctatcttggctcactgcaagctccgcctgcc

SEQ ID NO: 552527 - DNA, 201 bp, Homo sapiens
cctggtgccagctgtgaccaattgttattttagagggtttaacaatggcctgactatcacctgatggtcgccagacattcctgggggagggccctcccctrccctgatcatgtctacctaactgcctactctaacaatactactcctgtggtatggggatcctaagccaaaaagctgaaatgaacatgttctagcactaca

SEQ ID NO: 552528 - DNA, 201 bp, Homo sapiens
aacattaccatgatcacaaaaggtgctattcgataaccctgggctagagcaagactctgttgcatcactcattcattcatccatccgtccatttattcacygagcatttgttatgtgccaagaagtatggttggggctggagcattaaggcacacttccagctagcagaaaacataaacataagctaactagaatgcaatg

SEQ ID NO: 552529 - DNA, 201 bp, Homo sapiens
atacaaaaattagccgggcatgatggccgttgcctgtaatcccagctactcgggaggctgaggtgggagaattgtttgatcctgggagacagagattgcartgagccaagattgcgccactgtgctccagcctgagcaacagaccgagactgcgtctcaaaaaaaaaaaagtaaaagaagatgaaagagggggacagtgca

SEQ ID NO: 552530 - DNA, 201 bp, Homo sapiens
accttgtctctttaaaaaaaagaaaaaaaaaattaaaaacaatattcatattgacttctagatcattaccaaacagtcctttctcttctgccctccgcccwaacatttcacagcagggtatgaagcctttgccttccttgcctctattatatcctatcctcaccttccgttgtttttttgttttttgttttgagacagggt

SEQ ID NO: 552531 - DNA, 201 bp, Homo sapiens
aatgaatgaaagggaaaattgcaaggggaacacagtttatcagcaagaaatagactatcagtctgcagattagacaattatggttgtaaagacaggtgcartggcatgtgcctataatctgagcgactccataggctgaagcaggaagatggcttaagcttgagttcaagaccagcctggacaacacagcaagacttcctc

SEQ ID NO: 552532 - DNA, 201 bp, Homo sapiens
agtagagacagggtttctctatgttggttaggctggtgttgaactcctgacctcaagtgatccacccgtctcagcctccctaagtgctgagattataggcrtgagctaccacacccggcctgatcatagttatttatgtataccttatcccctcgttagactaattacctgaagagcttctgtcattcagctgatgtttag

SEQ ID NO: 552533 - DNA, 201 bp, Homo sapiens
agcactttgggaggccaatgcaggtggatcacttgagattaggagttcaagaccagcctgagcaacatagcaagacccagtctccacaaaaaaaaaaaaamaaacctcattcaggtgcacctgtggtaccagctacttgggaggctgaggtgggaggatcacctgaactaggcaggtcaaggctgcagtgagctgtgatca

SEQ ID NO: 552534 - DNA, 201 bp, Homo sapiens
gtaagtacatagtaggcacccaataaatgtttgggtaaatcagatcttcagcataacaggagatatttaagctgactgtgtaggcattggtgtaatagtgytacttccttacaccattcaaaaacagttcaggatgaggtctcagccctgaggcctctgtgtagctatgtcacagcactggtgacattttgttcctttcca

SEQ ID NO: 552535 - DNA, 201 bp, Homo sapiens
caagagccaccgcacgtggccccaagtttctttgtagtagggacgaggccttagacatttgtgtccccaacatatgatgtaagtacatagtaggcacccartaaatgtttgggtaaatcagatcttcagcataacaggagatatttaagctgactgtgtaggcattggtgtaatagtgttacttccttacaccattcaaaa

SEQ ID NO: 552536 - DNA, 201 bp, Homo sapiens
ttagagttgagcacttcttggctagaagggagccagtccagcctcccagcagggcagagggccccaggctttgctttgcatcactttttttttttttttttgagacatggcatcaggctggagtacggtggcacaatctcggctcacttcaggctcgacatcccaggatcaggtgatcctcccacttcagcctcctgagta

SEQ ID NO: 552537 - DNA, 201 bp, Homo sapiens
attttgcttttgttggtagataccacccctttctgaggactccatgagttcttggagctccttctagatcctggactgggattttctctttcttctccgcrtacccctacgcagaaatttcagagtacttctgtggccattacttctcattttctttcttcagatgcttttaaagactggtgtgggtaacacctggatact

SEQ ID NO: 552538 - DNA, 201 bp, Homo sapiens
catgagttcaggagttcaagacaagcctggccaagaaggtgaacccatctttactaaaaatacaaaaaattagccgggtgcagtggcaggcgcctgtaatsccagttactcgggaggctgaggcaggagaatcactttaacttggagggcagaggttgcagtgagctgagatcacgccactgcactccagcctggcgacag

SEQ ID NO: 552539 - DNA, 201 bp, Homo sapiens
tattttttagaacagatttaggttcacaacaaaattgagcagaaagcacagagatttcccatattcactcaacccacacacaaaattggcacgatcattgktcactgcagtcttgaccttccaggctcaagcgttcctcccacttcggcctcctgagtagttgagactacaggtgtgcacaaccacacctggcttattttt

SEQ ID NO: 552540 - DNA, 201 bp, Homo sapiens
ctctctgctcacaggtttggattttttatcacctgagttaccaacaaactatactcagatgagtgtcaagatcattttgtttgggtttcagaagtgtagcmccttcctcaggaacactattttaacgtccctgatgtcctctttcttgttgaaaaacagtcttttaatagttttattttcttgctttccaaagtgctacaa

SEQ ID NO: 552541 - DNA, 201 bp, Homo sapiens
cagcagtgatttcaatgcaaaaagacatctcaacagaaggaggaataccaaacacaaatatctgatccatgtaggaatcattttttaaacgaacataccccattcatgaaaatgaacacctttcagatcacagtctctggttaagaatcgtgtcagggctaataggcactgttctgatataaatatttgtgccttttggta

SEQ ID NO: 552542 - DNA, 201 bp, Homo sapiens
ctctctctgccaggctttggtatcaggatgatgctggcctcataaaattagttaggaagaattccctctttttctattgattggaatagtttcagaaggamtggtaccagctcctctttgtacctctggtagaatttggctgtgaatccgtctggttctggactttctttggttggtaggatgttaattattgcctcaatt

SEQ ID NO: 552543 - DNA, 201 bp, Homo sapiens
aaattgttttgggaagtgttagctatatactttaatgtactttaccaaagtagtgttttggtgagctggacatactgattaaaaagcattattgcttcacyttaatatttaggtttcaattgcccctattttggtaccatcatgcatttactgtatgcttcacatgtcttaagaggcaaaagatacagaggttttaacctt

SEQ ID NO: 552544 - DNA, 201 bp, Homo sapiens
tcctcttaaatgactttgaagtcttgctaagggaattaagacttagggaaacaagtggtatttctctctctctctctctctctctctctctctctctctctgtagctcaaggtcatgacttagaagagaagggagatcgtgggaagtgatttatgttgatgatgccaaagtgtgaactctaggttcctggcccatgggtta

SEQ ID NO: 552545 - DNA, 201 bp, Homo sapiens
ccttgtctctttaaaaaaaagaaaaaaaaaattaaaaacaatattcatattgacttctagatcattaccaaacagtcctttctcttctgccctccgcccawacatttcacagcagggtatgaagcctttgccttccttgcctctattatatcctatcctcaccttccgttgtttttttgttttttgttttgagacagggtt

SEQ ID NO: 552546 - DNA, 201 bp, Homo sapiens
ggataagctttttgatgagctgctggattcagtttgccagtattttattgaggatttttgcatcgatgttcatcaggaatattggtctaaaatgctctttytttgttgtgtctctctctgccaggctttggtatcaggatgatgctggcctcataaaattagttaggaagaattccctctttttctattgattggaatagt

SEQ ID NO: 552547 - DNA, 201 bp, Homo sapiens
tgagaacccatgcacagcatgacagaggagtagcatggtgctggggtggcaccatgatcaataacttgaaggggcagcttgaggtagtcttggctctttcyctagccagtctgtggcttcagcaagcagcctcactttttaaatcctcagtttgcatattcataaagttaggtcatcgacttagcccttcccagctgtaca

SEQ ID NO: 552548 - DNA, 201 bp, Homo sapiens
ttcctcttaaatgactttgaagtcttgctaagggaattaagacttagggaaacaagtggtatttctctctctctctctctctctctctctctctctctctctgtagctcaaggtcatgacttagaagagaagggagatcgtgggaagtgatttatgttgatgatgccaaagtgtgaactctaggttcctggcccatgggtt

SEQ ID NO: 552549 - DNA, 201 bp, Homo sapiens
aaaaacaatattcatattgacttctagatcattaccaaacagtcctttctcttctgccctccgcccaaacatttcacagcagggtatgaagcctttgcctyccttgcctctattatatcctatcctcaccttccgttgtttttttgttttttgttttgagacagggtttcactctgtcgtccagtctaaactgtagtagca

SEQ ID NO: 552550 - DNA, 201 bp, Homo sapiens
aagctgacttgatcatggtggataagctttttgatgagctgctggattcagtttgccagtattttattgaggatttttgcatcgatgttcatcaggaataytggtctaaaatgctctttttttgttgtgtctctctctgccaggctttggtatcaggatgatgctggcctcataaaattagttaggaagaattccctcttt

SEQ ID NO: 552551 - DNA, 201 bp, Homo sapiens
gttcctcttaaatgactttgaagtcttgctaagggaattaagacttagggaaacaagtggtatttctctctctctctctctctctctctctctctctctcyctgtagctcaaggtcatgacttagaagagaagggagatcgtgggaagtgatttatgttgatgatgccaaagtgtgaactctaggttcctggcccatgggt

SEQ ID NO: 552552 - DNA, 201 bp, Homo sapiens
tcactctgtcgtccagtctaaactgtagtagcacaaccatggctcactgtggcctcaacctcctaggcccaacaaatcctcctacctcagcctctgtttasctaggactacaggtgcaccaccgtgcctggctaattatttttttcttttgtagagatgggggggtctcactgtcttgccagggctggtcttaaactcctg

SEQ ID NO: 552553 - DNA, 201 bp, Homo sapiens
tatgcaaacacctacacttcaaattagagtagatctcaccctccaagtagtagcttagtgtatgatcatttgggctcccttgctaggtggggaggcagagrccgcttcatccttctggtgctagtaacaacaatggctcatttggggacccttccctgagtgttttttttgtttttgtttttgtttgttttattttgtttt

SEQ ID NO: 552554 - DNA, 201 bp, Homo sapiens
ccacaatggttgaactagtttacactcccaacagtgtaaaagcattcctatttctccacaacctctccagcatctgttgtttcctgactttttaatcgccwctctaactggtgtgagatggtatctcattgtggttctgatttgtatttctctgatgaccagtgatgatgaggatttttttcatgtgtgtgttggctgcat

SEQ ID NO: 552555 - DNA, 201 bp, Homo sapiens
atgacatttaaaatataatagtaagatctaaccaaacatcagactcttcttgtgttgccttaaaggacacacacacacacacacacacacacacacacacacgctttctctctctttcatgtagtgaggggggaagagctggctgcctgctgtaaggccgcttgaaggttcagaaagcagcctccatttactgagcactgt

SEQ ID NO: 552556 - DNA, 201 bp, Homo sapiens
aaaagtgctcatcttgaagtagtctagaaatccaccagcagccactaaacccaacgtagatgagggaacacgggttgcatgtagctgtaaggcaagaagarggaatggagagaccgagagtgacatcagctggagaactaagggaggtgggaagtataaagaggagatttgaattggctgcatcttgtgaggcctgggcta

SEQ ID NO: 552557 - DNA, 201 bp, Homo sapiens
tttgtctgctgtttccctggtgctgcttggctctctgggatttttcctgctcaagagttgtctgcagaaaagtattccttaagcctgaacctgctttgaaracaggaggctataagtggggaggttcaagcgtgctggtgggtcaaaatgacaggtgcaccaccttggcatcccacctaaccttgagagcaggtggctaaa

SEQ ID NO: 552558 - DNA, 201 bp, Homo sapiens
atagggtagataagccagctagtcagaagtagatgttatatccataccttacctctttgtccaccaattttctgaaaatagagatcccaaatatttatttktcttagtgttttatatcctacccctctagttacattttttcaaatgtaatgttttatttctcccagttttattgaggtatgattgacagaaatcatgtat

SEQ ID NO: 552559 - DNA, 201 bp, Homo sapiens
ctactaaaaatacaaaaaattagccgggcatggtggcgggtgcctgtagtcccagctactcaggaggctgaggcagaagaatggcgtgaacccaggaggcrgagcttgcagtgagctgagatcacgccactgcactccagcctgggtgacagagcgagactccgtctcaaaaaaattaaataaataaataaataaataaaa

SEQ ID NO: 552560 - DNA, 201 bp, Homo sapiens
ttttttttcaaatgaaagtaatctgtgtccaatggtcaaaatatccacaattatggatacattaaaaagaaaaccctcagataacttttttaaatattttkatgactgtacatgtgtaaacatgtgtgcatataagactatataaacttttatgattgcacaaaaagatagactaataaccgtaagtgttttcctctgaaa

SEQ ID NO: 552561 - DNA, 201 bp, Homo sapiens
tgttcttccaaataaatatctatttcaattggcccaaaactcttgcagcccatggggtggccttgcagactgaacactgttgaaaaaccacaaaatatttmtcctgtctccagtttctggggaataaagcagtcatatcctcagaaagctctgaagaagctctcagcaaaggacggggagtcattgacactctgtctgcca

SEQ ID NO: 552562 - DNA, 201 bp, Homo sapiens
tttttttcaaatgaaagtaatctgtgtccaatggtcaaaatatccacaattatggatacattaaaaagaaaaccctcagataacttttttaaatattttgwtgactgtacatgtgtaaacatgtgtgcatataagactatataaacttttatgattgcacaaaaagatagactaataaccgtaagtgttttcctctgaaaa

SEQ ID NO: 552563 - DNA, 201 bp, Homo sapiens
ttgtgtcagaaacccagaaggactaaaactaacataaatgactatagggtccttgagagtagaaaccatctccttgccatcttgactttttttttttttttggatttactcataaagtcacagagatctaattgcaaggttacagattcaaatgcccatgaggccaggctggtcacttcaatgacaaaagtggacagagta

SEQ ID NO: 552564 - DNA, 201 bp, Homo sapiens
caaatgaaagtaatctgtgtccaatggtcaaaatatccacaattatggatacattaaaaagaaaaccctcagataacttttttaaatattttgatgactgkacatgtgtaaacatgtgtgcatataagactatataaacttttatgattgcacaaaaagatagactaataaccgtaagtgttttcctctgaaaaccaacag

SEQ ID NO: 552565 - DNA, 201 bp, Homo sapiens
taaacttttatgattgcacaaaaagatagactaataaccgtaagtgttttcctctgaaaaccaacaggtttttacaaattgtgtgcagccatgtattttakcatctcatttttcattaagcaaccatatgtttgctctgtttgtaccaagttcttgagaagagttcctttaatgccattaactccatagggtttgacatat

SEQ ID NO: 552566 - DNA, 201 bp, Homo sapiens
ccaacaggtttttacaaattgtgtgcagccatgtattttagcatctcatttttcattaagcaaccatatgtttgctctgtttgtaccaagttcttgagaaragttcctttaatgccattaactccatagggtttgacatatgcaacagcagtaagtattgaatgtggtggcaaggaggtgggtggtgattttttaaaaaag

SEQ ID NO: 552567 - DNA, 201 bp, Homo sapiens
cctggcacaagggagatatagaaccagtatctgtttactgaacgaaagatttaaaaacaggctgggcacggtggctcatgcctgtaatcccagcactttgraaggctgaggtgggaggatcgcttgagcccaggagttcaagaccagtctgggcaacatggcaaaatgctgtctctacaaaacaaatccaaaaaaaaatta

SEQ ID NO: 552568 - DNA, 201 bp, Homo sapiens
gaaccaggtgttaagttgggcattgaagatacaaagcagaaaaaaacaatgccaaccctcatggtgtttacagtctagtgtcaggacagggccataaatckatgattacagtttcacacaaaactgacagacaaagatttacccacagtaaagcatataggtaaatcttatattagtgggtgtgaaaggattgtgcctgca

SEQ ID NO: 552569 - DNA, 201 bp, Homo sapiens
tgtcataagtgtcatattcaaagatccataggttgagctgttgggttggacacatgaaatagaggggacaagatttcatctctttatttcccaccaactaytggcagcctttaccttgggaaccaccttggctatttctgccaggaaacactattgagagctccagtcactgctgttttaaatgagactttgggaattgaa

SEQ ID NO: 552570 - DNA, 201 bp, Homo sapiens
actagaatgagaaattcccaaagctaagtcctgatatcacatttctttgtcatgttttccggaaaagtccaagtccggttttaaggccactccacctttttggtctgggaggagtaacttaacctctctgggctcagttctctcctctgtaagacaggacattataaggccattgagagattttagatactataagtcagc

SEQ ID NO: 552571 - DNA, 201 bp, Homo sapiens
gaatcgcttggacctgggaggcagaagttgcagtgagccgagatcgcaccattgtactccagcctggtcaacagagcgagactctgtctcaaaaaaaaaaagaacacagaccatcacttctgctgactttcctctcttcttctctgtagacccagtaccgtagtagccactagttttgtacaaacatgaccccttttgttc

SEQ ID NO: 552572 - DNA, 201 bp, Homo sapiens
gatgacatttaaaatataatagtaagatctaaccaaacatcagactcttcttgtgttgccttaaaggacacacacacacacacacacacacacacacacacacgctttctctctctttcatgtagtgaggggggaagagctggctgcctgctgtaaggccgcttgaaggttcagaaagcagcctccatttactgagcactg

SEQ ID NO: 552573 - DNA, 201 bp, Homo sapiens
ttgaactcctagcctcaagtgacctcctgtctctgcctcccaaagtattggaattacaggcgttagccaccgtgcctggcttccatttgctctttaaccartatgatatccctaagctcaagctcttctgtttccagtttcccattggtgatttaccctttttatgttaccatctctggcccctagagcaaagcagttgct

SEQ ID NO: 552574 - DNA, 201 bp, Homo sapiens
ctgaaatattattagttctgttttatacatacacatgattactttttttaaaaatactgatttttttccaagtgcatccttttctgctgctgaactcagcytacgaatcaaaaggtgactttcactttgtttactttattctactccgtatacccagcacctgtgccagtgcccggcacctactaggtgctcagtaaatac

SEQ ID NO: 552575 - DNA, 201 bp, Homo sapiens
gtgactgacactattagcaatgtgctcagagccgtgttttaactcagctagggggagctgccaggtcctattgaaactacccaacacttgctcctttctgstaccagatattgctttccttttgcaacctgaaattggtaggaaacaaagaatgaccttggagttgcatcatctatgagactttcaaaccaaattattacc

SEQ ID NO: 552576 - DNA, 201 bp, Homo sapiens
tagcccttcccagctgtacagtgctgtgggagtaagtgtcataagagaagttgggtacttcttaatttctactgacttttcagtgggatatttgtatacaytacaaattaacattttttcatctgccttgtctgctttatcttaaaatctctgaatatgcattttaacaaaaagtggaagtgaattgaaaatctagttaca

SEQ ID NO: 552577 - DNA, 201 bp, Homo sapiens
acaccatcactacagccaggaagcccgttgccagcccctctgtcccaggcactatttgataggatgttttttggtttggggacttttttttttttttttttaaagagacagtctcactccactctgttgcccaggctggagtgcagtggtgtgatctcagcccactgcaacctccgcctcccagattcaagcgattttgat

SEQ ID NO: 552578 - DNA, 201 bp, Homo sapiens
ctcattgcagttaaaaatcatccaagtaagagtccagaaggcactaactcttaacaacaacaacaaaaaacaaaaactgcatagaggcagggacagggctsaagaggtaggtttgcataagattgtgaacgcccttgtatgtcatcaaaaggaactttatttacatcataagcagtgagcagccacaaagaatttttttta

SEQ ID NO: 552579 - DNA, 201 bp, Homo sapiens
atgtaagtgttctgagcacatttaaggtaggccaggctaagctctgatcagtaggctagttgtatgagatgcattttgacttacaatattttcaggttacratgggtttactgggatgtaaccccactgtaagcagaggagcatctgtgtacgtatgtatgtcttctataaagatctgtgcatatatgacccagcactcac

SEQ ID NO: 552580 - DNA, 201 bp, Homo sapiens
tttgtgtcagaaacccagaaggactaaaactaacataaatgactatagggtccttgagagtagaaaccatctccttgccatcttgactttttttttttttttggatttactcataaagtcacagagatctaattgcaaggttacagattcaaatgcccatgaggccaggctggtcacttcaatgacaaaagtggacagagt

SEQ ID NO: 552581 - DNA, 201 bp, Homo sapiens
gaaagcctctggctgcttccactcatggttgaaggcaaaggacagccagcatgtgcagaggtcacatggcaagagaggaaaggaggtgccaagctccttawaacaaccagctctcaggaactaatagagtcagaactcactcattgccatgaagatgcaccaagccattcttgagagatttgactccgtgacccaaacacc

SEQ ID NO: 552582 - DNA, 201 bp, Homo sapiens
atcctttttttttaatcggagggtgggctggtacactttaaattgcattttaaggctgggcgtggtggctcatgcctgtaatcccagcactttgggaggcygaggggaatggatcacctgaggtctggaggtcaagaccagcctggccaacatggtgaaaccccgtctctactaaaaataccaaaattagccgggcatggt

SEQ ID NO: 552583 - DNA, 201 bp, Homo sapiens
tagctcactgcagcatccaacttctcctaggctcaagcagtcctttcacctcagcctctcaagtacctgggactataggcacgtgccaccacactgggtgttttttttttttttttgtagaaacaggatcacaccatgttgaccaggctggtctcaaactcctggcctcaaatgatcctcctgctttggcctcccaaagtg

SEQ ID NO: 552584 - DNA, 201 bp, Homo sapiens
tcacaggtacacaaggagtacttataatttctatggtaagcatgattatgacagaaaatgaatcatgccacctgtgctgtgtcagttagcaacagaggaakaaaaatcagaaggatggagaaatctaagagtgtggcatcagtatcagtgggggggtgactatgacagtatttcctcagaactaagacacgtctttgtttt

SEQ ID NO: 552585 - DNA, 201 bp, Homo sapiens
ctccccttcccaggttcaagcaattctcctgcctcagcctcccaagtagctgtgactacaggcgcctgccaccacacccagctaatttttgtatttttttrgtagagatggggtttcaccatgttggccaggcttgtctcaaactcctgatctcaagtgatccatcccccttggcctcccaaagtgctggaattacagaca

SEQ ID NO: 552586 - DNA, 201 bp, Homo sapiens
gctgatatcttgaacttggatttctcagccttcaaaactgtgagaaatttacaagccacccagtttatgttgtgtgtgtttttgttttttatttctctcgctctctctctctctctctctctctctctctctctgtctctctagagaggcacggtcttattctatcatccagactagagtatggtggcacaatcatagctc

SEQ ID NO: 552587 - DNA, 201 bp, Homo sapiens
ttagcaacagaggaagaaaaatcagaaggatggagaaatctaagagtgtggcatcagtatcagtgggggggtgactatgacagtatttcctcagaactaaracacgtctttgtttttttttaacatatctgaattttatatttgatttttgctgccagccaggggacaggcatgacatgtcatctcctggacatatgtgaa

SEQ ID NO: 552588 - DNA, 201 bp, Homo sapiens
ggcgtgcagtggtgcagtttcggctcactgcaacctccccttcccaggttcaagcaattctcctgcctcagcctcccaagtagctgtgactacaggcgccygccaccacacccagctaatttttgtatttttttagtagagatggggtttcaccatgttggccaggcttgtctcaaactcctgatctcaagtgatccatcc

SEQ ID NO: 552589 - DNA, 201 bp, Homo sapiens
tgctgatatcttgaacttggatttctcagccttcaaaactgtgagaaatttacaagccacccagtttatgttgtgtgtgtttttgttttttatttctctcgctctctctctctctctctctctctctctctctctgtctctctagagaggcacggtcttattctatcatccagactagagtatggtggcacaatcatagct

SEQ ID NO: 552590 - DNA, 201 bp, Homo sapiens
ttttgtttttgagacagggtctcaatctgttgcctaggctggcgtgcagtggtgcagtttcggctcactgcaacctccccttcccaggttcaagcaattcycctgcctcagcctcccaagtagctgtgactacaggcgcctgccaccacacccagctaatttttgtatttttttagtagagatggggtttcaccatgttgg

SEQ ID NO: 552591 - DNA, 201 bp, Homo sapiens
ttgctgatatcttgaacttggatttctcagccttcaaaactgtgagaaatttacaagccacccagtttatgttgtgtgtgtttttgttttttatttctctcgctctctctctctctctctctctctctctctctctgtctctctagagaggcacggtcttattctatcatccagactagagtatggtggcacaatcatagc

SEQ ID NO: 552592 - DNA, 201 bp, Homo sapiens
actaggagagaaagcagattcaggtactcagagaaaaactatcataacaacatttatgtgaggtctcgaggcctaaatagagggatagaagcagaaaacayggaacgaaaatgaataagaaactaaatgatttaggccaagggataaaggtaagaggttaagtcattgacagcaccagttgcctatttaaatatgtctctt

SEQ ID NO: 552593 - DNA, 201 bp, Homo sapiens
agtgggggggtgactatgacagtatttcctcagaactaagacacgtctttgtttttttttaacatatctgaattttatatttgatttttgctgccagccargggacaggcatgacatgtcatctcctggacatatgtgaacatcaaaagggcagacacctgcaggggcggaaaagatttcctcacccatcacaaggtcccc

SEQ ID NO: 552594 - DNA, 201 bp, Homo sapiens
attacctttatcctctcatgtagctaatatttggggcagggaccagggggagttttgtttttgtttttgagacagggtctcaatctgttgcctaggctggmgtgcagtggtgcagtttcggctcactgcaacctccccttcccaggttcaagcaattctcctgcctcagcctcccaagtagctgtgactacaggcgcctgc

SEQ ID NO: 552595 - DNA, 201 bp, Homo sapiens
acttgctgatatcttgaacttggatttctcagccttcaaaactgtgagaaatttacaagccacccagtttatgttgtgtgtgtttttgttttttatttctctcgctctctctctctctctctctctctctctctctctgtctctctagagaggcacggtcttattctatcatccagactagagtatggtggcacaatcata

SEQ ID NO: 552596 - DNA, 201 bp, Homo sapiens
attctaaatgtaaaagttttggaaaccttagccaacctacttcaattctatatcccttattaaatatatacaatagtgatagataataaaaatgtgtctargtctcagctcttatgaaaaggataaaattaaaatttgaagtgttaagaaagaattatacatattttaattggctgctttttttcttcctggaagtaataa

SEQ ID NO: 552597 - DNA, 201 bp, Homo sapiens
gagggggtgcgaggagaccagatgggggaagctgaggatattcagagggcccgtcaggaagacactgatatggtaagctaaaaagttaaaaaaaaaaaaawtttttttttttttgaggcggaatctcgctctgttgcccaggctggagtgcagtggcgcaatctcggctcactgcaacctccgcctcctgggttcaagaga

SEQ ID NO: 552598 - DNA, 201 bp, Homo sapiens
ggcatatatgtttgatgaaatatcataccctgttgttatcctggaagaaagcaagcagtttgtggaaatcatgaaaggctctgtgtgtgaaggcgcctcaragtgacacaatatttaaggccctttcaaacctgcacatcctcagagggagagggtaggtggcccctgcagttatcaaagctgttgaggagttcccaacta

SEQ ID NO: 552599 - DNA, 201 bp, Homo sapiens
tgagtcttaatttttaataagtatctgaactgtggttagtatatgtgcattgaaactcctcccattcttgatattttcttttattcctttttctataattktgaattttacatatgttttcacattttattttatgcatctgtaaaaactttcatttcctcataggattaaagcaagatgtagattcttctctcaaccttt

SEQ ID NO: 552600 - DNA, 201 bp, Homo sapiens
atatttaaggccctttcaaacctgcacatcctcagagggagagggtaggtggcccctgcagttatcaaagctgttgaggagttcccaactaacccacagayatctgcctcaacagatcttctgacgcagccacccaggcaaatggatatcagccaaaaagagcccaagggtccctggtttaaagcaccatcaaagggccca

SEQ ID NO: 552601 - DNA, 201 bp, Homo sapiens
acattcagaccataacatgttcatttgtaaacagatggttcccaacttactttttttttttaatcagggcagccttcattttacaaagcagaatgaaagcmccgctacttttttttttttaactttctgatattgtgaaagcaatatgcatttggtagaaatcatacttcaaattgattttgaattttgacctttttccag

SEQ ID NO: 552602 - DNA, 201 bp, Homo sapiens
ctctgtgtcattgcatattctctgtagtgtcattgtaagtgacaccatagaattcttttgtttgggtttatgctagtttatttaatgagttattcattcartgatttcttctagttatttaatgttataaataatgtcagagacatttttgtgcccatactgtgtgtggctctgtgtgtgtgagttcttttaacaaggttt

SEQ ID NO: 552603 - DNA, 201 bp, Homo sapiens
cttggattcacacccaaattcttctcacccaaagcaccactgttgacctgacctattaagtgttagttcccttcattccttcccaggagaacctctctgtraaacctcgtatttaagcttccttgatacccatcagcaccccaagccttactcccagcagaattttcagagcccctcaaagtgatccagaattcccaccag

SEQ ID NO: 552604 - DNA, 201 bp, Homo sapiens
catcaaaaggacagggtcggggagccctgctgagatcaagggacacaggaagaagagagtaaaaaaacagcttgacacaagtctcttggctttccctcttmgcagtttcttactccaatgacacccctcccacatctgacataactagactgcttggaagagaatgcttggagttcaccacagacgttggcttgtataaat

SEQ ID NO: 552605 - DNA, 201 bp, Homo sapiens
ggtggctgcacctgcacccaggaggacagggctcctgtcccaccaacttgggagctcccacctgttcccagctcccaccagctccatggagcacacaacastggctgtgccacccctgctacagccagcatctttgcagcagctggtccagacaggctgctactgccatcaataagctgttcttcactgtgctgcaggaac

SEQ ID NO: 552606 - DNA, 201 bp, Homo sapiens
gaactacccccttaccttctgtagagagatagacaatagaacttccttatcttctatagcaagacagacaatagaaaggagtaggctcccttccccttgcwtatattgtgggggtgatgatgaggatgttgttccctttatcaatgagtttttcccataggaaacccatgggaagaagcatttcctctgaaccagctctag

SEQ ID NO: 552607 - DNA, 201 bp, Homo sapiens
ggtgttctgtaagacttatctcactaatttgatttgatgtgtgactttagagaagttttatagccctgatgttactataagcaggtgaaatgatacctgakatttcatgaactggcaaattcaacatagcaacataagccagaagagaagatggcacagatatgcaaattattgtgttaattcacagcacatgagtattcc

SEQ ID NO: 552608 - DNA, 201 bp, Homo sapiens
tgcgaaactcgactgcatgatttgtggtagtgggggactgcattcatgctttcccctaaaaaagaaaaaagaaaaaaatataaatatatatatattttacmtatatgttactagaatatatattttatataatatatattttaaaatatatctttatatatccatatatacatagtttcaacatgtcaataccaatatttc

SEQ ID NO: 552609 - DNA, 201 bp, Homo sapiens
ttgctatgcagttaagtttttaattattgggtgtgctttcaaaaatttttatttaattttcaggagtcaaaattatttttaaaaaataatttgaaagtttraaactaaattatcagtaaatctttaactacaaaaacatatatattaagttttgaaatgtccatggaatttgaagctaacttaaaaaaattgttgcccagg

SEQ ID NO: 552610 - DNA, 201 bp, Homo sapiens
aaacttgtctgggtgccaagtacacaaagacaagacaaacctcttttcctgaagttgtctagcaggagtcccatccagccgaacaagccactgtaggaagscttccccaggacatgagtcaggagctgaaccataaagcagccagccagacagtggagagctggaaaggaaagcgagtgtgggtgcatggaagggcagagt

SEQ ID NO: 552611 - DNA, 201 bp, Homo sapiens
ttgtaccacccattactctgcagtttacttttctcacttactatatcatggataactccaggtcacaaaatagaatttcactcctttttttttttttttttgagacagagtctcactctgttgcccaggctggagtgcagtggtgcaacctcggctcactgcaacctgtgcctcctgggttcaagcaattctcctgcctca

SEQ ID NO: 552612 - DNA, 201 bp, Homo sapiens
aggcttccccaggacatgagtcaggagctgaaccataaagcagccagccagacagtggagagctggaaaggaaagcgagtgtgggtgcatggaagggcagrgtaggatgcgcctgggaaactgtggggtgctctccatgcattgcttccacttcagtgctacttaggaaaacgctcacctgtagtgaccttctaggtgcag

SEQ ID NO: 552613 - DNA, 201 bp, Homo sapiens
gaaaaattaactttctctcccacttccataacttccttgccactcattgaaacataattatatgttatcaagctgctaggtgtcgaggtggtcagttaggwcaatgaaccaaacagaaagtaacaaccaaacctttcttctcttactgcagtagtcctggcaagaggcaaagaggaaagtgctcttccatttttccccata

SEQ ID NO: 552614 - DNA, 201 bp, Homo sapiens
gagaattaaatctagcaaaggagataagcaacctaaggatcaggcgataaggggtgtcattggagtacacatgtgtgagggacaggatgagagggctaacyaaccagtgttctggtttgggggaagttttcttggggagatgacagtggttcatttcttcaaacaaaatttgttagacatctgtcctactttgtgacaggt

SEQ ID NO: 552615 - DNA, 201 bp, Homo sapiens
aggcattcgcgacgagcctaggcaacatagtgaggcctcgtctctataaagaaaataataataatttaaaaaattaaaaataataaaattttttaaaaagwaaaattaactttctctcccacttccataacttccttgccactcattgaaacataattatatgttatcaagctgctaggtgtcgaggtggtcagttaggac

SEQ ID NO: 552616 - DNA, 201 bp, Homo sapiens
aacatgtactcttctcacaaatatgtactcttctcctctttgtctctccctctcttccccttcttgccttctgctgcctttttctttctttcatttttcayagaagggccctaattggctcagctcagagatcaggtggccatccctaaaccagtcacctctggccatggaaaaaccatatgaatgggacggaggagggtg

SEQ ID NO: 552617 - DNA, 201 bp, Homo sapiens
tgtgagccgtcatgcctggtctagacttctttatatggctaagattaacaagatctaaccttcaatcaaagagctgatgaattctttagtcatgcatgcatttaatccctcacttggaacctcttcttatacttttattttgaatgtgattggcagttctaaacctatttttctgggtcctttccataaagcacaagtgat

SEQ ID NO: 552618 - DNA, 201 bp, Homo sapiens
tttttttttttttttgatatggagtttcattcttgttgcccaggctggagtgcagtggcatgatctcagctcaccacagcctctgcctctggggttcaagygattctcctacctcagcttcccaaatagctgggattacaggcacctgccactatgcctgactattttttttttttttcattttggtgcttttgtcaagac

SEQ ID NO: 552619 - DNA, 201 bp, Homo sapiens
tagccttgactttctgggctcaagtgatcctcccatctaagctttctgagtagctgggactatgggcatgtaccacaacgcctggctaattttttctattwttttgtagagacgagggtctcagtatgttgcctaggctggtcccaactcctgggttcaagtgatcttcctgccttgacttccccaagtgctgggattata

SEQ ID NO: 552620 - DNA, 201 bp, Homo sapiens
agttcaagtttggtcacattaatagtgtgtggtgtgattccctctgggacttttgtctgtttgttctcatctcttttgtctgtttgttctcatctctgtckaaggggcctctccaggtgacttgtcacgtgcatgcgaagctgtaacagaatactgagaatctaagaaatagacctcagactctgttgtcttttttcttct

SEQ ID NO: 552621 - DNA, 201 bp, Homo sapiens
cttgggtgcctagtgaaatatatgtatcagactgttacagaatgctcaggctgcaggggaagatcacacctgttcacactttgtttttgtttttgtttttkttttgagacaggatcttgctctgttgcccaggctggagtgcagtggcatgatcatagctcatcatagccttgactttctgggctcaagtgatcctcccat

SEQ ID NO: 552622 - DNA, 201 bp, Homo sapiens
cccccatctctacaaaaaaaaaaagtcagaaaaattagccaggtgtagtggcacgcacctgcggtcccagctatgctggaggctgaggtggaaggatcacytgggcccaggaggtggaggttgcagtgaattgagatcacgccactgcactccagcctgggtgatggagtgagcctctgtctaaaaacaaaaacaaacaaa

SEQ ID NO: 552623 - DNA, 201 bp, Homo sapiens
ccttaagagtcattcataatgttttatcctgaaatattattagttctgttttatacatacacatgattactttttttaaaaatactgatttttttccaagkgcatccttttctgctgctgaactcagcctacgaatcaaaaggtgactttcactttgtttactttattctactccgtatacccagcacctgtgccagtgcc

SEQ ID NO: 552624 - DNA, 201 bp, Homo sapiens
aggttaactgtcagaacctaacaacccagaaagggtagatgatggcaggcccttcctcacacgtgtgtgtgtgtgtgtgtgtgtgtgtgtgtgtgtgtgttctacactgaaacacatttaactacatgagtgggtggattccatgctacagggctggctgattgcttaggaattaaagatgggaatgaatttctgcactcc

SEQ ID NO: 552625 - DNA, 201 bp, Homo sapiens
tcaggttaactgtcagaacctaacaacccagaaagggtagatgatggcaggcccttcctcacacgtgtgtgtgtgtgtgtgtgtgtgtgtgtgtgtgtgtgttctacactgaaacacatttaactacatgagtgggtggattccatgctacagggctggctgattgcttaggaattaaagatgggaatgaatttctgcact

SEQ ID NO: 552626 - DNA, 201 bp, Homo sapiens
aacatttgctttctttgctggataaatgtactcataagtcaagaccatcctggctaacacggtgaaaccccgtttctactaaaaatacagaaaaaaaaaaatagccaggtgtggtggcaggcacctgtagtcccagctatttgggaggctgaggcaggagaatggcgtgaatccgggaggcggagcttgcagtgagccgag

SEQ ID NO: 552627 - DNA, 201 bp, Homo sapiens
tggcccctcagccagcatatttgtgccgtggacttctactcaaccttatgtgccattcttggttagttttctccacttgcataacattcagagtgcagatrgtaaataacttttggttagtaaaaatatgctttccttgggtaggattttaaaaataaaataaaaatgagcaaaactcaatttctttctttctttcttttt

SEQ ID NO: 552628 - DNA, 201 bp, Homo sapiens
atacatacacatgattactttttttaaaaatactgatttttttccaagtgcatccttttctgctgctgaactcagcctacgaatcaaaaggtgactttcastttgtttactttattctactccgtatacccagcacctgtgccagtgcccggcacctactaggtgctcagtaaatacttgcaaatgaatccaatagaaccc

SEQ ID NO: 552629 - DNA, 201 bp, Homo sapiens
agcctttcaggttaactgtcagaacctaacaacccagaaagggtagatgatggcaggcccttcctcacacgtgtgtgtgtgtgtgtgtgtgtgtgtgtgtgtgtgtgttctacactgaaacacatttaactacatgagtgggtggattccatgctacagggctggctgattgcttaggaattaaagatgggaatgaatttc

SEQ ID NO: 552630 - DNA, 201 bp, Homo sapiens
tttctccacttgcataacattcagagtgcagatagtaaataacttttggttagtaaaaatatgctttccttgggtaggattttaaaaataaaataaaaatragcaaaactcaatttctttctttctttcttttttttttttttttttgagacggagtctcgctcttgtcacccaggctggagtgcagtggcatgacctcag

SEQ ID NO: 552631 - DNA, 201 bp, Homo sapiens
tccatctccaaacattctaagccccaaaactcccagctggatagagggtgtttcgcagcctcttcagactcaccctggggactgatccttgctccacaacyctgacttgagcctgctgttgttaagcatgcctcagattcactctccttcacagtgcagctctgtctttccagcagacagtttccatccaaaggcaaagtg

SEQ ID NO: 552632 - DNA, 201 bp, Homo sapiens
tatacaaataagattaagaaaagaaagacatgatattctcaccatccaaagacgatcactggcttgagcctctcatcatccaggtcgctccttggcctgttcttgtgtgatttccctgttcacatgtggcatctctcagaactgaattgacctgcgtggtagagagctgaaggccacccatcttgtaaagataacatcctt

SEQ ID NO: 552633 - DNA, 201 bp, Homo sapiens
aatccaggaggtggaggttgcagtgagccaagatggcaccagtaccctccagcatggacaacagagtgagaccctatctcaaaaaaaaaaaaaaaaaaaaagtaccacagttcggtggttttcaatatattcacaaggttgtctaaccactaccactaattctagaactttttatcaccccaaaaagaaacactgtattta

SEQ ID NO: 552634 - DNA, 201 bp, Homo sapiens
ttaactggggtcatgccaagctcttaaaagccacaagtagcatttgggctccaggcttatgtctgttcctgtccagccaggcctgggtggtgtttcatccyaggcctcctgagatttaagctactgctgagattttgttataggaaggcaagaagggggaccgaagatgtttctgtgctccggcctcctcccaaacccaac

SEQ ID NO: 552635 - DNA, 201 bp, Homo sapiens
gaatccaggaggtggaggttgcagtgagccaagatggcaccagtaccctccagcatggacaacagagtgagaccctatctcaaaaaaaaaaaaaaaaaaaaagtaccacagttcggtggttttcaatatattcacaaggttgtctaaccactaccactaattctagaactttttatcaccccaaaaagaaacactgtattt

SEQ ID NO: 552636 - DNA, 201 bp, Homo sapiens
ttgggctccaggcttatgtctgttcctgtccagccaggcctgggtggtgtttcatcccaggcctcctgagatttaagctactgctgagattttgttatagraaggcaagaagggggaccgaagatgtttctgtgctccggcctcctcccaaacccaaccagcccctgtggaatgtgcctctgccgggctaggacttggttt

SEQ ID NO: 552637 - DNA, 201 bp, Homo sapiens
atttatatgccgtacagttcacccatttaagatatacaattttggccaggcatggtggctcacacctgtaatctcagcactttgggaggccaaggagggcrgattgcttgagcttatgagttcgacaccagcctgggcaacatggcaaaaccctgtctctaccaaaaatacaaaaaactagccagatgtggtgacacatgc

SEQ ID NO: 552638 - DNA, 201 bp, Homo sapiens
gtttttaattgagatatgatttatatgccgtacagttcacccatttaagatatacaattttggccaggcatggtggctcacacctgtaatctcagcacttygggaggccaaggagggcggattgcttgagcttatgagttcgacaccagcctgggcaacatggcaaaaccctgtctctaccaaaaatacaaaaaactagcc

SEQ ID NO: 552639 - DNA, 201 bp, Homo sapiens
ctgaaagttaatattctgtgacccactgtaagagttacagatgccacagacctgccctgtgccatccatgtgttcttttttgtttttgtttttaattgagrtatgatttatatgccgtacagttcacccatttaagatatacaattttggccaggcatggtggctcacacctgtaatctcagcactttgggaggccaagga

SEQ ID NO: 552640 - DNA, 201 bp, Homo sapiens
atgtaggcaagaaactatggtgctagggctctgacagcagggaaggtgttgaaatctgaggattctggatttgtttgaaaggtagagatgacagtatttgrcataatgttaatagacaaaatactcaatccttgttgtgttactggaaaattgagaaggtgacaagttctagcaaagaaaagtatcaaaaagctttgccac

SEQ ID NO: 552641 - DNA, 201 bp, Homo sapiens
tctcagaggtggggggtgttcttgctgcaggccacatgaccagggtgatgatggggaacagagaagaaggtcagcaggaagtgagctaggagttttaaagsgaggaatccaaaagcaccaccaaattctaagaaaatgctgagaatgacatcctgggaaagagtgaaaaagcaatctgaacctaggctgaagtcatcgggg

SEQ ID NO: 552642 - DNA, 201 bp, Homo sapiens
atgtgccttaggagcaagagggatttgaaggaatgtcgtccactggaggtggtatgatcaggagagccagcttaggttcaataaggcaggctcaattagtratctgttcttgttgggtaaggttcctagattgggtgaatactgtatgcatagatatattctgagtttgtaagaaatcggattgtttcttctctcagcctt

SEQ ID NO: 552643 - DNA, 201 bp, Homo sapiens
atcacctgattctgaccctttttgttatcagcaaggatgccagggcccagagttaaagacaattaacagcccactgtggagttggcacctataatcacagrttcccaggctggtgctggtgctgtttctgccacaacacacaggctcctaccaccaattactcacatatatgtgaatttcctccaaagccatgaaccttct

SEQ ID NO: 552644 - DNA, 201 bp, Homo sapiens
caactccctataaaggaagaggtagtcagtgtggtgagtggatggggtctcagggaaaatgaaatccctagcagtcggtgtcagggcagcaggtcactaaytgagtgcaaaccttttttaaaatgttgtttatcccctacagggcatacaaaaccattgaggatgaggacttgaagttcccccttatatatggagaaggca

SEQ ID NO: 552645 - DNA, 201 bp, Homo sapiens
ctcacagttttggattcgtgatgagaatactgttgctgggtcacttcattattacacagaccctaaggccagaaacccatctcccctttttgctaattatscatatgccaacttatttcctccctcttcaagcatataaagacagtattttctggtttggtaaaagacacacacacacaattctgtagggagaacaactcc

SEQ ID NO: 552646 - DNA, 201 bp, Homo sapiens
tgtctgtttgttctcatctctgtcgaaggggcctctccaggtgacttgtcacgtgcatgcgaagctgtaacagaatactgagaatctaagaaatagacctyagactctgttgtcttttttcttcttctaatgacacagaatccagctgtctgagaaggatgcaattatgtgaggaaatgcctcctgctggcactaattcct

SEQ ID NO: 552647 - DNA, 201 bp, Homo sapiens
tggtgaagacaccggtggattccatgatatactcagcaccagcattgccccatctgattttggagggatctcgctcctggaagatggtgataggattttcrttgatgacaagcttcccattctcagccttggcagtgccatggaatttgccacagacaaaatcatactggaacacacagaccatgtagttgaggtcaatga

SEQ ID NO: 552648 - DNA, 201 bp, Homo sapiens
tgcgaagctgtaacagaatactgagaatctaagaaatagacctcagactctgttgtcttttttcttcttctaatgacacagaatccagctgtctgagaagratgcaattatgtgaggaaatgcctcctgctggcactaattcctgagctttgaattgttggtttgggtcctggcaaggtatttttgaaaactcaaactgcc

SEQ ID NO: 552649 - DNA, 201 bp, Homo sapiens
acattcccaaatgtcaccagctcacctgagtcttagtattccctggcctggaccacctctttgtagatgatgactctcctccctcaggaatttattttgtrtatttataaatatacaaaatacgttcatgtacatgtttccttcatgaaacatttgtttaaaaaaactgtgattacatatgcagtatatgttacttatgta

SEQ ID NO: 552650 - DNA, 201 bp, Homo sapiens
cctggcaaggtatttttgaaaactcaaactgccatataatcaggatagttgactctatcctcagtgcattcattttacaagtgacaaagtggagactgttratggtgcacaggttttccacgatcagaatctaggctttcttgcttctagtatgttcttactacaagcaggttagtcttttcaaacatggtttgccgtatt

SEQ ID NO: 552651 - DNA, 201 bp, Homo sapiens
ccctgccttgcagaccttggggagctgtctaggctaggaattcaaaactgccccaaaaatgccatagaagggataaagactcaggccagctttggaactaratatggctatatggcttgaaggtttgtaccaataaatgagtattacatgttaatataagatgatgtagctcttcagccacaggggtataaacctggctag

SEQ ID NO: 552652 - DNA, 201 bp, Homo sapiens
tagaaattgggacacagaaacatgggtcttaaatgatagagctgcttccgagtgttttctggagtggtgttatggtaggaagtgcctttcaataattctaytgtaaagacaaccttacaacttgaaacttgccccaagaaagacacttgaaaatagtagatctatgatggtacatttctggtgaatttactagagtgtgtt

SEQ ID NO: 552653 - DNA, 201 bp, Homo sapiens
tagtcatagacccaactcttctacaccagatccaggctcctcctgtgcctggatctcaaggcccagcccctttctacatctggtctccactgctgcatccyctctgtgcgggcctgtctcctcactctccacatggggtcttcaatccctgttcacgctcatctcagggcctttctcaggccattttcctcctctcccttg

SEQ ID NO: 552654 - DNA, 201 bp, Homo sapiens
tagtctcgctctgtcacccaggttgaagtgcagtggcacaatcttggctcactacaacacctgcctccccagttccagcaattctcatgcctcagcctccygagtagctatgactacaggcacatgccaccacgcctggctaatttttgtatttttagtagggacgagtttcctcatgttgcccaggctggtcttgaactc

SEQ ID NO: 552655 - DNA, 201 bp, Homo sapiens
ggaattggcctaactattaggatgacatttaagtcgctccaggttaaattgtaggacagagttagatattggaattcctgtatatatttagtggggtctgrtgagaaagagcctaaacactggctgatttgggaaaggtctgatagagaaaaaggcacatgtaccctgactatgccttcagctccagccacctctctaagc

SEQ ID NO: 552656 - DNA, 201 bp, Homo sapiens
ctcttgcaacatgtgggttaccataccctccctctttcccctccagcccacttttcgcctttaaatgttgaagccctcaaattcatctttggagaaaggcaccgatcacagactgtttctgtgattccatgtttttttctcccaggcattccttaacttaagttggcaaaatgaacttttaaatcaattgagacatgtctt

SEQ ID NO: 552657 - DNA, 201 bp, Homo sapiens
tgaggcttctttgcaagtatgcctattttctaaatttggaaaaaatctgtgtatttgagccctgaaaaagacagtctcttagcaacacgtgacaacaaagwggaacaaattaagaagtgtgttgtgatttgtgtatgtttgcactgttttgaaaaccaccctaaaggtaagtatttttaaagctgtttataacatttggta

SEQ ID NO: 552658 - DNA, 201 bp, Homo sapiens
agctggcaggtcatcattgccaccagcatttcaaagacacatggtccttccaaatggactgcaccaatttctcaatgttaatagatcatctaaaaaaaaaagctgtattatatactttccagaccctttgtttaaatgagaccttacaacagaggcccagtatgtaaaacagataggaacacttgtgatgtagagcaggtt

SEQ ID NO: 552659 - DNA, 201 bp, Homo sapiens
ccctgggctctgcccactagatgcctgtagcacccttacctggctgctgcaaccaaactgtcttcagacattgtcaaatatcccctgcagtagaaccagtrctctaaacttaaagtgttggtgctagcagataaatgtgcaaaatgagattataacaatgatgtggatgaatggagctagaaaagatccttatgtctcatg

SEQ ID NO: 552660 - DNA, 201 bp, Homo sapiens
ttaccaggttagatgtggacaagatgctgaattcaagtcagcacactccaaaggcccgtgtgtgtgtgtgtgtgtgtgtgtgtgtgtgtgtgtgtgtgtgtcttcacaaagtttataatgataatttagttgctttgggacacactgggcagcctgtaatattctttccagctctcgaattttgtgattttttttttttac

SEQ ID NO: 552661 - DNA, 201 bp, Homo sapiens
actaattgttatattaccttatgtgtgaaagtgagtccattgaaaattcacttgtgggaaatggaatataggtgatcaacaatttagccatagtattagayacccttttgcattttgaatgagtatctctgaataggaatatgtggcctataaagtccacatttgtgaataatggggtgtggttaaagttataatcatttt

SEQ ID NO: 552662 - DNA, 201 bp, Homo sapiens
agccgggcgtggtggcgggcgcctgtagtctcagcaactcaggaggctgagacaggagaatggtgtgaaccctggaggcggagcttgcagtgagccgagaytgtgctactgcactccagcctggacgatagagcgagaccccgcctcaaaaaagaaaaaataaagagggcttctgccttacctctttcttctttatttaaa

SEQ ID NO: 552663 - DNA, 201 bp, Homo sapiens
aaactcaatttctaatgacctgtcatgcatgcacgattttgattgtaaacaagtcaataaggagattgtcctgtactcatcgtcaatactttttaatcttrtgtactacattttaaaataaagggaatgttaatttcttttctgccttgagcttttaaaaattatcttaattgatgttgccctgatagcttcagaggctgg

SEQ ID NO: 552664 - DNA, 201 bp, Homo sapiens
cttaccaggttagatgtggacaagatgctgaattcaagtcagcacactccaaaggcccgtgtgtgtgtgtgtgtgtgtgtgtgtgtgtgtgtgtgtgtgtgtcttcacaaagtttataatgataatttagttgctttgggacacactgggcagcctgtaatattctttccagctctcgaattttgtgatttttttttttta

SEQ ID NO: 552665 - DNA, 201 bp, Homo sapiens
accatgtcggccaggctggtctcgaactcttgacctcaggtgatctgtctgcctcagcctctcaagtgctgggattacaggtttgagtcaccgtgcccagyctatacttcatatttcgtgataagcaatcaactagtacaaattcagtatctgtaagagatttcatctcactgatttgccagggacgggggtcaccaggca

SEQ ID NO: 552666 - DNA, 201 bp, Homo sapiens
acaggtacacgtttaaattctccaggtcacacagagcactattgagattcaggctggaatgatacagccttctgtgtaacaagtacttactggataaacaraggagacttagactagaacatttttatgttgcttttttgggaactgagtttcagagttgaggtttttgacttggcaattcatttgagaaagaaccgctga

SEQ ID NO: 552667 - DNA, 201 bp, Homo sapiens
tcttaccaggttagatgtggacaagatgctgaattcaagtcagcacactccaaaggcccgtgtgtgtgtgtgtgtgtgtgtgtgtgtgtgtgtgtgtgtgtgtcttcacaaagtttataatgataatttagttgctttgggacacactgggcagcctgtaatattctttccagctctcgaattttgtgatttttttttttt

SEQ ID NO: 552668 - DNA, 201 bp, Homo sapiens
agcaaacttttaggaaacctgtagagttatttatgaaaaaaacaatgaacaacaacaacaaaaaaagcatttcctctttgcagttacacttggcagggctraaaaatgagcctaaattagcttattaaactggctagaaaccctagggaaaggcttagccaatctcaattggtgcctgtaatcaataatagcataatataa

SEQ ID NO: 552669 - DNA, 201 bp, Homo sapiens
cctctgcctctggggttcaagtgattctcctacctcagcttcccaaatagctgggattacaggcacctgccactatgcctgactattttttttttttttcwttttggtgcttttgtcaagacaggatttcaccatgtcggccaggctggtctcgaactcttgacctcaggtgatctgtctgcctcagcctctcaagtgctg

SEQ ID NO: 552670 - DNA, 201 bp, Homo sapiens
aacaaaggagacttagactagaacatttttatgttgcttttttgggaactgagtttcagagttgaggtttttgacttggcaattcatttgagaaagaacckctgacaggtagtcccagtaaaaagagtggggcagagaacccaaaggcagcatgggacagtggaagagcctgcagggtttggtggcaaacctgaacacagg

SEQ ID NO: 552671 - DNA, 201 bp, Homo sapiens
ttcttaccaggttagatgtggacaagatgctgaattcaagtcagcacactccaaaggcccgtgtgtgtgtgtgtgtgtgtgtgtgtgtgtgtgtgtgtgtgtgtcttcacaaagtttataatgataatttagttgctttgggacacactgggcagcctgtaatattctttccagctctcgaattttgtgattttttttttt

SEQ ID NO: 552672 - DNA, 201 bp, Homo sapiens
tgacagcaatgtgataacatgaatttgagcttcagcatgaagggcttaaataaaatttaaaaacttgacattcagtggacttgaacccagacccaaaacakctgaatctgttcctgaggcatcatcatgaagactaaaagagaactttcaatttggacttataaagagcatgtgaggctgttttataagcagatgttatgt

SEQ ID NO: 552673 - DNA, 201 bp, Homo sapiens
tcttttctctctttctttctttctttttttttttttttttgatatggagtttcattcttgttgcccaggctggagtgcagtggcatgatctcagctcaccrcagcctctgcctctggggttcaagtgattctcctacctcagcttcccaaatagctgggattacaggcacctgccactatgcctgactatttttttttttt

SEQ ID NO: 552674 - DNA, 201 bp, Homo sapiens
cctggggtccacgagaactgctgcctacggaggcagggttcacaaggatctctttggaacaaacaggatgggaaagaaaaaatgttttctgtatgcctttyggggaagatggcaaaccaaagcaatagaaagaatcctatatcagatggatgaatgaatgaaagggaaaattgcaaggggaacacagtttatcagcaagaa

SEQ ID NO: 552675 - DNA, 201 bp, Homo sapiens
taggtctcttatttttaataaatcaaggtgaaattacacctgatatttcttttttttcttttctctctttctttctttctttttttttttttttttgatayggagtttcattcttgttgcccaggctggagtgcagtggcatgatctcagctcaccacagcctctgcctctggggttcaagtgattctcctacctcagctt

SEQ ID NO: 552676 - DNA, 201 bp, Homo sapiens
aggaaactgagactgaaaaaggtgaagctacatgctcaaggtgataaacagctgtaactgggctaacagttgtttgttcgcttgtttgttttttaacttgkttataagcaaaattgcaagacatggtcttcatcagctctgtccctttcatcttacccgcctccgctgtgcaggctgtggcactggagaaccctatctgga

SEQ ID NO: 552677 - DNA, 201 bp, Homo sapiens
cctaataggtctcttatttttaataaatcaaggtgaaattacacctgatatttcttttttttcttttctctctttctttctttctttttttttttttttttgatatggagtttcattcttgttgcccaggctggagtgcagtggcatgatctcagctcaccacagcctctgcctctggggttcaagtgattctcctacctc

SEQ ID NO: 552678 - DNA, 201 bp, Homo sapiens
tagttgagactacaggtgtgcacaaccacacctggcttatttttttgtttgtaagatggggttgcaccaatgttgcccaggctggtctcaaatacctgggmtcaagcgatccttctacttcagcctcctaaagtgctgggattacaggcatgagccaccggcatgtccaacctggaacactttttaatatgtttatttgcc

SEQ ID NO: 552679 - DNA, 201 bp, Homo sapiens
ttacaggcatgagtcaccacgcctggccttcaaacagtcaagtcttaaaggagttaagtgttagacatgttttcttgctgtttcattcatatatatatatrtgtgtgtgtgtgtgtgtgtgtgtgtgtgtgtgtgtgtatacacacacacgaaatgatattatatatattcccaatcaataagtgttgactccattaatca

SEQ ID NO: 552680 - DNA, 201 bp, Homo sapiens
tgctttgccagtttttatcaagagcctcgataatggaaaaagcattgggaatgaaattaggatacctgaattctgctgacaaattgggcagtggtcttagwcatatttagtgactgtgtttcctgtgtctgtcaaatgagaaaatatccctgaacccttttccagctttaaaattaaacccacttttttcctgaaattcag

SEQ ID NO: 552681 - DNA, 201 bp, Homo sapiens
tatagtgcctatagtaagagtcagattaactcttacttaacaagcaaatttaaaaatttccaaacttaggcttatggagaatgacagtattgcctctacayatttgctttcttttggggaacactaattgttatattaccttatgtgtgaaagtgagtccattgaaaattcacttgtgggaaatggaatataggtgatcaa

SEQ ID NO: 552682 - DNA, 201 bp, Homo sapiens
ctacacatttgctttcttttggggaacactaattgttatattaccttatgtgtgaaagtgagtccattgaaaattcacttgtgggaaatggaatataggtratcaacaatttagccatagtattagacacccttttgcattttgaatgagtatctctgaataggaatatgtggcctataaagtccacatttgtgaataatg

SEQ ID NO: 552683 - DNA, 201 bp, Homo sapiens
tgggttatgtcatcaaaacaaagtctttgaaagaggcctaaggatcatatatcattcatgcatctgaaagccttgaagactcgatagatgctcagaagtaytcaagtcagtttgcctctcgcagacattcaagtttatttaggtcacagccttatatgtagtgaaaagcccttatatctgttttttcatgcaaaaacctct

SEQ ID NO: 552684 - DNA, 201 bp, Homo sapiens
aggcggctgtctgtcaaatgggaggagcagagagctacttatgtacaatttaaatatacaaataagattaagaaaagaaagacatgatattctcaccatccaaagacgatcactggcttgagcctctcatcatccaggtcgctccttggcctgttcttgtgtgatttccctgttcacatgtggcatctctcagaactgaat

SEQ ID NO: 552685 - DNA, 201 bp, Homo sapiens
gaaatgttggtgaccagatttgcgcataagcattatttgcacataagcattatttggtttgggccagatttgcacataagcattattttgtttggcccacrttgtattttcaaaaatctagaaatttttcataatacagattcttggctttccttgaaatgcctggagacttggtaacactgagccatattcccaggcagc

SEQ ID NO: 552686 - DNA, 201 bp, Homo sapiens
ccatgtgtctatatagcaagtctccaagggagactatccctggccacacagctcgctgtataatcaagtaccctacaatgcatatctgaaaaccactaggstgggcaggaaaagggaaggggaatcagaagtcagtttgttagggagaataatatgcttccaatttcttaagtggtagtattcttgttttttttcaggtaa

SEQ ID NO: 552687 - DNA, 201 bp, Homo sapiens
ccacgatcagaatctaggctttcttgcttctagtatgttcttactacaagcaggttagtcttttcaaacatggtttgccgtattgctcatgttagagatcratggtcaggtttgggtgctatgttgatgtaatttatccaagggtcatgaatatttatattgtgccctgccaatacttcatgccctgctttgaggttctgg

SEQ ID NO: 552688 - DNA, 201 bp, Homo sapiens
gtaatgggtgggggcagtactggttcagctgggagtcccgagttcctgcttcataagaccccactactccatggctggttacggtggcctgtcagcatccygtgttcagaggaagcagattagcaacttctccccatcccttgtatgtctgagaggtgagctgcaggtaggcagaagtgagcaggatggaggagggtggta

SEQ ID NO: 552689 - DNA, 201 bp, Homo sapiens
acctccaactccctggttcaagcgattctcctgcctcagcctcccgagtagctggaactacaagcgcgcgccaccatgcccagctaatttttgtatttttwgtagagacagggtttcaccatgttggccaggatggtcccgatctcttgacctcgtgatccacctgcctcagcctcccaaagtgctaggattacaggcatg

SEQ ID NO: 552690 - DNA, 201 bp, Homo sapiens
tagcaacttctccccatcccttgtatgtctgagaggtgagctgcaggtaggcagaagtgagcaggatggaggagggtggtatgagaagctcctttcttctrtaataccagattcagggctaggtgctgggctagtaaaaacagtttctgacctcaagaagtatacattttagtggaggttactcacagaaataaataaata

SEQ ID NO: 552691 - DNA, 201 bp, Homo sapiens
tcaccagcccagggtgcagtggcaccatctcggctcactaccacctccaactccctggttcaagcgattctcctgcctcagcctcccgagtagctggaacyacaagcgcgcgccaccatgcccagctaatttttgtatttttagtagagacagggtttcaccatgttggccaggatggtcccgatctcttgacctcgtgat

SEQ ID NO: 552692 - DNA, 201 bp, Homo sapiens
ttttgtttttttgagacggagtctcgctctgtcaccagcccagggtgcagtggcaccatctcggctcactaccacctccaactccctggttcaagcgattytcctgcctcagcctcccgagtagctggaactacaagcgcgcgccaccatgcccagctaatttttgtatttttagtagagacagggtttcaccatgttggc

SEQ ID NO: 552693 - DNA, 201 bp, Homo sapiens
gttttgtttttttgagacggagtctcgctctgtcaccagcccagggtgcagtggcaccatctcggctcactaccacctccaactccctggttcaagcgatyctcctgcctcagcctcccgagtagctggaactacaagcgcgcgccaccatgcccagctaatttttgtatttttagtagagacagggtttcaccatgttgg

SEQ ID NO: 552694 - DNA, 201 bp, Homo sapiens
caaagtgctggaattacaggcctaagccacggcacccaggcttcatgcctttgtgttttgttttgttttgttttgttttgtttttttgagacggagtctcrctctgtcaccagcccagggtgcagtggcaccatctcggctcactaccacctccaactccctggttcaagcgattctcctgcctcagcctcccgagtagct

SEQ ID NO: 552695 - DNA, 201 bp, Homo sapiens
caagcgattctcctgtctcagcatcccaagtagctgggattacaggcgcccaccaccacgcccggctaattttgatattttgagtagagatgggatttcamcatgttagtcaggctggtcctgaactcctgcctcaggtgagccgcctgccttggcctcccaaagtgctggggttacaggcatgagtcaccacgcctggcc

SEQ ID NO: 552696 - DNA, 201 bp, Homo sapiens
ccatgctgttctcatgatagagagtaagtctcgtgtggtctgatagtttcataaagggcagtttccttcacatgctctcttgcctgccatcaagtaagacrtgcctttgtacctccttcaccctctgccatgattgtgaggcctccccagccatgtggaactgtgagtcgattaaacctctttttctttataaattaccca

SEQ ID NO: 552697 - DNA, 201 bp, Homo sapiens
ggtgagctgcaggtaggcagaagtgagcaggatggaggagggtggtatgagaagctcctttcttctataataccagattcagggctaggtgctgggctagyaaaaacagtttctgacctcaagaagtatacattttagtggaggttactcacagaaataaataaatatactacagtgattctttctgaggagtgaaacatt

SEQ ID NO: 552698 - DNA, 201 bp, Homo sapiens
gatttgcatttctctgatggccagtgatgatgagcattttttcatatgtctgttggctgcataaatgtcttcttttgagaagtgtctgttcatgtccttcrcccactttttgatggggttgtttgattttttcttgtaaatttgtttaagttctttgtaggttctggatattagccctttgtcagatgggtagattgcaaa

SEQ ID NO: 552699 - DNA, 201 bp, Homo sapiens
gacttagactagaacatttttatgttgcttttttgggaactgagtttcagagttgaggtttttgacttggcaattcatttgagaaagaaccgctgacaggyagtcccagtaaaaagagtggggcagagaacccaaaggcagcatgggacagtggaagagcctgcagggtttggtggcaaacctgaacacaggtctgaacac

SEQ ID NO: 552700 - DNA, 201 bp, Homo sapiens
ctttcctttttcctttcctttcgagacagagtcttactctgtcacaaggctggagtgcagtagcatggtcatagctcactgcagcctcaaactccttggcycaagccatcttcccatgtcagcctcctgagtagctaggattacaggtgcgtgccaccatgccaagctaatttttattttttgtagagatggggtctcact

SEQ ID NO: 552701 - DNA, 201 bp, Homo sapiens
tggttttgatttgcatttctctgatggccagtgatgatgagcattttttcatatgtctgttggctgcataaatgtcttcttttgagaagtgtctgttcatrtccttcgcccactttttgatggggttgtttgattttttcttgtaaatttgtttaagttctttgtaggttctggatattagccctttgtcagatgggtaga

SEQ ID NO: 552702 - DNA, 201 bp, Homo sapiens
gggtgggaagaacagggagaaagaattgtagaaataataatatcagcctttcaaaaagaaaaacattaaatttgccaggagagtagttgtcaggtataaayccaaagatttggaggtgatcgatcttgtttgatttaatccctgtaggggaaatgggtcagtggaatcttgagagtatttctcagctccattttcacccct

SEQ ID NO: 552703 - DNA, 201 bp, Homo sapiens
ctaaagtttctcagccacatgaaaagataacttttgttgatgtaaaagatcaaatatttgtcagttatggggtaaggtggtaaggctagctgtccatgagmctgggatagaagtgatagccacaggcaggcaggatggtggttaagagcagggactctggactcagatggcctgagctgaatcctggctctgccactattg

SEQ ID NO: 552704 - DNA, 201 bp, Homo sapiens
cattcaggttccttaacctgaaagagtgattgcctcatgtgttttgactaaaatggattagtgtatttgatcacatctatcagacacctgtgggtgaacargtctcaaaacaacttctttagtaaatattttaatgggtgctaacataatgccattaaaaaattttcatttatttgggaacataaaataccaagaccataa

SEQ ID NO: 552705 - DNA, 201 bp, Homo sapiens
ctgggtcaaatggtatttctagttctagatccttgaggaatcgccacactgtcttccacaatggttgaactagtttacagtcccaccaacagtgtaaaagygttcctatttctccacatcctttccagcacctgttgtttcctgactttttaacgatctccattctaactggtgtgagatggtacctcactgtggttttga

SEQ ID NO: 552706 - DNA, 201 bp, Homo sapiens
tgattagaaggcaccaaacttgcaggactagaatctctgctgtgttctgagcaaactacatgatgcaaaaatgtatccggctacatggaaatagaggcggmtgactctccaagttctctatgttcccagagcttgtctgggtttaagtggtggtggcagtaagggggaaagaccagagagtttagagagggtgagatctca

SEQ ID NO: 552707 - DNA, 201 bp, Homo sapiens
gaaactacccaacacttgctcctttctgctaccagatattgctttccttttgcaacctgaaattggtaggaaacaaagaatgaccttggagttgcatcatytatgagactttcaaaccaaattattaccatcccgggcaatatttttctcttgcacttctttcctgctgaattagtctcattgcacacacatctctgtttg

SEQ ID NO: 552708 - DNA, 201 bp, Homo sapiens
agtcagattatctgtcttcattgtaattgccgaaacattcaggttccttaacctgaaagagtgattgcctcatgtgttttgactaaaatggattagtgtakttgatcacatctatcagacacctgtgggtgaacaggtctcaaaacaacttctttagtaaatattttaatgggtgctaacataatgccattaaaaaatttt

SEQ ID NO: 552709 - DNA, 201 bp, Homo sapiens
tataagcctttgggtatatacccggtaatgggatggctgggtcaaatggtatttctagttctagatccttgaggaatcgccacactgtcttccacaatggytgaactagtttacagtcccaccaacagtgtaaaagcgttcctatttctccacatcctttccagcacctgttgtttcctgactttttaacgatctccattc

SEQ ID NO: 552710 - DNA, 201 bp, Homo sapiens
tttgtgactgacactattagcaatgtgctcagagccgtgttttaactcagctagggggagctgccaggtcctattgaaactacccaacacttgctcctttytgctaccagatattgctttccttttgcaacctgaaattggtaggaaacaaagaatgaccttggagttgcatcatctatgagactttcaaaccaaattatt

SEQ ID NO: 552711 - DNA, 201 bp, Homo sapiens
ccaagtctttgctattgtgaatagtgccgcaataaacatatgtgagcatgtgtctttatagcagcatgatttataagcctttgggtatatacccggtaatrggatggctgggtcaaatggtatttctagttctagatccttgaggaatcgccacactgtcttccacaatggttgaactagtttacagtcccaccaacagtg

SEQ ID NO: 552712 - DNA, 201 bp, Homo sapiens
catggaaagctctgagcttgagcagctctttgagctatactagcagcaaactgagactcccctcaatgtaatcaatcaaaaacatcaaaagaggactgagsaggtgaataatgtaagacattatctaatgtatttagtgccttatcccactaccatgtaaacaataatctcacattaggtgtcctacattttgggaaaaga

SEQ ID NO: 552713 - DNA, 201 bp, Homo sapiens
tgatagtttgctcaaaatgatggtttccagcttcatccatgtccctacaaaggacatgaactcatccttttttatgactgcatagtattccatagtgtatrtgtgccacattttcttaatccagtctatcattgatggacatttgggttggttccaagtctttgctattgtgaatagtgccgcaataaacatatgtgagca

SEQ ID NO: 552714 - DNA, 201 bp, Homo sapiens
ggtcaagaggagagggtgacgctgacaagtaagcagctcactcacaccaaggcttatcagtcatttacaaaaaaaaaaattaaataaattaaaaaaaaaaaccaaaaaacttcacattcttgctatatgcttatgccaggttgtattatttttaacatttttccttaactcacttttttaaaaaatttattttaaatgatt

SEQ ID NO: 552715 - DNA, 201 bp, Homo sapiens
ttctatctccactgactgtggatgagaagaacttcaaattatctttagatgtttactaacctgtcaaagtggaggaaggcattggttagtcaggaacttasaacataaactatccatatattctatcacctgtaattagcttcgattgataatttgtgtgcacctattagtacatatctattttccaactgcgataattct

SEQ ID NO: 552716 - DNA, 201 bp, Homo sapiens
aagagtaagctggggtgatatggtttggctctgtgtccccacccaaatcttatgtcgaattgtaatccctacatgtcaggagagggacctggtgggaggcrattagatcatggggaccgagttcccccatgctgttcttacgatagtgagtgagtgagttcttacgagatctgatggtttaaaagtgtggcatttcccccc

SEQ ID NO: 552717 - DNA, 201 bp, Homo sapiens
aatagtcatgtttacccatatctccttatttgcttaaagccttaagaagattttgatgaccagcatttcagttttcctgtcaactgagtattagacacagwgtaaaatttgactaaaaaagtttgaggacagttttgaaagcttaggcagacctgccgggacactataggaatggcagtttactcacaatttctgccctgt

SEQ ID NO: 552718 - DNA, 201 bp, Homo sapiens
ctttccttccttccttcctttatttgtttgttaaaatatttgagtgctgtctttgtgccagccctttgctgggtgctagggatgttgtggtaaataagttrcatccctcctttctccaccacacgcacacactgaaatctggtcttcactgaaggtgaagacagtagggaattatatgattccagaagatcctttcacacc

SEQ ID NO: 552719 - DNA, 201 bp, Homo sapiens
gtttccacgtagtcctttccttttttttttttttaactactggtaagcaaattcccatttcttcttcccttctttctttattattattattattattattwcattttaagttctagggtacatgtgcacaatgtgcaggtttgttacatatgtatacatgtgccatgtcggtgtgctgcacccattaactcatcatttaca

SEQ ID NO: 552720 - DNA, 201 bp, Homo sapiens
ttctgactctggtagtaccagccaccaccagtggattataaactaagggtatatcacgtacaattctctagctcagtggaatgaggctgaggttgcagggsaattccagtgcttggtgaaattaaaacgaccatgattcatccaggccagtgcaactcagtcatcatcagtaaacccaaagtgtcaccaccacttgggagc

SEQ ID NO: 552721 - DNA, 201 bp, Homo sapiens
atctatgtaagtttaacagctttttttttgaatccttaaaataaactttgatttactcaattgataataaatcaaagatattcagaagattaaatatgccygatcagtggctgtcagatgtttacctcactggcttgctctggtcataactggcaaaaatttgctacttcttgttgtcttttacctcttagcacaggatgt

SEQ ID NO: 552722 - DNA, 201 bp, Homo sapiens
tagattttgtattaactacagatggaggcaagaagaggatggaggtataggctcaacagttagaaaagaagccttaggaacttcccattccatgcagagaycctcagagtatccctgggaggtcataagccagcttttggacatttccagtgaagggaattctactttttgaggtaactcattgcatggctgggtagcttc

SEQ ID NO: 552723 - DNA, 201 bp, Homo sapiens
ttgcaagattatcatatgtgtgagcacaatacataatgtaaaacctcagttgctataagaagatatcagaatggctcacctaggacatttacctaaataartcatcatgcatatgacattgatttggccaataaaatgaggataataacaacacctttctcacgtttacagttgaaagcattaagttgttaagtataaaac

SEQ ID NO: 552724 - DNA, 201 bp, Homo sapiens
atcaaggaagaataactcctaatgttgacatgtataatttcaataaaatttgacactaaatattttctcatttccattatgatttctcttttgatatgggmgttagttagcagtgtcccctgtcaactcagaaactgtaatagctgttactaagatgaaaaacagagctaaaatgaaattatcatcttctctttatagtcc

SEQ ID NO: 552725 - DNA, 201 bp, Homo sapiens
accctccttactacataacagtccccttctgtataactttattcctcttgtgttactttaaggtttaaagaaaaataccagaggcctagatagtccaataytttctttatccagcaacaaggagaaagcctaggtggtgtctgggatttttgaggacctgtcaattaaaaatgtatatgttttatctgaagtctgttgaga

SEQ ID NO: 552726 - DNA, 201 bp, Homo sapiens
tggcagtggttttgggggcttgaagattggtgtttgttgaaggtctgttgctttcaaaagtatatatgtggtgacataaacgtatatatatacattttacracaaatattctaacgtgtattacatgaaatgtaattacatgttctaacatgaaagaggtggagaagtgtgtaatacatgttgtaaaaatgtatatattta

SEQ ID NO: 552727 - DNA, 201 bp, Homo sapiens
taaattattgcattttttaaaaatgtgtatacatttttaaaataaagaaaatgttaaaatttctgaaacacctccatagagttccagagtttggcagaagygtgctttgaaacacgctcgcttacatcttgcggcactcaaatctcaatttgctttccatttcctatttggttgtggcatgtgtgtgttggcttatggaaa

SEQ ID NO: 552728 - DNA, 201 bp, Homo sapiens
agcccactgttctttctgcagcagatacacaattacatgatgctaaagtattcattactgttttagtgcattgccagcaagcagtcttctggttgacccarcatttctgcaagaactctcaggattagcacattgggaatgtacttggaagagagatgttcctaacatatctgtgtataatgtgtgtagtataggtatctg

SEQ ID NO: 552729 - DNA, 201 bp, Homo sapiens
tatagttgcagccatagaagtggcttaggtgacacagaaggtataaaagtgtgtaacagaaacatgatgacagtggggttctagaagctccaagaagagakgggtactgtgaagagggaaggtatctatggcatgggccacacagtgataagaaagataaggatgggaaaagtggacatataatgttataagcaaaaaatg

SEQ ID NO: 552730 - DNA, 201 bp, Homo sapiens
tggtggaacctcttcacacctgccactgaaatgcaggctgccccagggtttgtcttcagccagcttctccacatcccaccctgagccatcttatgcacctwcagcatccactcacatcccgatgttgcccaagtatagaagcccaagccgcacttccctcccacactccaggccccatgacaaccttcctccagtcacctc

SEQ ID NO: 552731 - DNA, 201 bp, Homo sapiens
tcctaagctctccacattcatttccctattttaatctttgcaataatctcacgaatgagccccagattttgccctaattgattaatgaggatcctgagggmctgagagcacatctacttgtgcagggctataccaaaggcattgctgaactccagctcaggcacatctggtgccaaaacctcactgattctccaccccatg

SEQ ID NO: 552732 - DNA, 201 bp, Homo sapiens
tgtatagtagtggatctcaaccttggctgcacattggaatcacctggaaagctttaaaaaacccaaattcttctaataatagctttatttgttccccccccaaactcatataccacagtgtttaaaatagctcatgtgagtatgtaaaaacatcaaagtggttatttccactttgtgttagtttggtagatttgggggaag

SEQ ID NO: 552733 - DNA, 201 bp, Homo sapiens
ttcctcctctcccttgagccatgtagtctgttgtcttaagggtcaagctgataaggggctaattgctgaatcattttgaatggtagttaattgatgcttgrtgtatagtagtggatctcaaccttggctgcacattggaatcacctggaaagctttaaaaaacccaaattcttctaataatagctttatttgttccccccc

SEQ ID NO: 552734 - DNA, 201 bp, Homo sapiens
tcaacttgatttgagctgaggtgaggagggaagaggaaacattgatgtcagggtttgtcagggttcaaccagagaaacagaacaagtagctacaaagtgartatgtgggtatctagatatgtatgaattaaagggatgcattgcaaggaattggcttatgcaattgagaactggctaggcaatttggaatcccataggctg

SEQ ID NO: 552735 - DNA, 201 bp, Homo sapiens
agggactttaattacatctgcaaaatcccttcacagcagcacctagattcatgttggattgcatatttgagtgagtgtatgtgggtgctacagacggccayatctcccttccatctaccaactttcaggagaaggtcttccttgtagcccaccctaatcagaaacatactagaaagggaattatggggatattgtttagcc

SEQ ID NO: 552736 - DNA, 201 bp, Homo sapiens
tcctgtgcctggatctcaaggcccagcccctttctacatctggtctccactgctgcatcctctctgtgcgggcctgtctcctcactctccacatggggtcytcaatccctgttcacgctcatctcagggcctttctcaggccattttcctcctctcccttgagccatgtagtctgttgtcttaagggtcaagctgataagg

SEQ ID NO: 552737 - DNA, 201 bp, Homo sapiens
ttacaaggggacaccattcgagggtggaggggagtaactgatgagttctgtggcttgctgaagttctgaagtgcctgtggaccatcatgtatcctgctcasgaacgtgggtccaagagctcattaggagtctgggctgcagacacagaggatggttccccaacatatgcatggtagttagaaccaggtgactccactcggt

SEQ ID NO: 552738 - DNA, 201 bp, Homo sapiens
tttcagaagttttcagtttgaaagagtaaaactaatttcttaccatgataagtaaaaagctcctttttgttatgtcttagtggtacttcatatcagcaacraaaacacaaaaacttgaaaagctatcaatgacaaaagccatttacctataaaggaatgataaaagacagacttctcaaaaagagtagaagtcagaagtaa

SEQ ID NO: 552739 - DNA, 201 bp, Homo sapiens
gacagctttgaattttccagatcattcctaaactttttttttcaccgcagtagccacccactctctaattttcctgtttctagatgtcctttaggtattgygggttttgtgccattgattttctataataggaaattcaatattaagtaagagttgtcatataggcatttcagctttgtggctctcttgccttctcttcca

SEQ ID NO: 552740 - DNA, 201 bp, Homo sapiens
ccgtatcgcgtggtaccttggaacaaaatgcttttgaaggagctcgggcagtgatgctagaagcagatgttgagcgctcagccgagagcactgactgctcygtaggtgaggggcccccaatctctgcagaaagtgcttagtgcctcactgcaggagcatgccttcatactatctcatggtctgtgttcaatatcaggaagc

SEQ ID NO: 552741 - DNA, 201 bp, Homo sapiens
atgaatggttgaatatctccacaggtagctactctgtgttcaccttacctcacgcaaagtgttgatttattgatttccagagccccagactatcccctacytgctccttttctcttggaatatgtggatgaccataccctccctctttcccctccggcccacttttcccctttaaatactgaagccttcaaattcatcttt

SEQ ID NO: 552742 - DNA, 201 bp, Homo sapiens
agtttatccctaagagtgatcaacatcccctaaccactcatgagaaatcttgatgtacacgagcctttcagtggccttcccagtgtctgaacccagtggayggctgcttctctttcagtggaaggttgactttcctgttttccttcagtaaggagtagagggtacacaaactttaatgtatgtaaattaagaaagcagatt

SEQ ID NO: 552743 - DNA, 201 bp, Homo sapiens
caaataaacaaaaaaaaaaaacctggagattacaaagtgatgagaagctgttaaatgaagtcaaaacagctagaagcgtcttgccagaaccggataggcayatggtgcatgttccaggatctcacggcatcaggtagtgtgctaagaaggaaagtaaataatgactatacatatcgtcatctgatttgtttgtaaggcaaa

SEQ ID NO: 552744 - DNA, 201 bp, Homo sapiens
ggttttatacattggcatgatttgcgtttcttctcccctgattcttcccttggggtgggctgtctgcatgcacagtggcctgccaacagttgggaggggcygcatatgcagtgtgcttactgaagtacgcatgctcatttgtttttcccttatctgttgagtgtttctggaggaaggccatatgatagttaaactcggcca

SEQ ID NO: 552745 - DNA, 201 bp, Homo sapiens
caagctctgtgttctccttttagagtttttgccactgacacgcttccaccccttcaccagctgttttatcttaatcttaaaagcattaaagaagctttcakacttgatgtggatggaggcatgtctaaagaaatgaactgcaccagctacttcaaatgggaaaaacttggaatctggtaatgtctgaatgcagtggccata

SEQ ID NO: 552746 - DNA, 201 bp, Homo sapiens
aatattgaaagcttcagctagagaagaaaaatgttctcaaaattcaaaacatgtctcctggggagactcttcattaggagtgggcatttcaaactcctccrcagttgtctaatgcagcctggcccagcattcagtgacggcactagggctgctccacacacagcttccagaagcatcgggctccggctgccacacagtccc

SEQ ID NO: 552747 - DNA, 201 bp, Homo sapiens
ataaaaatgagcaaaactcaatttctttctttctttcttttttttttttttttttgagacggagtctcgctcttgtcacccaggctggagtgcagtggcaygacctcagctcactgcaacctccatctccagggttcaagcgattctcctgcctcagcctcctaagtagctgggattacaggcgcccaccatcacgcctag

SEQ ID NO: 552748 - DNA, 201 bp, Homo sapiens
gaatctgcaaggacaagaggacaatcgaggatttatggcctccttccgcctgactttaagagtcagtggttatgaaaagagctttggccttcccatcgctyttcagcccctcttcctttttgttttccatgcctcccctgctgtcctttctctgctccctcccgctcagagcctgagccctgtggagtttgccaagtctga

SEQ ID NO: 552749 - DNA, 201 bp, Homo sapiens
tagtaaataacttttggttagtaaaaatatgctttccttgggtaggattttaaaaataaaataaaaatgagcaaaactcaatttctttctttctttctttyttttttttttttttgagacggagtctcgctcttgtcacccaggctggagtgcagtggcatgacctcagctcactgcaacctccatctccagggttcaagc

SEQ ID NO: 552750 - DNA, 201 bp, Homo sapiens
gttcctgccactactcaccctcttataagaccctgtctgtaccatccaaatggcaaattgaagttcccacccaacaagaactattaagaactttaagatayggtgatagcctgcagcctgaaattgacttatttttgacactgttgtgctgattcagatgctaaagattcagaaaacagactataagacgtagatgactta

SEQ ID NO: 552751 - DNA, 201 bp, Homo sapiens
actatgttatctgaatttctaattagagtcctttcatataatcaccacttttttgcgttgtaggctcaagagtattgtgaaatggatgccatctttttctkttttaattgaaagggggaaacaggtgagttcctcaaagatttaataaggaatatcagcaaatgttgccaactgttgtgaagactctgggatttaacaaga

SEQ ID NO: 552752 - DNA, 201 bp, Homo sapiens
agcaatcctcctgcctctgccttggcctcccaaagtgctgggattgcaggtgtgagccatcatgcctggccccacctcattttttttttttttttttttgwaacctggatttaatgaccctctgtctccctgccatgacccttgaggggctttttatgcagtatttatgcagtattaaatctgtaagaaccagtataccat

SEQ ID NO: 552753 - DNA, 201 bp, Homo sapiens
tcagatttcaacctgagacttggtggggacaaaccaaactacagcactcctttatttccttccttatagaaatgtatattgggccaggcatggttgctcaygcctgtaatcccagcactttgggaggctgaggccagcgggtcacttgaggtcagaagttcgagaccagcctggccaacatggtaaaatcccatctctact

SEQ ID NO: 552754 - DNA, 201 bp, Homo sapiens
ttttcttctagtagtttcgtagtttcaggtcttatatttaagtctttaatttgtttttattatttgatttttgtatatggtgagagacagggctctggttycctttttctgcatgtggatatccaattttcccagcaccatttattgaagagactgtcctttccccaatgtatgttcttggcacctttgttgaacatgagt

SEQ ID NO: 552755 - DNA, 201 bp, Homo sapiens
ccgggaagtggaggttgcagtgaatcaggatcactctactccactccagcctgggcgacagagtgagactctgtctcaatacataaataaataaataaatwaattaattacataaaaatgctatagattattgagtttctatatttaagtggtctgctatggtgtactaatagtcattatatgcctttttgaaaaggtgaa

SEQ ID NO: 552756 - DNA, 201 bp, Homo sapiens
agcgactccataggctgaagcaggaagatggcttaagcttgagttcaagaccagcctggacaacacagcaagacttcctctctaaaaataaggaaaaaaaagtgttttaacagacagaactggcctaggtgcagtggcccacacctgtaatcccagcattttgggaagccaaggcaggcggatcccttgaggccaagagtt

SEQ ID NO: 552757 - DNA, 201 bp, Homo sapiens
tattaaaaaatggtgcatctttaccctgtgatcttttttgtataagtataggaaggaaaaaaatcttgtgataaattgattttttttaaaatgaaaatatkaacgggcgtggtggctcatgcctgtaatcctaggactttgggaggccgaggcgggcgggtggatcacctgagatcaggagtttgagaccagcctggccaa

SEQ ID NO: 552758 - DNA, 201 bp, Homo sapiens
caggagttcaagaccagcctagccaacatggcgaaactcccatctctactaaaaatacaaaaattagccaggcatggtgatgcatgtgtgtaattccagcyactcaagaggctgaggcatgagaattgtttgaacctgggaggcggaagttgcagtgagttgagatcacgccactgcactccagcctgggtgaaagagtga

SEQ ID NO: 552759 - DNA, 201 bp, Homo sapiens
ttaagttcttttccatagaaaaattaaaaaataagtttgagtgactttgacatcctcagttgagaaaaacagcagcaattgggtccttgtgcatggaagggccacctcagacttcagttttataacattggcccctgcaaatgctcactcagttgataagcttcccataacttagcatccacatagttgagcttcacatgg

SEQ ID NO: 552760 - DNA, 201 bp, Homo sapiens
ggtaaagaatttgagtgtttgtttaggcatttcagcggcatacctttctcacatttttacttcctctaagctatcctctaaagtagaaataatcccatttytgatcctgttgatgagagtgatggcaaatgcaccccagcactgatagtcatccattggagaattgtttcttttgagaaatacttggtaagaagagaaaga

SEQ ID NO: 552761 - DNA, 201 bp, Homo sapiens
gaagtaggaggtgctcgaggagtaaacgctgaaagaaaaaaaaaacaaaatgggagaggaagaaaggtcttggaagttctcatttgattggtaaaagtgtkgtgttcctggggttcctgttacactcaaggtcacatggatttaatttgagacctttttatagttaaaaatgtcaagatcctttggaagctgagccttcca

SEQ ID NO: 552762 - DNA, 201 bp, Homo sapiens
ccagacttggtggtacacacctgtaatcccagctactcgagaggctgaggcaggagaatcgcttgaacccgggaggcagaggttgcagtgagccgagatcsctccattgcactccagcctgggggccaagagggagactttgtcttgttaaagaaaaaacaaaaaaagaaaaaaaaattttcaaatgtgcagaaaagttga

SEQ ID NO: 552763 - DNA, 201 bp, Homo sapiens
taaaaatgtcaagatcctttggaagctgagccttccatatgcacagaatgtttttattcagaatagctgttactcaacatttgagacagatttgcttcagratggtggtttggctctgtctagcatttgcagccatgatctccactcactaatttagggcatacctagatttccagcacaaatatccccctcctggcaata

SEQ ID NO: 552764 - DNA, 201 bp, Homo sapiens
tttaaatgcaggtttattgagtgcatttcctttttttgagacagagtcgaatcttgctctgtcgctcaggctggagtgcagtggtgtgatccaggttcaaygcagcctctgcctcctgggttcaagcgattcctgtgcctctgcctccctagtagctgcgaccacaggcatgcgccaccacacctggctaattttttgtat

SEQ ID NO: 552765 - DNA, 201 bp, Homo sapiens
atgatcttgaggctgttgtcattacttctcatgcttcatgcccatcacagacatgggggtgtcagcagaaggggcagagatgatgacccttttggctcccygctgcaagtgagtcccagccttctccatggtggtgaagacaccggtggattccatgatatactcagcaccagcattgccccatctgattttggagggatc

SEQ ID NO: 552766 - DNA, 201 bp, Homo sapiens
cagatgtttcctggctggacatggtggctcatacccataatcccaccactttgggaggctgaagcaggagaataatttgagtccaggagtttgaaatcagyctgggcaacatgatgagatcccatctctaccaaaaatttaaaaattagccagatgtggtggcacacacctgtagtcccagctactgagggggctgaggtg

SEQ ID NO: 552767 - DNA, 201 bp, Homo sapiens
caagttcccacagatagccggcggcagaactcgtaccagaacctggatcgccacctgtttttggaggacctacctcctccgtttctgagattttgcttgtkatccgcttagcaacatcagttctttctaagatcagataatactctggacctactctttatccatgaacagtttgctgagcctctgctattttaggggatt

SEQ ID NO: 552768 - DNA, 201 bp, Homo sapiens
ttcctatttctccacaacctctccagcatctgttgtttcctgactttttaatcgccactctaactggtgtgagatggtatctcattgtggttctgatttgyatttctctgatgaccagtgatgatgaggatttttttcatgtgtgtgttggctgcataaatgtcttcttttaagaagtgtcagttcatatcctttgcccac

SEQ ID NO: 552769 - DNA, 201 bp, Homo sapiens
gatatttctagttctagatcactgaggaatcaccacactgtcttccacaatggttgaactagtttacactcccaacagtgtaaaagcattcctatttctcmacaacctctccagcatctgttgtttcctgactttttaatcgccactctaactggtgtgagatggtatctcattgtggttctgatttgtatttctctgatg

SEQ ID NO: 552770 - DNA, 201 bp, Homo sapiens
tgatatttctagttctagatcactgaggaatcaccacactgtcttccacaatggttgaactagtttacactcccaacagtgtaaaagcattcctatttctscacaacctctccagcatctgttgtttcctgactttttaatcgccactctaactggtgtgagatggtatctcattgtggttctgatttgtatttctctgat

SEQ ID NO: 552771 - DNA, 201 bp, Homo sapiens
agcctggtgtggtggtgtatgccttagtcccagctacttgggaggctgaagtgggataatcacttgggcctgggaggcagaggctgcggtgagccaggatygcaccactgcactacagactaggtgacagactctgtctcagaaaaataaaataaaggtacagcaaaacctatttgatcattccacctttgaaaatagatc

SEQ ID NO: 552772 - DNA, 201 bp, Homo sapiens
cttcacacatagtataaatacatgggataggtcaggagaccatgctgcccagggcatttaacttaatggtttctgattcctgctcatcttcagtaaatgcyacacaccccatctccaaggcctgatcctctgggtcacattggatcaccctatagaaaactgggcacctaggtatgaaaatttggagtctgagtttattgc

SEQ ID NO: 552773 - DNA, 201 bp, Homo sapiens
tcaaattaggcctcctctttttcctttttgtgcccataacctggatagtccaggcttcacacatagtataaatacatgggataggtcaggagaccatgctkcccagggcatttaacttaatggtttctgattcctgctcatcttcagtaaatgctacacaccccatctccaaggcctgatcctctgggtcacattggatca

SEQ ID NO: 552774 - DNA, 201 bp, Homo sapiens
attaaaatttgagctcatttcctgctgagaattagttgctacagaaacagtgaatgtttcagtagcggtcaataagatggtgttcagtggatgccgtcctwgtttttaaaatccagctgtgggtttatctatttgggggaggggcaagtgtgggatctgctgctctttaacccaggttcttcactgccagagcagagacaa

SEQ ID NO: 552775 - DNA, 201 bp, Homo sapiens
ggatctgctgctctttaacccaggttcttcactgccagagcagagacaattctgcctgagtcgccgaggcagggaaggctttgtggatggccctagcaggmagcgggctccagcttgcgacctacacgttgttcaggctcagatgttacatggtctttacagggaatctataacaaatccttaatttccagatgctattaa

SEQ ID NO: 552776 - DNA, 201 bp, Homo sapiens
gggtggatcacctgaggtcgggagttcgagaccagcctgaccagcatggagaatccctgtctctactaaaaatacaaaattagccgggcgtggtggcacaygcctgtaatcccagctactagggaggctgaagcaggagaatcgcttcaacctgggaggcagaggttgcagtgagctgagatcatgccattgcactccagc

SEQ ID NO: 552777 - DNA, 201 bp, Homo sapiens
aggtgctttactgagtgatagtacagtgctcaggagacctgaagtgggtagcttctttccacaggcaggtcatcctgatgagtgcagccctcagtggagakgagacccaaaatgggtagctcctatctgcaggcaggttgtcccattgtctctgtgagtctggctgagtctggggtttttacaggcttcagaagggaggaa

SEQ ID NO: 552778 - DNA, 201 bp, Homo sapiens
gggtttctccatgttggtcaggctggtctcaagctcccaacctcaggtgatccgcccacctcggcctcccaaagtgctgggattacaggagtgagccaccrcacctgacccatttagagatctttttacggttttcctgtttatattcatttttctgttgagataatgtttcatatttataagagctctttatattttaag

SEQ ID NO: 552779 - DNA, 201 bp, Homo sapiens
gagagagtaggtgggactgcagttatttaactgtgattttcattctgacttatctgcattacttctgtgaccctccataattgactgtgtttcctactgaycatgtaaggagagcagatgcccttaattatggtgcaaaagatgcaggattgaacctaattatacaacataatgttatggcaaagagttgaggagcctttc

SEQ ID NO: 552780 - DNA, 201 bp, Homo sapiens
aggcatggtggtgcatgcctgtaatcccagctgcttgggaggctaaggcacgagaatgtcttgaacccaggagatagaggctgcagtgagctgagatcacrccattgcactacagcctgagcaacagagtaagactctgtctcaaaaagaaaaaaaaaaagtatgcagaagctactttctttgaatctggtatattctcac

SEQ ID NO: 552781 - DNA, 201 bp, Homo sapiens
gtatacgggctgggtgtggtagctgctgcctgtaatcacagaactttgggaggctgaggcaggcagatcacttgaggccaggagttcaagaccagcctggscaacatggtgaaaccctgtctctactaaaaatacaaaaattaggcatggtggtgcatgcctgtaatcccagctgcttgggaggctaaggcacgagaatgt

SEQ ID NO: 552782 - DNA, 201 bp, Homo sapiens
cccagcactttgggaggctgaggcgggcagatcacgaggtcaagagatcaagaccatcctggccaacatggtgaaaccccatctttactaaaaatacaaamattagctgggcacggtggcatgtgcctgtagtcccagctactcgggaggctgaggcaggagaatcacttgaacccacaaggcagaggttgcagtgagccg

SEQ ID NO: 552783 - DNA, 201 bp, Homo sapiens
acacctgtaatctcagctactcaggagactgagaggccagagaatcacttgagcccaggagttcaaggctgccttgagctatgatcacaccactgctctcsagccttggtgacagagtgagaccttgtctcttagaattcctactttttttgggattcccccattttctcccatgaaaacatgaataatatttaacatgtt

SEQ ID NO: 552784 - DNA, 201 bp, Homo sapiens
ctgaattccaacccagcaccagtgttaccagaggactgcacaagcaatcacagcctgtcttttctcttccttaaggtggggtaaaaatccctatgttgacmagttgttaggaaaagcaaatgagaacatcagtgaaatgagagcatcagtgagaacaagatgtggtacgtggtcagagatagtaaatattagtcttccttc

SEQ ID NO: 552785 - DNA, 201 bp, Homo sapiens
tctctatgttggttaggctggtgttgaactcctgacctcaagtgatccacccgtctcagcctccctaagtgctgagattataggcgtgagctaccacaccyggcctgatcatagttatttatgtataccttatcccctcgttagactaattacctgaagagcttctgtcattcagctgatgtttagagaagttaatttaca

SEQ ID NO: 552786 - DNA, 201 bp, Homo sapiens
ataaccataataattatcattagtaatattatcccccaggtggaaaaaaaataaaaactagggaccccaatttattaagccaaaaaggaaaaaaaaaaaaagctgaaagttgagtcatgcaagaaactgcctttccttttgttcctaagcaaatagctgcagataaaaggttaaatatctccactggtagctactctgggt

SEQ ID NO: 552787 - DNA, 201 bp, Homo sapiens
tcagaaccatgtggatactctcctgtgtacagagcatgtggcttgagaagagggctcagaggaggtccctgttctgggaagtgtcatgccttgtccctgaaggctctggatgtctggccatgtgttcctgagggaggcagagggatgctgatggaaaggcgtagaaaggaggagatgctcctctaactcgcatggctggat

SEQ ID NO: 552788 - DNA, 201 bp, Homo sapiens
gaattttctacagttcattttcttcatctgaaagatgaaacagtttatataaatcattttcaaagtctgacttctgcttttcccataattatcagtttagrtgacatagagctttgtgcctgttttgtttcttgattttttaaatggatatatattaagatctttaggcttgaaaggtatactttcaaggttttgattgtt

SEQ ID NO: 552789 - DNA, 201 bp, Homo sapiens
agactagagtatggtggcacaatcatagctcactgcagcatccaacttctcctaggctcaagcagtcctttcacctcagcctctcaagtacctgggactayaggcacgtgccaccacactgggtgttttttttttttttttgtagaaacaggatcacaccatgttgaccaggctggtctcaaactcctggcctcaaatgat

SEQ ID NO: 552790 - DNA, 201 bp, Homo sapiens
ttgttttttatttctctcgctctctctctctctctctctctctctctctctctgtctctctagagaggcacggtcttattctatcatccagactagagtayggtggcacaatcatagctcactgcagcatccaacttctcctaggctcaagcagtcctttcacctcagcctctcaagtacctgggactataggcacgtgcc

SEQ ID NO: 552791 - DNA, 201 bp, Homo sapiens
gtgtttttgttttttatttctctcgctctctctctctctctctctctctctctctctctgtctctctagagaggcacggtcttattctatcatccagactrgagtatggtggcacaatcatagctcactgcagcatccaacttctcctaggctcaagcagtcctttcacctcagcctctcaagtacctgggactataggca

SEQ ID NO: 552792 - DNA, 201 bp, Homo sapiens
catatgagatcaagtggtatttgtctttctgtgtctggtttatttcacttagcataatgccctccaggttcattcatgttgttgcaaatggcagaatttcyttctttttgtggctgaataatatcttattgtatgtaaataatatacaccacattttctttaccattcatctgttgatggatgctaaggttgtttcagtgt

SEQ ID NO: 552793 - DNA, 201 bp, Homo sapiens
cttatttatacaactgtagtgatgcctcccccttcccagcctcacttgaccctggcttctgtctgatgctctactgactgtctcgttcctggttctcctgygtaggtacacactggcagctcaggacctggtgatgcgtgcccggggtgtgctgaaggacagaggatggcggatatctaatgaccgactgggctcaggaga

SEQ ID NO: 552794 - DNA, 201 bp, Homo sapiens
gaagttaactcaacttcccggctggaatacctttatgttagactgttcttcgagactcaactcctccccagtgcctttttctctcttttttttttttttttcctcatttttaaacgtagtttccttcaaagctccaggctccttaaaagagccacctacctagccagggcttctaagcctgcatcccagaagctccagtcc

SEQ ID NO: 552795 - DNA, 201 bp, Homo sapiens
tggtggtggtggtaatggtccatttggggatccattgcaaatgtagactaggacttatttttgaaagatgggtcaaaggggagccataaaaagtctgaagmctcatgacaaatagataagggtatatacattaagtaattatcatataaaaatatatgcaaggcgctgacctgggtgcatgactgccctcatgaaaccctc

SEQ ID NO: 552796 - DNA, 201 bp, Homo sapiens
aacaaaagatagtgatctctgaaagatgggaaggaaatggggtgagccctgtgattgtccccactttgagagattgccccctctttaacttatgctcattwgagaggcccccacccaggcagaaccaagcaaaccctctgagttgaagaggagttgagagtctgaggagaccaagaaagctagatttcacagaacagtgtc

SEQ ID NO: 552797 - DNA, 201 bp, Homo sapiens
atcacttactgtgcaacctccagccagttacttaaccattctgtgccccagttacctcgtctgtaaattaggaattctaacaatccctatccctttcagtyattgtgaggattaaatgaattaattcaactcagaaaatatttgcattcctactgtgttctgagaactgaaggcttagttaataatgaagacaaaaacccc

SEQ ID NO: 552798 - DNA, 201 bp, Homo sapiens
ctggtagctactctgggttcatcttatcttatggaaagtactaatttactgagccccagatgaatagataatcgactattccccaacctgttgcttttctyttgcaacatgtgggttaccataccctccctctttcccctccagcccacttttcgcctttaaatgttgaagccctcaaattcatctttggagaaaggcacc

SEQ ID NO: 552799 - DNA, 201 bp, Homo sapiens
acacgcaggccacctctgcatgtcacagccatcaggattctgccacttaaaagggtaaagcggtattctggttagggacaccaccttttctgaatgtggaytctgcagacaacttccttaccccaagtggtgcaggtttgtggatcagagcttcttagggctagtggtgccacagcaggaagagctagactagcccactgt

SEQ ID NO: 552800 - DNA, 201 bp, Homo sapiens
  misc_feature (1)...(201): n = A,T,C or G
agggtaaagcggtattctggttagggacaccaccttttctgaatgtggactctgcagacaacttccttaccccaagtggtgcaggtttgtggatcagagcntcttagggctagtggtgccacagcaggaagagctagactagcccactgttctttctgcagcagatacacaattacatgatgctaaagtattcattactgt

SEQ ID NO: 552801 - DNA, 201 bp, Homo sapiens
ttaccttatcaaaaacacccacttacagagaggttaaaggcagctaccataagtacgcaccaactcctcttgaaacaatctctctgctcagcctctaggawttcccttccccctccctccccttcactggtggaacctcttcacacctgccactgaaatgcaggctgccccagggtttgtcttcagccagcttctccacat

SEQ ID NO: 552802 - DNA, 201 bp, Homo sapiens
catccaaatgcattagagggaacagtacccagtgcttgcacagagccaagaatagtgcctcttccatcaaccaaatgggaaaacctcattcacagtgcatytggaagggtcttgccttaaatagtagtggataattagctgtacacttaacacagtctcatcccacataacacatcttaaagggaaaacctgaaaggatca

SEQ ID NO: 552803 - DNA, 201 bp, Homo sapiens
aacttgctgccttttggtatttctgaaagagtctgttgagagaaacagtatataggaaggatttctattcctcgcacccttctagaaattctcaaatctayccctggtaaagcctgaagctcacacttgtggccctgcacaatggtttcctgaatggcttgcttatgccatgtgcctccactggagaagattgcaagaaac

SEQ ID NO: 552804 - DNA, 201 bp, Homo sapiens
cataacacatcttaaagggaaaacctgaaaggatcaaactctttcaaagtaactatgtccctttgtttgagaacacagctcaagaatatttatggatatayaaaaatatccagtacccaataagctcaaaatcagtgtcaggaatctaattaaaaattgccagacatgcaaagaagcatgaaaattggactcagttgttga

SEQ ID NO: 552805 - DNA, 201 bp, Homo sapiens
gctgccttttggtatttctgaaagagtctgttgagagaaacagtatataggaaggatttctattcctcgcacccttctagaaattctcaaatctatccctrgtaaagcctgaagctcacacttgtggccctgcacaatggtttcctgaatggcttgcttatgccatgtgcctccactggagaagattgcaagaaacagctg

SEQ ID NO: 552806 - DNA, 201 bp, Homo sapiens
ggtaattttttttttgtttctgtggctttttttaattcattttgggccctgagttgtgtaaactgatcctggtttgtatctgtgttgcctgttaggaagcrtttgtgacccacttctaataagcgcaagggccttacagtacatgttttttgtattaacttaattcctaccttcctgtgatctttctagttttattttcca

SEQ ID NO: 552807 - DNA, 201 bp, Homo sapiens
atctgaacttttttgatgacctgcaaggtccttctgactggccccagcccatccctcgagcctcccctgagcctgtcctcttcctaactaagcggcacgcrtggctttgtccagctcctcacacaggccgagcatccgccaccatgcggccttcacacatgcagttgcttctacctgaacttctctccctccatccttctc

SEQ ID NO: 552808 - DNA, 201 bp, Homo sapiens
atccaccacagcctccagaggaggatagagaaggaaaatagcgaaagaaacacttcctgctaaacggtgactcattgggacctcctgctctcgcccccacctagagggtaagacgttagtacaaattgactagaccaagcctatatggtgaaaatggattctgttcaaaatcagcttccaacagagcagaatccacttgcc

SEQ ID NO: 552809 - DNA, 201 bp, Homo sapiens
atttcagaaatgctaaagctgacccaacttcccagagattccaatttaattagtgtgcagaggcgcctggccagcaataccagttttaagcactacagaayattctttttttatttttttaattttttattattattattatactttaagttctagggtacatgtgcacaacctgcaagtttgttacatagttatacatgt

SEQ ID NO: 552810 - DNA, 201 bp, Homo sapiens
gtagcatctagaaccatgggcacttcttactttcctcagaacaccactgttgtactctcacgatgctgtcaaccctgcagtacttctgtctcttgataggrattaaaatgctttccttagatatgtgagatttcaggctagaacagaaaatgattgaagttgtcttcttctaattaacatgtttatacctcatctcagaaa

SEQ ID NO: 552811 - DNA, 201 bp, Homo sapiens
gtgttgaagatgggattagaatccaaatcttctcacctgtaatcattgttctttcctctttcctatgagttagagctctttgtgtttttacctttgttttrtgacacttttcattgtttaaatgtgtttcttatggcctgaatgtgactgaatgttttttagggcaggatttacctcctaccttagcatcatgactttcac

SEQ ID NO: 552812 - DNA, 201 bp, Homo sapiens
agggacaaccagctaatggcctaacacctgtcctgccaccactcagctgatgattggtgttgaagatgggattagaatccaaatcttctcacctgtaatcmttgttctttcctctttcctatgagttagagctctttgtgtttttacctttgttttatgacacttttcattgtttaaatgtgtttcttatggcctgaatgt

SEQ ID NO: 552813 - DNA, 201 bp, Homo sapiens
ggtttgggtgctatgttgatgtaatttatccaagggtcatgaatatttatattgtgccctgccaatacttcatgccctgctttgaggttctgggaggctttctaacttgggactcagaatctacttcatgagaagcttcaaaagcatctagtactgcaccctaactcagattaaaggccactgagtccattgatccactca

SEQ ID NO: 552814 - DNA, 201 bp, Homo sapiens
tatgtcccttttttacatcctcctagcataggaggacattgaagattttaacatctcattataaacttgtttttatctagttcaagggattaaaaaacaamaaaccatggcatagaaatgttaagcaaaagggacaaccagctaatggcctaacacctgtcctgccaccactcagctgatgattggtgttgaagatgggat

SEQ ID NO: 552815 - DNA, 201 bp, Homo sapiens
gttgttaagtataaaacacttgtggttttttgtttgtttgtttgtttgtttttttgagacagattctccctctgttgcctaggctggagtgcagtggcgccatctcggctcactgcatcctccacctccggggttccaagcaattctcgtgcctcagcctcccaagtagctgggactatacgcacgcaccaccatgcctgg

SEQ ID NO: 552816 - DNA, 201 bp, Homo sapiens
gcttagaatagtgcatggggtaggtgctcaataaatattatctattgttgttgttgtttctaatagtggattggcaactgcacttcagtattatttcacartacttatgttttttccataaactaatttagggagaagttgttgatgtataaactaatagtttaagaatattctcgagttgattctagaataaatcacaat

SEQ ID NO: 552817 - DNA, 201 bp, Homo sapiens
  misc_feature (1)...(201): n = A,T,C or G
aatggacaccacctgcttgtttctgaaatgacttcagctccttgtttaatagttagatttctgtttggaacaatcttgtatttgttgaaaggcccaaggantcttttccagttagaactcattaagttctggcatactagattttttgaaaaatgggaaaaagaaaataaaattattaaaaagcagtttccttttgcgaga

SEQ ID NO: 552818 - DNA, 201 bp, Homo sapiens
atgcggccttcacacatgcagttgcttctacctgaacttctctccctccatccttctccatggccccccgtgccagtcctttcagcctcagcctcactgtmccctcctggacctccctgactgaggcatctcccaccttcacagatggatcacggctcctccctatattgtgagctctgtgcagcagaaactgccctctct

SEQ ID NO: 552819 - DNA, 201 bp, Homo sapiens
atctccactcactaatttagggcatacctagatttccagcacaaatatccccctcctggcaatataggacataagccaggggacattggtgtccctagacrgtgcctccacatcctgactccagagtctgtggtctctctgggtgcatctcttctgggtcactcccatttgttctcatttcactatttttgtccctggcaa

SEQ ID NO: 552820 - DNA, 201 bp, Homo sapiens
gtcatgctagatccctattgatttcagtagggatgacaccacgttcaagaacctgaagaagagacccaaagccaacaaacaaggcacaaggttttattatrgggaacttacacacagaaatggcccagtggtggcaggctggacagagctgcaactgcttgtaaaaaggatgcagattgtatagcatcttcacttagcatc

SEQ ID NO: 552821 - DNA, 201 bp, Homo sapiens
tattgatttcagtagggatgacaccacgttcaagaacctgaagaagagacccaaagccaacaaacaaggcacaaggttttattatggggaacttacacacrgaaatggcccagtggtggcaggctggacagagctgcaactgcttgtaaaaaggatgcagattgtatagcatcttcacttagcatcctccccctagcaccc

SEQ ID NO: 552822 - DNA, 201 bp, Homo sapiens
ggcaaaaaagaaaaattgcctataatctcctcccctccccaaccactgttaccaattaggggtatatctttccagccttttttcatacataatcccatttkccccccagggaaattacactctgcatacaggtttgaaacagcttttccccttcctcctcaaatacagagtaatggaaaataatctaaacatttcttaatg

SEQ ID NO: 552823 - DNA, 201 bp, Homo sapiens
agagaagaggcggctgtctgtcaaatgggaggagcagagagctacttatgtacaatttaaatatacaaataagattaagaaaagaaagacatgatattctyaccatccaaagacgatcactggcttgagcctctcatcatccaggtcgctccttggcctgttcttgtgtgatttccctgttcacatgtggcatctctcaga

SEQ ID NO: 552824 - DNA, 201 bp, Homo sapiens
ttttactgatttgatgtgatttcctcctgtctgtttcactctgagcatgaagaactggtcacccactgttctctgaataaacccattttaaatgcgtgaargcgagtgtgatgagattgttcctcattctttccctcaggctaaaataccacttttcctttagcctcttcaaagcttctattttccaccccttgaattgtg

SEQ ID NO: 552825 - DNA, 201 bp, Homo sapiens
ttaagagtgctcttcgcctgtctctattaagctctaggtaatacccagtcattggttctagagctgcagccttctgcctctatttaattctagccttctasctctatttaattcctgtgaatgtctagtcatagacccaactcttctacaccagatccaggctcctcctgtgcctggatctcaaggcccagcccctttcta

SEQ ID NO: 552826 - DNA, 201 bp, Homo sapiens
gcatggaagaaagaatgaggctccgaagaccttaatagccacaactgatggccaaatagcaccttatccttcacaaaggatgttcccagacatgtttgccyttaatccttgcaaccatcctatgaagtgtccagttgaagaggcagattcagtgaggtctgagggattttcccaggttcatacagccagttcacatgacga

SEQ ID NO: 552827 - DNA, 201 bp, Homo sapiens
gcctcttctggactcctaactgcttttcctgcatccattcataccacattcagctcccagaatgatcttgaaaaatgtcagatcatgtcgctcatgcttgmatgcccttctgtggcttctaggtccttgaccaccttgaggagcattgccacccagctccagtcaccctggcttcatttctgttctctaaccatgcaaact

SEQ ID NO: 552828 - DNA, 201 bp, Homo sapiens
ataggcatgaaccactgcgcctggccagtttttttttttttttttcttttttttagtttttttttttttcttttttttttttttttttttagtaatgcagkggtttctttcaaaactcttttagttctagggacatagaactcttgccagtgattaagatggatgattttaaaaccaggaattgaggaggctgatgtcagc

SEQ ID NO: 552829 - DNA, 201 bp, Homo sapiens
cctttgtaatatcctttataatgaactagcaaatgtaagtaaatttttcctgatttctgtgagccactctagcaaattaatcgaaccttaggagaggggggtcttgggaacccagatttatagctggtcagtcagaagcacaggtaaaccaacctggggcttgcgactggcatcagaagtgggagtcagttgggggactga

SEQ ID NO: 552830 - DNA, 201 bp, Homo sapiens
gcgccacggtgtgccaggcaacccgaggacagttcacacagctgtctatagcaggacagctttgaattttccagatcattcctaaactttttttttcacckcagtagccacccactctctaattttcctgtttctagatgtcctttaggtattgcgggttttgtgccattgattttctataataggaaattcaatattaag

SEQ ID NO: 552831 - DNA, 201 bp, Homo sapiens
gatgccttggaaccactgaatggagtttgagttcatgttacatatttaactggccaaaacagtagtaatctttccttccttccttcctttatttgtttgtkaaaatatttgagtgctgtctttgtgccagccctttgctgggtgctagggatgttgtggtaaataagttacatccctcctttctccaccacacgcacacac

SEQ ID NO: 552832 - DNA, 201 bp, Homo sapiens
ttagcttggctatatatttgtgtgtgtgtgcatgtataatttttttctctttctctttcccacctcatgttataggtcattgttgtgtatctagagcagasggagtacttggtgggttctgccacatgggcaaagctttctactgaggctgaaaagctctatgcctattgtctccatgccatgtttacatagcacctgttt

SEQ ID NO: 552833 - DNA, 201 bp, Homo sapiens
gttttaggcttaaccagttcttatttttctaagaagattcagtcactggcttcttagttagtggctcctgaaacagatgcaggatagttgtgctgctgtgmctgagctccaaataatggcctctgagatgtggttgggccacctagtagaagaacttcatggagaggtgcttgaggcacatggggtcatgaagggtggtaa

SEQ ID NO: 552834 - DNA, 201 bp, Homo sapiens
gtttcaccatgttggccaggcttgtctcaaactcctgatctcaagtgatccatcccccttggcctcccaaagtgctggaattacagacatgagccactgcrcccggcctgagttttttaaactattaatgtccttgctttacctccttttctcccattcttgcggttgactcataagaacaccctaaaccttactgttcat

SEQ ID NO: 552835 - DNA, 201 bp, Homo sapiens
ttgaggacaataccttattcccaatggcctcctgattcccacagaaggctttttaattaaccagctcaagatttgtgcacatgaatcaccattgctagctyttctttcctttgacttggaaggttataaagagtctttatttatcatactgattgccatactcaggtgaaaacacagcttttccaagagctttttcttctt

SEQ ID NO: 552836 - DNA, 201 bp, Homo sapiens
tgtttataacatttggtaaatttaacctaaaaagtatcaaaaccaggagtggtgtctgttctcttttcagtgcgttttttcctttgtcgccccacactgaatatttttggccacttggaggacatacgtgggcattcataattaagaattaattaaaagtgtctgcttggaggactttctgctccgtacttaattaactta

SEQ ID NO: 552837 - DNA, 201 bp, Homo sapiens
ctctaaacttctcctctcactttgtttcattaatttgatcttccatcactgataccctttcttccacttgatcgaattggctatcgaagcttgtgcatgcsttacgtagttctcttgccacggttttcagctccatcaggtcatttaaggtcttctctacactgtttattctagttagccattcatctgatcttttttcaa

SEQ ID NO: 552838 - DNA, 201 bp, Homo sapiens
ccaactcctttttctttcctccccctctcaatattaggtttttgagagtcattgtcttaccgtgtaaacctttggttttttgaaatgcccacaagcgccayggtgtgccaggcaacccgaggacagttcacacagctgtctatagcaggacagctttgaattttccagatcattcctaaactttttttttcaccgcagtag

SEQ ID NO: 552839 - DNA, 201 bp, Homo sapiens
ctgggaacaggaggcaccgctgggaatagacccaggaaaggttgctcatggttatcgatcctgcagcctctcctatagacatctgctttggggaacgccgytccctcaaaagtccttgactgggcaatagctcttagatacactttttggagtgtatgagtttcctgagccttgagatgagtggttttggttttttttttc

SEQ ID NO: 552840 - DNA, 201 bp, Homo sapiens
attgccaactcctttttctttcctccccctctcaatattaggtttttgagagtcattgtcttaccgtgtaaacctttggttttttgaaatgcccacaagcsccacggtgtgccaggcaacccgaggacagttcacacagctgtctatagcaggacagctttgaattttccagatcattcctaaactttttttttcaccgca

SEQ ID NO: 552841 - DNA, 201 bp, Homo sapiens
cacagcacagaaattataccagcttcaaaataatagctggaaggccattgccaactcctttttctttcctccccctctcaatattaggtttttgagagtcrttgtcttaccgtgtaaacctttggttttttgaaatgcccacaagcgccacggtgtgccaggcaacccgaggacagttcacacagctgtctatagcaggac

SEQ ID NO: 552842 - DNA, 201 bp, Homo sapiens
tctcccatttcactctcagatgtgaccttctttggaatgataagtcttctgtttaatcacagatgctcttgtttttctttgcgtcatcagagatttcagaraaactacactcctgtttcatagaaacaatgcctgtcttaaccttatcaaattgcttaaggtgagcttcagaatccacagcacagaaattataccagcttc

SEQ ID NO: 552843 - DNA, 201 bp, Homo sapiens
aagctgagtcgtggaagaaactgtttccttttgttcctaagcagatactacagatgaatggttgaatatctccacaggtagctactctgtgttcaccttayctcacgcaaagtgttgatttattgatttccagagccccagactatcccctacttgctccttttctcttggaatatgtggatgaccataccctccctcttt

SEQ ID NO: 552844 - DNA, 201 bp, Homo sapiens
gtggcatgatgagagcggtgctttaacatcacctttgtgaccctatgaagcacggggcagaggagggcagaacaggggctgaggaagcagtggagagctcytgagtcatgcaggtaagctctgatggaaaccagaaccaaggcactagcaggaatcaaggaaagagagggattcctgtgctgctgaggaggtgaaatctac

SEQ ID NO: 552845 - DNA, 201 bp, Homo sapiens
aggaagagaagaggaaaagatagctgaggagcagtgagtgtctagctgaaggcccctctttcctctgtaaaatctaccccgtgtgacttggttaagtgaayatctgctgccttttagttcttttctcttcgggcctcaaattcaaggaacagtttcttctaagttctttcatctgctcctttaatcagcaaacattcactg

SEQ ID NO: 552846 - DNA, 201 bp, Homo sapiens
cgatcctgcagcctctcctatagacatctgctttggggaacgccgttccctcaaaagtccttgactgggcaatagctcttagatacactttttggagtgtrtgagtttcctgagccttgagatgagtggttttggttttttttttccccctggacccaggatatcaccctagaaattcaacagtgtaggccacacattctc

SEQ ID NO: 552847 - DNA, 201 bp, Homo sapiens
aatcctgcattgctttttgcaggaaggtctcaggagagtgggtgtggggagaggggagtcaagggagagcctctgtggattccagaattgcttaactgggrtcatgccaagctcttaaaagccacaagtagcatttgggctccaggcttatgtctgttcctgtccagccaggcctgggtggtgtttcatcccaggcctcct

SEQ ID NO: 552848 - DNA, 201 bp, Homo sapiens
ctctgacttgattacattaagtcgtgccggtgtcatcatatcttcaaataacatacttctgtccttgcagaataatccaagtttgcagctgtttttcatcmagggcaatgtatagaagagatgaacgtgggtttcaagtacatatttgatgaacacaagtgcaacattatctgaggtgatttcttgcaatgtccttggaac

SEQ ID NO: 552849 - DNA, 201 bp, Homo sapiens
gattgaaggctgtgttatcttatagtttaaataatcactatgttgtgattgtgtagagcaggtcagaatgtcctgtattcattcttttagcaaatacttaytcagcacctttactatgttgggtgctatgctgggcactggagtggagttaaggttttaaaaatgatggacacatggccgggcatggtggctcatggctgt

SEQ ID NO: 552850 - DNA, 201 bp, Homo sapiens
accagctcaagatttgtgcacatgaatcaccattgctagctcttctttcctttgacttggaaggttataaagagtctttatttatcatactgattgccatmctcaggtgaaaacacagcttttccaagagctttttcttcttagttcccaaatatttagtcattccaggaatgagataagaggaggagggtaccaagtgac

SEQ ID NO: 552851 - DNA, 201 bp, Homo sapiens
agaatagtcttcgaatgacacgatcaaatgactgcagagcaaactggagggagtccaacagaaagttcctgtctgctgcatccagccccaaccagcactcragccattgtgtttacatggaagctcacacacaggtttcaaaggcaaggccgtgataaccaaggatgtaagtgagatgagtgtggaaaagaccacgtcagg

SEQ ID NO: 552852 - DNA, 201 bp, Homo sapiens
agacggggtttcaccgtgttagccaggatggtctggatctcctgaccttatgatctgcccgcctcagcctcccaaagtgctgggataataggcatgaaccmctgcgcctggccagtttttttttttttttttcttttttttagtttttttttttttcttttttttttttttttttttagtaatgcagtggtttctttcaaa

SEQ ID NO: 552853 - DNA, 201 bp, Homo sapiens
aaggcaacgttttaaaataacaacagctaacagtgatacagtgttaattgtatgccaggcattgatttaagtgtttttcacacagtaactcatttactgtyttgctaagagcaaagacttcctgctatcattagctaatatctcaaggcaaaattcatcattaacaatagcgagtataattccatatttcaactctcccct

SEQ ID NO: 552854 - DNA, 201 bp, Homo sapiens
aaattgttgagcaggtgggggagagctagttgcagaatgaaactgtaaaccagactgggtgtgaggggaggtaatagaagggttatagggtgggggagcaraggctgaagaagagttggagcctgattcaacctggcagggagcgaccggaggaggagcagcctggggaggaggtgagaggtcagatgggttagtagaaag

SEQ ID NO: 552855 - DNA, 201 bp, Homo sapiens
gcaggcaagagatgaccttggatggattcacagacctgaaaagaccatttgcttgatctgggaggtagcacatattgggagccaggtaaatctgcttctcrgtccctgcttggggacttcgggaccatcacttaaaaactcttcttgcctccttgggttgttgaagagaaattagacacagtacctgcttcttggcaggtg

SEQ ID NO: 552856 - DNA, 201 bp, Homo sapiens
aattgttaatactctcccatttcactctcagatgtgaccttctttggaatgataagtcttctgtttaatcacagatgctcttgtttttctttgcgtcatcrgagatttcagagaaactacactcctgtttcatagaaacaatgcctgtcttaaccttatcaaattgcttaaggtgagcttcagaatccacagcacagaaat

SEQ ID NO: 552857 - DNA, 201 bp, Homo sapiens
acccctctccacatctgaaacttcaccattgtatttcattgttctagacacatttatattcttcatcatttcagattcattttatttcaaagctataacagaaggaacgtgttgttacgctatacatgtctgattggatttatacaacaaactgaagccaggttctattgtagttcatttcccattatccccctgtcctac

SEQ ID NO: 552858 - DNA, 201 bp, Homo sapiens
ccatttgcttgatctgggaggtagcacatattgggagccaggtaaatctgcttctcggtccctgcttggggacttcgggaccatcacttaaaaactcttcytgcctccttgggttgttgaagagaaattagacacagtacctgcttcttggcaggtgctttggaaaaaaaaatagtttctttcctttcaataagaggaagg

SEQ ID NO: 552859 - DNA, 201 bp, Homo sapiens
cacctttctggttggccttattaagtgagaagctcaccattctttggttctcatggcacctggaagggtggccataccttgtgctttgctggggactgggycagtgggtgcctgctgtcttaattgttaatactctcccatttcactctcagatgtgaccttctttggaatgataagtcttctgtttaatcacagatgctc

SEQ ID NO: 552860 - DNA, 201 bp, Homo sapiens
tgcaccaccacctggcagttgtgattttcttttaaataactgatgcttcttcacttttggtgtggggaatttttaaattacagattttgcaacaaatattytaacatgtattacacacttctccaccgctttcataacgaaatatgctggcctgagagtggggccttttccaaagaactgactctttattccgaaagtagt

SEQ ID NO: 552861 - DNA, 201 bp, Homo sapiens
attctcttagctctcagatagttcctgtctaggtgacacctgtcttgggttagatgctccttttttttcctccacagttggaaggtttaaataaaatgtasccagtgtggagagtgagatgattgcaattatggaggcagaaggataagaagtttgaagtttaggcaaagcacatgtcccaccaccaagataaaacaaaca

SEQ ID NO: 552862 - DNA, 201 bp, Homo sapiens
ctcggaaccacacagtgtgtgtgaaggaagcatcaccaccataaacagccagttacacagtttggatcaggaagcacagccagagaccagggtttgtggtraaagacaagggggtacacctgcctctgctatgtttgcttaggaccaaatcacgagccttggtttgcctctctgcttcttcgaggccctccttggggatat

SEQ ID NO: 552863 - DNA, 201 bp, Homo sapiens
tcatcttccactaatcatcatggtaatggggctgacaattattggaagagctaagggccagacactatgatgagagctttacctaattcctcatacctaaygcttaaaacagtcctgtgaactaggtacattttacagatgaggaaactgaggcacagagctaagttgctcaaggttacataactcgtaagaggagaaagt

SEQ ID NO: 552864 - DNA, 201 bp, Homo sapiens
gttaccgagttgaaacagcagtttctcacagctcgctttgtggcaccaagtctctgctcctgtgaccactggctattccgctttctcaagtaggatcagcrtacttcgtgccatgtccagccacctggggtggcaagcaagccagggacccagagggacatgtgtgtgggagggggctgaaacttcacccctggcgccagg

SEQ ID NO: 552865 - DNA, 201 bp, Homo sapiens
ctcacagctcgctttgtggcaccaagtctctgctcctgtgaccactggctattccgctttctcaagtaggatcagcgtacttcgtgccatgtccagccacmtggggtggcaagcaagccagggacccagagggacatgtgtgtgggagggggctgaaacttcacccctggcgccaggccagattctccagcagctgttcct

SEQ ID NO: 552866 - DNA, 201 bp, Homo sapiens
tgctctgccaagcttctggggccttgggcagatcctggcctaggtctctcgtaaatacttcctctgaccattgctgcgaacctctaagtgtggtggcggcrgggggtaggctttgctctgcttttagagctgctggaaaagacagatcccattagaaagattccagagatggcagtgttttattttgtcccttagagcccc

SEQ ID NO: 552867 - DNA, 201 bp, Homo sapiens
ttaagatcaggccatgtctgatatctctttcagccagtcttttatctctactgcctactccagagcctgttgcatagaaagtgctcaaatcacatattggytgaattaaaaatcagctattttatttcttagcacctaacacagaatcgaatggaaatcaagttttaaagagcacagagtaatggttcatgtcaccatatc

SEQ ID NO: 552868 - DNA, 201 bp, Homo sapiens
ccaagcttctggggccttgggcagatcctggcctaggtctctcgtaaatacttcctctgaccattgctgcgaacctctaagtgtggtggcggcagggggtrggctttgctctgcttttagagctgctggaaaagacagatcccattagaaagattccagagatggcagtgttttattttgtcccttagagcccctaacttt

SEQ ID NO: 552869 - DNA, 201 bp, Homo sapiens
ggtctggctcaggcgtgctgatagggagaagtggggaggtaggcattttcctagggactgttggttaaacctaccaatcaggtgatttcctccagggcagytgcattgtcggggaccagagcttgggccccattatggagagttttcatggaggaaaaaaagccagcagcctttcttgtggctaaggagatgagcaggtgg

SEQ ID NO: 552870 - DNA, 201 bp, Homo sapiens
tgcctgtgctttgggtatcatatctaaataatcattgccaagaccaatatcaaggagtttttttcccccatgtttttttctaggagttttatgatttcacrtcttacatctaagtctttaggctattttgagttggattctgtatatgatataagaatagggcccaatttcattcttttgcatgtggatattcacttttcc

SEQ ID NO: 552871 - DNA, 201 bp, Homo sapiens
tgttctaaaaattcaggatgtagaccaagaaagatgggacaattatcccagcatttaagggctctaaaaggggaaaatgggtctacttatttcccgttggraaacctgagaaagggcgtttttccaaggccccagatcaaacctactctggggttgaaatagatgggaggttccaggcacggtggctcacgcctgtaatcc

SEQ ID NO: 552872 - DNA, 201 bp, Homo sapiens
ctaaggaaaaggaaactttgagatagttctctttaaacaattgaagagctctcaagcagaaaatagtctggatttatttcatgtttttccagatgggccarcgggtttgggtcagtttaagaaagaatttcccagagctgttctccaatggaatgggctgacattaagtaccgttaaactcctaggacagtgactttctgt

SEQ ID NO: 552873 - DNA, 201 bp, Homo sapiens
ctgggcaacaacagcgtgactccatctcaaaaaaacaaataaacaaaaaaaaaaaacctggagattacaaagtgatgagaagctgttaaatgaagtcaaarcagctagaagcgtcttgccagaaccggataggcacatggtgcatgttccaggatctcacggcatcaggtagtgtgctaagaaggaaagtaaataatgact

SEQ ID NO: 552874 - DNA, 201 bp, Homo sapiens
ctcaagactgtctgatagcctgcaaccctgcaatcccaatgaaaataccaggaggctggaaaagattatttaggaaaaagggaattaaggtaggaaaattkactcccactcagtcgtggtgtaaaatctcactctctgcctctgtagaggctctgatgtcaataaatgtttctagacactaatactcagaatgccaagtat

SEQ ID NO: 552875 - DNA, 201 bp, Homo sapiens
aaaaacccaggtaggccaaagccagtaagccaccattgctgtggtgggaagatagatcttaaatgtagcaatggcaggtgaatgaggaggaaggctggagygcccctgtggagacccaggcccagatgtgccatatcatgaacctttagctttaagctatgtctcttccctgtttgttcctttcaggtttacccccatgcc

SEQ ID NO: 552876 - DNA, 201 bp, Homo sapiens
ggatatgcttgttgtgtttgaggaccagcagggaggtgagggtggctggggagaagggaacaaaggagagggagataggaaatgagggtccagaggagatyagatggctgaggccagtggctgctgagatggaaggtcagtgggagattttgcgcagaggaacatgggaaattgttttagaacgatggctttggccaccat

SEQ ID NO: 552877 - DNA, 201 bp, Homo sapiens
tcagcacaatagttggtattataattatgtcattcttcaattccacaatggtattcattataatacacactactgacttgctttaataatactttgagacrcattcttttgttcactgccacgtgcgaaggtgatgttttaagtgctggggaaatggtgagcaaagcagtctctgcccacagacagcctctattctagtgg

SEQ ID NO: 552878 - DNA, 201 bp, Homo sapiens
aattcatctttggagaaaggtacagactacagactgtctctgtgatctgtgttttttttcttccaggcatgtccttacccttggcaaaataaactgaatggattgagacctgtctcagataccttttggtttacagcacctttctggttggccttattaagtgagaagctcaccattctttggttctcatggcacctggaa

SEQ ID NO: 552879 - DNA, 201 bp, Homo sapiens
taagcagatactacagatgaatggttgaatatctccacaggtagctactctgtgttcaccttacctcacgcaaagtgttgatttattgatttccagagccycagactatcccctacttgctccttttctcttggaatatgtggatgaccataccctccctctttcccctccggcccacttttcccctttaaatactgaagc

SEQ ID NO: 552880 - DNA, 201 bp, Homo sapiens
cttcccaggagaacctctctgtaaaacctcgtatttaagcttccttgatacccatcagcaccccaagccttactcccagcagaattttcagagcccctcaragtgatccagaattcccaccagacctagaaactgttgaggctacagcaaatgggaagcacagttctcctgctcaccctcagtcaccctgtctcatcccat

SEQ ID NO: 552881 - DNA, 201 bp, Homo sapiens
ggaggctaaggcaggagaatcgcttggacctgggaggcagaagttgcagtgagccgagatcgcaccattgtactccagcctggtcaacagagcgagactcygtctcaaaaaaaaaaagaacacagaccatcacttctgctgactttcctctcttcttctctgtagacccagtaccgtagtagccactagttttgtacaaac

SEQ ID NO: 552882 - DNA, 201 bp, Homo sapiens
ttatatagaggacaaacaggctcgaaagatttcttccctagccatcccaatacaaggctgttttggtataaacaacccctgaaggtgagaactggctctcraagcagtttcacactccattcatctctgagctctgctgtttctcacagttttggattcgtgatgagaatactgttgctgggtcacttcattattacacag

SEQ ID NO: 552883 - DNA, 201 bp, Homo sapiens
aactttttacagtgtttaaacatgaaccactttcacacacatcatctcatttatatctgacaacgagcaaggaggcaggtcaagctggctgtgttatatcmatctggcagacgaggcagctgggactgtgaggttaaaacagctcaggcagatcacgcagccaagcgaggggcagctgcggatgtggtgccttggctttct

SEQ ID NO: 552884 - DNA, 201 bp, Homo sapiens
gtgggaagatagatcttaaatgtagcaatggcaggtgaatgaggaggaaggctggagtgcccctgtggagacccaggcccagatgtgccatatcatgaacytttagctttaagctatgtctcttccctgtttgttcctttcaggtttacccccatgccctagcttcctcttcacactttttccccccagattgtctgtcta

SEQ ID NO: 552885 - DNA, 201 bp, Homo sapiens
gtgtttaaacatgaaccactttcacacacatcatctcatttatatctgacaacgagcaaggaggcaggtcaagctggctgtgttatatccatctggcagasgaggcagctgggactgtgaggttaaaacagctcaggcagatcacgcagccaagcgaggggcagctgcggatgtggtgccttggctttctgtctgcttcgc

SEQ ID NO: 552886 - DNA, 201 bp, Homo sapiens
tgtgttgttttcactaagaactgctcttctcagtcactagtatttattgagcttacatcttaaaatcagtattcttttagacaccactgaggaagtaaaasataagatcttatggtcaggcactttggtccacacctataatcccagcactttgggaggcccaggtgggcagatcacttgaggccaggagttcgagaccag

SEQ ID NO: 552887 - DNA, 201 bp, Homo sapiens
ttcaggactattgattaagcagataaatcaattatcttgttaattgaatcttaagagtcatttaatcgatccttttagaccatacttgaatgatagtataygcatgtgttttgctaatcagtttattctagacacagggctcggggttcattgacagcaaaaatagggagatattctaaatcagtccttgcttagcacaaa

SEQ ID NO: 552888 - DNA, 201 bp, Homo sapiens
ctatttgcttgagataattcttcccacctgacacccgtgcccctcctcctcatcctccagccttctaccagtcttgtgtaggttctgataaccattcttgkcagtcaagcattttaattgaagcatgggtttctgcttaattattatctcagcgagcgttggcattgtaagcttttcatttgtgaattgtggaatccattt

SEQ ID NO: 552889 - DNA, 201 bp, Homo sapiens
gcttagatgcttttttatggagagttccctgatttcttccttgcccaaccagaagtaatgtctctccctacttgggatatacatagagcaccttccacgtrcagtgttttcactgtctgccttcggtcacagttgttttgttttgttttgtattttgagacaaagtctcgctctgtcgcccaggctggagtgtagtggcat

SEQ ID NO: 552890 - DNA, 201 bp, Homo sapiens
taattttacttccatttacaaagcagacttaggctgaggcagccttcgttcctcctagtaaagcgtcctttccaagggaagatcccagagaacaaggagcraaccgacctggcagtggttttgggggcttgaagattggtgtttgttgaaggtctgttgctttcaaaagtatatatgtggtgacataaacgtatatatata

SEQ ID NO: 552891 - DNA, 201 bp, Homo sapiens
aaaaaaatcaaaaaagcagtatctctaaaacctaataagcttaatgataaaatactacctctaaaacctcataagcttaattatgcttacagtattctagycccagtatccagatataaatttggggttttgtagttgattatttgggttttctgttcacatatgggtcatacttcaggaaacctgagaacaatgtgagtt

SEQ ID NO: 552892 - DNA, 201 bp, Homo sapiens
agtgtagttgtagttccccattccaaccaagctgtgccttgaaacacgtcccgtgtctcttacacactgaaaggctaagctgggaagtctcatgaagttcrtagaagtagaatatttgcacttagaaatgctggcgtgagattattgtgatcgagatagtcaccttttctatgcctggctgctgagctagggtagaacagt

SEQ ID NO: 552893 - DNA, 201 bp, Homo sapiens
catcctcttgcctcgcctcccaaagtgttaggattataggcatgaaccatcacacccagcaaagcattatgtttctgtgactttgaggatcttaagtaacrtgactattttcatttttgtctctttcctttaagagtttaatgaagcagtgcctttgtccctttcaggcactcgaggacctaggccgaaggaggctctgtc

SEQ ID NO: 552894 - DNA, 201 bp, Homo sapiens
ccccaccactctacctggttaactcctgcttagcctcaggtttcaacttcaatagcccttcctcgaggccatttctgaaccccaggataaattaccacctstctgcaattaatgttattaaaacctccgtaatcttcagcacaatagttggtattataattatgtcattcttcaattccacaatggtattcattataatac

SEQ ID NO: 552895 - DNA, 201 bp, Homo sapiens
tgcctcccctatgcactaaccactaatctacttgctgtctctatggatttgcctattctgaacatttcatataaatagactcatataacatcgttttttttgtctagcttctttcacttagcatagtattttcaagattcatccatgttgtagcatggatctgtacttcctttttatggctgaataatattccattgtatg

SEQ ID NO: 552896 - DNA, 201 bp, Homo sapiens
gtgtgcggttgatggccatggtttatagaggggagggagccgaggcttggaggggctcaacagccagtccagggttacaggggacaagtggaaaggccagyactcaaccccggtccgcctgattccacccaaacagcccagtgtgggcaggcaagagatgaccttggatggattcacagacctgaaaagaccatttgcttg

SEQ ID NO: 552897 - DNA, 201 bp, Homo sapiens
ggatttggtgctcagccctgactgatgatcttcatagcatggtgtgcggttgatggccatggtttatagaggggagggagccgaggcttggaggggctcarcagccagtccagggttacaggggacaagtggaaaggccagcactcaaccccggtccgcctgattccacccaaacagcccagtgtgggcaggcaagagatg

SEQ ID NO: 552898 - DNA, 201 bp, Homo sapiens
ctcctgatgcccgctcccactcgtgcacatttaccctatctggatttggtgctcagccctgactgatgatcttcatagcatggtgtgcggttgatggccayggtttatagaggggagggagccgaggcttggaggggctcaacagccagtccagggttacaggggacaagtggaaaggccagcactcaaccccggtccgcc

SEQ ID NO: 552899 - DNA, 201 bp, Homo sapiens
aggcagaggttgcagtgagctgagatcatgccactgcactccagcctgggcaacaacagcgtgactccatctcaaaaaaacaaataaacaaaaaaaaaaaacctggagattacaaagtgatgagaagctgttaaatgaagtcaaaacagctagaagcgtcttgccagaaccggataggcacatggtgcatgttccaggatc

SEQ ID NO: 552900 - DNA, 201 bp, Homo sapiens
caagttgtgaacaattagtctcacaaatgaaaagcaactgctgcatgcaaagcaggtgatctgaaatcaggaccactgctcctgatgcccgctcccactcrtgcacatttaccctatctggatttggtgctcagccctgactgatgatcttcatagcatggtgtgcggttgatggccatggtttatagaggggagggagcc

SEQ ID NO: 552901 - DNA, 201 bp, Homo sapiens
ttgtgttgtactttgacctgctttgtcaagttgtgaacaattagtctcacaaatgaaaagcaactgctgcatgcaaagcaggtgatctgaaatcaggaccwctgctcctgatgcccgctcccactcgtgcacatttaccctatctggatttggtgctcagccctgactgatgatcttcatagcatggtgtgcggttgatgg

SEQ ID NO: 552902 - DNA, 201 bp, Homo sapiens
agaagagcaataaatgtcggacctccaactctctttttgaatgccattgagcacagggcttgtaactggactcgtggacttttctattctcccccttacargagaggcatttgtcagataacttaaatgttgccttcacctttctactttccaaaaagcatccgtaaaggtcttgattttgctccttaaagcaaagtaaaa

SEQ ID NO: 552903 - DNA, 201 bp, Homo sapiens
ggaaaaatctcgagtttgccaaacccaaagagcagccgccaggtttgctgagcttctctcaaaccttccccagtctaaggcagggatttctggccaagaamtgaattccaagagaggccctcaccaccagtcgagcacaggcctgttgtctggaggtgtgggttgagtgtaggggatgttttgactcccctctagcctaca

SEQ ID NO: 552904 - DNA, 201 bp, Homo sapiens
aaagggaattcatattaggttcaattagtaatagtgtcttcattcagtttttgatacattttcccttttgttctgatgaagttacaacttggatatcactrtcatttttaaagtccaaagaccaattacctcttttgttacctgaattttgtcactgttagttttaggagagatgcagtaagttcagctttagctgtcaaa

SEQ ID NO: 552905 - DNA, 201 bp, Homo sapiens
gttgagtgtaggggatgttttgactcccctctagcctacagtgcctggttttttctgcctaacagcatagagtgcagcctctcccccagcataaggaaaakgttcccagccaggtcccccatcctcttgcttagtgaagtttgccattaaacttttttatactgtcctgaaagagttcagtggagaaggataggatttgtt

SEQ ID NO: 552906 - DNA, 201 bp, Homo sapiens
atctgctgggcactgtgctggggaagctaccgtgaagtaggcagatgaggtctctgtcctcttctacttgtagtcagcccaggtaggcaggcagtcaggcmtccatttacaatgcagtgtaacaggcaaggcaggtgtttcaggagacacatgaagctctgggctttactgagtgaaggctgccttgggttaaaggcacac

SEQ ID NO: 552907 - DNA, 201 bp, Homo sapiens
cctcttgcttagtgaagtttgccattaaacttttttatactgtcctgaaagagttcagtggagaaggataggatttgttaactcaaacgcactggagcccrggctctcctcacattcttctttctcagcaattctcccagtcccagtccagcacacatctcctgttctgtaactcagacagcccagcacaggctggcagcc

SEQ ID NO: 552908 - DNA, 201 bp, Homo sapiens
tctgctgggcactgtgctggggaagctaccgtgaagtaggcagatgaggtctctgtcctcttctacttgtagtcagcccaggtaggcaggcagtcaggcakccatttacaatgcagtgtaacaggcaaggcaggtgtttcaggagacacatgaagctctgggctttactgagtgaaggctgccttgggttaaaggcacaca

SEQ ID NO: 552909 - DNA, 201 bp, Homo sapiens
ttcctctcctctagcccccacatcaaacccatggaatagctgtgggctctcatctcccaatcccagagcgggagggtcttcctagtatttacctgctggargacaggagcagagggaacaagcaccacttacagacaaatagggaccagagaaataactccagggagttcagtgtcccatgtttcatctttccagtcttat

SEQ ID NO: 552910 - DNA, 201 bp, Homo sapiens
acttgtagtcagcccaggtaggcaggcagtcaggcatccatttacaatgcagtgtaacaggcaaggcaggtgtttcaggagacacatgaagctctgggctktactgagtgaaggctgccttgggttaaaggcacacatttgtaatcatgttctttggccgcagaaatagcaatgctggtacactgcatcaacagaattgcc

SEQ ID NO: 552911 - DNA, 201 bp, Homo sapiens
accactgtttgagaaacagataatgtcacaggatccttaccgtgttgcttcaccagccggaaaccactgtggctggtggcatctttgcccaagttttgctygggcccgctgggcctgttctgcccactcagcctggcaggctgcgctcagcttttgctactggcccagaccccatgcctgccaagagtgagccaggcacag

SEQ ID NO: 552912 - DNA, 201 bp, Homo sapiens
ggggtttgggagagaagcattgggaatgaggtgacttactctcttaaggaacccaggtagaccaccagtgactgctgctttctttcactagccctcataargcttcctttcatgatctactctagtatctgtttttggacagtgtctgtctctcacctgggctagagtacagtggtggcttgatcttggctcactgcaacc

SEQ ID NO: 552913 - DNA, 201 bp, Homo sapiens
agcggcttccactgtgggcactggggaacatggtggtgcctgaaagcttggaggtaccaggaactgtagagccccaaagagggcatcacaaccctggctcrgggagctcctaagtctgggttccccaaagggccatggctctttcctcctctcttctctcctcctcattgcctgcagtgtggcaagagggaggcgtgtttc

SEQ ID NO: 552914 - DNA, 201 bp, Homo sapiens
ataaacagttggatctatgtaaggccttaaaaaccatcttgtaaagtggtttgtatacattaagcagtgggtccattgttggtacgctttctggtagaatyttacacaaattctcctgtgtataaacaaacaaggtagagctgcccagactaaactctagaacaaggctgaggttcacaccagctcccttttcccaaggtg

SEQ ID NO: 552915 - DNA, 201 bp, Homo sapiens
ggtggagtccacggcctggagtgagagcttatggtgcttttctggcccactcatggccacccatgaaccaatcagcatgcacttcctcccttctgaagccygtaaaaaccccagacccacaatgcatgtggctcatgccaggctggtgggttaaggatatgatatacctcattctgcacttgaacagctatgttctgggct

SEQ ID NO: 552916 - DNA, 201 bp, Homo sapiens
tagagctgcccagactaaactctagaacaaggctgaggttcacaccagctcccttttcccaaggtggcacctggggctgctctgagggactgtgaagcccmctgaactcggtctgaggctgacttctggtccagaggctgccggacttgcctgtacatcagaatcacctgggggactttgccaacatatataataattgag

SEQ ID NO: 552917 - DNA, 201 bp, Homo sapiens
acaggtaagatgctccaaacctagagcataaagaaaattttcagttgccagctccagtgggacttggttccccctgagagctgtgcttcagcagtttcccraaatctaagcttcccaggaagcccccaccctgctcctgatgttcctctctgtagcttcagaagaactgtacggcactgacctttgagttccttctggctc

SEQ ID NO: 552918 - DNA, 201 bp, Homo sapiens
agagctgaggaagaaatgagccgaggactggcaagaggttgtagcaatttgtgttgtactttgacctgctttgtcaagttgtgaacaattagtctcacaamtgaaaagcaactgctgcatgcaaagcaggtgatctgaaatcaggaccactgctcctgatgcccgctcccactcgtgcacatttaccctatctggatttgg

SEQ ID NO: 552919 - DNA, 201 bp, Homo sapiens
aagagctgaggaagaaatgagccgaggactggcaagaggttgtagcaatttgtgttgtactttgacctgctttgtcaagttgtgaacaattagtctcacaratgaaaagcaactgctgcatgcaaagcaggtgatctgaaatcaggaccactgctcctgatgcccgctcccactcgtgcacatttaccctatctggatttg

SEQ ID NO: 552920 - DNA, 201 bp, Homo sapiens
gctcaccccacatgttcaaaagcaaccaggagtggaggtgagaattaatagtccaccatgagtggtagcaagctcagcaaatggaataatgaacccctcargtttaggtctggccaaaccactagcctctcaagattttggttgcttcacccctaaaatgaaacgattgaagatttctaagctcaacaatttctgtgaaga

SEQ ID NO: 552921 - DNA, 201 bp, Homo sapiens
aaggctttgccattttgtggaccgagggttgtagggccagggagagaaggggaaggactataagaagactgagtcagagcagagaagtgtctcagtggagwctcctaggctagtggggtatgagtcctgggctgcagctgtcctggcggctgcagtgcagggactgtgcaccacatccggtgtggagagggcagcttcccc

SEQ ID NO: 552922 - DNA, 201 bp, Homo sapiens
ctatcttaggacgtcggctctctcaaagctcaccccacatgttcaaaagcaaccaggagtggaggtgagaattaatagtccaccatgagtggtagcaagcwcagcaaatggaataatgaacccctcaggtttaggtctggccaaaccactagcctctcaagattttggttgcttcacccctaaaatgaaacgattgaagat

SEQ ID NO: 552923 - DNA, 201 bp, Homo sapiens
cggcatgattttaagtttcctaagactttcccagccatacggaactgtgagacaattaaacctcttttgcttataaattacccagtctcaggtagttcttyatagcagtgtgagaatgaggtgagcagctgagaggcttttctgactatagtgtatgagctgcaatatgtcgattttcagatatttacttagctcttcagc

SEQ ID NO: 552924 - DNA, 201 bp, Homo sapiens
gttcatgagatggtataataggcagggattgattctgccaaattaggagggaagagcagtgaaaccccaaatccctctccacacctccctatccctccccwcccacattgaagtaggatggacatagaattgtggcctagcccaagagaggcttgatttttattcttactagttttgcctaggctgcctcattctctttcc

SEQ ID NO: 552925 - DNA, 201 bp, Homo sapiens
ttaggaaaagcaaatgagaacatcagtgaaatgagagcatcagtgagaacaagatgtggtacgtggtcagagatagtaaatattagtcttccttccccacyggcttctggaggtcttcacacttaaagattccttgtattcactttcatattaatagagaatgggccaggcacagtggatcacacctgtaatcccagcact

SEQ ID NO: 552926 - DNA, 201 bp, Homo sapiens
atgccctctgacagtgcattcaagcaggctgacaaggaagtggatgagcagattgagaaacgccacagaatgcttatgaagccaactccagagctgcgccygcatttaatataaattgatttattgaatcaagcacagaagccctgttacagaaaccccaggctttatcctcttgaggaccacctaataaagcagccccaa

SEQ ID NO: 552927 - DNA, 201 bp, Homo sapiens
aacacaccagccctttctcacatccccaggctttagcccctgcagcttcctcttcgtgtaaggcatacgatgtccagctcgtccatccaaggaatcagtaycccatttacctttggtgttcccagcagatggtctgtaagctttgaaactgaatgaataaagtgattttgcctaatgcagaggtgggtttcaaacccaagt

SEQ ID NO: 552928 - DNA, 201 bp, Homo sapiens
gttggatcaccgtgaaatgagggggtcttctgaaagtatcttgtatgtttaatttgtttcttccactctccttcccctgtttatgctttgcctcagcaagkatgtcctgaagacctactgtggtttacactatagaagatgctgctagacccacagaggaaatacaaattgggatttctgggccttcagaagttgaatttt

SEQ ID NO: 552929 - DNA, 201 bp, Homo sapiens
tccaaaagaaggttggggaggtgcaagaagggacccatgggaaattgactcgctcagatggtaccttcccagagaggtccaccatgacctcatcttctaaratgactctattgttctccttaccatgctggatttttcttcagagcatctttcatcttctgacattgtaatttatttgggtgtctatctcatctactagtt

SEQ ID NO: 552930 - DNA, 201 bp, Homo sapiens
ggtatggttcgattgagtaaggccaacaacagcttcagggagggaaggtcaggactccggagcccagtggaatcctttgaagcctttgctgctggggaggrtaagcacacagtgggatgacttgcgcggcagtccaattcttctgaaaacatttttgcaaaatgttctgcatcacaggttaatgtataggacacgagttgt

SEQ ID NO: 552931 - DNA, 201 bp, Homo sapiens
acgccactgtactccagcctgggcaacacagtgagagactccgtctcaattagaaagacagaaaatagagtaataagggaggctgaaggggattgattaawttgacttgcttttcttctcagttcatgagatggtataataggcagggattgattctgccaaattaggagggaagagcagtgaaaccccaaatccctctcc

SEQ ID NO: 552932 - DNA, 201 bp, Homo sapiens
atctttcttagtactactcataattattacagtcatgagagcctcaacctattattgagtccttcagtatatgccaggcattgggccaagggttatacatrtattattttaattaatccttgaagtaattcaaagtcaggattgtcaccatgtagaagaagaatggacccttagagattaaatgacttgtccaaggcctca

SEQ ID NO: 552933 - DNA, 201 bp, Homo sapiens
tgggaagaagagaagaattggcaactctgactacagcagctggtgtttatttatgtatttttttttaatcttggtgttcagctgggaatcacatgggccccatacttgaagccctgcctgtcctcttctccccattcccctgtcatcagtttagtgctgacagagactacctggccacgctgcccttttgccccttgcaca

SEQ ID NO: 552934 - DNA, 201 bp, Homo sapiens
cactgtagctggcattgtgttgccttgagagcagtgtatcccgacccgcagccctctgagatgtctcaggccataatttactggcaagtgtctatgttacygagttgaaacagcagtttctcacagctcgctttgtggcaccaagtctctgctcctgtgaccactggctattccgctttctcaagtaggatcagcgtactt

SEQ ID NO: 552935 - DNA, 201 bp, Homo sapiens
aggactacaggtgcaccaccgtgcctggctaattatttttttcttttgtagagatgggggggtctcactgtcttgccagggctggtcttaaactcctgggytcaagcaatcctctcacctcagcctcccaaattgctgggggttacaagcgtgagccactatgcacagcccacctcctgctctttattgaaacccatttcc

SEQ ID NO: 552936 - DNA, 201 bp, Homo sapiens
caacaaatcctcctacctcagcctctgtttagctaggactacaggtgcaccaccgtgcctggctaattatttttttcttttgtagagatgggggggtctcmctgtcttgccagggctggtcttaaactcctgggctcaagcaatcctctcacctcagcctcccaaattgctgggggttacaagcgtgagccactatgcaca

SEQ ID NO: 552937 - DNA, 201 bp, Homo sapiens
tcctaggcccaacaaatcctcctacctcagcctctgtttagctaggactacaggtgcaccaccgtgcctggctaattatttttttcttttgtagagatggkggggtctcactgtcttgccagggctggtcttaaactcctgggctcaagcaatcctctcacctcagcctcccaaattgctgggggttacaagcgtgagcca

SEQ ID NO: 552938 - DNA, 201 bp, Homo sapiens
gtagtagcacaaccatggctcactgtggcctcaacctcctaggcccaacaaatcctcctacctcagcctctgtttagctaggactacaggtgcaccaccgkgcctggctaattatttttttcttttgtagagatgggggggtctcactgtcttgccagggctggtcttaaactcctgggctcaagcaatcctctcacctca

SEQ ID NO: 552939 - DNA, 201 bp, Homo sapiens
cctacagcatccactcacatcccgatgttgcccaagtatagaagcccaagccgcacttccctcccacactccaggccccatgacaaccttcctccagtcayctctcccctcttgtcagcctcccacctctctgcagagcgtcaggagcttaccatgaggcatgtggcagggttcgacttgaacttccctcacacttgatca

SEQ ID NO: 552940 - DNA, 201 bp, Homo sapiens
aagttactttagaatcgcaggctgtcccatgaccctggtgaccatcactgaattattaaacctgaccattcattgtgtgaaattattaaaaaaaaaaaaaagacatcctatccccataaacaaaatgccacataagggaattaaatgcattttattaactcaaaggaaactaattttcaagaggctttacatggaataaag

SEQ ID NO: 552941 - DNA, 201 bp, Homo sapiens
aaggcaagaagggggaccgaagatgtttctgtgctccggcctcctcccaaacccaaccagcccctgtggaatgtgcctctgccgggctaggacttggtttytaatgagaagaaaacaaggctgcctgtggctttctcctccctcctggaggggcactgagctcccagctaaggaaaaaaaaaaaaaaaaagggctcctttt

SEQ ID NO: 552942 - DNA, 201 bp, Homo sapiens
gcgtgtttctgatgaccctctgcttatactcctaggcccgggtaatggcaactattggagtgaccaggggacttggggaccatgacctgaaggtgcatgaytccaacatctacattaaaccattcctgtcttcagctccagaggtaccgcatgaggtttttgtttatattttgtgcaataaaacattttcggcgttattcc

SEQ ID NO: 552943 - DNA, 201 bp, Homo sapiens
tgtggtgaaacctcgtcactacttaaaatacaaaaattagccagacttggtggtacacacctgtaatcccagctactcgagaggctgaggcaggagaatcrcttgaacccgggaggcagaggttgcagtgagccgagatcgctccattgcactccagcctgggggccaagagggagactttgtcttgttaaagaaaaaaca

SEQ ID NO: 552944 - DNA, 201 bp, Homo sapiens
ggactgttctggataaagttgcacgggtatgctccttcatgcttacagtagaaaaagtatgaattaggtggcttgattgctcagcaggaagtggtttttcytacggggatgtgctgtgtcttcctgcttacggttgcctgttagctctacatctgcatggaagaaagaatgaggctccgaagaccttaatagccacaactg

SEQ ID NO: 552945 - DNA, 201 bp, Homo sapiens
attctgtgccggccatttggctatgagaaaagcttagaaaaaataagaccagtggatgatagtctcgaatgtagtaaattcgcatctccttatgcacttgkattatgtcactgttcacctatgtttgtgcaagcatggctgaaggactaacatcaaaattcagaaactggtttctgtaagaaatttactctaaatgctgag

SEQ ID NO: 552946 - DNA, 201 bp, Homo sapiens
aggaagaaaatgggaagtaataaattgagaaagcaagagtggattttccctcaggaagttaagcacctaagggaaaacagagtggatggtgaagagagaascaatctcaaaggaagttatcttggaataggaaataaccatattgaagaatgaaaccttaattacctacagccctcagggaaatgagtttcctgggtagcc

SEQ ID NO: 552947 - DNA, 201 bp, Homo sapiens
acatctctgtttgccttttttttttttttttttttttgaaacggagtttctctcttgttgcccaggctggagtgcaatgacgcgatcttggcttggcgcgrtctgggctcaccgcaacctccacctcccgggttcaagcaattctcctgcctcaacctcccgagtagctggggttacaagcatgcgccatcacacccggct

SEQ ID NO: 552948 - DNA, 201 bp, Homo sapiens
ttggttattttatatttcttagaatttgttttggaaatgttaatgtaactgaagttcttgtatttctaagtgttcataaaagtatgatgttttggccgggmgtggtggttcacgcctataatcccagcactttgggaggccaaggcgggcggatcatgaggtcaggagatcgagaccatcctggacaatatggtgaaaccc

SEQ ID NO: 552949 - DNA, 201 bp, Homo sapiens
aggatcttaagtaacatgactattttcatttttgtctctttcctttaagagtttaatgaagcagtgcctttgtccctttcaggcactcgaggacctaggcygaaggaggctctgtcatttttaactcttggcttccaagagctcttgaggcatctccatccagtgagacagaaggggacaagagtgtggaggagcactcaa

SEQ ID NO: 552950 - DNA, 201 bp, Homo sapiens
tggcatcggagctgttctggaggaacacgttgctactgacatgggagcaggctcaccgcattcaaatgacatatggtattaactcccccacacacaccttytggatcacacatcctggctccgtgtgtgacgacacactccacctccgtgaatttattattgcggctgattttctcccatctgtgaccaattgaagacatg

SEQ ID NO: 552951 - DNA, 201 bp, Homo sapiens
catgtttcttcacttgtgaattagagattacacaattcctttcatacctactcgacaggattgttttgaggattgttattatgggaaagggcttggaaagygtgaagtgttcatgatcattgaataggggcgccagtgacttagtgttgctctttccactgatattttccccctgcccctgggatataaagtgatctctgt

SEQ ID NO: 552952 - DNA, 201 bp, Homo sapiens
aataattttttttcttatttggaccacatcttaagtgttttcagttccgggtaccattttttgaggacactggccaaccagaaagaccctagagggccacyaccacagtattcagtgctcagttactgtttgttggatgcatggggactagagtggttaggatcctccaggtcctgtgaagaacagttgaaagaactaagg

SEQ ID NO: 552953 - DNA, 201 bp, Homo sapiens
  misc_feature (1)...(201): n = A,T,C or G
atttcctccctcttcaagcatataaagacagtattttctggtttggtaaaagacacacacacacaattctgtagggagaacaactccctataaaggaagangtagtcagtgtggtgagtggatggggtctcagggaaaatgaaatccctagcagtcggtgtcagggcagcaggtcactaattgagtgcaaaccttttttaa

SEQ ID NO: 552954 - DNA, 201 bp, Homo sapiens
atgctccctgaagagtactctttcaatagacttcagaatgtgttacctgaaaagtgctcatgatgaatcaagacatcactgtgttttccatacttctgaaktagagattgtccactaacagcttagggaaagcagagtacccgctcagctgctctttttctggtgtggtcagaccagctgggtcctctgaaacatgaatcc

SEQ ID NO: 552955 - DNA, 201 bp, Homo sapiens
gacagagtgagaccttgtctcttagaattcctactttttttgggattcccccattttctcccatgaaaacatgaataatatttaacatgtttacatcttarcatttataatcttctgattctgggtgactttttgttcccaagccaaaatcccatttggagaaagaacatattttgttgtattttgtgctttctacagtct

SEQ ID NO: 552956 - DNA, 201 bp, Homo sapiens
aaaaaaaaagacatcctatccccataaacaaaatgccacataagggaattaaatgcattttattaactcaaaggaaactaattttcaagaggctttacatkgaataaaggcatgttggcacatcaagttttgtataaaaggatacatttaacagtactttaaaatagttctattgagtatagtagtctcttaaaattatac

SEQ ID NO: 552957 - DNA, 201 bp, Homo sapiens
cacaggatggaattaacatacagcacggagaatgagcaagtcgcagttacacacaacatggatgaatttcgcagacttaatacccagcaaagagggcatcmtgtaggatttcagatgaagcacagaaacaggcaaggccagtcttgaagttggaatagtgcccctttggggcagtgacagtgattggatggggtgctgatg

SEQ ID NO: 552958 - DNA, 201 bp, Homo sapiens
cttttttctaaagttaataaatacagcatgtgttttaacatcagtagctacttagaagtaaggaaatgtacttaggaattctgaataatggggcttaaatygtaagtgaggttttatgtgagtcccctgtaaaatttaatttgggagatttttttacctaagttttacttaagcagagtcaagttttttgtttgcttgttt

SEQ ID NO: 552959 - DNA, 201 bp, Homo sapiens
ttgcactccagcctgggggccaagagggagactttgtcttgttaaagaaaaaacaaaaaaagaaaaaaaaattttcaaatgtgcagaaaagttgaaaccaktgtagacttaatacccatatgactgccatctagattctgtaattcacattttgttagatttgctttatcatttatctgtgtgtgtacccatttctgtgtc

SEQ ID NO: 552960 - DNA, 201 bp, Homo sapiens
ctgggggccaagagggagactttgtcttgttaaagaaaaaacaaaaaaagaaaaaaaaattttcaaatgtgcagaaaagttgaaaccattgtagacttaayacccatatgactgccatctagattctgtaattcacattttgttagatttgctttatcatttatctgtgtgtgtacccatttctgtgtccatccatcagtc

SEQ ID NO: 552961 - DNA, 201 bp, Homo sapiens
atcacaggatggaattaacatacagcacggagaatgagcaagtcgcagttacacacaacatggatgaatttcgcagacttaatacccagcaaagagggcawcctgtaggatttcagatgaagcacagaaacaggcaaggccagtcttgaagttggaatagtgcccctttggggcagtgacagtgattggatggggtgctga

SEQ ID NO: 552962 - DNA, 201 bp, Homo sapiens
ataatactttgagacgcattcttttgttcactgccacgtgcgaaggtgatgttttaagtgctggggaaatggtgagcaaagcagtctctgcccacagacarcctctattctagtgggtgaagcagataatttgcaaataaatatgtagtgtgatgacagctacctgtaagtgcagggaagagtccaaagaatgagacagac

SEQ ID NO: 552963 - DNA, 201 bp, Homo sapiens
ttctcaacatcatgagcccttttattatttcattttcttggatgaattccttgtgaaaaattttgtccagcaagctgtattaaataagcattaaattactyctattaaaaaaaattaaccagatacatcatatctcctaatcatgaaggtgtagtgaaaatcatattgaactgataacatttcagccaaaagcaaaggatt

SEQ ID NO: 552964 - DNA, 201 bp, Homo sapiens
aggaggagcaccaaggcatgctgagcctttcaacactgagttgtaggagatgcgtcagggattcagtacgtcataatcagggttatcaccatatgaccttrgacaacttggagaattttctacagttcattttcttcatctgaaagatgaaacagtttatataaatcattttcaaagtctgacttctgcttttcccataat

SEQ ID NO: 552965 - DNA, 201 bp, Homo sapiens
attcacttggtgttcaaggcttattataatttggtctggacttctctgatctttgttctcctgcaccagccagaatgaacttgctgtttcccttacatgaycttaggtttcccatatttgcttaaactattccttttgccaagaatgccctttctccccaactccaaacatccaaattctttttttctctggagtttagct

SEQ ID NO: 552966 - DNA, 201 bp, Homo sapiens
tgataacatttcagccaaaagcaaaggattaacctttgttaaccttgagtacttcttgcccacaatgttagtcattagcttctcccccagcccccaccccscaacatttaaaacaggttagatctcctatttctacctttccaggtcttcaaggagcctggaccacaggctaggactctctgctcacaggtttggattttt

SEQ ID NO: 552967 - DNA, 201 bp, Homo sapiens
caggtttggattttttatcacctgagttaccaacaaactatactcagatgagtgtcaagatcattttgtttgggtttcagaagtgtagcaccttcctcagraacactattttaacgtccctgatgtcctctttcttgttgaaaaacagtcttttaatagttttattttcttgctttccaaagtgctacaagttgcccgaga

SEQ ID NO: 552968 - DNA, 201 bp, Homo sapiens
taaattcatttttatgtgctcgtcttctattagtgtttaaactctgaaatctatttacttaaaatatgaggcaattttcttgtttttaaaatatggcctgyctcaatttgcaaaacatccttgattcttattttgtttctctaaatacgtgtatgtgtgtgttttttctttttctttttgctattaggcattcatgcagcc

SEQ ID NO: 552969 - DNA, 201 bp, Homo sapiens
gtttcagaagtgtagcaccttcctcaggaacactattttaacgtccctgatgtcctctttcttgttgaaaaacagtcttttaatagttttattttcttgcyttccaaagtgctacaagttgcccgagaggcacaatgcatgtcagctgcaagtttaattaaactcatgctgagactattatttttctagcagagtttgacc

SEQ ID NO: 552970 - DNA, 201 bp, Homo sapiens
ctcagcctcccgagtagctgggactacaggcacacaccaccatacccagctaatttttgtatttttagtagagacagggtttctctatgttggttaggctkgtgttgaactcctgacctcaagtgatccacccgtctcagcctccctaagtgctgagattataggcgtgagctaccacacccggcctgatcatagttattt

SEQ ID NO: 552971 - DNA, 201 bp, Homo sapiens
ccggtgccagaatccccaagctggggcccatcctccccatccctttgtgttgagctgctgttgcaggatgcacactgtagctggcattgtgttgccttgaragcagtgtatcccgacccgcagccctctgagatgtctcaggccataatttactggcaagtgtctatgttaccgagttgaaacagcagtttctcacagctc

SEQ ID NO: 552972 - DNA, 201 bp, Homo sapiens
  misc_feature (1)...(201): n = A,T,C or G
aaggtatgtagatatctaattagggtcgactaaaagttgaaaaaatgtaaaattgaaagctcttactgacccttccaggaaaaaaagaaatgaagatcacnactagatctgatttcagccttttcatttagccccaagttgtctgtaggtgggtgacctgaggacatctacatggctgtcagaattgtgctgccacttggc

SEQ ID NO: 552973 - DNA, 201 bp, Homo sapiens
tgtataccttatcccctcgttagactaattacctgaagagcttctgtcattcagctgatgtttagagaagttaatttacaaacaagttggtcatatatttkgtttaaaaaaaatcatgtgtcttaccatataggaaacagtatcgatttctatgttgactttctggatatatcatttagaaatttttttgcttccaaattt

SEQ ID NO: 552974 - DNA, 201 bp, Homo sapiens
atgttagcgacatctagcgcatacccttctttctccgtgtgggcacatgggaggcttacacttctctgctccctttgtaggtagatgagtccatgtgactmgttctggccagtatatttgagcataaatgaagtgtcacttctaggctgatgcatataattgtcattggaagaccttccagtattgtcttcctcttgaatg

SEQ ID NO: 552975 - DNA, 201 bp, Homo sapiens
tacacaaagacaagacaaacctcttttcctgaagttgtctagcaggagtcccatccagccgaacaagccactgtaggaaggcttccccaggacatgagtcrggagctgaaccataaagcagccagccagacagtggagagctggaaaggaaagcgagtgtgggtgcatggaagggcagagtaggatgcgcctgggaaactg

SEQ ID NO: 552976 - DNA, 201 bp, Homo sapiens
gaacatttcctccctttcttccccatcttcattaacaattttatccatatcactttctttggaacttgaagaatttacctatagccttgcttctcccttargctctccatggggtcccttctgctgtgatctttccttcactctgcctgcccataccatatgctttgcatgagcctgcatttatatttgttcaaaatgtga

SEQ ID NO: 552977 - DNA, 201 bp, Homo sapiens
ttctgctgtgatctttccttcactctgcctgcccataccatatgctttgcatgagcctgcatttatatttgttcaaaatgtgagtataaattatagtagcygtaaaggacatggtggatactccgtgcctgtggaatcatctacaaactaatggtttttgacagtgccaggtggaagcagttggataatgctgaggcttca

SEQ ID NO: 552978 - DNA, 201 bp, Homo sapiens
attgccctgtagtgagttaatacctgcgtttgtcttattagctttgaaaaacaaaaaacagattgagtctgtatattgattcagacttaccttctgggatrtcatagtagaaggttaactactcttgtacattctgtacatttctgccaaatctcgtgtgatggccattaagatgctgctcaccaattctcaacttcaagt

SEQ ID NO: 552979 - DNA, 201 bp, Homo sapiens
gaaggttaactactcttgtacattctgtacatttctgccaaatctcgtgtgatggccattaagatgctgctcaccaattctcaacttcaagtctcctcctsctgggcacactgctcttcccctcctattccttctgcctcagcaaggggtgaccctccagattgtggaagccctgtccttcctgagagaagagacacggag

SEQ ID NO: 552980 - DNA, 201 bp, Homo sapiens
cagcttccagggttccagtaatatgttgtaatttttttctcattaataaacattcacattagtatctaaatttgtattcataattacttttgcattcttgrgagcccccaaaatttcataaacctcagacctcacaaaacatgtatccccctgcaaaaagggaaaatggggagttctaaggatactttgttaggctaaagc

SEQ ID NO: 552981 - DNA, 201 bp, Homo sapiens
gcaaggggtgaccctccagattgtggaagccctgtccttcctgagagaagagacacggagccaacctgaaatggacgcgtagagtgaatgaaaaataaacmtctgttactgccaccataatgtagcccgcaagttttatcagtacttagaaaagtaaagttaatggttgtttggggaatgaaggtggttctagattttact

SEQ ID NO: 552982 - DNA, 201 bp, Homo sapiens
aaagttaatggttgtttggggaatgaaggtggttctagattttactgtcctaggcagtaagttgggactgtgaagaaataattttttctgctaaatgaatrttgttagcttcataagtagtttttcactatgttatctgaatttctaattagagtcctttcatataatcaccacttttttgcgttgtaggctcaagagtat

SEQ ID NO: 552983 - DNA, 201 bp, Homo sapiens
caactgttgtgaagactctgggatttaacaagaaccaagacaagacctgaggctttgagaattaaatctagcaaaggagataagcaacctaaggatcaggmgataaggggtgtcattggagtacacatgtgtgagggacaggatgagagggctaaccaaccagtgttctggtttgggggaagttttcttggggagatgaca

SEQ ID NO: 552984 - DNA, 201 bp, Homo sapiens
ttgagaattaaatctagcaaaggagataagcaacctaaggatcaggcgataaggggtgtcattggagtacacatgtgtgagggacaggatgagagggctamccaaccagtgttctggtttgggggaagttttcttggggagatgacagtggttcatttcttcaaacaaaatttgttagacatctgtcctactttgtgacag

SEQ ID NO: 552985 - DNA, 201 bp, Homo sapiens
caggatgagagggctaaccaaccagtgttctggtttgggggaagttttcttggggagatgacagtggttcatttcttcaaacaaaatttgttagacatctrtcctactttgtgacaggtgatggagtagatgatgggcatgcagtagagggaaagcgtggtgcctgcccttgcagagtgcacaggcaaagctaggacctga

SEQ ID NO: 552986 - DNA, 201 bp, Homo sapiens
tgcccttgcagagtgcacaggcaaagctaggacctgaaggatgagtgattagcaggaatcagccaacccattctctgaaagtagaaactgatgtgcaaagrctcagaaataagtaaatgctggggttgaaagatgaggctcaagaggagctggggactggaggatgggtgccctcacacactgtaagatctccaaacggac

SEQ ID NO: 552987 - DNA, 201 bp, Homo sapiens
gagaaaaagaaaaagaaatagtgtttcattgcgtctatgctcagggattgataagtattgatttattttgttagtcctagtttaatttaaagttgacttayggggatttatcaattgtacatattttctaggttgaaggaaggccttttccaaacaaccagagctgaggacccagatgggcagtatagaatggtgatggtt

SEQ ID NO: 552988 - DNA, 201 bp, Homo sapiens
tgtcttcctgcttacggttgcctgttagctctacatctgcatggaagaaagaatgaggctccgaagaccttaatagccacaactgatggccaaatagcacyttatccttcacaaaggatgttcccagacatgtttgcccttaatccttgcaaccatcctatgaagtgtccagttgaagaggcagattcagtgaggtctgag

SEQ ID NO: 552989 - DNA, 201 bp, Homo sapiens
aagaatcagaacaagaaagcccaagctccaaggcagaactagtggaaatgaggttagtgggagcccgccctgatcccccttatctggaaaactatttaagrgaataaccagaatggagaaagccagagagagggggagagaacctggcattctcccaggcaagcccccaccagtctcagcctctttatctctgcctgtgca

SEQ ID NO: 552990 - DNA, 201 bp, Homo sapiens
aggtaattaaggtcagtaaatgaattgtacaagataacaaacatatttcttggaaatctgatatgcaagaaaaactaacagttttgagctctacctttaayttaaaaatgtgttaaagtaaaaattgccttttgggacattaaggagaacttttacatcgtagggtttaaaaatttgacaaactcgtataatttcagatct

SEQ ID NO: 552991 - DNA, 201 bp, Homo sapiens
aatttcagatcttgtcatattgttgggggaaatatctttctgatgatcacagtgccactctgctcaatttttgctagccccactcagactttggagtgccktgtagggaccacatatctgatacagatatcattagaccccctgaagaataccagtaatttacattacttctagcttttcaggtttttagctgatttgctt

SEQ ID NO: 552992 - DNA, 201 bp, Homo sapiens
gtgccgtgtagggaccacatatctgatacagatatcattagaccccctgaagaataccagtaatttacattacttctagcttttcaggtttttagctgatytgctttctaggccttgggaagtaggtagtggtggtgagatttcatggccactggagattttctgtcccacattctcttgtttttgttcccagtttgcgga

SEQ ID NO: 552993 - DNA, 201 bp, Homo sapiens
aatttacattacttctagcttttcaggtttttagctgatttgctttctaggccttgggaagtaggtagtggtggtgagatttcatggccactggagatttyctgtcccacattctcttgtttttgttcccagtttgcggagcctgccacattgtaggtgctcaaatatttacataatttttttagtttttatcatggatct

SEQ ID NO: 552994 - DNA, 201 bp, Homo sapiens
gccttgggaagtaggtagtggtggtgagatttcatggccactggagattttctgtcccacattctcttgtttttgttcccagtttgcggagcctgccacaytgtaggtgctcaaatatttacataatttttttagtttttatcatggatctttatttaaaccttccattattatttaacagttcacctgtgagtactttgt

SEQ ID NO: 552995 - DNA, 201 bp, Homo sapiens
gtaaaaaagtataggtggtgtgcacctgtagtcccagctacttgaaaggctgagatgggagggttgcttgagtgtggcaggttgaggctgcagtgagccaraattgtgccacagcactccagcctgcgcgacacagcaagaccctgtctcaaaaaaaaaaaaaaaaaaaaaaaaaaaagagtggctcttctcaagtcacaa

SEQ ID NO: 552996 - DNA, 201 bp, Homo sapiens
tttttagtttttatcatggatctttatttaaaccttccattattatttaacagttcacctgtgagtactttgtattctgaactagagtaagcttccttgcsggcagctgctttgtatacctcagatttgctggctggtgctccaacggcttggtctgattcttcagataaaatgagtattgctagagggagataacagttg

SEQ ID NO: 552997 - DNA, 201 bp, Homo sapiens
caaggcttctgataacaagggcaagcctctttctcttccacaaagccagtcctgagctgcaggagctcattgtcctacattgagtacttaaaagggaaaamccagtttggagaatctgctgaactgatcaagacacaaaagctgtgagggcatcctagagaagcggcagagatttggcaaatggaagaattgatggattct

SEQ ID NO: 552998 - DNA, 201 bp, Homo sapiens
tttaacagttcacctgtgagtactttgtattctgaactagagtaagcttccttgccggcagctgctttgtatacctcagatttgctggctggtgctccaayggcttggtctgattcttcagataaaatgagtattgctagagggagataacagttgttaatgcatgggacaggcaggaggtggtgaccgtttttcttatca

SEQ ID NO: 552999 - DNA, 201 bp, Homo sapiens
tagagggagataacagttgttaatgcatgggacaggcaggaggtggtgaccgtttttcttatcaagagatatcgctaagcaactgctaagcccttccttcrtcagctaattctctcagtcatggtgtgttagcctggataaagtgccataagtcaaaaggatatagacataaaaggaattttctctaaaaattgtcatcac

SEQ ID NO: 553000 - DNA, 201 bp, Homo sapiens
agacataaaaggaattttctctaaaaattgtcatcacaggcatcagatttctgaatccaatgtgctaaattatttttatacaattgacttaaatatattgyttcattaaaaaaaaagaaatagagaaaatgtccaaagaattagtatctttctctctttgaatgccctcctgccaatacctgcccctggttatgttactga

SEQ ID NO: 553001 - DNA, 201 bp, Homo sapiens
gatttgtcatggatggaggtcccaggtgaattcactaaggaccacaatttttgctacagaaaaggtaataatccctcatttgctggtttgatcacctggaygtttcctgcacaaactctgctgcagctgtgcccaaagccctccaaccattcctgattgaaccacgcagggagcagagccagtgctggagcagacagcaga

SEQ ID NO: 553002 - DNA, 201 bp, Homo sapiens
accatataactactattaactaaagtatgagctttgttcagaaccagcttttccactgtcttgtcttctgttccaggatccacccattcctaataggtctyttatttttaataaatcaaggtgaaattacacctgatatttcttttttttcttttctctctttctttctttctttttttttttttttttgatatggagttt

SEQ ID NO: 553003 - DNA, 201 bp, Homo sapiens
tatggtccatatttgcatttccaccgcccccatcccagaaatgtctttttatggcctttttattataaggttgaccttttgaagaaaccaaactagttttytacagactatcataatgttttagttttttctagttgtttccttgtgatgtttagcccaattctctatctcctttgtttcccgtacactgggatttatgct

SEQ ID NO: 553004 - DNA, 201 bp, Homo sapiens
tgggtccaagagctcattaggagtctgggctgcagacacagaggatggttccccaacatatgcatggtagttagaaccaggtgactccactcggtggatcwtctggggtagcagggcgagcacctggagaagggaatgttcacacataaggggttgaggaaggaagagagaaaaacaggctgagctacttagaaatgtttt

SEQ ID NO: 553005 - DNA, 201 bp, Homo sapiens
caggattgattggtgaactgagtgagaaaaagaggagtcaaagataattccggattttcagcctgagaaactgggtgaatagtggttccattttctaatasttaagaagcccaggggatagggtggggtgggggactggtgggaactggtgtagtgttgtccttaaaggaatggtctccagagtccattggcccaagttcc

SEQ ID NO: 553006 - DNA, 201 bp, Homo sapiens
tccattttctaatacttaagaagcccaggggatagggtggggtgggggactggtgggaactggtgtagtgttgtccttaaaggaatggtctccagagtccrttggcccaagttccaatcccaaatccacccctttaagcagatagttaatgccagttttctcatctgtaagccagggattagtcataactgataagatgca

SEQ ID NO: 553007 - DNA, 201 bp, Homo sapiens
taagatgcatgtgaggattaaatagataagggaaaatgtttttcttagagttgagaaaacgtggtccatagtaatttgtaattatttgtttaatatctacycactctactggaggctccttcggggtgtggtctgcatctcttttgttacccatttattccttgccatagcataaacttggcacttaagaggagtccattc

SEQ ID NO: 553008 - DNA, 201 bp, Homo sapiens
agaaatttctacagggtgtgctcaggtaagaaaaggaaatgatcccacaggaaatatctgagaagtaaaatggattattaagctaaggtattagtaaacakgtggtcatatttaaatataccttgactatataaaacagtaataagaatgtctaatgtgtgggttaaaaatgatagaactaaaatattgcataaaaatagc

SEQ ID NO: 553009 - DNA, 201 bp, Homo sapiens
tccctctgcagtgcctggcacatgctggtgctcagtgagtgccatttgctttgttgcctttctcccatgagtgagcatttagattgcatgtcttagatggrgggtgggaagaacagggagaaagaattgtagaaataataatatcagcctttcaaaaagaaaaacattaaatttgccaggagagtagttgtcaggtataaa

SEQ ID NO: 553010 - DNA, 201 bp, Homo sapiens
tgttgttacgctatacatgtctgattggatttatacaacaaactgaagccaggttctattgtagttcatttcccattatccccctgtcctacttttaatayggaagaactcttatcaactgtgtagcatttttatctcatatcttcttctattgttgcctctaccttttgtttcccttggggtcatggtgatggaagaagt

SEQ ID NO: 553011 - DNA, 201 bp, Homo sapiens
accatgcccaaatttctgacctacagaaacaagataataaacatgtgttgtaagtttgtgtaaattgttacctagtagtagaaaaccaatacacaataccrtataactactattaactaaagtatgagctttgttcagaaccagcttttccactgtcttgtcttctgttccaggatccacccattcctaataggtctctta

SEQ ID NO: 553012 - DNA, 201 bp, Homo sapiens
aacatagtgagaccctgtctctacctttacatatatattttataaatttttttttttaaaagagaattgcagattttcaggccccacctgaaataaaaacyccaatggtaggaccaaccatttgtgttttaacaaaccatgcaggtgattctgatgctgctaaaattcaagaaccgactctcctagaagaactcttgcatc

SEQ ID NO: 553013 - DNA, 201 bp, Homo sapiens
aggttctattgtagttcatttcccattatccccctgtcctacttttaatatggaagaactcttatcaactgtgtagcatttttatctcatatcttcttctwttgttgcctctaccttttgtttcccttggggtcatggtgatggaagaagtggataactgtgcttctgaatagtcttttatgtggagaaatacagtttact

SEQ ID NO: 553014 - DNA, 201 bp, Homo sapiens
tttgtttcccttggggtcatggtgatggaagaagtggataactgtgcttctgaatagtcttttatgtggagaaatacagtttactcctctggacatcatgktggtgacccactttatgtattctttaatattctaggggtttttgttcatagagagaagcacctgctactatttgtaatttagcgctcaaactattaaatt

SEQ ID NO: 553015 - DNA, 201 bp, Homo sapiens
ctggtcatctggctaggctccattttatatttgtccacaatttgttacagcagtaagattttggagttatactttccacacaagttctagtttttttgaarcatggtgcttctcccagaatgttttcttttccaagttttgcttggctggcatctcatagtccattgtcctgtcctcctaatctttgcctggttctttgca

SEQ ID NO: 553016 - DNA, 201 bp, Homo sapiens
atcatatggaagctaccatatgatctattactatctccattagtaagacatggaaggggtattatctcctaggatatgagggatgaagtctgtggttaatrcacctcttagaacatttagcgaattcatcatcttgacacacttcgattttctttccccctggtttttaagtatgttaaagccttcctgttattggtctac

SEQ ID NO: 553017 - DNA, 201 bp, Homo sapiens
ttgggaacccacatagctgtcttaaatttaagttggttttgttctctttgtttttgttagaacgggaagtttctctaggaaggaatgagcatgtgattccrccagcagccggcaggtggcaatagtaggcagtagagtgctggcttttcttccccattgcctggctggcagatggccttgttctcagaataaactgggatc

SEQ ID NO: 553018 - DNA, 201 bp, Homo sapiens
aaaaaacaaataaacaaaaaaaaaaaacctggagattacaaagtgatgagaagctgttaaatgaagtcaaaacagctagaagcgtcttgccagaaccggayaggcacatggtgcatgttccaggatctcacggcatcaggtagtgtgctaagaaggaaagtaaataatgactatacatatcgtcatctgatttgtttgtaa

SEQ ID NO: 553019 - DNA, 201 bp, Homo sapiens
aagtcagaagtaagcagaataatgtcttcaaactgctgagggaaaataacagacaatctagaattgcataacaataaagctatcagccaaaatcaaaggtwaaaataaagattttcttaatccaaagactaggtgagcttaccactcacagaccattgttaaaaaaattactaaaaatgtaattcaatggaaggaaattaa

SEQ ID NO: 553020 - DNA, 201 bp, Homo sapiens
gaaggcattctaaggtccttttattttcaggaggacagaaatacgattaacttatatactaaaaatttaacataactgataatagaaataacacttccaawccagttgggggaggggaatattaaagctatccacctgacagaaaacaagaaagaaggaaagaagcacataataaattaaaaacacaaaataagttttcat

SEQ ID NO: 553021 - DNA, 201 bp, Homo sapiens
aaaataagttttcatatgtgtgtgtatatatgactgcaaaatataggtacaggtctaccagtttttgcaataaacaaaattatcatcttagtgactatatrgattttgttttaattagccatgtgctactaataaaatacacttaaaataatgcaaagtttattagctgggcatggtggaatatgccttagtcctagctac

SEQ ID NO: 553022 - DNA, 201 bp, Homo sapiens
gatcacttgaccccaagacttcaaggttacagtgagctatgattatgccactgcactccagcctggatgacagagcgaggccctgtctctgaataataatratgcaaagtttagaagtcctacactgccctgtggatttcataattgaacaatatcagggtgtgaaagtggcattgaaaaacactatgatttcttgcctaa

SEQ ID NO: 553023 - DNA, 201 bp, Homo sapiens
aggttagatggtataaggacaatgttggcctgtaggagatgctcagaagatattagtacctcctccacccgcattcgtttccacgtagtcctttccttttytttttttttaactactggtaagcaaattcccatttcttcttcccttctttctttattattattattattattattacattttaagttctagggtacatgt

SEQ ID NO: 553024 - DNA, 201 bp, Homo sapiens
caggcatattttctcatagcataccataattttctatgtctagtcagctcatacctgggttaaggtgtgttcaggcctgataggcaaataaacttagccasgtttctgaacctaaaaagctcaggtgcagactgatcaatcaccaggataataaacatcactctggtgtggctggtggcctttccccatgtgtttatgtct

SEQ ID NO: 553025 - DNA, 201 bp, Homo sapiens
ctttttgtaaaatcaggaattagtatgtggattaggttagatggtataaggacaatgttggcctgtaggagatgctcagaagatattagtacctcctccayccgcattcgtttccacgtagtcctttccttttttttttttttaactactggtaagcaaattcccatttcttcttcccttctttctttattattattatta

SEQ ID NO: 553026 - DNA, 201 bp, Homo sapiens
gtaaaaggcccacaggctggcttccaagaggacttatacggtgacatttattatcttgatgatttaccagtctggctcttagcttttcaggttcagaaacygatttaatcaagatacagaaaagagattcattatcagagttggtctcaccttaaccaagctcacaagattgatctgtaaagcaaaatgccacttgacatt

SEQ ID NO: 553027 - DNA, 201 bp, Homo sapiens
caactcaacaagagcaaaacacaaaggctgctaccaagtgttgttgtatttcagttcctttcataggcctccgaggtggccattgactatttggggtatayatgtcatatttattttatctagagtagctggggcagccattttcaggtgtaaatggcagaggactcttcagcctgtcaagctgccagcttatctacgggt

SEQ ID NO: 553028 - DNA, 201 bp, Homo sapiens
acagtaactatataaaaacaattatgcagatatacttaagttttacaaagttgccatgcagcccccaacaataaaaattgtattttaatatattgcaatcrtattatttggtagggcttaatacctttcaaaccatttttgtgtgttttattgaatctgaactcctgggctcaattgagccttcctctttggcctcccaac

SEQ ID NO: 553029 - DNA, 201 bp, Homo sapiens
ttcaaaccatttttgtgtgttttattgaatctgaactcctgggctcaattgagccttcctctttggcctcccaacatgtggagattaaaggcgtgagccayggcgcctagcaaatttgaacttatgaataagcctttcaaataggataggcattacatcttttggaaagactgaaacacagacaaggtggtatgcctacca

SEQ ID NO: 553030 - DNA, 201 bp, Homo sapiens
gcctagcaaatttgaacttatgaataagcctttcaaataggataggcattacatcttttggaaagactgaaacacagacaaggtggtatgcctaccatttrtccagtgctatgctaaggactgcatacttttatgtctaatatttttaaatctgggaggtaggttgtattgtccctgttttatagatgaggacacggaaca

SEQ ID NO: 553031 - DNA, 201 bp, Homo sapiens
tgtgatttgccttttggggaagctgtatgttgcaaatgctggggatagcaggtaagcagatgagctgtctgattcttgctaatttctaatgccttctgatstttttattttgtctcaaaaattaaatgattagaaataattaaagacaggccttctacatcagaatgaaaatgcatttaaggacaatcaggttgatattac

SEQ ID NO: 553032 - DNA, 201 bp, Homo sapiens
gcatcatatataattaaatatttgctgaatgaatatataggtgaatgggttagtgcgagtcctctcaccaaatgtggtaaaatggaacctgctctgggatygcagtaatgacatggatctgggctctgatctgccattcagcaactttgtaactttcacctccctgtgtttcagttgtcttttgcttcagtgggggataat

SEQ ID NO: 553033 - DNA, 201 bp, Homo sapiens
atgactcagtagtctggaacagatgtcccagagcccccatataactcacccagtatataggttcttgatcgctttcacagatgtgtatctgaacagtaaaraatatattcactgaagagtatagtgatccacttgtaattctttcggcaagactcgacaactgctaaccttgtggcacttttagtcaccaaagatatgagt

SEQ ID NO: 553034 - DNA, 201 bp, Homo sapiens
cttgatcgctttcacagatgtgtatctgaacagtaaagaatatattcactgaagagtatagtgatccacttgtaattctttcggcaagactcgacaactgmtaaccttgtggcacttttagtcaccaaagatatgagtcttagttattctaaaggccctctgtcgtgatactaggtaagaacaaaaaagcaccagcctcaa

SEQ ID NO: 553035 - DNA, 201 bp, Homo sapiens
aaactaatggttcatcttattggttgatcttagactggataaatgtaccaggcactgagccttttatgattgctgcttttatggagtttcccatataggtrtgatatgagtatttccattcgtatatggaatgcattttcccagagagagtgtgtaacaagattatgaagaacttacatcacttttaaggaaaaatatgct

SEQ ID NO: 553036 - DNA, 201 bp, Homo sapiens
tttttgatgcccacattgtcccatcttggctagtgatttgtcttttcatcactacccctgagctccatgaacatcttctatcttcctactagccacacgtkgagccttgccaatccctaactttccccgccccaagatatggaactaccctctaagaaaccctggcttctttctctggagaacagtttgacaccaaaatct

SEQ ID NO: 553037 - DNA, 201 bp, Homo sapiens
tgtcccatcttggctagtgatttgtcttttcatcactacccctgagctccatgaacatcttctatcttcctactagccacacgttgagccttgccaatccytaactttccccgccccaagatatggaactaccctctaagaaaccctggcttctttctctggagaacagtttgacaccaaaatctaggtgctagttttatt

SEQ ID NO: 553038 - DNA, 201 bp, Homo sapiens
caacagaatgctctttgctgtgattagaaggcaccaaacttgcaggactagaatctctgctgtgttctgagcaaactacatgatgcaaaaatgtatccggytacatggaaatagaggcggatgactctccaagttctctatgttcccagagcttgtctgggtttaagtggtggtggcagtaagggggaaagaccagagagt

SEQ ID NO: 553039 - DNA, 201 bp, Homo sapiens
ctgggtttaagtggtggtggcagtaagggggaaagaccagagagtttagagagggtgagatctcagatgtgactcggaaattatatcatagcacatggaartagaaatatgtaggggcattgagaaaggcatgctcaaattagtccttgaactctggaaacagaatgtgtaaggtcagcatagcaattgggtatagccttg

SEQ ID NO: 553040 - DNA, 201 bp, Homo sapiens
tgaaggttcagaaagcagcctccatttactgagcactgtggttagacttggggcctgattcctttggaaatacagatggctggcagaaaaaaaggaagcaygaggtggttgccaatcctgcattgctttttgcaggaaggtctcaggagagtgggtgtggggagaggggagtcaagggagagcctctgtggattccagaat

SEQ ID NO: 553041 - DNA, 201 bp, Homo sapiens
taaacttagccatttcctcattgatttaccatctagtttcagttatattgagtttaaatttttaattttttttagtgtttttagggatgggggtctctctrtgttgcctaggctgatctcaaactcctggcctcaagtggtcctcccaccttggcctcccaagtgtctggtattacaggtgtgagccaccacgcccagctt

SEQ ID NO: 553042 - DNA, 201 bp, Homo sapiens
ctgggaatgtggttcacactgcagacaaagtgctggaggagaacagagccaggggccaatatccaagaagtcttagtcttacccaggcatgtggatttgtstgttcgtttccatctgaatgggtctgatcgggagttcatcatccttcgctgttggcctcactcctgagcatgtcctcgggagagtgccacagctctcgct

SEQ ID NO: 553043 - DNA, 201 bp, Homo sapiens
agattgccatgccaaggctgggtgtccttcattgggatcccacaccattccagctattggggctgtcacacacaaggtgtacccatacatgcttcatcagrggctgaagtgtggacaaggttcttacagggtatggacacctgcttgataggtcattgtagacattgtattgtcttaatcaaaggctccaataactgtcta

SEQ ID NO: 553044 - DNA, 201 bp, Homo sapiens
tcactcactcccttgagaattccaccaatctatttgtgagggatctgctcccatggcccaaacacctcccaccatgccccacattcaacattggggatcaratttcaatatgagacttggtggggtcaaacaaacaaaccctatgcaaaccgtagcagtagggcagtagaatttgctttctaatgagtcccaggtgctgct

SEQ ID NO: 553045 - DNA, 201 bp, Homo sapiens
tgagctccttttctctaagatctaacacgtgtgtaattcaaacatgggttcaaaagtgctcatcttgaagtagtctagaaatccaccagcagccactaaayccaacgtagatgagggaacacgggttgcatgtagctgtaaggcaagaagaaggaatggagagaccgagagtgacatcagctggagaactaagggaggtgg

SEQ ID NO: 553046 - DNA, 201 bp, Homo sapiens
ttgcatgtaaaaatcacattaaaggggatatctccttaattctttctgagactattggcttgccctctcttctatgttcagtaaatattcagtatctcttktataccaagcccagtgctaagtcccgctggtgataaagaggacacatagtggaactgctctggggatgccccgctaaatagacgggggtgttgctgaaac

SEQ ID NO: 553047 - DNA, 201 bp, Homo sapiens
cacagagatttcccatattcactcaacccacacacaaaattggcacgatcattgttcactgcagtcttgaccttccaggctcaagcgttcctcccacttcrgcctcctgagtagttgagactacaggtgtgcacaaccacacctggcttatttttttgtttgtaagatggggttgcaccaatgttgcccaggctggtctca

SEQ ID NO: 553048 - DNA, 201 bp, Homo sapiens
gtgtgcacaaccacacctggcttatttttttgtttgtaagatggggttgcaccaatgttgcccaggctggtctcaaatacctgggctcaagcgatccttcyacttcagcctcctaaagtgctgggattacaggcatgagccaccggcatgtccaacctggaacactttttaatatgtttatttgccttctgtttatctttg

SEQ ID NO: 553049 - DNA, 201 bp, Homo sapiens
gtgctgggattacaggcatgagccaccggcatgtccaacctggaacactttttaatatgtttatttgccttctgtttatctttggtgagatgcctgataargtctttggcccattttctaatcaggctgtttttttattgttgagttttaagagttcttagtatgttttcaataataatcctttaccagatatgtctttgg

SEQ ID NO: 553050 - DNA, 201 bp, Homo sapiens
caaatattttctgccagtctgtggtttgtctctccattttcttgacagtgtctattgcagagcagaaatcttaattttaataaagtctagcttatcaattwtttctttcagagatcgtacctttgacattgtattttaaaactcattgccaaactcaaggccacgtagattttctactacgttattttctagaagttttat

SEQ ID NO: 553051 - DNA, 201 bp, Homo sapiens
ttctcagatagtgccctgggtagattctttccatctccatcgtgtgccacaccctgatgggggtcaaagcggggatgaagaacatgtttccttttcagtayaggtaacattttaaaaatagaaacaggcattgagaacaaagtagaatttagtattagacattaaaatagagggcttcaggctgggcgcggtggctcacgc

SEQ ID NO: 553052 - DNA, 201 bp, Homo sapiens
ttgactgtatttatgtgggtctatttctgggctctgtcttctgttccgttggtctactggtatttgttcatttgccaacactagacgttcttgataaatgyaactttacattatatttttatatatatattttttaaatttttttagagacaggatcttgctatgttaccccagatggacttgaactcctgggctcaagta

SEQ ID NO: 553053 - DNA, 201 bp, Homo sapiens
gacttccgtgttacaaaatacaggggttccttgcaagattatttatttagcagtattatagctccatggcccacttcctccttgaaacacccttttcttaygttggcatctctgacgatagtttcttggttttcttctgtcttcctgggatgctgtgtctgaagtttcctttgctggctcttcctttgtctgaacaaccag

SEQ ID NO: 553054 - DNA, 201 bp, Homo sapiens
tccagacccttgactgaaacaactactggacgactccccttggcttcttcctcatgggcagagctctgaattttcaatgcctttgttccctttcctgtaaytcctgcctctccctccattttataaatttcagcaaatggtgccaccatccacctagttgatgaagtggatactcaggctctgttctttgtctcatcatca

SEQ ID NO: 553055 - DNA, 201 bp, Homo sapiens
tgactccactcggtggatcatctggggtagcagggcgagcacctggagaagggaatgttcacacataaggggttgaggaaggaagagagaaaaacaggctkagctacttagaaatgttttgaggtggagctgagcacgggacaagtgaaagaattgtggtggcataagtctgcagaatgacacaattttctcttcccagcc

SEQ ID NO: 553056 - DNA, 201 bp, Homo sapiens
tgggtttctgagtgaatgtacctttcctcgccatcctctttcttacattcaccctgtaagggtgaatcgaagtatttccttcaatttgccttcctaaggtytagtgtgaccttttaagatcagagcaagctcactggtttccatagcaacactcacttttcttctgattaggatttttggggggaattgcctagtaagaac

SEQ ID NO: 553057 - DNA, 201 bp, Homo sapiens
ccatttgtccagtgctatgctaaggactgcatacttttatgtctaatatttttaaatctgggaggtaggttgtattgtccctgttttatagatgaggacayggaacagctaagagtataagtatcttaccaaagctaatttgaggcagaacctggatgtttcctgggatttgttttggggcttttgtccttttcactgcag

SEQ ID NO: 553058 - DNA, 201 bp, Homo sapiens
tgttttatagatgaggacacggaacagctaagagtataagtatcttaccaaagctaatttgaggcagaacctggatgtttcctgggatttgttttggggcktttgtccttttcactgcagccatctactctctgatacaaccctactttcaatatacatactaggagagttccttgttaacacgaggagcaacgttctcat

SEQ ID NO: 553059 - DNA, 201 bp, Homo sapiens
atagtagcctttcacatagcctttttgtaagggttatcttgaattctggactattcacctttatttaaggtaaagcagtagcactgtggtgttctgtaagrcttatctcactaatttgatttgatgtgtgactttagagaagttttatagccctgatgttactataagcaggtgaaatgatacctgatatttcatgaactg

SEQ ID NO: 553060 - DNA, 201 bp, Homo sapiens
aatagtgctgcaataaacatacatgaagcactacagaatattctaatgtgcaaccagaattgaacccctggtttattcatatcgtttacatctattttgargaggagagaagatccaccacagcctccagaggaggatagagaaggaaaatagcgaaagaaacacttcctgctaaacggtgactcattgggacctcctgct

SEQ ID NO: 553061 - DNA, 201 bp, Homo sapiens
aagtgatccacctgcctcggcctcccagagtgctgggattacaggcatgagccaccatgcctggcctcttttttttttttttttttttttttttttaagcrtaatcattgtttcaaacaaaatcttagaactccaacccctaccctccagccaccatcctcccatgggaccctttttaggactggtaggattccttaaaac

SEQ ID NO: 553062 - DNA, 201 bp, Homo sapiens
atgagccaccatgcctggcctcttttttttttttttttttttttttttttaagcataatcattgtttcaaacaaaatcttagaactccaacccctaccctscagccaccatcctcccatgggaccctttttaggactggtaggattccttaaaacacactttaaaaaccagaccatcaagtgttaaagctacttctgtctt

SEQ ID NO: 553063 - DNA, 201 bp, Homo sapiens
gctcccccacctccccttccccctctcctcagatagtttgcacagtggctagatttacaaagccattctcttcgcagtgcccccagtgctgagttcattcytgatggagtcttcccttgctctccctatcacccccttggctctcacctcctgcgcatggtgtcattggtcccggtgccagaatccccaagctggggccca

SEQ ID NO: 553064 - DNA, 201 bp, Homo sapiens
tccacattatttctgtgaagtggcactcagcccccattggaagcctcaaatgatggtgaactcagacttttgggcaacactgtttcaccttgttcagctgrtttccgctcttggggccagttctacgtcctggggacctatactgtacataccctctcccatctgactgcatataatttcaaaacagctctcctgcccact

SEQ ID NO: 553065 - DNA, 201 bp, Homo sapiens
cttccttttccaggctgcatcaccccttcaagttactgtgtgtactattgctccctttttaagaaaatcttcccctccttgtcttagtttgtgttgctgtwaaggaataccaaaggctaggtaatttctaaagaaaaaacatttatttggctcatgattcttctggctggaagattgggcatctggcgaaagcctctggct

SEQ ID NO: 553066 - DNA, 201 bp, Homo sapiens
agacttggtggtacacacctgtaatcccagctactcgagaggctgaggcaggagaatcgcttgaacccgggaggcagaggttgcagtgagccgagatcgckccattgcactccagcctgggggccaagagggagactttgtcttgttaaagaaaaaacaaaaaaagaaaaaaaaattttcaaatgtgcagaaaagttgaaa

SEQ ID NO: 553067 - DNA, 201 bp, Homo sapiens
cttcattccataacactgagctcagatgcctcttcatctgtgatacttcccctgactcttcttttgttgacttgcctcctctgtattctcagatcccttgygacataggccttgagtatggcattaattcaagcaaattgtagtttttgtgagaagggccaatggactaaatgtgtgcatccctcccctcccaatgcatat

SEQ ID NO: 553068 - DNA, 201 bp, Homo sapiens
ttgcaacctgaaattggtaggaaacaaagaatgaccttggagttgcatcatctatgagactttcaaaccaaattattaccatcccgggcaatatttttctyttgcacttctttcctgctgaattagtctcattgcacacacatctctgtttgccttttttttttttttttttttttgaaacggagtttctctcttgttgcc

SEQ ID NO: 553069 - DNA, 201 bp, Homo sapiens
ttctaattaacatgtttatacctcatctcagaaattctgatgagattacaaaagccacacattaaactttaggtttatggagaaacatttggctagaaackgaatgctgtatttattttcatagatccaggtttcaaaagcttagtgagagcttagagcaggactttgtaaatcctgaaagttaatattctgtgacccact

SEQ ID NO: 553070 - DNA, 201 bp, Homo sapiens
aaagcttagtgagagcttagagcaggactttgtaaatcctgaaagttaatattctgtgacccactgtaagagttacagatgccacagacctgccctgtgcyatccatgtgttcttttttgtttttgtttttaattgagatatgatttatatgccgtacagttcacccatttaagatatacaattttggccaggcatggtgg

SEQ ID NO: 553071 - DNA, 201 bp, Homo sapiens
aaacaaatccataagagaaactccaggaagatggttgttttcattgcaatgtacctttatacccttgttcttaatatctaaagccacatatagggtattgrtgaatcagtgtatgacatcatatacagcaaggtgtacctccagaggcacaagtcatgttgttatctgtgtgactgtgtgtacttcgcagcacgtagtggg

SEQ ID NO: 553072 - DNA, 201 bp, Homo sapiens
ggtattgatgaatcagtgtatgacatcatatacagcaaggtgtacctccagaggcacaagtcatgttgttatctgtgtgactgtgtgtacttcgcagcacrtagtgggtacagcacacagtgggtacagtgagtggttcagaccaggtctgggagtcatttacacctggtttttatccaggttcttctagttttggctgtg

SEQ ID NO: 553073 - DNA, 201 bp, Homo sapiens
tgagccgagatcgcgccactgcactccagcctgggtgacagagtgagactctgtctcaaaaaaaaaaaaaaaaaaaaaaaaaaaaaaatagtgctcataaratgtatttcaggagaggaagctactttaaagtcattgtatcagctatgatgagatcctagcgtgttttgtttccctgcggttatatttagcactaatatg

SEQ ID NO: 553074 - DNA, 201 bp, Homo sapiens
tctcaaaaaaaaaaaaaaaaaaaaaaaaaaaaaaatagtgctcataagatgtatttcaggagaggaagctactttaaagtcattgtatcagctatgatgaratcctagcgtgttttgtttccctgcggttatatttagcactaatatgggtctatgggaggaggcaggaaggtgaattcagaaggaaagtaggtaagaggg

SEQ ID NO: 553075 - DNA, 201 bp, Homo sapiens
tacgtcctggggacctatactgtacataccctctcccatctgactgcatataatttcaaaacagctctcctgcccacttgtgttttcttttcctaagttgracatcctcgtgtgtcatggttttaagtctttttaccatcttgattacttgccttcataggttagtttttctctactccttttatgggtagcattaagcac

SEQ ID NO: 553076 - DNA, 201 bp, Homo sapiens
tttaactttttcaggaattgccaaactgttttccaaagtggctgcaccattttaccttcccaccaccagtgataagggttctaatttctccacatccacascaacacttgttattgtatctttttttataatacccagcccagtgggtgtgaagtggtatttcattgtggttttgatatgcatttccctaatgactaaaga

SEQ ID NO: 553077 - DNA, 201 bp, Homo sapiens
atctttttttataatacccagcccagtgggtgtgaagtggtatttcattgtggttttgatatgcatttccctaatgactaaagatgttgagcatttttccmtgtgcttattggccatttgtatgtttctttgcaaaaacgtctattcacatcctttgtccgtatgttctataagagtctaatattagcattaagtccctgg

SEQ ID NO: 553078 - DNA, 201 bp, Homo sapiens
actgcactatgtaattactgtggatgtcctaccctcccttctgcttttgatagttcctgggattagagtagcacttcaagtgtttgttcaacaagtatctrttgaacatctgcaatatgccaggccctgtgttgggtactgggagcatctaaacatggtcctgctcctcgatgaaggattgggaaggcctctctctgaggc

SEQ ID NO: 553079 - DNA, 201 bp, Homo sapiens
accttgggcaagtgcttcagtttgcacatctataaaatggtaccattaatattacatgcccctttgaattctgaggattaagtgaatttatatgtgtaaakaatttagaataaatcttaaaatgaatgaagtgtcaaatataaaaacatttgaaagtaaaagattttaaatgactttaataagagtactaaaacattattt

SEQ ID NO: 553080 - DNA, 201 bp, Homo sapiens
ctggcttctaagaagtctgattggccttgaactgttcttggtattaagaaaactgctttcaatccttggtagcacactgcaggtttaggacaagccagggsaggagggcagttatcatgcatttggcagccttttggtaacctacactgctctcaaccttgtcgaagtcccacagtcctattacatcttgttagacatggt

SEQ ID NO: 553081 - DNA, 201 bp, Homo sapiens
gggcatcataagcaaattccaaaagaacatttgctttctttgctggataaatgtactcataagtcaagaccatcctggctaacacggtgaaaccccgtttytactaaaaatacagaaaaaaaaaaatagccaggtgtggtggcaggcacctgtagtcccagctatttgggaggctgaggcaggagaatggcgtgaatccgg

SEQ ID NO: 553082 - DNA, 201 bp, Homo sapiens
gtcaaggaatttgtgaacaggctttaaaaccaccagaggggataagtgtagatgtcaggaagtaccaaagtcagtgctccaaaccctagtcctggaggaaytggacaggctctttacctcccagtgggatagcaagacatcaaaaggacagggtcggggagccctgctgagatcaagggacacaggaagaagagagtaaaa

SEQ ID NO: 553083 - DNA, 201 bp, Homo sapiens
tccttatgcacttgtattatgtcactgttcacctatgtttgtgcaagcatggctgaaggactaacatcaaaattcagaaactggtttctgtaagaaatttrctctaaatgctgagctgacagagattatgttcagaagaccagtggcagcactgaaaagtcagccatgtgggtgattcttacaagaggcttccatccctgt

SEQ ID NO: 553084 - DNA, 201 bp, Homo sapiens
ctttccttcacatgcctgaaatgttgccaccccccttgtgtggttagcttggccagtaggaaggtctctaatgattccacttagcaattttttcagtgatstggatgaagatggcagggctgcttatcaaatttaacatgatatagcatagacagctgatattttggatggaaggatctgagttcaggaagttgtcagtga

SEQ ID NO: 553085 - DNA, 201 bp, Homo sapiens
ttttgcaacctgaaattggtaggaaacaaagaatgaccttggagttgcatcatctatgagactttcaaaccaaattattaccatcccgggcaatatttttytcttgcacttctttcctgctgaattagtctcattgcacacacatctctgtttgccttttttttttttttttttttttgaaacggagtttctctcttgttg

SEQ ID NO: 553086 - DNA, 201 bp, Homo sapiens
ttttcttgtggactagggtttttcatttgttttcattcagagtctccatatgtaaccctaaaaaaaaatacacataatggaaatagctttgttaatttttwaaaaatgcaaggcccaaatcaaaagaagtaataattttttttcttatttggaccacatcttaagtgttttcagttccgggtaccattttttgaggacact

SEQ ID NO: 553087 - DNA, 201 bp, Homo sapiens
ccagcgggtttgggtcagtttaagaaagaatttcccagagctgttctccaatggaatgggctgacattaagtaccgttaaactcctaggacagtgactttytgtggcagtccattcaggagaggccaggaaccaaggttaggtgtattgtagaagggattcctacacttggggtacagctgtcttggtggcatttcagtct

SEQ ID NO: 553088 - DNA, 201 bp, Homo sapiens
aacatggttaggttttgggctccgtgtagaccagcagtgatttcaatgcaaaaagacatctcaacagaaggaggaataccaaacacaaatatctgatccaygtaggaatcattttttaaacgaacataccccattcatgaaaatgaacacctttcagatcacagtctctggttaagaatcgtgtcagggctaataggcact

SEQ ID NO: 553089 - DNA, 201 bp, Homo sapiens
acttcctttctctcaaataccacccaagtggaggttggttcatttttataatgggttgggaacccattttggctttttttctttttttacctgtttgcccratttttatcctgttgatgaaacagttggtcttagagatgccagcaggcatggaatttgtgcctgaaactacagacgtagggaatgccaaagaatgtgttg

SEQ ID NO: 553090 - DNA, 201 bp, Homo sapiens
tatttctccatggggttgctaaataaaccaaatgtagtgtgcctgtgtttctaccatgacccactgagatcaggtgtagaattctccacttgtgatgtcaygtccgtgctcaaaagttttggatttcagagcattttccagacttttggattaggagtgcccaaactgtaatatgtgcataaatatgtattattattgcct

SEQ ID NO: 553091 - DNA, 201 bp, Homo sapiens
agagctaactcaaaaaaaaaaaaaaaagtactgcaagaaggccggctatggtggctcatacctgtaatcccagcactttgggcggctaaggcaggaggatygcttgagaccagcatgggcaacatagcaggacccttgttcttacaaaaagtaaaaaattagtttgatgtggtggcacatgcctgccccagctactcagaa

SEQ ID NO: 553092 - DNA, 201 bp, Homo sapiens
tgtcacgtccgtgctcaaaagttttggatttcagagcattttccagacttttggattaggagtgcccaaactgtaatatgtgcataaatatgtattattawtgccttttttaactggtgaggaagctgaggcacagagctagaaagtgtagatcttgattcgacccaggcagtctggcctcagtgtctagacttacaccat

SEQ ID NO: 553093 - DNA, 201 bp, Homo sapiens
agtgcccaaactgtaatatgtgcataaatatgtattattattgccttttttaactggtgaggaagctgaggcacagagctagaaagtgtagatcttgattygacccaggcagtctggcctcagtgtctagacttacaccatgctgcctctgtatccattagcagttgagacatggagcaggaaaatctctttgagaaagtc

SEQ ID NO: 553094 - DNA, 201 bp, Homo sapiens
cttccttaaggtggggtaaaaatccctatgttgacaagttgttaggaaaagcaaatgagaacatcagtgaaatgagagcatcagtgagaacaagatgtggkacgtggtcagagatagtaaatattagtcttccttccccaccggcttctggaggtcttcacacttaaagattccttgtattcactttcatattaatagaga

SEQ ID NO: 553095 - DNA, 201 bp, Homo sapiens
atgcgtaagtaaatatccagcatttaaaataactaaaattgcccttggactgttaaataatgtaaatgcttaaaccttgttcatttaccatataaacacaraatcttagagttaataccaaactgaggagatgttcctcctttgccaacagtatgaggggtggatatgccctagctcagaagagattggattgagagagag

SEQ ID NO: 553096 - DNA, 201 bp, Homo sapiens
tatgtaggaacgaggctcagcaaatcaagtacagccagagatggcaatgtctcttcgtttctttggagcccctctgagattcccagggtcccagatgcagrctccttatttgcttggcacacttggcctcagggagctgagaggacacagtcctgggtaaataaagcaagatcaagtcatccccaatcctggagtagggta

SEQ ID NO: 553097 - DNA, 201 bp, Homo sapiens
cggacaggagccagcccacagagcaggctgttagactcataaaagaaaatgaccaaatgttgtgttttaggaaaaatcactctggttgcaactcagattayagagtagaaaaatggactatggcactatgtataaattaaggcaaccttccctctggtggtagggtaggggtggtcaccttagcatagaggttgatggctg

SEQ ID NO: 553098 - DNA, 201 bp, Homo sapiens
gagacacgcatgagagagtgcttagagggctccccccatcctctctgggcctccatttccgcatccctaaaaagttaatttttttttcctagaataaaacrtgagagatattcaacttgaagcctaggaaggccactgtaaaatgttacaaattttaaagttagtggcaaaaataatacatgtgtgataattcaagcaaag

SEQ ID NO: 553099 - DNA, 201 bp, Homo sapiens
gcctccatttccgcatccctaaaaagttaatttttttttcctagaataaaacatgagagatattcaacttgaagcctaggaaggccactgtaaaatgttayaaattttaaagttagtggcaaaaataatacatgtgtgataattcaagcaaagacctatttaaaaaaaaaaaaaaaaagtcagcccctcttccccagccct

SEQ ID NO: 553100 - DNA, 201 bp, Homo sapiens
ggaagcaaacttgttttttccaaccagcttatgattagctttgtacctgaaggcccaagaccttccctgctgttagagaaaaaaaattattctgacacttrttacaatgctggggaagactttactcaagtctgttgcaatataggaaaacaacccagctcaataccacgttgacagctggtacttgtaggcaaagagtag

SEQ ID NO: 553101 - DNA, 201 bp, Homo sapiens
ccccaaactcatataccacagtgtttaaaatagctcatgtgagtatgtaaaaacatcaaagtggttatttccactttgtgttagtttggtagatttggggsaaggaaacagtatatttccttttttgaaaattcaattcctagaatacctctcagctcactcaacagcagcagcatttgttttgccaggcacagtgctaag

SEQ ID NO: 553102 - DNA, 201 bp, Homo sapiens
caaggaatcagccccaaatgtaacacattaacccaatgatgttgggtcctaagaagtcatcttttctcgctgctaattgaaaccttagcgcttttggcacygcagtgttcaaaatctgttgtgactcttgggcttcattccatgacaacctgtttctgctcattgcctcagagataatcctctctgggttctgcgtgtgtc

SEQ ID NO: 553103 - DNA, 201 bp, Homo sapiens
gcaaagggtttaaccatgcaggggggtgtttactatatgtttcagtcccagtttaggtagacatccgcatctctgctatgaccccactatacagtgctttyaattaaggttacagcagtactagttgaaaatgtaaaactgcatactggaattgttgtctaaaaatacattaatgttcaagagttatttttaattctcaat

SEQ ID NO: 553104 - DNA, 201 bp, Homo sapiens
tgatgttgggtcctaagaagtcatcttttctcgctgctaattgaaaccttagcgcttttggcaccgcagtgttcaaaatctgttgtgactcttgggcttcwttccatgacaacctgtttctgctcattgcctcagagataatcctctctgggttctgcgtgtgtctgaagtatagtttgcccctttctgccttcctcaact

SEQ ID NO: 553105 - DNA, 201 bp, Homo sapiens
ttgaggagcctttcccaagttgtttttttagataagtggttttcactagctttccagtttggtactacagtagatactttgcaaattattagcttaagaayggtatagcatttgatttgtttggcccatctcccatataccatatagtgataggattatccctatttatactttattagaggcattaaaaattgctaaatg

SEQ ID NO: 553106 - DNA, 201 bp, Homo sapiens
ttcatttttcacagaagggccctaattggctcagctcagagatcaggtggccatccctaaaccagtcacctctggccatggaaaaaccatatgaatgggayggaggagggtgggaaggaaagatgatgtctaggagaaagggagtctgggcagataaaaacatctctgacaggtatatgcactttacatttatgcattctc

SEQ ID NO: 553107 - DNA, 201 bp, Homo sapiens
atgttgacaagttgttaggaaaagcaaatgagaacatcagtgaaatgagagcatcagtgagaacaagatgtggtacgtggtcagagatagtaaatattagkcttccttccccaccggcttctggaggtcttcacacttaaagattccttgtattcactttcatattaatagagaatgggccaggcacagtggatcacacct

SEQ ID NO: 553108 - DNA, 201 bp, Homo sapiens
tcagtccgggcctgctgtgcaggatttactaagaagagacgacaggttaggaggtttaaatattggtgcctgctggatgtgacaagggcctggacaaggcmtggaaatggggatgtaagtcatagttatgacttagccccgcaggctgagaagctagatgtggggagagtagtaagctgggaggacaaggatgctccttgg

SEQ ID NO: 553109 - DNA, 201 bp, Homo sapiens
aacaagcaccacttacagacaaatagggaccagagaaataactccagggagttcagtgtcccatgtttcatctttccagtcttattgggatagagggcatwcaagagttatatcccaacacaattcctctatgccttttttggttacaaaacaaacctcctccaaaacttagaggctttgcagaacaatttctgattctct

SEQ ID NO: 553110 - DNA, 201 bp, Homo sapiens
tgcttataattaatttttttctatggaatgcagaaatcaaatgaggagaaactccaaatattgtaagctttaagaaatatataggcaggcttagaacaccktcattattctagtctctctcccatggggtgttatggcaaaatgagttcatttgtttattcattcaattaacatttatcgagtacctactccgtgctatgt

SEQ ID NO: 553111 - DNA, 201 bp, Homo sapiens
ggagggaggggagggggaaagaggaaagagggaaagagaaagagagagagagagaaagggagaaagagagaaaaggagaaatgaaaatagtcccaggcagmatcagcaaggcttcttaaaacctagcctaagaagtcccagaacatcatcactgtcacattctgttggtcaaggaaatctctaaggccagtccatgtttga

SEQ ID NO: 553112 - DNA, 201 bp, Homo sapiens
acactgagctcagatgcctcttcatctgtgatacttcccctgactcttcttttgttgacttgcctcctctgtattctcagatcccttgcgacataggcctygagtatggcattaattcaagcaaattgtagtttttgtgagaagggccaatggactaaatgtgtgcatccctcccctcccaatgcatatgttgaaatcctc

SEQ ID NO: 553113 - DNA, 201 bp, Homo sapiens
aggctaaggcaggaggactgcttgagcccagttcactagcctgggcaacatagcaaaacctcatctctctgaaaaatacaaaaatgagctggatgtggtgrcacatgcctgtagtcccagccactcaagaggctgatgctggaggatcatttgagcctgggaggttgaggcttcagtaagtcgtggttgtgccagtgcact

SEQ ID NO: 553114 - DNA, 201 bp, Homo sapiens
gacatgtcatccacgacaccctggctgtctacatcaagaggtgcctgcaggcccaccttgagccaccctcagcccttcccctcggcctccctcccatgctyggtggcgaccaaagtccagaggtggctgagatggcagggagctggcatgtcagtgctgccccaagcccccacacacccagccgggtcacgacagtgacca

SEQ ID NO: 553115 - DNA, 201 bp, Homo sapiens
gaggatggagccctcatgaatgggattagtgcttttagaaaagaggccccagagagctgctttgtctcttctgccatgtgaggtcacagtgagaacacaaycatctatgaaccagaaagggggccctcactggacacaaaaacttgctgatatcttgaacttggatttctcagccttcaaaactgtgagaaatttacaagc

SEQ ID NO: 553116 - DNA, 201 bp, Homo sapiens
cttgtcaaagattagttgacaacatatgtgtgggtttatttctgagctctctattctatcagctatgtcataattgagctccttttctctaagatctaacrcgtgtgtaattcaaacatgggttcaaaagtgctcatcttgaagtagtctagaaatccaccagcagccactaaacccaacgtagatgagggaacacgggtt

SEQ ID NO: 553117 - DNA, 201 bp, Homo sapiens
cacttggctcattcagagcacattagtcaaggttcttgtttgcccccagacttattcctgctcccccacactgaatgtttattggcagctccactgaaaasaaaggaagaaaaggaaagagtttgccacttctgttatatatcagcacattacatttgtttgacgatttggaagtgtctcagttaacaaactaaatctgtt

SEQ ID NO: 553118 - DNA, 201 bp, Homo sapiens
tagtgtgctaagaaggaaagtaaataatgactatacatatcgtcatctgatttgtttgtaaggcaaaaatagttcatatattcacccctcaaatttgcatyctctttttatttaaacgtgtcccttctttggtctcagctttttctctccttgttacagagataacatttaccctttgactagcaggtggtttaaaatgca

SEQ ID NO: 553119 - DNA, 201 bp, Homo sapiens
tagatttacaaagccattctcttcgcagtgcccccagtgctgagttcattcctgatggagtcttcccttgctctccctatcacccccttggctctcacctyctgcgcatggtgtcattggtcccggtgccagaatccccaagctggggcccatcctccccatccctttgtgttgagctgctgttgcaggatgcacactgta

SEQ ID NO: 553120 - DNA, 201 bp, Homo sapiens
aaagcgtactgaaggcagcagaaaggcaggtccacacaggtcccattttttagctgctcagattatattgttctgaaaaactgcaagaatctcaaggattygtctggcttttttctccctttcttggtggatgggaacccgggaaggagccattagaaggtctgaccatgtcccccagtcccacttcaaagccgtttctgt

SEQ ID NO: 553121 - DNA, 201 bp, Homo sapiens
tcatatattcacccctcaaatttgcatcctctttttatttaaacgtgtcccttctttggtctcagctttttctctccttgttacagagataacatttaccmtttgactagcaggtggtttaaaatgcaccttgctgggcgtggtagtggtgcatgcctgtcattccagctactcaggaggctgaggccggaggattgtttg

SEQ ID NO: 553122 - DNA, 201 bp, Homo sapiens
ctttccaagtgatgtccaggagccagcatggcaggatcaaagggaagaatggcccagacagaaggaatgaccaggccccctggtgtgtcaaaaaaaaaaaacaaacaaacaagaaagccattgttacaaggcgtagcagagtgatcgacgatgtcagagtgcaaaggccagatcatggagggcctcatcattggattgtat

SEQ ID NO: 553123 - DNA, 201 bp, Homo sapiens
accccatctcttaaaaaataaaattaagaataaaaatgtaaaaataaaatgcacttctatctcaagactgtctgatagcctgcaaccctgcaatcccaatraaaataccaggaggctggaaaagattatttaggaaaaagggaattaaggtaggaaaattgactcccactcagtcgtggtgtaaaatctcactctctgcct

SEQ ID NO: 553124 - DNA, 201 bp, Homo sapiens
ttgtttaggcatttcagcggcatacctttctcacatttttacttcctctaagctatcctctaaagtagaaataatcccatttttgatcctgttgatgagastgatggcaaatgcaccccagcactgatagtcatccattggagaattgtttcttttgagaaatacttggtaagaagagaaagatccaagttaagtatttct

SEQ ID NO: 553125 - DNA, 201 bp, Homo sapiens
tactcagggggctgaggtgggattgcttgagcccaggaggcagtggttgcagtgagccaagatcgatcacaccactgcactccagcctgggcagcagagcwagactccgtctcaaaacaaacaaaaaaatttaaagcatttaaaataggagtcttaaaagagactaaaaaaatgactaaacaatttttaagaaaatggaat

SEQ ID NO: 553126 - DNA, 201 bp, Homo sapiens
gagccaccgcacccggcctccaacatatattcttatatgtcgactgcctaatattccattgaagggcttcccattcatgaatctcccattgaacatttagrtttacttttaggcttttagtgaatatcttcatatgttttcttcagctcattcagttgtttccttatgattaatttctagacatggaaagcttggttagaa

SEQ ID NO: 553127 - DNA, 201 bp, Homo sapiens
aatgtcacattgactcaggactccacaggggtctcaggctgttcctgcccattaatggctcagggttgctcttaacaactgtgctggcaaagaaaggttcwttcagaaaaatacttaagaggctcatttttaaaatatttctacttttaatgaaccaattcattacctcaaatttttcttggaaacttagtcaccagcaaa

SEQ ID NO: 553128 - DNA, 201 bp, Homo sapiens
acggttttcctgtttatattcatttttctgttgagataatgtttcatatttataagagctctttatattttaaggctgttcacccttggcctattatgttktgatattttttctaacatgttcattttttaacttcattttttttctttgcaatgcaaaatttaatatttgggtggtcatacctaatctcctctatggctt

SEQ ID NO: 553129 - DNA, 201 bp, Homo sapiens
ttaatgaaccaattcattacctcaaatttttcttggaaacttagtcaccagcaaaaacaacaattgtttgcttcattttcatgtgtaattcattcaatcartaatatttgttgagaaccaactagaagccaggcctgactgggaaaagaatattgagccgattaggcaaagaagggtgttaaacaagtaaaatataaatgg

SEQ ID NO: 553130 - DNA, 201 bp, Homo sapiens
ccagggcacgggtgacttctccatgccaccaacaagcaaccagaccacatcaactgtggcttcaattccaattttgaatttttgggagagagactccaatwggttcagtttgtctcagatgtccaccttctccacaggtgattatggctgccaggacccacccctgaaaatgggcagttctttaaaaaggaggtggtggta

SEQ ID NO: 553131 - DNA, 201 bp, Homo sapiens
ccctgtttgttcctttcaggtttacccccatgccctagcttcctcttcacactttttccccccagattgtctgtctaggtccccaacctgcctacagcttrccggggctttgcactgtgaaaggaaaataaaaactgggcccccaatccactatggaaattggaaatcactaggaaaaaaaattaagctgaaagctgagtc

SEQ ID NO: 553132 - DNA, 201 bp, Homo sapiens
tgggctcagaggcctgacactaaccaccacagcatttcatggagaaaagaaattctcttagctctcagatagttcctgtctaggtgacacctgtcttgggytagatgctccttttttttcctccacagttggaaggtttaaataaaatgtagccagtgtggagagtgagatgattgcaattatggaggcagaaggataaga

SEQ ID NO: 553133 - DNA, 201 bp, Homo sapiens
cttggggctcagcaagggttcacaaagaaataatggaagttacaatctctgagatgtgtagtaattggccaaatgaagagggcacctaataccctgccccmacaatcatcctggccaaacttgatctttgcaaattaattcattgactttgttagagcagtatttcacaatgcaggctgctctcaattgggaagatgtctg

SEQ ID NO: 553134 - DNA, 201 bp, Homo sapiens
atttcacaatgcaggctgctctcaattgggaagatgtctgttttctactaaattacatctaaattatatcagagaggtatttatgtgtgtgtgtatatgcmtatgtatacatgtataattgttctattttaacaacttttttctctctctctcctttcaatgagcatgcttaagtcagagtaaaattcattttccaaaggt

SEQ ID NO: 553135 - DNA, 201 bp, Homo sapiens
atattccatctatgccatttgtaaaattcattgtgattttaggagaattgaaatgctagaagtagatcttagaatcaagaacacatcctgtcttgttcttytggttagtgttatatcttggttgctagagcatcacaggctgtaatgtagcatctagaaccatgggcacttcttactttcctcagaacaccactgttgtac

SEQ ID NO: 553136 - DNA, 201 bp, Homo sapiens
cctttaatatttgtcagtgatctgatagatgaaatatacttcattgtaatctgtttgattattgaagaaaatgaataaacagatgtatatacttatatgtyatagatatttattagccatttaaatatctttttgttgttgttgttgttttttgagacagagtcttgctctgtcctgcaggctggagtgcaatggcacaat

SEQ ID NO: 553137 - DNA, 201 bp, Homo sapiens
actcagggggctgaggtgggattgcttgagcccaggaggcagtggttgcagtgagccaagatcgatcacaccactgcactccagcctgggcagcagagcawgactccgtctcaaaacaaacaaaaaaatttaaagcatttaaaataggagtcttaaaagagactaaaaaaatgactaaacaatttttaagaaaatggaatt

SEQ ID NO: 553138 - DNA, 201 bp, Homo sapiens
acaataggaagaggttgggttaggggtcaagataggctcattctgaatcccagctgtgccacttcctggctgtggagcttctgataagttgcttagctcargcagtaaatgcggtaggattaaccatcatgcaggtagcctcattgtgtccctaatatttacattttatccttaagccatatgaaaatgtctttccttaga

SEQ ID NO: 553139 - DNA, 201 bp, Homo sapiens
atgaaaaggtttttaaaaagtcatttgaaaataatgattttgaactgttaggaggctgtgcaactcaatcaatagagcagtgtacacaccacacttatagrgctaatttttatttagcttaccttaaaaagaaaaaacacaccttttctttccttgctactgagttccataaactccacactcactctgtcaggactgtga

SEQ ID NO: 553140 - DNA, 201 bp, Homo sapiens
gcagagccaaggagagtgggagccactaatgagggaccactgggcaggagctgttagaaggaatgggagaagatatgctgacttctctctgcccgccctcmcatctcttgcctgaccttcccatcggctgaccccagcaggaagccagctgatgagtggcccagggaggtcagcctgccaggacacagacacaggccaggg

SEQ ID NO: 553141 - DNA, 201 bp, Homo sapiens
atatgggtcatacttcaggaaacctgagaacaatgtgagttggtatttttatgtgctatccaaaggatcgtttatgcgacacttactagagtgctatttgmagctcttttacaaacaatagatactgatatcatcttctaggattgttgtctagtttgccatactaataatataggtatttgagcttacagaaatattcag

SEQ ID NO: 553142 - DNA, 201 bp, Homo sapiens
ctttaagtaaacaagttgaaatagctaagaaaactgttaaaataatagaaagggtaacttctaaactagtaaaggagaggaaactcacatggaatagaaamcaaacttctaaacaacttatgaatcaaaggaaaaaattataatgaaaattagaaagtacctgggcctgaataataatacatatcaaaactgtaaaggctg

SEQ ID NO: 553143 - DNA, 201 bp, Homo sapiens
tgttttagtgcattgccagcaagcagtcttctggttgacccaacatttctgcaagaactctcaggattagcacattgggaatgtacttggaagagagatgwtcctaacatatctgtgtataatgtgtgtagtataggtatctgaatatatacaataagctgtgcaaaacaaacatgtctcaggttaggcctaaaagaaatc

SEQ ID NO: 553144 - DNA, 201 bp, Homo sapiens
gaagaaaagaaagatacccttaaccacagagaaagatatttctcagagtgaggccctaagggctgacttgtgttacttggctagttcggtctatattcttygcataaatgtacacagaataattttttttttttttttgagatggagtttcgctcttgttgcccaggctggagtgcaatggcgcaaatctcagctcaccgc

SEQ ID NO: 553145 - DNA, 201 bp, Homo sapiens
aaacttattccaactgtctaatataacattttggtaatccgctttggtgattaagcttgcgtttgactgatcagctatttcaggaaccgactgagttaggytgacgacccagagtggaatcgggaaaggagaggtggaggattttattgcccttcccccagctccatggccacttttccactgactattaataaccatctt

SEQ ID NO: 553146 - DNA, 201 bp, Homo sapiens
aacaggcttaaaaagccaggcaaaccccagctgtcttgtcttttatcatttggtatttcacaggatttgtgcctctccgtacttagattcagggatgtgcwgatttcttccaccagtgttctttgttccacctcctccaaaaagtctccacccatcctctctgcccctacatatctgtatttgctcccttccccttggctt

SEQ ID NO: 553147 - DNA, 201 bp, Homo sapiens
aactgtgcaggctttgctctagagcttcatttccccaaaactgtctgtggaaacttcttttttacttaaaaaaaaaaaaaaaaaaaaaaaaaaaaaattcmccgtgttacccaggctggtctcaagcaatcctcctgcctctgccttggcctcccaaagtgctgggattgcaggtgtgagccatcatgcctggccccacct

SEQ ID NO: 553148 - DNA, 201 bp, Homo sapiens
aaaactcttttagttctagggacatagaactcttgccagtgattaagatggatgattttaaaaccaggaattgaggaggctgatgtcagctagaatccctktaaaggccccttattggtgggtgttggattactctgaagaccaggtttgaccaaaatgtacatagtagctgagaacacaacatggtttcactatagtttc

SEQ ID NO: 553149 - DNA, 201 bp, Homo sapiens
gcagtcattttattatttgtcaggtgaccatcttaacccctcaaccaggaattttcaagaatcaaaggggacactattaataattatgctggaaaaacagrcgcaaatcaaaactattggagtaaacagggatgtatggtcactctctgcctcacctgccttctgggtggacttgaggcaacttggttcatctgttctgca

SEQ ID NO: 553150 - DNA, 201 bp, Homo sapiens
ctctgtctccctgccatgacccttgaggggctttttatgcagtatttatgcagtattaaatctgtaagaaccagtataccataaaccctacagagtatgtytctaatgagagaagccttcctgatgtccacacttgtcagtcttcacatccatgctctccttggctcagatagctgtgtgccttggaaggaagagattaat

SEQ ID NO: 553151 - DNA, 201 bp, Homo sapiens
gtaatgcagtggtttctttcaaaactcttttagttctagggacatagaactcttgccagtgattaagatggatgattttaaaaccaggaattgaggaggcygatgtcagctagaatccctttaaaggccccttattggtgggtgttggattactctgaagaccaggtttgaccaaaatgtacatagtagctgagaacacaa

SEQ ID NO: 553152 - DNA, 201 bp, Homo sapiens
agcagctaatattaccttatcaaaaacacccacttacagagaggttaaaggcagctaccataagtacgcaccaactcctcttgaaacaatctctctgctcrgcctctaggatttcccttccccctccctccccttcactggtggaacctcttcacacctgccactgaaatgcaggctgccccagggtttgtcttcagccag

SEQ ID NO: 553153 - DNA, 201 bp, Homo sapiens
ccagtataccataaaccctacagagtatgtctctaatgagagaagccttcctgatgtccacacttgtcagtcttcacatccatgctctccttggctcagawagctgtgtgccttggaaggaagagattaatcagtgaaaggttaatagtaaaacaccaacactgacaacaggcgttaattcaagtattaaatgctagtttg

SEQ ID NO: 553154 - DNA, 201 bp, Homo sapiens
agctactcgggaggctgaggtgggagaattgtttgatcctgggagacagagattgcagtgagccaagattgcgccactgtgctccagcctgagcaacagascgagactgcgtctcaaaaaaaaaaaagtaaaagaagatgaaagagggggacagtgcatgaggtcagaggcttattaaatacaggccttattgcttttatt

SEQ ID NO: 553155 - DNA, 201 bp, Homo sapiens
agattgcaagaaacagctgtgtgaaatgtgctgtggcattcactgaaggaccctgctgaagagcttgctcattctatcacacagcctcctcttttttcagraccacagaggacttttctctcatatgcaatttaggaaaagcctggggactgagagcagggtaattttttttttgtttctgtggctttttttaattcattt

SEQ ID NO: 553156 - DNA, 201 bp, Homo sapiens
taccataaaccctacagagtatgtctctaatgagagaagccttcctgatgtccacacttgtcagtcttcacatccatgctctccttggctcagatagctgkgtgccttggaaggaagagattaatcagtgaaaggttaatagtaaaacaccaacactgacaacaggcgttaattcaagtattaaatgctagtttgcattac

SEQ ID NO: 553157 - DNA, 201 bp, Homo sapiens
ggatcacttgaggccaggagtttgagaccagcctgggcaacatggtgaaaccccatctctactaaaaatacaaaaaaaaattagcctggtgtggtggcacrcgcctgtagtcccagctactccagaggctgaggcatgagaagactgaggcatgagaatcgcttgaacctgggcggtggaggttgcagtgagcctagatcg

SEQ ID NO: 553158 - DNA, 201 bp, Homo sapiens
ttcctaactaagcggcacgcatggctttgtccagctcctcacacaggccgagcatccgccaccatgcggccttcacacatgcagttgcttctacctgaacwtctctccctccatccttctccatggccccccgtgccagtcctttcagcctcagcctcactgtaccctcctggacctccctgactgaggcatctcccacct

SEQ ID NO: 553159 - DNA, 201 bp, Homo sapiens
ccatctgattttggagggatctcgctcctggaagatggtgataggattttcgttgatgacaagcttcccattctcagccttggcagtgccatggaatttgycacagacaaaatcatactggaacacacagaccatgtagttgaggtcaatgaaggggtcattgatggcaacaatatccactttaccagagttaaaaaccgc

SEQ ID NO: 553160 - DNA, 201 bp, Homo sapiens
tctgcaagtcctacctgtcttggcacacaaatagtgagccattgtagtcaacagtcatctttaaaaagaagagaaaagttcgtcctactcataaatagacygcagtagagagaaaaataaatgcctttggtggcttcacccagtctggctacttgccatgaggaagaaaatgcttgatttggcacttaacaaatggttgta

SEQ ID NO: 553161 - DNA, 201 bp, Homo sapiens
agccaatcaagaatgcacccccagggaaaaaatatgttcgatgcccctgtaactgtctccttatctgcaaagtgacatcccaacggattgcatgccctcgkccctactggtaagaggcataaggtggggaagggcctaagtggggaactggaaagtcaaaaaaggatgagcgtatacagagaatgtaaaggtgagagagcc

SEQ ID NO: 553162 - DNA, 201 bp, Homo sapiens
cctgttggctgtgctgtgtttgggccgggctctttattgggcctgtatgaaggtcagccaccctgtccagaacttctcctgagcctgatgacccacagacygtgcctggcccctccctggtggggacagtgacactacgaagggagctggggtagttaaaggctcccggggcttctagaaggaagccaagcagctgccttc

SEQ ID NO: 553163 - DNA, 201 bp, Homo sapiens
cctggggcctgtgcatcccggacctctgagtccagaaccccaacccatgggtgtcagggttatctgtggacattgcaagaatacttttctggtgaggaagsggtattgggaaggggaggggaaaggagactaagagtcatttcgagtatatttcttagagtaatggtaatgacccctgaaaggtctgtcctatgggaacat

SEQ ID NO: 553164 - DNA, 201 bp, Homo sapiens
ctcacttttacacctagcctagttcctatttgcaaatctcatgatatagtctttcttttatttctccttcctggttagcaccttatttttctgatctcatraagtgtttttggagggaagtggaggggattgggattagaggtttgcttgctgatgaccctattattctctagccaatcaagaatgcacccccagggaaaa

SEQ ID NO: 553165 - DNA, 201 bp, Homo sapiens
gcacctgtgactgggcgaggcttccttccctccgtaatcgcgaccacagcctagggacggaagggggttctgagcaacctgatagaagtgccaattatgakaagccctccgagcttggtcagagggttgaagatcagaaggacttccctaccaccgtggagcatcagtgggggtgtaagtgatcccagcccttctatttgc

SEQ ID NO: 553166 - DNA, 201 bp, Homo sapiens
cagggtaagccggggcgggtccgaggtgctccccggggtactctgaaagccggggagggggcgggaccgagggcggaggcgggtcccagtcgccaggtgcsggactgctgcacctgtgactgggcgaggcttccttccctccgtaatcgcgaccacagcctagggacggaagggggttctgagcaacctgatagaagtgcc

SEQ ID NO: 553167 - DNA, 201 bp, Homo sapiens
tctcataaagtgtttttggagggaagtggaggggattgggattagaggtttgcttgctgatgaccctattattctctagccaatcaagaatgcacccccarggaaaaaatatgttcgatgcccctgtaactgtctccttatctgcaaagtgacatcccaacggattgcatgccctcggccctactggtaagaggcataagg

SEQ ID NO: 553168 - DNA, 201 bp, Homo sapiens
ttcactttctctcacttttacacctagcctagttcctatttgcaaatctcatgatatagtctttcttttatttctccttcctggttagcaccttatttttstgatctcataaagtgtttttggagggaagtggaggggattgggattagaggtttgcttgctgatgaccctattattctctagccaatcaagaatgcaccc

SEQ ID NO: 553169 - DNA, 201 bp, Homo sapiens
aagtgcttttgatgatacccaggtttcagttccaggtgtctcacacagccatttccccagaagccactcaccaaagctaatgttcactttctctcactttyacacctagcctagttcctatttgcaaatctcatgatatagtctttcttttatttctccttcctggttagcaccttatttttctgatctcataaagtgttt

SEQ ID NO: 553170 - DNA, 201 bp, Homo sapiens
taatgacccctgaaaggtctgtcctatgggaacatgttctgcatccccaccccaaggttctcattgagggagaccctgcttgtgctattatttttgttttstttctccatagtggacagagttcacagaccgcactttggcacgttgtcctcactgcaggaaagtgtaagtgattagggattgagctggtaattgatgtat

SEQ ID NO: 553171 - DNA, 201 bp, Homo sapiens
ctcaaggattcttgagggtatacagttgggggacagagtatcttaagtacagagaagtcgagtgacttaatagacagggagtgggggatgtggaacagggwctgtgaagatttttaggattaaaaatttttcaaacacaagtttgaaaatacaagtctttttcttttgtatagcaaaagaatcatcaacctggggcctgtg

SEQ ID NO: 553172 - DNA, 201 bp, Homo sapiens
gcctaagtggggaactggaaagtcaaaaaaggatgagcgtatacagagaatgtaaaggtgagagagcctagtgtttatttaggagaaaaggctttgaagcrtgtgcctcaggaatgttatagctgtctttctcgtttctcaataaaaatattgagatgaaatgatgtcgtttcggagaatagagagccttggggactgggt

SEQ ID NO: 553173 - DNA, 201 bp, Homo sapiens
gtgaggaaggggtattgggaaggggaggggaaaggagactaagagtcatttcgagtatatttcttagagtaatggtaatgacccctgaaaggtctgtcctrtgggaacatgttctgcatccccaccccaaggttctcattgagggagaccctgcttgtgctattatttttgttttctttctccatagtggacagagttcac

SEQ ID NO: 553174 - DNA, 201 bp, Homo sapiens
acccaccttgcccacccctgtggtccagctccaccccctgcttcctgacccttctgctccaacgcccacccctaccagccctcttctaaacacatcctacrcccactcccagaatctgtctcaggaagggtaaggttctcagacactgccgacatcagcattgtctcgtgtacagctcccttccctgcagggcgcccctgg

SEQ ID NO: 553175 - DNA, 201 bp, Homo sapiens
ggtgcccgttcctgggcagctggtctcaggaaggaagtcccagaactgttagcccatctcttggcctcagataatggagtatttcaggacttggagtccaragaaaagctccagtggctttatgtgtgggggtagatagggaaagaatagaggttaatttctcccataccgccttttaatcctgacctctagtggtcccag

SEQ ID NO: 553176 - DNA, 201 bp, Homo sapiens
gttattcctcttgtcacatgtggaacggtaggagatggaagacggagacagaacaagcaaaggagggccctgggcacagaggtctgtgtgtgtagccatcyaagccactggaccccagcagacgagcacctaagctcaggcttaacccagtgcacgtgtgcgcacatacatgtgccccgcacctgacagtccactcaaccc

SEQ ID NO: 553177 - DNA, 201 bp, Homo sapiens
gcacctaagaattggaggggctgattccccttcctccaccagaaaaatatccccaacatctgccgactgggctccttctcagcagctccgagtccactccracgcccgcgcgacccggcgctccccacccgccagggcccgggccggccgcggggtgcactcaccgcctcgcaggcgcacagcacgcagcgcatcaccccg

SEQ ID NO: 553178 - DNA, 201 bp, Homo sapiens
tcaccttcagcttggccaccctaacccaatctacattcacctatgatgatagcctgtggataagatgatggcttgcaggtccaatatgtgaatagatttgmagctgaacaccatgaaaagctggagagaaatcgctcatggccatgcctttgacctattcccgttcagtcttcttaaattggcatgaagaagcaagactca

SEQ ID NO: 553179 - DNA, 201 bp, Homo sapiens
aagatgatggcttgcaggtccaatatgtgaatagatttgaagctgaacaccatgaaaagctggagagaaatcgctcatggccatgcctttgacctattccygttcagtcttcttaaattggcatgaagaagcaagactcatatgtcatccacagatgacacaaagctgggaagtaccactaaaataacaaaagactgaatc

SEQ ID NO: 553180 - DNA, 201 bp, Homo sapiens
ttcaaattcaaggccttccaacgcccccatcccctttactatcattctcagtgggactctgatcccatattcttaacagatctttactcttgagaaatgawtaagctttctctcagaaatgctgtccctatacactagacaaaactgagcctgtataaggaataaatgggagcgccgaaaagctccctaaaaagcaaggga

SEQ ID NO: 553181 - DNA, 201 bp, Homo sapiens
cccatactcccaggaagacaccatcacttcctctaactccttgacccaatgactattcttcccatattgtccccacctactgatcacactctctgacaagrattattcttcacaatacagcccgcatttaaaagctctcgtctagagatagtactcatggaggactagcctgcttattaggctaccatagctctctctatt

SEQ ID NO: 553182 - DNA, 201 bp, Homo sapiens
gacattctgggagcagtgacccttctgctggagggagtgatggcagcacggggacaactgggacccacttgcctctcatccctcctggggcagctttctgracaggtccgtctcctccttggggccctgcagagcctccttggaacccaggtaagtccccagtcaagggatctgtagaaactgttcttttctgactcagtc

SEQ ID NO: 553183 - DNA, 201 bp, Homo sapiens
cagctgtccccagcagaacctctctagtcctcacactgaacgagctcccaaacaggacttctggattgttggagacaaacttcactgcctcagccagaacwactggctctgggcttctgaagtggcagcagggattcagagccaagattcctggtctgctgaaccaaacctccaggtccctggaccaaatccccggatacc

SEQ ID NO: 553184 - DNA, 201 bp, Homo sapiens
gtaacttatcctcaggcgcattcgacagtcccctcttgctttctcacccccttccttcacccaagggaccctctgcctctccagcccactcccagcctccyttctcttggttccctggtcatgcctgcctccctgtctcctgtctctccctcccacacacacccactatcctcccagctatcccagcaccctccttcctaa

SEQ ID NO: 553185 - DNA, 201 bp, Homo sapiens
ccgactccccgcccgcgcctcccccgggcgcccacctacctgccgctccccgaacgggcagcggctccttctcagaacggatgggcagcacggggggctckgggccggcgccgcgggccggccgggagccgagcagcagcagcccgaggagcagcagcggggccggcggggccgggaggctcggcatgacgcgaacgggac

SEQ ID NO: 553186 - DNA, 201 bp, Homo sapiens
acatcctacacccactcccagaatctgtctcaggaagggtaaggttctcagacactgccgacatcagcattgtctcgtgtacagctcccttccctgcaggrcgcccctgggagacaactggacaagatttcctactttctcctgaaacccaaagccctggtaaaagggatacacaggactgaaaagggaatcatttttcac

SEQ ID NO: 553187 - DNA, 201 bp, Homo sapiens
gtaagtccccagtcaagggatctgtagaaactgttcttttctgactcagtccccctagaagacctgagggaagaagggctcttccagggagctcaagggcmgaagagctgatctactaagagtgctccctgccagccacaatgcctgggtactggcatcctgtctttcctacttagacaagggaggcctgagatctggccc

SEQ ID NO: 553188 - DNA, 201 bp, Homo sapiens
catgttttatgggcaatagtttaaaaaactaaaatctatcctcaagaaccctagcgtcccttcttccttcaggactgagtcagggaagaagggcagttcckatgggtcccttctagtcctttcttttcatccttatgatcattatggtagagtctcatacctacatttagtttatttattattattatttgagacggagtc

SEQ ID NO: 553189 - DNA, 201 bp, Homo sapiens
acgggagtttttgaagcagaggctgatgaccagctgtcgggagactgtgaaggaattcctgccctgggtgggaccttggtcctgtccagttctcagcctgwatgattcactctgctggctactcctaaggctccccacccgcttttagtgtgccctttgaggcagtgcgcttctctcttccatctctttctcaggaggaga

SEQ ID NO: 553190 - DNA, 201 bp, Homo sapiens
catctcaagccctccccagcatctgttcaccctgccaggcagtctcttcctagaaacttggttaaatgttcactcttcttgctactttcaggatagattcytcacccttggcccgcctttgccccaccctactctgcccagaagtgcaagagcctaagccgcctccatggccccaggaaggattcaggggagaggccccaa

SEQ ID NO: 553191 - DNA, 201 bp, Homo sapiens
cagacaccccggccagaatggagctgactggtgagaacacacctgaggggctagggccatatggaaacatgacagaaggggagagagaaaggagacacgcygcagggggcaggaagctgggggaacccattctcccaaaaataaggggtctgaggggtggattccctgggtttcaggtctgggtcctgaatgggaattcct

SEQ ID NO: 553192 - DNA, 201 bp, Homo sapiens
aggtccgtctcctccttggggccctgcagagcctccttggaacccaggtaagtccccagtcaagggatctgtagaaactgttcttttctgactcagtcccmctagaagacctgagggaagaagggctcttccagggagctcaagggcagaagagctgatctactaagagtgctccctgccagccacaatgcctgggtactg

SEQ ID NO: 553193 - DNA, 201 bp, Homo sapiens
acccctaccagccctcttctaaacacatcctacacccactcccagaatctgtctcaggaagggtaaggttctcagacactgccgacatcagcattgtctcrtgtacagctcccttccctgcagggcgcccctgggagacaactggacaagatttcctactttctcctgaaacccaaagccctggtaaaagggatacacagg

SEQ ID NO: 553194 - DNA, 201 bp, Homo sapiens
ccctgagtcccagtaggataaaggatggggggggtcctcctttcccgtcctgctttagttgccctgtaatccaagactgagaggtgctgatcccccaccgycccagccccccagtctgcagtttcagaattactctcccccgcccccacccccacccctcccgacgtttctccccgcccccctacatgtacgtcgaaaatt

SEQ ID NO: 553195 - DNA, 201 bp, Homo sapiens
tgtcgtcctctctctaggtcaacggtgtggacctccgaaatgccagccatgagcaggctgccattgccctgaagaatgcgggtcagacggtcacgatcatygctcagtataaaccagaaggtaccaggccggaagttccttgtcttgtgagctgaaatggcccttagaactcttcctcagctgatggcttcagtaggggag

SEQ ID NO: 553196 - DNA, 201 bp, Homo sapiens
gacgactgaagctgcgtggcggactggagggccgggcgagggtggcggaaggcggagcagaacaagtgggggtggggatacagtgggggaaagactgaggytatttgccagagccccaggagcgaagcggttaaaccctccgggtggtccttattgggcaaagccgagatgccgggggcggggcagtgtggccgacggcct

SEQ ID NO: 553197 - DNA, 201 bp, Homo sapiens
gtgagaggaggcccaggaggagagagagctgggctcagcttctttttgagctgctggagccctctgtgaggaggccctctttgctggcttctcaggagagygtggctaggttctgcctgcctatgggaagagggggccagggtgtgtggagcaagatggtggcggtgctggtgccttgggacctgggggaatgggacagct

SEQ ID NO: 553198 - DNA, 201 bp, Homo sapiens
ctccacggctccctcggccgctgccgtttccaacccccccaccccactcccccgccacggcccctagcccctggccgtttggcaagacccccccctacccsggggctccccgaaatccagttcccctcccccaccccagctcatgccccagcccccgaactccggggctgccagcccccggtgcccccgcccctcctgaga

SEQ ID NO: 553199 - DNA, 201 bp, Homo sapiens
gtcagggacctgggcacgccccactttaaccctttcccgaatgaagtggggggagggagtagatgagcgggataggacccggatgtctttcaccactcccmgttcctgacgtcctttgcactgcgtagggtgaggggcgtaggggagcgaggaaggcaggttattcaggatgcgctgcgcccacaaacctcttcagcccgg

SEQ ID NO: 553200 - DNA, 201 bp, Homo sapiens
gagagaggggagccaatgggctagaggagagggagggggaggagctggtcaggccccagggccttccgcactgcactggctgggggaagaggcggcggccrgggcggccagcctggagcctgaggcaccgggctggccccagtgacacctccgtccccatccccagaaataccgctaccaagatgaagacacgccccctct

SEQ ID NO: 553201 - DNA, 201 bp, Homo sapiens
ccggcctcctctcggcctggctaacgtggggcggggcccagggcaggagaggcggggctagcggatcccttctgcgctcaggagtttggtcggccccaggscacgccccacccccctgttgtcctgacgacagggcctcctggaggtgggtctccccgggtcttgactggtcctagataccgttgctaggcaacacggtcc

SEQ ID NO: 553202 - DNA, 201 bp, Homo sapiens
tcccctttgctcccccaacacctgtggccctgggcctcacaaggcgtctgcgttcaactctcccttcagaaccctggacagcggtttcagcagcccctgasggggatccctggaacccagaggatgtgggggaatcgggtctttcccctcctctcctgccttggctagacaggactacatttcccagcagcccctggggca

SEQ ID NO: 553203 - DNA, 201 bp, Homo sapiens
agcagttgggactacaggtgtgcaccaccatgcctggctaatttttgtattttttgtagacagggtttcactgtgttgcccaggctggtctccaactccarctcctgggctcaagctgtctgcctgcctcagcctcccaaagtgctgggattgccgtgccttctctttttacccatgtgtactgggcggtgcattctgtct

SEQ ID NO: 553204 - DNA, 201 bp, Homo sapiens
taggaagacccccccagattcactgcccctcccttagtaaagcctctgagaccttcctgaacattcccttctgtctttgccctctgttccttccagagacyatgtgcccaggcagatggattcctcccgggcctgagaggaactgcaggaattctcctgcctcttacccgtaaaaccccaacttctctagccctagggcag

SEQ ID NO: 553205 - DNA, 201 bp, Homo sapiens
gctagaggagagggagggggaggagctggtcaggccccagggccttccgcactgcactggctgggggaagaggcggcggccagggcggccagcctggagcmtgaggcaccgggctggccccagtgacacctccgtccccatccccagaaataccgctaccaagatgaagacacgccccctctggagcacagcccggcccac

SEQ ID NO: 553206 - DNA, 201 bp, Homo sapiens
aactccgatgaagtcagagccccttacccgccgccgcggccaggccccccaacatggactgtctctgtatagtgacaaccaaggtaagcatgatggggggrctataaactggggggagggtatgagtttgtggggaggggttagtaggccttatctgggactggcgcccctggagtggcagcatcagaagtaagatgtatt

SEQ ID NO: 553207 - DNA, 201 bp, Homo sapiens
caatgcctacctgagtgacagctatgctcccccagacatcacaacctgtgagagcccttcaaacaccaaagttccccatgacccatcccgtttaacccatkacatgcagtcccacgacatccctgtagctgtccctcttcagatattccctatgaaatagccacaacctctgatccttgctgttgttggagaagagatgga

SEQ ID NO: 553208 - DNA, 201 bp, Homo sapiens
gacctccgaaatgccagccatgagcaggctgccattgccctgaagaatgcgggtcagacggtcacgatcatcgctcagtataaaccagaaggtaccaggcyggaagttccttgtcttgtgagctgaaatggcccttagaactcttcctcagctgatggcttcagtaggggaggacaggggtgacagtaggatggggacaga

SEQ ID NO: 553209 - DNA, 201 bp, Homo sapiens
agcagcctgggctcagggactgcgtccctgcggagcaaccccaaaaggggtttctacatcaggtcagaggcttcccgggctggactcctcagcccctctgygttcctgggcactctgtgcctggcccgggcctcagccgctcctcttctccaccctgcctgctctagctccccaccccaggcctgaggcgcagccagggtt

SEQ ID NO: 553210 - DNA, 201 bp, Homo sapiens
cggtatgggctccggcccgctcccccttcccggacccccgcaaatatcagggtgcaagcttcaagcgctgtcgctcttccttctgcttggtgcggggtctmtgggttgcaacttctcgtggacaggcgccgtgggtcgcccctcttatcattcactttgactcacacccctatgttttgggggtgcaagcctcagttccag

SEQ ID NO: 553211 - DNA, 201 bp, Homo sapiens
tagggatgctctctcaatttgagggaactgttaatttagggttcagtcatatagaatggaggtagttggaagttgtcagagggctggggccctggcatggkatcacctgagggaatggaccaggtgaggcaaggatttgggggtactcccataggaggcagaagattgcagcagccgagcttgccagcccctgaggaggag

SEQ ID NO: 553212 - DNA, 201 bp, Homo sapiens
ttctgccaaaacacacctctctcccgcccccgggggtcacccctccacttctgtccctgtctggccctgtggcttgcatggcctcgtctgccgctgcgctstgcagatgtctctcggaggtgctggccctggctgacctatttccagaggtcaagacctgcacttctggccattggctttctggccatctccactgggatg

SEQ ID NO: 553213 - DNA, 201 bp, Homo sapiens
attcccttctgtctttgccctctgttccttccagagactatgtgcccaggcagatggattcctcccgggcctgagaggaactgcaggaattctcctgcctyttacccgtaaaaccccaacttctctagccctagggcaggaagtcccaaacaatttctacccctttttctgcaattctcattggggtgagaggaggcccag

SEQ ID NO: 553214 - DNA, 201 bp, Homo sapiens
ctgaggcatgagaatcacttgaacctgggaggcagaggctgcagtgagccaagatcacggcactgcactccagcctgagactccttctcaaaaaaaccccmaaaaaacaaaagaatttccctcatagaatgtgggaaattcttttagacaaatgacctagttttttcaacgaatggatggcagagaggtggggggaaaaaa

SEQ ID NO: 553215 - DNA, 201 bp, Homo sapiens
gatcatcgaagggggtgctgcccacaaggatgggaggttgcagattggagacaagatcctggcggtgaggactccatctagcccattttctagcccagatytgggtctcacctactagccctggcaggcccaagttcatcacttcaccccagtgcttctgtcttgggccatttgtggctttgtctgagctttgctttcctt

SEQ ID NO: 553216 - DNA, 201 bp, Homo sapiens
ggagttgcaggtgaacgggaccgagggggagatggaatacgaggaaatcacattggaaagggtgagcaggctcctccatcggcagtccccgtggcctcccrtctgtacctttctttctgccatgtggtctgggtggctagcccctcaccctgtgccttcctcctctggctgctccaagccatttcccaccccacttgcctt

SEQ ID NO: 553217 - DNA, 201 bp, Homo sapiens
cttcaccttccctcttttcctcctcccctctctcatcctcttgggttctcacctctgccatatcttctttctatccccctctgccccctccatcatccccyaccacctgtttccctttctcctctctgctcacagcgtcctcctctctccagtcccgggaggcctggtttctgggaccttccattctccagtccactttcc

SEQ ID NO: 553218 - DNA, 201 bp, Homo sapiens
tctccctccatcagccagctcccctttcccatgttccctcttgcctattcatcttcaccttccctcttttcctcctcccctctctcatcctcttgggttckcacctctgccatatcttctttctatccccctctgccccctccatcatcccccaccacctgtttccctttctcctctctgctcacagcgtcctcctctctc

SEQ ID NO: 553219 - DNA, 201 bp, Homo sapiens
ggagctttggtcctaatttaccttgcagggaattggaggccttgtgaaggaagagtggatagcggagagcggcttccaccccttcccccaggtctcaattmtggggcttgcccctcagcttgtgcactgcccaggtagaagaccaccttctcaggatgtggaatgaacagtctctgttggttcatagaactcctttattca

SEQ ID NO: 553220 - DNA, 201 bp, Homo sapiens
ggtgcccaccaccacgcctggctaatttttttgtatattttagtagagatggggtttcaccgtgatagccaggatggtcttgatctcctgacctcatgatycccccacctcggcctcccaaagtgctgggattacaggcctgagccaccgtgcccagccaatttaaaatctttggcaataaatctgtaagatgagcttcta

SEQ ID NO: 553221 - DNA, 201 bp, Homo sapiens
cgcttgagccgaggagttggaagctgcagtaagccaatgattgcgccactgcccaccagactgggtgacagagcgagaggagaaaacgatgtgattatctyaaatagacgtgaaaaaggcatttggtgaaattcaccatctcttttggatgaaagcttttagtaaactaggaacacagaaattttccttaagatggtgaag

SEQ ID NO: 553222 - DNA, 201 bp, Homo sapiens
gggaggctgaggctggaggatcgcttgagccgaggagttggaagctgcagtaagccaatgattgcgccactgcccaccagactgggtgacagagcgagagragaaaacgatgtgattatctcaaatagacgtgaaaaaggcatttggtgaaattcaccatctcttttggatgaaagcttttagtaaactaggaacacagaa

SEQ ID NO: 553223 - DNA, 201 bp, Homo sapiens
gtccctcttcagatattccctatgaaatagccacaacctctgatccttgctgttgttggagaagagatggaaaatcaattaccataaaagaactagaaaaratcgtcaacgatctctctcctggaaggcacaaagcctggttggttttatggctaattttgtgaaattctcaaggaatagataattcttctgctcttccag

SEQ ID NO: 553224 - DNA, 201 bp, Homo sapiens
ggttctgaccccaggggttgtgacttactgatagaaatttgatactggtaagggtaaccattatttggaaacacgggacattttctttttcttatgaattygggcagattcagggttacccctgtgactttatgatgtgcgtgtgtactgcacactgctttctgtttttctttttctttttctttttttttttttttgaga

SEQ ID NO: 553225 - DNA, 201 bp, Homo sapiens
agaactggcaagagaggagttgggggataggaagggtaagaggtcctgggtcaggggccagatagggataagactgtgagatcagggcagtgaatgaggcygacagagcaaggaaaggaaggccctggagacagggatggtacagagtgtttgtgcgaattctgtggatgctaggagtgagggaaagaagactagagatgc

SEQ ID NO: 553226 - DNA, 201 bp, Homo sapiens
ggggactccgcagcgggcccctgccttccacacgcccccaccatttttctttgccggtttgcatgagtggaaggtctaaatgtggctttttttttttttttcctgggaatttttttggggaaaagggagggatgggtctagggagtgggaaatgcgggagggagggtggggggcaggggtcgggggtcgggtgtccgggag

SEQ ID NO: 553227 - DNA, 201 bp, Homo sapiens
catctcttgggtccctgcctgcctggtgctcctcccttcctccattctgtcctgtccctgccctctcccgtgctctccatcttccctttcctttccctctrtcttttactctgtccatacccgcttcctgcctgactctctgcccccgtgtttcttgacatccatgtcactccccttcggccaacttcccattccccacct

SEQ ID NO: 553228 - DNA, 201 bp, Homo sapiens
tgggcgaggcagggggagcgaacgggcgggaagtggacggaggcgtggcctcccgggcaggtgggtggggtctggcttactctatcgagggaggcagcaamcttcggaaaggggaggaaccttggggctgggttacctgaccgaaatgagggcggggctgacctgggatgggcgtggcgtggccccccgtgcgtaaaggag

SEQ ID NO: 553229 - DNA, 201 bp, Homo sapiens
cgcctcctgggctcaagcgatcctcccacctcagcctcccgagtagctgggattacaggcgagtgccatcatgctcagctaacttttttttttttttttttgagatggagtctcactctgtcacccaggctggagtgcagtggcacgatcttggctcactgcaacctctgccgcccgggttccagcaattctcctgcctca

SEQ ID NO: 553230 - DNA, 201 bp, Homo sapiens
tccttgatttctcatttattttttccactttttttcttctcaaaggtggttttttggggggagaagcaggggactccgcagcgggcccctgccttccacaygcccccaccatttttctttgccggtttgcatgagtggaaggtctaaatgtggctttttttttttttttcctgggaatttttttggggaaaagggagggat

SEQ ID NO: 553231 - DNA, 201 bp, Homo sapiens
acctgggaggcggaggttgcggcgagctgagatcgcgccattgcactccagcctgggcaacaagagtgaaactctgtctcaaaaaacgacaaaaaaaaaaaggaatgtggctatttgtaagataaataacaggaattagtaacttcccagcaataagaaaatgtagtgaataaaaagcccccttttgccatagaaaaaatt

SEQ ID NO: 553232 - DNA, 201 bp, Homo sapiens
gcggatcacctgaggtcaggagtttgagaacagcctggccaacatggagaaacgctgtctctactaaaaatacaaaaaaaaattagctgggtgtggtggcsagcgcctgtaataccagctaatcctgaggctgagacaggagaattccttgaccctgggaggcggagcttgcagtgagccaagatctcaccactgcactcc

SEQ ID NO: 553233 - DNA, 201 bp, Homo sapiens
ccattgccatagagacgtggcttcggttgccctggcaattggggaagcccctaggaccgggctaaagcgggccccgcctgggagtctagagaccaggcgaytgacgtcagggacctgggcacgccccactttaaccctttcccgaatgaagtggggggagggagtagatgagcgggataggacccggatgtctttcaccac

SEQ ID NO: 553234 - DNA, 201 bp, Homo sapiens
cccctacccgcgtatccctccatgtatcccacagggttgagcgacgagagtggtcaaggttaaaggccaaggtaggtggaggagggtgtgagcctgggtgraagtgtgagggctcatggagctgagctcataactaaccccgtggcctgctttttcttcttaggactggggctccagctctggatcgcagggtaggtaggg

SEQ ID NO: 553235 - DNA, 201 bp, Homo sapiens
gtggcatgatctcggctcactgcaacctccgcttcccaggttcaagcaattctcctgcctcagcctcccatgtagctaggattacagccatgtgccaccaygcccagctaatttttgtatttttagtagagatgggatttcaccatgttggccaggctggtctctgacctcaggtgatgtacccacctcggcattataagc

SEQ ID NO: 553236 - DNA, 201 bp, Homo sapiens
acctccctgtccttcctcagagtacagccgattcgaggccaagatccacgaccttcgggaacagctcatgaacagcagcctgggctcagggactgcgtccytgcggagcaaccccaaaaggggtttctacatcaggtcagaggcttcccgggctggactcctcagcccctctgcgttcctgggcactctgtgcctggcccg

SEQ ID NO: 553237 - DNA, 201 bp, Homo sapiens
gcgacgagagtggtcaaggttaaaggccaaggtaggtggaggagggtgtgagcctgggtggaagtgtgagggctcatggagctgagctcataactaacccygtggcctgctttttcttcttaggactggggctccagctctggatcgcagggtaggtagggttagttcgggaagatgtgggtgagaggagcactgagttgc

SEQ ID NO: 553238 - DNA, 201 bp, Homo sapiens
cacaatttggcgtctcgaaggttaatgcttggtgaagcagggtcctctagggtatttggagtgttgccccagccttcacgtccctgtgggcagtcccggakacgtgggccgcagctctgtggtgcctgcccccgtctctccagcggcattttgctcccctcttagggctcgtctccattgactctttttgtggcttaggtt

SEQ ID NO: 553239 - DNA, 201 bp, Homo sapiens
gccctgagtcccagtaggataaaggatggggggggtcctcctttcccgtcctgctttagttgccctgtaatccaagactgagaggtgctgatcccccacckccccagccccccagtctgcagtttcagaattactctcccccgcccccacccccacccctcccgacgtttctccccgcccccctacatgtacgtcgaaaat

SEQ ID NO: 553240 - DNA, 201 bp, Homo sapiens
cttctccggtggggttagaagggaaaagtagggaaagagaagtgtaaggtagatggcagaggcagagacatggaaagacagactctagggttcctgatgawatctatctcggccaacacaaaagggagggtacagtggtggggggcacccaagctagggtgtgagtaccctaagtgtattcttctgagatgtaggccattc

SEQ ID NO: 553241 - DNA, 201 bp, Homo sapiens
taagctagagggatggtggttagatctttggggggtggggtgacttcctggcagatacgacacggcccaagcgggagtatgagatagatggccgggattaycactttgtgtcgtcccgggagaaaatggagaaggacattcaggcgcacaagttcattgaggccggccagtacaacagccacctctatgggaccagcgtcc

SEQ ID NO: 553242 - DNA, 201 bp, Homo sapiens
ggcactggactcaaaccctcccccagactccaaaacttggagctttggtcctaatttaccttgcagggaattggaggccttgtgaaggaagagtggatagyggagagcggcttccaccccttcccccaggtctcaattctggggcttgcccctcagcttgtgcactgcccaggtagaagaccaccttctcaggatgtggaa

SEQ ID NO: 553243 - DNA, 201 bp, Homo sapiens
cagccagcagcggtgatgacaggggtgatgtgcctggagaggcctggggtggggaggtaactcagttctgttcctgtgacagacatcctggactattatgwggcttccctctcagagagtcaggtaaggaggtgggggcgagcgcctaacttcctgaggggcaggcagggctggaggggtgagccaaatatcactaatatt

SEQ ID NO: 553244 - DNA, 201 bp, Homo sapiens
atggccctcctcatgtttccattttctttgggtgcacgctgacatttcctcctcagattcaggaattttctctctgaggtggagtgaagatggagaggcamtggactcaaaccctcccccagactccaaaacttggagctttggtcctaatttaccttgcagggaattggaggccttgtgaaggaagagtggatagcggag

SEQ ID NO: 553245 - DNA, 201 bp, Homo sapiens
aggacacacatgttccctgccacaaactcacacatgtgtgtacacatgcattgtgcacgtgtgaggatggttggaagagattgggggctgaggacctttakatctggagcccccaccctctctccaccagggcgactttcttgtccttcattctgtgggtttcgggctttctcccaggctgcctcttccccacatcccctg

SEQ ID NO: 553246 - DNA, 201 bp, Homo sapiens
ccttgcagatgccccacctcccaccaggtcgagaagactcggttctgagctacgagacagtgacgcagatggaaggtgagccctggcccctgccttggccycagcacttgctgctcccccaaccctgcgctcggcctaagccaggctctctctgcagtgcactatgctcgccccatcatcatccttgggcccaccaaggac

SEQ ID NO: 553247 - DNA, 201 bp, Homo sapiens
aaatctctgaagagacctgaaggaggcggttgggagtgttctggacgatttgtgggtcattgcagattgccggccgtatctttggtgtgtattttttgagkcctgagtgtggagaagatatatttgggagcaatcttccgacaaagttggaattcagaatcgtggaggggatgttctgggcagacagaaaagggtgtaatc

SEQ ID NO: 553248 - DNA, 201 bp, Homo sapiens
gagttgtggttcatctctatccagggcagccagcggagggtagcccaagaggagcctgcagggggcacatggctcctgcttccccaaatgctggatggggyagggagtgctcaggctttgcggtcgttgagctccccagctctgcctgagtcttccatctttcattgcctatatttagactcctgccgcagtaatttaagg

SEQ ID NO: 553249 - DNA, 201 bp, Homo sapiens
ctcggccaatgccgtgcggcggctgcaggcggcccacctgcaccccatcgccatcttcatccgcccccgctccctggagaatgtgctgtgagtatggtcckgggggcctcccctttgctcccccaacacctgtggccctgggcctcacaaggcgtctgcgttcaactctcccttcagaaccctggacagcggtttcagcag

SEQ ID NO: 553250 - DNA, 201 bp, Homo sapiens
tatcccacctacccccttccctcagtccccctccccttctccatgtcggctcggaacagattcgcctccatgtgtctctgcgtggtacgtgccgcggtatkggctccggcccgctcccccttcccggacccccgcaaatatcagggtgcaagcttcaagcgctgtcgctcttccttctgcttggtgcggggtctctgggtt

SEQ ID NO: 553251 - DNA, 201 bp, Homo sapiens
cagggccacaggcctccgctctctcctaaggcagggtctggggtcacccctgccctcatcgtaattccccatgttccttgatttctcatttattttttccmctttttttcttctcaaaggtggttttttggggggagaagcaggggactccgcagcgggcccctgccttccacacgcccccaccatttttctttgccggtt

SEQ ID NO: 553252 - DNA, 201 bp, Homo sapiens
ctgtgatacagcttgaaaatggtcggtagtttgtaggcttgagaaatagcagtaggagaggggagggacccctttggacggggagagcgggaaggagactrgggaatccttgcgcttgggcgactgcaaatacatgtttctttaaggaggaagtaggttggggaccccggaaggaggctcttggcggcctccccccattgc

SEQ ID NO: 553253 - DNA, 201 bp, Homo sapiens
gcttctttttgagctgctggagccctctgtgaggaggccctctttgctggcttctcaggagagcgtggctaggttctgcctgcctatgggaagagggggcyagggtgtgtggagcaagatggtggcggtgctggtgccttgggacctgggggaatgggacagctggtcggctcagagacggcctactttactcacagctgg

SEQ ID NO: 553254 - DNA, 201 bp, Homo sapiens
tagcgacctcttccaggccttgctgggtgagtagcccgttttctgagggacctgggcctccaagggccattactgaacttcgggggctgtttgggagcccrgagatcatttggtccaagctggagcaccatgcagggtcctgcctatggtgtcctccatgagtgtggaccagccttggctgaaagggctcctcccttgcca

SEQ ID NO: 553255 - DNA, 201 bp, Homo sapiens
ggccgggcgagggtggcggaaggcggagcagaacaagtgggggtggggatacagtgggggaaagactgaggctatttgccagagccccaggagcgaagcgkttaaaccctccgggtggtccttattgggcaaagccgagatgccgggggcggggcagtgtggccgacggcctcattcattggccgtcaggggcgtggcgga

SEQ ID NO: 553256 - DNA, 201 bp, Homo sapiens
cagtgagccgagatcgcaccactgcactccagcctggcgctaagagcaaaactcaatctcaaaaaaaaaaaaaaaaaaaaaaaagaggtgcccctgtgggmgggtgcagccccaggacttatggcttggagagttggaaagaggtgccccttcctctgggctggtgcaacccccttggccaggtgtcctctggcccttcct

SEQ ID NO: 553257 - DNA, 201 bp, Homo sapiens
tgagctgctggagccctctgtgaggaggccctctttgctggcttctcaggagagcgtggctaggttctgcctgcctatgggaagagggggccagggtgtgyggagcaagatggtggcggtgctggtgccttgggacctgggggaatgggacagctggtcggctcagagacggcctactttactcacagctggaatttagtg

SEQ ID NO: 553258 - DNA, 201 bp, Homo sapiens
aagactgaggctatttgccagagccccaggagcgaagcggttaaaccctccgggtggtccttattgggcaaagccgagatgccgggggcggggcagtgtgkccgacggcctcattcattggccgtcaggggcgtggcggagggacagtgtgggcgaggcagggggagcgaacgggcgggaagtggacggaggcgtggcctc

SEQ ID NO: 553259 - DNA, 201 bp, Homo sapiens
aacttgaaactgatcaagcctccagaatgaactgccagtttacaggagatacaggggcagaggcataggctaaacaaaccacaggagggtaagcagtaatwtccctgttagaatttccctcataggctggtcaaggtggctcatgcctgtaatcccagcactttgggaggcataagcgggtggatcatttgagttcagaag

SEQ ID NO: 553260 - DNA, 201 bp, Homo sapiens
ctggggtggggaggtaactcagttctgttcctgtgacagacatcctggactattatgaggcttccctctcagagagtcaggtaaggaggtgggggcgagcrcctaacttcctgaggggcaggcagggctggaggggtgagccaaatatcactaatattacctggaatcttgggggccctgctgacaaaagcctgagtcagt

SEQ ID NO: 553261 - DNA, 201 bp, Homo sapiens
cacatcggtgacgacccatccattttcatcaccaagatcattcctggtggggctgcggcccaggatggccgcctcaggtggggagaggagacaggggttargttgcttggtccctggagagggagggccagggcagcaggaagctcttggctcaggcccaccttgctgctcccagggtcaacgacagcatcctgtttgtaa

SEQ ID NO: 553262 - DNA, 201 bp, Homo sapiens
tattgaggagcacagtgtccagggctgcaggagaaggggtgtcagctggcccagagtatggagaaggggttgtcagctggctcagagcatgggggtggcakggggtaggcattcccctacccgcgtatccctccatgtatcccacagggttgagcgacgagagtggtcaaggttaaaggccaaggtaggtggaggagggtg

SEQ ID NO: 553263 - DNA, 201 bp, Homo sapiens
tgtcctgtccctgccctctcccgtgctctccatcttccctttcctttccctctgtcttttactctgtccatacccgcttcctgcctgactctctgcccccstgtttcttgacatccatgtcactccccttcggccaacttcccattccccacctctccccgtccgtgtccctccggcactgctctctgtcctttctcgcca

SEQ ID NO: 553264 - DNA, 201 bp, Homo sapiens
cctgccctctcccgtgctctccatcttccctttcctttccctctgtcttttactctgtccatacccgcttcctgcctgactctctgcccccgtgtttcttsacatccatgtcactccccttcggccaacttcccattccccacctctccccgtccgtgtccctccggcactgctctctgtcctttctcgccacccgctggc

SEQ ID NO: 553265 - DNA, 201 bp, Homo sapiens
gatgatcttctctccgagttccccgacaagtttggatcctgtgttccccgtgagtgctggggccttggatggaggagaaggtggaagtgggggtggggcakgggaggcccatccctggggccataggcagagcctcctgggggatcggtgtgtagggagatacagggtttctccgagaaggggtgcttctcagccaccctc

SEQ ID NO: 553266 - DNA, 201 bp, Homo sapiens
tcttctctccgagttccccgacaagtttggatcctgtgttccccgtgagtgctggggccttggatggaggagaaggtggaagtgggggtggggcaggggakgcccatccctggggccataggcagagcctcctgggggatcggtgtgtagggagatacagggtttctccgagaaggggtgcttctcagccaccctctcatt

SEQ ID NO: 553267 - DNA, 201 bp, Homo sapiens
ttatggcttggagagttggaaagaggtgccccttcctctgggctggtgcaacccccttggccaggtgtcctctggcccttccttggcctcactccctgctmcaccccactcccagccatcgtggagggtgacagctttgaggagatctaccacaaggtgaagcgtgtcatcgaggacctctcaggcccctacatctgggtt

SEQ ID NO: 553268 - DNA, 201 bp, Homo sapiens
agcaacttcgttgaattttcaccaacttattacttgaaattataatatagcctgtccgtttgctgtttccaggctgtgatatattttcctagtggtttgaytttaaaaataaataaggtttaattttctccccactattgagtcttctttccttatatctgggtggtgaatatgtaactttctcaggatgcttctcctttt

SEQ ID NO: 553269 - DNA, 201 bp, Homo sapiens
cataatgagcacgcagtaaatggaggccttactctcagctttttctacgttcttccttcttgccacaggaccgcctggcccggtgcaccatgcattgcaaygacaaagccaaagattcaatagatgctgggagtaaggagcttcaggtgaagcagcagctggacagttgtgtgaccaagtgtgtggatgaccacatgcacc

SEQ ID NO: 553270 - DNA, 201 bp, Homo sapiens
gagaccagcttggctaacatggtgaaaccccgtgtctacaaaaaaaaaaaaaaaaaattagccagacgtggtggcacatgcctgtaatcccagctactcgrgaggctgaggcatgagaatcacttgaaccagggaggtggaggctgcatgagccgagaccacatcactgcactccagcctgggtgacagagtaagaccctg

SEQ ID NO: 553271 - DNA, 201 bp, Homo sapiens
gtgaccggttcccaagcgggaggagggcggtgggctcgcggacaccagcatgcagtggctccgttcggccgccaggggggggcgtgggccctggaagggcrggcggcgaagggcggcgaagggcggtgagggggcgggcccgtacgccgattccatatgggcgccggcgcggagcgccgcggggcagcgcggggtcgccat

SEQ ID NO: 553272 - DNA, 201 bp, Homo sapiens
gaaatggaaaaaagtggtgctaaatcgagtcagagatattacaggagagttttagagcttattatttcctgtggccagtgcttgtcctggcagtaaggctytcccctgtaacaagccagagccctccaaggtaccagactcttcttactacacaggtactaacaggctggcaggttagagttggtggagtctgaggagaga

SEQ ID NO: 553273 - DNA, 201 bp, Homo sapiens
cgccggggcggcctcggacaggacttcggaagctttggcggatcggatgaaatccgtgtgcccttgccgtgcgcgaggctgttttccgccccttccagccyggggcaggagcgtcctcggcggcaggtgggaagcccctggtggcaggcgctcgccccaccaccttcccctcttacgcggccccttccgcaggtgagcggc

SEQ ID NO: 553274 - DNA, 201 bp, Homo sapiens
tttcttgatttggggtaatttatacaagggcatacaagttgattttaagatgtggaactgggaggtagactagtttggataagaactttgaaatgttcctwgtggatccccatttctggtcatcaagatgtggatgtacatttcttaaaattattacatgctgcatctttcagcctggagactgtgcagaaacatgagagg

SEQ ID NO: 553275 - DNA, 201 bp, Homo sapiens
acctctccctcccgggttcaagcaattctcctgcctcagcctcccaaatagctgggactacaggcatgtgccaccacacccggctaatttttgtatttttrgtagggacggggtttcgccaggttggccaggctggtctcaaattcctgagctcaggtcatccacctgcccacggcctcccaaagtgctgggattacaggc

SEQ ID NO: 553276 - DNA, 201 bp, Homo sapiens
acctggttttattagaacatatggaatgaaagcctacacctagcattgcctacttagccccctgaattaacagagcccaattgagacaaacccctggcaamaggaaattcaagggagaaaaagtaagcaacttgggctaggatgagctgactcccttagagcaaaggagagacagcccccattaccaaataccatttttgc

SEQ ID NO: 553277 - DNA, 201 bp, Homo sapiens
acgtgaaagaccagaaaggcgaggacttccggcctccccgttggccaggtcatgcctgcttctcttgcgcccaacctcgcttcacacagcgcgggtttctrcactgttcttctctgagccccgcaatgcctctgtgtgtttcggtcctgcttctctcacggagtatgcgtttcccagatagtgccccttgagtcattgatt

SEQ ID NO: 553278 - DNA, 201 bp, Homo sapiens
caggttagagttggtggagtctgaggagagatattttctctttgttgccaacatcctgtttaccaaaagtgtcaccccaccatcttccataagctgtgaawcaaaatcaatgaggtcactaacttagaagggaaagaaagttttctgggtctttgttttcttgatttggggtaatttatacaagggcatacaagttgattt

SEQ ID NO: 553279 - DNA, 201 bp, Homo sapiens
gttcccctaaacatttcacttttttttgtctttttgcctaagcacaaatttctgtaagtctaacaaaacaattgtagtaactcccttaaaattacactctsttgataccaatttgtccaatttggtatcctttttgtacactaaagtcttaaatctaaataaactctaaattgtaggagcataattcttttagttgaggta

SEQ ID NO: 553280 - DNA, 201 bp, Homo sapiens
acatattttcttaaaacagggaaacttaaattcttgttcactaaaaaatttctctttgcagtcttttcgtctgcagatgactatagagaacatgaaccatytgaaattcattccccacaaagactacacagccaatcgcttggtcagtgggctcctccagctgcccagcaatacttcccttgtaatcgatgagactctcct

SEQ ID NO: 553281 - DNA, 201 bp, Homo sapiens
atgatggtatgaactgagtgaaagtacgtgctccctccattgaagtaaccacttttttttttttttttttttttttttttgagatggagtctcgctctgtygcccaggctggagggcagtggtgcgatttcggctcactgcaacctccccctcccaggttcaagcgattctcatgcctcagcctcttgagtagctgggact

SEQ ID NO: 553282 - DNA, 201 bp, Homo sapiens
ttcccttcagcacctttaatcagaaggaaaaattaaaggacaaggaggcaaaacaaatcagtctggtcatttactatctgcaagattgggtagagaaggctttttttttttttttttttttgagacagagtttcgctcttgttgcagtggctggattgcagtggcacgatcttggctcactgcaagctccacctcttgggt

SEQ ID NO: 553283 - DNA, 201 bp, Homo sapiens
tcttttatataaattaagaagcaagaagaattcatctttttttatatttggcatcatttcctttagcgatattattatgattatgattttattttattttwtttttttttttttttgaggcagagtcctgctctgtcaccaggctggagtgcagtggtgcaatttcggctcactgcaacctccgcttcccgggttcaagtg

SEQ ID NO: 553284 - DNA, 201 bp, Homo sapiens
tcccttcagcacctttaatcagaaggaaaaattaaaggacaaggaggcaaaacaaatcagtctggtcatttactatctgcaagattgggtagagaaggctttttttttttttttttttttgagacagagtttcgctcttgttgcagtggctggattgcagtggcacgatcttggctcactgcaagctccacctcttgggtt

SEQ ID NO: 553285 - DNA, 201 bp, Homo sapiens
cttccttgacagccttcccccaccataccctcttctccatccctgccacattgtttgaggctggagggatggaagaatggattggtgtataaggcagagcwcagagggtgttgggaatggtggctcaagagctggaggaggagcatagatggttcgcttactcgttaaacactgagtgagaaggtgctcgcgtcctggagg

SEQ ID NO: 553286 - DNA, 201 bp, Homo sapiens
aactgtcagcctttgggaaaaggctttttttaattttaggaaaagccttttttttttgtagtactgtggtatattgaaaacagacattagtctggaagttrggcatcctgtgttttggtttttcacttatttgctaactagcagaatgactcttggtctcaatttataaaaatttataaaataaaggacttgctttaaggt

SEQ ID NO: 553287 - DNA, 201 bp, Homo sapiens
tgtcatttgtgtgttttccttattgggcttcatcacatggtttttatctgtccagtgttaactgttataccaaatcacagacaaattccttttctcacagttcacatttagcattttgattatgtccccttaaattttagagccaaaatcagataaagcagtggtccccaaccttttaggcaccaaggacccatttcatgg

SEQ ID NO: 553288 - DNA, 201 bp, Homo sapiens
tatgatgagtcatttttaaatggagggaggttgacattggaaaaatacctacatttttgctgtttcttggtaccgcttattaataagttacatttgttgtaaaaaaaaaaaaaaaaaaaaaaactgtgactgctgatcattaagggaattgagtattttgcactgccatggatgaaaaccttacatctaccaagctcaggt

SEQ ID NO: 553289 - DNA, 201 bp, Homo sapiens
atgatgagtcatttttaaatggagggaggttgacattggaaaaatacctacatttttgctgtttcttggtaccgcttattaataagttacatttgttgtaaaaaaaaaaaaaaaaaaaaaaactgtgactgctgatcattaagggaattgagtattttgcactgccatggatgaaaaccttacatctaccaagctcaggta

SEQ ID NO: 553290 - DNA, 201 bp, Homo sapiens
gagtagttgggactacaggcgcctgccaccacacccagctaactttttgtattttcgtagagatggtgtttcactatgttgctcaggctggtccaaaaaawttttttttctttgaaataaaattcacataacaaaatttaacattttaaaatgtacaattgaattttttttactgtattcataatgatgttgtgcaaccat

SEQ ID NO: 553291 - DNA, 201 bp, Homo sapiens
agacctaactatatatgcaccaagcaacagagcttcaaaatgtatgatgcaaaaaccagcagaaataaaagaagaaataggcaaatctgcaattgtagttmgatattttactactcctctctcagtacttgacagaatagtgggtagaaaatcaaaaagaatactgaacaacacaaaactacacaacactgtcaaccaagt

SEQ ID NO: 553292 - DNA, 201 bp, Homo sapiens
ttatgcttgtattaaaaaatacaggagtatgaatttattacttcagtgtctatagattctataaagtcaagatctaaaagattagctatttgttttggtcrtctcacaaatctatcatctgcagatttatttagcaagtctgaaaaattcatactttcattgcttgtctactcagtcttcgagggatcatgtaagaattaa

SEQ ID NO: 553293 - DNA, 201 bp, Homo sapiens
cacattcttttcaagtgcacatgtaaattcaccaagataaaccacattctgggtcataaaccaaatagtaaactttatatataagaagaacacttctaaayaatccatggattaaaaactctcaaaggaaagctttgaatattgtgaactaaaccaaaatgaaaactcaacataccaaaatttgtgggatacagccaaaga

SEQ ID NO: 553294 - DNA, 201 bp, Homo sapiens
ctttatatataagaagaacacttctaaacaatccatggattaaaaactctcaaaggaaagctttgaatattgtgaactaaaccaaaatgaaaactcaacawaccaaaatttgtgggatacagccaaagacatgcttagatgcattagctgccttaattagaagagaaggtctcaagtgaataatttaagcttccacctatg

SEQ ID NO: 553295 - DNA, 201 bp, Homo sapiens
atccatggattaaaaactctcaaaggaaagctttgaatattgtgaactaaaccaaaatgaaaactcaacataccaaaatttgtgggatacagccaaagacrtgcttagatgcattagctgccttaattagaagagaaggtctcaagtgaataatttaagcttccacctatgaaactagaaatgaagagcaaaataaaccca

SEQ ID NO: 553296 - DNA, 201 bp, Homo sapiens
ctgatgtgtttagatgattaaagtcaaatgactgaaagtgttttcctgcctttgtaggtgttcataatgtgacagccctgagcaacctcataacgtggcaraaggtggattatgacttcagctaccatcagatggaattcccctgcaatattaacgttttcattacttcggaggggaggtcactcctcccggtatgatgag

SEQ ID NO: 553297 - DNA, 201 bp, Homo sapiens
aattaccaatagtagaaaagaaaaaaaggaagacaaattaccaatattagaaaagaaagaggagataaccaccgtagactgtacaggcatgaaaaggatawtacaaacagctctacagatagaaattcatcaacttagatgaaatggaccagttcctcaaaaaccactgtattagctttctatttctcctgtaacaaatta

SEQ ID NO: 553298 - DNA, 201 bp, Homo sapiens
aggataatacaaacagctctacagatagaaattcatcaacttagatgaaatggaccagttcctcaaaaaccactgtattagctttctatttctcctgtaayaaattacaaatgtagtgactttaaaacaaaaggtttttatttacagtcctggagacagaagtctgacatgggtcttactgggataaaatcaaattgttga

SEQ ID NO: 553299 - DNA, 201 bp, Homo sapiens
ctggagacagaagtctgacatgggtcttactgggataaaatcaaattgttgacaggacttgcattccattgtggaggctttaggagagaatctgttccttktcttttcctgcatctagagtctgcccacatttcttggcttgtggcccccttccgttttcaaagacaacaagtcgagttgttctcacatcttactctaact

SEQ ID NO: 553300 - DNA, 201 bp, Homo sapiens
aggctttaggagagaatctgttccttttcttttcctgcatctagagtctgcccacatttcttggcttgtggcccccttccgttttcaaagacaacaagtcragttgttctcacatcttactctaacttcctcttttgccacatccttccacatttaaggacccttgtgattacattgaacccacccagattgttttttttt

SEQ ID NO: 553301 - DNA, 201 bp, Homo sapiens
caaactatccaaactcacccaagtagaataatatttcaccttttacgtctggcttatctcacttagcataatgttttcaaggtttattcctgtgtcttcgktgctttttttttttttttttttttttttttttttgagtctgagcctcactctgtctcccaggctggagtgcagtggtgcgatctcagctcactgaaacct

SEQ ID NO: 553302 - DNA, 201 bp, Homo sapiens
tttttttaagagatagagcctggctctgtcgtccaggctggaatgctgtgtggcaagatcatggttcaccgcagccttgaacttccagtctcaagtgatcytgcagcctcagcttcctgagtagctgggactacaggcatgtattacctgtattaccacacccagctaatttttaaatcattttttgtagatttggggtct

SEQ ID NO: 553303 - DNA, 201 bp, Homo sapiens
acagctggatctcttagcaaaatggtgcagccactctggaagacaggtagaatcttaatcatacatttaccatgtactcaactgtgtcatatctagatacycattctagagaaatgaaagctcatgttcacatgaaaacctgcagacacgtgttttatagttttgtttatagttgtcaaacctgaagacaatctaaatgtc

SEQ ID NO: 553304 - DNA, 201 bp, Homo sapiens
ccttttttttttttttttaagagatagagcctggctctgtcgtccaggctggaatgctgtgtggcaagatcatggttcaccgcagccttgaacttccagtytcaagtgatcctgcagcctcagcttcctgagtagctgggactacaggcatgtattacctgtattaccacacccagctaatttttaaatcattttttgtag

SEQ ID NO: 553305 - DNA, 201 bp, Homo sapiens
gcagatttatttagcaagtctgaaaaattcatactttcattgcttgtctactcagtcttcgagggatcatgtaagaattaaatttaggaaaaacaattagmaagataagagatgaatggattctccacacgctgaataatagataccagatggcttttgagaaaaagaccccagtttttgagatctgctgtcaagtattcg

SEQ ID NO: 553306 - DNA, 201 bp, Homo sapiens
gcattccttttttttttttttttaagagatagagcctggctctgtcgtccaggctggaatgctgtgtggcaagatcatggttcaccgcagccttgaacttycagtctcaagtgatcctgcagcctcagcttcctgagtagctgggactacaggcatgtattacctgtattaccacacccagctaatttttaaatcattttt

SEQ ID NO: 553307 - DNA, 201 bp, Homo sapiens
aaatgaaggcttcactggatttgtgaggataaaatacattttctttaattgtcctagagcaaagtacattagtcaccatgtgttttttgtgccaatgtaamttgtaatttaccaaagaaaaatacatacattgcttggtcttgcagaaaagttcccttgaaagaacctttccaataaataaaacgtcccaaattagcagta

SEQ ID NO: 553308 - DNA, 201 bp, Homo sapiens
ttcctcatgtgggttcatgttactgtctagtatcttttcatttcagcctgaagaactgtctttagtgtttcttgcatggcaggtctacttgtgcaaattctttttttttttttttttttttttttgagacagggtctcgctgtgtcatccaggctagagtgcagtgttgtgatcatggctcactgcagcctcaaccccccc

SEQ ID NO: 553309 - DNA, 201 bp, Homo sapiens
ccttttatgctcctaactaccactctcctgcctcctccgtccccagaagtctctagaccctagcaaccactggtctcttctccatctcttataattttgtyattttaagaatggaattgtatattacataaactttggggattgtcttttcttcagcacaattcccttgagatccatcccaattgttgcatgtatcagtag

SEQ ID NO: 553310 - DNA, 201 bp, Homo sapiens
gagttagactctaagaatataaaaaggcctagataacatcataaaagtaaggttctagatccacaaagcagagaactagacccagattataagtcactccmgaggtcccatttttctggatttgagggaggaagtgtttgatgacagtatttgaagtgattttatatccattttcttttaaaaagtaatagtttggaatta

SEQ ID NO: 553311 - DNA, 201 bp, Homo sapiens
tcctcatgtgggttcatgttactgtctagtatcttttcatttcagcctgaagaactgtctttagtgtttcttgcatggcaggtctacttgtgcaaattctttttttttttttttttttttttttgagacagggtctcgctgtgtcatccaggctagagtgcagtgttgtgatcatggctcactgcagcctcaaccccccca

SEQ ID NO: 553312 - DNA, 201 bp, Homo sapiens
cctcatgtgggttcatgttactgtctagtatcttttcatttcagcctgaagaactgtctttagtgtttcttgcatggcaggtctacttgtgcaaattctttttttttttttttttttttttttgagacagggtctcgctgtgtcatccaggctagagtgcagtgttgtgatcatggctcactgcagcctcaacccccccag

SEQ ID NO: 553313 - DNA, 201 bp, Homo sapiens
aatcatcttagtttctgtgtaggatgaacttaacatttttcacagttaaaaaaaaatggtacaaaacaaaaattttaaacaactttaaataagcttaaccrtcccttaataatagtatatgagattgttcatcttggcaatttctgattgtgatgactttcctgctttagttacttcactattgatgtagtttagtttaga

SEQ ID NO: 553314 - DNA, 201 bp, Homo sapiens
atctcggctcactgcaacctcctcctcccaggttcaagcaattctgcctcagcctctggagtagctgggattacaagtgcctgccaccatgcccagctaatttttttttttttttgagactgagtcttgctctgtcactcaggctagggcgcagtgttacaatcttggctcactgcagcctctgcctcttgggttcaagtg

SEQ ID NO: 553315 - DNA, 201 bp, Homo sapiens
ttttcatccttcaatccagtcagattgacaaagtattaaccatcacagaggttaagagcacagacaggcaggcagcctgggttggagtcctgacttggccwcttactagctatgtcaccttgggcttggtttcctcattgtaaataagggtagatgtgaggttttggtgaatttgtacgtgtaaggcattgaacgttgtct

SEQ ID NO: 553316 - DNA, 201 bp, Homo sapiens
atcatacatctgagtataaaacctgaaactataaaacttttagaagaaaacagatctttgtgacctggggtttggcaatgagttcttaagacatgacaccraaggcacagtgcgtaaaacaaaaatttgataaattgggcttcatcaaaattaaaaacctttgttctgtaaaaaaaaattctattaggagcatgaaaagac

SEQ ID NO: 553317 - DNA, 201 bp, Homo sapiens
ggcttgtggcccccttccgttttcaaagacaacaagtcgagttgttctcacatcttactctaacttcctcttttgccacatccttccacatttaaggaccsttgtgattacattgaacccacccagattgtttttttttttaagttcaactgattattaaccttaattccatctgctaccttaattcctatgtaacatatc

SEQ ID NO: 553318 - DNA, 201 bp, Homo sapiens
tctcggctcactgcaacctcctcctcccaggttcaagcaattctgcctcagcctctggagtagctgggattacaagtgcctgccaccatgcccagctaatttttttttttttttgagactgagtcttgctctgtcactcaggctagggcgcagtgttacaatcttggctcactgcagcctctgcctcttgggttcaagtga

SEQ ID NO: 553319 - DNA, 201 bp, Homo sapiens
tgaaatagaaaacagaaaaaaaagaaaaaatcagtgaaactcaaagctctttaaaaaaaaaatcaataaaattgtaaacctctagccatactggcaaaggaaaaaaaaaaaggaaaacaaattaccaatagtagaaaagaaaaaaaggaagacaaattaccaatattagaaaagaaagaggagataaccaccgtagactgt

SEQ ID NO: 553320 - DNA, 201 bp, Homo sapiens
ccaatcgcttggtcagtgggctcctccagctgcccagcaatacttcccttgtaatcgatgagactctcctggaacaggggcagctggataccccaggtacrtacatagatgtttctcttccatttctgacttccttcgcactaaagccagatctaggaataacttttagaagagtatctatggacaaattcacatttaaca

SEQ ID NO: 553321 - DNA, 201 bp, Homo sapiens
ctaaggacacacatggagtctggaggaatccagtgtcttgataattttttctttttgcgtggtggaggaggtggtgtggggggggacgaagattcactctwgtcgcccaggctggagtgcaatggggcaatcttggcccactgcaacctccacctcccaggttcaagcgattctcctgcctcagcctcccaagtagctggg

SEQ ID NO: 553322 - DNA, 201 bp, Homo sapiens
gcaacacctgacttgtctggagttaacttagagttgtagagcggccttagctcattgaaaaaaacatcttggggtactagagagaaaaggcagtgggaagmtaaatcatcctcagcagccaaaatcgacggcaaacaatgtatggtatttcttataggagggcctctagtgcttactcaggaagtccttattaatttacct

SEQ ID NO: 553323 - DNA, 201 bp, Homo sapiens
tacactgtgggtgctagagagcctgcaggaggtcagcatcctcctgatttgtaactgccccttcccctgctcagtacagcttcttgaatgtgtcttgtgcrgtacttcagacacactgaagcataaaatacaccctatctaaaaattcattctatcatagtagctaattttagtttgttttttgctgactaaactattgtg

SEQ ID NO: 553324 - DNA, 201 bp, Homo sapiens
ttcaaatgagttcattactctaaataattgtcagaagttacatttttgtttaatataatctttgcagtaaccttccaaattagggcaatttttctgtccasatctgcctactgaactagaatatttaatgagcaacaacttctgttgtgaattaacggactgatattggggtttgataaatcagtttcctaaggtttggat

SEQ ID NO: 553325 - DNA, 201 bp, Homo sapiens
ctaatgtctgtgaaaaaccatgggttcatatttctgattccagttcagcacagcaggagtcacatgttctagttgttctcctttctatatttatgacttcyttttctaacaaatttgattcccattattcacaatctgttgtttccccatttctaccatatacagaagggaatttcagaattggtaacccataccactaca

SEQ ID NO: 553326 - DNA, 201 bp, Homo sapiens
actgttgtaagcctacacacttagtgacgtttagcttagtaaactggacagcgcctcataccctttattaaaagtggtagaaacttcatggctcatcatcrgtgtcagcaaaactgatgtgtttagatgattaaagtcaaatgactgaaagtgttttcctgcctttgtaggtgttcataatgtgacagccctgagcaacct

SEQ ID NO: 553327 - DNA, 201 bp, Homo sapiens
agtgcatgctccgcctaaggcacatttaaaggtactgaaaaaatatgataattaaagtaaaaaaatagtttcaaattggaattcattctaattaagggaaracaacgtgttggctcttttgagaggggattgtagaaacatttcctttttatttacgatagtaattttttaaggcatggcccacctacactgaaatgcaca

SEQ ID NO: 553328 - DNA, 201 bp, Homo sapiens
gtttccttggtttagccctgtaaatacaccacttagaaataatcatacttgggaactattttatgtctaggtgcataccagatgctaggtattagatttgygggggtatcgcctgcccccagaaagttctaccttgaccaagactgttgtaagcctacacacttagtgacgtttagcttagtaaactggacagcgcctcat

SEQ ID NO: 553329 - DNA, 201 bp, Homo sapiens
tgctccgcctaaggcacatttaaaggtactgaaaaaatatgataattaaagtaaaaaaatagtttcaaattggaattcattctaattaagggaagacaacrtgttggctcttttgagaggggattgtagaaacatttcctttttatttacgatagtaattttttaaggcatggcccacctacactgaaatgcacagatttt

SEQ ID NO: 553330 - DNA, 201 bp, Homo sapiens
cagatatattgatataattctgtttttctatgtttggggtcataggttcttcattttggaaaatatagagatgtagcagagtgtggggtatgtatctttawtatatatgaaacatttttagtaagaattttttcctaaacagagaatttgtttagctaatcttaaatttatttatcttgtgtataagttacaagaaatcat

SEQ ID NO: 553331 - DNA, 201 bp, Homo sapiens
aaacatttcctttttatttacgatagtaattttttaaggcatggcccacctacactgaaatgcacagattttaaggtaatgcacagtgatttggataaacrcatacacctatataatttataccccaaagtaaagaacttgtgcctaaaaattcctttctgcctttttctagtcactacctcctcccctgcaagcacaatc

SEQ ID NO: 553332 - DNA, 201 bp, Homo sapiens
gtaaagaacttgtgcctaaaaattcctttctgcctttttctagtcactacctcctcccctgcaagcacaatcctgaattcttgactatggcttggtcttgyctgttgaatgacatctaaatggactcatataatatatagtctttgtgtctgacatcttgtgtttaacatcatgcatttgagtcatgtgtgtatcagtagt

SEQ ID NO: 553333 - DNA, 201 bp, Homo sapiens
ttttgtatttttagtagagacggggtttcaccatgctggccaggatggtctcgatctcttgacttcgtgatctgcctgcctcggcctctcaaagtgctggrattacaggagtgactaattcagttttttaacagatattttgagtcagttgtgataaattgtatctttcaaggactgttttgaagtcatttaaacccagtt

SEQ ID NO: 553334 - DNA, 201 bp, Homo sapiens
agcctggctctgtcgtccaggctggaatgctgtgtggcaagatcatggttcaccgcagccttgaacttccagtctcaagtgatcctgcagcctcagcttcytgagtagctgggactacaggcatgtattacctgtattaccacacccagctaatttttaaatcattttttgtagatttggggtctcactatgttgcccagg

SEQ ID NO: 553335 - DNA, 201 bp, Homo sapiens
cccttcagcacctttaatcagaaggaaaaattaaaggacaaggaggcaaaacaaatcagtctggtcatttactatctgcaagattgggtagagaaggctttttttttttttttttttttgagacagagtttcgctcttgttgcagtggctggattgcagtggcacgatcttggctcactgcaagctccacctcttgggttc

SEQ ID NO: 553336 - DNA, 201 bp, Homo sapiens
cgagtcagtccctcaacatcctacactcctagtcgccacaagaggagttatgaagatgatgacgatatggacctacagcccaataagcagaaagaccaacrtgcaggtgccagacaagcaggtagtgtgtgccaacaggttttctctagactttgctctcttacagtagattggttttcagagtgaattgttacataatat

SEQ ID NO: 553337 - DNA, 201 bp, Homo sapiens
aatagtttggaattagttacttgttaattaatctgtaaaatatttgctgtggtgttataatgtgaaaatgtggttgctaattttaaaataaattttgggtkttttaaagtaaatttttaaaaacactttttatgtatatcacagcctcaacaagaacttgatttaaactctccacgaaataccactttggaaagacagact

SEQ ID NO: 553338 - DNA, 201 bp, Homo sapiens
ctccattattgtctttttgtttgaaataggtattttccagtgtcccattttaatcccttgaagtttcttaaagttattttcttagtagttgtctttggggrataaacttaacatgttagtataatcatctattagggattaatgccagtttgtttagttatttttaatttaaaaaaaatttgtgtggctaatgccatttta

SEQ ID NO: 553339 - DNA, 201 bp, Homo sapiens
ccactttgcctgtgggaagcccacaggatatttcaaaacttccggtgcgtcggggagtgctcgcttgcacagaagttggttctaactcctgtgctaccctyattctctctttcagagataagatttaatgttcatagcttagttttcctgttgggatgactttagaacccatctagtctggatctgctcctgtgccagagc

SEQ ID NO: 553340 - DNA, 201 bp, Homo sapiens
gtgttttcacaaagtattcctaggtcttaaaaaaaatttaaaacttactatcccagctctagacttaaatttgtttctgtgtttcaaaccaggtgtctgtstctcagtgctggtcagacaacgctgtcaagagaacgatggctgagagcaaagcagctagagtctttaagaagaacgaggcttcagcagcaaaaatgtgtg

SEQ ID NO: 553341 - DNA, 201 bp, Homo sapiens
catcagcagcattatgtatgtatatgctttggtactttcacccatattgcctcctttgtctaagaggctgacatgcaccttactacatcagtcaaggaacyatgttaattttcttttccttacaaaaatgcacatcatttacatttactcttttgataaaggcagttgaagatgactttgtggaaatgcggaagaacgacc

SEQ ID NO: 553342 - DNA, 201 bp, Homo sapiens
ctcagcggtgctgccttccgtgctgaacaaattccgcatttatctaactcttttgagattcttggaatatagcatatctgatgaaataaccaaggtatgtmtaggttaaaataaaggatttccctgtgttgaattgcagtatgcaaccaatttacatttaccataattactgataaggtaattttgttatttgttttctgt

SEQ ID NO: 553343 - DNA, 201 bp, Homo sapiens
cagtcagagcagaacttcttgggttccttactcatgcccttctgggggatagtttggctgctgaataccttatattacatctcatctccacagtgtaagtsctgtatcctggtgggaattaggggagtttggtgtgtgtggaagtggaagagcgggaagattgctggtgtcatttgtgtgttttccttattgggcttcatc

SEQ ID NO: 553344 - DNA, 201 bp, Homo sapiens
aattgatgtctctctaaattgaaactttatcacctctccacagggatgcctctgcactgctggatccgatggagtgcacagacacagcagaggagcagagrgtacacagtcctcctgcttcattagtgccgagaattcatgtgatcttagcccagaagttgcaacacatcaacccattattgcctgcctgccttaacaaag

SEQ ID NO: 553345 - DNA, 201 bp, Homo sapiens
ctgcactgctggatccgatggagtgcacagacacagcagaggagcagagagtacacagtcctcctgcttcattagtgccgagaattcatgtgatcttagcycagaagttgcaacacatcaacccattattgcctgcctgccttaacaaagaggagagcaaaacctgtaagtgtaagtgttacagcctagtcaactatcgac

SEQ ID NO: 553346 - DNA, 201 bp, Homo sapiens
acacttgcaccccatgtgttttgtcattcatttgtgctctctatgcacacatttttctgaaacacttgaaagtatgttgcagaaatcaagcccttttaccyctaactgcttgtcaacatttcctaagagtactgactttctcatatataattagagtacaggtatcaaaactaggaaatttgccacaaatatacaatacac

SEQ ID NO: 553347 - DNA, 201 bp, Homo sapiens
tagagatgggatctcactatgttgcccaggctggtctcaaactcctgggctcaggtgatccttctatatcagcctcccaaagccattggcataacaggcgygagccaccacgcccaaccagtcttagcttttataagcagtggatttctttgttatggtgggtatataagtttgtctttatatttgtaatatattcgagtt

SEQ ID NO: 553348 - DNA, 201 bp, Homo sapiens
gttgcttcacatattttgtccagttacattgttgtttacagcaaggatagcagcataaggttgatacctgttattctcatgaccagaactggaagtctagyctccttttatgaaaatgcattctattttaactgaattgccaaactagtaattttttataagtcatataattagcaaaactttaggatattcctcagttta

SEQ ID NO: 553349 - DNA, 201 bp, Homo sapiens
cgctgactcaaatgttaatctcctttggcaacaccctcacagacacatccaggaacaataattttcatccttcaatccagtcagattgacaaagtattaamcatcacagaggttaagagcacagacaggcaggcagcctgggttggagtcctgacttggccacttactagctatgtcaccttgggcttggtttcctcattg

SEQ ID NO: 553350 - DNA, 201 bp, Homo sapiens
gtgaatttgtacgtgtaaggcattgaacgttgtctgtcacatggtacgtactatggaaaaggttattatgcttgtattaaaaaatacaggagtatgaattwattacttcagtgtctatagattctataaagtcaagatctaaaagattagctatttgttttggtcgtctcacaaatctatcatctgcagatttatttagca

SEQ ID NO: 553351 - DNA, 201 bp, Homo sapiens
catcctgtgttttggtttttcacttatttgctaactagcagaatgactcttggtctcaatttataaaaatttataaaataaaggacttgctttaaggtctrtttcctgatctaaaattccaagatattggtacttcaagactaatatcttaagctttgtgtctgttctaacagtgtgatttcatgtggtctcttgttaggt

SEQ ID NO: 553352 - DNA, 201 bp, Homo sapiens
ggggcaagccctcagttcaacacttagccatgcaatttacaagccttagccttcatttcctgctcgcacagagcctccaggtcatgcagaggtgggagctrtggtctctgagcatgtctgcagccttctgagttcctaggagttacatacttaaggttttcagagccctctacagacatgtcatttcccagctagcttttc

SEQ ID NO: 553353 - DNA, 201 bp, Homo sapiens
gtgagtctgtgtgctctttttttggtctcctttatttttatataatttcaagttttcaggagagttacaggatggttttaaagaactcccttttccctttytcccagatgtaccagttgtaaacacttgcaccccatgtgttttgtcattcatttgtgctctctatgcacacatttttctgaaacacttgaaagtatgttg

SEQ ID NO: 553354 - DNA, 201 bp, Homo sapiens
tggttcgtggttgtgtagtttattttctctgcatatatttagacagtttttttaaactgaaaagttaagttttgttgtgtattttattttgaaatatgcattttttttttttgagacagtctcgcactgtcacccaggctggagtgcagtagcgcaatctcggctcactgcaacctccgcctcctgggttgaagcgattct

SEQ ID NO: 553355 - DNA, 201 bp, Homo sapiens
tgtgctctttttttggtctcctttatttttatataatttcaagttttcaggagagttacaggatggttttaaagaactcccttttccctttctcccagatrtaccagttgtaaacacttgcaccccatgtgttttgtcattcatttgtgctctctatgcacacatttttctgaaacacttgaaagtatgttgcagaaatca

SEQ ID NO: 553356 - DNA, 201 bp, Homo sapiens
cagttgaagatgactttgtggaaatgcggaagaacgaccctcagagcatcactgctgatgatcttcaccagctgctcgtggtggctcggtaagtggcgcaygtccattattgctgtttcggtaagcttgtgtatatgtcttctgagttattcagcagtaactgaggcagaattctaaaaacggaaatgaacttttcctttt

SEQ ID NO: 553357 - DNA, 201 bp, Homo sapiens
ttacaggatggttttaaagaactcccttttccctttctcccagatgtaccagttgtaaacacttgcaccccatgtgttttgtcattcatttgtgctctctrtgcacacatttttctgaaacacttgaaagtatgttgcagaaatcaagcccttttacccctaactgcttgtcaacatttcctaagagtactgactttctca

SEQ ID NO: 553358 - DNA, 201 bp, Homo sapiens
aaaactaaacttgtacatggcagtggttcccagacttttgtattttatggaccggtagtaatatttccaaaaatctggggtactataaggttgccaatttrccttgccaagtaatccgaataaatcactgtattatcaccatttttttcataaaaggaaaggacaatctatctctgaataagaggagtcctttaaacggaa

SEQ ID NO: 553359 - DNA, 201 bp, Homo sapiens
accccatgtgttttgtcattcatttgtgctctctatgcacacatttttctgaaacacttgaaagtatgttgcagaaatcaagcccttttacccctaactgyttgtcaacatttcctaagagtactgactttctcatatataattagagtacaggtatcaaaactaggaaatttgccacaaatatacaatacactaatccac

SEQ ID NO: 553360 - DNA, 201 bp, Homo sapiens
tctcctatcccagtgcatttgagaaccatgcataagggaatgctgtgctacaaagctgtgcccaaatatgaaaacaaaataggaaacttaaaaagcaatascccctttagaaagtttttattttcttaaatgtcattgagttgctttgattctattggatttttggcattttttatgggatcatcagttggttccaagtat

SEQ ID NO: 553361 - DNA, 201 bp, Homo sapiens
ggaaggtacttggggacataaatatccagtttctcattaaactttcaccaatttattttagcattcattgatgattcttgcttgaatcagttattactttkttggcaattttctaacgcagtacatttatttattggcattctactataaaagatacctcttccatttgtttattcaagtaatgtatttacttatatttag

SEQ ID NO: 553362 - DNA, 201 bp, Homo sapiens
ttgctttgattctattggatttttggcattttttatgggatcatcagttggttccaagtatgttagatcagctaacatctgctactccagtaacagcctcrtacaactgcaggtaggttttctccagaccaattagttttaatagagcaaactaacaacagactgtagtagcatggttatggcaaccagaatcttcagaaa

SEQ ID NO: 553363 - DNA, 201 bp, Homo sapiens
taatagagcaaactaacaacagactgtagtagcatggttatggcaaccagaatcttcagaaaggttaggacattactttttaagctgtcagtggtatcaartaacttacctagttggaggcagataaaggatcccttacgttttttcctataaggcctaaattgaaattgttaaccaaggaaacagggtcagccttgaaaa

SEQ ID NO: 553364 - DNA, 201 bp, Homo sapiens
agttccagaccaacctggacaacatagggagacctccatctctacaaaaagatttaaaaattagccaggcgtggtggcccgtgcctgtggtcccagctackcaggagactgaggccagaggatcacttgagcccaggaaattaaggttgcagtgagccaggatcacaccactgtactccatcctgggtgacaaagcaacac

SEQ ID NO: 553365 - DNA, 201 bp, Homo sapiens
ggtggaaatattcttggctttaactctaattttgttttccaagatgcacattatttttgcatctgtgcaattgatgtctctctaaattgaaactttatcayctctccacagggatgcctctgcactgctggatccgatggagtgcacagacacagcagaggagcagagagtacacagtcctcctgcttcattagtgccgag

SEQ ID NO: 553366 - DNA, 201 bp, Homo sapiens
ttcactatgttggccaggctggtctcgaactcctgacctcaagtgacccacccacctcagcctcccaaagttctgggattccaggggtgagccactgcacmcagattctcagtggttttaactgaaatgacacttaagtcatatggcacagggaccaaaattaccattttttcccctgccttgcttctaccaggtctaatc

SEQ ID NO: 553367 - DNA, 201 bp, Homo sapiens
cctgagtcccaaaatctcaaaagtagggaagccaccagtgtaggcttcagtccgtggctgaaggcctaagagctcctggtgaaccactggtgtaggtccargagtccaaaagctgaagaacttggagtctgatgtttgagggcaggaagcatccagcatgagagaaaggtggaggcggaagactcagccagtctgctcttt

SEQ ID NO: 553368 - DNA, 201 bp, Homo sapiens
aaaatcaaggaattcattgtacctaataactgaagtaaaaataactagttgttcaacttttcctaaactcaaatctatttttataaacaaatgtaaataakgtttatattagagttgaactggttttcatttttataactggtagactagaccttccttaaacttttagaaataaaatgaaggcttcactggatttgtgag

SEQ ID NO: 553369 - DNA, 201 bp, Homo sapiens
tgcagtggccaatcttggctcactgcaacctccaactcccgggttcacaccattctcctgcctcagcctcccgagtagctgggactacaggcacccgccaycacgcctggctaattatgttttaacctcccgttgtaaagtttgtaaatggttttcagagaatgtctgagaaataatagatcaaatggtttgcactaacct

SEQ ID NO: 553370 - DNA, 201 bp, Homo sapiens
gggtgagccactgcacacagattctcagtggttttaactgaaatgacacttaagtcatatggcacagggaccaaaattaccattttttcccctgccttgcytctaccaggtctaatcagtaaatggccttgactattactaagtccatcatgacagacaattttgaaaggtttttttttttttttaaattgtgaaaaatct

SEQ ID NO: 553371 - DNA, 201 bp, Homo sapiens
aaaaaaaaaattcactatatagcagtcaagggtgctttgaggaaggggcatatatttctccactaaatcctagtaatttatgttcataagaattctagaamtgataatcgatggtcaacacaatggccccaaaatgtcaagtgaagattcaattgtagcattggtttaagagggtgcagatgcatagatactttttaggaa

SEQ ID NO: 553372 - DNA, 201 bp, Homo sapiens
aacagcattacaagtatgtttgtgtgataacttataggcactttttggtttagtaggaaattgttttccccccagataggtaatgcatatgcattgtacaraaagaaaaaagcagttcagcaacatatagcagaaaaggaaagatctttgaagatccttcaccttcaagataaccactggttcgtggttgtgtagtttatt

SEQ ID NO: 553373 - DNA, 201 bp, Homo sapiens
cccataccactacaaaacagaaacctagtaattagagttcaatacatttccagttcatttttattttagaatgcagctgtgtagtcagagctatgttccasttactcaggtaacttttcttccccttcagtgtgatttcattatttattttacttagaaagattctcagaggtgtcattctcggctatccccattcctgct

SEQ ID NO: 553374 - DNA, 201 bp, Homo sapiens
gcctctcaaagtgctgggattacaggcgtgagccactgcatccagcagcctgaatttttccctttcttactgtccttgtcatatagtattgtataaacttwttaaccctgtcatatattttaagttaggtgtcacaataatctagagtgtgctgtccagggcagtagccatgtgtggctatttaaatgtaaattaattaaa

SEQ ID NO: 553375 - DNA, 201 bp, Homo sapiens
aaaaaaaatggtacaaaacaaaaattttaaacaactttaaataagcttaaccgtcccttaataatagtatatgagattgttcatcttggcaatttctgatkgtgatgactttcctgctttagttacttcactattgatgtagtttagtttagaggttgtattaggggtctctaaagggtcagaactgataggatagatgaa

SEQ ID NO: 553376 - DNA, 201 bp, Homo sapiens
cctcctcatactccatcccagccgcactgaaccttttttcagttctttaattttgaacctgtgtctaggcctttttgcatctgctgatttcttgtgcctgmttccccctcccatcccatgtccacttttctggctaagtcttacttttcctttgggaacttaagttaggtaccaaagtagggtacccctgctccatgttac

SEQ ID NO: 553377 - DNA, 201 bp, Homo sapiens
gcccagaagttgcaacacatcaacccattattgcctgcctgccttaacaaagaggagagcaaaacctgtaagtgtaagtgttacagcctagtcaactatcractgttagcctcagtgtgtccagagctgcctgtaacgtgctcatagtggaattgagagtcaggtcttcattcctcacaataagtgttttcagtaatctct

SEQ ID NO: 553378 - DNA, 201 bp, Homo sapiens
gaacaaaagcagtgaaaagactgattaatcagaaatgttgttaattgaaatggctagtgagatcacaaatctcaaaatttttcttttctttttttctggaktcagtgtcttgctctgttgcccagggtggagtgcagtggcgtgatctcggctcactgcaacctccgccttctgggttcaagccattctcatgcctcagcc

SEQ ID NO: 553379 - DNA, 201 bp, Homo sapiens
gtgctgagatctcaggtgtgagctgctgcgcccagcctctttagctgttttcccttcaactattggttagaccaagatcattattctcgttatatttaagsttctttggttgtatctaacagaactagactagctcatgcaaaaaagagcagggttgggtgaagaggggcagagcagactattttatcactagcattttag

SEQ ID NO: 553380 - DNA, 201 bp, Homo sapiens
attcacttcaaatatttaacttagagattttaatagatcttatttaaggggaaacaaagcctgccaaattacataatttaaaatgtacgttcccctaaacrtttcacttttttttgtctttttgcctaagcacaaatttctgtaagtctaacaaaacaattgtagtaactcccttaaaattacactctcttgataccaatt

SEQ ID NO: 553381 - DNA, 201 bp, Homo sapiens
acataatttaaaatgtacgttcccctaaacatttcacttttttttgtctttttgcctaagcacaaatttctgtaagtctaacaaaacaattgtagtaactyccttaaaattacactctcttgataccaatttgtccaatttggtatcctttttgtacactaaagtcttaaatctaaataaactctaaattgtaggagcata

SEQ ID NO: 553382 - DNA, 201 bp, Homo sapiens
caacatggagatggttctgacaccagcctcccagggctgctatgaacaccaaacagattaatgtccgagacagcatggagtggagtaagtgccacggtcayggtgctcctgttaggcgcctggtgctatctgaggtgtgggaaggtgacaggctagcaggaagcaggccttcatcagtggctgcaagagggtgtcagtctg

SEQ ID NO: 553383 - DNA, 201 bp, Homo sapiens
tgcctccttcaagcagtgggagatgtatccaattcttccccagctagagaaggacatggcacaagtttgggaattttgatgaaataccaaacagttaaacsagaggcgggactgttttccccacactgtgcctcccctgccgctggctgcgcctccccatggccaagagacccatttttggaaggagtccctggagctcta

SEQ ID NO: 553384 - DNA, 201 bp, Homo sapiens
ctgcatccttaacatagagcgaaggagatagaagacagctttgcaagctcacaggggaagggatgcagaccccaggagcaaaagtgaaggccataggaaayatcccacagccgcctcactctccgttcctgcaggtctgctgagggggccccatcatgaagcttccactgaccttatcaatcacacagatgtacagctcct

SEQ ID NO: 553385 - DNA, 201 bp, Homo sapiens
attcagagcccaggaggtcccctcacctgggtgcccatccttatctgcatgatggggctgcggatcctcacggctccaagcagcagcaccttcacctgaaygaggtcctggggaaagagcatggtgctcaggtgcagggcaccagaatgctgtgctggccggggatgtttctggaagggacctctcaagggaaggaggctg

SEQ ID NO: 553386 - DNA, 201 bp, Homo sapiens
ccctgctcacagagcacccacgggtggggtccctggctccttcagtctctatttgctgagagtctgctgagggcacacttggaggcgagaaggcaaaaggccacagcaggtgccacaccgggctgcccagtccactgccagtgctgccacttcctagctgtgtggccctgggatgagtcttaagctttctgtgcattcatt

SEQ ID NO: 553387 - DNA, 201 bp, Homo sapiens
cagagcccaggaggtcccctcacctgggtgcccatccttatctgcatgatggggctgcggatcctcacggctccaagcagcagcaccttcacctgaacgargtcctggggaaagagcatggtgctcaggtgcagggcaccagaatgctgtgctggccggggatgtttctggaagggacctctcaagggaaggaggctgcgg

SEQ ID NO: 553388 - DNA, 201 bp, Homo sapiens
catttgtcactgaaactccagagaacccaaaacctgtattttcagggggaaatccatgctcagcaagacatgtgcctggctggttaataacctacaccagmtaaaagacaagaattcccaggtcacagctaatttagaggcaacttccagcaggatttactgccaagcctcatggggatgtcacctgggatgaagaagttc

SEQ ID NO: 553389 - DNA, 201 bp, Homo sapiens
attagggagatgagacactgcttagaacagcagcaggcatccagtaggagttcagtaaatgctcactgactgaatagctcacacctggcagtgtagaataygataagaaccttaggaaatgagagtcagaaatacacagtgaagaaacagaaaattagcaaacagcagtggaaatgagattataggaggagtatgtgaggc

SEQ ID NO: 553390 - DNA, 201 bp, Homo sapiens; identical to SEQ ID NO: 399837

SEQ ID NO: 553391 - DNA, 201 bp, Homo sapiens; identical to SEQ ID NO: 399838

SEQ ID NO: 553392 - DNA, 201 bp, Homo sapiens
aaacaaggacctttcatgcagctgagccttccccttggatcagcaattctcagtgtgtggtcgctgactagcaatgcataccctccagccaccccggcccrtggagccagaggcagccctgcatctgtgtcctaacatgccctctggagatgctggtgtgggtcaagctttgccatccactgcctttaggactccccaact

SEQ ID NO: 553393 - DNA, 201 bp, Homo sapiens
ccacataatgagcccatgagtgacctcagagctccccttgtccaggaatcacctacttcaggagttgcctttgtgacatctctgctggaggaggtgaccaycaggaggactcacaccaatgtgacaattggggaagctgctcggagcttcaggtccatgaatgggaagtatttggccagaaggggattcttgtgcaagtcc

SEQ ID NO: 553394 - DNA, 201 bp, Homo sapiens
gctcaggtgcagggcaccagaatgctgtgctggccggggatgtttctggaagggacctctcaagggaaggaggctgcggctaagaggctgtggcgagaagrcccctcaggatgcctagcaccgtgctcctctgccaagagaggcctggttttgtgggcggttcaccccacatgggccagccacttcctctcccacggcccc

SEQ ID NO: 553395 - DNA, 201 bp, Homo sapiens
cccagcgtggcccaagcacagggaggatgttggcagggctggtttaatgttgctgctgtaaatagacttggaatgatccccgggccacgactgccatggcytgtggctgcagtgctgctcctgtcataacctaacaccccgagacagccccacaccacataatgagcccatgagtgacctcagagctccccttgtccagga

SEQ ID NO: 553396 - DNA, 201 bp, Homo sapiens
tggaactccaaagcagccttccctgagatgattctgcaagtcactgctggcgaaggaggtcacgaagaatgcaaaggccccaattttagccctgagccttygtcagaaggtggaaatggtctcacctcctctccagaggaccaaaggagacccacgcctcacaacgcggggaagttgtcagactctccagacaccgacttt

SEQ ID NO: 553397 - DNA, 201 bp, Homo sapiens
ggatcaaggagctcagcaacaaggactagcccaggaggagaccagggatgccggtgccatgctgtggaggcggtgaagcccccacctgctcctcctgcatyccccccaagtgcactcctggcaggagaaggtgagtgaacacaggaggcatccagggcactgcttgtgtgggaggattggtctctgcagtgctgtgctatt

SEQ ID NO: 553398 - DNA, 201 bp, Homo sapiens
cgagaggactgaaggacatgaaggcaaagtgtgcggagcggcgcctgccctcaccacgattgccatcatcctccactggaagggccctttggggccggggrttgctgaagaccctgtcccgtaaggagcagctggaaagactgggagactcagcctggagaagagcagcctctgggggtctgggtgctcccaagtcagcag

SEQ ID NO: 553399 - DNA, 201 bp, Homo sapiens
cgcatgggaccactgagactctgagaagcagtttgagaacctttgggtagtgaacagaatactgattttggacatagatatgggttcaaattcaaactccyccactttccacctataaattatgggcaagtttcttaacctctctaagcctcaagctgcctcatctagttgaagaatgccaccaacctcacagggctgtca

SEQ ID NO: 553400 - DNA, 201 bp, Homo sapiens
agtaagtacagatgaactggcagtcgcttcaggaaagggacacatggtgagtcctgatgatgggcagggagggaaggaaggtggggtgtcgggccctgcartggggtgtgggggagctgcagaacttggggcactagtagggtacaccatatcaggccaggaggaaaaaggagaaatcaaagttggggagtggtagggaag

SEQ ID NO: 553401 - DNA, 201 bp, Homo sapiens
gctcttgaactgcctaaaacattagtttcttgtcagttttactggccacagcccacctggggactggggagtgctttagcctgtccactgactgacatttmcttctcacccttcccccaaccctggctaggacacggagttgcagaggaagctagaccatgagatccggatgagggaaggggcctgtaagctgctggcagc

SEQ ID NO: 553402 - DNA, 201 bp, Homo sapiens
tccctgccttgctcaatccctttttccctgtctcaagctgctcctcctcccctgactcaggactggctgtctcatccccagcccttttttgccattccttyctactctggtcagtaggaggcaaatgagagggctcagcaaaagccccacaagctcattcttctaaggcaggcgtgatcaaggctgcctgattgtcactgc

SEQ ID NO: 553403 - DNA, 201 bp, Homo sapiens
tgagccaagcccagccaggtgcccggagggacctccagcgccctggtacccctcagttgctctcgcggcaattgggagctgatgtcaccggcgtcctgagygctgcagctggaggcggtgcagctatgctggcgccctggctcctccgatttcccgcggccctcggacccagccggctccccaggccagtgcagctctctg

SEQ ID NO: 553404 - DNA, 201 bp, Homo sapiens
agatctctggggacccaagtctcacccaatcttgtgtgttcttttctcctctccaactctttttagaaccacctccaccaaagttcaaaacaaaaccccartgagccaggatcatttcattaatttctttcctaatttcttcttttctgtttccctttctgcatgtggattcctgtctcttcttctgacccctcacttgcc

SEQ ID NO: 553405 - DNA, 201 bp, Homo sapiens
cctaaacccttcctggaagaaaactggaaccaactctgccctacctccctgcactaaccagctttgaggatggcactgaagaacccttggagcaaacatamctcccttgtgactcccacatcaaccattaaagttatttaacagcagccttcacctggctcctgaggacagggtgcctctctctgcctggtctagacctgc

SEQ ID NO: 553406 - DNA, 201 bp, Homo sapiens
gggtaaggccttgcacaccgacaccaccctcagctgcctgtattctgcccacaggtgacctttgaactgtgttgagtgtgcagaacccattttgcattgcygccaggatgtgcagacagatatgaatgagcagtggccacgtagctgggaggcattccagcccacgccccagagctgggctgaagccagtccagaagacca

SEQ ID NO: 553407 - DNA, 201 bp, Homo sapiens
ccccatgaagtcttatcagggacctgggagagaccttggtgttttaccaccactgtgtgttgcccagaggcgcatttgtgagtagccagggcaggacttasaaaagtcggtgtgtctggtgaaaggtagctgatctgaagggtagcaagtaatgcaaaagcactaatttgctaagccctgtctgtgatccagtaagactgg

SEQ ID NO: 553408 - DNA, 201 bp, Homo sapiens
tccctaaacccttcctggaagaaaactggaaccaactctgccctacctccctgcactaaccagctttgaggatggcactgaagaacccttggagcaaacayacctcccttgtgactcccacatcaaccattaaagttatttaacagcagccttcacctggctcctgaggacagggtgcctctctctgcctggtctagacct

SEQ ID NO: 553409 - DNA, 201 bp, Homo sapiens
caaatgttggccaaattattttctgacccagtaccctcctatatcaaagaagtgatgggatggtgggaaataagcagctttcctattgttaaaaaaaaaawaaataaagactggagacccctctaagccaggggtttaatggagagccctggaaatgaagtctttctgtgggcacctgtcccctcaaggctgcacctgtcc

SEQ ID NO: 553410 - DNA, 201 bp, Homo sapiens
acagtgctcgcgaggtgcagtgcgcccctgggggctccggggccgtcgggccaggtcggcttggcgcccagggactggccggacgggctgggcctttggckggggtggaagaggaggttgccgcgccctgcccggcccaggtgtcgtctccgggggcggggtttggagccccgcagcgggagattcccggccggactggcg

SEQ ID NO: 553411 - DNA, 201 bp, Homo sapiens
caactgggtggtgtggctgtttacggagatggggaagatggaggaagttgtggaagtgactgcctggaccaggcaggggctgctgctgagaggtcagaggyaggactgcaaagagtctagatcaggaatggcaggatattgtatgtgctgtcccccctcaagccctgcccccactccctggatcatagtagatgttactgg

SEQ ID NO: 553412 - DNA, 201 bp, Homo sapiens
ggagagtggctgagggtgctgtgttctttctcaaccaagttcagcaggtcctcaaaagagagacccattgatgtttcagggaatggcaaaagagatagtcrtggaagagtaaatccaagaagactttctggaggaagtgactcaagttgcaagtaaagggggcttattttaaaatatgtgctaggcccaggtagagatgag

SEQ ID NO: 553413 - DNA, 201 bp, Homo sapiens
cacctaccttcccatccccattccttgcctctgacctcatctcccaagctcagagggccggtaggtggtgattctcttaatttggggtgtataggtttctktgcagcgtcagtgaacactgtaggtggtatgctccttgtccactgatcccttgccaactagatgtccctggcatcacttgagtctgagggataactctca

SEQ ID NO: 553414 - DNA, 201 bp, Homo sapiens
tgctcgcctgcctcagtggccccagccccagactggacccaccccctgccctgggggagaccccgaaccttttccctggatgctgtccccccagaccactcccctagggctcgctcggttgcccccctcccacctcagcgatccccacggaccagaggcctctgcagcaaaggccaacctcgcacttggctccagtcacca

SEQ ID NO: 553415 - DNA, 201 bp, Homo sapiens
tggaggtctcgtagtgaaccagtcacagtcatgactagaccctgggcccctgcacccccaacaccaggcagccaacacaacctatgggcctagccctatgmcaggtacaatggagaatatgaataagaaaatatacaccctgttctcaagaggtttgcaaattacttggggagacaagagttgtcttttgagggcagtgcc

SEQ ID NO: 553416 - DNA, 201 bp, Homo sapiens
acttgccctagagaaggaagctgcacatttcagagctggaaagtatcttagaaaccatttgttccaactcctcatttcacatcagtattataaagtcttarttaactataaaatactacataaatgtaaagtatctctggctttatcactgaacctggttgctgaagactaggaaaatgtagatttgcccaaagccatcca

SEQ ID NO: 553417 - DNA, 201 bp, Homo sapiens; identical to SEQ ID NO: 400748

SEQ ID NO: 553418 - DNA, 201 bp, Homo sapiens
accagcagcactcggaaggggaggacacaccagtggacctggagggaggtgcatcagtgtagggagaaaatcaaagcagggaagatgagtttgtttgtttktttttttttttttggggacggagtcttgctctgtggcccaggctggagtgcagtggcgccatctcggctcactgcaacctcagcctcctgggttcaagcg

SEQ ID NO: 553419 - DNA, 201 bp, Homo sapiens
ggaaggggaggacacaccagtggacctggagggaggtgcatcagtgtagggagaaaatcaaagcagggaagatgagtttgtttgttttttttttttttttkggggacggagtcttgctctgtggcccaggctggagtgcagtggcgccatctcggctcactgcaacctcagcctcctgggttcaagcgattctcctgcctc

SEQ ID NO: 553420 - DNA, 201 bp, Homo sapiens; identical to SEQ ID NO: 553405

SEQ ID NO: 553421 - DNA, 201 bp, Homo sapiens; identical to SEQ ID NO: 400752

SEQ ID NO: 553422 - DNA, 201 bp, Homo sapiens
gagtaccagcagcactcggaaggggaggacacaccagtggacctggagggaggtgcatcagtgtagggagaaaatcaaagcagggaagatgagtttgtttktttttttttttttttttggggacggagtcttgctctgtggcccaggctggagtgcagtggcgccatctcggctcactgcaacctcagcctcctgggttca

SEQ ID NO: 553423 - DNA, 201 bp, Homo sapiens
cctagagaaggaagctgcacatttcagagctggaaagtatcttagaaaccatttgttccaactcctcatttcacatcagtattataaagtcttaattaacyataaaatactacataaatgtaaagtatctctggctttatcactgaacctggttgctgaagactaggaaaatgtagatttgcccaaagccatccacctgtt

SEQ ID NO: 553424 - DNA, 201 bp, Homo sapiens
aaggaagctgcacatttcagagctggaaagtatcttagaaaccatttgttccaactcctcatttcacatcagtattataaagtcttaattaactataaaayactacataaatgtaaagtatctctggctttatcactgaacctggttgctgaagactaggaaaatgtagatttgcccaaagccatccacctgtttagtggc

SEQ ID NO: 553425 - DNA, 201 bp, Homo sapiens; identical to SEQ ID NO: 400759

SEQ ID NO: 553426 - DNA, 201 bp, Homo sapiens; identical to SEQ ID NO: 553408

SEQ ID NO: 553427 - DNA, 201 bp, Homo sapiens; identical to SEQ ID NO: 377181

SEQ ID NO: 553428 - DNA, 201 bp, Homo sapiens; identical to SEQ ID NO: 377184

SEQ ID NO: 553429 - DNA, 201 bp, Homo sapiens
tactcacgcaccccgctttgcacaccacagagtgccctcacccactccatggacctcaagcagccctcagagctggagcccctgctgcccagctcagactmtaagctcaacaagcccttgagcccccagaaggagaccgctaactctcagcagacctgagccccagagcaggcctccttccctgtgtgctggggagtctca

SEQ ID NO: 553430 - DNA, 201 bp, Homo sapiens
tggtgccgagctgtgaggaggagtgggtgtggcagatggggcatccagtggaagcagcagctcagactgggggctggggccgccccagtaagtgctaaccyttctggtttgggccccagttgccaaagcatttcttcttcccctttggcaagaatcccagaggacaaccccaacaagggtcattccccacagggtgcagat

SEQ ID NO: 553431 - DNA, 201 bp, Homo sapiens
gtgtccccgaacacttcacctttaacctcatctagcatcccaggagaaagcaagccccttgttgacccttggtccctgaaccctgacccctttttcacctsgctggcctccacctggaccctacacaggcctctcaaaactcccttctggagcattccctggtcttggtgcagccttggagagcccttttccatcccaggt

SEQ ID NO: 553432 - DNA, 201 bp, Homo sapiens
ccctcttcctccttcccactccaggcatgcacctctaccaaaaggccccagacttctcccactcctccccctcctcccccacctcctcctcctccacactrcaggcatgcacctcctccacccaaagaccctagccccctgccaacctcctgctctgccatccccaaccctcctcttcgttgttcacttcactctgtcatg

SEQ ID NO: 553433 - DNA, 201 bp, Homo sapiens
atgtgaggttcacccacatcatggtttcttattgctctgaagtatcccgctgtatgggtctccacctgcccctatctctgccccataattcctcactcacytgccagttctttaatgtttttatgaaggtgagttttgctttgtgtcccattcagaccatctctagcggcgggttcatctccatcatccaagccgcaagac

SEQ ID NO: 553434 - DNA, 201 bp, Homo sapiens
cccaatccagtcaaatctcacctgcacctcaaaggcccagctccacccctcccctgcaggatcccctccccaaccctacccctggccttgacttgcactcmtagggtgtgagccatgtcccacacaaggcctgcctcccaccgggaactctctgagtgcagggtctccccacccccaacagagctgagcttaggggtacaa

SEQ ID NO: 553435 - DNA, 201 bp, Homo sapiens
ccagcagggaccgtctgactgagacagggacgcggcctcaccagaagccatgctctccctccatctccttcctcgctctgggccccagctttctttgtctrtcaaagcgaggtgttaataacagagctctgggccaggtgcggtggctcattcctctaatctcagcactttgggaggctgaggcgggcagattacctgagg

SEQ ID NO: 553436 - DNA, 201 bp, Homo sapiens
aagtcagggaggcagggaggcccttccctgccatcaaggtctttaggagctgaagggggagcatgtgcgtggcccttggcagatggggagtgccaggctgrtgtaggcgagaaacagcttctgggcagaggtagggaaggctttgaagataggggcccagaaggctgggcccatgggtggagtggccagggctaaattctg

SEQ ID NO: 553437 - DNA, 201 bp, Homo sapiens
tgtccccgaacacttcacctttaacctcatctagcatcccaggagaaagcaagccccttgttgacccttggtccctgaaccctgacccctttttcacctgrctggcctccacctggaccctacacaggcctctcaaaactcccttctggagcattccctggtcttggtgcagccttggagagcccttttccatcccaggtg

SEQ ID NO: 553438 - DNA, 201 bp, Homo sapiens
gggagaacaggcacagagggaatggaagcacggaagaaagggggaccagcctggtggaggattcagcagaggggccgaggtggaccctcagggccaaggtrgactcccaggcacccattctctccccttccctcctcccccatctcacagaagaatgatcgagagaaggagctgctccttctgtatcaggcccagcagcca

SEQ ID NO: 553439 - DNA, 201 bp, Homo sapiens
cggaagaaagggggaccagcctggtggaggattcagcagaggggccgaggtggaccctcagggccaaggtagactcccaggcacccattctctccccttcyctcctcccccatctcacagaagaatgatcgagagaaggagctgctccttctgtatcaggcccagcagccacaggccgctctgctgaagcagtaccagggc

SEQ ID NO: 553440 - DNA, 201 bp, Homo sapiens
tgccattgcctcctccaggctcccacccccagggcaatgccacatcgcacagaccaccctgccctcacctccctaaccctgccctctgtgtctcaggagcrcagcctctcccactgggctatgcccttgccgcttcgatatcccacccagccaatgaggctctcagtcctccctcgcctgccctctggtggtgatgaggtt

SEQ ID NO: 553441 - DNA, 201 bp, Homo sapiens
cttccccattttacaatgagtttataaggaccctaagtagccacaggtgtcattggatgcagtgcctcagattctgccagaagcacttcttatttttttgyggggggtgggtaagggttaagcattaccctctttaggcctcctgcacccaaggccctgcaggtaccttacccccaacacaccctccctaacccagctcct

SEQ ID NO: 553442 - DNA, 201 bp, Homo sapiens
aataacagtagggaatttctgcttataaaacaaatgcatataaatatagcctattaattttcatatatatatatatatacatgcacatgggcaggcatgawtttttctctcgattggggattgcactgatcattcctttttgtagcctgcttttatcacttctcagcgtattgtgaagtgtccacatatggaggcctcatg

SEQ ID NO: 553443 - DNA, 201 bp, Homo sapiens
tttctctgtccatcttggtggcctgaggcatcttgccacaaaccccctccagcttaggcccttcactggcctgcaggatggaatccaagctcctgagattgccacacccctacttactccccaaccagcactctgccctccaggaagtcaccggctttgttcctgatcatacactctctctcctccctgcctttgccacag

SEQ ID NO: 553444 - DNA, 201 bp, Homo sapiens
gctttgcttctttatactgtcgctacctgagcatgcctctcgaatcactctggcctaaattttctatttttaccttcatggagagggcaccgtgacatacrcattgctttgcacacggctcttttgctcaccttgatgtatgtgaggttcacccacatcatggtttcttattgctctgaagtatcccgctgtatgggtctc

SEQ ID NO: 553445 - DNA, 201 bp, Homo sapiens
tgactttccagtgtagatgtggatgtgggaccagggttgctatggggcagtgggctcagctctgggctctgggatccacaggagatgaacaactaccggckggccatgcagaagatggcagaggacatcctgtctctgcggagacaggccagcatcctggaaggagagaaccgcatactgaggagccgcctggcccagcag

SEQ ID NO: 553446 - DNA, 201 bp, Homo sapiens
aaccagtagaggtgttcccagagcctcttaagtgggaggcagggtggagaggaccagggctttggcccttagatgcccgtggtcacaggaatcttttgcarggcccccggctccagcctaggccacctgagcccacacagtaatccagagagggaggacagaagggcttctgggaaaatcccttgaagtgatcattgcctc

SEQ ID NO: 553447 - DNA, 201 bp, Homo sapiens
ttaggcccttcactggcctgcaggatggaatccaagctcctgagattgccacacccctacttactccccaaccagcactctgccctccaggaagtcaccgrctttgttcctgatcatacactctctctcctccctgcctttgccacagtgtctcctctgcccaagagccctctcccctaccccgggtaacacctgctcacc

SEQ ID NO: 553448 - DNA, 201 bp, Homo sapiens
agaggtgttcccagagcctcttaagtgggaggcagggtggagaggaccagggctttggcccttagatgcccgtggtcacaggaatcttttgcagggccccyggctccagcctaggccacctgagcccacacagtaatccagagagggaggacagaagggcttctgggaaaatcccttgaagtgatcattgcctcctgctag

SEQ ID NO: 553449 - DNA, 201 bp, Homo sapiens
tgcccaagagccctctcccctaccccgggtaacacctgctcaccctcctagagtgagctcaggctatcaccacctccaggaaggcttcctagacctggggytaggaaaagagactcctgtaagctctcctctgccacagatgtcactgccatctccttggtgtagatgggagaccatcacaagcagggacggtctgggctg

SEQ ID NO: 553450 - DNA, 201 bp, Homo sapiens
agccagggccgagatccctctccatgccctgggggagccctctctctcagagagcagccaggcttggtgggggagggggataggcacctgtggaggcctayaggactagtctccgaggagtggagtccagcagggaccgtctgactgagacagggacgcggcctcaccagaagccatgctctccctccatctccttcctcg

SEQ ID NO: 553451 - DNA, 201 bp, Homo sapiens
tggtcaggctgcctgactgtttggccccctcaccctcaccccgccacccctgaggtctcgggaaggtgtcaagcccacatggcccagagctttgctttctkcctggacagcaggctcaggccctggttgtcctggccatcagggattagccctgctgcccatggtcctccaattgtccctctctgtgtctgcagttagagg

SEQ ID NO: 553452 - DNA, 201 bp, Homo sapiens
cagggctcttcccccacccaatgtggggcattcctgaggcagcaaagctctaaccagggaggattctggcaggaggtgaccagtggggaagggttctttgwggaagagtgaacagggcctgtgagaccaggactggggcctgcccctcaccacctgctgaatgcccagccctgtactcacctgggctgagagcaagggctg

SEQ ID NO: 553453 - DNA, 201 bp, Homo sapiens
acctgctcaccctcctagagtgagctcaggctatcaccacctccaggaaggcttcctagacctggggttaggaaaagagactcctgtaagctctcctctgycacagatgtcactgccatctccttggtgtagatgggagaccatcacaagcagggacggtctgggctggtctgggctccatggccccagtgtggacatggc

SEQ ID NO: 553454 - DNA, 201 bp, Homo sapiens
cttgtgggggacccactgactttccagtgtagatgtggatgtgggaccagggttgctatggggcagtgggctcagctctgggctctgggatccacaggagrtgaacaactaccggcgggccatgcagaagatggcagaggacatcctgtctctgcggagacaggccagcatcctggaaggagagaaccgcatactgaggag

SEQ ID NO: 553455 - DNA, 201 bp, Homo sapiens
gggtttccccctgagttggtatcacaggacgtgatgtggccccggggagagaacattagtgtggctgccctcacatggccaggatgggtgaggatcaagtyataaccacccttccagggagctgctaagacttagggccatggcttggggctcctggtgctcactggccttgtgggggacccactgactttccagtgtaga

SEQ ID NO: 553456 - DNA, 201 bp, Homo sapiens
aggatttgcctgagtaagtcagggaggcagggaggcccttccctgccatcaaggtctttaggagctgaagggggagcatgtgcgtggcccttggcagatgrggagtgccaggctggtgtaggcgagaaacagcttctgggcagaggtagggaaggctttgaagataggggcccagaaggctgggcccatgggtggagtggc

SEQ ID NO: 553457 - DNA, 201 bp, Homo sapiens
catctccttggtgtagatgggagaccatcacaagcagggacggtctgggctggtctgggctccatggccccagtgtggacatggccttcagcaactgctgrtgactgtgctgcttccaatgtagcctttacactgagtctctgtgaccttgggaacactacttccaatctcagcttccccattttacaatgagtttataag

SEQ ID NO: 553458 - DNA, 201 bp, Homo sapiens
tagaaaaaatgaccctctgaatgagaagagggggtgatcagacccatggggtgggctgaggaactggcagccccctcccccaggactcactccatgagcaygctcacaacccggttatggacaggatcgtattaatttgccacatgcactttcctttcacaatagagcgtggccatctctgtgtgtcagtataataaaatc

SEQ ID NO: 553459 - DNA, 201 bp, Homo sapiens
tcttccctggagctaacccaggatagaggccccaggttcaagattcactgagtgacttcaggcaaatctctgcacctctctggtcccaatatcagaacttstgagatgggggttccagggctagaggtcttggaaggctggctggaccacctggaggaaggacatgtgctcctggaactggggagagagacagctccgcac

SEQ ID NO: 553460 - DNA, 201 bp, Homo sapiens
ccagcataaaaacaaagacaatcgccattcctcctccttcgtgggaactggtcctcagtttctatacaatgaaagtagtcacatcatcatatcttctgtgmccactgcccagggttataataagaaccattaaaagtgcgacggcaggcagaatggctcatgcctataatcccagcactttgggaggtcaaggtaggagga

SEQ ID NO: 553461 - DNA, 201 bp, Homo sapiens
tggcactgttcatgccccctctctctccacagcaaccccccttggggtggggtgattttcccattccacggatgaggacgctaaggctcagagaacagcckcccttccagagccaaagcgaaggtgtcggtgcagcaaaggccaccagcgctcagtggcagtggggcaattcaaacccaaggacacctgacatttctcacc

SEQ ID NO: 553462 - DNA, 201 bp, Homo sapiens
cccaccacaggctgaagctgagtgtctgtgggaggcggctgccctctgctgactgcaaaggcaaaccacatgcagatggcctgggcctgccagcgatggaycctggggatccggggaaccctgagattgggtggccgcccaaggaaggggacagaggagagggtgtgtgcctggtccagcaaacccaccctctgcacccac

SEQ ID NO: 553463 - DNA, 201 bp, Homo sapiens
gaaatgggtgtggaggagagcagcagcctccaaattatacctgcctgggcaggggcttcacgcaccaactcttgagcctcacagcaacaccaggcatctcygtgtgaggactctgaggctcagaaaggtgaaggggcctggctgaactcacactgcatgtgagtggccaagctggcctgctgatctgggcctgactgcaaa

SEQ ID NO: 553464 - DNA, 201 bp, Homo sapiens
acaaaaataaaaataacagagctctgctcatgccccaaaacagctgagttggagaacaggagggtcttagaaaaaatgaccctctgaatgagaagaggggktgatcagacccatggggtgggctgaggaactggcagccccctcccccaggactcactccatgagcacgctcacaacccggttatggacaggatcgtatta

SEQ ID NO: 553465 - DNA, 201 bp, Homo sapiens
accccaaagcagaacatttggaatcacagaatattgggcagggcaggggcacaggagagttttctctccatcccaggactcgccggaggtgagttctgttraaagcacacctgactcatggacatccaggtaaagtgtgagggatgaggtcaactgcctcacaggttcttcacttcactcaaagactcccagtgcgttaat

SEQ ID NO: 553466 - DNA, 201 bp, Homo sapiens
gatcaagttataaccacccttccagggagctgctaagacttagggccatggcttggggctcctggtgctcactggccttgtgggggacccactgactttcmagtgtagatgtggatgtgggaccagggttgctatggggcagtgggctcagctctgggctctgggatccacaggagatgaacaactaccggcgggccatgc

SEQ ID NO: 553467 - DNA, 201 bp, Homo sapiens
gatcaggacagggacatgggaagcaggagagcccatctcaccaacatctgtggccgtgtctctaggcttccctatgctctcagcctctggccttcccttgsgttctatgggagagaacctgccggttgaactttactcggtgctgctggcagaaaacgcgaagctgcggacggagctggataagaaccgccaccagcaggc

SEQ ID NO: 553468 - DNA, 201 bp, Homo sapiens
ctgtctctgcggagacaggccagcatcctggaaggagagaaccgcatactgaggagccgcctggcccagcaggaggaggaagaggggcagggcaaagccartgaggcccagaacacgggtgaggatgtgcaggccaccaagggcacccgggcttctgcctgggcccaggctccaggttgtgcaatagggtggctgggagct

SEQ ID NO: 553469 - DNA, 201 bp, Homo sapiens
ttgccaggtcatggcccactggattctggatactctgaggcctggtttgtcaggcaatatgcccttgagcaggtcaccccctgggaatggggggtactcaygcaccccgctttgcacaccacagagtgccctcacccactccatggacctcaagcagccctcagagctggagcccctgctgcccagctcagactctaagct

SEQ ID NO: 553470 - DNA, 201 bp, Homo sapiens
ttaaaagtattgggaaatttagattagccaagagagacctctctgacattcaaaggacacctacaggagttctgtttggcaaatctggcaggagcagggtmtgggtcaaaggatttgcctgagtaagtcagggaggcagggaggcccttccctgccatcaaggtctttaggagctgaagggggagcatgtgcgtggccctt

SEQ ID NO: 553471 - DNA, 201 bp, Homo sapiens
ttcctaagcatcctgttaggtaattccaagaaagcacagaaggtaactagtcataaggttagccattactatttcccaaaacaaagggctacttcgctacytctcttaacattaccttagtcctgttttgattttaaggcaaattctacctagctcctgtttcttagctggtgaaaaggggcagaaaaggggacagtaaaa

SEQ ID NO: 553472 - DNA, 201 bp, Homo sapiens
aaaatacaaaaattagccacgcgtagtgacacatgcttgtagtcccagctacttgggaggctgaggtgggaggatcgattaagcccaggaggaagaggttrcaatgagccgagattccccagcctgggtgacacagcaagaccctgtctcaaaaaaattttttaaaaaaatgccgtaagtttaaaaagaaaaaaatctgct

SEQ ID NO: 553473 - DNA, 201 bp, Homo sapiens
caaaaaagtattataaacaagcaaattctgccaacagcatccacaaatctgcatttagcatcctcagggggtatctttgaggggccattcaaaatgaactagacgtgcagtctcagcagctgcaatagtgaggcttatttcccccagtgtgctctccctgtgaacactgtcagttatggtccacatttctctccccaccct

SEQ ID NO: 553474 - DNA, 201 bp, Homo sapiens
attagagacattaatttagtactcttctaaggaaacagagccactaagaacaaggacttgggattgaacccaggtctgtctgtcctcctacaatacaataycctgggtagaatttttctgtttaggaggcagtaaaagggacaatatactaaaatcatctaatgcagctaagatttgcttaaacttctcatgcccataatc

SEQ ID NO: 553475 - DNA, 201 bp, Homo sapiens
ggttattctcctttctcaatgaggaaaccaactattagagacattaatttagtactcttctaaggaaacagagccactaagaacaaggacttgggattgamcccaggtctgtctgtcctcctacaatacaatatcctgggtagaatttttctgtttaggaggcagtaaaagggacaatatactaaaatcatctaatgcagc

SEQ ID NO: 553476 - DNA, 201 bp, Homo sapiens
cgaggtcaggcgggcagatcacgaggtcaggagtgcaagaccagcctggccaacatagtgaaaccccatctctactaaaaatacaaaaaattagccaggcrtggtggcaggggcctgtaaccccagctactcaggaggctgaggcaggagaatcgcttgaacccgggaggtggaggttgcagtgaaccgagattgtatcac

SEQ ID NO: 553477 - DNA, 201 bp, Homo sapiens
tcagtaagtcaagatttcaggctacagttaagatgtttccccccaccttaaaagcacctgcttgcctgttaaaataccacaaactataagaaaaaattaastgtacagtaaaacctaaaaccaagtaaatattagtaaatattacatcctcagaaactaatggatagctccttgacctggccactgatatcatttcttcct

SEQ ID NO: 553478 - DNA, 201 bp, Homo sapiens
ctactagcaacactgtcagtaagtcaagatttcaggctacagttaagatgtttccccccaccttaaaagcacctgcttgcctgttaaaataccacaaactrtaagaaaaaattaactgtacagtaaaacctaaaaccaagtaaatattagtaaatattacatcctcagaaactaatggatagctccttgacctggccactg

SEQ ID NO: 553479 - DNA, 201 bp, Homo sapiens
gggcgtggtggcgggcacctgtagtcacagctactcgggaggctgaggcaggagaatggcgtgaacccaggaggcggagcttgcagtgagccgagattgcrccactgcactccagcctgggcaacagagcaagaccccatctcaaaaaaaaaaggaataaagtacagactttagtaggtatcaatatcagttcattaactc

SEQ ID NO: 553480 - DNA, 201 bp, Homo sapiens
ccacctcagcctcctcactagctgggactggagccgcccgccaccatgcccatataatttttgtattttttgtagagacgagggtttgccatgttgcccargctgttctcaaactcctgagctcaagcaatccgcccaccctggcctcccaaagagctgggattacaggtgtgagccacagcactcagcccataaccctga

SEQ ID NO: 553481 - DNA, 201 bp, Homo sapiens
atggtgtcctctcggatactggaatagaaaaaggacattgggaataagctttaaaaaaaaaaaaaaaaaaaaaaaggaataggccgggcacggtggctcaygcctgtaatcccagcactttgggaggccgaggcaggcgggtcacgaggtcaggagattgagaccatcctggccaacacggtgaaaccccgtctctattaa

SEQ ID NO: 553482 - DNA, 201 bp, Homo sapiens
gtaagtattattaatcagtaacagtgtattttaatccctaaactacctctgatctctagccctgctgttttttctacttttttttttttttttttttttttgacacaggatctggctctgtcacccaggttggagtgcagtggcgcaatctcagctcaccacaacctccacctcgctggctcaagcaatcctcccaggctc

SEQ ID NO: 553483 - DNA, 201 bp, Homo sapiens
tggtgaagatgcaaagtaactgaaaccctcatactgttggtgaaaatgcaaaatggtagaaccactttggaaaacagtattactctgcaaaaaaaaaaaaagaagaaaaaagaaaaagaattgatacccactacaacatgaatgaatcaactgcattaggctaagcgaaagaagccagactcaaaaggttatacacaattc

SEQ ID NO: 553484 - DNA, 201 bp, Homo sapiens
tgtaagtattattaatcagtaacagtgtattttaatccctaaactacctctgatctctagccctgctgttttttctacttttttttttttttttttttttttgacacaggatctggctctgtcacccaggttggagtgcagtggcgcaatctcagctcaccacaacctccacctcgctggctcaagcaatcctcccaggct

SEQ ID NO: 553485 - DNA, 201 bp, Homo sapiens
aatatgacagaggcttggggttataacctattctacttttacgcctcagctattgaacaattttgaacaatcagagacaaaaaggcttaccagaaaatacrtgattaacagtatgtcaaacaaagtaactacagagattttttactttaagatgtctgctgtttgtgtacccagtcatgtacaaaggcaaagttaggaggt

SEQ ID NO: 553486 - DNA, 201 bp, Homo sapiens
gttggccatgtaaatgtcttcttttcaaaattgtctgttcatgtccttcgcccactttttgatgggatttttttgtagccatgctcctttcaataaggtatcattaaaataaatgttaacactttcaagttccagtttgtagtctacatgtttatagcatcatgagtacaataagctcctagtacaacaaagtaacttgag

SEQ ID NO: 553487 - DNA, 201 bp, Homo sapiens
aaacatcaagcgcagcagcaaagccatatttgggggctcagccattatctgtttagagtctaaaaaggacaaattgcactcacagattgcataggtaaccygtgacatcagtgagaggggccagataagccacgaccgcagctcacctcctaagagtgcctgctgccgtcccctgcagcaacccaggccatcgtgacctct

SEQ ID NO: 553488 - DNA, 201 bp, Homo sapiens
tgttggccatgtaaatgtcttcttttcaaaattgtctgttcatgtccttcgcccactttttgatgggatttttttgtagccatgctcctttcaataaggtatcattaaaataaatgttaacactttcaagttccagtttgtagtctacatgtttatagcatcatgagtacaataagctcctagtacaacaaagtaacttga

SEQ ID NO: 553489 - DNA, 201 bp, Homo sapiens
cctcatactgttggtgaaaatgcaaaatggtagaaccactttggaaaacagtattactctgcaaaaaaaaaaaaagaagaaaaaagaaaaagaattgatayccactacaacatgaatgaatcaactgcattaggctaagcgaaagaagccagactcaaaaggttatacacaattctaaacacgacatctgaaaaggcaaaa

SEQ ID NO: 553490 - DNA, 201 bp, Homo sapiens
ccaagcttataggccacggcaggaagagatgggaggattcctctctggggaagctcatcaagagaagaaggcctaaagataatcatagttggggacccccyaccccaagaaaggtagatccctgaccatcatgctgcagcacagcttgccctcaacgtacccctttcaatcagcttttagcaccttatatacaaataagga

SEQ ID NO: 553491 - DNA, 201 bp, Homo sapiens
tttgggaggccgaggtgggtggattgcctcatgagttccagaccagcctgggtaacatagtgaaaccccatctctacttaaaaaaaaaaaaaaaaaaaaaattagctgggtgtggtggcatgtgcctgtagtcccagctactttggaggctgaagtacgagaatcacttgaacccaggagatggagggtgcagtgagctga

SEQ ID NO: 553492 - DNA, 201 bp, Homo sapiens
gagaggccaaggcaggaggatcacttgaaccaagagttgagaccagcctggtctggtctcatagtaagaccctgtctctacaaaaaaaaaaaaaaaaaaaatacaaaaattagctgggtgtggtggtgtgcacctgtactcccagctacttaggaggctgaggtggaaggattgcatgagtccaggaggttgaggatgcag

SEQ ID NO: 553493 - DNA, 201 bp, Homo sapiens
tatgcctagaggaagagccagtgccttcccctcccttaaacacgcgcgcgcgcacacacacacacacacacacacacacacacacacacacacacacacamaatttcagtacagacgagggaacgtccagtctggcctgccaaagaagaaaagagtaagctcagatttgagaatgtaaaccctaacaaaaacaaaagctgc

SEQ ID NO: 553494 - DNA, 201 bp, Homo sapiens
tccttaccaggacccaaatatgcctagaggaagagccagtgccttcccctcccttaaacacgcgcgcgcgcacacacacacacacacacacacacacacacacacacacacacacacaaaatttcagtacagacgagggaacgtccagtctggcctgccaaagaagaaaagagtaagctcagatttgagaatgtaaaccct

SEQ ID NO: 553495 - DNA, 201 bp, Homo sapiens
ccaaactccccttcccttcccagttttcagcttttgctgatccttcctcacagctcatttttagctatatttttaccaccactccagtatattgtcttcccatgtcctacttattacccactccctgccatacagcaccagcaacacaaaaggcacacacaggttaggacataaagggtctgtatctcccaccacccacaa

SEQ ID NO: 553496 - DNA, 201 bp, Homo sapiens
ccccgcgccaggtaccaggcgtagcccaggcccttgccaagcccgagggctacagagaaggcgggaaagggggcgagcgggcgcgccgggcgggggtggtmccagaactcgagcgtgccccaagcgttcccggttcccaccacaccggttccaggggaggccggctcggtccggcgcgggggaaccgcgcaaggaaggtgc

SEQ ID NO: 553497 - DNA, 201 bp, Homo sapiens
aactattttaaacactaaaacaaatcctccccacaaatatataaacactcttctttattttgcttctgtaaatgtattcctgtaacacaaactttattttrtcataaagataaaaataaagccatttctttttctatgagactctcaaccctactctcaacccaactgagacaaaatctttacaattaggttagaaatgtc

SEQ ID NO: 553498 - DNA, 201 bp, Homo sapiens
ttagggatgcaaggtaatcccattttagggatgaaaaaaatgagaaaaccaagacccagaaaggcttaagagttctttgtacagtgaacactttcataacstggggagaaagggggcagggagaggttctggtttttccaccactgaaatatgcatttaagagacagttgaaaaccaaactattttaaacactaaaacaaa

SEQ ID NO: 553499 - DNA, 201 bp, Homo sapiens
ccaaagaaaaaaaatggctaaaaaataatttttctgatgaaaaaaactatttaatttaccaccaggagtcaacacacgtttccaaattccacaaatggggmtttcttaaggttcacacatttgactctataaatgatcgctttggtttggctgcagtgaggtggctcctgtgggcttcattactaatatgaggctgctgtt

SEQ ID NO: 553500 - DNA, 201 bp, Homo sapiens
tctccttgatcacacccacctgcaggggaacctaaagacaacaccgaccctagaagggcaagttccatcagcaacacagctaaaccaaaccaggagaactsctttcactctccacaagataatgtcctctgaaagccttcttcaaagtcctctatcattccaaatccatgctcctgataatattattaaaaaccaagaatc

SEQ ID NO: 553501 - DNA, 201 bp, Homo sapiens
aaatataaaaactgctggtgaagatgcaaagtaactgaaaccctcatactgttggtgaaaatgcaaaatggtagaaccactttggaaaacagtattactcygcaaaaaaaaaaaaagaagaaaaaagaaaaagaattgatacccactacaacatgaatgaatcaactgcattaggctaagcgaaagaagccagactcaaaa

SEQ ID NO: 553502 - DNA, 201 bp, Homo sapiens
tgaagacaaaacagtatgatgttaaatgacttgggaaaaacagcagcgggagggaggaaggcagcgattgagctgtacctgaggctgggggcacgaggggrgactggcgtcactgaatgggaccacagaggtgggaggcagggggttttactctttccatttcctaaacgaagtaaaagcagttggaggaagagaactttg

SEQ ID NO: 553503 - DNA, 201 bp, Homo sapiens
gcagaactccacctaagccttattttcattcatgcctggttgtgagctcacaaggaggaaatctctagctcttacttcctctgacttttggtagtaattayaatgtgccataaagaatctaataccagctgggcatggtggctcacgcctgaaatcccagcactttgtgaggctgaggtgggaggatcacttgagcccagg

SEQ ID NO: 553504 - DNA, 201 bp, Homo sapiens
ccaaatgcaagctgctgtcagagcagactcctgaaaaggacaaagctggagcctcaccaggcgtataaagcaggttgtgtggctgtgctgtgacagcctastaataaatctgtatgggcagaactccacctaagccttattttcattcatgcctggttgtgagctcacaaggaggaaatctctagctcttacttcctctga

SEQ ID NO: 553505 - DNA, 201 bp, Homo sapiens
tgcttgaggccaggagttcgagacgagcctgggcaacatggtgagaccctgtctctacccgcccgcctcctacacccctgacaccgacaaaaaaaaaaaaagtaattgtggtcttaggccacctttagtctgcactcggtgctacttgttctcttgtgctgacaaccttatgcttcaaatatgccaggacctaacaggcgt

SEQ ID NO: 553506 - DNA, 201 bp, Homo sapiens
ggcgggtgggtcacctgaggtcaggagtttgagaccagcttggctaacatggcaaaactctgtctctactaaaaatacaaaaattagccgggtgtggcggygggtgcctgtaatcccagctactcgggaggctgaggcaaaagaatcgcttgaacccaggaggcagaggttgcagtgagccgagactgtgccactgcactc

SEQ ID NO: 553507 - DNA, 201 bp, Homo sapiens
tcctgggttcaagcaattctcctgcctcagcctcccgagtagctgggattacaggtgcccaccaccatgcccagttagttttgtatttttagtagagacarggtttcaccatgttggccaggctggtctcaaactcctgacctcaggcaatccgcccgccttggcctcccaaattgctaggattacaggtgtcagccatcg

SEQ ID NO: 553508 - DNA, 201 bp, Homo sapiens
acagtccgggagcggtggctcatgcctgtaatcccagcactttgggaagccgaggcgggtggatcacgaggtcaggagatcgagaccatcctggctaacayggtgaaaccctgtctctactaaaaatacaaaaaaaaaattagctgggcatggtggtgggcgcctgtagtcccagctactcaggaggctgaggcaggagaa

SEQ ID NO: 553509 - DNA, 201 bp, Homo sapiens
agcaatttccatttttttttttttttttttttttttttttttttgagatggggtcttgctatgttactcaggctggttatgaactcctggggctcaagcartcctcctgcctcagcctccccaagtgctggaaacagcaatttcttaaaggtaagttccactgttgactcaatctgcatcgatgaattttttgtactgtta

SEQ ID NO: 553510 - DNA, 201 bp, Homo sapiens
cttatcaacagagatccagactgaaaaatccatctccccaagccctcactcagggaaaactactgcccagcaccttcccctcacaactttttgtttaaaaygaaatattcaagcataagctacttttaacttcccccttttacttaaaccaagtgttatgagattaatccccccaaattaaccagaatgtaatactacata

SEQ ID NO: 553511 - DNA, 201 bp, Homo sapiens
ggtcaggaaactgaggttcaaataagttgttcttatctgaactcggcccacacatgacaaagcaggaaggaattcacaccctggtctatgcagttttgaarcccaggcactgaatcaccattgagcacttatacaactatcaaatctggattaaatatgcaattctagaaaaagcccaggcactgggaacttccaccaccc

SEQ ID NO: 553512 - DNA, 201 bp, Homo sapiens
aaaccaaaatagtgaccctccccacatctggaatggtgtgtttgtgtcaaagccagccacgtggaaagggctttccctactcagggtcccccacacaatcstcaagtatcgtcctagtttgtctccatgaaatcatactactacttcttcacagaaacttgctgtggtggccatttccccacacagctgactggtggctct

SEQ ID NO: 553513 - DNA, 201 bp, Homo sapiens
ccagtgggacctgatgcccaacaaatggaactgaatatagaagagcaatgatttttgtttcacaggccagatctgatctggaattccttttttttttttttaacaaatgagctgactgttataaagtaaacatcaaggaatgtaaaagccaatgctccactctctcagctacacatggagtcagtgctgcctgcaaagaac

SEQ ID NO: 553514 - DNA, 201 bp, Homo sapiens
aaagcatccacgtgcctgcctgtttaactgtcttagaacggttctattcagatccaacccctaactcatagactcaaccctgaggagccaggatactcaaygcagggactcatgagttgggcagacctaggttcaaatactgtacccaggcctggcacggtggttcatgcctgtaatcccagcactttgggaggccgaggt

SEQ ID NO: 553515 - DNA, 201 bp, Homo sapiens
gattaatgagacccctgtttacatctggagagaaaattaaataacaaaacaagaacaaatacactgaaggggaatattgagacactatggggaacatgtaagaggggtctaatcagtcagctactgggtagggctgtatgagattaagtattaagaacctcctgcagtttaatatttcattgacaacacaaaaaaccaaac

SEQ ID NO: 553516 - DNA, 201 bp, Homo sapiens
gcagaggctacagtgagccatgatcatgccactgcagtccagcctgggtgatagagtgagaccctagcttaaaaaaaaaaaaaaaaaagataagaaagaamcaataacgaaaatgttttttctcacagaagttctgagtcacagtggttctagggctggctaatcagcagctaaaataagtcattgtgggctggggatggt

SEQ ID NO: 553517 - DNA, 201 bp, Homo sapiens
aaaaagtcatccactcagtcatcaaatgctttgctctgcaaggctctgaaatacgactgcactctttcttcaccttcccaaagttttttttttttttttttgagacagggtctcactctcttgcccaggctggagtgcagtggtgctatctcggctcactgcagcctcgaacttccaaggctcaagcgatcctcccacctc

SEQ ID NO: 553518 - DNA, 201 bp, Homo sapiens
caccttatagagataaaaggctccagagaacctgatctctctctctctctctctctctctctctctcacacacacacacacacacacacacacacacacamgtatgtgtatgcacaattagtggtatagctaataccaattcttctgattatacatacagcgtatttttaaaacaccatttgcttgcatggtgctcattac

SEQ ID NO: 553519 - DNA, 201 bp, Homo sapiens
cgaacccaggaggcagaggctatggtgagctgagacagcaccactgcactccaacctgggcaacagagaaagtttccatctcaaaaaaaaaattttttttwaattaagccaggtgtgatggtgcacacctgtagtcccagatacttgggagtctgaggggacaggatcacttgagcccaggagttggaggctgcagtgaac

SEQ ID NO: 553520 - DNA, 201 bp, Homo sapiens
tgagaggaggcagataggctgagaaccatcaaccccaccttatagagataaaaggctccagagaacctgatctctctctctctctctctctctctctctcwcacacacacacacacacacacacacacacacacacgtatgtgtatgcacaattagtggtatagctaataccaattcttctgattatacatacagcgtatt

SEQ ID NO: 553521 - DNA, 201 bp, Homo sapiens
aaaaccctgtctcaaaaactaaataaacaaatgaagtaaaacagaataaaataaaatatggtaagaggaggagaaggtggaagatgatctggttttgatasctctgatccatgcacggtgctaagcctttcatacagggcttcgcctttggccttggcataacctctatgaaacaggaattattgtccccattctacagac

SEQ ID NO: 553522 - DNA, 201 bp, Homo sapiens
tttgttgaagcaaaacatttcagaaaggaagagattaaacaaaactttgtaatggtagaggaaaagtgtaaaaagctcaagtaccacttgacttgaagtcygtagggaatcaagttcattctgagagaacaggcactatctgggaaggagcagtgtcagtccttgcctggctgagatcttttcttgtccaagccagattca

SEQ ID NO: 553523 - DNA, 201 bp, Homo sapiens
gtgttttcatgcctcccagcctctgcttcttacgctccttttctctagaaagcctctcaccctctttcccacctggcaaagtcaccttcacctcctccccytcctccctgaagctttccccagccactgtcaactcctcctcctccccctactcctcctcctcctgcactccctaacaccttgcagtggtactgtgtgtgc

SEQ ID NO: 553524 - DNA, 201 bp, Homo sapiens
ttagcctggcatgcaaggcctttgcaatctggctctcttctccctgccactgtacccaaatgccaagcaccgtctgttctagtaacaacaccccaaacacracttgtgttttcatgcctcccagcctctgcttcttacgctccttttctctagaaagcctctcaccctctttcccacctggcaaagtcaccttcacctcct

SEQ ID NO: 553525 - DNA, 201 bp, Homo sapiens
catatgtaagaaacctgcacattgtgcacacgtaccctagaacttaaagtataataataataattttttacaaaaagcctcaactcacgttcagcgacagsttgcaaatgctgcaagagcttctaagcaccctaggtttttcctacataaggttgatgacctcactggcatagtatctaagcattcactgcaggacagcac

SEQ ID NO: 553526 - DNA, 201 bp, Homo sapiens
catttttagataagaaattaagatccagtgtgaatgagtgatctgtctaaggtcattcagagaaaaaattttaaaggctttcattaaaaaaaaaaaaaaaagcctttcattcatttctataagcacatagttctgaatgtagtctcctgtccacatccttgaaataggatttggcagattagaatctgtaaactagagcca

SEQ ID NO: 553527 - DNA, 201 bp, Homo sapiens
ggaggaggaagggaggcaaaatgaatggagacaggtataagactgcccctctgtctggaaggtttctcattatcccattctgtaaaaacccaggggagatmttaagcaatgacagccatggggagcctcagtttgaagtttccaagagtcccgccctcgggtaatgtgctacagggagggaaaggattgcctaatgggatc

SEQ ID NO: 553528 - DNA, 201 bp, Homo sapiens
catgagaggaggcagataggctgagaaccatcaaccccaccttatagagataaaaggctccagagaacctgatctctctctctctctctctctctctctcwctcacacacacacacacacacacacacacacacacacgtatgtgtatgcacaattagtggtatagctaataccaattcttctgattatacatacagcgta

SEQ ID NO: 553529 - DNA, 201 bp, Homo sapiens
cccatgagaggaggcagataggctgagaaccatcaaccccaccttatagagataaaaggctccagagaacctgatctctctctctctctctctctctctcwctctcacacacacacacacacacacacacacacacacacgtatgtgtatgcacaattagtggtatagctaataccaattcttctgattatacatacagcg

SEQ ID NO: 553530 - DNA, 201 bp, Homo sapiens
gagcacaggttcccatctgtctgccacccaactggttcccctccctggagaacagccatcagtgtactgtttccagtttcctctattaaattttttttttytttttctttttttttttttttttttaaggcggagtctcactctgtggcccaggctagagtacagtggtgccatctcggctcactgcaacctcgacctcct

SEQ ID NO: 553531 - DNA, 201 bp, Homo sapiens
aaaggctggccctcctcatgcggctaggagccagggtctccctggaattctgccttcccctggacaacattaagcagagttgctgtgtatgagcaaaacamacctctctgaggctgccacattacaaagtgaccaatccctggagcccgaccctttctgtgtatgctgtggtttcagagacaagagagtctggcccagcaa

SEQ ID NO: 553532 - DNA, 201 bp, Homo sapiens
aatacatacttacttcatatatgactgaatgcttactcaacagccctgtggtagggactgctgttatgcccattttacagataagaagcctgaagtcatayataggctcaataacttgcccaataccctagggctggcaagtggaaagatgaagattccaggcaatctagttcctggagctcaggcacatggcttcttcat

SEQ ID NO: 553533 - DNA, 201 bp, Homo sapiens
ctgaatgaaccaggcaggtgcccagccttcaccttcccgcccaagattcagagtggtactagctcaagtccaggtgttctgactttatccactccattccyaaaactaccttcccacattccaaattcacagaaaacagctcagggaggctgtgtaacctgtccagggtcatagtggggcaaagggactaaactgggacct

SEQ ID NO: 553534 - DNA, 201 bp, Homo sapiens
actgcttgagcccaggggtttgagaccagcctaggcaacatggcgaatccccatgttttgcatctctacaaaaaaatacaaaaattagccaggtgtggtggctcatgcctgtagtcctagctactcaggagcccaaggtgggaggagcacctgagtgtggggaggcagatgctgcagtgaactgtgattgtgccactgcac

SEQ ID NO: 553535 - DNA, 201 bp, Homo sapiens
gaaagtaaaaattatcccaagggtaacaagataccaacaaaaaagacacacaagctgaaaacaaaacgaaaacactttttcttttttttttttttttttgrgacagggtcttgcctgtcacccaggctggagtacagtggcccgatctcagctcactgcaacctccacctcccggggttcaagcaagtctctcggcctcag

SEQ ID NO: 553536 - DNA, 201 bp, Homo sapiens
aactgggttggaccctgtcctccttttccttcacaacccttgctatgtatttggtgactccctcttgaggcaactaaaaacctgtaagcacaggcagactwtgctcaggcttaaaacagatcacgttctacacacaaattcctgacaaggctctcgtttacaaatgatgcagacagacaacaagatctgtgttttcctttt

SEQ ID NO: 553537 - DNA, 201 bp, Homo sapiens
aatttcattttttaaatgcagcttatttaaaaatttgtaacaaacacaatacccaccccccacccaaccaccacaacatttgctgttactaaattcccccytttttttttttttttgagacaggatcttgctctgttgcccaggctggagtgcagtggtgcaatcttggctcactgtaacctccacctcccaggttcaggg

SEQ ID NO: 553538 - DNA, 201 bp, Homo sapiens
ctctggctaagttgctcttgctgcttaacaggcaggccctgaccttgtatccagtaacttggctttcttgctcctgcattccacaggcctaaatcaccctytagctcagttctgataaggagcctgagaccctctctggataatctgctgctaactcctcaggggctgaggagctgccttgctcttggcaatcttccaggg

SEQ ID NO: 553539 - DNA, 201 bp, Homo sapiens
cagcaccctggctctattcccagcacgtgcctgggatggctctgtttctaaatacagcctcgaacctatatatttccagtttccagaatagggaagtcttyttacaagtcagtcaggcagacagacctctcaggctgaaaatggggcaacacaagaacaggccttcaaaaggtgtggtccccatgccagggagcctatgaa

SEQ ID NO: 553540 - DNA, 201 bp, Homo sapiens
tgagccaccctccccagcctcttatatatacttctaaagatactctatgcatatatattttttgttaaataatattcttggaaaattttccttaagagcayacataaacctacctcattcttttaacatctgcattccactctatcgtatggatgtaccaaaatttacttaatcagaccgtgcactgtaaaaatgcatgag

SEQ ID NO: 553541 - DNA, 201 bp, Homo sapiens
ccacctcggcctcccaaagtgctgggattacagacgtgagccaccctccccagcctcttatatatacttctaaagatactctatgcatatatattttttgktaaataatattcttggaaaattttccttaagagcacacataaacctacctcattcttttaacatctgcattccactctatcgtatggatgtaccaaaatt

SEQ ID NO: 553542 - DNA, 201 bp, Homo sapiens
ctttacataacatcacttaacatttataattcttaaaatattttaattgatgtgagagcacagatggaagagtgattaattttgactgaaataatgtatgygaaaggtgaaaactctaaaaacccccatgaatgaatgctgttattgtcagagcatgaaataatctagcattatgcataatactatgacactgtagtagca

SEQ ID NO: 553543 - DNA, 201 bp, Homo sapiens
gaaggatggcttgagcctaagcactgtagaccagcctaggcaagtagacatcccatatctacaaaaaataaataaaagattagcagggtttggtagcactygcctgtagtcctagctactcaggaggcagaggctggaaaattgcttgaccccaggagttggaggctgcagtgagctatgcaccactgcactacagcctgg

SEQ ID NO: 553544 - DNA, 201 bp, Homo sapiens
gttaaaaggtaaaatacattattttgaaagcataaaccaccacagggcagacaaatgactcagagcttccccagttttgttataggggaaaggctgaagcygggagaagagcctttagtatccagaggagatgccagaatatttgggaataggaagtcatggaaagaagcttctagaacatcactcttcatctgagatcag

SEQ ID NO: 553545 - DNA, 201 bp, Homo sapiens
atggcttccactgccaggtttgcaagcatctgtctctccagctagtccttccattagatgtattgaattattggaaactggtaactctcatgtagctgacyatttctctggcacctgctgggtgcctgggacatggagcctgataaaatcagtttctgccctgaaagacatttcacggttctcagtttatcaaggttttat

SEQ ID NO: 553546 - DNA, 201 bp, Homo sapiens
tggctgggactacaggcacatgccaccacacccagctatcaaataattttagtattttttgcagacttggggggtcttactatgttgcccaggctggtctygaactcctgggctcaaacagtcctcccaccttggcctcccaaagtgctgggattttaggtgtgggtcaccatgtccagccatcaagttatttttaaatta

SEQ ID NO: 553547 - DNA, 201 bp, Homo sapiens
tggagcctgataaaatcagtttctgccctgaaagacatttcacggttctcagtttatcaaggttttattccctcaaacctcgattagacatgggcatttgrcaaagagataaagatagtgcccaaagctttccatattatttttaggcaatgccatatcactttaaaaacaaccagtatatgtacatgatgaaatactatg

SEQ ID NO: 553548 - DNA, 201 bp, Homo sapiens
gacattatggctaagtgaaataagccaggcacggaaagacagcatgatctcacttatatgtggaatctaaacaagttgaactcacaacagaagcagagaayagaaagaggctgggagacagggggacctgcggaaagggtaggcaccggtcaaagggtacgaagattcagttagacaggaggagtaacttctggtatctac

SEQ ID NO: 553549 - DNA, 201 bp, Homo sapiens
taaaattgacaccctaacatcacaattaaaagaactagagtagcaagagcaaacacattcaaaagctagcagaaggcaagaaataactaagatcagagcakaactgaaggagatagagacataaaaaacccttcaaaaataaaataataataatgaatccaggagctgttttttgaaaagatcaatgaaattgatagaccg

SEQ ID NO: 553550 - DNA, 201 bp, Homo sapiens
aggaccttgaggatgcagtgagctatgatcctgctactgtactccagcttgggcaacagagtgagaccttgtcttggcaaaaaaaaaaaaaaaaaaaaaaatttaaggtgtaatttgaattccacatgttttctttctccttgtctctcagaactggttcagaattcagacagggaaaactgacctaccatttattgcctg

SEQ ID NO: 553551 - DNA, 201 bp, Homo sapiens
aaccctcctctttagccaaacccaagggaactaataacacaactcagcttgtcctcacctataccctgggcccgaaagaccacagaaatcacatcactgtrcagaaagacgccactgcacttgaattctctgatccaaaagaccctgaatattctaaaaggccctcctcccactccccgcaaccactgtttcaaacttttg

SEQ ID NO: 553552 - DNA, 201 bp, Homo sapiens
gtgtctgggatttgctttaaattgctggggataaaatataggtcaaaggttccaaggttgcagttacgcagaatgagtaagtctagagatctaatgtatgrtatgaaggctatagttaacaacattgtattgcttagtggtactttgttaagagagtaggttttaggtacacttaccacaagaaaagaaagaaaagaaaag

SEQ ID NO: 553553 - DNA, 201 bp, Homo sapiens
gcaccactgcactccagcctgggtgacacagcaagaccttgtctcaaaacaaataaaaaaaacttaagtgacacaagcagcacacaagagggttacataaygtggtctcaggtttaggtggagcagatttttttcaaaagactagaagaaaagatgttcacagtagttctttctcgatgggatttccagattttctacaag

SEQ ID NO: 553554 - DNA, 201 bp, Homo sapiens
tctaaagtaaacacatgaaggtaacagaaactctcgagagggcatttccctcctcagcagctcacaaacgcctcactaaacccaaatatctgagacaaacycacatctgcacccagaggatcacaaataccactggccacgccttagaagttacaggttacaacctcaaaatctctgtgaaggagtcagataaaatttatt

SEQ ID NO: 553555 - DNA, 201 bp, Homo sapiens
aattgctggggataaaatataggtcaaaggttccaaggttgcagttacgcagaatgagtaagtctagagatctaatgtatgatatgaaggctatagttaayaacattgtattgcttagtggtactttgttaagagagtaggttttaggtacacttaccacaagaaaagaaagaaaagaaaagaaaaggaaaaaaggaagga

SEQ ID NO: 553556 - DNA, 201 bp, Homo sapiens
acaagcagcacacaagagggttacataacgtggtctcaggtttaggtggagcagatttttttcaaaagactagaagaaaagatgttcacagtagttctttytcgatgggatttccagattttctacaagaaatacttgcgggttgggggagggagtgccttcacagacattaactcatggtccaagaatcaaagagacaat

SEQ ID NO: 553557 - DNA, 201 bp, Homo sapiens
aaaatattttgtattaatgtagtgttcagattgtaatgtgacattcttttttttttttttttttttgagactaagtctcactctgtcacccaggctggagwgcagcagcaccatcttggctcactgcaacctccgcctcccagtttcaagcgatcttctgcctcagcctccggagtagctgggactacaggtgtgcaccac

SEQ ID NO: 553558 - DNA, 201 bp, Homo sapiens
gtgagctccattttaactaaattgtacagaaattcggccctcttgcctgtacaatcggcctcaattagacaaaaataagtttgtaagtttggtaagaagawcctcgagctgatattaacaaactcactcaacaattcccatttaccaggaggtaataaacagtaatgaattttctaaggcttaaaacaacaaaaaccgaga

SEQ ID NO: 553559 - DNA, 201 bp, Homo sapiens
cattgtatatgtggtctgtcattcacctaaaccttatatggtgcatgactgttgttgaaatacctttcaaatttaaaagcaattttgcatacctgtgtaaraactatatttttcccctattccagagtgcacagcattattattgtcagttatgaggaaatgatttagaaattctaatgggacactttaatccttaggagt

SEQ ID NO: 553560 - DNA, 201 bp, Homo sapiens
agccctgttactacagcagggggcaattctggctcacagatagccgaagccactcgagacagcagagacacaggccaaagccagggccaagtggaagttgsgggcttgccatatacatatctgaacgcatctgcatcctcaaactttctgacctctcacactgttaccaagccacacagcagacaggcttccttccccatc

SEQ ID NO: 553561 - DNA, 201 bp, Homo sapiens
gtgcctcacccttctgagtagctgggattacaggcacccgccaccacgcccagctaatttttgtatttttagtagatactaaaatagtatctactagttcrcttgatctcgaactcctgacctcaagttcgcttaatctcgaactcctgacctcaagtgatctgcccatcttggcctcccaaagtgccgggattacaggca

SEQ ID NO: 553562 - DNA, 201 bp, Homo sapiens
aattgaattatctcatttacctgcacaatcctgtgactaagtactatgacccccatatgcttatatgaagaaacagaggcctgaacaggttaagcgacttrtgcaagaccacatggctagatgacagaacagagatttgaactaaagttggtcagacaggagagcctgtgctcttaacctgcggagcttgagtcctccatt

SEQ ID NO: 553563 - DNA, 201 bp, Homo sapiens
gtatcaagctcttactctatgccagatgcagaaacctaattgaattatctcatttacctgcacaatcctgtgactaagtactatgacccccatatgcttayatgaagaaacagaggcctgaacaggttaagcgacttatgcaagaccacatggctagatgacagaacagagatttgaactaaagttggtcagacaggagag

SEQ ID NO: 553564 - DNA, 201 bp, Homo sapiens
ctcccgtcagcctgggcatccccactccccgattcttaatttgggggtaataagcagggggtgtagttcgaagagttgcttctgctcatcgcaagaatcaytgtctagagaggaggacggaggaggtggcagaaacaaccccaggccaggatgatcagctctttggtgggaccagaggccaggaaaaggctgagtggcgag

SEQ ID NO: 553565 - DNA, 201 bp, Homo sapiens
ccaatttgatcaagtggaagaaagggaatcagtgattgaagatcaaatgaatgaaatgaagcgagaagagaagtttagagaaagaagagtaaaaagaaackaacaaagcctccaagaaatatgggactatgtgaaaagaccaaatctacatttgattggtatacctgaaagtgatggggacaatgtaaccaagctgaaaaa

SEQ ID NO: 553566 - DNA, 201 bp, Homo sapiens
tgctggtgatacccaggcaaacagggtctgtagtgaacctccagcaaactccaacagacctgcagctgagggacctgactcttagaaggaaaactaaaaarcagaaaggaatagcatcaacatcaacaaaaaggacatccacaccaaaaccccatctgtaggtcaccatcatcaaagactgaaggtagataaaccacaaag

SEQ ID NO: 553567 - DNA, 201 bp, Homo sapiens
tccgtgggtactggacatttattaactcttgcagcatttgggcctgctgcttctgcagcacagtggcgctggctccggtcattctgcctggcccaatgaarggtgaagtcacgagctagctgtggtggaaggcaacctggcaggattcaccgtcaatctgcatggaatttgggattctacatttccttgccagcacagact

SEQ ID NO: 553568 - DNA, 201 bp, Homo sapiens
aaaaaacaaaaatggtgacaaatgctatttaagggagaatttttttttttttttttgagatggagtcttgctctgttgcccaggctggagtgcagtggcaygatctcggctcactgcaagctccgtcttctgggttcacgccattctcctgcctcagcctcctgagtagctgggactacaggtgcccgccaccatgcccgg

SEQ ID NO: 553569 - DNA, 201 bp, Homo sapiens
tggtggagccaggtgagatcccaaagtactgaaattataggcatgagcgaccttgcccagcaccccccaaaaaagtattataaacaagcaaattctgccawcagcatccacaaatctgcatttagcatcctcagggggtatctttgaggggccattcaaaatgaactagacgtgcagtctcagcagctgcaatagtgaggc

SEQ ID NO: 553570 - DNA, 201 bp, Homo sapiens
acgatgaatccacccactccacttccctccacagctgaaggcagtggctgtgtctctgacctggatagctcagccttgagcagccttgctccccagcctaygtggccaactgtgttatcttgtcaaacgtggctctatcaagcagtcctgatggcacagcagaagccgaggatggggaacagacaggctcaggggagctgc

SEQ ID NO: 553571 - DNA, 201 bp, Homo sapiens
gtcacagcagctccttctcctggtcaggagggtcaagatcttggcccctccccacacccacactgcatcaagggacactgtggaggagttctacaggggcrctgtctgaagaatgaaacccgaaatcaccaaatctctgcccatcgtgtggagagataagttggagttgagagggagctgcccaggtactgagaggaaaag

SEQ ID NO: 553572 - DNA, 201 bp, Homo sapiens
acccactcactagtctgggtccaggttcctgctgataaagcaccatcctttttagttcacgagactcaaagcccctcctctttctcatggcctcccttccrtgtctggtaaacagccaaacaggtctccgtctcaccagtcctgactcccctccattcgcttccaccactctggggaggtcctcactatctcttgggtgga

SEQ ID NO: 553573 - DNA, 201 bp, Homo sapiens
acaaaaaaacaccctgttccctcgtctattttcacttttcatgccggctggttaattagctccacagcactcctgcagcactccttttgggaggtacccargcccagtgatcattaatcttctctcagtcacacctcatgctgtcaccatacaagcgaagtggatccaggataggtgtttagtcatcaagcaccctagttt

SEQ ID NO: 553574 - DNA, 201 bp, Homo sapiens
taattcctctagcacccctgggttagggtctccacaactgagctggtctcggcaaatattggttttttttgtttgtttgtttgttttgtaaagttttttttatttctactggggagggaggaggataaatagaactgttttccaatttgctctccactatatacacacatacccacacacatacataaacatacatacacc

SEQ ID NO: 553575 - DNA, 201 bp, Homo sapiens
ggggtgctactgaaaaggtacccaaaaatgtggaagcggctttggaactgggtaacatacagaggctggaacagtttgaagggctcagaagaagacagaaraatgtgggaaagtttggaactccctagagacttgttgaatggctttgaccaaaatacactgataatgatatggacaatgaaatccaggctggcatggact

SEQ ID NO: 553576 - DNA, 201 bp, Homo sapiens
ggcttgctgtcaataaatatgtgggtaaatcactgttcagggctctcagctctgaaggctgtgagacccctgatttcccactccacaccctatatttgtgygtgtgtctgtctgtctgtctttaattcctctagcacccctgggttagggtctccacaactgagctggtctcggcaaatattggttttttttgtttgtttg

SEQ ID NO: 553577 - DNA, 201 bp, Homo sapiens
aatggcatgaacccgggaggcagagcatgcagtgagccaagatcacaccactgcactccaccctgggtgacagagcgagactccatctcaaaaaaaaaaamaaaaaattttgaccaagctgcatataaactaaaaaaaaatacttattaaacagggcagaggaaggtactgaattaggagacagaaagagactgtgacccc

SEQ ID NO: 553578 - DNA, 201 bp, Homo sapiens
ctttatatatactaagctattcttcattaagattcacaaaatcctttaacttttcccagacatacaactagcacttggaaggatatcaagggaaaaaaaaatgtaaatagcaaattaagttagcaaagttagctatgataggaacttttatttgcttgtctgggtttctaagacaatgtacatagaaaattatcaccccga

SEQ ID NO: 553579 - DNA, 201 bp, Homo sapiens
aaagaagtgttccaaaaagactaaaagggaaaagatcataggcaaggtatgcagtttatgcctctttaaaaacaatgtgtacatcaaatagcaattacttwactcctaggatcaaacagggcggagataaatttttttaaaatcactgaaaaacagcctcaagcaaaactgtcaccatctaagaaaaatatttcaatccat

SEQ ID NO: 553580 - DNA, 201 bp, Homo sapiens
agggttctgcagcattgaacactgctttgactacaatgtgaggcccagagaggctaaacaacgtgacaaagaccactcaggcaaagccagcgtcggtgagytcgtgaggacgttcaagtcacactcaaccacagcacagtggaaacaataccacagaaatcctaaagcaaataaaagaaagctcttctttcatgttgaatg

SEQ ID NO: 553581 - DNA, 201 bp, Homo sapiens
ctctgacctggatagctcagccttgagcagccttgctccccagcctacgtggccaactgtgttatcttgtcaaacgtggctctatcaagcagtcctgatgkcacagcagaagccgaggatggggaacagacaggctcaggggagctgcattgtgttctcaggggagccaggcaatagtgaactccatccccactcattgct

SEQ ID NO: 553582 - DNA, 201 bp, Homo sapiens
tttctgcccacttataagaagaatacagtcttatgaatgtgactcctcaatgcatcttttctcttgccctatttcatactttccccaactcataccttcayggaaaaggaaaaatcttggtttattacatgtctgttttgagcatttcaaattcactggtgaggaattaagtaatgatccttaagaaatcacaacagtggc

SEQ ID NO: 553583 - DNA, 201 bp, Homo sapiens
agtcctgatggcacagcagaagccgaggatggggaacagacaggctcaggggagctgcattgtgttctcaggggagccaggcaatagtgaactccatcccsactcattgcttctgaagcattcaggggccccctgggtacctgccaatgcccctggcgtgctgcacaaaacaaaggtggaacccctctcctgtttgtccgc

SEQ ID NO: 553584 - DNA, 201 bp, Homo sapiens
ccttctctaattgaaaggacagtctcactttgggccagaaaccaccattacatgagggatggacactatacattttgaatgtggacacttggttatgacastgcaactataaagatagccaattttcttccttgtcttctcctgaagataatcctccctcttactgactgaagctctggttccagctctgctcacgggcaa

SEQ ID NO: 553585 - DNA, 201 bp, Homo sapiens
tttttattttaacagcattttaaaccagattcactagttttgtttcaaggaggattttcatggattacagggactcattgttttgtattaaaacgtgtaayaggataaggtgaagataaaaagcttatgtgaaagaaatcctgatgggagatggaatcagtaagtgctatcctgaggccctcatccaaggaccctgagcct

SEQ ID NO: 553586 - DNA, 201 bp, Homo sapiens
agaaatcctgatgggagatggaatcagtaagtgctatcctgaggccctcatccaaggaccctgagcctagcaagcagagtaagagccctgtgcagacagckgcaacgaggccagggccagtaagggcagtgagactctgcaggtgacctgatacccataatccttacactgtgaaactgcttatataacaaggacaaacac

SEQ ID NO: 553587 - DNA, 201 bp, Homo sapiens
gaggtgctgaggacccatgacagtctgcagacacacagggaactccctctagagaagccccctgttcccaggggctgatctcacacattcccatgcatgaycctgcagaagctgggtgggggaggagacggggctccatgagacaatggacagtaaggaaggaccacacaggcaccacccagcttctcttttatccacatg

SEQ ID NO: 553588 - DNA, 201 bp, Homo sapiens
aggctctgttggcttggctacttctctgaatggcattataactgcatctccaggcactctggggctttccacatacttgggcttcctgacgggacctgtartgggaaagatctgagtgtggctaattttttccagatgcaaacaaagccttggaatgtacagtgtgtgtccttaccaggacccaaatatgcctagaggaag

SEQ ID NO: 553589 - DNA, 201 bp, Homo sapiens
tgcagatgaggaaatcaaggcttggaggagggctaagttgcctaggatcccctaccctgaaagtggcagatccggaattgaacccagccagtttgactccrgagtcagaactcttaaccacagtaccacactggactgtcccagatagcatattccctaaccaaggtgtatactgagcatggagcattgcttggtgctaaa

SEQ ID NO: 553590 - DNA, 201 bp, Homo sapiens
ttgttaggcatttcctcccgtctctgagcgaggggaaggcttctattagaaagaagaacatactttccaagagctataaatttttcacctctacaaagacraggcagttatctaacctaatcctcaacaatttaaaggataaaatgaaaggtaatcaagatggctcttccagaaaactgtacttgcactgggagacaaaca

SEQ ID NO: 553591 - DNA, 201 bp, Homo sapiens
tgtcattgcccccttgctgcagatgaggaaatcaaggcttggaggagggctaagttgcctaggatcccctaccctgaaagtggcagatccggaattgaacmcagccagtttgactccagagtcagaactcttaaccacagtaccacactggactgtcccagatagcatattccctaaccaaggtgtatactgagcatggag

SEQ ID NO: 553592 - DNA, 201 bp, Homo sapiens
cactattccctctagggtaacaaagattaaaagcaacagagatagctgtcatcaggctgttctctacttatccattgactcatttagtgcaaaacacattytattaatagtctttattccatatggaaaagtacagtagttgtgcagaaacaaaactaacaaaggagtaagactttcacaaatattaaagaaaataaataa

SEQ ID NO: 553593 - DNA, 201 bp, Homo sapiens
tcattctggcccagttcatgtcagttgggagccactctcccaaccacaggctaagtcctcctaagtctcccagttggctgagctctgtggccaggccaacygtgtccatcacaaagacacactaactatcactttacagggtgatgaccacacaccccttggtggccgggcctaaagtttccagtgctcccagctgagcac

SEQ ID NO: 553594 - DNA, 201 bp, Homo sapiens
agtgataaaggcacctgcagagcaagggcttgctgagtgtcaggcgcccttccagctgtgtgattttggaaagtatcaactgccctaaacctcagttttcycatctaaaaaaatgaggataaaagtttcacttcacttggtggttgtaaagattaaaaatcaatgtgtaaaaaaaaaagtgtatgtatatatatgtgcatt

SEQ ID NO: 553595 - DNA, 201 bp, Homo sapiens
ctgcacctattaacccgtcatctaggtttgaagtcccgcgtgcattaggtatttgtcctaatgctctccttcccctttctttcatatatatatatatatattttgttgttgttgttacccagactgctcatctgcaaggcatctctctttcattaaaaaaatatgtgaaatataagcaaatttaaagttactttgaaaact

SEQ ID NO: 553596 - DNA, 201 bp, Homo sapiens
agctcactatctgcaggcatttagatcttcatacatctcatccaccaggcctttcgtgttactccacaaggactctcccttgaactcactgcatctgctargattgtctttaatgtttttgcactatcatcctatggaacctcccatttcacctgtgtcagtgttcccatgtgaaagaacatggcactgtaaataacatgc

SEQ ID NO: 553597 - DNA, 201 bp, Homo sapiens
gctgcacctattaacccgtcatctaggtttgaagtcccgcgtgcattaggtatttgtcctaatgctctccttcccctttctttcatatatatatatatatattttgttgttgttgttacccagactgctcatctgcaaggcatctctctttcattaaaaaaatatgtgaaatataagcaaatttaaagttactttgaaaac

SEQ ID NO: 553598 - DNA, 201 bp, Homo sapiens
tctcaactatctttgcatagagggaatactgacatagataactctattcagctaagcactacagagcccatcacctcccatctcccagtggggatgctcargccagatcctaccctggggagttatcgcccatgattttgctttgtggtagttgcagacagctcactatctgcaggcatttagatcttcatacatctcatc

SEQ ID NO: 553599 - DNA, 201 bp, Homo sapiens
aattaacttaatttattcaaacccattgccttgggaatctacaatgaaacaaatttcaaattgtcaaaccatacctactttttactttcaaaactaccttmagatatttcaaagctttccctaaccctttccaaagactcatgaaaataaattactggatttacagtagccaagaacaacaacaacaaaaaaccttgaaat

SEQ ID NO: 553600 - DNA, 201 bp, Homo sapiens
atcactgtcctagaaatggcatctcttttttccagatggaagggggaactaacaccctttgattcctcctggcttaacttttggtatgtagagttgggacmgttaaaagggtcctttttgttgaagcaaaacatttcagaaaggaagagattaaacaaaactttgtaatggtagaggaaaagtgtaaaaagctcaagtacc

SEQ ID NO: 553601 - DNA, 201 bp, Homo sapiens
ggaagagctggggtggtagttctgaactaaactgaaggcatccaaacccaacccaacagcaaacacacacacacacacacacacacacacacacacacacaaacaccacttcaactaaattttgaattagagctaattcctatgggtggatatgacatgttatttgtaggggtcccataaaactaatcaaacctatgaagt

SEQ ID NO: 553602 - DNA, 201 bp, Homo sapiens
tggaagagctggggtggtagttctgaactaaactgaaggcatccaaacccaacccaacagcaaacacacacacacacacacacacacacacacacacacacaaacaccacttcaactaaattttgaattagagctaattcctatgggtggatatgacatgttatttgtaggggtcccataaaactaatcaaacctatgaag

SEQ ID NO: 553603 - DNA, 201 bp, Homo sapiens
ctggaagagctggggtggtagttctgaactaaactgaaggcatccaaacccaacccaacagcaaacacacacacacacacacacacacacacacacacacmcaaacaccacttcaactaaattttgaattagagctaattcctatgggtggatatgacatgttatttgtaggggtcccataaaactaatcaaacctatgaa

SEQ ID NO: 553604 - DNA, 201 bp, Homo sapiens
gccctatttatcaagaatgtccatcaccaccaaattactatctacaaaaaccaggcctggcatgacaggagacagactctagatatttactgtgacagacaatgtacaaaaacaaaatgccacatttcatatttgagacaggtgtttttaatacacgctgttggttgtattgttttcttggtgctctcctcactctttttg

SEQ ID NO: 553605 - DNA, 201 bp, Homo sapiens
agccctatttatcaagaatgtccatcaccaccaaattactatctacaaaaaccaggcctggcatgacaggagacagactctagatatttactgtgacagacaatgtacaaaaacaaaatgccacatttcatatttgagacaggtgtttttaatacacgctgttggttgtattgttttcttggtgctctcctcactcttttt

SEQ ID NO: 553606 - DNA, 201 bp, Homo sapiens
aagccctatttatcaagaatgtccatcaccaccaaattactatctacaaaaaccaggcctggcatgacaggagacagactctagatatttactgtgacagacaatgtacaaaaacaaaatgccacatttcatatttgagacaggtgtttttaatacacgctgttggttgtattgttttcttggtgctctcctcactctttt

SEQ ID NO: 553607 - DNA, 201 bp, Homo sapiens
tccagacccggtaccattttgggcaatggacatttttgtctttataaacaccaccttccacatgtgttttctctctttccactagctatcaggaaacttargagtaaagctttctgcccacttataagaagaatacagtcttatgaatgtgactcctcaatgcatcttttctcttgccctatttcatactttccccaactc

SEQ ID NO: 553608 - DNA, 201 bp, Homo sapiens
aaagccctatttatcaagaatgtccatcaccaccaaattactatctacaaaaaccaggcctggcatgacaggagacagactctagatatttactgtgacagacaatgtacaaaaacaaaatgccacatttcatatttgagacaggtgtttttaatacacgctgttggttgtattgttttcttggtgctctcctcactcttt

SEQ ID NO: 553609 - DNA, 201 bp, Homo sapiens
acaaatagccaggcaaggtggctcatgcctgtaatcccaccactttgggaggctgaggcgggcggatcacctgcagttaggagttcgagaccagcctgaasaacagggtgaaaaccccgtgtctactaaaaatacaaaaattagccagcgtggtggcgcacgcctgtaatcccagccactcaggagactgatgcaggagaa

SEQ ID NO: 553610 - DNA, 201 bp, Homo sapiens
aaaagcaccaaggcacagaggtacagggccatggcttccactgccaggtttgcaagcatctgtctctccagctagtccttccattagatgtattgaattaytggaaactggtaactctcatgtagctgaccatttctctggcacctgctgggtgcctgggacatggagcctgataaaatcagtttctgccctgaaagacat

SEQ ID NO: 553611 - DNA, 201 bp, Homo sapiens
tgaccaacagaacacagcagaaccaattctgtgtgcatgtcaaggcccaggtcctaagagatgggctgcttgcacttccttgaacactctttcttggagcycggatgccatgctgagaggaagcccaagcagtcctgtggtgagacccacagagagaagaactgaggcctgggcatggctgccagttccagatgggctccc

SEQ ID NO: 553612 - DNA, 201 bp, Homo sapiens
cagctttgaccaacagaacacagcagaaccaattctgtgtgcatgtcaaggcccaggtcctaagagatgggctgcttgcacttccttgaacactctttctyggagctcggatgccatgctgagaggaagcccaagcagtcctgtggtgagacccacagagagaagaactgaggcctgggcatggctgccagttccagatgg

SEQ ID NO: 553613 - DNA, 201 bp, Homo sapiens
tctgttagcatgtggtggagcacagatagccagaaattctttaacagttctctcccccagtgggagatggggtctatatgtcctccccctttgaacctgcrggggctctgtgacagctttgaccaacagaacacagcagaaccaattctgtgtgcatgtcaaggcccaggtcctaagagatgggctgcttgcacttccttg

SEQ ID NO: 553614 - DNA, 201 bp, Homo sapiens
taagatgcagcattggcggatggcatgcccttcggggaaggcaacttttagcaaagcaccttgaggagattctcagccctagaaatatgcctttcaaccaygcatagtcataagtttggggagaaaaaaccctagaaaaccagacaggggtatcccatcaccaccatcccagcaggaactgcttcacccgtagcttagccc

SEQ ID NO: 553615 - DNA, 201 bp, Homo sapiens
tgcgctacacaaagggaggcctacgacgcagctaaatagcccattcaattcacagcggagaaaatctggcccatctgaacagaggcaaatagtagctttgrcaataaaaattatttacctgactaaactcctttagaaagtattcaacaattaaaatattactgacttaacataaaaacacttcacatgaagtatttcagt

SEQ ID NO: 553616 - DNA, 201 bp, Homo sapiens
cctcctcctgcactccctaacaccttgcagtggtactgtgtgtgcacttgtctcctcagattgagacacagcactgggcctcaaaccctgaagtgcacaaygaccagctctcaagaaacattttttggaaaaatgaatacaagacctccaccacccgctgacaaatgaaaatggtttctaatttgtcaaatagttaccacc

SEQ ID NO: 553617 - DNA, 201 bp, Homo sapiens
caaaaaacaaacccaaaaaagctcacaatttgggaaaagcagcctcctatcaaataagccacatcaaataagcctatcaaggctgggcgtggtggctcacrcctgtaatcccaccactctgggaggccgaggtgggtggatcatgaggtcaggagatggagaccatcctggccaatacagtgaaaccccatctctactaaa

SEQ ID NO: 553618 - DNA, 201 bp, Homo sapiens
tgcttacaggatcaagtccacacttcttagcctggcatgcaaggcctttgcaatctggctctcttctccctgccactgtacccaaatgccaagcaccgtcygttctagtaacaacaccccaaacacaacttgtgttttcatgcctcccagcctctgcttcttacgctccttttctctagaaagcctctcaccctctttccc

SEQ ID NO: 553619 - DNA, 201 bp, Homo sapiens
atcctggctgaactaggttactttgagcttgcttccttttctgcaaaatgaggatgacaacagcaccctatgaaaagtttttctgtgaagattacatgagmtaatgcaccttcaccttaagtgcacactcaaaggtattcaactggcattagttctcttcctcccactaactcaggcctcaaacatcatctctcacctgac

SEQ ID NO: 553620 - DNA, 201 bp, Homo sapiens
aaccagggagttggaggttgcagtgagccaagattgcaccacagcactctagcctggtgacacagtgagactccatctcaaaaaaaaaaaaaaaagaaaaraaaagcctatcgaataagatgtactgatggtaagtcctacgaagggaactggagagtgagccaagggagtggagagggttaaggctctgataccagacag

SEQ ID NO: 553621 - DNA, 201 bp, Homo sapiens
gcagaacagtgggcttccttttcgatctggaagccttgtgggaatgcatctgtagcaaatacagtatgaggccagagggataggcttttaatacctgtctmgagcagttgggctgtgcttccttcataataaaatgctccaaacagactcctcattctctcttttctctcaaccagtattaaaaatggaagccttcctgcc

SEQ ID NO: 553622 - DNA, 201 bp, Homo sapiens
atggctattcacagacatgatcctaactcactaccacctcaaatccctgggctcaagctctactgctactcctgcctcagcctcctgagtagctaggactrcaggtgcatgccaccttgcccagctacttccctatttttaataagttctaccagaagcttagattactttggttatctttttaaaagaaaagcctaaatg

SEQ ID NO: 553623 - DNA, 201 bp, Homo sapiens
ctcagcttcccaaagtgctgggattacaggcgtgaaccaccgtgccttgccccacctccacttctaatttccagcttgtcatttcttatgaatagaacccyggaacaaacatcctgaattcaagtggtctccagatcaaaaacaagaggtcctgggcacacacttaggaaaaaggtgcatacacgctggtgtgtaccccat

SEQ ID NO: 553624 - DNA, 201 bp, Homo sapiens
tatgctcctgatgaatatttgggtcatgaacaagacctagcccaaagtcatcaaaaacccagttgttgtcctgccaagagatcttaggaaggtctgtcgarctacaaagcctgtgtgcttcccaagctgatgaccttacccagtcaggaatgccagcttctccaggccacctccacttctattttttatgttatttttcaa

SEQ ID NO: 553625 - DNA, 201 bp, Homo sapiens
ttcactgaatccctgaaaaggccttcctatatgacaaacaagcaatcaagaaagttttaaggcacagccatccattggggccaacctgattagttaaatgwtcagaaataagaccagataaattgtataccatttcaaagaaataaataaaaatatggtattatagtaaagccccatgtatccaacatccctgaaaaactt

SEQ ID NO: 553626 - DNA, 201 bp, Homo sapiens
ggtattcagttatagcaatggaaaacagcacataattaaaggctagagtgcagggtaggagaaattgagaggaacaggaagccaaagaagctgaggtcatygaggaaagcctcaaaaaaaagggcaacataggcccaaccctgaaggatcagctgaggctgcagggactgctacaagcatctgagtaaggacactgagctg

SEQ ID NO: 553627 - DNA, 201 bp, Homo sapiens
tgataccttctaccacgttatgaagcaggaagaagaccctcatttgaagctaagcagatgccagcaccatgctcctggacttcacagcctccagaactgtragaaataattttcccttttttataaattatgcagaaggtggcattcagttatagcaagagacggactaagactgaaaattggtaccaagaatggggtcat

SEQ ID NO: 553628 - DNA, 201 bp, Homo sapiens
gtctaggctgtcaggacatccaggcctggcctgttgttttcagtgtccatggcccttccttccccacagctgaagcctcttaacccttgcccccacactcsccttgctggctcaacccagcgggaatttctaagatagagatttaaatagctctggctaagttgctcttgctgcttaacaggcaggccctgaccttgtatc

SEQ ID NO: 553629 - DNA, 201 bp, Homo sapiens
aatttgcttcaggcttggtaaagagtactttcatgaatttaactgacagttctgtaatatagggttataatttacacttgggaaaaattgaggaatttgtkttgtctaaattgaatttaaaactacatccacttccagattcacataagtaattctcagttttcaagctcatgattgaatatgtaccttacaccctaagac

SEQ ID NO: 553630 - DNA, 201 bp, Homo sapiens
gaagactggataaacaaaacgagtggcatgtaggagtacttcattctattttattaccaaacaatattttactgaatgcagtactgatacatgccacaacwtggatgaacctagacaacacgatgctccataaaagaagccagtcacaaaataccacatattatgattccattttaatggaatgaccagaataagcaaatc

SEQ ID NO: 553631 - DNA, 201 bp, Homo sapiens
caattttcacaacttaataaacctacaatgagatatcagttcacattctctagaatggctataataaaaaagacaatacaagcattggcaaggatatgaarcaattggaaacctcatactcagctggtagtgatataaaatagtacagccacttaaaaaataatttggcggcaacttaagaaggttttacggaactaccat

SEQ ID NO: 553632 - DNA, 201 bp, Homo sapiens
aggcacagagaaaggctggaccaagcaagagatgcaagccatacccacggtcaactcctaaggagaaggttctgacctaggcataggaatttccagaggawgagcaatgggggaagaggaacaatagggctgggtgaaggcacaacaatgatttggtcaagagaagacaattcagtggggaaagaacagtcttttcagtaa

SEQ ID NO: 553633 - DNA, 201 bp, Homo sapiens
tagtattttcaaccaatcacatggaactgatgggcatggaaatactaaaatcctattggttttaacagttacttacctatgctccatcaccaggataaagraagtgattggattctgaagatacaattggatcctgttttcagtgctcccaagggggaatgacaagatgtcaacaaagacaagacagcagtccttacagag

SEQ ID NO: 553634 - DNA, 201 bp, Homo sapiens
gacagcctgcatctgtcaggacccttcacatctcattagctgaactgcagtctcaccagttctggatttagggtggtgaacttactctcctagcctcttcraaaggtcagctcattagctgtactcaggacctgtgaccaataaagaggactttgttggtggtggaagtaacaagaaaatcacatctcctttgaagagtgt

SEQ ID NO: 553635 - DNA, 201 bp, Homo sapiens
tatactcacatcaccagttctaagagctggcttcctgtatagggtaattctacatacataacattttaatcacttcacacaaatcatgtgcaaaccaggaraagatgaataatccaagaagctggcagcagggctagaagtggaacccactgtgttccactttcatgtcctattcccagggaacaaagccccgaaggaggg

SEQ ID NO: 553636 - DNA, 201 bp, Homo sapiens
agcaagaacctgtctcttaggaaaacgagaaaaaaaaaaaaaaaaaaggctgggtgcagtggctcacgcctgtaatctcagcactttgtgaggccgaggcrtgcagatcacctgaggtcaggagtttgacaccagcctgggcaacatggtgaaatcctgtctctcctaaaaatacgaaaattagctgcatgtggtggaatc

SEQ ID NO: 553637 - DNA, 201 bp, Homo sapiens
caaataaaaatgggattctcttaagcagtctgatatatgtttcttgctcatttcggggaaacatgttgaactcaacaggtttattttttcctttctgggtrtcacacactactctactagcaacactgtcagtaagtcaagatttcaggctacagttaagatgtttccccccaccttaaaagcacctgcttgcctgttaaa

SEQ ID NO: 553638 - DNA, 201 bp, Homo sapiens
agctcatgaaatcactgcgtgaaagactgaataactcagagtgcctctgaggccatttgcaaaaataaagatcaccaccaaaagtcatcatatccacccayacaatgtcctcttacaatgaaagggatcctggaacaggctctcaccaaaacaagtccaggagaactgggggagtaagagctcttgagatgaccacagaat

SEQ ID NO: 553639 - DNA, 201 bp, Homo sapiens
cagaccaacccaaatggagtcattcatgcaaaagttccacgtcaccaaaccaaaacctaagctgtttacttgtaagatcggaccctccaagcaaacaggaragaaatgatagtcaaatctccaaacaggccagttttcaaaaagcacaagattcacgacaaccaatcaaagggggcccagtcagctgggtgcggtcgctca

SEQ ID NO: 553640 - DNA, 201 bp, Homo sapiens
ttgctctgttgcctaagctggaatgcagtggcacaatcatagctcagtgcagcctcgatcttgcaggctcaagtgattctcccacctcagccttccaagtsgctgggactataggcatgagccaccacgttcagctgatttttttttttaacttttagtagagatgaggtctcactacgttgccaggctgctctcaaactc

SEQ ID NO: 553641 - DNA, 201 bp, Homo sapiens
acttaaatattttaattgttaattcacagaatgccatcattgctgaaatgttgtcaatttctaccttctttccagtactaggtacacagatttttttttttaatttgtaaattattgctaactttttgagagggtacagtgggatatgttgatacatgtatacaatgtatagtgatcaaatcaggataattaacatgtaac

SEQ ID NO: 553642 - DNA, 201 bp, Homo sapiens
aacctcaacttatccagaaaacaccaagaaccaagatgcaaataagtcttcaaagctgccaaaatctggggctcagttcatgcacaatgcagaagggaacctcctaacccccacaccaacccccaacacctcttcacaggctctccctcagagccctcccactgtctttcagattcaattctaacaggagagaatatgtgg

SEQ ID NO: 553643 - DNA, 201 bp, Homo sapiens
acggaaaccaggacaggctttctcaaaagcactgccattctgatctggaatattccatctgagtactctcccattcattattctcatccatcttttcttayggtatctgtgagtaaagctcctcaccagattataaacttctttgagcagatggactatgcctttgtattaatgacacgccccctatctcctcctaagtca

SEQ ID NO: 553644 - DNA, 201 bp, Homo sapiens
catatgtgtgtttaacagtatctctctgtgtgtgtgtgtgtgtgtgtgtgtttaatgtttaaaccagaaattagccagccactatttcatgcttgtgtgtrtgtccgcccatgagttttgaatgccaaagtcagccagccagcttcccactcgaatttactaaagtcattttagaaaaagaatcttaccaaatactggcac

SEQ ID NO: 553645 - DNA, 201 bp, Homo sapiens
gacaactatgagtctagcatatcaagaaaaaatcctctcatggtctcgcactttgctttacatttgtttttccagtaagattcgacgttttgggtatgcamaccaaaagccaacacgaagtgaacgttgaatcattatggttaacctgagcatgctggaaaccaaggaaaggctgaatgttattttatgcagcccatgaat

SEQ ID NO: 553646 - DNA, 201 bp, Homo sapiens
aaaaattctgaggcctagaaaaagtgaaacgggatctctgggaatagggcccactggcgcttttcaaacccgaccagttgattttaatgtgtagccaggaytgagagtcactacacctgaccaactcccagctgtttcttttgtcctcctgatggggtcaggtgggaaatatttatgcctcaaaaacaggggagagaggga

SEQ ID NO: 553647 - DNA, 201 bp, Homo sapiens
ttaggactatttaatttataggaagtcattttgaagggccccagggagctgcagatggtacctcgggggcccatctgtttaaggatgaaagctttgtgcamaccattacatcactctgacctcctcagaaacttcctatctgacaaaatctagatgtttgctctgtcaacaagatatttgtgcttgtccccagcctcaggc

SEQ ID NO: 553648 - DNA, 201 bp, Homo sapiens
aaaccccctctctctctggaaattagtcatcctccaggtacagctcaaatatcacctgcatgcccacgccaccccccacggaatcttgccagccctttctstgtgctcagaacacctggttggcctctgagttgcagcactggcttcgttctgcctgagctcccctcctaccagtctctccagggctggtcttccctggtg

SEQ ID NO: 553649 - DNA, 201 bp, Homo sapiens
atgctcactatccaagctgagtcaggacatcaactgagaagcacctgctcttaagcaaggtactagatgcatccggtttaccaccactatctcaggttttmtgtttatgtgatgctaataggtttacagcccagtccacaacgaaatgttttaaaggtttaagataacatgccaagaacctctctcaaacccttagcatgc

SEQ ID NO: 553650 - DNA, 201 bp, Homo sapiens
acaggcatgtgccaccatgcccgggtaatttttttgtatttttagtacagacaggcactcctgagctcaggcaatctgctcacctcagcctctcaaagtgmtaggattacaggagtgagccactgcgcccggcccatatgtggctatcttacttcatgatatacactatcacctcttgtggaactttaaaacaacaacaac

SEQ ID NO: 553651 - DNA, 201 bp, Homo sapiens
ggcaagagagatgtgagttggggactccccagaaaggaacaaacaggaaaattcttgaattgattttttaaaataaacaactatgaatatatctgttaaaygctgcaaatttgtaatgtcacacatatttccaggtataaaatacatatacatataaaatgtctttaaaaatatttccatcaatttggttttttttttttt

SEQ ID NO: 553652 - DNA, 201 bp, Homo sapiens
cccaccttggaaatactatgaaaattaaactggggagaaaaacaaagtcatgaggcacaacagaatattttgaatcttgacctatcaagaaaaccaagctrgagctcggcaagcttcccaatggcatgcaaaaaatgagttaagggtatgccaggatatggattctctcagctctccggaccgttgggcagagtctggggc

SEQ ID NO: 553653 - DNA, 201 bp, Homo sapiens
cacacaatgagtgcctggacagaaaggaaaagggtggcatttctcatgccaagacacctgcaatagcacctcttgcctgcccagagtgcccagtgcctggycccatcttttccccatgtcccaaactccccttcccttcccagttttcagcttttgctgatccttcctcacagctcatttttagctatatttttaccacca

SEQ ID NO: 553654 - DNA, 201 bp, Homo sapiens
gctcctgtgccatctgcacctttcgagagtgatcgaaggccactattccgggtggcaatgaagtaaagtgaaaatgacccaggctttggaattagactgargttcaaatcccaactggttatcaacgagcagtctaaccttcagcaaagttataactaagctcttggggcgctccatcaactcactgtaagtggggttcat

SEQ ID NO: 553655 - DNA, 201 bp, Homo sapiens
ttctggctggggcccagccgatccccaaagtggccacaaccagctcttgtagtgaaagtacctgttccctctaaatgctgggttctgctcccagcaggagyggcagcgattctccctggcatgggacttggaggagggttctgagaagagatctgaactttcatactgccatttctcactgccgactggccagagcccagg

SEQ ID NO: 553656 - DNA, 201 bp, Homo sapiens
gcttacaaaaaaaaattcatcttcttacatcatcgaacccacacttcccagaaggctaaaacgtgcatcacacataaatgcaattacttataaataagcarattcaaaatgttctttggtttgttttcctttgatttaaaatccaaacagagagctaagaatcaagagttgatggagctacatgaccaaagcaaaagtgag

SEQ ID NO: 553657 - DNA, 201 bp, Homo sapiens
tctggctggggcccagccgatccccaaagtggccacaaccagctcttgtagtgaaagtacctgttccctctaaatgctgggttctgctcccagcaggagtrgcagcgattctccctggcatgggacttggaggagggttctgagaagagatctgaactttcatactgccatttctcactgccgactggccagagcccaggt

SEQ ID NO: 553658 - DNA, 201 bp, Homo sapiens
ctccataaagaccactggactgggaatagggagaagcatgaatcagtgggcgccagaatctttttaatattgttaccatcccgtggtaacactgtgcccayctctcagtcaacaggcttatatcactcttccccacctctgaacttcctaatgtccctagttggcagtttccttgaaatatggactaaactaggtaggaag

SEQ ID NO: 553659 - DNA, 201 bp, Homo sapiens
acggataggagctgtttcccacatgccaggttcatgtaaatgtgcaagcaaattggacaggagggcccaggatctggtctggagaagggctggccttcacygctggagaagggctctgttgctggaagactgggttggaataaaggggcacagcttacatttgtttttcttcggcatcgcgacaaattgagatagagggaa

SEQ ID NO: 553660 - DNA, 201 bp, Homo sapiens
ccactgtgctccagccaaggtgacagagcaagaccctgtctcagacaaaaaaagagaaaaaaaaaaaaaaggaaccagaacaaagacaagaacccatatayacttttggtttgccacctactctctaaggtaaaatgaactgctgacatattttcccttcatctgccctcatccatttgaaggacctggggaggtaaagct

SEQ ID NO: 553661 - DNA, 201 bp, Homo sapiens
agggcccaggatctggtctggagaagggctggccttcactgctggagaagggctctgttgctggaagactgggttggaataaaggggcacagcttacattkgtttttcttcggcatcgcgacaaattgagatagagggaaacccttaattcattgaagggtctcatgtcctctccgaatccttctcgaggaaactttctta

SEQ ID NO: 553662 - DNA, 201 bp, Homo sapiens
gcacagccctgctagagacgtttctccaccatcaaggctacatttgcttgtgtcctttccaggccggccaaaaatgctttctccttaaggtttcaggtaayacacatatggctaacagtctatattgagaaagtaaaccactgaggcacagcaactccctacccccatcttaggacagactctgactgcacctgagaggac

SEQ ID NO: 553663 - DNA, 201 bp, Homo sapiens
cctcaaggattagctcagaaataatggctctcagacacaaagagaggtgctttctacctttaagattctgccggaaagatattaagccaacaacgggcatraggccaggtcagcacctcttggcactttttttttttttcttctgagactgagtctcactctgttgctgaggctggagtgcagtggtgcaatctcagctca

SEQ ID NO: 553664 - DNA, 201 bp, Homo sapiens
acttggcctacccaagcctgtgggataaagggagtctttataacaggaacatgggctggctccctgtgcttttgtctcttgcctgagttgaggcacggctrgggggacagaaggcaccgcccaaagacaccatcttacagggtaagagcctcttgggaagattcaccttgggggaaggagacagaaaatgaactgaccaag

SEQ ID NO: 553665 - DNA, 201 bp, Homo sapiens
catcagatccaaagaatccaaacactgagtgtttcctctttgaggagtagatttgagatcttactatctttaaaaaaggtttttttttgttgttgttgttkttttacttccaagtaatctgtgagaaaacagaaagaaagagaaaaaccagaacaattctaatacccaaaacaatgacttttttcatttcatgtaaacctt

SEQ ID NO: 553666 - DNA, 201 bp, Homo sapiens
gcagtggtgcaatctcagctcactgcaacctctgcctcccagattgaaacaattctcctgcctcagcctcccgagtagctgggattacaggcacctggctratttttgtatttttagtaaagatggggttttgccatattggccaggttggtctggaattcctggcctcaagtgatctgcccacctcggcctccaaaagtg

SEQ ID NO: 553667 - DNA, 201 bp, Homo sapiens
atgcaattagggactgaaaaaagatgatgacttggcctacccaagcctgtgggataaagggagtctttataacaggaacatgggctggctccctgtgcttytgtctcttgcctgagttgaggcacggctggggggacagaaggcaccgcccaaagacaccatcttacagggtaagagcctcttgggaagattcaccttggg

SEQ ID NO: 553668 - DNA, 201 bp, Homo sapiens
gaattaggttgccaacacttagaaagcaggaggttacacataaataaggatttctagtttctcttgaaaatttgcaagtgccagcagtatcatgcctgtaktcccactcagcaactaccggtgcagaatctctattcccatcactcctaacacgggctgaagatcgctggctgcttccttcagctcactgcgtggctgctg

SEQ ID NO: 553669 - DNA, 201 bp, Homo sapiens
ttgaaacaattctcctgcctcagcctcccgagtagctgggattacaggcacctggctgatttttgtatttttagtaaagatggggttttgccatattggcyaggttggtctggaattcctggcctcaagtgatctgcccacctcggcctccaaaagtgctggagttacaggcgtgagccaccccacccagccactttttgc

SEQ ID NO: 553670 - DNA, 201 bp, Homo sapiens
ctggcctcaagtgatctgcccacctcggcctccaaaagtgctggagttacaggcgtgagccaccccacccagccactttttgcacttctattacatggagwctgtgcagtagcacagctgtagccattatgtacccaattaagagggtgctcccaggcagtttcaatggcaaagaaaagggcggaaccacttactttgtac

SEQ ID NO: 553671 - DNA, 201 bp, Homo sapiens
cattttagggatttttttgcatcctgaactttcacagtaaaggttcctgccaattttatctgatctaggttttcattccacagtgggaaatttcacaagaygaggaaaataaagagatgagtaagataatattttgggggcagggggaacctttatcactaaggcaaattgcattaaatagccaattcctaatggcaaacc

SEQ ID NO: 553672 - DNA, 201 bp, Homo sapiens
gaaagaaagaaagaaagaaagaaagaaagaaagaaagaaagaaaagaaagaaaaagaaagaaagaaagaaaaagagaaagagaaagaaagaaaaagaaagmaagaaaggaagttaactatatgagataatgggaatgttaattttcttgaccatagttatcacttcactatgcatatgtgtatcaataagtacagtcatag

SEQ ID NO: 553673 - DNA, 201 bp, Homo sapiens
cacctcggcctccaaaagtgctggagttacaggcgtgagccaccccacccagccactttttgcacttctattacatggagactgtgcagtagcacagctgyagccattatgtacccaattaagagggtgctcccaggcagtttcaatggcaaagaaaagggcggaaccacttactttgtacatcacatttccttcctccat

SEQ ID NO: 553674 - DNA, 201 bp, Homo sapiens
tgtttaacagtatctctctgtgtgtgtgtgtgtgtgtgtgtgtttaatgtttaaaccagaaattagccagccactatttcatgcttgtgtgtgtgtccgcycatgagttttgaatgccaaagtcagccagccagcttcccactcgaatttactaaagtcattttagaaaaagaatcttaccaaatactggcacctctaatt

SEQ ID NO: 553675 - DNA, 201 bp, Homo sapiens
cctcaggtgatccacccacctcggcctcacaaagtgctgggattacaggcgtgagccactgcacttggccttatttttgacaatttctataatgacttttkaaagccatgggtggccaggggccatggcacatgcctgtaattccagcactttgggaagccgaggtgggaggattgcttgagctcaggagtttgagaacag

SEQ ID NO: 553676 - DNA, 201 bp, Homo sapiens
aaccacccgccccctaagcccttccacctcccatcccaagacgctggctccctcctctctctcctctcaacccaacaggcggagtctcctaaggatccagsaccctcctccctcactgaaaatccaatggcttcctcttaaccgtcatttcccttcacctcttggcaacacttacatccgtaaggtccctccctgaaaccc

SEQ ID NO: 553677 - DNA, 201 bp, Homo sapiens
caattcccacaattgaacacaacttttcaaaaatgccctgaatttgaaagcactttcctgtacggcattccatttcctcctcataaaaaccctctgagggygagcagcatgatcctactgtccttgtctcaggccacccagctaatagacagttcacggaagagccagggctggtatccagacgaagccacagacaacatg

SEQ ID NO: 553678 - DNA, 201 bp, Homo sapiens
attattttgtaaaaatactttcaagaaaagaaatccctactgaattttcactgaagagctgtagtccacaatctctttctgactgacacaacaggagattytagtttgtacgtctcacttcaagacatacaatttctgtatcaaatgttaacactagactctacaaggcgtacaatgggcatatatttttctgtgattacc

SEQ ID NO: 553679 - DNA, 201 bp, Homo sapiens
aaatataattcagagtccaaaatacacggacttaaactgagccattgccaatttctcatggatcctgggtaaccgagatggtttttgttttcatggttagkaacagctgcaagagcgcaatactctttctagactaataaaataacctaagtctggctcagtatttcagctgtggcagcagccaaatttcccagaatggtg

SEQ ID NO: 553680 - DNA, 201 bp, Homo sapiens
gctaagtcaaacatgcagtcctaagggacttgacatcttcataattattatggatactctaagggcacgacagtctcccaaaaagtcagtcaaaagcaatytaaaatgtagaaccaaactggccgaaaacaaaaaagattctttttttttttttttttttgagactgagtcttgctctgttgcctaagctggaatgcagtg

SEQ ID NO: 553681 - DNA, 201 bp, Homo sapiens
tcgaggggcccacttctggggagtgccttcttaccgcatcatcccataaaattcagaaaattaaacagtaacttactgattggcacacattagcaggagcragtatgtcacatacacgccactgctagcaattaaaggcaagtcccatgattcattttcagaatagtctgtaaaagccctatttatcaagaatgtccatca

SEQ ID NO: 553682 - DNA, 201 bp, Homo sapiens; identical to SEQ ID NO: 124933

SEQ ID NO: 553683 - DNA, 201 bp, Homo sapiens; identical to SEQ ID NO: 124934

SEQ ID NO: 553684 - DNA, 201 bp, Homo sapiens; identical to SEQ ID NO: 124929

SEQ ID NO: 553685 - DNA, 201 bp, Homo sapiens; identical to SEQ ID NO: 124928

SEQ ID NO: 553686 - DNA, 201 bp, Homo sapiens
caaggtcccttgcaccaagccttggtgaactcttccagagccgtgtgtttacctggatcattgaccaagctcaggccccaccacatccatgagctgctccygattaatcacctaggtcatcaccagttggcagtacacctaccaggccactcagaataggcatcacacggggcaaggactaggtgacactgactctggtat

SEQ ID NO: 553687 - DNA, 201 bp, Homo sapiens; identical to SEQ ID NO: 506960

SEQ ID NO: 553688 - DNA, 201 bp, Homo sapiens
cagtatcctaatttttaaagcttcacaggaattgtgatatgtactctgctgccctgcccctgtggagaagctccgccttttggcaggatcccgcaaagttytggggagcaacaaggccactgcattcctcatggatagcagggtgtggcaggagaactgaatgcagaaaatgaaatcctgctggcaagtcacacaaaacag

SEQ ID NO: 553689 - DNA, 201 bp, Homo sapiens
gctgcagaaacataaatgcagtctgtctgggatggcatataaaaataaagactcttaaattccatggatgattctaatacaaacctgggactgaaaactaytggattaatcaaaatccttaatgatctagagaaagaaagtgtgcaaaaaggtaaattcaatgttgctcaagtcaccgggcaaatcggcgtaagagtccgg

SEQ ID NO: 553690 - DNA, 201 bp, Homo sapiens
ctgaggctgccacattacaaagtgaccaatccctggagcccgaccctttctgtgtatgctgtggtttcagagacaagagagtctggcccagcaaataacamttctagcaatgagatgaagccatttccctgccccagccccaaaagagcaggctgccgcttactctcactcccttcttggtcagcagacacaccagcttca

SEQ ID NO: 553691 - DNA, 201 bp, Homo sapiens
tttctgagtgtttcggttaaagataattatatatttatatgaaagcaatatttgggacacagaacacctgaggctacttattgcatttaaagtggatcttrcatttttcatgatatctggaggctgtgaaaagtgacactgtatgttatcaatcattttagggatttttttgcatcctgaactttcacagtaaaggttcct

SEQ ID NO: 553692 - DNA, 201 bp, Homo sapiens
catttgaaaagtgaacgtgcaattcgatgccaacaggaaacttacctgacatcttgataaatatacctggggctaaaaaggtcagagtttcacccaagtcyggctctctggactagtttttcaaattcttaacatagtttccaattcaagcagctgaatggtttacaacagttttacgttattaacatttatcactgtaaa

SEQ ID NO: 553693 - DNA, 201 bp, Homo sapiens
gaagccatttagctgctcggtgccttggtttcctcatctgtaaaatcatgggattgtcactgagactttcagggctgtggtagggattaaggcagagggcraaactgcttggatagttcctggcactattcactgcttgacagtattagtgaatagcattttcatcacagtgccctacccagagctgctcctgaccaaggg

SEQ ID NO: 553694 - DNA, 201 bp, Homo sapiens
ctgcccagcaccttcccctcacaactttttgtttaaaacgaaatattcaagcataagctacttttaacttcccccttttacttaaaccaagtgttatgagrttaatccccccaaattaaccagaatgtaatactacataataattacccagaaagcatgatattccagctactgggtatgttttaacgcaggaggctctta

SEQ ID NO: 553695 - DNA, 201 bp, Homo sapiens
ccaacatccctgaaaaacttactgtgctaaaaaaaaggaatcccttagatactgaaacctgtgttaacaggaaaaatctatgtatggactaggtattgacragtattagggaattatcctcattttgttttgtgttaatgtcatcggggatctttactgagtaacagatacatactatttacaaagggaattacatagtgt

SEQ ID NO: 553696 - DNA, 201 bp, Homo sapiens
ctcagacccacacaacctgtgcacggcagactgttaagattggcagcttgggaccggatggacccgagtataatccacttcaaagagatgtgaaggaaatygggagagtaaagatggcaagtttgataccacggtacaaagactgatttgatgtgatataatagctgtcagttgaaccaaactggaaacaagaggaagaaa

SEQ ID NO: 553697 - DNA, 201 bp, Homo sapiens
tccctgcacaaggataacacgcaaattcatgaagcattccatgtttaaaaaaaaaaaatgagtgaaaaagtgtgttcaggagaggaaaccaaggctgtggstaggtgatcatttgttaaggagattactattgatagatgaaattatcaagagaataggaaaaagacccctgccatttcagagatctttgaggctgtccct

SEQ ID NO: 553698 - DNA, 201 bp, Homo sapiens
gcctgtggctattttagattttcatgtgaatctaaaaatatatgcttcctatcatccaccccattattcaaaatgacactaactagagggattatctacayaaagaactacaacccaactacaaaaaccaaataacctcatctttagaatgggcaaaggactggaatagatttctacaaaaatgatcaacaagtgctcaac

SEQ ID NO: 553699 - DNA, 201 bp, Homo sapiens
aactctttatcatatctggctatcttaattttatttatttatgagacagtcttgctctgtcacccaggctgttgtgcagtggtgcaatctcggctcactgsaacctccgcctcccgagttcaagcaattctcatgcctcagcctcccgagtagctgggactacaggcatgtgccaccatgcccgggtaatttttttgtatt

SEQ ID NO: 553700 - DNA, 201 bp, Homo sapiens
cataatggatcattccgccataaaaaaaggaaatcctgatacatgctaccacatgaatgaaacttgaagacatcacacaagagaaataaaacagtcacagraggataaacagcacacgattccactcttatgaggtatataaagtagtcaaactctgctaggcactgtggctcacacctgtaatcccaacactttgggagt

SEQ ID NO: 553701 - DNA, 201 bp, Homo sapiens
aagatgttcaccttatacccattacgatggctacaattaaaaaaaaaaagctactattaaaaaaagcacctcagacatgcagggccatggcttccactgcmaggtctgcaagcacctgtctgtccagctagtccttccacaagtactggctgggcgtgatggctcacgcctgtaatcccagcactttgggaggccgaggca

SEQ ID NO: 553702 - DNA, 201 bp, Homo sapiens
catttttatcaatatactttaaagatccagacaaaaaccctagctggttaaagtgtactacactttagaataacataaaaaacagcaaccttcattttctrgtcaaagattatttttgtaatacctagtaatttctacaaaattctagcattttttgctttctaccaccattccgtagaaagacattccccccttggcttt

SEQ ID NO: 553703 - DNA, 201 bp, Homo sapiens
ctacaacatgggtgaacctggagaacattatgctatgtgaaataagccagtcacaatgagacaaatactatatgattctacttacatgagatatctaaagrggtaaaaaaactcacaaagtagagtggtggctgtgatgggctgggggagatggagagttgtttaacaaatacagtttcacctttgcaagatgaaaagttc

SEQ ID NO: 553704 - DNA, 201 bp, Homo sapiens
acatatgtaagaaacctgcacattgtgcacacgtaccctagaacttaaagtataataataataattttttacaaaaagcctcaactcacgttcagcgacascttgcaaatgctgcaagagcttctaagcaccctaggtttttcctacataaggttgatgacctcactggcatagtatctaagcattcactgcaggacagca

SEQ ID NO: 553705 - DNA, 201 bp, Homo sapiens
tgcaactagaattaataacttttatttattatttttttgagactgagtctcactctgttgcccaggctggagtgcaatggtatgatcttggctcactgcarcctccacctcccgggttcaagtgattctcgtgcctcacccttctgagtagctgggattacaggcacccgccaccacgcccagctaatttttgtattttta

SEQ ID NO: 553706 - DNA, 201 bp, Homo sapiens
cacatatgcacatgtgtatgcatattcacgtatgtgtctgttgtatgtgctatttgcaagcaggtatttttaagcttttaagagtcgactaaaatcttaaktcctggaatagactgcatgtcacagaattagagaaaaatgaaagatccctgacaagacacacacacacacacacacacacacacacacacacacacacac

SEQ ID NO: 553707 - DNA, 201 bp, Homo sapiens
cacatggaggggaatctgttagcatgtggtggagcacagatagccagaaattctttaacagttctctcccccagtgggagatggggtctatatgtcctccscctttgaacctgcgggggctctgtgacagctttgaccaacagaacacagcagaaccaattctgtgtgcatgtcaaggcccaggtcctaagagatgggctg

SEQ ID NO: 553708 - DNA, 201 bp, Homo sapiens
tcacacctttgctctttctcttccctcaacctgaaaccccctctctctctggaaattagtcatcctccaggtacagctcaaatatcacctgcatgcccacrccaccccccacggaatcttgccagccctttctctgtgctcagaacacctggttggcctctgagttgcagcactggcttcgttctgcctgagctcccctcc

SEQ ID NO: 553709 - DNA, 201 bp, Homo sapiens
aggagcgataaggagccttgtcattaaactttaagaagtttttcacggggaataaggagtagaagaatgaaaatgatacggatgagacagccagtctgacyttattaaaaatgtgaaaattttatcagttatacttctgacaactgtacttaaactgtaaacaaagatactaagccattcaatcaacatatattaaatgtt

SEQ ID NO: 553710 - DNA, 201 bp, Homo sapiens
attcaaaaaagttcccctaaacgtcggctcaggctaagaaagaggtttataagtttactccccatacaaatatttttcaaaagttacatatctcaaatatkaatgactattatagaattgtcattaatataaagcaaaaaaatttgaagatctgaggcttctgaaatatattcctccaaaaatactactcactctttgtat

SEQ ID NO: 553711 - DNA, 201 bp, Homo sapiens
ctcagagcccttgtccagaaaaggggctccctgcatggcacagttaactatctcgataggccccaccccaggcaaggctttctggtttcagtgctccagascctaataatgaagtttttcccaaaggtaccagtttcccttttgtaaggcactctggttcccactgggctctcccttctagaaatcaccactctgtgttca

SEQ ID NO: 553712 - DNA, 201 bp, Homo sapiens
acctttaacatctcagtaaggtttctcatcacttgagagacagcctcttttgtgtctccactttataggtgagaaagccaaggctcagagggagtaaggcmgagctgagcgctaagcacaaagctaatgatggtcacagagcagccaggtggcagagcagcagtcttggctgagacggcactgtgctgaaggaacctgttt

SEQ ID NO: 553713 - DNA, 201 bp, Homo sapiens
gggtgagcttgaggtacaggtaggagccgaggctccgcagcaccaggtggctgctcacttttccaatgagtgtggcatcggccttgccgttcagggagatrttgctgaggatgtcctggctgctgtgcaccctgtgctggacgtaggcgtgcaggtcactgtggatgtctttgttgtctgggaagtcatctaaggaaagct

SEQ ID NO: 553714 - DNA, 201 bp, Homo sapiens
gccgaggcgggtggatcatgaggtcaggagttcgagaccagcctggccaagatggtgaaaccccgtctcaactaaaaaaaatacaaaaattagccaggcgyggtagtgggcgcctgtaatcccagctactcaggaggctgaggcaggagaatcgcttgaacccaggaggtggagtctgcagtgagctgagatcacgccact

SEQ ID NO: 553715 - DNA, 201 bp, Homo sapiens
tctctgtctttttcagttcccaggtccttgcaattcctcaagaatcttccattcaccacctcttcttcactgaacctgaactaatttgagactttatcctytcacttaattactaaaacaattttttaatcattcttaaccgtagtctctttccagtcccactccatcctactctgttgccacgtactatagtctgaatgt

SEQ ID NO: 553716 - DNA, 201 bp, Homo sapiens
tcaatgaaagctttgggcaacaacaatcaaacaaaactgagtgatactagaaagatagtatcttaggcagaatttggaaaaagccatactgaaggttatcrgagtaaaatcatcttacacacaagttttacatactgaaggggcatggcttagagcctaattctgtttttgaaaatgctgcttgaataaaccctggtgaaa

SEQ ID NO: 553717 - DNA, 201 bp, Homo sapiens
ctgaccagtttatatcctgagctctttcttgatacccagtttgattttccaactggtggctggacacttgcgaagatgttccaccagcactttgaagtctmcatgcctgaaactgaactcaaaccaaaacacagtccctgctcctccagtgtcccttaatgtggtctcaaaggcgtgaagttgttgtctctgtctttttca

SEQ ID NO: 553718 - DNA, 201 bp, Homo sapiens
tctcggtaaagcatgtctatctcgaatattttcatttccttgattgagagctcctacttccactgcttacattttaagccgtgagctccattttaactaarttgtacagaaattcggccctcttgcctgtacaatcggcctcaattagacaaaaataagtttgtaagtttggtaagaagatcctcgagctgatattaacaa

SEQ ID NO: 553719 - DNA, 201 bp, Homo sapiens
cacaaggcattgcaagatcttttgaattaaagagttaaccataattttatgatgctttagtaataaacatacttcttaaaacagaaattaaaactgaaacrttatttgacatagtaactcagaaaaccagtcattctccaaggagactggattaacatgggtttacagagtgaaatgtaacatttcaggcaagtcaattca

SEQ ID NO: 553720 - DNA, 201 bp, Homo sapiens
cagggtttcaccatgttggccaggctggtctcaaactcctgacctcaggcaatccgcccgccttggcctcccaaattgctaggattacaggtgtcagccaycgtgcctggcctttttttttttttctattgaagtgccaggctaatttcattcctgttgaagaaaaaatgtgccaaatacctacttcagaataaccatggg

SEQ ID NO: 553721 - DNA, 201 bp, Homo sapiens
aaaaaaaaagtcttctttaaaaattggggatttcattagggattaaatggaatgtctacataattatggaggagctagatggtttaaaataatgaatcagrttattcagaaaaacagtatttccttctacttattcaggtcttcctttaagtccttcaataaagttttattttctttaatgtgaggctgcatagccagtca

SEQ ID NO: 553722 - DNA, 201 bp, Homo sapiens
atactagatattaaaactaagaatttttaaactgtatgttagttcattttaatgttataaaacttcatgttaacaattaatattttaattaaaaaactaawttttaacttatgggtacataggtaaaaagctgtacttttgattttaaagattagttaagaagaatggcattgtttttacaattttacaaactttaatgtg

SEQ ID NO: 553723 - DNA, 201 bp, Homo sapiens
aatgttgataatggtggaagctatgcatgtgtgggggaaaatctctgaaccttcctcccaattttggctgtgaacctaaaaccactcaaaaaaaaaaaagycttctttaaaaattggggatttcattagggattaaatggaatgtctacataattatggaggagctagatggtttaaaataatgaatcaggttattcagaa

SEQ ID NO: 553724 - DNA, 201 bp, Homo sapiens
aggctggagtacagtggctttatcatagctcactgcagccttgaactcctgggctcaagagatcctcctgccagagcctcccaagtagctaggatttacargtatgtgccaccatacccggataattttttaaaatttttttgtagaggaaagtgtctctttatgttgcccaggctggtcctggaactcctagcctcaagc

SEQ ID NO: 553725 - DNA, 201 bp, Homo sapiens
cgactgccatcataactttaaaccatcagtgccctctacaaccatcttctcatcttccgccactgtctgggaatccagggtgttctcagtgctaaccaccrtccagatccttttgggtactgaacctctctcaactgcactttcttagtgagggaagtggccatacccacctcctacaggttgtgaggctcaaaaccaatg

SEQ ID NO: 553726 - DNA, 201 bp, Homo sapiens
cagaggttgcagtgagccgagattgtgccactgcactccagccttggcaacagagcaacattctgtctccaaaaaaaaaaaaaaaaaaaaggaaaagggayacccaaattcatgatcaactgttctcttaactgcacaacctggactttgctgctacccaagttctaaacccttacccggggttgggatgaatggacagac

SEQ ID NO: 553727 - DNA, 201 bp, Homo sapiens
acaaaggatgtgttgagataacattttataaactgtacttagaaatctattctcgaaactgcttgccaactcccgaaatccctttaagcaaggagaaaagmctttcagtttaacttcataaagagaaaaccataaaatgcaagtacttcatagaggttaaaaggtaaaatacattattttgaaagcataaaccaccacagg

SEQ ID NO: 553728 - DNA, 201 bp, Homo sapiens
ttatcacatgctttatgatgattcagataggtggtgccttgctggagatcttatgccacaaaaaggtcttattagtccagggtgactgacttccctttcckctggggtccagagctttctccaagtatgccccccaccaggaaaacaggcagttcagcatgaaaccagcttgggccttacatgtaggtgcctaatgataaa

SEQ ID NO: 553729 - DNA, 201 bp, Homo sapiens
aaggtctcactatgttgctcaggctggtcttgaacgcctaggctcaagcaatcctcccgcctcagcctcccaaagtgttgggattacaggcatgaaccacygggcccagcgtatttttcgaattttgtacattgagtatataaatattaggcatggattcaaatactgatattctcatttttacttctctagtagtttaaa

SEQ ID NO: 553730 - DNA, 201 bp, Homo sapiens
gatttccacctggatttctcagtaagcctaaactctggttgaatttagtaaattcctcttccatgtcatttttcttgttctttgtcatgttagcatcataraaaatgctatcgcatgcaattttaagtgaaaattataaaatagttttacgatatgaattatggcacaagggaatgtttgggttggcagtgtcaactggtt

SEQ ID NO: 553731 - DNA, 201 bp, Homo sapiens
gaagggggaaaaaaaaaacccacaactttctaaataaatttcctttctgataaatctctatgggcaatacacttaaattgctatttcaatgttactttgaraaacgtgttaccacaggaagaaaggcttggtttcaatacgcaaatctattgtaaaatgccatttaagcagatttccacctggatttctcagtaagcctaa

SEQ ID NO: 553732 - DNA, 201 bp, Homo sapiens
gacatcaatcaatatatgtaaaatgaacattggttctgtctggaaaggcaggacaactggaaatggggagggggcttccaggtcacaggtgggagaccaastgttgcattcttttgagtttctgattagcctttccaaaggaggcaatgagatatgcatttatctcagtgagcagagggatggctttgaatagaatcagag

SEQ ID NO: 553733 - DNA, 201 bp, Homo sapiens
atgtcccatctggaaggggatccaccagcctgggtcaagctgccccagctaaagccatgtgagcagaggtgagccatccccaccatgcccggcccaaactrtagattcagaggtggctaagttttgtttttgtttttctcaggaagagataaccagaatacagtgcaatgcaaacacaggttggtattattgtctagtttg

SEQ ID NO: 553734 - DNA, 201 bp, Homo sapiens
tatttcaatgtactgataattcactaaaaactataaaactgcattcatctccaattgacatcactttttataatcctcatatcataaatcaatacaaatgsaagatttatcgatacaaatggaagacctttacttcacaaatccagcaaccaaccacaaaagcaatggcagaggtagagaaacttatttcacagacaacct

SEQ ID NO: 553735 - DNA, 201 bp, Homo sapiens; identical to SEQ ID NO: 124931

SEQ ID NO: 553736 - DNA, 201 bp, Homo sapiens
ggctgaaaatggggcaacacaagaacaggccttcaaaaggtgtggtccccatgccagggagcctatgaagagcaccaagccccattagtaaccaggctcaytaacgagagatggatgcggaacaacaggaaagcttgcaccctgctagcagaaaggtgcatggtggctgctctggaaaacaggctgacgctacgagtaagt

SEQ ID NO: 553737 - DNA, 201 bp, Homo sapiens
ggatttggggagacagacacctttgtgtcatacaaacaatgctgcccctattcctaacacttacccagaagttagcaactatggtattcatgaaaaacccrgaaaactgcctcatttcttgtgaataaattgtataaagcttgttacacggtgacaggatgcagtgagaaatggcctgatgatctcaatgtctttctctgg

SEQ ID NO: 553738 - DNA, 201 bp, Homo sapiens
gcaccccgggctgcaaacaatccaaacaaccatcatcatcatcattagcaagcttcaagaaagtggcatagtcaatcagcagaacactacatgtctacaaraataaacaccatgtggctaaacacgactgaccaagtcagtctcacaaacttaacaaggattgaaagaaaccaaacccaaaagaaaacacacagaggattt

SEQ ID NO: 553739 - DNA, 201 bp, Homo sapiens; identical to SEQ ID NO: 124932

SEQ ID NO: 553740 - DNA, 201 bp, Homo sapiens
gcaaacaatccaaacaaccatcatcatcatcattagcaagcttcaagaaagtggcatagtcaatcagcagaacactacatgtctacaagaataaacaccaygtggctaaacacgactgaccaagtcagtctcacaaacttaacaaggattgaaagaaaccaaacccaaaagaaaacacacagaggattttgttcatacata

SEQ ID NO: 553741 - DNA, 201 bp, Homo sapiens
gaaaacacacagaggattttgttcatacatagttcaaaagcagagtgccacgacagccatctcgggagagggtcatctgtgggcttccgattagcaagggygggacctggtttgtctcctgcgcaccttctgagctcgggtctcagagctaagccccgggagccaagggctcagtgatgctggtgtctgcacacacccctt

SEQ ID NO: 553742 - DNA, 201 bp, Homo sapiens
cctcagagcagctaacagatgcctgcttcctctggtgcctacaataatgcccagggaagctgggagtctgttgctgatttgtgacctcctctggtcacacyagtcagcatggccatggtttaacctccaggagccacataaacaaaaggcggcaaacctgttatctccctgcaagaaactagctctcctactgaacagtct

SEQ ID NO: 553743 - DNA, 201 bp, Homo sapiens; identical to SEQ ID NO: 124930

SEQ ID NO: 553744 - DNA, 201 bp, Homo sapiens
ttcacatgtcacagagaggtagccacatctctcccgtggatcacctgagctctgcgttctatctggggcctcgtcaccggaaagtgagggagtaagcgtgrgcagcaggcagtcctggtcttgtggacctaagaatgtaagggttaggtccaggatgaccatggggaaagcatccccttctccatccttccagaacggtaa

SEQ ID NO: 553745 - DNA, 201 bp, Homo sapiens
caccaagccttggtgaactcttccagagccgtgtgtttacctggatcattgaccaagctcaggccccaccacatccatgagctgctcccgattaatcaccyaggtcatcaccagttggcagtacacctaccaggccactcagaataggcatcacacggggcaaggactaggtgacactgactctggtatctcatcccagac

SEQ ID NO: 553746 - DNA, 201 bp, Homo sapiens
cagagaggtagccacatctctcccgtggatcacctgagctctgcgttctatctggggcctcgtcaccggaaagtgagggagtaagcgtgggcagcaggcaktcctggtcttgtggacctaagaatgtaagggttaggtccaggatgaccatggggaaagcatccccttctccatccttccagaacggtaaggcagctctca

SEQ ID NO: 553747 - DNA, 201 bp, Homo sapiens
tcccagctccccaggccttatctgagcaccagagggagcaggcatctgccagctgtcaagatgctctgacacctgatgctacaatatttttccaagaggcstaacaacttcagttctctgtggtagaacagtccttcacatgcactgggacatagtcccttgcagctctccaaggaggtagctggtaagccgagccaaggt

SEQ ID NO: 553748 - DNA, 201 bp, Homo sapiens
actaacaagaaagacattttggtcttgacccagcagagggtgaatgtccccctggatggaaattctgtgaacgaaatttctccagagtaacaattctaatyaattattcaaagccaggggttgattttctaaggttaactatggtctcctgtttaggtcattaaaaactggtttctccttttctttggtgtctgctcaccc

SEQ ID NO: 553749 - DNA, 201 bp, Homo sapiens
aaaaaacaacaacagcaacaaaaccccacaaaaattagccaggcatggtagcgtggtggctactcaggaggctgaggtgggagaattacttgagcctgagrggtcaaggatgcagtgagccgagatcacgccactgcactccagcctgggtgactcagcaaaaccctgtctcaaaaaaaaaaaaaaaaaaagcttgcacat

SEQ ID NO: 553750 - DNA, 201 bp, Homo sapiens
atgatgattcagataggtggtgccttgctggagatcttatgccacaaaaaggtcttattagtccagggtgactgacttccctttcctctggggtccagagytttctccaagtatgccccccaccaggaaaacaggcagttcagcatgaaaccagcttgggccttacatgtaggtgcctaatgataaacggtagatatctgt

SEQ ID NO: 553751 - DNA, 201 bp, Homo sapiens
aaaactcattacacttaaaaactcattggaaatgcccttaaaaatggccaacaaagaaatctgagctagaagtctctgatgcaagaaaacaaccaaatttkatgttcccttgcctctaaggaggcaatttataatgttcaaaacactttatatacattctgtcatttgaccctcaaaaccctggagacatgtctgtcttcc

SEQ ID NO: 553752 - DNA, 201 bp, Homo sapiens
ctatggtatttgctacttgatttggaaaaatcatctgtgtagatgtgactaagttaaggatcctgagatgaggggcttatctaggtgggcctcaactgccrtaagtaaaagagaaaggagaggccagacacggtggctcatgcctgtaatctcagcactttgggaggcagaggcaggaggatcgcttaagttcaggagttc

SEQ ID NO: 553753 - DNA, 201 bp, Homo sapiens
aaccacaactgagtcatagataacctgctctgtgaagaggcagtggaacctgcacaccctgtattgatttaaaaggaagctcttcccctttctgtccccamcactcctgcctcttcaaagacctgtggctacagtctgcctggagaggaaattcttgcgtcttttccttctcctccctaccacacctccagcgtgtccctt

SEQ ID NO: 553754 - DNA, 201 bp, Homo sapiens
atcagcttgggtaagaaaagggcctatctttcatgttaccctcacagagtgccgggtgtccaatgcccacaggaggctgaaatgaagtaaaaccctagtgrcatgctggtagagacccaggctatttaggtgttggagtaaaactgaaatccaagctctcattaaacaagccaggggaacgacgtggaaaatttggtggaa

SEQ ID NO: 553755 - DNA, 201 bp, Homo sapiens
gtgggataaagggagtctttataacaggaacatgggctggctccctgtgcttttgtctcttgcctgagttgaggcacggctggggggacagaaggcaccgyccaaagacaccatcttacagggtaagagcctcttgggaagattcaccttgggggaaggagacagaaaatgaactgaccaagctggaaaaccttggccaaa

SEQ ID NO: 553756 - DNA, 201 bp, Homo sapiens
cattttgtagtcccacaagtggacaagttttgacaatagatgctgtgccttatctttattgtcccagtactgaacatgcttgctcctggtacacagtaggygccaataaatgcttgctacaccaatagaacagcctgaagaatccaactacagtctgaataaaagtacagcaggctctttgctgactcaaatcattgccaa

SEQ ID NO: 553757 - DNA, 201 bp, Homo sapiens
atagatggaccatttgatctcatcttattttgtctctgcctcatctcctataaatcttttcctcaccccactgaccctccaaaatctcaacagctaaaaargcacaggaaagcgtataccaaagcaaccagatgagaagaacggtgctataaaggtaaaagtactggtagcattatgaaggcattcttttagcctctttaa

SEQ ID NO: 553758 - DNA, 201 bp, Homo sapiens
ccacagcttttaacctgaggggtctagtgaaggcacttaagccaccttgcctggaatgccaacagaatgtcccaggtgggacccccgccccaaccctgcayggtaaccttcagcttcaggagacttctggcttctccttctgcaactgcccagccccatccaatgcgccacagggccctgctccctctctggccttgctct

SEQ ID NO: 553759 - DNA, 201 bp, Homo sapiens
acatgcatgtcccatctggaaggggatccaccagcctgggtcaagctgccccagctaaagccatgtgagcagaggtgagccatccccaccatgcccggccyaaactatagattcagaggtggctaagttttgtttttgtttttctcaggaagagataaccagaatacagtgcaatgcaaacacaggttggtattattgtct

SEQ ID NO: 553760 - DNA, 201 bp, Homo sapiens
gaagagaaagctggttcttccaataaacgacatctttctttcttccaaccttacagaaattcaaactcctaatcaggttaacccagtcaatcactctcaaraatgcttgtgggtacacgtacacatcaagggcagcatcttaactgtgatgacttaaaaaaaaaaaatctctaaaaagtgctatttgacatttcccagaga

SEQ ID NO: 553761 - DNA, 201 bp, Homo sapiens
gtggaggtggggaacacctgctggtactcacagtctcggcatcgccatagaaggcagccaggtccaagggtgtgcggccattcttgtctgtctggtctatygcagctccttcttcaaccagatactggaccactgccctgtgacctttcagacaagcccagcttaatgctgacagaccctctttgtctagagaagaaaggg

SEQ ID NO: 553762 - DNA, 201 bp, Homo sapiens
acaggcttagagactatccaatgccttaattaacatcattacaagtgtatttagccaaccacctgggttttaatgagagaaaggtaaaggtcaaaaaaaawtttttttttaacaagttgcttcaaactaagtccccctactggggaaaaataaagcacaaataatttaactacaaataaaagacttaacataaacagtttt

SEQ ID NO: 553763 - DNA, 201 bp, Homo sapiens
taacttaagtgtccatcaacagaagaatgagataaattataactacccaatgcaacactgagctactttttagaaggctatatatcgatatgtgccaataygaaaaaaatgtataaaatgcaatcatcatagtagtttacagaataagatgtattataaagtccatgtggggtttcttaaggatcgatatatgtattgatg

SEQ ID NO: 553764 - DNA, 201 bp, Homo sapiens
ctccattttaactaaattgtacagaaattcggccctcttgcctgtacaatcggcctcaattagacaaaaataagtttgtaagtttggtaagaagatcctcragctgatattaacaaactcactcaacaattcccatttaccaggaggtaataaacagtaatgaattttctaaggcttaaaacaacaaaaaccgagaggaga

SEQ ID NO: 553765 - DNA, 201 bp, Homo sapiens
aactatgtagtcttaagctagtactttgacctctattaataagctattgatgatgtaactgtttataaacatgcagcacactgtctgaaacacagcaaacmctcaaaaaaaaaaaaaaaaaaaaaaaagacacacacacttttcagccaagtgaggttgctcacacctgtaatcccagttactagggatgctaaggcagga

SEQ ID NO: 553766 - DNA, 201 bp, Homo sapiens
cctggaatagactgcatgtcacagaattagagaaaaatgaaagatccctgacaagacacacacacacacacacacacacacacacacacacacacacactmtctgatgacactgagacacaacctcatgcaggccctggattgagctgttcacttcctggggtttctttccaatgcaggtggaggtggggaacacctgctg

SEQ ID NO: 553767 - DNA, 201 bp, Homo sapiens
ggctctgacactcagtaactatgtagtcttaagctagtactttgacctctattaataagctattgatgatgtaactgtttataaacatgcagcacactgtytgaaacacagcaaacactcaaaaaaaaaaaaaaaaaaaaaaaagacacacacacttttcagccaagtgaggttgctcacacctgtaatcccagttactag

SEQ ID NO: 553768 - DNA, 201 bp, Homo sapiens
gtcctggaatagactgcatgtcacagaattagagaaaaatgaaagatccctgacaagacacacacacacacacacacacacacacacacacacacacacactctctgatgacactgagacacaacctcatgcaggccctggattgagctgttcacttcctggggtttctttccaatgcaggtggaggtggggaacacctgc

SEQ ID NO: 553769 - DNA, 201 bp, Homo sapiens
attcccaacttattaattaaatgggcagattctatgtgtacaattccacagcaccgagaacactaaaagttggctcagtagtaatagtataatcatattcytaagcttcaaatatatgtgtagacttatatacacattctatatcataccgcattttttggtgttttttattataaaaataagttatgtttacctctgacc

SEQ ID NO: 553770 - DNA, 201 bp, Homo sapiens
ggtcctggagccaggctttctcctggttttccctgtgctgatggcaaatactgaacaagtctcacatcctttacttctaagcccagaaatgcagtctcackccctgacactctctgctctcttctagaagcagtaagcctgactggtagggaaaccaccctgaggggtatgggaaggggaagtctgttcactttccctgtc

SEQ ID NO: 553771 - DNA, 201 bp, Homo sapiens
tagtatcttcaaaggtgactttaaatttcatacctaagtgactataacttataaatcactaagcaattcagttcaggctttcaacaaaatttacttaaacktcattttgatattgtttgccccagtttatttttctggcagtatcattagttgaaaagtggtaaaaaccaaatgcttctttttcttaaagttatgttgact

SEQ ID NO: 553772 - DNA, 201 bp, Homo sapiens
ggtgtgcagggccattctcaccacactgcaggcggacattctggctggggcccagccgatccccaaagtggccacaaccagctcttgtagtgaaagtaccygttccctctaaatgctgggttctgctcccagcaggagtggcagcgattctccctggcatgggacttggaggagggttctgagaagagatctgaactttca

SEQ ID NO: 553773 - DNA, 201 bp, Homo sapiens
actttattcagaatgctctgccttcaaggtacagattttacataggaaatataccaggtatagttactgagctggggtcatcaatagagatggagcaccamagactcttaagagttctagccatgctagagtgggaagatctatccaccttctgatcgtacggggcagaagcctccaggtcctggagccaggctttctcct

SEQ ID NO: 553774 - DNA, 201 bp, Homo sapiens
agtcctggaatagactgcatgtcacagaattagagaaaaatgaaagatccctgacaagacacacacacacacacacacacacacacacacacacacacacactctctgatgacactgagacacaacctcatgcaggccctggattgagctgttcacttcctggggtttctttccaatgcaggtggaggtggggaacacctg

SEQ ID NO: 553775 - DNA, 201 bp, Homo sapiens
ccactggagtgatctgtacgcctcggcctcccaaagtgctgggattacaagcatgagccgccaggcccggccttgaaatcaatttagagccacaatttttwaaaaaataaacttaggaacactagagtgtattataggatataagaataaacatagttctaaaatgctttagttatgtgggtgattatgtgtgagtgatct

SEQ ID NO: 553776 - DNA, 201 bp, Homo sapiens
tttatctggagacccttaaagcaataactgatgctgcctgccagaactcgctaacaatagcttacatttttcacgattgggatgctgggcaaggaaagctytctttacccccacccacccctctaaacaagcagagtagcacggaacaccacaatgactgttttcattgccaaggaactcaaattaaaaaaaaaaaatcag

SEQ ID NO: 553777 - DNA, 201 bp, Homo sapiens
aagagtcgactaaaatcttaagtcctggaatagactgcatgtcacagaattagagaaaaatgaaagatccctgacaagacacacacacacacacacacacwcacacacacacacacacacactctctgatgacactgagacacaacctcatgcaggccctggattgagctgttcacttcctggggtttctttccaatgcag

SEQ ID NO: 553778 - DNA, 201 bp, Homo sapiens
tgagcctgagaggtcaaggatgcagtgagccgagatcacgccactgcactccagcctgggtgactcagcaaaaccctgtctcaaaaaaaaaaaaaaaaaaagcttgcacatatttcttcttaggttgataaagtttttgttctattgtaaaatgggactttttttcctattcattttccaaacagtgttgctgtacaaaaa

SEQ ID NO: 553779 - DNA, 201 bp, Homo sapiens
ttaaagatgacaaaaggggatcctttgttgttgcaataaacaattggtggcctaaccacactccagtctataaaacatcagagcccagcccactgtggaarggggaggatagcaaacccctgaccctggagtcggcctctgtatctccaccctgtgcccaccagcaggaacaacagctccagatcagtaaaacctggctga

SEQ ID NO: 553780 - DNA, 201 bp, Homo sapiens
ttaagagtcgactaaaatcttaagtcctggaatagactgcatgtcacagaattagagaaaaatgaaagatccctgacaagacacacacacacacacacacwcacacacacacacacacacacactctctgatgacactgagacacaacctcatgcaggccctggattgagctgttcacttcctggggtttctttccaatgc

SEQ ID NO: 553781 - DNA, 201 bp, Homo sapiens
cccacttaaccagcccagagtaactcagctaagtggcagtgctgaattctaacctaggtaggtgggactctacagccctgctctccataaagaccactggrctgggaatagggagaagcatgaatcagtgggcgccagaatctttttaatattgttaccatcccgtggtaacactgtgcccatctctcagtcaacaggctt

SEQ ID NO: 553782 - DNA, 201 bp, Homo sapiens
ctacaaagtaagaaaactcacaagtgcaaaaaaaccatactaaaaggaagagactgccagaaaaggaaagaatttccagtaattttaaagatgacaaaagrggatcctttgttgttgcaataaacaattggtggcctaaccacactccagtctataaaacatcagagcccagcccactgtggaagggggaggatagcaaac

SEQ ID NO: 553783 - DNA, 201 bp, Homo sapiens
ttgtccgggcatggtggctcatgcctgtaatcctaccattttcagaagccaaggtggggtgatcacttgagcccaggagttcgagaccagcctgggcaacrtggtgaaaaaccgtgtctctaaaaattagccaggtacggtggtgcatgcctgtattcccagctactcagggggctgaggtgggaggacctcttgagacca

SEQ ID NO: 553784 - DNA, 201 bp, Homo sapiens
taccctagtaaaatatctaactacaaagtaagaaaactcacaagtgcaaaaaaaccatactaaaaggaagagactgccagaaaaggaaagaatttccagtrattttaaagatgacaaaaggggatcctttgttgttgcaataaacaattggtggcctaaccacactccagtctataaaacatcagagcccagcccactgtg

SEQ ID NO: 553785 - DNA, 201 bp, Homo sapiens
atgatcttggctcactgcagcctccacctcccgggttcaagtgattctcgtgcctcacccttctgagtagctgggattacaggcacccgccaccacgcccrgctaatttttgtatttttagtagatactaaaatagtatctactagttcacttgatctcgaactcctgacctcaagttcgcttaatctcgaactcctgacc

SEQ ID NO: 553786 - DNA, 201 bp, Homo sapiens
gagactatccaatgccttaattaacatcattacaagtgtatttagccaaccacctgggttttaatgagagaaaggtaaaggtcaaaaaaaattttttttttaacaagttgcttcaaactaagtccccctactggggaaaaataaagcacaaataatttaactacaaataaaagacttaacataaacagtttttattttggc

SEQ ID NO: 553787 - DNA, 201 bp, Homo sapiens
tgcggaaagggtaggcaccggtcaaagggtacgaagattcagttagacaggaggagtaacttctggtatctactgcacagtactgcaactagaattaataacttttatttattatttttttgagactgagtctcactctgttgcccaggctggagtgcaatggtatgatcttggctcactgcagcctccacctcccgggtt

SEQ ID NO: 553788 - DNA, 201 bp, Homo sapiens
agccacctcttggacactgactcatttctctgggtatctcccatggatacaacacaagatatacctactattcaacttctgtttgtgttaatctgtctttygttgctgcagtctgtcccaagaactgtgaagggtagggatgaagtgatttcttcctctcctacaatatacattttctggattgatttgatcgtgaccctg

SEQ ID NO: 553789 - DNA, 201 bp, Homo sapiens
cctatggactttgggtgataataatgtgtcaatgtaggttcatcagttgtaacaaatgcacaactctggtggaaaatgttgataatggtggaagctatgcrtgtgtgggggaaaatctctgaaccttcctcccaattttggctgtgaacctaaaaccactcaaaaaaaaaaaagtcttctttaaaaattggggatttcatt

SEQ ID NO: 553790 - DNA, 201 bp, Homo sapiens
aatctcttatatattaaagttctctgggaaaagatttgatttgcaaaaactcaattgtcaacttgccggggacacagtcattccacaaacagggctattcstaaaattttaaagcagatctgtcactcaaattcacaggatgtgctccccaggctcaggatcgcttggcttacagatcacaacaatgggtctgtattccca

SEQ ID NO: 553791 - DNA, 201 bp, Homo sapiens
ttgtgtaagtacactggaggattttcacgcaatgaccaaatcgcctaaggatgcatctctcagaactatctcatgcacgaatttaaaaagttgtggttttkaacaccttccttattgtttcccattggcaaaactctcccaggagggccagatctcccaatggccatgatggggcctgcagaagcagcctggctggagcca

SEQ ID NO: 553792 - DNA, 201 bp, Homo sapiens
tcatggaaaaatgtggctccctctgccgacagacatgaacccattttcaccgagctatctaacagaggtgaatacagggcagaatccaaatctgggtaacyagaacactcctgaccatgttacaaactctactgtaaaaacactgtcagcctgtatgtgcattcaagattaaacaggaacctcaaattgccaacttctttt

SEQ ID NO: 553793 - DNA, 201 bp, Homo sapiens
ggctcaagatccagagggagcaggttctgtccaaaattccatccagaattagtgaacagtaaactacggtgagcacacatgccaagtggaattgcttcaaygcgctacacaaagggaggcctacgacgcagctaaatagcccattcaattcacagcggagaaaatctggcccatctgaacagaggcaaatagtagctttga

SEQ ID NO: 553794 - DNA, 201 bp, Homo sapiens
aactaaatactgttcccattttttatgaacgtcttaaaattctattgtacattttcttgtctccttcaacctaacacaggagccacctacttctgtgatgrcattcattgactcagggtcaccagcagtcagatgtgcagggctctgagggtggagggctgctgctgtgcccagtgccaccacactgacggcctgagtgag

SEQ ID NO: 553795 - DNA, 201 bp, Homo sapiens
tgcaaggctctcctagcagaaaactggaggaagaatttgtgcgtgaatttaagctcctgcgccactggctctggcaatggcagagaagagatgggcaggtrgctgtcctcctaacgggggtatccctgcaggaaaaccacaggctgttcaaaggcaggcaggtgagtcaaaacagacgaggaagctctgccttgtcacctc

SEQ ID NO: 553796 - DNA, 201 bp, Homo sapiens
tcagtaaaaattccccaagaagctttctggataagtcatatagaaaatttgcattactatacacaacagccagattaggaaaagggaagaacaagactaayaagcccctcacaatcccaacagaaaaaaacaagtacaagggcatgaaaaagacaatcattgaagaagaaatgtaacagagcaataaatactggaagaggt

SEQ ID NO: 553797 - DNA, 201 bp, Homo sapiens
agacgaggaagctctgccttgtcacctcatcagctagcattttaaagccaagctgttcacagctaaatctatgctggacagacttgtgtaaacatacttamggtttcaaaataaataatgaactgttatccacacaaagcttccagtttttctgccaccttcccatatcccagataagtattactcttgggatcctatcct

SEQ ID NO: 553798 - DNA, 201 bp, Homo sapiens
gttttggacacaaaacaccattgactacacccaggaatgaggaccaaacgagaacaggatgcaaaaccactactttcccttctgtgggtccctatagcaaygagcaacaatgcacacagcagtacagccacacaggctggggaatcccggggctcatggcttgaagttgagccttggtgagaaccaggactgtgagctgac

SEQ ID NO: 553799 - DNA, 201 bp, Homo sapiens
acaggatgcaaaaccactactttcccttctgtgggtccctatagcaacgagcaacaatgcacacagcagtacagccacacaggctggggaatcccggggcycatggcttgaagttgagccttggtgagaaccaggactgtgagctgacccattcactctcaaggccttcagttctctgtacgatgcctcatctgccttcat

SEQ ID NO: 553800 - DNA, 201 bp, Homo sapiens
catgaacattatgagatgacaaagccagaaagcaaattgtttcacacctgcggaacacccggcctgaaccaagtgtcagtcaagcactgtgaagggtgacwctggccggatgggctggcagaatggtcatcgctgctgaagaggaataccaggcatgtggctgtgttgcctattctctctactgtttattagaaaatttcc

SEQ ID NO: 553801 - DNA, 201 bp, Homo sapiens
ctgacacctcatacagctgggtgctcctccgagatgaagcttccagaagaaggatcaggcagcaatatttgctgttctgcaatatttgctgttctgcagcmtctgctggtgatacccaggcaaacagggtctgtagtgaacctccagcaaactccaacagacctgcagctgagggacctgactcttagaaggaaaactaaa

SEQ ID NO: 553802 - DNA, 201 bp, Homo sapiens
gatgacaatccataccgggggtgtctaatcttttggcttccttgggccacattggaagaagaattgtcttgggccacacgtaaaatacactaatgatagcygatgagttttttaaaaaagtcacaaaaaaagtctcataatgttttaagaaagtttacaaatttttgttgggccgcattcaaagccgtcctgggcctcatg

SEQ ID NO: 553803 - DNA, 201 bp, Homo sapiens
ggaacacccggcctgaaccaagtgtcagtcaagcactgtgaagggtgacactggccggatgggctggcagaatggtcatcgctgctgaagaggaataccasgcatgtggctgtgttgcctattctctctactgtttattagaaaatttccattaacagaaaacttagaatttgaatcagaaagcactgaatgggtctgctg

SEQ ID NO: 553804 - DNA, 201 bp, Homo sapiens
gccagcacagacttgtccaggtctaccagtcctgtggaacacactgcagcttgaattccgtggctctgccaggcctactgatgctacacctgattcagttyccaacaccctccacacagagggacccccgatccctgccgagcgaggctgttttaactggttgggaaaatggcacaggtgatggtccttaaagctcaccaa

SEQ ID NO: 553805 - DNA, 201 bp, Homo sapiens
ggtttcaattcaactgagcagaggccctgacaaatatatatgctggaaaattcctccaaataatccacttattccctcagatacttaggagtgcaaaataygcaacagtcttctgtggtgcaagtcacctaaacagcccacacttacaagctgactactttggaactgctcagtcatcacattcattcttatcagggtgct

SEQ ID NO: 553806 - DNA, 201 bp, Homo sapiens
gcaccttccagcagaggtgccatgcgggcaagtaaacaagctcaaaaggtgaggagtccagggcagagaggatgggaaactgaagggcccatcaggtcacygatgtccattaccttgtcggggacaaacaattaaaatggaaacctttagaagtcactttaaggtttcaattcaactgagcagaggccctgacaaatatat

SEQ ID NO: 553807 - DNA, 201 bp, Homo sapiens
ctcagcccaccatttatatgaaatgttcagaataagctacagagacagaaagattaatagattactggttgactaggactggggagcttggagtaggaaayagagtgtgccttctaatggtcacaaggtttcttttggggataatgaaaatgttctaaaatcagatagtggtgacagttgcacaacttttaaaatatacta

SEQ ID NO: 553808 - DNA, 201 bp, Homo sapiens
atacaaaaattagctgggcatggtggcagatgcctgtaatcccagctactccggaggccaaggcaggagaatcactggaaccagggaggcggaggctgcaytgagccgagatcatgccactgcactccatcctgggtgacagagcgagactctatctcaaaaaaaaaaaaaaaaaaaatctttcaccttcatttttccctt

SEQ ID NO: 553809 - DNA, 201 bp, Homo sapiens
atgttacctcatgcttaagttttgtgaaaaaatagacctctgggaataggccttaaaaatgtttcaccttcagccaggcacagtggctcatgcctgtaatyccagcactttgggaggccaaggtgggtggatcacctgaggtcaggagttggagaccagcctggccaacatggtgaaaatccgtctctactaaaaatacaa

SEQ ID NO: 553810 - DNA, 201 bp, Homo sapiens
acatttccttgccagcacagacttgtccaggtctaccagtcctgtggaacacactgcagcttgaattccgtggctctgccaggcctactgatgctacaccygattcagtttccaacaccctccacacagagggacccccgatccctgccgagcgaggctgttttaactggttgggaaaatggcacaggtgatggtccttaa

SEQ ID NO: 553811 - DNA, 201 bp, Homo sapiens
ctgcggaaagggtaggcaccggtcaaagggtacgaagattcagttagacaggaggagtaacttctggtatctactgcacagtactgcaactagaattaataacttttatttattatttttttgagactgagtctcactctgttgcccaggctggagtgcaatggtatgatcttggctcactgcagcctccacctcccgggt

SEQ ID NO: 553812 - DNA, 201 bp, Homo sapiens
aacaatgtagataaagagggcagaatacaattattcccattttacatggatgctatctgaagctctgaaaacttacacagctgggaagaagaacgtaagaytcctggttcctatgatctactgatggacaaattgtgcttactatgtaaaaaatgactgaaaaatatacaaactgaatgtccaaaaaacacgcatcaagtt

SEQ ID NO: 553813 - DNA, 201 bp, Homo sapiens
ccatcagacttccgagcatgcagaagggctttactcagacatcccacttcatcacacagaatattaaaaagatgggtctccaagggtcaagatttaataayattacttttagtgcttcatcaaggacattcttcagtgaattatttgtgaagccagcacttggcagtgaagaacaccaggactaccagtgtagccagtgcc

SEQ ID NO: 553814 - DNA, 201 bp, Homo sapiens
aaggccactctggcatatatcagagctgagtctgaacccaggcagcgggatccagagtccactgtctcagtattgctccccttggagaaggctactgagaraggctttcaacattatgtcattttgcatacttaagaaggaaaaccaaaaatagtatatgtaggtctacgcacagtactgggccaccacagaggggaagaa

SEQ ID NO: 553815 - DNA, 201 bp, Homo sapiens
cctgcggaaagggtaggcaccggtcaaagggtacgaagattcagttagacaggaggagtaacttctggtatctactgcacagtactgcaactagaattaataacttttatttattatttttttgagactgagtctcactctgttgcccaggctggagtgcaatggtatgatcttggctcactgcagcctccacctcccggg

SEQ ID NO: 553816 - DNA, 201 bp, Homo sapiens
agccacgccacaaattaggcattgctattagcccccttttcagatgaagaaactgaggcacagaaaggatcaagtatcttgcccaaggccactctggcatrtatcagagctgagtctgaacccaggcagcgggatccagagtccactgtctcagtattgctccccttggagaaggctactgagagaggctttcaacattat

SEQ ID NO: 553817 - DNA, 201 bp, Homo sapiens
ggacctgcggaaagggtaggcaccggtcaaagggtacgaagattcagttagacaggaggagtaacttctggtatctactgcacagtactgcaactagaattaataacttttatttattatttttttgagactgagtctcactctgttgcccaggctggagtgcaatggtatgatcttggctcactgcagcctccacctccc

SEQ ID NO: 553818 - DNA, 201 bp, Homo sapiens
aggctgaggcaggagaatcgcttgaaccaaggaggcggaggttgcagtgagttgaaattctaccactgcacttcagcctgggtgacagagtgggactccawctcaaaaaaacaaaaacaaaaaacaagtattggtgacgatgtggaacaattctggagcccttatgcactgtgctatgaatgtaaaatggtgcagcagctg

SEQ ID NO: 553819 - DNA, 201 bp, Homo sapiens
actagggcattaaatgtgttagggcaccttttgtgcagtccccgccttacagtgcactaatgtttcttaaaggttgtataaccacataactctacatacayacacacacacacccccccctatatttacagaaaactgaaagatttcttccacaagatccagtatcatttttggacccttcagaagactacaactaaaagc

SEQ ID NO: 553820 - DNA, 201 bp, Homo sapiens
atggttgttttctcatcaccacctcactctcacactgagaatgcaagcaggtgctgtgcctacaagaaccacatcacgtcacctaattcatgggtgtacargcaagaatcaccaagagacagatcagaacttggaaagcactgaggccacagccccagaacattacatacaaaagacgtgtgggggaccttgaagaggtga

SEQ ID NO: 553821 - DNA, 201 bp, Homo sapiens
agagctaggctgcaccatgatgccagcgcgcagtggagccggatgccctctgacccgacaaacttgtaaaagctgagggatggttgttttctcatcaccayctcactctcacactgagaatgcaagcaggtgctgtgcctacaagaaccacatcacgtcacctaattcatgggtgtacaggcaagaatcaccaagagacag

SEQ ID NO: 553822 - DNA, 201 bp, Homo sapiens
tcctggaatagactgcatgtcacagaattagagaaaaatgaaagatccctgacaagacacacacacacacacacacacacacacacacacacacacacacwctctgatgacactgagacacaacctcatgcaggccctggattgagctgttcacttcctggggtttctttccaatgcaggtggaggtggggaacacctgct

SEQ ID NO: 553823 - DNA, 201 bp, Homo sapiens
caaaaaaaaaaaaaaaaaatacagccagtcctcatgtattcagataacacattttcctctgactgcttcttcccaccaatcaccttccccgctcgttagtrtgtactaagatggaactgaggatgtgcagggaaagaatgtaaatcattacctgcttcttaaaaagcatcttcaaactctaagtcacagagagcagaattt

SEQ ID NO: 553824 - DNA, 201 bp, Homo sapiens
tgcaacctcgactttccaggctcaagcaatcctcccacatcagcctcctaagtagctgagactataggcatgttccacaacacctggccagttttttttttgttttttttttttaatagacaaggtctcactatgttgctcaggctggtcttgaacgcctaggctcaagcaatcctcccgcctcagcctcccaaagtgttg

SEQ ID NO: 553825 - DNA, 201 bp, Homo sapiens
gacatcgagacacctttggccaagctcaccctataggtgtcctctgctgtgggaagactgctcacaggagagtcagcactgtggtcaaggtgcaggactgragaagtctctggaccaaagtcacttcctagagtagagagagaatacttaggttaaaccatccattcattataagttgatgcaaatttaactcctataaac

SEQ ID NO: 553826 - DNA, 201 bp, Homo sapiens
agaaaagtgtgtcagggtgcgggggatggctagaacaacccgtaaataattgtgataagtaaagaattggcctttggttcttcttttttttttatatatttggttttttttaagagagtcttactctgttgcccaggctggaatgcaatggcaccatgacagtgacagttcactgcagtcttgtcttctcaggctcaggct

SEQ ID NO: 553827 - DNA, 201 bp, Homo sapiens
aaaacccccaatataaatctaaatatctctacaaatatattttattgttccttgcttaatgggcatttcccaaaagcaggtataccataggtttaaaaaaatacaaaaacaaaacaaccctatatcttcaacactatcatgcctgaagttttttaaaaaaatatttaaccctcataattacttaatgatacagagcaatac

SEQ ID NO: 553828 - DNA, 201 bp, Homo sapiens
ttactagggatgctaaggcaggaggatcgcttgagttcgggaattcaagatcagcctggacaatatagtgagaccccatctctttaaaaaacaacaacaacttctcatagtgctatcatattttctccaaaagattcactttttgctgaactgagattcaccttctggtttctaatatcttgagcattatctcatccctcc

SEQ ID NO: 553829 - DNA, 201 bp, Homo sapiens
gttactagggatgctaaggcaggaggatcgcttgagttcgggaattcaagatcagcctggacaatatagtgagaccccatctctttaaaaaacaacaacaacttctcatagtgctatcatattttctccaaaagattcactttttgctgaactgagattcaccttctggtttctaatatcttgagcattatctcatccctc

SEQ ID NO: 553830 - DNA, 201 bp, Homo sapiens
agttactagggatgctaaggcaggaggatcgcttgagttcgggaattcaagatcagcctggacaatatagtgagaccccatctctttaaaaaacaacaacaacttctcatagtgctatcatattttctccaaaagattcactttttgctgaactgagattcaccttctggtttctaatatcttgagcattatctcatccct

SEQ ID NO: 553831 - DNA, 201 bp, Homo sapiens
ggactctacagccctgctctccataaagaccactggactgggaatagggagaagcatgaatcagtgggcgccagaatctttttaatattgttaccatcccrtggtaacactgtgcccatctctcagtcaacaggcttatatcactcttccccacctctgaacttcctaatgtccctagttggcagtttccttgaaatatgg

SEQ ID NO: 553832 - DNA, 201 bp, Homo sapiens
gagaacacagccccagccaatacccaattaggagcctggtaagatcctgaagtagagaatccagccaaactgtgccaagaattctgatctagataaagackggtgggaagtctgttgtttctcatgtgtgtctttagccatcaactgatgggcagattctcaagcaggatgataatgcaattcaggactggtcattgagag

SEQ ID NO: 553833 - DNA, 201 bp, Homo sapiens
ggtacctctgggctgcctctttcattttccctttctaggattcaaaaatcacaaacatttgtcctttttcagaggttctaaaatgaataactcccacaccyggaacaccgtggggagtttactcccccctgcaaacccacgacagaacattgaaagcatccaaacaagtgtcaaggtgggagctagttcactaactgggct

SEQ ID NO: 553834 - DNA, 201 bp, Homo sapiens
gagaggctttcaacattatgtcattttgcatacttaagaaggaaaaccaaaaatagtatatgtaggtctacgcacagtactgggccaccacagaggggaaraaaaaaaaaacaaaaaaacaccctgttccctcgtctattttcacttttcatgccggctggttaattagctccacagcactcctgcagcactccttttggg

SEQ ID NO: 553835 - DNA, 201 bp, Homo sapiens
ttaggagcctggtaagatcctgaagtagagaatccagccaaactgtgccaagaattctgatctagataaagactggtgggaagtctgttgtttctcatgtrtgtctttagccatcaactgatgggcagattctcaagcaggatgataatgcaattcaggactggtcattgagagaagagagctcaaacaaagccttcaaag

SEQ ID NO: 553836 - DNA, 201 bp, Homo sapiens
atccttgtcttcaaaaatccacccagtgggatctaaacagagatcagtaaatactgtccgcatggttttattcttaatactcaatggttatagaaccaaaygtacaaatgtgccttatcctgaaacagatgagtaaacagactggcatttcctctctaattgtcaaagttttccttttaagacatatcagcatgcaagagt

SEQ ID NO: 553837 - DNA, 201 bp, Homo sapiens
aagtagagaatccagccaaactgtgccaagaattctgatctagataaagactggtgggaagtctgttgtttctcatgtgtgtctttagccatcaactgatkggcagattctcaagcaggatgataatgcaattcaggactggtcattgagagaagagagctcaaacaaagccttcaaagtcagcccttctctggaattttc

SEQ ID NO: 553838 - DNA, 201 bp, Homo sapiens
ctttattcagacaatcatgattaattctcaaacaataccactaagaggcaagaaagcagctaacccctagggtacaagaaacctagccaacaggacagcayatccttgtcttcaaaaatccacccagtgggatctaaacagagatcagtaaatactgtccgcatggttttattcttaatactcaatggttatagaaccaaa

SEQ ID NO: 553839 - DNA, 201 bp, Homo sapiens
attaaaatgttagaaattctcacttgagctaaatgtgtgatgtcatggctgctagacctgatgtccatcgtcttcatgggtacctctcactgtgtgtcacyctatgtcaggctttctagacagctctgcagggagctaggagtaacctgaaatgacttgggatgcttgttaagaaaatcaaatcctgggctttccccctag

SEQ ID NO: 553840 - DNA, 201 bp, Homo sapiens
actcatgtagaaagttcaaggagctctaaacttcaaatgcttgtgataaaatagaaacaggactacatatatcagtcattcttaagacaattaggccaaartagggctaaaacatcaagcaagctgccccagactacaagcagtggcattataattacctgtttctccccacaatgtgtcggtgccattgacttctacttc

SEQ ID NO: 553841 - DNA, 201 bp, Homo sapiens
aaatgtgttagggcaccttttgtgcagtccccgccttacagtgcactaatgtttcttaaaggttgtataaccacataactctacatacatacacacacacmcccccccctatatttacagaaaactgaaagatttcttccacaagatccagtatcatttttggacccttcagaagactacaactaaaagcacttgaagcca

SEQ ID NO: 553842 - DNA, 201 bp, Homo sapiens
tgtgtcggtgccattgacttctacttcatgttccttctccatccccagcaagcactggaccacctgtcagaagtggcaaggtgatttaatgagttctcttwgcaagaggtgcttattatagcccatgtatcaaaggagacagtgtgttgttttttaaccattatctcacactgcccaaggagagaaaaatataatgaaaac

SEQ ID NO: 553843 - DNA, 201 bp, Homo sapiens
acattctcaccacttcacacgtttaagagctttaatttggggaaaaagatagagatccccaaaacgacacatttttagtgagtattttaaatacataaggmgtcagcacactttgctacaaagggtatgacagtaaatatttcagactttgcaggttacatatagcctctgtcactcatacacacacactcctttgcttct

SEQ ID NO: 553844 - DNA, 201 bp, Homo sapiens
ttatgggactcttcctgtcaaagggcgggtcaagtcacaggtatggaggcaggaagcctggcttgcagggagacaaggcatctgtgccctggacctgagcyggcgttcaccctgagcaacagcagcgagcaacgggagaacacgacaaagccaccttccagtctcctagcccacaccctttgtggtaggctgaataatggc

SEQ ID NO: 553845 - DNA, 201 bp, Homo sapiens
actgagaatgcaagcaggtgctgtgcctacaagaaccacatcacgtcacctaattcatgggtgtacaggcaagaatcaccaagagacagatcagaacttgsaaagcactgaggccacagccccagaacattacatacaaaagacgtgtgggggaccttgaagaggtgacactggttttccatgtggtttgaagagagctac

SEQ ID NO: 553846 - DNA, 201 bp, Homo sapiens
gcgcgcagtggagccggatgccctctgacccgacaaacttgtaaaagctgagggatggttgttttctcatcaccacctcactctcacactgagaatgcaarcaggtgctgtgcctacaagaaccacatcacgtcacctaattcatgggtgtacaggcaagaatcaccaagagacagatcagaacttggaaagcactgaggc

SEQ ID NO: 553847 - DNA, 201 bp, Homo sapiens
gtgtgtttaacagtatctctctgtgtgtgtgtgtgtgtgtgtgtgtttaatgtttaaaccagaaattagccagccactatttcatgcttgtgtgtgtgtcygcccatgagttttgaatgccaaagtcagccagccagcttcccactcgaatttactaaagtcattttagaaaaagaatcttaccaaatactggcacctcta

SEQ ID NO: 553848 - DNA, 201 bp, Homo sapiens
agttctgtcctcaagggagagaagcagacaggagttagaggcctttcctcctagaggctgtgtggacagcagtggcccccaggctggcccccacccccccsccacacacacacaagcttcatccaccctcttttgctagctagcactgtaagataccattgtcaccaatccccagaaccacaggggccagtcttatagcac

SEQ ID NO: 553849 - DNA, 201 bp, Homo sapiens
gagcatgtgtggagacacagaccaaaacctcggacaaatccctgtatttcccaactttggttgcttgggtggggcattctaagtctgctgtgacaagctakaatttgaaggagtagagccactctctggtcactgagccaggggatccgaagaaagagagggatgtggaaaaacagctgagtgtggaagggcaggaaagga

SEQ ID NO: 553850 - DNA, 201 bp, Homo sapiens
gtcattgtgcgaacatcctcaagtgtacttcacaaatcaaggtggcatagcctactatatacctaggctatatggcatagcctattgctcctaggctacawacctgtacagcacgttactatactgaatgcagtaggcaactattaatgtagtggcaagtatctgcatatctaaacatagaaaaggtacagtaaaaacaca

SEQ ID NO: 553851 - DNA, 201 bp, Homo sapiens
tgtttacatgtaattgagaagaatccttacactggcatatgatcaactgggccccaaattatccgccttttgtaaacactccacaaaccttaaaaaaaaaraatccaagaatttttaaaactcaaggtatcagcattttagaaaggctttcctcacatgtgaatcataacctctcaaagttctgttttgttttttttgggt

SEQ ID NO: 553852 - DNA, 201 bp, Homo sapiens; identical to SEQ ID NO: 506961

SEQ ID NO: 553853 - DNA, 201 bp, Homo sapiens
ctgcccacgtgaacgcacaatcaagagaggcctcatgtaccagcagttggctatcctaaccagacaccacagtggaatctccaccttcaccagcaacattyggtgtgcacaaatcctcagctcaaatcctcttccctcaaccacacaatgagtgcctggacagaaaggaaaagggtggcatttctcatgccaagacacctg

SEQ ID NO: 553854 - DNA, 201 bp, Homo sapiens
aaaaccatttaacatgatttttgctattaagttcctatctattttctaaagttggtcccagggaaggagaaaaattagtgaattctctgccaaacgaaaactgaagggggaaaaaaaaaacccacaactttctaaataaatttcctttctgataaatctctatgggcaatacacttaaattgctatttcaatgttactttg

SEQ ID NO: 553855 - DNA, 201 bp, Homo sapiens
taaaaccatactttttccttaaattaaaaaaaaaaaaagatttatttcttctagaagatactgcgacaaagaaaaaacattgtcccagaagatttctcatrggcactagttttgcttattttcaatgcaggtactacatatataaccaaggcagctccttcattgcctgtttacctggggattttttgttcactcttgatt

SEQ ID NO: 553856 - DNA, 201 bp, Homo sapiens
gcagtaggcaactattaatgtagtggcaagtatctgcatatctaaacatagaaaaggtacagtaaaaacacagtattataacctcatgggaccaccatcayacatgcagtttgtcattgatcaaaagaaacatcattagtcggtgccataactgtatagtgctccttaattcatcagcaagaaaacaacaaaattgctggt

SEQ ID NO: 553857 - DNA, 201 bp, Homo sapiens
actggcagacacctcccagtaggggccaactgacacctcatacagctgggtgctcctccgagatgaagcttccagaagaaggatcaggcagcaatatttgmtgttctgcaatatttgctgttctgcagcctctgctggtgatacccaggcaaacagggtctgtagtgaacctccagcaaactccaacagacctgcagctga

SEQ ID NO: 553858 - DNA, 201 bp, Homo sapiens
gctgtgccatctatacggaacactcccccacataaagcagccacagtccttatcaacagagatccagactgaaaaatccatctccccaagccctcactcarggaaaactactgcccagcaccttcccctcacaactttttgtttaaaacgaaatattcaagcataagctacttttaacttcccccttttacttaaaccaag

SEQ ID NO: 553859 - DNA, 201 bp, Homo sapiens
ccagaaaattctgcaacaataaaagattttggacactcacaaattcatagcaccgtttctaacattcagagcctttaagggtgccctcctaattttacccrcacataaacctcaaagatctactaaatgagtcagcataggtgatctcaagtaatacaaatattaccaggaaatcagagaaacagataccatttcacagcc

SEQ ID NO: 553860 - DNA, 201 bp, Homo sapiens
gtattaacatacatatttttattattacaggctgtgttgttcagagtgtcttcttacaggggtttgtagtatttgatccttgcaagaataattgttccagyccctaacagtttctggattagcatcaattagtgaagagtttctatacaaacaactgaaacaagtttggtttttttgtttttgttttttaaccttgaacaa

SEQ ID NO: 553861 - DNA, 201 bp, Homo sapiens
caaaagactagaagaaaagatgttcacagtagttctttctcgatgggatttccagattttctacaagaaatacttgcgggttgggggagggagtgccttcrcagacattaactcatggtccaagaatcaaagagacaatatggcttctactccacagcctgtcaatttagtggtttttcccttaacaaaacaggcagagaa

SEQ ID NO: 553862 - DNA, 201 bp, Homo sapiens
gacctctattaataagctattgatgatgtaactgtttataaacatgcagcacactgtctgaaacacagcaaacactcaaaaaaaaaaaaaaaaaaaaaaaagacacacacacttttcagccaagtgaggttgctcacacctgtaatcccagttactagggatgctaaggcaggaggatcgcttgagttcgggaattcaaga

SEQ ID NO: 553863 - DNA, 201 bp, Homo sapiens
caatgaaaaaaaaaaccaaataaatggaggaaggtggcagaagagtaaataaaaataataacctcaatatgagtggaaagtaagaaactcaatcatgtaayatgcagggtcacattattgcaaggttaattaaattatctctggcccacagttcccaagatccaggaagtaatcatcaattgtattaacatacatattttt

SEQ ID NO: 553864 - DNA, 201 bp, Homo sapiens
cagagaagttttcaaaactgctacatcagctatgtccactgtgagacagaactggaactggaatcggcagaagcggaagtggccggcactctccagtgtckccatacaaggagtagggcagtatcgcccacttgtcaccatctgctgtcttactccatcacagcatttcaaagggttgcttctcattcattcatgatgttt

SEQ ID NO: 553865 - DNA, 201 bp, Homo sapiens
tgacctctattaataagctattgatgatgtaactgtttataaacatgcagcacactgtctgaaacacagcaaacactcaaaaaaaaaaaaaaaaaaaaaaaagacacacacacttttcagccaagtgaggttgctcacacctgtaatcccagttactagggatgctaaggcaggaggatcgcttgagttcgggaattcaag

SEQ ID NO: 553866 - DNA, 201 bp, Homo sapiens
atactttataaagtatctaatgatattactaataaatcacaggaaatgagcttttctcttctctggaaaacagcagcacacattacaaatattgatgaatwcttaatccaaaaagacttgcaactgccacagaactactttaatggatgctggtccttgttttcattaacagaaaatatatttaccattaaaaacaaaagt

SEQ ID NO: 553867 - DNA, 201 bp, Homo sapiens
ttgacctctattaataagctattgatgatgtaactgtttataaacatgcagcacactgtctgaaacacagcaaacactcaaaaaaaaaaaaaaaaaaaaaaaagacacacacacttttcagccaagtgaggttgctcacacctgtaatcccagttactagggatgctaaggcaggaggatcgcttgagttcgggaattcaa

SEQ ID NO: 553868 - DNA, 201 bp, Homo sapiens
taaatggttaagatggtcaattttgttatatgtatttcaccataattaaaaatattcacaccaggaatagcgaaaacaaattataacatgctaattttttwaaaaagtaagtatctggccaggcggggtggctcatgcctgtaatcccagcactctgggaggccgaggtgggcggatcatgggatcaggagatcgagacca

SEQ ID NO: 553869 - DNA, 201 bp, Homo sapiens
tttgacctctattaataagctattgatgatgtaactgtttataaacatgcagcacactgtctgaaacacagcaaacactcaaaaaaaaaaaaaaaaaaaaaaaagacacacacacttttcagccaagtgaggttgctcacacctgtaatcccagttactagggatgctaaggcaggaggatcgcttgagttcgggaattca

SEQ ID NO: 553870 - DNA, 201 bp, Homo sapiens
tcctatcaggaggacacaagacaatattctgcaaatctcctgcaaatctacaactggggatatagaccgtcggtactgtgtcaggcacattggggttacgrgagaaatctaaaactctgtctaccctctcctgcaaagatcttaccccctagccagcatggggaactcataatgcattgtgaaattatcacactgctataa

SEQ ID NO: 553871 - DNA, 201 bp, Homo sapiens
tatcagttcacattctctagaatggctataataaaaaagacaatacaagcattggcaaggatatgaagcaattggaaacctcatactcagctggtagtgayataaaatagtacagccacttaaaaaataatttggcggcaacttaagaaggttttacggaactaccatatgattcaacaatttcactaggtatatacccaa

SEQ ID NO: 553872 - DNA, 201 bp, Homo sapiens
gtagcagggagtctgaagcagcctacaaaataaataatacagactaaagcaaataagaaaaaacaaagcgtaagagaccaaaaaaaaaaaacaacaacaamaaaaaaccacacacacacacacacacacacacacacacacacacacacacacaagaggtctgctagatggtacactggctgttatctagaaactcatgga

SEQ ID NO: 553873 - DNA, 201 bp, Homo sapiens
ctttgacctctattaataagctattgatgatgtaactgtttataaacatgcagcacactgtctgaaacacagcaaacactcaaaaaaaaaaaaaaaaaaaaaaaagacacacacacttttcagccaagtgaggttgctcacacctgtaatcccagttactagggatgctaaggcaggaggatcgcttgagttcgggaattc

SEQ ID NO: 553874 - DNA, 201 bp, Homo sapiens
gtcaagaactgaggtttgagaatctctgcctagatttcagaagatgcacgggaatgcctggatgccctggcagaagtttgctgtaggggtagacccctcayggagaacctctgctacagcagtgtggaaaggaaatgtggggtcagagcccccacacaaagtccctaagggggcaccacctagtagagctgtgagaagagg

SEQ ID NO: 553875 - DNA, 201 bp, Homo sapiens
aattttcacaacttaataaacctacaatgagatatcagttcacattctctagaatggctataataaaaaagacaatacaagcattggcaaggatatgaagmaattggaaacctcatactcagctggtagtgatataaaatagtacagccacttaaaaaataatttggcggcaacttaagaaggttttacggaactaccata

SEQ ID NO: 553876 - DNA, 201 bp, Homo sapiens
taccaaactaccctttctcatttaaaaattcgttaaacttctaaaacccctcccatgcacttcttataaattagatatttgtctaaacaaacaaaaatagkggcaaaaggatattttcaaaggaaacttactttttacatgatgaagacatgcacttgggggtgggtaggtgtgagttctcatttgtgttttgaaatccca

SEQ ID NO: 553877 - DNA, 201 bp, Homo sapiens
aaatttctaagcagcaaagcattcaaaaggttacctgggtgctattaaaggcatccagttttataagggaagcagagcatctaagttcagaaaatttgcarcctgacaatgcaatagaaaagaaaattctattttctgaggagaaatccaagccagctgtagaaatttgcgtaagtaatgaagagccaatgttaatcccca

SEQ ID NO: 553878 - DNA, 201 bp, Homo sapiens
cccaggttcaagccattcccctgcctcagccttctgagtagctgggattacaggcattcaccaccacccccggctaatttttgtatttttagtggagaggkggtttcgccatgttggccaggatggtctcgaactcctgacctcatgatccgcccgcctcggcctcccaaagcatttggattacaggcgtaagccaccatg

SEQ ID NO: 553879 - DNA, 201 bp, Homo sapiens
tcaggagatcgagaccatcctggctaacacagtgaaaccctgtctctactaaaaatacaaaaaattagccaggcgtggtggggggcacctgtagtcccagstacttgggaggctgaggcaggaaaatggcatgaacccgggaggcagagcatgcagtgagccaagatcacaccactgcactccaccctgggtgacagagcg

SEQ ID NO: 553880 - DNA, 201 bp, Homo sapiens
aagtcacaaaaaaagtctcataatgttttaagaaagtttacaaatttttgttgggccgcattcaaagccgtcctgggcctcatgtgacccacaggccgtgsgttggacaagcttgagctatactacagactaaggcattctatactatatatctatactatagactattaaagataaggaaagaaaagcaggaaatttaaa

SEQ ID NO: 553881 - DNA, 201 bp, Homo sapiens
attcaaaaatcacaaacatttgtcctttttcagaggttctaaaatgaataactcccacacctggaacaccgtggggagtttactcccccctgcaaacccaygacagaacattgaaagcatccaaacaagtgtcaaggtgggagctagttcactaactgggctggcacatgagggcttcactgtcctcacatgcacccgcat

SEQ ID NO: 553882 - DNA, 201 bp, Homo sapiens
gggccatcccctgtgagtttacaatcttgagtcaggcagaagacacctagctctaaggagaaactccactgcatttgggaatttcttaaataaactgatgyctttttggcacaaatgctgtttggcataaaaggttccttaaaatactattggtaattcaaagtgagagaatataatatcttttatcttataaatattaca

SEQ ID NO: 553883 - DNA, 201 bp, Homo sapiens
tgcccaaatgactggcatttgaagaaacaagacagatcagaaaactcactagggctgggtgcagtggctcatgcccataatcccaacattttgggaggccraagcaagcgaatcacgaggtcaggagttcgagaccagcctggccaacacggtgaaaccctgtctctactaaaaatacaaaaaaaatagctgggcatggtg

SEQ ID NO: 553884 - DNA, 201 bp, Homo sapiens
cattctgcaaatatataacttccttctcctcaattttagaaaataaatttcacatcccaacatataaaacagatacactcctacttctctcaaattagcaytttaacatcttccaataacacaccattttcatataaaaatacctttaaaccaaggttcattcctgtaccttatctttacaaatgaataatacatcagagc

SEQ ID NO: 553885 - DNA, 201 bp, Homo sapiens
actgaatgcttactcaacagccctgtggtagggactgctgttatgcccattttacagataagaagcctgaagtcatatataggctcaataacttgcccaayaccctagggctggcaagtggaaagatgaagattccaggcaatctagttcctggagctcaggcacatggcttcttcatgagttcatggaactcatcctact

SEQ ID NO: 553886 - DNA, 201 bp, Homo sapiens
agtgagactcagtctcaaaaacaaaaacaaaacaacaaaaaataacaatagaacggccatgtgatcagtcatcccacttctgggtacatattcaaaagaaytgaaagcaggatctcaaagacatatttgtaccctcatgttaattgcagcattattcacaacagccaacaggtagatgcaacctcagtgttcatcagtgga

SEQ ID NO: 553887 - DNA, 201 bp, Homo sapiens
ctccctatgttgcccaggctggttttgaactaatgggctcaagcgatcctcccacctcagcctcacatggtgatgggataacaggcgtgacccaccatgcscggcctctctacactgctctgatcataccatactattaagacaagacttggcatacatcccaaatacatgtactataaattatgtacatatactattata

SEQ ID NO: 553888 - DNA, 201 bp, Homo sapiens
caacagagatcccttaaaaatatcgatagtttctgaattatctctattatctattatatagagatgaggtataagacatcttgtttgtcctcaagcatcaracagaggaagcacataatgtttttaagaagaaaaaactactcagtgatacttttaaaagcatagtagggcagactttattcaggaccatcttaacacata

SEQ ID NO: 553889 - DNA, 201 bp, Homo sapiens
cacctgcccactaaatgtgaaaaccacagagactatcatttattgactagagacacatggggatcattaaaagatacagagagatgacaaggcataaaaamttcatggtatttcagtgatagatgtccacaagagtagctgacaaacagaatatttacaaacaaatgggtctggaaaattatactaccaagtagtgaaacc

SEQ ID NO: 553890 - DNA, 201 bp, Homo sapiens
cctcaaaacttgccctagtagctagaaatatattaatgcaaacctaaataaattatggttacccctaaatcaaagaaataaagcgtggatcctgttataayaatcatctctaatttatctgaaggttttttttcccttaacgcagatattgtttgtgggtaaatgagctttcccctaaacgatatgttgatttagcaatag

SEQ ID NO: 553891 - DNA, 201 bp, Homo sapiens
gggcagtgaacaagcactgctccgttagagatgtatctgcttagtttatttaattatcatttggaccaaaaacatctaatagagagaacatcccaaatccrccagaagcttgtatgtttcagaactattaaccttctattctaaggccttgcaaagaatttagcaaaaataaatttcattcctatggagaaaaacttgagg

SEQ ID NO: 553892 - DNA, 201 bp, Homo sapiens
tcagtgatagatgtccacaagagtagctgacaaacagaatatttacaaacaaatgggtctggaaaattatactaccaagtagtgaaaccataactcacaayggcatagtgacaggttagaaccccaggtgtcaaatttgaagatgtcttggctgctgaagcttgaacctctgtgatacaggcctccagcttcctctctgat

SEQ ID NO: 553893 - DNA, 201 bp, Homo sapiens
ttgggaggccgaggtgggtggatcacctgaggtcaggagtttgagaccagcctggccaatatggtgaaactgagtctctactaaaaatacaaaaattagcyggttgcggtggcacacgcctgtaatcccggctactcgggaggctgaggcaggagaatcacttgaacccaggaggcggaggttgcagtgagccaagatcac

SEQ ID NO: 553894 - DNA, 201 bp, Homo sapiens
tggggggcatcttacaaatcagaacaaaagtcatcaaggtagtttcggagcacatgtctgaatgatggcacgaccctggagcatgacccactgtggggccrgcgtggaaggagaggaggggagtggctccatacctctgggtgctgcagacacactgtattgactctatcattagcagcaacagtgctagcttttaaaata

SEQ ID NO: 553895 - DNA, 201 bp, Homo sapiens
gcctgggcaacaagagcaaaactccatctcaaaataataataataaataaaaataaaaataaaataataaaagtgttttaaaaatccctttgagtaacagygtggacagaatcagattatgctgaagaaataggattttattaaggccaatgaaaccagtcctcagcaagaggagtagagaagatacacatctggaaatac

SEQ ID NO: 553896 - DNA, 201 bp, Homo sapiens
ggtgccacctaagaaaacagcagcatgccatcccattctatctaacaggtactcttttgctaataatggtggaaggtatacttggagtaccatgatgaatyccttacaagagtttacctggaaggcatgtgctcagggcagaggtttcctaaagatgtcatcaattcacacttcctctgcttctgggaataacattttcct

SEQ ID NO: 553897 - DNA, 201 bp, Homo sapiens
ggatgggactccagtgggccagcggggcccaggctggccccatcctggcctggccacaggagacaacatggttagagactgctggcatgccactgcaactraaatccatctaccaagtaatcatcccagagcaagtcactttaatttaccaaagtggcaaactgcaattattgttcaaaatgacattcattcctgtatgac

SEQ ID NO: 553898 - DNA, 201 bp, Homo sapiens
agcctgggcaatagagcgagactccatctcaaaaaaaaaaaaaaaaaaaaaaaagcaaatatccaacaatcagaaatgtttaaaaatcaattataaaatamtgaaacaatggacaacaaatatcaaactcttcaagtaaactggaaattgctcgtgataaaatattaagcaagagctgggtgcagtggctcatgcctgtaa

SEQ ID NO: 553899 - DNA, 201 bp, Homo sapiens
catttgggctgaggtgcatggagcgtttcttggatggctgacagagctgtctaaaatctccaaagcaaaacctcaaaatgacaacaaagaaacccttcccyaagttggtgtgcatctcaccttgaaaatgtgcgccttcaggatgtggtggccaagctccatggtctgctggcggttcaacttgccctcctgacgcgagaa

SEQ ID NO: 553900 - DNA, 201 bp, Homo sapiens
agcattattcacaataaccaaagtgtagaagcatcctaaatattcactaacagataaatggataaacaaaatgtgatatatacacataatggatcattccrccataaaaaaaggaaatcctgatacatgctaccacatgaatgaaacttgaagacatcacacaagagaaataaaacagtcacaggaggataaacagcacac

SEQ ID NO: 553901 - DNA, 201 bp, Homo sapiens
aaggactgttacatttaaaattgcctatgcgtccattagtattttcaaccaatcacatggaactgatgggcatggaaatactaaaatcctattggttttarcagttacttacctatgctccatcaccaggataaagaaagtgattggattctgaagatacaattggatcctgttttcagtgctcccaagggggaatgacaa

SEQ ID NO: 553902 - DNA, 201 bp, Homo sapiens
ttatgacttatcaattatttcaagaatttctcatgtaatatttttgaaccacagttgactgcaggtaactgaaaccacagataaggaagaactaccgtatyctcacatggctaacagaaagagctctagtaccttcctcttcttatataagggcattaatcccatcatggaggttccaccctcctgatttcaaaacttaat

SEQ ID NO: 553903 - DNA, 201 bp, Homo sapiens
gcactttacagcttctccttggcatttccaaattgccagcgtcaccactcttgtgctttggggccacagttaagtaaaataaggttgacttgaatacatgyggtgtgatactgtgacagtcagcctgacaactgagagggctactgagtgattaacaggagggtagcgtgtgcagcacatggacactgggccaagggaaga

SEQ ID NO: 553904 - DNA, 201 bp, Homo sapiens
aaggaagcactttacagcttctccttggcatttccaaattgccagcgtcaccactcttgtgctttggggccacagttaagtaaaataaggttgacttgaayacatgtggtgtgatactgtgacagtcagcctgacaactgagagggctactgagtgattaacaggagggtagcgtgtgcagcacatggacactgggccaag

SEQ ID NO: 553905 - DNA, 201 bp, Homo sapiens
atacaatgttttttctttattaagtcaagaacttttgcctttccacttaaaggaagcactttacagcttctccttggcatttccaaattgccagcgtcacyactcttgtgctttggggccacagttaagtaaaataaggttgacttgaatacatgtggtgtgatactgtgacagtcagcctgacaactgagagggctactg

SEQ ID NO: 553906 - DNA, 201 bp, Homo sapiens
gctaggcaggaactaaattctgcagatttttgtgtacaaggctcaaaggggatacaaaccagaccatcaagtttcaagtggtatcactgtgcttgttttttgtgttaggagtcaagaggaagtagagtcaccccctccatataggacatatgccttatatgagacatataggacaggtacatgccttactttttttttttt

SEQ ID NO: 553907 - DNA, 201 bp, Homo sapiens
cagtgcctccttatctgcagaggatatataccaaggcctccagtggaaactgaggatagtactgaaccctgtatacacactatgctttttcctatacatayatccttcgcttgcactaaatggctttgtgtcactcatttcaggggacctctcttgcagaattttctccatagtctcaacgctttctcttggcaacatgtt

SEQ ID NO: 553908 - DNA, 201 bp, Homo sapiens
gaaccttaagaagcagaaaggatgtaatcacaatgttaaaaaatatatacaagaaagagtatcttggctggaactagtctcccaaaaaaaaaaaaaaaaaatacagccagtcctcatgtattcagataacacattttcctctgactgcttcttcccaccaatcaccttccccgctcgttagtatgtactaagatggaactg

SEQ ID NO: 553909 - DNA, 201 bp, Homo sapiens
tggtacagtgtaatcctgagtacaagctatctacttcatctggtgctcgtccaaataaacaacaatctgtttaaatggcagaacaacggctgtgccatcargagacagcatgtctgcagatggcatttaagccatctgagggatgttcaagggtaacctgacacaaaggcttctgcctcaagtgctgactttatcacttac

SEQ ID NO: 553910 - DNA, 201 bp, Homo sapiens
gcgtggtggtgggcgcctgtagtcccagctactcggaaggctgaagcaggagaatggcgtgaacctgggaggcggagcttgcagtgagcccagatcacacyactgcactccagcctgggcaatagagcgagactccatctcaaaaaaaaaaaaaaaaaaaaaaaagcaaatatccaacaatcagaaatgtttaaaaatcaa

SEQ ID NO: 553911 - DNA, 201 bp, Homo sapiens
agaaaaaaatctgcttaaacttcacaaccttaaaaaaaaaaaatactggctgggtgtggtggcttacacctgtaatcccagccctttgggaggccaaggcygggggatagcttgaggctaggagtttgagagcagcctggcaacacagcagaaccctatctctataaaaatgcaagataaaaaaattacccggccatggtg

SEQ ID NO: 553912 - DNA, 201 bp, Homo sapiens
gggcggatcatgggatcaggagatcgagaccatcctggctaacacggtgaaaccccgtctctactaaaaatacaaaaaattagccaggcgtggtggtgggygcctgtagtcccagctactcggaaggctgaagcaggagaatggcgtgaacctgggaggcggagcttgcagtgagcccagatcacaccactgcactccagc

SEQ ID NO: 553913 - DNA, 201 bp, Homo sapiens
aattataacatgctaattttttaaaaaagtaagtatctggccaggcggggtggctcatgcctgtaatcccagcactctgggaggccgaggtgggcggatcrtgggatcaggagatcgagaccatcctggctaacacggtgaaaccccgtctctactaaaaatacaaaaaattagccaggcgtggtggtgggcgcctgtagt

SEQ ID NO: 553914 - DNA, 201 bp, Homo sapiens
tgttatatgtatttcaccataattaaaaatattcacaccaggaatagcgaaaacaaattataacatgctaattttttaaaaaagtaagtatctggccaggmggggtggctcatgcctgtaatcccagcactctgggaggccgaggtgggcggatcatgggatcaggagatcgagaccatcctggctaacacggtgaaaccc

SEQ ID NO: 553915 - DNA, 201 bp, Homo sapiens
ttttgttatatgtatttcaccataattaaaaatattcacaccaggaatagcgaaaacaaattataacatgctaattttttaaaaaagtaagtatctggccrggcggggtggctcatgcctgtaatcccagcactctgggaggccgaggtgggcggatcatgggatcaggagatcgagaccatcctggctaacacggtgaaa

SEQ ID NO: 553916 - DNA, 201 bp, Homo sapiens
aaaattagccaggcgtggtggcacatgcctgtaatcccagctactcgggaggccgaggcaggagaatcacttgaacccgggaggcaaaggttgcagtagcygagattgtaccactgtgctccagcctgggtaacagagtgagactctgtctcgaaataataaaattaaaaaatatatatatatgagggtatgcataagcta

SEQ ID NO: 553917 - DNA, 201 bp, Homo sapiens
tcgattaagcccaggaggaagaggttgcaatgagccgagattccccagcctgggtgacacagcaagaccctgtctcaaaaaaattttttaaaaaaatgccrtaagtttaaaaagaaaaaaatctgcttaaacttcacaaccttaaaaaaaaaaaatactggctgggtgtggtggcttacacctgtaatcccagccctttgg

SEQ ID NO: 553918 - DNA, 201 bp, Homo sapiens
aggtgggaggatcgattaagcccaggaggaagaggttgcaatgagccgagattccccagcctgggtgacacagcaagaccctgtctcaaaaaaattttttwaaaaaatgccgtaagtttaaaaagaaaaaaatctgcttaaacttcacaaccttaaaaaaaaaaaatactggctgggtgtggtggcttacacctgtaatcc

SEQ ID NO: 553919 - DNA, 201 bp, Homo sapiens
atttactatctggcccttgacagaaaaagtttgcctattctgctcaaaggtcatcaattgccatatttccaaaagctaacaggtcctttgttttttttttkttgttgttgttgttgttgttgttgttttttgagactgagtcttgctctgtcacccaggctgtaatacagtggtacaatctcggctaactgcaacatctgc

SEQ ID NO: 553920 - DNA, 201 bp, Homo sapiens
ctccagcctgggcaatagagcgagactccatctcaaaaaaaaaaaaaaaaaaaaaaaagcaaatatccaacaatcagaaatgtttaaaaatcaattataarataatgaaacaatggacaacaaatatcaaactcttcaagtaaactggaaattgctcgtgataaaatattaagcaagagctgggtgcagtggctcatgcct

SEQ ID NO: 553921 - DNA, 201 bp, Homo sapiens
gctggctccctcctctctctcctctcaacccaacaggcggagtctcctaaggatccaggaccctcctccctcactgaaaatccaatggcttcctcttaacsgtcatttcccttcacctcttggcaacacttacatccgtaaggtccctccctgaaaccctcctccacgccctggaagcccagtgctatcttttctctaatg

SEQ ID NO: 553922 - DNA, 201 bp, Homo sapiens
gcacaaccatgaaaaatgaaaatgacacttttctaagacttctaacagcttagtaaggtgcccgtgatgtgttaagcaaaaacccagataagaattccaaragaaaaagaagattggtatatcatttaaaatgctacagaaagaggcagaaataaaaaatgaactgtctttgtctgagggttgaaattttctgcttttata

SEQ ID NO: 553923 - DNA, 201 bp, Homo sapiens
caagagaaaaagaagattggtatatcatttaaaatgctacagaaagaggcagaaataaaaaatgaactgtctttgtctgagggttgaaattttctgctttyataattagggcaaaaatacgacaactgggagttggggaagaaatgctaccatttttcgaggcccaacccaccatcaccatgttttaaaatcacctcccca

SEQ ID NO: 553924 - DNA, 201 bp, Homo sapiens
accctagctctgacctaggctacataacctcaatgcccaccaatacccaaaatgaagcgaagcttaatgaagactacagtccagccactttagcctccaayccagtaacaacctacactcctgatggagtctttcaatttgtttttatgtctctacaaactcagctatagtcaatcttcctagaaaatgactggaatttcc

SEQ ID NO: 553925 - DNA, 201 bp, Homo sapiens
tacatcacttggtcatgagttaaacctgttactcttgaacaatagacatatttattctctaagtaagttctgtgattctaccatatagcaaaggcaaggargaaagtggcaaaagccaaacaatttcataagtgagagtcattaatgtcttctgggctgtcttaaaattttaagttgatataattttcaattctgtttagc

SEQ ID NO: 553926 - DNA, 201 bp, Homo sapiens
caaaatctctgcagcactgtaacgtgtgtgatggccatgacacccatgctgaaggttgtgggtttatcggaatgagggcaaggaacaactggcccacccarggcagaaaaccacttaaagctgttcctgaaccacaaacaatagcatgagtgatctgcgccttaaggacatgttcctgctgcagataactagccagaccca

SEQ ID NO: 553927 - DNA, 201 bp, Homo sapiens
ctgggacctcttgctgctcatccccaatgtgctcttcctcatcttcctgctctggaagcttccatctgctcgggcgaagatccgcatcacctccagccccrtttttatcaccttctacatcctggtgagttcactgcagttgacagaaaagccaactccaactgggttaaacaaaaagggaattaactgcttctataatga

SEQ ID NO: 553928 - DNA, 201 bp, Homo sapiens
ccgcagcggccgaggtgctcctgagccaagcctgccgccggttcggggctttgctgccccgtgagggggccatgtcgaagcctccgctccctctggactcsgggaatgcaggtgggggctggctttgccctcttctctgcagtgaggaggggccgcagggtcgtccagtccccagcggggcttggcggtgctggagattca

SEQ ID NO: 553929 - DNA, 201 bp, Homo sapiens
gcttccagctgtaagctcctgcatgctcagcgtggtggcccagtcctccaggggtgcaggaagacagttctggacaccccacacaggcacagatccccccrtgaggcatcacatgcctttgcctcaaccaactgctggccaggagcagaagggccacccttcttgacttcgaccagagccactctgcagggcatgctagct

SEQ ID NO: 553930 - DNA, 201 bp, Homo sapiens
tgctctcatgggccctcaggactgaaaggagccaagtggctgtgccttgcacatggagatgcttagctgagggggtggctttgttagactatttgcaggtygtgagatagagcctgagatgggggactgggcccctgcctgggggattgggtcgtgacctgtgtggagccccacactgagctgcagtgggtggggagggtg

SEQ ID NO: 553931 - DNA, 201 bp, Homo sapiens
ggggctggctttgccctcttctctgcagtgaggaggggccgcagggtcgtccagtccccagcggggcttggcggtgctggagattcagttgttcccgtcayaacaacctgttgagggctcgtgtcgtgccaggccttgttctaggggaccgagtcctgagcactcccgggatagagagtagtaaatacccagacgcggctc

SEQ ID NO: 553932 - DNA, 201 bp, Homo sapiens
ttccatgccctgccacactggcagcatcaacagcacagacagcgagcgctggaaggccatcaatgcctgagggcagctgccagggcctgtggaggacaggycagagaggaggccagcaggcccagagtccccaggggaggaggaccaggtcaagggacgttctgtgggcagtagccctgtgtggccctgttcccaccatga

SEQ ID NO: 553933 - DNA, 201 bp, Homo sapiens
gaagcatgcatctagaggcccctttcttagattgggggcagggactgcaccttgtccatctctgcccccttccccatgtgactcagcccaagactgggccrgctctggatgctgcaatcagttgggcaggacatggccagggagcagactggggcaggtgagttgagggtcaggccaagaggctgaacttggtgtggtgga

SEQ ID NO: 553934 - DNA, 201 bp, Homo sapiens
ttccaagtagctggcattacagctggacgccaccatgcctggctaatttttgtattttttagtagagatggggttttggcatgttggccaggcttgtcttraactcctgaccgcaagtgattcgcctgccttggcctcccaaagtgctgggattactggcatgagcctccgcacccggccaatttttgtattttttgtaga

SEQ ID NO: 553935 - DNA, 201 bp, Homo sapiens
tcctccccttcccacctgctctcatactgctcagtgacatggcccaggctttccttccagggccatgcttggcaaggttggctgagggcaccctccttctytgcacccttggcacgagggcagggctggctctcccaatgcctccatcccatccccatggtgctttggcctcctcaaagcatccaccatggtggatggact

SEQ ID NO: 553936 - DNA, 201 bp, Homo sapiens
ggctggctttgccctcttctctgcagtgaggaggggccgcagggtcgtccagtccccagcggggcttggcggtgctggagattcagttgttcccgtcatamcaacctgttgagggctcgtgtcgtgccaggccttgttctaggggaccgagtcctgagcactcccgggatagagagtagtaaatacccagacgcggctcgg

SEQ ID NO: 553937 - DNA, 201 bp, Homo sapiens
gtccacacacccatttcaccatgaggaagcaggcacagatgccccccgcctgagctcacacagccagggggaggagggctgggttccaaaacaagtctagrtgggctctggggtccagctcacaggcccactcagagtgggtgtcaggcgactgttggtcaattccttccttatctggtggccccatcagcctggagagga

SEQ ID NO: 553938 - DNA, 201 bp, Homo sapiens
agggcaccctccttctctgcacccttggcacgagggcagggctggctctcccaatgcctccatcccatccccatggtgctttggcctcctcaaagcatccmccatggtggatggactgaagtgtgtatattttcttgatctattttttaataaaaaggaaaaggagcagaaggtgctaatgtggaggttttgcaggaatac

SEQ ID NO: 553939 - DNA, 201 bp, Homo sapiens
tcgaacgctgcaactgttgctgataaggtgcggctgggccctctgagggaggccagggaggcctggcctggggtgggctggggatgctggtccaggctgaygctgtgcccactctgcgtgcagatcctgtgggagatcacccgcttcttcctgctggccatcgagctgagtgtgatcatcctgggcctggcctttggtgtg

SEQ ID NO: 553940 - DNA, 201 bp, Homo sapiens
tgctctgtgcagcccctctgattttcccctgggagtcccaggtccaggggaaggaggacagtggcccaggccacacagctcactgggcggctctcactccyccagggctggctgctggcgggatggacaccctggaggaggtgacttgggccaatgggagcacagcgctacccccacccctggcaccaaacatcagtgtgc

SEQ ID NO: 553941 - DNA, 201 bp, Homo sapiens
ggaagcggagcttgcagtgagccgagattgcgccactgcagtccgcagtccgacctgggcgacagagcgagactccgtctcaaaaaaaaaaaaaaaaaaamaaaaaaaaacagcatgttgctccacaccgcctcgtgttgtgtgtcggcgcgctcgcagggttcgaaccgatacaagaaccttacagagggtagttattag

SEQ ID NO: 553942 - DNA, 201 bp, Homo sapiens
tccgtgaagcagcgtcttgtctctgcacctcctctgtgctgtctctttaagaggtcagcgggctgctccgcctcttgggaatttgattggtctctcccacttttttttttttttcccccagtgatgacttattcctataggctgctggaggttagagggcgggcctgagtgataacagggactctgggactctgggacttg

SEQ ID NO: 553943 - DNA, 201 bp, Homo sapiens
actggcgaccagaagggacacggaggggcgggccagagggtccggtcccgcctacaacgcccgaggcgctccgcccagagcccggaggtgtgcggcccggsgctgtgcgcgtgcgctcgcctgcgctgtggtgggagctggagcggaggtagaagctgaggctccaggggacccgacgacacttgctggctgcgtgacctc

SEQ ID NO: 553944 - DNA, 201 bp, Homo sapiens
tgaggcactcggcatcaccacagcctcacttgttacacccattccatggtggggggacacaggcacggagaggacaggaaggaaggggcagggctgggctktgaacccagagcctatgctcttacccacgctgctctcatgggccctcaggactgaaaggagccaagtggctgtgccttgcacatggagatgcttagctga

SEQ ID NO: 553945 - DNA, 201 bp, Homo sapiens
tataggctccaggtgtgggctgtcccagtataggtgccaggtgtgggcttcaggtgtgggctgtccaggtgtgggcttcgggtgtgggctctccaggtgtrggcttccggtgcgggctgtcctggtgtgggcttcgggtgtgggctgtccagctgccttccttcagggcgcccttcccctgtctgcagggcctgcctgact

SEQ ID NO: 553946 - DNA, 201 bp, Homo sapiens
ccgtgaagcagcgtcttgtctctgcacctcctctgtgctgtctctttaagaggtcagcgggctgctccgcctcttgggaatttgattggtctctcccacttttttttttttttcccccagtgatgacttattcctataggctgctggaggttagagggcgggcctgagtgataacagggactctgggactctgggacttgt

SEQ ID NO: 553947 - DNA, 201 bp, Homo sapiens
tcttgtctctgcacctcctctgtgctgtctctttaagaggtcagcgggctgctccgcctcttgggaatttgattggtctctcccacttttttttttttttcccccagtgatgacttattcctataggctgctggaggttagagggcgggcctgagtgataacagggactctgggactctgggacttgtgggactgtggccg

SEQ ID NO: 553948 - DNA, 201 bp, Homo sapiens
gtgggcggatcacgaggtcaggagatcgagaccatcctggccaacgtgatgaaaccccgtctctactaaaatacaaaaaattagccgggtatggtggcacrtgcctgtagccccagctactcgggaggctgaggcaggggaatcgcttgaacctgggaggcagaggttgaaatgagccgagatcacgccactgcactctag

SEQ ID NO: 553949 - DNA, 201 bp, Homo sapiens
tctcctctgaaggctcatcttcaggaggatccccttccaagcttcttcacatgataggattcaggtcctcataggctgttggactgaagacttagtttccyactggctcttgggtgggggcctctctacagagcagcttacaacctggcagctggtttctttcagagcaagcgaacaagagagagaggccatacaagacag

SEQ ID NO: 553950 - DNA, 201 bp, Homo sapiens
cgagattgcgccactgcagtccgcagtccgacctgggcgacagagcgagactccgtctcaaaaaaaaaaaaaaaaaaaaaaaaaaaaacagcatgttgctycacaccgcctcgtgttgtgtgtcggcgcgctcgcagggttcgaaccgatacaagaaccttacagagggtagttattaggcctggtcacacatgtcccatg

SEQ ID NO: 553951 - DNA, 201 bp, Homo sapiens
ctcccaagttcaagcgattctcgtgccttagcctcccgagtagctgggattagagatgcacgccattgtgcccggttaatttttgtatttttagtagagakgggatttcaccattgttagctaggctggtctccaactcctgacaagtggatccgcctgccttggcctcccatagtgctaggattacaggcgtgagccacc

SEQ ID NO: 553952 - DNA, 201 bp, Homo sapiens
tacaggagactataaaacctttgccgcgtcctcacttggggctgatgccattttaggcctcagcccacctgcacccaggcgctcattaaaacagcatgttkcggccgggcgcggtggctcacgcctgtaatcccagcactttgggaggccgaggcgggtggatcatgaggtcaggagatcgagaccatcctggctaacaag

SEQ ID NO: 553953 - DNA, 201 bp, Homo sapiens
tggctttgccctcttctctgcagtgaggaggggccgcagggtcgtccagtccccagcggggcttggcggtgctggagattcagttgttcccgtcataacamcctgttgagggctcgtgtcgtgccaggccttgttctaggggaccgagtcctgagcactcccgggatagagagtagtaaatacccagacgcggctcgggcg

SEQ ID NO: 553954 - DNA, 201 bp, Homo sapiens
ctctgatgggtgggagggcccaggtcctgcctgcccacccaggccccacatgccagggcgcgtgtctgcatggccacccacagctgaaaacaggcgtgggygatctgaagccctgtctgtgttctactgtggcagaaagtgccccagtccttccagcggttttgggagcagggcctccaggagcacagggctgagacgggg

SEQ ID NO: 553955 - DNA, 201 bp, Homo sapiens
tcacctgggctgcccggggcccctggggcctcaggcctgctccatgccaggccccggggaccctgtgttggctcagacactgctatgaggactcacaccayggagagggtactgttggtgcctggcccagggccccttcccaggcccgggccccatctcccagctgctgagagtgggggcactaatggctcagaggtgccc

SEQ ID NO: 553956 - DNA, 201 bp, Homo sapiens
cactccccaaacctgctcttcactggccatcatctgctcggctctctcctcctcaccctctgcttggtcaccaagtccccaggccagggcacagcagcagkacttttggcctgcatccccttggctccttctggccagctctctgcctcatcgctctctttcttctccacatcagagccagggctcctccaaaaacccaca

SEQ ID NO: 553957 - DNA, 201 bp, Homo sapiens
tcttctctcaagttcccctcaagtacagggcacaggcctgatggggcgtagcggacagtccctgcactcatggccaggaacacgggacatgtccctcgggyggggcacccagcgtgctcctcagaagagtccatgcttgcaaggccagactgagggtccctctggagggtgccgggaagggaggtagcaggagccttcttc

SEQ ID NO: 553958 - DNA, 201 bp, Homo sapiens
tctgtgacatccttcccatcacccccagtagaagagcccaaggccaaatcccaatggcaagaagtgtgggaacatgggaacagtgggaccacccagtagcsaccaactccccaacgccaaaggtggcaggagcaggagggaagaagggcctgacctgcccttggagggtagccagaatctgcagaccctcttcctcctcat

SEQ ID NO: 553959 - DNA, 201 bp, Homo sapiens
ttcccagcgccgccgcgtcctcccagcgccgcgtccccgcccgccgccgactccgccaggggccgagccgccccaccgcctgtcagccctgcccgcggccrgtcagtaggtctcagacgcctgggctcgcggcccccagcccagccccgaccctgccctgggcgggtcacgtggcggaggggggagcggcccgaggacacg

SEQ ID NO: 553960 - DNA, 201 bp, Homo sapiens
aggtcttgtccagggtgggggattccctccaggcctggaactctgcaaacaggattgtgtccacctgtgggggagggcaagcgagggtgggggcggtcagsgtactggggccagcatagaagatgcaggctgagctgaaggggagcgagggaggacgtggggcaggcccagcaagccagcaggtcgatccccagcagccgt

SEQ ID NO: 553961 - DNA, 201 bp, Homo sapiens
cgactggtctacctgtccctcagttcctctgtcccacccattctgagtcctgatcattcgtctcaacttcagcctgggactggaccagtaagagcagaacscgtcttctctcccgccaggtaccatggctcccaccttccctgtctaggggaggactgggagcgtggtgggaggtacttccccttctaggtgctaccagag

SEQ ID NO: 553962 - DNA, 201 bp, Homo sapiens
aggtcccagtgctacccctccaggcccactgactcaggccgcaggctcaagttagtcagatcttcgtttgaggacacattttattcattcattctactcaytcatacattcagccactccatctgagcatagactatggggcatgcaaggggctggggacccagcaggaaactgtacagacataggttctgccctcctggg

SEQ ID NO: 553963 - DNA, 201 bp, Homo sapiens
ccctctctgagcttcagtctccacctctgtacagccaccaaattggacaagacaatcagagccattgcctaggactctctgagcccagcttctcacactgrctgccctgaagcttgccaagactccccctcccctccatgccccaggtcctgagctcacctgtctgtgccccagggctcttctctcaagttcccctcaagt

SEQ ID NO: 553964 - DNA, 201 bp, Homo sapiens
gtgcctgacagtttgtgatgctttttccgtttagccacagcatgaagctgaagccctgcctgccagttcatcagagctcagggcacgtttgcagtcaagaygggtgaccatcggtgcgcccagtacaggcctggccagcagctggcctcggtgagggcacatccctctcccttgggcacatctctgggcacctgatgagag

SEQ ID NO: 553965 - DNA, 201 bp, Homo sapiens
tgaggaaacgaagcccagaaacatcactggccccgctggggtcaccaactcctaatcccagctcctcctgttctaggatcaacagtcccaaatatacacckgccagagctgtcatcagacttggtcagagtaacctggcaagtatgactctgaacaggacacctcccaactgctgctggggtctgggtgagctcctaggac

SEQ ID NO: 553966 - DNA, 201 bp, Homo sapiens
agctcctcctgttctaggatcaacagtcccaaatatacacctgccagagctgtcatcagacttggtcagagtaacctggcaagtatgactctgaacaggayacctcccaactgctgctggggtctgggtgagctcctaggacaccaggcacccagtgggggctagcagcttggcccctgactctaaatccctgtttcctca

SEQ ID NO: 553967 - DNA, 201 bp, Homo sapiens
aggaaggggcaggtcttgtccagggtgggggattccctccaggcctggaactctgcaaacaggattgtgtccacctgtgggggagggcaagcgagggtggrggcggtcagggtactggggccagcatagaagatgcaggctgagctgaaggggagcgagggaggacgtggggcaggcccagcaagccagcaggtcgatccc

SEQ ID NO: 553968 - DNA, 201 bp, Homo sapiens
aaggtcaggagatcgagaccatccttgctaacatggtgaaaccctgtctctactaaaaacacaaaaaaattagctgggcgtggtggcgggcgcctgtagtmccagctactcgggaagctaaggcaggagactggtgtgaacctgggaggtggagcttgcactgagccgcgccactgcactccagcctgggcgacagagtga

SEQ ID NO: 553969 - DNA, 201 bp, Homo sapiens
ggaagctaaggcaggagactggtgtgaacctgggaggtggagcttgcactgagccgcgccactgcactccagcctgggcgacagagtgacactctgtctcaaaaaaaaaaaaaaaagagtctcaagtcttagggcagggcgtggtggtaaaagcctgtaatcctagcactttgggaggctgaggctggtggatcacctgag

SEQ ID NO: 553970 - DNA, 201 bp, Homo sapiens
atgccttgcttgctcccttggccagcactttgtgcagtgaacaacctaggcagttctccatagcatcccttccaactttctagaatcattcagcccaggcrtcccatagccatcactcagcagggcagttgtttccatggccacggcttccagagggcagggattctctctttcttggagctatgttcccctaccccaccc

SEQ ID NO: 553971 - DNA, 201 bp, Homo sapiens
aaggatgggctcggagaagttaaggaacctgcctgatatcacaccagccaggggcagtggggctgagtcctcttacacccgttttccaaaaagaccacccrgaaactagaggctcactggcagctgcagctgtgtgcagccaggcagcaagaggttcctgagcacatgctaggtgtctggccagtggcagggaagggataa

SEQ ID NO: 553972 - DNA, 201 bp, Homo sapiens
cttgccccgagcctccttcagctgcttttctgatgccgcctgcttcatgttggcttctcgaaccatcttgtgagcttcctaggaagaaggcagtccctgcrtgagtggtgaggagccaacggacgcccagatgacccattccccaagttgttcccgcgcccagccggtgtacctcaaacaggctggccgtcagctcttcca

SEQ ID NO: 553973 - DNA, 201 bp, Homo sapiens
gggcgtagcggacagtccctgcactcatggccaggaacacgggacatgtccctcgggcggggcacccagcgtgctcctcagaagagtccatgcttgcaagrccagactgagggtccctctggagggtgccgggaagggaggtagcaggagccttcttccccccaccaggctgagcctcacactaacctttgctatctcccc

SEQ ID NO: 553974 - DNA, 201 bp, Homo sapiens
gaacgctttactaaaccacaaccctccccgctccccagcctcctagctgagtcttgcctccactaggggcaggtgggcccagagggcacttccccatccarccccactcccgtgtgcgatccctgcaccggccaccagggggcgctcaccgtcctgccgcaccaggccttgctggatgtagcggatgtaggtgaagaagtt

SEQ ID NO: 553975 - DNA, 201 bp, Homo sapiens
cttcactgtgggcagcgtctgcgaagccaccggctcaatggtgagcgtgttgtcctccacggcggcccgtaccagcaccgagagctgtggcagaccagggmggcaggcagggtggtaaggggctgggccctggcggaggggtgtgtcccccagctggccccgcccctgccatgcctcacctcctgcattgtgaagtccagg

SEQ ID NO: 553976 - DNA, 201 bp, Homo sapiens
ctgggggtgaagctcgcggttgggagaggctggtgtggacgtgatgaccagcgtcttcaaggctgtcacctctgcctgcagcatgtcgatctgcatgggakgggatggctgtcaaccctcacccagactggatgccatcctggctgccaccgcctatcagcctaactcaggacaatgcacccctgcagtgacaggcactta

SEQ ID NO: 553977 - DNA, 201 bp, Homo sapiens
agctgggcggctgcggggccctcctggccttgggcctcctcccctgcagaggtctccaccagggctcctggggactccctgtggccttggcaggggtccgygctcttccaggggaccgggacagctgcaaggggcggcgggaggccctggtctggctggggtgggctggagacaaacaagggtatcagcaggttcagggtg

SEQ ID NO: 553978 - DNA, 201 bp, Homo sapiens
agggcccagtgtcccagcacccaggtggccccaaaggagtcaagtaacgcttgcaaaggctgactcaccctggcccgggaagatggcgagatgtagtaatrgcttttggagtccccgagccggattcggtggcggcaggtgcgggtcagcccgctcagggcacatgtgctaggggaaagcaaaatgggtcacgggggctgg

SEQ ID NO: 553979 - DNA, 201 bp, Homo sapiens
ctcctccttcaggaactcggagcccttctctcggatctccatggaagagctgcgcaggcgcaacacgtccagctgggcggctgcggggccctcctggcctygggcctcctcccctgcagaggtctccaccagggctcctggggactccctgtggccttggcaggggtccgtgctcttccaggggaccgggacagctgcaag

SEQ ID NO: 553980 - DNA, 201 bp, Homo sapiens
tgtagtaatggcttttggagtccccgagccggattcggtggcggcaggtgcgggtcagcccgctcagggcacatgtgctaggggaaagcaaaatgggtcaygggggctggctggggcttgcccctctccctcacccctgcatacagggaagatgcagcagctgagaggatgcatggggaggggcaggcctcccttccccca

SEQ ID NO: 553981 - DNA, 201 bp, Homo sapiens
atgctttttccgtttagccacagcatgaagctgaagccctgcctgccagttcatcagagctcagggcacgtttgcagtcaagacgggtgaccatcggtgcrcccagtacaggcctggccagcagctggcctcggtgagggcacatccctctcccttgggcacatctctgggcacctgatgagagcccacagctctcccaac

SEQ ID NO: 553982 - DNA, 201 bp, Homo sapiens
gtccacaggaaacctgccaaactgcctccttgccctgtgggggcagcaactgtccctgtcctgtcggcgctgctgcatcctgaccacccctcggcacagtraacacacggcttggcggggctttcccacatgggcaggaaggagctaagaccctcagcttacttggtgctgctacagtcaacctcggccaccttcactgtg

SEQ ID NO: 553983 - DNA, 201 bp, Homo sapiens
ggcagaccagggaggcaggcagggtggtaaggggctgggccctggcggaggggtgtgtcccccagctggccccgcccctgccatgcctcacctcctgcatygtgaagtccaggcaggggcccacgtcctctcggtacaccctttccaggaaggggcaggtcttgtccagggtgggggattccctccaggcctggaactctg

SEQ ID NO: 553984 - DNA, 201 bp, Homo sapiens
ggggctgggccctggcggaggggtgtgtcccccagctggccccgcccctgccatgcctcacctcctgcattgtgaagtccaggcaggggcccacgtcctcycggtacaccctttccaggaaggggcaggtcttgtccagggtgggggattccctccaggcctggaactctgcaaacaggattgtgtccacctgtgggggag

SEQ ID NO: 553985 - DNA, 201 bp, Homo sapiens
agaatttagaactaaaagttttgtttccaggccggtgttaaatttcttggcgctactggattttagagtggggtgcagggctttgtcctgaagaccctcastgcctccttgaggaggaaaagtcaaagagcaactagcaggaggccacaggtaccagcaggtacacaagcacacacaagcacgtgcacacaggaggggaca

SEQ ID NO: 553986 - DNA, 201 bp, Homo sapiens
ggcagaaagtgccccagtccttccagcggttttgggagcagggcctccaggagcacagggctgagacggggtgggagggaaggtgacaagggaggcctttrtgaagggggagggaggaagggggaaaggaagggaggaagcgggggaggggtcttgactcatcttaacaaggctttggggcaattctgtgctatggaggcc

SEQ ID NO: 553987 - DNA, 201 bp, Homo sapiens
cacacagcatggggcaggctggtcctcactgggctcggaccctgcctaccgcaggcactgccacccttccccgtgcccagagcccgcttcccaccctcacytccttgccctctctgtctggggtgagggtgtgtcccgcagcgggacacacggcggggcagagggtgctgctggtgctcttgtggcgagagtggccctttc

SEQ ID NO: 553988 - DNA, 201 bp, Homo sapiens
tgtggcgagagtggccctttcggggcccggccttggtggggctcagcagctgggggtgaagctcgcggttgggagaggctggtgtggacgtgatgaccagygtcttcaaggctgtcacctctgcctgcagcatgtcgatctgcatgggatgggatggctgtcaaccctcacccagactggatgccatcctggctgccaccg

SEQ ID NO: 553989 - DNA, 201 bp, Homo sapiens
tgggcgtggtggctcacacctataatcccagcactttgggaggccgaggcaggcagatcacttaaggccaggagttcgagttcagcctggccaacgtggtraaaccccatctctactaaaaatacaaaattagctgggcgtggtggcacatgcctgtaatcccagctacttgggaagctgaggcaggagaattgctaatgt

SEQ ID NO: 553990 - DNA, 201 bp, Homo sapiens
gaccagcctggtcaacatggtgaaaccccatctctgctaaaaatacaaaaattagccgggccaagattgtgccactgcactccagcctgggtgacagagcraaactctgtctcaaaacaaacaaacaaacataaaactctctcaacagcactcgtggtattgtcccattctacagatgaggggacggaggctcacagagtg

SEQ ID NO: 553991 - DNA, 201 bp, Homo sapiens
tgcaatctcagctcaccacaacctccgtctcccaggctcaagcaattctcctgactcagcctcccgagcagctgagattacaggcgtgtgccaccacaccyggctaacttttatatctttagtagagatggggttttctccatgttggccaggttggtctcaaactcctgacctcaagtgatccacccgcctcaacctccc

SEQ ID NO: 553992 - DNA, 201 bp, Homo sapiens
gccacagtgaaagactaactctctctcctgctggtcccaagcacataggctggaggtgtggctggctgacctcaccattttcccaacaggctctcattttkgccttgtggggcagagtggggacagggcccaattttgtagccagaggaaacagtggtccaggaggcctgtgacagagtctgtgacatccttcccatcacc

SEQ ID NO: 553993 - DNA, 201 bp, Homo sapiens
gagctcaagtcaaggaggggacaaagggacaggtgggaaccaaggtgggcctgggccacaggggaaggggagccagagtagggagaagggcacaacagcaygtcctagtagagaccatggaggaggagtgggggagaaggtcaggaacagctggggatgggaagcagatcagaacacctaaagcaggtgagtcaggccacg

SEQ ID NO: 553994 - DNA, 201 bp, Homo sapiens
ctgcacgaccaggcagcccccttcttaccatatcctattttgatttgcatctccctcccgctacctcatttccaaagacctattgggcataaatcatgtgyagagctcggagggtctaggacaagcaggattctaatgaggatgtctgcccccaacacccatgtcctgattaaggaacagcaggaaagatctccacctgtt

SEQ ID NO: 553995 - DNA, 201 bp, Homo sapiens
gacacacggcggggcagagggtgctgctggtgctcttgtggcgagagtggccctttcggggcccggccttggtggggctcagcagctgggggtgaagctcrcggttgggagaggctggtgtggacgtgatgaccagcgtcttcaaggctgtcacctctgcctgcagcatgtcgatctgcatgggatgggatggctgtcaac

SEQ ID NO: 553996 - DNA, 201 bp, Homo sapiens
tcatccagcgaaggggttgagggacaggttgggagggtgggctgggggtccttcctctaggtgcatgccccagagtcgtgcacactcttccccacaccccractcttctcacttgcgctcctgatgagctaagaggagttgacgctgtcaccccgggacggtcggctgcccacccttcgcaccctgcaccccgagagacac

SEQ ID NO: 553997 - DNA, 201 bp, Homo sapiens
ctgaggccccagagccgggcctggaacatcggttcctcctacctgctgggttccaaaaccatttcccacaccacacccctgcatcctcaaaccaccaatgyggctgcccccactcctgagaaatggaaactgagtcccggagaggattctagtacagggctgcaaactcctcagacaacattctctcctataccccatgcc

SEQ ID NO: 553998 - DNA, 201 bp, Homo sapiens
ttctagtacagggctgcaaactcctcagacaacattctctcctataccccatgccttaggccaccgccccgccctggtgatgggggaagcagggccagacyctgaggcccaccagactggagggaactcctgagtgggggagggcttgactgccctccccacactcggctccttcccagaaggctgcctgaagccccctca

SEQ ID NO: 553999 - DNA, 201 bp, Homo sapiens
cctcatgagctgtgtgacctggggcaagtgacctaactcctctgggtctcattttcttcatggcagtggagcaccagagtccaaggcatctcttaggcccytctgcctggctgctctgagccagataggcctcccagaaggcattgagccaatgcttttctcctcagattgccgtgggctgggctctctgcactccacagt

SEQ ID NO: 554000 - DNA, 201 bp, Homo sapiens
gtgacctggggcaagtgacctaactcctctgggtctcattttcttcatggcagtggagcaccagagtccaaggcatctcttaggcccctctgcctggctgytctgagccagataggcctcccagaaggcattgagccaatgcttttctcctcagattgccgtgggctgggctctctgcactccacagtccaccccttcgct

SEQ ID NO: 554001 - DNA, 201 bp, Homo sapiens
tagaagtgtggacgcaggcatcccatggctgtacatttacattcttagaagtcagaccccagtgacttggagaggctgctgggaagtcagctggctgaaarggggtcaagatccagggcttaaaacttgctgcagacaatccaccaaacaggccactaggaatcagctctggtggctcatcctcagaggtgtgtgctcaat

SEQ ID NO: 554002 - DNA, 201 bp, Homo sapiens; identical to SEQ ID NO: 401289

SEQ ID NO: 554003 - DNA, 201 bp, Homo sapiens
accccagtgacttggagaggctgctgggaagtcagctggctgaaagggggtcaagatccagggcttaaaacttgctgcagacaatccaccaaacaggccastaggaatcagctctggtggctcatcctcagaggtgtgtgctcaatagcccttgccccaggagcacaggggtgcagggagagaaggaggaaagaagggcca

SEQ ID NO: 554004 - DNA, 201 bp, Homo sapiens
ttactgttgctggaagtgtcccacctgctgctcataataaatgcagatgtatagcagtcctgtctggggcccattctgcaggggtggtgggtgctgggacmtacattgcttccccaatctcttccctttcccatttctcatctgcctttcacagttcctgctgctgatctacttaagggggatgagatttgtgtagcaccg

SEQ ID NO: 554005 - DNA, 201 bp, Homo sapiens
cataaacatagccaccattctctgtgctggggcatcctcaccaggctcagcttctccccctaagaaggcttttctcctcagtggctacttttaatgcaggwgggcagcagcgggtgcgcaggaggggaaggtgtggccatgggagaggctgatgagtccactcctagccccaatatgaagctaagaggataaggggtatga

SEQ ID NO: 554006 - DNA, 201 bp, Homo sapiens
tcgtgtatcctttcactgagcagccagaggaccagcattagtgatgtgggaagctcagggagaaaccacgctaggtacatggaccccgccggttttgtacrttggattggggctgagagaaggtaaggaggagaggagggctagtgatgcccaggggcaggttatagccttatttcccaagttcaggtgagctcagtttgt

SEQ ID NO: 554007 - DNA, 201 bp, Homo sapiens
gctggggcatcctcaccaggctcagcttctccccctaagaaggcttttctcctcagtggctacttttaatgcaggtgggcagcagcgggtgcgcaggaggrgaaggtgtggccatgggagaggctgatgagtccactcctagccccaatatgaagctaagaggataaggggtatgaagcatccatttggccctctggttca

SEQ ID NO: 554008 - DNA, 201 bp, Homo sapiens
gcgctctatgcacacgcaggcttctaagggtgcacggtatgggcaggaggatttgcactgggaggccctatgtacagcttgaagctagggggagattagcscagtgactacaggaacaaacgccaaaggagagagaagaagggagggatgacctgctggaccccagggcagggacagggccaagacactcacaccattgcc

SEQ ID NO: 554009 - DNA, 201 bp, Homo sapiens
gtatgggcaggaggatttgcactgggaggccctatgtacagcttgaagctagggggagattagcccagtgactacaggaacaaacgccaaaggagagagawgaagggagggatgacctgctggaccccagggcagggacagggccaagacactcacaccattgccagccgggcagctggcagcttccagcaggtggcccac

SEQ ID NO: 554010 - DNA, 201 bp, Homo sapiens
tagaaccaggcacaggctaagaagctggaagctggctgcttcctgtccagctgtctctagggccccacaagactgagtgaaccccatgtgtctcttggtcytctcaggggaacttcccagtcattgtccagagcctcgttctaggctccaggagaccctcccatcaatgagtatttgggcctttctctctacgcaggtagc

SEQ ID NO: 554011 - DNA, 201 bp, Homo sapiens
caggaggatttgcactgggaggccctatgtacagcttgaagctagggggagattagcccagtgactacaggaacaaacgccaaaggagagagaagaagggwgggatgacctgctggaccccagggcagggacagggccaagacactcacaccattgccagccgggcagctggcagcttccagcaggtggcccacttacctt

SEQ ID NO: 554012 - DNA, 201 bp, Homo sapiens
gctgcttcctgtccagctgtctctagggccccacaagactgagtgaaccccatgtgtctcttggtcctctcaggggaacttcccagtcattgtccagagcytcgttctaggctccaggagaccctcccatcaatgagtatttgggcctttctctctacgcaggtagcccccgccccaagccccagcccacagaaagcctta

SEQ ID NO: 554013 - DNA, 201 bp, Homo sapiens
cccacaagactgagtgaaccccatgtgtctcttggtcctctcaggggaacttcccagtcattgtccagagcctcgttctaggctccaggagaccctcccaycaatgagtatttgggcctttctctctacgcaggtagcccccgccccaagccccagcccacagaaagccttacctgagcggttggtgctggggctgggact

SEQ ID NO: 554014 - DNA, 201 bp, Homo sapiens
tcctgtccagctgtctctagggccccacaagactgagtgaaccccatgtgtctcttggtcctctcaggggaacttcccagtcattgtccagagcctcgttytaggctccaggagaccctcccatcaatgagtatttgggcctttctctctacgcaggtagcccccgccccaagccccagcccacagaaagccttacctgag

SEQ ID NO: 554015 - DNA, 201 bp, Homo sapiens
acaggccagacagaaacatcagcgtcagcagggactgggaaaggctgcccaccctccaaggaggccctccctggatccccacagcaccccagcaggctaasaggctaaggatgaactcctttagagaagacagtctcatggctctctgacctgggactgcccaccaaagccccacctggcctggcagcttggcttggcctc

SEQ ID NO: 554016 - DNA, 201 bp, Homo sapiens
aggccagacagaaacatcagcgtcagcagggactgggaaaggctgcccaccctccaaggaggccctccctggatccccacagcaccccagcaggctaagargctaaggatgaactcctttagagaagacagtctcatggctctctgacctgggactgcccaccaaagccccacctggcctggcagcttggcttggcctcca

SEQ ID NO: 554017 - DNA, 201 bp, Homo sapiens
ggtgagggcactcccctgaggccccagagccgggcctggaacatcggttcctcctacctgctgggttccaaaaccatttcccacaccacacccctgcatcytcaaaccaccaatgcggctgcccccactcctgagaaatggaaactgagtcccggagaggattctagtacagggctgcaaactcctcagacaacattctct

SEQ ID NO: 554018 - DNA, 201 bp, Homo sapiens
tggagccacagaaaagggtgaccgttagagctggagccaccatccagtgccctctctctaggacaaggctgtggtccttgctcctgaggctgggctcccasgtgatgcctacaaaatgggtcaccccagaggggaagaggcagaaaggcccacctcaccgagacctcagctgcctgatctcccaagctacatcctcctctt

SEQ ID NO: 554019 - DNA, 201 bp, Homo sapiens
ctggagccaccatccagtgccctctctctaggacaaggctgtggtccttgctcctgaggctgggctcccaggtgatgcctacaaaatgggtcaccccagargggaagaggcagaaaggcccacctcaccgagacctcagctgcctgatctcccaagctacatcctcctcttcccccaggcctgagcccatgggcagctgac

SEQ ID NO: 554020 - DNA, 201 bp, Homo sapiens
acgcgtgcccctccctgggacacagaggcccaggccccagagtgtcccttgtggagaaggctttactctataactcccagcttctgctccttgcccatttkggggcccagttgtgccaggagagaagcagctcgggcctggccggcccgcagcttcccagtcccacctacctgggtgtcctggtgggtgtggagactctgt

SEQ ID NO: 554021 - DNA, 201 bp, Homo sapiens
accatccagtgccctctctctaggacaaggctgtggtccttgctcctgaggctgggctcccaggtgatgcctacaaaatgggtcaccccagaggggaagakgcagaaaggcccacctcaccgagacctcagctgcctgatctcccaagctacatcctcctcttcccccaggcctgagcccatgggcagctgactccactgg

SEQ ID NO: 554022 - DNA, 201 bp, Homo sapiens
atctcccaagctacatcctcctcttcccccaggcctgagcccatgggcagctgactccactgggcagctccactcccctagtcagccaccatgagagcccrggggacaagtcacctgaaggccatgaccaccaccagggcaatgatggttccctgcaggaagcgctggctgatgcaggcctggtccggaaccacggacgat

SEQ ID NO: 554023 - DNA, 201 bp, Homo sapiens
aagaggaaaagtgcaaatgcaaagagggccaggctgaggctgtccccagtgggctctgctggaggtcggaggagcggttaagggggtgccccatttccccrggggcaaagggagaagaaagagaaacggggctgggagggctacagagtcacaaggagagggaagcaccagaggcagtgaggctggagaactgcaagccag

SEQ ID NO: 554024 - DNA, 201 bp, Homo sapiens
cctcctcaaaagaactggaacacccagaagtagggatgggtcttcacatcccctgccaggtgtgcaggagcccgctcgaggcctgtgttcctgactgcgggcatctctcccagttctgggttcagaaacatcagttacactggtagcttgaaatcagcagtgttgacagcatcacacaaatcaggctcccctctgccccga

SEQ ID NO: 554025 - DNA, 201 bp, Homo sapiens
tccactcctagccccaatatgaagctaagaggataaggggtatgaagcatccatttggccctctggttcaggcgctcagagattccaggcttctcaggaaraactttgaattccaattggccctagccttataggtgactcctctcccaccagaccaatcccaagaagagacaaggaggcaagctcagatacaaagcagta

SEQ ID NO: 554026 - DNA, 201 bp, Homo sapiens
gaggcagaaaggcccacctcaccgagacctcagctgcctgatctcccaagctacatcctcctcttcccccaggcctgagcccatgggcagctgactccacygggcagctccactcccctagtcagccaccatgagagcccaggggacaagtcacctgaaggccatgaccaccaccagggcaatgatggttccctgcaggaa

SEQ ID NO: 554027 - DNA, 201 bp, Homo sapiens
agggctacagagtcacaaggagagggaagcaccagaggcagtgaggctggagaactgcaagccagaaagggaggccacaagggaggccccctttccaaccygcctgccatccctgctcacccctaccttgctggccaccttggggggcctcttcttgtgggggacgctgcccgcccgactgaactggctccctgcatggct

SEQ ID NO: 554028 - DNA, 201 bp, Homo sapiens
tgggaggccctatgtacagcttgaagctagggggagattagcccagtgactacaggaacaaacgccaaaggagagagaagaagggagggatgacctgctgraccccagggcagggacagggccaagacactcacaccattgccagccgggcagctggcagcttccagcaggtggcccacttaccttccctgaagccctttt

SEQ ID NO: 554029 - DNA, 201 bp, Homo sapiens
caaggtgcggacagcagaacctggggccgagctggtgaggctggtggtcactgaggaggccagaggctgtatgagccagagaagccccaaagacagaacayagcaacctccctgtcctacccagacctgcccagacacgcacccagcagcaaagagggctgtatgcctggtagccccgtggtcaagggggactgtcggagc

SEQ ID NO: 554030 - DNA, 201 bp, Homo sapiens
ggagggatgacctgctggaccccagggcagggacagggccaagacactcacaccattgccagccgggcagctggcagcttccagcaggtggcccacttacyttccctgaagcccttttaccacaggcttaaggcaactttggtccaaggttgaccccctcaagcagcttggatccccagcctgtccccaactcctgcactg

SEQ ID NO: 554031 - DNA, 201 bp, Homo sapiens
ctggtccggaaccacggacgatgactgaggaccaagaggaaaagtgcaaatgcaaagagggccaggctgaggctgtccccagtgggctctgctggaggtcrgaggagcggttaagggggtgccccatttccccgggggcaaagggagaagaaagagaaacggggctgggagggctacagagtcacaaggagagggaagcac

SEQ ID NO: 554032 - DNA, 201 bp, Homo sapiens
gatgacctgctggaccccagggcagggacagggccaagacactcacaccattgccagccgggcagctggcagcttccagcaggtggcccacttaccttccstgaagcccttttaccacaggcttaaggcaactttggtccaaggttgaccccctcaagcagcttggatccccagcctgtccccaactcctgcactgaggaa

SEQ ID NO: 554033 - DNA, 201 bp, Homo sapiens
ggcccagtcagccccgggagccccaggctgccagacatcagggggcaggaggggcggccactgtccttggccactgggaggccctcaaagtctccctaccygggcgggcccctccaatccagcctcggctcccacagctcctgtgcctgtctccgagcaacacctccacctctgcaccttcacctgggctgtcccacctgc

SEQ ID NO: 554034 - DNA, 201 bp, Homo sapiens
gctggaccccagggcagggacagggccaagacactcacaccattgccagccgggcagctggcagcttccagcaggtggcccacttaccttccctgaagccyttttaccacaggcttaaggcaactttggtccaaggttgaccccctcaagcagcttggatccccagcctgtccccaactcctgcactgaggaacccctccc

SEQ ID NO: 554035 - DNA, 201 bp, Homo sapiens
cttcccatccttaagtcaatgaagggctctaaatctcaggtctctcatctgtgaaatggctcagcctgtaggactctgtgcctggtgtgccacccagggcrgtgtcttcctgcctcagaaatggaggggctccggggcagggcccccacctgctcacctctggtccgggttgggcttgcccttcttacgcatgttgttagc

SEQ ID NO: 554036 - DNA, 201 bp, Homo sapiens
ctggaccccagggcagggacagggccaagacactcacaccattgccagccgggcagctggcagcttccagcaggtggcccacttaccttccctgaagcccktttaccacaggcttaaggcaactttggtccaaggttgaccccctcaagcagcttggatccccagcctgtccccaactcctgcactgaggaacccctcccc

SEQ ID NO: 554037 - DNA, 201 bp, Homo sapiens
gcgaggaccggaccaggtagagggatcttccagggcaatagcaaggccagatgcatgatgaggttggggaaagagggccctgacccagatttgcggctcakgtaaccaaggccctgcgccccattccctgagaggggagcccagggtgggaggcaagtgtgcagggagtttagtttgggacctggagctgaggcacctggt

SEQ ID NO: 554038 - DNA, 201 bp, Homo sapiens
cagcccctgcatggtttgggaatcgtaaaattcctatgtcaacggaaccaaattggggagggggctgggagcaagctatccctgctattcctgcatccccstgctcttccctatcctgaggacaagtgctttgagatcaatggcaaaagggggcctgcagttcataggcttcaaggaaaggcctccactatagaaaggcct

SEQ ID NO: 554039 - DNA, 201 bp, Homo sapiens
tagggctggatccgagccccctgctgatctcaaaggtgggcaggtcctctctccaaaagggttggctccagtctcaaaaggggaggcaagggagaatgggytctgaacaaatcagggccacaggcttccccttccctccagggcacctgaaccagccctccaaccaccatatctggaaagaggtaaactggtcctgtcctg

SEQ ID NO: 554040 - DNA, 201 bp, Homo sapiens
tccctccctctagggagggggctgccgggagggcccagcttgggctcagcttccggctaccttcctggaatgcagagggaggaggtggggaaggaggaacygggggaaaaaacacccatctgcccacttctccctgacttggttcccagctgcccctccctggcagtcatcaccttctcagggaggcctggggctggccta

SEQ ID NO: 554041 - DNA, 201 bp, Homo sapiens
gggctggatccgagccccctgctgatctcaaaggtgggcaggtcctctctccaaaagggttggctccagtctcaaaaggggaggcaagggagaatgggctstgaacaaatcagggccacaggcttccccttccctccagggcacctgaaccagccctccaaccaccatatctggaaagaggtaaactggtcctgtcctggc

SEQ ID NO: 554042 - DNA, 201 bp, Homo sapiens
atgatgtctattcatctttgtattctcagtgccaaacagagggcccgtaattggaagctcaataaatggcagtgattgtctttatcattttgggggaaggrggccgtgattgtttactgaattgaattccagtgtctcagaacaatgggggcagtttacttctctagagttgttatgttctggattttagaagcattggct

SEQ ID NO: 554043 - DNA, 201 bp, Homo sapiens
gtgggcaggtcctctctccaaaagggttggctccagtctcaaaaggggaggcaagggagaatgggctctgaacaaatcagggccacaggcttccccttccytccagggcacctgaaccagccctccaaccaccatatctggaaagaggtaaactggtcctgtcctggcccctagggggtggcaggcaggaaggcccaagaa

SEQ ID NO: 554044 - DNA, 201 bp, Homo sapiens
aaaccacgtatttcagcctggaggtaaccatacgaggatgtctgtgcagttctattaccgccctcattttaccgggggtggaaggccatggccctccacasggtttctcttgcccttgatcacacaggctccaggggccaaatccctacccactcatctccttgaacactcaccccttccctgtggggtgcagagggcgct

SEQ ID NO: 554045 - DNA, 201 bp, Homo sapiens
ctcaaaaggggaggcaagggagaatgggctctgaacaaatcagggccacaggcttccccttccctccagggcacctgaaccagccctccaaccaccatatytggaaagaggtaaactggtcctgtcctggcccctagggggtggcaggcaggaaggcccaagaagtctctggctctcaggttccctctgtgccgtgagggg

SEQ ID NO: 554046 - DNA, 201 bp, Homo sapiens
ggagcagggggaaactccacagcagcccctccccttccagccagggtttctcactgcaccaagcccaacttgaactgtccctcccactgtgacaacttttkgtcacttgtgggatcccagaagctaccaggcttcgtccacctccctgctttactgtggagaccctgcagcccagagagggtgggagctttgcccaaggcc

SEQ ID NO: 554047 - DNA, 201 bp, Homo sapiens
tccccttccagccagggtttctcactgcaccaagcccaacttgaactgtccctcccactgtgacaactttttgtcacttgtgggatcccagaagctaccakgcttcgtccacctccctgctttactgtggagaccctgcagcccagagagggtgggagctttgcccaaggccacacagccagtgcctagcaggatgagcat

SEQ ID NO: 554048 - DNA, 201 bp, Homo sapiens
cgggttgaagggccgcttgctccggtctgactgggactgctcgatgttaatggactggttcagggcctccagctgtggggagtgaagccagtggcacctcrggatggggctacccggctggtcctgccctcctgccccctctcagccaggcctggcccaactagagctcaccaggaaacagggcagcacccagccctcagc

SEQ ID NO: 554049 - DNA, 201 bp, Homo sapiens
atacaaagcagtatttatacatttatttatatatgtatatttacttcagaagaaacgaacatttcggggacaggaagcaagcaggcccggggctgcttccytcactgcccacctcagagtcagagttggcacatgacaaataccaagctcagggagaagaactgggagttaactgggaagtagggggcgctctatgcacac

SEQ ID NO: 554050 - DNA, 201 bp, Homo sapiens
agatgccttctgcatggtcacacccccccacaccctacttcacacccacaccctcctcacccctcacagcataccactcccccaacttctgcacagctackcatgcagtcactccccaaacacccacacccccattccacacccacacgctccccccacctctgcatgtatgcactcacacacagacacacacacacactc

SEQ ID NO: 554051 - DNA, 201 bp, Homo sapiens
ttctgcatggtcacacccccccacaccctacttcacacccacaccctcctcacccctcacagcataccactcccccaacttctgcacagctacgcatgcaktcactccccaaacacccacacccccattccacacccacacgctccccccacctctgcatgtatgcactcacacacagacacacacacacactcacagccc

SEQ ID NO: 554052 - DNA, 201 bp, Homo sapiens
cctaccctaggtgggagggccgttggtcagccacctactagaggcctgggcagggaggcacaaacctgcccaaggaggggcagcctttcacctcatcctarccacctcctgcccccaggctggaccaggagaatccaacccaaatctaaaggtccccctccgtccccatctcctctgaggcctgctcctcctctgggcctc

SEQ ID NO: 554053 - DNA, 201 bp, Homo sapiens
accgaagccgacagacccagccatgcccacagggagctcatagactcaaaatcagccactactggggttgtgctgtggtgcctcccaatgggtcttagggraggggcccctggggaggggaccagcatggagtctgcctggagaggagggatgggtgttgggaagggcatccaaggcaaagggagccacagggtggagggc

SEQ ID NO: 554054 - DNA, 201 bp, Homo sapiens
cattccctgagaggggagcccagggtgggaggcaagtgtgcagggagtttagtttgggacctggagctgaggcacctggtagagggcccaggagatgggtyttgactggggttgcagacttgggaatcacaggctggagcaggaaacggggcgagagggaggcagggaggcaaggaggcacagagtcagggtaaggtgccc

SEQ ID NO: 554055 - DNA, 201 bp, Homo sapiens
gaactggctccctgcatggctgcagcaagagggccaggatcaggggtgtccctgggaagaagggtctcaccttcccccaccccgcacccctacctgaaggygcccgagctgccggtggacttgaggctgtcgagccgccgcagcttggccagcttgtggctccagcgctccagctcatcaatgcgcgtctccaggttgtct

SEQ ID NO: 554056 - DNA, 201 bp, Homo sapiens
tggctgctctgagccagataggcctcccagaaggcattgagccaatgcttttctcctcagattgccgtgggctgggctctctgcactccacagtccacccyttcgctttgccttaactgctgtgcccagttacgaggtcacctctaccaagtacactcgtgatatctataaagagctcctcatctccttagtggcctcact

SEQ ID NO: 554057 - DNA, 201 bp, Homo sapiens
cctcaagccccacgtcgcagacaggggtgcccagacctccagggtaggtgggatgcccctgctcaccagcagtgccacccggaagtggtaggtgaattcayggaaggacaggatggttattggccaccggtgagaggtgccctggagagaagggagagaggggtcaggacagactgctgcccttatcccaaccagcatctc

SEQ ID NO: 554058 - DNA, 201 bp, Homo sapiens; identical to SEQ ID NO: 401291

SEQ ID NO: 554059 - DNA, 201 bp, Homo sapiens
cctccaaccaccatatctggaaagaggtaaactggtcctgtcctggcccctagggggtggcaggcaggaaggcccaagaagtctctggctctcaggttccytctgtgccgtgaggggcgaccagctggaacagcaactccagtgtgaagacttccagtttcaccagtctcgggtagggccagtgaacagcagagctggcct

SEQ ID NO: 554060 - DNA, 201 bp, Homo sapiens
ccaccccgtcctgagccaagcccgggggctgccccccacctaccctaggtgggagggccgttggtcagccacctactagaggcctgggcagggaggcacamacctgcccaaggaggggcagcctttcacctcatcctagccacctcctgcccccaggctggaccaggagaatccaacccaaatctaaaggtccccctccgt

SEQ ID NO: 554061 - DNA, 201 bp, Homo sapiens
aaccaccatatctggaaagaggtaaactggtcctgtcctggcccctagggggtggcaggcaggaaggcccaagaagtctctggctctcaggttccctctgwgccgtgaggggcgaccagctggaacagcaactccagtgtgaagacttccagtttcaccagtctcgggtagggccagtgaacagcagagctggcctgcagc

SEQ ID NO: 554062 - DNA, 201 bp, Homo sapiens
tttttggtaagataaacagaactcttgaccccaatccggactgcggggagcctgctcccgcggtggttctgctcttggccacctgggggccagggcacccmtgagcaccctctaaggtgaggtgggcccggcctgggaagcctgcacccaggctgcacccacggccttccccagccacccacttaccgccgaagggtgcgt

SEQ ID NO: 554063 - DNA, 201 bp, Homo sapiens
aaaatgttttgacagcagaaccttcctttgaactaaacctttcatggaatctccacatgtaaaacagatgaaaagacaatcgtgcaggttgagtcagagtsgggggcttgggtctaggaagaagactcctcagaaacctgagggttccatgagacagctgcaaaatcactggggtctgggtaagagcacagccccgggccc

SEQ ID NO: 554064 - DNA, 201 bp, Homo sapiens
ccttccagctgggcagcttctctgcgtggtagggtcccacagccccccagaagctggcgacactgaggtttcgtcacatccacccttaggggcatttctcygcaccacccacattggggtgcctggcagggcctggggccgaattgtgggtaggggaccgcccaggatcccctcagacctacagggcacttggggggcagt

SEQ ID NO: 554065 - DNA, 201 bp, Homo sapiens
aagagataggaaggagcatgttctgctttggcagaaggagcaatggcagctactccatgcagaccgtgcccgggactggcaggtccacagccacctccacstggcccctgcctccttcccagtcctgttgtgctgggttccctcacccactatgctctgggcacatcaaagtatttcattagccccatcctcagtacaatc

SEQ ID NO: 554066 - DNA, 201 bp, Homo sapiens
gggaccgcccaggatcccctcagacctacagggcacttggggggcagttactagtgtccttgatgatggcacagggactcaaagactcccgccccagaccraaggccaggacttcttctctcttcctgcacccactgaagccccacagcttcctggaaacacagggccctagggggctgggcctcagggcattcagcaggt

SEQ ID NO: 554067 - DNA, 201 bp, Homo sapiens
gataggaaggagcatgttctgctttggcagaaggagcaatggcagctactccatgcagaccgtgcccgggactggcaggtccacagccacctccacctggsccctgcctccttcccagtcctgttgtgctgggttccctcacccactatgctctgggcacatcaaagtatttcattagccccatcctcagtacaatccagt

SEQ ID NO: 554068 - DNA, 201 bp, Homo sapiens
agaaggagcaatggcagctactccatgcagaccgtgcccgggactggcaggtccacagccacctccacctggcccctgcctccttcccagtcctgttgtgstgggttccctcacccactatgctctgggcacatcaaagtatttcattagccccatcctcagtacaatccagtgacacagtgctgctactagccccatctt

SEQ ID NO: 554069 - DNA, 201 bp, Homo sapiens
cccatctacctgaggctttggctgtgcgtctgtgatgtggtttcaggcccgagcaccatgtctgctgtgtgtctagctgggctctccctctgtcttggacmctgtctcttctgcagggcgacagggctcgggcctccctcagaagcacccccacctctgttgcaggtgctttctgcacgtcttttctccctcactatagag

SEQ ID NO: 554070 - DNA, 201 bp, Homo sapiens
tagccagttaaccacgaagtaggcaatgaagtcagcacttatcccaccatgcaggaaataccagagactctccggctgtcctcagactcggctgttctgargctctgcgggagattctccctggctcccctcctgcctcccacttccccacaccggcactcacttcatctgcagagtcaggctgaggtgcagtggggtgcc

SEQ ID NO: 554071 - DNA, 201 bp, Homo sapiens
aagtcagcacttatcccaccatgcaggaaataccagagactctccggctgtcctcagactcggctgttctgaggctctgcgggagattctccctggctccyctcctgcctcccacttccccacaccggcactcacttcatctgcagagtcaggctgaggtgcagtggggtgccactactgacagggatgtggtaggtgaag

SEQ ID NO: 554072 - DNA, 201 bp, Homo sapiens
ccaaacttgtgggaagaggcctctgggcctggccagtgttgccaaaggcctgggctcaccacctcttccctcctggagctccacccacctgcctgacctakcaaagcacccaggaagtgcctgggccacttccggggctgcagctgccaagcttcctggccttggggcctggggtggcaagggtggcccaaagagtatggc

SEQ ID NO: 554073 - DNA, 201 bp, Homo sapiens
taggctccaggagaccctcccatcaatgagtatttgggcctttctctctacgcaggtagcccccgccccaagccccagcccacagaaagccttacctgagyggttggtgctggggctgggacttgggctgagaacatggccagggttaaagctggggccaagactaggaccagtggtagggttggtagtgggtgaggaaca

SEQ ID NO: 554074 - DNA, 201 bp, Homo sapiens
ggagcacccaactccatgcagctggtctaatccactggcccaggcctggcaatatccacagttaccctgtcacctgcccactggccttctgggtgagccasgggagtggtccccacagggctcccggcctgcggcctggaaagatggagccatctgggtgttgagggggtgctaggaatgctcaggcagcctctgaccgga

SEQ ID NO: 554075 - DNA, 201 bp, Homo sapiens
gcagctggtctaatccactggcccaggcctggcaatatccacagttaccctgtcacctgcccactggccttctgggtgagccaggggagtggtccccacakggctcccggcctgcggcctggaaagatggagccatctgggtgttgagggggtgctaggaatgctcaggcagcctctgaccggatcctccccagcccctcc

SEQ ID NO: 554076 - DNA, 201 bp, Homo sapiens
accgggggaaaaaacacccatctgcccacttctccctgacttggttcccagctgcccctccctggcagtcatcaccttctcagggaggcctggggctggcmtaggagtcaggagccctgactgccagtcctggctcttccctgagcctgtttgctcttctgtgaaatgagtgctcccaggccctgctccaggaccttgatg

SEQ ID NO: 554077 - DNA, 201 bp, Homo sapiens
tgatggggtcctgggctggggcgtcccaaggtgggggggcctggaggagtggggagtgttgtagggcactcacagctccttgtagttagcatcgtacaggktcgcccacttgttctgctgatgaggctgccacttgatggactggtagttggggtccaggtaggagccactgaggctgtcactgtcctgcaggaggcctgg

SEQ ID NO: 554078 - DNA, 201 bp, Homo sapiens
agccaagcccgggggctgccccccacctaccctaggtgggagggccgttggtcagccacctactagaggcctgggcagggaggcacaaacctgcccaaggrggggcagcctttcacctcatcctagccacctcctgcccccaggctggaccaggagaatccaacccaaatctaaaggtccccctccgtccccatctcctct

SEQ ID NO: 554079 - DNA, 201 bp, Homo sapiens
gccgagggtgctcctgcctctgctttgcagtgcccccagtatctatggaggtgatgagtgttccccagctggctccccacttgcctctgggctccctcccwttcccccacccacagaccttgttcaccaccaggaagttctctatggttttcccattggcaaagaccatgtctccggtgtctttcacagcctcaggcaaga

SEQ ID NO: 554080 - DNA, 201 bp, Homo sapiens
ctgcccccaggctggaccaggagaatccaacccaaatctaaaggtccccctccgtccccatctcctctgaggcctgctcctcctctgggcctcaggaaggmgtctccggagacccccagcccaggcctgcccagtgttcccctctccggcaggcagtccctcttctgggctctcaggggccagccccccagcctgagcggg

SEQ ID NO: 554081 - DNA, 201 bp, Homo sapiens
cctgctcccgcggtggttctgctcttggccacctgggggccagggcacccctgagcaccctctaaggtgaggtgggcccggcctgggaagcctgcacccakgctgcacccacggccttccccagccacccacttaccgccgaagggtgcgtccatgatggcgcaggcgggcaggcgggtggcatcaccgcggggatacttg

SEQ ID NO: 554082 - DNA, 201 bp, Homo sapiens
cagggctggcttacagaatcacagcaatcgcttgaggaatgaatgagtttgtccctgcctgcagtgtcacactcaaggtcaccctttatagtgggggctcyatggagagcaggccctgtgatcagaaacaagccacagagggcctgggccacaaaaaccagggaaggggagcttccgcacggcactccttccccttctggt

SEQ ID NO: 554083 - DNA, 201 bp, Homo sapiens
agggtggcgatggggctcgagtggggtgcagaggcagggctgtcacggtcccaggctcctgtttgatcattccattcagcatctgggcattgagggtgctsgggggggattcagagtgcttcctcttcttggaggggtgtgtagggagcctggggaaacagaagtgtgcgccgtgggggctggctctccccgagcccctcc

SEQ ID NO: 554084 - DNA, 201 bp, Homo sapiens
tgcaggcctgattcctgatccttattctgtgctcagcaaacgtctattgactgacaagtctgaacccagacagtcacatgactgggctgaggtgggccctkgccagtgagccttgccaggctgggctgggtagtgtcaggggtgcagcaagtacctgactggccctgggcccaggtgggctcagcagggcccacgctggac

SEQ ID NO: 554085 - DNA, 201 bp, Homo sapiens
gactctccggctgtcctcagactcggctgttctgaggctctgcgggagattctccctggctcccctcctgcctcccacttccccacaccggcactcacttyatctgcagagtcaggctgaggtgcagtggggtgccactactgacagggatgtggtaggtgaagttcccaggcctgcaggggcaaaactggcaccttagcc

SEQ ID NO: 554086 - DNA, 201 bp, Homo sapiens
tctccggctgtcctcagactcggctgttctgaggctctgcgggagattctccctggctcccctcctgcctcccacttccccacaccggcactcacttcatytgcagagtcaggctgaggtgcagtggggtgccactactgacagggatgtggtaggtgaagttcccaggcctgcaggggcaaaactggcaccttagcctga

SEQ ID NO: 554087 - DNA, 201 bp, Homo sapiens
ctgcgggagattctccctggctcccctcctgcctcccacttccccacaccggcactcacttcatctgcagagtcaggctgaggtgcagtggggtgccactrctgacagggatgtggtaggtgaagttcccaggcctgcaggggcaaaactggcaccttagcctgagggtaccctgccaccccccacccccaccagggactc

SEQ ID NO: 554088 - DNA, 201 bp, Homo sapiens
tcaggctgaggtgcagtggggtgccactactgacagggatgtggtaggtgaagttcccaggcctgcaggggcaaaactggcaccttagcctgagggtaccstgccaccccccacccccaccagggactcctcagcccccaatctgtactggagccctccagaagagacagtgtccaagggtagcctggaaaggggctaccc

SEQ ID NO: 554089 - DNA, 201 bp, Homo sapiens
ggccacaagggaggccccctttccaacccgcctgccatccctgctcacccctaccttgctggccaccttggggggcctcttcttgtgggggacgctgcccscccgactgaactggctccctgcatggctgcagcaagagggccaggatcaggggtgtccctgggaagaagggtctcaccttcccccaccccgcacccctac

SEQ ID NO: 554090 - DNA, 201 bp, Homo sapiens
gtcacttcaccttagtctccatcccatttcttcagctgaacaataggaacaacaattcctttcttgcaggagtgctgtgaggactaaatgggatgatctaygtaaggctgcaggcctgattcctgatccttattctgtgctcagcaaacgtctattgactgacaagtctgaacccagacagtcacatgactgggctgaggt

SEQ ID NO: 554091 - DNA, 201 bp, Homo sapiens
cagaaagggaggccacaagggaggccccctttccaacccgcctgccatccctgctcacccctaccttgctggccaccttggggggcctcttcttgtggggracgctgcccgcccgactgaactggctccctgcatggctgcagcaagagggccaggatcaggggtgtccctgggaagaagggtctcaccttcccccacccc

SEQ ID NO: 554092 - DNA, 201 bp, Homo sapiens
tggccagaggctccagactcttgtgatgcttggagtggccaatgccattgactgaaagaccccaggacttggctctgatgttggtgactggcagaagggcmatctggctggggcctgtggatagaaccaggcacaggctaagaagctggaagctggctgcttcctgtccagctgtctctagggccccacaagactgagtga

SEQ ID NO: 554093 - DNA, 201 bp, Homo sapiens
ggagaactgcaagccagaaagggaggccacaagggaggccccctttccaacccgcctgccatccctgctcacccctaccttgctggccaccttggggggcytcttcttgtgggggacgctgcccgcccgactgaactggctccctgcatggctgcagcaagagggccaggatcaggggtgtccctgggaagaagggtctca

SEQ ID NO: 554094 - DNA, 201 bp, Homo sapiens
ggccagaggctccagactcttgtgatgcttggagtggccaatgccattgactgaaagaccccaggacttggctctgatgttggtgactggcagaagggccwtctggctggggcctgtggatagaaccaggcacaggctaagaagctggaagctggctgcttcctgtccagctgtctctagggccccacaagactgagtgaa

SEQ ID NO: 554095 - DNA, 201 bp, Homo sapiens
agtggccaatgccattgactgaaagaccccaggacttggctctgatgttggtgactggcagaagggccatctggctggggcctgtggatagaaccaggcayaggctaagaagctggaagctggctgcttcctgtccagctgtctctagggccccacaagactgagtgaaccccatgtgtctcttggtcctctcaggggaac

SEQ ID NO: 554096 - DNA, 201 bp, Homo sapiens
atgttggtgactggcagaagggccatctggctggggcctgtggatagaaccaggcacaggctaagaagctggaagctggctgcttcctgtccagctgtctmtagggccccacaagactgagtgaaccccatgtgtctcttggtcctctcaggggaacttcccagtcattgtccagagcctcgttctaggctccaggagacc

SEQ ID NO: 554097 - DNA, 201 bp, Homo sapiens
gcccgagtctgggggagagtccggcagtgtgctgcgagagccaggggaaggggccggggggtgagcagctgagcttctgccttccagctgggcagcttctytgcgtggtagggtcccacagccccccagaagctggcgacactgaggtttcgtcacatccacccttaggggcatttctccgcaccacccacattggggtgc

SEQ ID NO: 554098 - DNA, 201 bp, Homo sapiens
ctgtggatagaaccaggcacaggctaagaagctggaagctggctgcttcctgtccagctgtctctagggccccacaagactgagtgaaccccatgtgtctsttggtcctctcaggggaacttcccagtcattgtccagagcctcgttctaggctccaggagaccctcccatcaatgagtatttgggcctttctctctacgc

SEQ ID NO: 554099 - DNA, 201 bp, Homo sapiens
gggccggggggtgagcagctgagcttctgccttccagctgggcagcttctctgcgtggtagggtcccacagccccccagaagctggcgacactgaggtttsgtcacatccacccttaggggcatttctccgcaccacccacattggggtgcctggcagggcctggggccgaattgtgggtaggggaccgcccaggatcccc

SEQ ID NO: 554100 - DNA, 201 bp, Homo sapiens
ggtgctcctgcctctgctttgcagtgcccccagtatctatggaggtgatgagtgttccccagctggctccccacttgcctctgggctccctcccattcccscacccacagaccttgttcaccaccaggaagttctctatggttttcccattggcaaagaccatgtctccggtgtctttcacagcctcaggcaagatctcct

SEQ ID NO: 554101 - DNA, 201 bp, Homo sapiens
ggatcccctcagacctacagggcacttggggggcagttactagtgtccttgatgatggcacagggactcaaagactcccgccccagaccaaaggccaggasttcttctctcttcctgcacccactgaagccccacagcttcctggaaacacagggccctagggggctgggcctcagggcattcagcaggtcatggggggct

SEQ ID NO: 554102 - DNA, 201 bp, Homo sapiens
gtttctcagctcgcgatttctaagggcgagaggcgtggggcgaattttgaataccttccagtttgtatatctctgttatcggtggtgtgttatctttattkggaaagttcttctgccgaacccgtgcccatcctacaatgccctgggcaaatgtttattggtgaagcacttccaactctcaggcacttggccagactttcc

SEQ ID NO: 554103 - DNA, 201 bp, Homo sapiens
agggccctagggggctgggcctcagggcattcagcaggtcatggggggctgccccaccagaggcaggtgtggactgggaagggagccagcaccaccgggcstgggtttatttttttcttgcaggtttcacttttatcagtgttcaggaaaaagaacaaactcaacccaagaggtcaacacgtcctgcgtgaaccctgtgct

SEQ ID NO: 554104 - DNA, 201 bp, Homo sapiens
gatgtgggaagctcagggagaaaccacgctaggtacatggaccccgccggttttgtacattggattggggctgagagaaggtaaggaggagaggagggctrgtgatgcccaggggcaggttatagccttatttcccaagttcaggtgagctcagtttgttctttggatttccaggacagtgagcaggggacctggctggag

SEQ ID NO: 554105 - DNA, 201 bp, Homo sapiens
ccacgctaggtacatggaccccgccggttttgtacattggattggggctgagagaaggtaaggaggagaggagggctagtgatgcccaggggcaggttatrgccttatttcccaagttcaggtgagctcagtttgttctttggatttccaggacagtgagcaggggacctggctggagtggaggtggggaataggggtgct

SEQ ID NO: 554106 - DNA, 201 bp, Homo sapiens
acagcccttgaataaactgtcagttctacaagataacaatctgcaagtccctctccaagcagtgagcagaggaatatttggtgctcatgcaagtgaacccmcaaccagagctcatggctctgggaacctcgaggaggagaacagagagaacccacctggcaggcgaagaggaagacagtggtgatgcccagccagctgtga

SEQ ID NO: 554107 - DNA, 201 bp, Homo sapiens
cccctttctgcaatcaccccatgatgtctccaccccacctcacatccagatggggctggatggcagagcagatgaagcctgctctgtggcggggcagcctwactgaaatgcacacctttatgggggaagtggacggacacctcacctccctcatgtttcacaccgtggactgcacttgagtcccagctcttcaccacatcc

SEQ ID NO: 554108 - DNA, 201 bp, Homo sapiens
agctgtgaagggagtagaggttggcagtccttccatggttgtgaaacgtaaagacagcaaccagccccacaacagtgaggacgaaggccatcaggtgcagsgctgcatggaggagtttccagggcagtttgggccccacccacgactggggcaggcggtacaccagtgacgctgcaggagagagtagtgccagggctcagc

SEQ ID NO: 554109 - DNA, 201 bp, Homo sapiens
cagttctctggctaaaggaggtaacactgatttagctcttggcctgtgggatggaatctttttgcttcagttcccctgcatcagcctgggcaccacccccygcccgaggcctcaatgcctgggtgggcctgatcttcagtcacaatgactgaggccccaccccagcacctggcagtgcccagacagagcagcaaactcaag

SEQ ID NO: 554110 - DNA, 201 bp, Homo sapiens
caggcgccggagctgccgctcccgaggttcctaggagatgcagaagacactgccctgaatgcctacagccggctggcaatgccgccccagagcagagcggsgggtgccgcctcgccttcttataggctcgcagcacttccagtcgcgcgcgaggcctcctgggaagtgaagtccggagaccaggggtggccggctcccagc

SEQ ID NO: 554111 - DNA, 201 bp, Homo sapiens
ccccgtctctactaaaaatacaaaaattagccgggcgcggtagcgggcgcctgtaatcccagctacttgggaggctgaggcaggggaatcgcttgaacccrggaggcggaggttgcagtgagccgagatcgtgccactgcattccagcctgggcgacagagtgagactctgtctcagaaaaaaaaaaagaaagaaaaagaa

SEQ ID NO: 554112 - DNA, 201 bp, Homo sapiens; identical to SEQ ID NO: 401386

SEQ ID NO: 554113 - DNA, 201 bp, Homo sapiens; identical to SEQ ID NO: 401366

SEQ ID NO: 554114 - DNA, 201 bp, Homo sapiens
gccagagagtaggtgggctccaaaccccaggcttctcacttgcttactaagcacagcagtctgaagcttgggacctggcagtgcgtctttggagaaggcaraaaagccacagcagcaacacttaggagcaagacccttcccgctctccaccctatttcctcccctgaagaagagcaacagctcaagctctagcatggcaca

SEQ ID NO: 554115 - DNA, 201 bp, Homo sapiens
aggcccagagacagcccaacccaccctacccccatagccccaagcccaacatttacaaaggccagccttggagagggaaagtgcagctttgtccagcctgrgccctatcccgcctcccttcctgacctcttactcaccacctccatagaataccaccatgccagcaaccataagcactgggtgccagttgaacatgtagat

SEQ ID NO: 554116 - DNA, 201 bp, Homo sapiens
gtggagccgcacggtcacaatacatgcagacacagagcagcaatacgaaacagaacagctcagagcggtcagctcctcagcagaagctgcgtgggccgccrctccccctttctgcaatcaccccatgatgtctccaccccacctcacatccagatggggctggatggcagagcagatgaagcctgctctgtggcggggcag

SEQ ID NO: 554117 - DNA, 201 bp, Homo sapiens
agaagaaggagaagtcacaaatctccactggctcagatgcacccagttctctggctaaaggaggtaacactgatttagctcttggcctgtgggatggaatmtttttgcttcagttcccctgcatcagcctgggcaccaccccccgcccgaggcctcaatgcctgggtgggcctgatcttcagtcacaatgactgaggcccc

SEQ ID NO: 554118 - DNA, 201 bp, Homo sapiens
gcgccggagctgccgctcccgaggttcctaggagatgcagaagacactgccctgaatgcctacagccggctggcaatgccgccccagagcagagcggcggktgccgcctcgccttcttataggctcgcagcacttccagtcgcgcgcgaggcctcctgggaagtgaagtccggagaccaggggtggccggctcccagcgcg

SEQ ID NO: 554119 - DNA, 201 bp, Homo sapiens
atttttgttatagcagcctgaacaaagacagctttgattcttaacatatttaatgaaactcgagcttcataaaccagtgaaatgcctacccctatggagayggggagctggtcatgggacccaggtgcctggaggacatcccagtggctttgaaggctccagccagtcaagacggtcaatattagcccttctgccaacatc

SEQ ID NO: 554120 - DNA, 201 bp, Homo sapiens
caaggctggttgttctaagcttcagggctgccagctgtgatcagatcttcatttctgcatgtgtgtctcagaggcccaaatccacacttgaactttttgcraagttgtgtcataaccctactcattgatgggaaaatgttttcatcagccaaaaattactatcttctgttttatgccagaaattcaatttgacaaatattt

SEQ ID NO: 554121 - DNA, 201 bp, Homo sapiens
cacgatctcagctcactgcaacctccgcctcccaggttcaggcgattctcctgcctcagcctccttagtagctgggattacaggcatgtgccatcacgccyggctaattttgtatttttagtagagatggggtttctccatgttggtcaggctggtcttgaactcccgacctcaggtgatccatccgcctcagcctcccaa

SEQ ID NO: 554122 - DNA, 201 bp, Homo sapiens
gcgccccggccgctctggcctgcaacgtgtctctggggcggaggcagcggcagtggagttcgctgcgcgctgttgggggccacctgtcttttcgcttgtgyccctctttctagtgtcgcgctcgagtcccgacgggccgctccaagcctcgacatgtcgtacaactacgtggtaacggcccagaagcccaccgccgtgaac

SEQ ID NO: 554123 - DNA, 201 bp, Homo sapiens
agtagctaggattacaggcatgaactaccacatggggcaactttaagaggggaaaattttggcagtttcttttttttttttgagacggagttttgctcttrttgcccaggctggagtgcagtggcacgatctcagctcactgcaacctccgcctcccaggttcaggcgattctcctgcctcagcctccttagtagctggga

SEQ ID NO: 554124 - DNA, 201 bp, Homo sapiens
cctcctgtctcaacctcccaagtagctaggattacaggcatgaactaccacatggggcaactttaagaggggaaaattttggcagtttcttttttttttttgagacggagttttgctcttgttgcccaggctggagtgcagtggcacgatctcagctcactgcaacctccgcctcccaggttcaggcgattctcctgcctc

SEQ ID NO: 554125 - DNA, 201 bp, Homo sapiens
tcctggttcaagcgattctcctgcctcagcctcctgagtagctggaattacaggtgcatgccaccacgcccagctaatttttgtatttttagtagagacgyggtttcaccatgttggccagaatcgtctcaaactcatgacctcatgatccgcctgcctcggcctcccaaagtgctgagatttcagacgtgagccaccgtg

SEQ ID NO: 554126 - DNA, 201 bp, Homo sapiens
agggtcccctttcgtcctggggaggtcattcggcctcgagaacagggcgggcccagtgagacagaggagtgtgagttggttgtgcggtgtcgtttgggccyggagattggctttctgtggccaggaaaaggggaggtggtaatgacgactttggggtcaagattttcctgtggggaagtctggggggcccaggaggtggag

SEQ ID NO: 554127 - DNA, 201 bp, Homo sapiens
gggccctctactatctgcagatccatcctcaggagctccggcagatcaggtgtgtgtgtttttctgtctgctcgctttcctcctcttttctctaggacttmtttgagccttggattccttcctctgccatattcttctttgttcagccacacagagatggaacatgaagtggcttgcttggacatcaccccattaggagac

SEQ ID NO: 554128 - DNA, 201 bp, Homo sapiens
tagaaacatttgcttagtgtgacctgggaatttgaaacagaactgttctgaattatggctgcagttgggagttttctcagcagatgtctgagatgtgggtrgtatctggatcccacgtagggtccattctcatttctttcacgttgctgactttcttccagacctctattgctgagtgcttgacataccttgataatggtg

SEQ ID NO: 554129 - DNA, 201 bp, Homo sapiens
tggagcaggaatatgcaagacaaattatagatttttctgagtgtagggatgcaatagatgaagaatcaaaaacttcagagatttagaaacatttgcttagygtgacctgggaatttgaaacagaactgttctgaattatggctgcagttgggagttttctcagcagatgtctgagatgtgggtagtatctggatcccacgt

SEQ ID NO: 554130 - DNA, 201 bp, Homo sapiens
tcaagacccaagggacagggtaataattcattgagattcagtgtttcatgaaaaaggcatgcactgacattggggctccaactatttggcctatcaaataratccattagttttaatacctctcctaaaatttttctgcacaagtggtgcccagcgtcctctgttgctctgtggatgttgaggttcttccctaatcccgat

SEQ ID NO: 554131 - DNA, 201 bp, Homo sapiens
ctatttggcctatcaaatagatccattagttttaatacctctcctaaaatttttctgcacaagtggtgcccagcgtcctctgttgctctgtggatgttgargttcttccctaatcccgattttgtttctcaggaccgcattggccgcccctcagagaccggcattattggcatcattgaccctgagtgccggatgattggc

SEQ ID NO: 554132 - DNA, 201 bp, Homo sapiens
ccaatgaaagttttctaagtagggctgtcatgattcatggaaaaaattaaagtgctgggggcagctctctattcgatcagagaaataaggagaagacactrtgggtttgagctttttggagaaaggactcctgtagttcactcaagacccaagggacagggtaataattcattgagattcagtgtttcatgaaaaaggcat

SEQ ID NO: 554133 - DNA, 201 bp, Homo sapiens
gacatcattacgcgagcccatggcaatgtccaggtgaggtggctgctttaggccaatgaaagttttctaagtagggctgtcatgattcatggaaaaaattraagtgctgggggcagctctctattcgatcagagaaataaggagaagacactatgggtttgagctttttggagaaaggactcctgtagttcactcaagacc

SEQ ID NO: 554134 - DNA, 201 bp, Homo sapiens
tttatttattttctttgagacgggggtctcacagtgttgcccaggatgtcttgaactcctgagctcaagcaatccctccactttagcctctggagtagagyagctggggtattgtaggcatgccaccgtgcttgggctgtgttaggttgttttgcgaattcttgggatgggtggaatatgctttaggagaaaaactcttct

SEQ ID NO: 554135 - DNA, 201 bp, Homo sapiens
aggtatttagacataagtgataggattattttgaagggatgggaggcccttcccctgagttcaaaagttagagggtctgttctttcaggacactttacttyggccgaagacttaaacctgttgattgccaaaaacacgagattagagatctatgtggtcaccgccgaggggcttcggcccgtcaaagaggtgggcatgtat

SEQ ID NO: 554136 - DNA, 201 bp, Homo sapiens
tcaataaagtcatcaaaagtgtggggaagatcgagcactccttatatccttcccagagccatccccttgctgggaagcacatcccggcatatgtggcacayggagtcacattacccggaagctactacatgtcttgattaggttcctgtacagaacaggttttttgttttgttttgtttttgactttttcatgtggaaaat

SEQ ID NO: 554137 - DNA, 201 bp, Homo sapiens
acctgaagaccaagggcgacttcatcctggtgggcgaccttatgcgctcagtgctgctgcttgcctacaagcccatggaaggaaactttgaagaggtgatrctggtggggggatgcgagcagacttcttgcttgagccaccgcccctgcaagtgtctctggtggggaaggataagccagcccagtattaggggcagaaatg

SEQ ID NO: 554138 - DNA, 201 bp, Homo sapiens
aaatacttggggaggagtggaggaggcattacattcatctttcagaatttgaatgggatgattgagattagcttgagattgaaatagatgaagactttgtwtgtagaacagagagatggagaatcatgaaagtgagaactagatgtttaccagcttcagttctggctttttgtacatgcccttagggtgtatgtgtaccta

SEQ ID NO: 554139 - DNA, 201 bp, Homo sapiens
agcccaccgccgtgaacggctgcgtgaccggtgaggctgccggggccggagaccccggcgagtgagggagttggggggagccgcggcctagggaggcccgsgccccgggggcggccgggcaggagtgggcccggcgaatggaaggcgctggcggccgaggaacctcccccagcaccgcgacctcgaaagagtcgtccctgt

SEQ ID NO: 554140 - DNA, 201 bp, Homo sapiens
taagagtctcgtaaaggctatcatgttccctgggctttgatgtcctttttaaaataatgatgaccttaaagtttgccttggggctaactagacctgtactyttgccagtcctggtttggcagacccagagtgctgagcattctaattttgctgtctttcctgcagtcccagagccctttgggggggccatcatcattggac

SEQ ID NO: 554141 - DNA, 201 bp, Homo sapiens
tctgcacaagtggtgcccagcgtcctctgttgctctgtggatgttgaggttcttccctaatcccgattttgtttctcaggaccgcattggccgcccctcakagaccggcattattggcatcattgaccctgagtgccggatgattggcctgcgtctctatgatggccttttcaaggttattccactagatcgcgataataa

SEQ ID NO: 554142 - DNA, 201 bp, Homo sapiens
cccaagatggctctaaagactatcagcccggaaatctcagatcagatagctgaaatgggatctggtttccatcttgagagagagatctagagtttcagggygagggggcagatcctagataccaactggatttctctgcacattatcttggggctcatacttcacgtggtcattaactccagtagatactgagtctgtgtt

SEQ ID NO: 554143 - DNA, 201 bp, Homo sapiens
ttgttctccctgttcctctacaatgttcttttaggttcctaaagacaccaaatgtgtggtcccacacctcaactctgggaattatgttacttaacacctawcaacaaactgttgttcctgctgtggaagttgactgttgaatgagttaggtattggagcatctcacaggatcctgtgataatctatccaagcagcctgtga

SEQ ID NO: 554144 - DNA, 201 bp, Homo sapiens
tcacaggccagctttttgtcctgttttctttcttcctttctcctgatgtcattctctctgtaggtctgttgagcgaccgtaagaaggtgactttgggcacycagcccaccgtattgaggacttttcgttctctttctaccaccaacgtctttgcttgttctgaccgccccactgtcatctatagcagcaaccacaaattgg

SEQ ID NO: 554145 - DNA, 201 bp, Homo sapiens
tccatgttccagcccttccagtggtgtcaggctgccatgtctatatatatatatatatatatatatatatatatatatatatatatatatatatatatatmtatcctttttttttttttttttttttgagacaggatcttgctgtgtcacccaggctggagtgcaatgacatgatcatagctgcagcctctttctcctaat

SEQ ID NO: 554146 - DNA, 201 bp, Homo sapiens
ccttaaaaccaagaaggagcagagagggggttccagctcaggactccatgttccagcccttccagtggtgtcaggctgccatgtctatatatatatatatrtatatatatatatatatatatatatatatatatatatatatatctatcctttttttttttttttttttttgagacaggatcttgctgtgtcacccaggct

SEQ ID NO: 554147 - DNA, 201 bp, Homo sapiens
cagctgtgatcagatcttcatttctgcatgtgtgtctcagaggcccaaatccacacttgaactttttgcgaagttgtgtcataaccctactcattgatggraaaatgttttcatcagccaaaaattactatcttctgttttatgccagaaattcaatttgacaaatatttaggtacttaatgctatgtgaaaggtattcat

SEQ ID NO: 554148 - DNA, 201 bp, Homo sapiens
aatatgtaatagtgaaataataaatgttcaccccagtgcctcataaaaccgtttcctgtcccgcattgcactttgagaagtagtgctgcagatgaagggtygaagagttggggggagtcattctgagagagctctggcccctttggctgagagagacaatgcccttcccaggtgcggctctatgagtggacaacagagaag

SEQ ID NO: 554149 - DNA, 201 bp, Homo sapiens
gcagcctttgtgtcctgatctgacgggtcccttcacaatgatgtctcagcacttcttctgtgtttgagaaggatgatgtgcattctctctgtttgcaggcyctgtccagcagtgtaagctccagcaagctgttctccagcagcactgctcctcatgagacctcctttggagaagaggtggaggtgcacaacctacttatca

SEQ ID NO: 554150 - DNA, 201 bp, Homo sapiens
gtctttaatgacccttagatttttactgtttgggattgatgtttcaactacatgcctcctctgaaacactctcctcaggctccttgagctgccagccatcrgagttcttggctagctgcagcctttgtgtcctgatctgacgggtcccttcacaatgatgtctcagcacttcttctgtgtttgagaaggatgatgtgcatt

SEQ ID NO: 554151 - DNA, 201 bp, Homo sapiens
ctgcacattcgcacagttcccctctatgagtctccaaggtgaggcccagggtgggagagtgggaagtgggggttggtgtagggtgcttctgactttctaartgacactgttgttctgtacttgttctgcaggaagatctgctaccaggaagtgtcccagtgtttcggggtcctctccagccgcattgaagtccaagacacg

SEQ ID NO: 554152 - DNA, 201 bp, Homo sapiens
tacctcctttgtgccttgggagatggagcgcttttctactttgggctcaacattgagacaggtgagagtagtattttgagtgagggactctttcaaaaatrgagtattagaattacacagaattcttagtcccagggttctgcttttgaactttcacaggccagctttttgtcctgttttctttcttcctttctcctgatg

SEQ ID NO: 554153 - DNA, 201 bp, Homo sapiens
tgccctcttttgaactactgcacaaggagatgctgggtggaggtatgtgtcatttagggacctgggttgggacagagtcaaaatgtggaacaagaacatartgtccccctttctcacagagatcattcctcgctccatcctgatgaccacctttgagagtagccattacctcctttgtgccttgggagatggagcgctttt

SEQ ID NO: 554154 - DNA, 201 bp, Homo sapiens
atttcatttgcatgtggctgaataagtgatggaaggaaatgatagtccagttccacatagagtgtgttggcacataaacagtttgatagccttgttatatrttggaggtgctgatatatttttgtatatttcttagtgttactgtagttctgaagctattggaataagacccaattgaataaggttgaaaccaggagattt

SEQ ID NO: 554155 - DNA, 201 bp, Homo sapiens
ggaattctcaaagggtgtccccaaccagcagctacagcattacttgggaacttgttagaaatgcagattctctggctgggcatggtggctcacacctgtartcccggcactttgggaggccgaggcaggaggatcatttgaagtcaggagtttgagaccagcctggccaacatggtgaaaccttgtctctaataaaaatac

SEQ ID NO: 554156 - DNA, 201 bp, Homo sapiens
gaaggttgctgggtgcagtggctcatgcctgtaatcctagctctttgggaggctgaggtgggtggatcaccggaggtcaggagctcgagaccagtctggcygacatggcgaaaccccatctctactaaaaatacaaaagttagccgggtgtggtggcaggcacctgtaatcccagctactcaggaggctgaggcaggagaa

SEQ ID NO: 554157 - DNA, 201 bp, Homo sapiens
ttctttgcggatcatccggaatggaattggaatccacgagcatgccagcattgacttaccaggcatcaaaggtagcttttttggtgggcataggatgtagrtcttacatgagggactttggccttgttacatgttgtgaaggcgttttggtgggagccagaggaaagcagatcaagtgaagagtgaaagtcgtaacaacag

SEQ ID NO: 554158 - DNA, 201 bp, Homo sapiens
catagctggcttctataaaagtttatttttaaaaaacagttcctacttggtggccttgcagcatctgtcaccatcagtttgggtcctttgtagagtggtcraatagaggaggaacatggggtttggagtccgacagaacgggcttccaggtttgtttgtttgttttttttttaagacagaaaccagcttttcaaaagtgcc

SEQ ID NO: 554159 - DNA, 201 bp, Homo sapiens
ctacgccctccctaatccaggctgttctgggctctggtacctgcaaagcctgacagatgtggcagactgtcctaggaggagcagaaaggaggggtgggaaytctgtgagatggcagtgagtttggagggctgggcatcctctccttagcttaggctggtgggggatggataatctgatgagacagggacagcaggtggtac

SEQ ID NO: 554160 - DNA, 201 bp, Homo sapiens
agtctctgtgtgttgtgtacccgcccaatggcagcaggacggcacagactccagccaaggccccgagccctccagctgggctactccaccacagggggtcyttccacatcctgtctgggtttagggactctagggcagagggctggacaggtttggcctcttggagtgtcagtccctgagcccccactcagtgttcctccc

SEQ ID NO: 554161 - DNA, 201 bp, Homo sapiens
gggttaaggagaagccgatccccctggctggaagtgcccttcttggcccaagtctctgcccacggctgtgcccttgtttcttgcagggagatggagggggkcccaagcactgccatcagggagatctcgctgctcaaggaactgaagcaccccaacatcgtccggtgagttggggattgaggtggggaagctgggatggcg

SEQ ID NO: 554162 - DNA, 201 bp, Homo sapiens
ggggttttttcttaaaacatttttgtcgctgggcgcggtggctcacacctgtaatcctagcactttgggaggctaaggcaggaggatcaccggaggtcggraattcaagaccagcctgaccaacatggagaaaccctgcctctactaaaaatacaaaattagctgggcgtggtggtgcatgcctgtaatcccagctactcg

SEQ ID NO: 554163 - DNA, 201 bp, Homo sapiens
ggtgattatcctcgtgcttttccatatgtatgtgtttgtatatgtgggtgggtatggagacacccaatatacgtatatacatatatactctgtcagttatwtatcagttatatattgctatgtaacatattacccatacacacaattttagtttttcgtagagacagggtatccctatattctcaaggctggtgtctaact

SEQ ID NO: 554164 - DNA, 201 bp, Homo sapiens
gctggcgtgcagtggtgtgaccatgacttactgcagccttgacctcccaggcacaagcgatcctcccatctcagcctcctgagtagctgggaccacaggtrtacgccactatgcctggctaccttttgtattttttttgtagagacagcatttcaccacgttgcccaggctggtctcgaactcctgggctcaattgatcct

SEQ ID NO: 554165 - DNA, 201 bp, Homo sapiens
ttcagctcctgacctcaggtgatccgcctgcgtcagcctcccagagtgctgggattacagatgtgagccactgcgcctggcctttttcctttttttttccytttttttttttttttgagacagagtctcattctgtttcccaggctggagtgcagtggcgcaatcttggctcactgcgacatccacctccccggttcaagt

SEQ ID NO: 554166 - DNA, 201 bp, Homo sapiens
ctcgtgcttttccatatgtatgtgtttgtatatgtgggtgggtatggagacacccaatatacgtatatacatatatactctgtcagttatttatcagttayatattgctatgtaacatattacccatacacacaattttagtttttcgtagagacagggtatccctatattctcaaggctggtgtctaactcctgggctca

SEQ ID NO: 554167 - DNA, 201 bp, Homo sapiens
ctgggattacaggcgtaagccactgtgcccagcctcccccaaatttaaaataattattgtctcatagttactgtgggtcaggaatttgggagtggtttaactgtttggatctggctcagggtcgctcatgggagtggcatccagatgttggccagggctgcagttatctggaggcttgactggggccaggacctctacttc

SEQ ID NO: 554168 - DNA, 201 bp, Homo sapiens
gcactggggctaacagaagctgagacacacaggcaacctcatgtttcaaatgagttcattgcctaagggtagcctgtatagacagctaggcaggatgacaycctgaattctgccctcaggctgtgctataaatgacctagactagaggaaagggcaggcagagcctttatctcaaacagcgtcaaaagaaaacaatgtaat

SEQ ID NO: 554169 - DNA, 201 bp, Homo sapiens
gtggacattactgctccatctaagctgtatgcctccccaggctggggccataccttcttttcttttcttttttttgagatggagttttgctcttgttgccygggctggagtgcaatggcgtgatctcagctcactgcaacttctgcctcctgggttcaagtcattctcctgcctcagcctcccgagtagctgggactacag

SEQ ID NO: 554170 - DNA, 201 bp, Homo sapiens
tccccatttcaggtgactcgaaaagccctgtttcctggtgactctgagattgaccagctctttcgtatctttcgtatgctggggacacccagcgaagacayatggcccggggtcacccagctgcctgactataagggcagcttccctaagtggaccaggaagggactggaagagattgtgcccaatctggagccagagggc

SEQ ID NO: 554171 - DNA, 201 bp, Homo sapiens
aggggcccaggggctggggtggggggcccaggatgcaggggtctgcccctggccaggctctgccttcagaggaggctgagcgtcgtcacacgggccgggcygaggccctgggccctgaccgtgcagcctaagacaggactgtggctttaagaccctcctgacccctgacctctgcccccagtggccctggcccctgggcag

SEQ ID NO: 554172 - DNA, 201 bp, Homo sapiens
acatggactccaccccaggctcagagctccccctgcacctcatcaaggtagggaaggaagggcagggaaggagaggtgacaccccatccctgccatccctrtccacgcagcacctccgctcagctggctgcacctcgcgctcgtttctccagagctacctcttccagctgctgcagggggtgagtttctgccactcacatc

SEQ ID NO: 554173 - DNA, 201 bp, Homo sapiens
ccagtaggaaacagcagcctagcaacaccctcacctgcttcagagcccgaaccctctggagctgcaggagcccgggagagcacagacgcctccccagcgayggccttgtctggagctcgaaagccgaggggcgggtgatgaatccagccccttcccctactttgggattggctcagcaatgagaacccagaaagcatgcca

SEQ ID NO: 554174 - DNA, 201 bp, Homo sapiens
tagaattgaggccacaggcagccgttcttcctcctaccatcagacactgaaacggccaccgaccatcagacactgaaacggccaccgttagctccttcctytagtctaagaggaagcggggtccctcctacctaaggggttaccacagttcttccctgtccacatataaggtgttcaagcctcctctatatggaaataata

SEQ ID NO: 554175 - DNA, 201 bp, Homo sapiens
tcgtggctggggccggtcgcggggcagactaatcccctgctcctggccaggggaggctcccgagcggatcctcgggaaaggggctccgaaggtcaagaaaytgccctgctgggcgtccggggagtgggaaaataaagcactttttgtatcccgcccctcccccgtcacgtgaccacgcgaggcggaaagaagaaatccgag

SEQ ID NO: 554176 - DNA, 201 bp, Homo sapiens
agccagtaggaaacagcagcctagcaacaccctcacctgcttcagagcccgaaccctctggagctgcaggagcccgggagagcacagacgcctccccagcracggccttgtctggagctcgaaagccgaggggcgggtgatgaatccagccccttcccctactttgggattggctcagcaatgagaacccagaaagcatgc

SEQ ID NO: 554177 - DNA, 201 bp, Homo sapiens
cagctagtccagaaattcccctgcctcacaagaacccacttcctctcctcccctgtccctcccggcttattgctttatgagccagctagaattgaggccayaggcagccgttcttcctcctaccatcagacactgaaacggccaccgaccatcagacactgaaacggccaccgttagctccttcctctagtctaagaggaa

SEQ ID NO: 554178 - DNA, 201 bp, Homo sapiens
gtcccaagcactgccatcagggagatctcgctgctcaaggaactgaagcaccccaacatcgtccggtgagttggggattgaggtggggaagctgggatggygaaggtagcatcctgactgccatctccctgtcagactgctggacgtggtgcacaacgagaggaagctctatctggtgtttgagttcctcagccaggacct

SEQ ID NO: 554179 - DNA, 201 bp, Homo sapiens
gagggctgagtctgggttagtcctgcccgcaggttagcgagatcctgtgttgttttttgggttggacggtgccgtttcaaaatagaggcacagatgctccrtgcacgaggggtccccgggcactggaacaagtgccaagttgaaggcagggggcctgccagagctgggtgtgggtattcaggccctcacctgccctgcctg

SEQ ID NO: 554180 - DNA, 201 bp, Homo sapiens
aaagaggagagaggggcagcaggaggagtgtcacccatgcactcagccaccctgagtgatactgtttctttgccctgcaggtggtgacactgtggtatcgygcccccgagattctcttgggcagcaagttctataccacagctgtggatatctggagcattggttgcatctttgcagagatggtagagagaggggcacaca

SEQ ID NO: 554181 - DNA, 201 bp, Homo sapiens
gttctgtgctcttcccgactagaagcaggctgggacctgggaccctccccgagaaggggggtgactcagcttcagtggcctgaggagacctgggtgactcrttaggactgtccagattccaggagtgtccggaactggctggagagctgggaggtcatggcttcatgcggttctgggtttgagggcagccaatttggggcc

SEQ ID NO: 554182 - DNA, 201 bp, Homo sapiens
ggttctgtgctcttcccgactagaagcaggctgggacctgggaccctccccgagaaggggggtgactcagcttcagtggcctgaggagacctgggtgactygttaggactgtccagattccaggagtgtccggaactggctggagagctgggaggtcatggcttcatgcggttctgggtttgagggcagccaatttggggc

SEQ ID NO: 554183 - DNA, 201 bp, Homo sapiens
gaaggcgcgcgtgctgacctgtgtggaggggatgaacctgcccttgttggaacaagccatccgggagcagagactgtacaagcaggagcggggcggcagcyagtaggaaacagcagcctagcaacaccctcacctgcttcagagcccgaaccctctggagctgcaggagcccgggagagcacagacgcctccccagcgacg

SEQ ID NO: 554184 - DNA, 201 bp, Homo sapiens
acaaaaatgaaaatattagtggggtgtggtggcttgtgcttgtagtcccagctacttgggaggctgaggcaggaggatggcttgaggcaggagttcgatgytgcagtgagctatgatcatgccactgcactccaacctgggtgacaaaatgagaccctgtttctaaagaaaaagaaaagaggctgggcacagtggctcatg

SEQ ID NO: 554185 - DNA, 201 bp, Homo sapiens
atcctactgattacacaggtcagccttactcagcatcgtaggggatgcacaaggatgtaaatatcgggggtgagaatcacaggggaccatcttagagacaygtgtacatacatatagaagtattttaacctaggccaggtgcggtggctcacgcctgtaaccccagcactttgggaggccgaggcaggcggatcacctgag

SEQ ID NO: 554186 - DNA, 201 bp, Homo sapiens
tggagtgcagtggtacgatctcggctcactgcagcctctgcctcttgggctccagtgatcctcccgtcttggcctcccaagtatctgggaccacagctgcrtgccaccatgcctggctaattttttttatatttttagtagagacagggtttcaacatgttgcccaggttggtctcaaactcttggactcaagtgatccat

SEQ ID NO: 554187 - DNA, 201 bp, Homo sapiens
ggtacgatctcggctcactgcagcctctgcctcttgggctccagtgatcctcccgtcttggcctcccaagtatctgggaccacagctgcgtgccaccatgmctggctaattttttttatatttttagtagagacagggtttcaacatgttgcccaggttggtctcaaactcttggactcaagtgatccatctgccttggcc

SEQ ID NO: 554188 - DNA, 201 bp, Homo sapiens
cgtgtgatggcaagtacctatagtcccagctactcaggaggctgagatgggaggattgcttgagcagcctggaaggtcaaggctgcagcctgggatacagaaaaaaaaaaaaaagaaaggaagaaaaagatttcttagacaagacatagaaagcaaaagtcataaaagaaaaaaatgatcaggtgtggtggctcatgcctg

SEQ ID NO: 554189 - DNA, 201 bp, Homo sapiens
aataaactgatcatcaacaaaattaaaagcttctgcttatcaaaatatgccattaagaaaattgaaggcaaggagatgaaaattaaaaggaattccttcayattctacagtgtagactgaaacatttttttctggtttgttgctgcaatttgcatttctgtgatgagactgaggctgaacacttttctatagatttcttgg

SEQ ID NO: 554190 - DNA, 201 bp, Homo sapiens
tagccagagaagttagaatcctcttccccaaggcaggtcatagaaaacagagtcatttacccccaaagccagccataaaaccctaaatataagctgggtgyggtggctcacgcctataatcctggcactttgggaggccaaggcaggtggatagcgaggtcaggagatcgagaccatcctggctaacacggtgaaaccccg

SEQ ID NO: 554191 - DNA, 201 bp, Homo sapiens
agcttcaacctcctgtggtggtgatcctcctgcctcagcctcctaagttgctgggactacaggtgagagacaccacacctggcccatttttgtattttttytgtggagatgggctgttgccatgttgcccagactggtcccgaattcctagtctcaagggatccacctggcttggcctccgaaagagctgggattacaggc

SEQ ID NO: 554192 - DNA, 201 bp, Homo sapiens
ctgtagtcccagctactcaggagactgaggcaggagaatcacttgcaccagggaggtacaggttgcagtgagccaagatcgttccactgcactccagcctrgatgacagagtgagactccgtctcaaaaaaaaaaaaaaaaaaaaaagacaggtacagtgaagagacaatcccccatggggaagtgagaacgaggagagag

SEQ ID NO: 554193 - DNA, 201 bp, Homo sapiens
tcatttacccccaaagccagccataaaaccctaaatataagctgggtgcggtggctcacgcctataatcctggcactttgggaggccaaggcaggtggatmgcgaggtcaggagatcgagaccatcctggctaacacggtgaaaccccgtctctactaaaaatacaaaaaaagccgagcgaggtgccatgtgcctgtagtc

SEQ ID NO: 554194 - DNA, 201 bp, Homo sapiens
actaatttctcaaggcctacaacacaccaggcctgatgtgaggcagcttgcttagatctttttgaatttgcctgtcagcctttaatctgagtcttaaaaattttttttttttagtttttttgagacaagatctctctctgttacccaggctggagtgcagtggtatgatcacagctcactgcaacctccatctcctgggct

SEQ ID NO: 554195 - DNA, 201 bp, Homo sapiens
gaggtcaggagatcgagaccatcctggctaacacggtgaaaccccgtctctactaaaaatacaaaaaaagccgagcgaggtgccatgtgcctgtagtcccrgctactcgggagtctgaggcaggagaatcgcttgaaccggggaggcagaggttgcagtgagccgagattgcaccactgcattccagcctgggcgacagag

SEQ ID NO: 554196 - DNA, 201 bp, Homo sapiens
ttggccattatgggctgtacaatgtgttccttgttctgaagaaataatggtcggctttccaaatctgtgcactgtctcttgttctactttttcattttttwaaatttaattttgtttttgtgagacagcatctcactctgtcacccaggctggagtgcaatggtgcaatcatagctcactgcagcctcgacctcgcagact

SEQ ID NO: 554197 - DNA, 201 bp, Homo sapiens
tggatttgtgagtgctgggacggcccctgagttacccaccctgggccatcacaacctgggcgctccctgatccgttccctctttcctggagtccacgtttractcctctgggtgctgcccagcagcccttacctgtcctctccccagttcactgccttctgaccagcctttgccggggccctgactgtggagtttggtgga

SEQ ID NO: 554198 - DNA, 201 bp, Homo sapiens
atcttagagacacgtgtacatacatatagaagtattttaacctaggccaggtgcggtggctcacgcctgtaaccccagcactttgggaggccgaggcaggyggatcacctgaggtcaggagtttgagactagccggaccaaaatggcgaaaccctgtctctactaaaaatacaaaaattagccgggcttggtggtgggtgc

SEQ ID NO: 554199 - DNA, 201 bp, Homo sapiens
ctgcaagttctgcctcccaggttcacgccattctcctgcctcagcctcccaagtagctgggactacaggcacctgccaccacgcccggctaattttttttkttgttttttttttgtttttgtagagatggggtttcaccgtgttagccaggatggtctcgatctcctgacctcgtgatctgcctgcctaggcctcccaaag

SEQ ID NO: 554200 - DNA, 201 bp, Homo sapiens
agagggcacctatggggtggtgtacaaggccaagaacagggagacagggcagctggtggccctgaagaagatcagactggatttgtgagtgctgggacggmccctgagttacccaccctgggccatcacaacctgggcgctccctgatccgttccctctttcctggagtccacgtttaactcctctgggtgctgcccagca

SEQ ID NO: 554201 - DNA, 201 bp, Homo sapiens
gccagcctcttacataaccctggcactttctgagtccaaggccagggtctctttcctgacctttgtacacaactggcttgggtatactgattgttcaaccyggaagcctcccccaggataagtgcagtatttatcttccctgtgaaagtggcgctcattgagttagctctgtctttatgctgtgctacacgccctttttcc

SEQ ID NO: 554202 - DNA, 201 bp, Homo sapiens
gcctctatgacatgattcagtccagagtaacactgatggctcagcacggatccgatcagcaccaggttcttgtctgtaccaagttggtggagcccttccaygcccaggtgggctccctgtacatcgtcctcggggagctccagcatcagcagggtgagctgcagcctcagatcccctttctcatcctggggcctgagctgg

SEQ ID NO: 554203 - DNA, 201 bp, Homo sapiens
tgagctggggttggggtggctaggccgtgggccttgggagctgggcagtctgggctgggctgggctgggcagggcgccacatggaagctggaggagcaacrggagcgctgggcgtggggtgcaaattgcccagtgccttctgtttcccaggcagctctgtggccatggatatgttccagaaggtagagaagatcggagagg

SEQ ID NO: 554204 - DNA, 201 bp, Homo sapiens
gatgagggatctgcgtgccttggcctcccaaaatgctgggattacaggtgtgcagcaccaaactcagccttacttctgattcctttttattttttgagacrgagtcttgctctgtcgcccaggctggagtgcagtggcgcgatctcggctcactgcaagctccgcctcccgggttcacgccattctcctgcctcagcctcc

SEQ ID NO: 554205 - DNA, 201 bp, Homo sapiens
gccgaggggcgggtgatgaatccagccccttcccctactttgggattggctcagcaatgagaacccagaaagcatgccataaatccgacagccccaccccrggagactgcaggtggccgagcttgggcgccggggccgtgcttggtgtggggccatggagggttccagaaggtcctggtgaataaaggcccagggggcgtg

SEQ ID NO: 554206 - DNA, 201 bp, Homo sapiens
cgttccccggatcccaggagagctgggctatgactgcaataaggagttgttccttcacctgagatgtgcttcttttggttcatttctggcttgacaacaakaaataaacgtggtatgttcctgagttttctgattgttctgctcacaggggacacctgggcttcctgacaaggggaacattgacacagggctggagacagc

SEQ ID NO: 554207 - DNA, 201 bp, Homo sapiens
tgggtttagggactctagggcagagggctggacaggtttggcctcttggagtgtcagtccctgagcccccactcagtgttcctccctggacagcttcagtyccctgcttcctgatacgtggggttctgtgctcttcccgactagaagcaggctgggacctgggaccctccccgagaaggggggtgactcagcttcagtggc

SEQ ID NO: 554208 - DNA, 201 bp, Homo sapiens
ccttgggagctgggcagtctgggctgggctgggctgggcagggcgccacatggaagctggaggagcaacgggagcgctgggcgtggggtgcaaattgcccrgtgccttctgtttcccaggcagctctgtggccatggatatgttccagaaggtagagaagatcggagagggcacctatggggtggtgtacaaggccaagaa

SEQ ID NO: 554209 - DNA, 201 bp, Homo sapiens
tggcctcttggagtgtcagtccctgagcccccactcagtgttcctccctggacagcttcagtcccctgcttcctgatacgtggggttctgtgctcttcccractagaagcaggctgggacctgggaccctccccgagaaggggggtgactcagcttcagtggcctgaggagacctgggtgactcgttaggactgtccagat

SEQ ID NO: 554210 - DNA, 201 bp, Homo sapiens
tctggagctcgaaagccgaggggcgggtgatgaatccagccccttcccctactttgggattggctcagcaatgagaacccagaaagcatgccataaatccracagccccaccccaggagactgcaggtggccgagcttgggcgccggggccgtgcttggtgtggggccatggagggttccagaaggtcctggtgaataaag

SEQ ID NO: 554211 - DNA, 201 bp, Homo sapiens
cctcccaaagtactaggattataggcatgaccaccacacctggccagtacatcttaaaaatgatttctgatccacgttgaataatgatggcctataaataytttttcttgcacttgccttgttgggttttgatatcaaggttatttttattttaaccttataaaatgaactggggagtcttctttttttattctctcagtt

SEQ ID NO: 554212 - DNA, 201 bp, Homo sapiens
tgagagacaaataagacttctgcctgcttaacgctctagccggttccttgacagtgctggctgttatatagcaggccttccaaatgcttctggcatgaacmaataccaccaggagtaatgaagaagtcacttttggccaggcatggtggctcatgcctgtaatctcagcactgtgggaggctgaagtgggcagatcccttg

SEQ ID NO: 554213 - DNA, 201 bp, Homo sapiens
attataggcatgaccaccacacctggccagtacatcttaaaaatgatttctgatccacgttgaataatgatggcctataaatattttttcttgcacttgcyttgttgggttttgatatcaaggttatttttattttaaccttataaaatgaactggggagtcttctttttttattctctcagtttgtgttagtggcagagt

SEQ ID NO: 554214 - DNA, 201 bp, Homo sapiens
atctttgaaaataatagtgcagtgtcacagtcaggatattggcattgatgcagtcaagatgcagaacaggttcatcactttcctggccttttctcaagttygcattgtgataaaagtgctgacatgagaagatagatatgtttatgtgtatgtgtgtataaatatctataaatatgtatataatctgtatatgaaagctcc

SEQ ID NO: 554215 - DNA, 201 bp, Homo sapiens
agtgcagtgtcacagtcaggatattggcattgatgcagtcaagatgcagaacaggttcatcactttcctggccttttctcaagtttgcattgtgataaaartgctgacatgagaagatagatatgtttatgtgtatgtgtgtataaatatctataaatatgtatataatctgtatatgaaagctccaatttcaactgttac

SEQ ID NO: 554216 - DNA, 201 bp, Homo sapiens
taaaagcatgaattatgagaaacatttctcttgagaaagaaaaagacatctttctttcccccatcaccttagcaccacaagctgtgttgggcaggtgaatrgggccatcctgcatcgttctttcttccttggctgtgcctttgctgggtggccaggtaggcagcctcagctagagaaaccatagctgcgtgtgctggcttc

SEQ ID NO: 554217 - DNA, 201 bp, Homo sapiens
aggctggagaacgcactctcactctgacgacagcctggcattgtggggctggcagtgacatctgtggtccctgctctaaggacagtggggaaatgcctgcrtttctcacagaattacaagtacaaatcttgacgctaggtggcagaattaggctgcattaatcttgacctcttttgcttccttatttctttctctacatag

SEQ ID NO: 554218 - DNA, 201 bp, Homo sapiens
cctggcattgtggggctggcagtgacatctgtggtccctgctctaaggacagtggggaaatgcctgcgtttctcacagaattacaagtacaaatcttgacrctaggtggcagaattaggctgcattaatcttgacctcttttgcttccttatttctttctctacatagcattaaaactagcaaatgcttttcttgtaaaaa

SEQ ID NO: 554219 - DNA, 201 bp, Homo sapiens
agttcccatggcttttccactcaagttaggatttcttggtttaagccaggtagggtaaaaggtggagctgagtttggtgactgtgcttattgtcaaatgcygcttcttccatatgttgcagtctaatgctggcgtgctatgcgggacacctagatgttgtgaaatatctccgaagacatggcgcttcttggcaggctagag

SEQ ID NO: 554220 - DNA, 201 bp, Homo sapiens
tccattttccctggagttgctaccatacagctgcagaggaagcgctgtgcctgcaggccatgcaaagccacagtggtcttttggggttgcaggggggctgytgggaccctgcatgtgccaggctcatgccccctgctgtgtgtgccctggagggagaagctcatgcacaccaccctgggttttgttttctaggtggctgtg

SEQ ID NO: 554221 - DNA, 201 bp, Homo sapiens
atgcaaagccacagtggtcttttggggttgcaggggggctgctgggaccctgcatgtgccaggctcatgccccctgctgtgtgtgccctggagggagaagytcatgcacaccaccctgggttttgttttctaggtggctgtgttaaataatcatgaagagttagttcagttacttcttgacaaaggggcagatgcaagtgt

SEQ ID NO: 554222 - DNA, 201 bp, Homo sapiens
catgatctcaatgtcctggtgttgtactctgtatgatctcttccttttttagtgtggatgggatcactgctcagccttttggatgaaatcgagtgaacgtragtaggatctgtgacttgtttctaactgacgtaatattgcaaatgtgatgggttgttactcctgggatgtgtgtgtgtgtgtgtgtgtgtatgtgtgtgt

SEQ ID NO: 554223 - DNA, 201 bp, Homo sapiens
gtttcccatgatctcaatgtcctggtgttgtactctgtatgatctcttccttttttagtgtggatgggatcactgctcagccttttggatgaaatcgagtraacgtgagtaggatctgtgacttgtttctaactgacgtaatattgcaaatgtgatgggttgttactcctgggatgtgtgtgtgtgtgtgtgtgtgtatgt

SEQ ID NO: 554224 - DNA, 201 bp, Homo sapiens
gataggcagacttctaagatgtttcccatgatctcaatgtcctggtgttgtactctgtatgatctcttccttttttagtgtggatgggatcactgctcagrcttttggatgaaatcgagtgaacgtgagtaggatctgtgacttgtttctaactgacgtaatattgcaaatgtgatgggttgttactcctgggatgtgtgt

SEQ ID NO: 554225 - DNA, 201 bp, Homo sapiens
aacaagtatttattatctgtgataggcagacttctaagatgtttcccatgatctcaatgtcctggtgttgtactctgtatgatctcttccttttttagtgyggatgggatcactgctcagccttttggatgaaatcgagtgaacgtgagtaggatctgtgacttgtttctaactgacgtaatattgcaaatgtgatgggtt

SEQ ID NO: 554226 - DNA, 201 bp, Homo sapiens
gatctatagtgataactcttcactccttatattctaacttgtgcctaattagttaggcacaactctaattagttatctattgctgcataagaaattacctraaacttaatgtcttcaaacaacaacaagtatttattatctgtgataggcagacttctaagatgtttcccatgatctcaatgtcctggtgttgtactctgt

SEQ ID NO: 554227 - DNA, 201 bp, Homo sapiens
aaaacttaccagccttttaatctaaattgtcttattgtgataggcttgcttatagtaaaacaaactctttttagtatctgtaggatctatagtgataactsttcactccttatattctaacttgtgcctaattagttaggcacaactctaattagttatctattgctgcataagaaattacctgaaacttaatgtcttcaa

SEQ ID NO: 554228 - DNA, 201 bp, Homo sapiens
aaggctgtgagacttcaaataaatgagtagcctctctgagcattaggtttgtcctctgtaaaccaggaataatttttactgaaccagggttgttctaaggrttagtgaaatgtatgtaaagcctttagcatttaataggtgatcaaatggtaagtgatgcttatagaatgtttttatcatggtaaaatatacaaaacataa

SEQ ID NO: 554229 - DNA, 201 bp, Homo sapiens
ccagtcccagccatctttagttggtctctattcaaacattgtacttttgtttcttgattacatcttcaattattttagttatttctgagattctcccctgyagtttctccagttatctagagaagagtgtggcaaggtacaaagagtgcctgaataacattatgaaggctgtgagacttcaaataaatgagtagcctctct

SEQ ID NO: 554230 - DNA, 201 bp, Homo sapiens
agaaacttttaagagaacaaaaataaagggaactcctgagctcaagcacttctcccatctcggcctcccaaagtgctgggattacaggcatgaaccactgyaccccgcttagtgtgctgtttttaaaaatgacttttgggcttgtgttcatgtgactgatgagcctgtagttttactttttgtaattttttagactacttt

SEQ ID NO: 554231 - DNA, 201 bp, Homo sapiens
taatcttagggacagggtctcactatgttgcacaggctggagtgcagtggctattcacagtcaagttccagtgatcctcccacctcagcctcttgagtagmtgggactacaggctgcagaaacttttaagagaacaaaaataaagggaactcctgagctcaagcacttctcccatctcggcctcccaaagtgctgggatta

SEQ ID NO: 554232 - DNA, 201 bp, Homo sapiens
ggcaatcatttggcctgtacatgttgcttttattttttttctggacttaagatatagaccaaaccttgacatttctggcctttgagtctttcacaactgtkattataatacattagctcttctagaagttagaagtgactttggattaagtctttcataaggtggctaaatgaatttatatggctcatcagaattcactag

SEQ ID NO: 554233 - DNA, 201 bp, Homo sapiens
gaaaacatgagattccagtctacttgaatcagcggaagaaggaagtcccctctgctttaactattacaaaaaagtaaccgaagtagcttgatgttaaccamtcaggtttttctattctgtttccttgttgctacctcataaaacctgtggttctgctattgcccagtgggagctctcattctgttttgtagagtggaaggt

SEQ ID NO: 554234 - DNA, 201 bp, Homo sapiens
aaatgtggtgaaagttaaatgaataaataaagcatccacactagtacatgacccaaattaagtgtcatataagtgttgccgcattgcagttctcctcagtracggcctgtgacctgccatttctgtcggctcttaccaaggctcggtgccgccccgggcctctgctccattgtcatagtaatgtttgcactctgctagtca

SEQ ID NO: 554235 - DNA, 201 bp, Homo sapiens
tggcttctggttattttgggggtaatccataacagtctaccattcctggtgtttggttttagtgggctgtgaaaaaaatcatttgttcaacactgatgtcrtgatacaaggacgtgaagatgtgagtcattgtgacatcaccagccagaattgctgggattcagtgagatgactcacagtaagaggtcagtgtctggttca

SEQ ID NO: 554236 - DNA, 201 bp, Homo sapiens
cctatcaaggctaatttttagtccttctagactcagaaaaaccaccaaaaccctggattacattcgcctgtctgttttgtttatctagagtgtagtctccktattagaagaaaggaaaaaaaagcagaggccaaagaagtcttgtgtctgctgatgagagcaccactcatctgcgaaacgcacgtaaaacaaagtgaaccg

SEQ ID NO: 554237 - DNA, 201 bp, Homo sapiens
aaaaaataacaccaacattacagattttttttttttttaatcttagggacagggtctcactatgttgcacaggctggagtgcagtggctattcacagtcaygttccagtgatcctcccacctcagcctcttgagtagctgggactacaggctgcagaaacttttaagagaacaaaaataaagggaactcctgagctcaagc

SEQ ID NO: 554238 - DNA, 201 bp, Homo sapiens
gattccacaattattataagcagaaacaaattaaaaggttgtatacctactgtttgaaaaacacgacttaccaaaccaaacataagaagtatgtatacccstatatttatgaaataaatagaatccataatttaaaacttcctcacaaaaacaatcccaagttcctgatggcatcactggtgaattcttcaatgaaaggga

SEQ ID NO: 554239 - DNA, 201 bp, Homo sapiens
acttgggaagctgaggcggggggactgcttgagcctaggagtttggattcagcccgggcaacatgtcgagaccccatctctaatttttttttaagttttawtttttttaatttaaataaacatattcaggctagtgcacgtactttggttctctactgaagtaattcaccctaaattgaaactagcattgctagtttagtg

SEQ ID NO: 554240 - DNA, 201 bp, Homo sapiens
tttaaaatccccatcaaaatggtaaaattcattgtgatcctgacctctgatgctgtcagccacaggaaggggcaaaacgacttgaggcttgaagccgtgtstttcccgaagctcaggttcaccaaacatggtctccagatggagtctgttcctcagaacctgggctttacttcttgatgggagaaggaagcagtgttaaaa

SEQ ID NO: 554241 - DNA, 201 bp, Homo sapiens
agtgtcttttaaacagtcatgttttaaaatccccatcaaaatggtaaaattcattgtgatcctgacctctgatgctgtcagccacaggaaggggcaaaacracttgaggcttgaagccgtgtctttcccgaagctcaggttcaccaaacatggtctccagatggagtctgttcctcagaacctgggctttacttcttgatg

SEQ ID NO: 554242 - DNA, 201 bp, Homo sapiens
ctcatgtagtcttagccccgaagaatattaagtctatcaattaggttataattcaaatcttatcaagaaataaatgcttaataaatcaagattaaaaaaawttttcaaagcagtgtcttttaaacagtcatgttttaaaatccccatcaaaatggtaaaattcattgtgatcctgacctctgatgctgtcagccacaggaa

SEQ ID NO: 554243 - DNA, 201 bp, Homo sapiens
acctcctgcaacccttccctggcttcctaaagtggtggtgccccctctctgatgttattctatctctgcgcttttctcttaatagtaataatcagaacttrtaattattttgttaatatttaaaatctagctggacgtggtggctcacgcctgtaatcccagcattttgggaggccaaggcgggcggatcacctgaggtca

SEQ ID NO: 554244 - DNA, 201 bp, Homo sapiens
aatctttgcctaaatttcacctcctgcaacccttccctggcttcctaaagtggtggtgccccctctctgatgttattctatctctgcgcttttctcttaayagtaataatcagaacttgtaattattttgttaatatttaaaatctagctggacgtggtggctcacgcctgtaatcccagcattttgggaggccaaggcgg

SEQ ID NO: 554245 - DNA, 201 bp, Homo sapiens
ggtagataagagatctaaggtatttcagtgactaagaaactgaggtgaatgactaagggactgagacttctctctccaaacctgtttctccactagtcttycaagccttcccagttactccaacctgaaaatgagtcatccttggctcctcattatcaaccctcaccccacccttctccatccaccagcaggtctgtttat

SEQ ID NO: 554246 - DNA, 201 bp, Homo sapiens
atattatgttaacagtacattgtttatgccgatattatctaacatattttaaaccctgttccttttgttactgagaggtctaaaataacattttacaagtrtagttgaatatagcatcagtaaattggttatgaggaagactccttcataattgcttttaaggattaaacatgtatctaaggacaacaccaaggaactact

SEQ ID NO: 554247 - DNA, 201 bp, Homo sapiens
tggtagagacagggttttgccatgttgcccaggctggtctcaaactcctgaacttaagcattcctcccacttcggtctcccaaagtgctgggattacaggmgcgagccatcgttcttggcctgcaagttatgacttcctttcagagtctttctatctgtagtacagtcctcctgtgcaagattgttttttgactgcttttt

SEQ ID NO: 554248 - DNA, 201 bp, Homo sapiens
ccgacctgcagcttgagctgctccaccaggcgctgcagggcactcttgctggccctggaagacatggtagcagcagtgtgctccaagggtggttgagccaygctaggcgggtcagccctgccaggccctgagcgtgggcactgccaatattgttgaaaggaccatactatccaaagcaatctacagattcaatgcaatctt

SEQ ID NO: 554249 - DNA, 201 bp, Homo sapiens
gggttttgatatcaaggttatttttattttaaccttataaaatgaactggggagtcttctttttttattctctcagtttgtgttagtggcagagttttttktgtttggttggttggtttctctttttcttgtatgtttcatggaactttttggtgaaggcacttgggcctggaaatttctttatggcaagttttttcatta

SEQ ID NO: 554250 - DNA, 201 bp, Homo sapiens
cacacctgtgggtatttctcatcaggtgggacaagagactgagaaaataaataagacacagagacaaagtatagagaaagaacagtgggcccaggagaccrgtgctcagcatacggaggacctgtaccagcaccggtctctgagtttcctcagtatttattgattactgttttcactatctcagccagaggaatgtggcag

SEQ ID NO: 554251 - DNA, 201 bp, Homo sapiens
cagacgtggcatcaagtattacagtgaattacagttatactgtcagcaatattatgttaacagtacattgtttatgccgatattatctaacatattttaarccctgttccttttgttactgagaggtctaaaataacattttacaagtgtagttgaatatagcatcagtaaattggttatgaggaagactccttcataatt

SEQ ID NO: 554252 - DNA, 201 bp, Homo sapiens
ttgtatccaaccagatttcacctgagacggaagttatttcctactgtcagccataatggaagcactacagacgtggcatcaagtattacagtgaattacarttatactgtcagcaatattatgttaacagtacattgtttatgccgatattatctaacatattttaaaccctgttccttttgttactgagaggtctaaaat

SEQ ID NO: 554253 - DNA, 201 bp, Homo sapiens
atctttgaggtttcttttaacttggagatttgtatccaaccagatttcacctgagacggaagttatttcctactgtcagccataatggaagcactacagaygtggcatcaagtattacagtgaattacagttatactgtcagcaatattatgttaacagtacattgtttatgccgatattatctaacatattttaaaccct

SEQ ID NO: 554254 - DNA, 201 bp, Homo sapiens
gtctgcagaatgacccagcaaagaatgagggcaagggattccaggcagtgggaattacttgtacataggccctgagacctgagagcagcgtgggtttgagkctcacggtaggaagattagtaaagctgtagctaaggagaggaggaggaaaaaacagggttggaaggagggaggagaaatgagataaggctggaaaattca

SEQ ID NO: 554255 - DNA, 201 bp, Homo sapiens
agaggagatggacaaaggctcccaagaggaagtagtactgggtctgcagaatgacccagcaaagaatgagggcaagggattccaggcagtgggaattactkgtacataggccctgagacctgagagcagcgtgggtttgaggctcacggtaggaagattagtaaagctgtagctaaggagaggaggaggaaaaaacagggt

SEQ ID NO: 554256 - DNA, 201 bp, Homo sapiens
tggcaggaggccacataaacatttctgcttctctgtgacttatgggtagcattgatataaattgttaaaaataatgatcgtagatagataatgtatcagartttgggctcagccgctgtagctgctgttgacccagaggaaccactgggatcctcacatctcagggcagcacatcgtttgcagcaatggttggttctgtac

SEQ ID NO: 554257 - DNA, 201 bp, Homo sapiens
cagctctgttctagggattgaggattgaacaacggatcggacagtgttagttttggtcatcccaggaaaactaagcagaggcttgctcaagaactcctgasgtcttggtggggttcggagattgggggaagaggagatggacaaaggctcccaagaggaagtagtactgggtctgcagaatgacccagcaaagaatgaggg

SEQ ID NO: 554258 - DNA, 201 bp, Homo sapiens
attcattcatttatagtgcctgttatgttgcagctctgttctagggattgaggattgaacaacggatcggacagtgttagttttggtcatcccaggaaaaytaagcagaggcttgctcaagaactcctgaggtcttggtggggttcggagattgggggaagaggagatggacaaaggctcccaagaggaagtagtactggg

SEQ ID NO: 554259 - DNA, 201 bp, Homo sapiens
gttttcatgtgtaaactataatttcaagttcttcagtgctgtctttatccattcattcatttatagtgcctgttatgttgcagctctgttctagggattgrggattgaacaacggatcggacagtgttagttttggtcatcccaggaaaactaagcagaggcttgctcaagaactcctgaggtcttggtggggttcggaga

SEQ ID NO: 554260 - DNA, 201 bp, Homo sapiens
cgaggctgggtcttgtatttattagagaccccgtcttactccccgccccccgccccacacccctagtctgcgacttgaaggagagagagagaaaagaagarctttgtccaagtgtatttgattcattcttaggggttctacaagttaggacactcaaaaaatgtttgtaatctctttttctgttttcccatgttgctttcg

SEQ ID NO: 554261 - DNA, 201 bp, Homo sapiens
tcttcaaactcatcacacatctgatcttagatgtattatgcttcaagcacattggtcttcttgtagtccctcaaacaagcttctttcaggactgtggctcwgaacaagctttcctctctgccagggatgctattccctcctgctatggcaggtctgactcctaatgtccttcaatctttgcctaaatttcacctcctgcaa

SEQ ID NO: 554262 - DNA, 201 bp, Homo sapiens
attttccattttccctggagttgctaccatacagctgcagaggaagcgctgtgcctgcaggccatgcaaagccacagtggtcttttggggttgcagggggrctgctgggaccctgcatgtgccaggctcatgccccctgctgtgtgtgccctggagggagaagctcatgcacaccaccctgggttttgttttctaggtggc

SEQ ID NO: 554263 - DNA, 201 bp, Homo sapiens
cctttttattgccaaatagtaatccattgtataaatactacatggtttgcttattggtttgtcattggaggaatatggactattttcactttttggtaaaytataagtggattggaattcacaaagtgctttttgtctgagcataggttttcatttcacttgtgcaaatgactaagggtgtaggattgctgagtcacatgg

SEQ ID NO: 554264 - DNA, 201 bp, Homo sapiens
ggaagactggaaaatgtaggctggactgagaacttgtggatagacacacctcagtgattagtgaaaaggaagattggtccaaagcaatgtttgttaaccawattttcattatcaaagaggaaaaactaaacattccctaacagaaatgaaaaaggaataaaatttttgttagatgatgttgaactttgaaaggccaccaag

SEQ ID NO: 554265 - DNA, 201 bp, Homo sapiens
tagtgttcttttgtggtgctttagaaattctggcttacttgtatttttgctggccttctaatgatttcactcatcaatcagaagatatttgtgtccacctycctgcttcctctccggtgatcttgtctattcttggccattttagagttgacttagcagccttcacaaaactggttggaatttccactgggattaaattga

SEQ ID NO: 554266 - DNA, 201 bp, Homo sapiens
gagagagggatattctggaaaactttctgctaggttgctaagttataattttcacagatacactctcattatctgttccacacagagataagtattaataygaatacctcattttcatttatattttaattaaatgccatttgaaaaaaacagaaatgcatcttcattacatgctaccatttaagaatacattaaaaatgg

SEQ ID NO: 554267 - DNA, 201 bp, Homo sapiens
atctcgaaaaaacaaaaaaaagaactttatttcttcagatttatgttactgttttcatgtgtaaactataatttcaagttcttcagtgctgtctttatccmttcattcatttatagtgcctgttatgttgcagctctgttctagggattgaggattgaacaacggatcggacagtgttagttttggtcatcccaggaaaac

SEQ ID NO: 554268 - DNA, 201 bp, Homo sapiens
cccagaatatgatctctcaccaccgccatccagataattcttcaggttttgacgtttcccaacctgtctgctggttacttttcagagtacttggatcattrctatttatattttgtccagagtttcaaattgtgatcagtggaaatgacaggccgtagcatacatacgccatcctggccagcatcacaggtggtcagtaca

SEQ ID NO: 554269 - DNA, 201 bp, Homo sapiens
cttatgctaaatgctgtgtcatcaaactgaaactttaaggaagcagatagatccccaaacagaccagtttttcctgaaaacatgagattccagtctacttraatcagcggaagaaggaagtcccctctgctttaactattacaaaaaagtaaccgaagtagcttgatgttaaccaatcaggtttttctattctgtttcctt

SEQ ID NO: 554270 - DNA, 201 bp, Homo sapiens
aaagagaacccctgtaatcgatcagggaccccatctgccttctctgtgggcgtaggataaattcttttgattatgtctatttgatataaaaaaatctgtarttaaaatataccatttgcattatccataatagccaaagggtggaagcaagccaagtgtctatctgcaaatgaataaacaaaatatggtatatatatacac

SEQ ID NO: 554271 - DNA, 201 bp, Homo sapiens
ataggtttatgaagaaggcattttaaaaagagaacccctgtaatcgatcagggaccccatctgccttctctgtgggcgtaggataaattcttttgattatytctatttgatataaaaaaatctgtagttaaaatataccatttgcattatccataatagccaaagggtggaagcaagccaagtgtctatctgcaaatgaat

SEQ ID NO: 554272 - DNA, 201 bp, Homo sapiens
aaatgcagtgctgtgtgaatggtgcctaccttcgtgcccggcctgtcaagaccaggcagtttacacaaaaacacttgatattgactatgaaacaagatccrgaagagaacaaatataaatacagatggatcagctaaatgaaggactgtcgagtaaaaacacaaagaagatgtttgtgagtggagggggatggatctcctt

SEQ ID NO: 554273 - DNA, 201 bp, Homo sapiens
cttcataattgcttttaaggattaaacatgtatctaaggacaacaccaaggaactactagaaataaccctcgagtcagtcttttccgttctgtttccacasccttagttttctattacttttaggaatgacctttgttaactaagtcattaaaatccaataaacataaactcttcagaccccacagctggatcatactctt

SEQ ID NO: 554274 - DNA, 201 bp, Homo sapiens
tgccgatattatctaacatattttaaaccctgttccttttgttactgagaggtctaaaataacattttacaagtgtagttgaatatagcatcagtaaattsgttatgaggaagactccttcataattgcttttaaggattaaacatgtatctaaggacaacaccaaggaactactagaaataaccctcgagtcagtctttt

SEQ ID NO: 554275 - DNA, 201 bp, Homo sapiens
caggaccactgtgggatcaaaacagaactggtgaaacaaagaacaagctgctttctgttctggttttagtgtggagagagggagtccattttccattttcyctggagttgctaccatacagctgcagaggaagcgctgtgcctgcaggccatgcaaagccacagtggtcttttggggttgcaggggggctgctgggaccct

SEQ ID NO: 554276 - DNA, 201 bp, Homo sapiens
agcaatgtttgttaaccatattttcattatcaaagaggaaaaactaaacattccctaacagaaatgaaaaaggaataaaatttttgttagatgatgttgarctttgaaaggccaccaaggacacttttaatatcaaatcttcctcatccccccaactccagaaaactagtttttgctcagatattggctcagtggaaaatg

SEQ ID NO: 554277 - DNA, 201 bp, Homo sapiens
ttaaggactaaagaacccctgtccccaggaccactgtgggatcaaaacagaactggtgaaacaaagaacaagctgctttctgttctggttttagtgtggakagagggagtccattttccattttccctggagttgctaccatacagctgcagaggaagcgctgtgcctgcaggccatgcaaagccacagtggtcttttggg

SEQ ID NO: 554278 - DNA, 201 bp, Homo sapiens
ggaagttatttcctactgtcagccataatggaagcactacagacgtggcatcaagtattacagtgaattacagttatactgtcagcaatattatgttaacwgtacattgtttatgccgatattatctaacatattttaaaccctgttccttttgttactgagaggtctaaaataacattttacaagtgtagttgaatatag

SEQ ID NO: 554279 - DNA, 201 bp, Homo sapiens
taataaccaggaaaaacgtaaaactcattatagatttgtataataagggcgagttcggggtagtataggcttctaatgtacagtgacaatctcgctctgtygtccaggcaggagtgcaatggcgcgatctcagctcactgcaacctccccatcaccctcccgggttcaagcgattctcctgcctcagcctcccgaatagct

SEQ ID NO: 554280 - DNA, 201 bp, Homo sapiens
agatttgtataataagggcgagttcggggtagtataggcttctaatgtacagtgacaatctcgctctgttgtccaggcaggagtgcaatggcgcgatctcrgctcactgcaacctccccatcaccctcccgggttcaagcgattctcctgcctcagcctcccgaatagctagccgggactacaggtgtgtgccagcacacc

SEQ ID NO: 554281 - DNA, 201 bp, Homo sapiens
caaagtgctgggattacaggcgtgagccaccgcacctggcttactgtagacatctttaacatatcacaatcttccttcaaataataccccactgcttgatsttatgcacaagaaccttacgacagtattcttccaggccccagactctgtgctgttgttatcctctatgttgcttttgcatatcctattaacctcacaaaa

SEQ ID NO: 554282 - DNA, 201 bp, Homo sapiens
ttcccagcctctagtatcctctgttctcttttttacttctgtgtgatcaacattttttttagcttctgtattagtctgttttcacattgctatgaagaackgcccgagactgggtaatttaaaaagaggcttaattgattcatagttctgcatggctgaagaggcctcaggaaacttacaatcagggtgaaagaggaagca

SEQ ID NO: 554283 - DNA, 201 bp, Homo sapiens
gtaatttaaaaagaggcttaattgattcatagttctgcatggctgaagaggcctcaggaaacttacaatcagggtgaaagaggaagcaggcatgtcttacrgggtttcgccatgttggccaggctaggtctcgaactcctggtctcaagtgattggccagccttggcctcctaaggtgctgggattacaggcatgagccac

SEQ ID NO: 554284 - DNA, 201 bp, Homo sapiens
ccttctcttgaggcttggaggcagtcatttatcactttgtacttgaaggcattcctctgcagacttctttcctagagtcttcagggtaaagcacaggatcyggactccaggaggggggttacttcctgctggaacactgaccagcagggcatcctttcaggcattctgcatgcagtactgttgcagctctgcagctgcctg

SEQ ID NO: 554285 - DNA, 201 bp, Homo sapiens
aacccctggggtcaaatgattctcctgccttagcctcccaaagtgctgggattacaggcatgagccaccatgcctggctaccaactgatttttgacaaagkcagcaagaatactcactggggaaaggataatctcttcaataagtgatgctgggaaaactagatatccataggcagaagaatgaaaatagaccctcacctc

SEQ ID NO: 554286 - DNA, 201 bp, Homo sapiens
tttgtttggttggttggtttctctttttcttgtatgtttcatggaactttttggtgaaggcacttgggcctggaaatttctttatggcaagttttttcatkactgattcaatatatttaatctatgtaagatttttttctactttttgagtcaattttgattttttttttccaaaaattcatatctcaccaagtatggtgg

SEQ ID NO: 554287 - DNA, 201 bp, Homo sapiens
aataaactggaaattgatgcataagtggctttgccacatggagaaggattggctttccaaggcaggttgatttgcatgtttataaacaagaatcatttgcrttatctgttcttttcaacttcacataccataaaacaggtgaaaggctagactagaaaaccttaaaggggctgggtgcggtggctcacgcctgttatccca

SEQ ID NO: 554288 - DNA, 201 bp, Homo sapiens
ctggaaattgatgcataagtggctttgccacatggagaaggattggctttccaaggcaggttgatttgcatgtttataaacaagaatcatttgcattatcwgttcttttcaacttcacataccataaaacaggtgaaaggctagactagaaaaccttaaaggggctgggtgcggtggctcacgcctgttatcccagcactt

SEQ ID NO: 554289 - DNA, 201 bp, Homo sapiens
agaacctgggctttacttcttgatgggagaaggaagcagtgttaaaacttgtctattctgaactagccaaccagattaaaggaggggtttgtgcataccarcatcatcccagaatgacctgaatgactcattacatgcagacagtggtgcaaactcattaacaagtaaacaactcacaccagtgctctgtgctcacagggc

SEQ ID NO: 554290 - DNA, 201 bp, Homo sapiens
tccgggggttcgcccgcggaggccggggagcagccgaccatggagccccagagtaagggaggcccgggctggagctgggaccggggcgggcgaccgggctrgggctccccgggaacgagtgtgggcgccccgcgcgcgactccgcaggtttcaacgctcggacacggaaatacggtttgcgtctcctcgcgcttttctctc

SEQ ID NO: 554291 - DNA, 201 bp, Homo sapiens
gaggcgttaggagtccgggggttcgcccgcggaggccggggagcagccgaccatggagccccagagtaagggaggcccgggctggagctgggaccggggcdggcgaccgggctggggctccccgggaacgagtgtgggcgccccgcgcgcgactccgcaggtttcaacgctcggacacggaaatacggtttgcgtctcctc

SEQ ID NO: 554292 - DNA, 201 bp, Homo sapiens
cctggctaccaactgatttttgacaaaggcagcaagaatactcactggggaaaggataatctcttcaataagtgatgctgggaaaactagatatccatagrcagaagaatgaaaatagaccctcacctctcaccctatatgaaaataaactcaaaatggatcaaagacctaaatgtaagatctgaaactcaaaatggatca

SEQ ID NO: 554293 - DNA, 201 bp, Homo sapiens
gcgacgccggccctggctgagaggcgttaggagtccgggggttcgcccgcggaggccggggagcagccgaccatggagccccagagtaagggaggcccggrctggagctgggaccggggcgggcgaccgggctggggctccccgggaacgagtgtgggcgccccgcgcgcgactccgcaggtttcaacgctcggacacgga

SEQ ID NO: 554294 - DNA, 201 bp, Homo sapiens
agagaggtctgctgtctttctttgtttttctgtagacccccttgcacccaccatagctgcttctaagattttccactgaatcctagcaattacattagaaygctacttggcataattttcttaagtttattctgcttggggttgttggatttgtgggtttatgcttttcatcaaatttaggaaatttggaccattatttca

SEQ ID NO: 554295 - DNA, 201 bp, Homo sapiens
gccggcgccttacccgcgggcaggcccactcgcccgacggacgccgcgggtcggcgacagcggggaccgcgggtcggcgacgtcggggcacaggtcctgcsgggccgcgggggccgccagggagggcgcgaccgcctgaccgggcttcaggagcagtgtcctcagccggtgacctggccgctaccctcgctcagtgtcccc

SEQ ID NO: 554296 - DNA, 201 bp, Homo sapiens
ttgattacagataacttcagtgtgactcaggctcgtttgccacagctgtttctcttaaaagttctctgataagtcattgccaccactacttccaaatagcrtatgttaactttgagttaattttacataaacctgggttaatttacaaaattttggcaccaacaacatggttaggcaaggcagcatggatgggtattggaa

SEQ ID NO: 554297 - DNA, 201 bp, Homo sapiens
attacagataacttcagtgtgactcaggctcgtttgccacagctgtttctcttaaaagttctctgataagtcattgccaccactacttccaaatagcataygttaactttgagttaattttacataaacctgggttaatttacaaaattttggcaccaacaacatggttaggcaaggcagcatggatgggtattggaatct

SEQ ID NO: 554298 - DNA, 201 bp, Homo sapiens
aacataagttttactaatgctataatcagtataaattccttgcagatcaaggacagtgaggccatgtctaataatccagaggcagaacttggatttgggarataactcccccctcttgcactctctgtgacaagtctagtttcgatatcaagtttatcttaatctcaaaaaatgagcttggctctgttccctctattttct

SEQ ID NO: 554299 - DNA, 201 bp, Homo sapiens
ccagaatatgatctctcaccaccgccatccagataattcttcaggttttgacgtttcccaacctgtctgctggttacttttcagagtacttggatcattgytatttatattttgtccagagtttcaaattgtgatcagtggaaatgacaggccgtagcatacatacgccatcctggccagcatcacaggtggtcagtacat

SEQ ID NO: 554300 - DNA, 201 bp, Homo sapiens
ctcaggctcgtttgccacagctgtttctcttaaaagttctctgataagtcattgccaccactacttccaaatagcatatgttaactttgagttaattttasataaacctgggttaatttacaaaattttggcaccaacaacatggttaggcaaggcagcatggatgggtattggaatctgtcaatctgggttgctgtatac

SEQ ID NO: 554301 - DNA, 201 bp, Homo sapiens
ttacataaacctgggttaatttacaaaattttggcaccaacaacatggttaggcaaggcagcatggatgggtattggaatctgtcaatctgggttgctgtrtaccagctctgggactgggggcaagttgtagcagccctgagcctcctgcttcacctgtatcaggggaggctgagacccaccttgcaggggtcttgtgaag

SEQ ID NO: 554302 - DNA, 201 bp, Homo sapiens
tatcaaagaggaaaaactaaacattccctaacagaaatgaaaaaggaataaaatttttgttagatgatgttgaactttgaaaggccaccaaggacactttyaatatcaaatcttcctcatccccccaactccagaaaactagtttttgctcagatattggctcagtggaaaatgtgtggtctgaagctgtagtctcctagt

SEQ ID NO: 554303 - DNA, 201 bp, Homo sapiens
tttttgttagatgatgttgaactttgaaaggccaccaaggacacttttaatatcaaatcttcctcatccccccaactccagaaaactagtttttgctcagrtattggctcagtggaaaatgtgtggtctgaagctgtagtctcctagtttgtgagcttattttcgctgcctgaaggtttgagtcaccgtagaaggggagga

SEQ ID NO: 554304 - DNA, 201 bp, Homo sapiens
cttaagctacaaacaatagcatgagcgatctgtgccttaaggacatgctcctgctgcagttaactagcctaacctattcctttaattcggcccatcccttyctttcccataagggatactttcagttaatttaacatctatagaaacaatgctaatgactggtttgctgtcagtaaatacgtgggtaaatctctgttgggg

SEQ ID NO: 554305 - DNA, 201 bp, Homo sapiens
aacctattcctttaattcggcccatccctttctttcccataagggatactttcagttaatttaacatctatagaaacaatgctaatgactggtttgctgtyagtaaatacgtgggtaaatctctgttgggggctgtcagttctgaaggctgcgagacccctgatttcccacttcacacctctgtatttctgtgtgtgtgtc

SEQ ID NO: 554306 - DNA, 201 bp, Homo sapiens
ggcctttgagtctttcacaactgtgattataatacattagctcttctagaagttagaagtgactttggattaagtctttcataaggtggctaaatgaattwatatggctcatcagaattcactagattggttaagcaggaaatttacagagatttttttctttgctgtaaatgtttttctaaattgaaaaacttctaatac

SEQ ID NO: 554307 - DNA, 201 bp, Homo sapiens
tgtttttggcaggaggccacataaacatttctgcttctctgtgacttatgggtagcattgatataaattgttaaaaataatgatcgtagatagataatgtdtcagagtttgggctcagccgctgtagctgctgttgacccagaggaaccactgggatcctcacatctcagggcagcacatcgtttgcagcaatggttggtt

SEQ ID NO: 554308 - DNA, 201 bp, Homo sapiens
ataaacatttctgcttctctgtgacttatgggtagcattgatataaattgttaaaaataatgatcgtagatagataatgtatcagagtttgggctcagccrctgtagctgctgttgacccagaggaaccactgggatcctcacatctcagggcagcacatcgtttgcagcaatggttggttctgtacaaccttttatgaaa

SEQ ID NO: 554309 - DNA, 201 bp, Homo sapiens
tatctgtagtacagtcctcctgtgcaagattgttttttgactgctttttcttgacaaatcttgctaaaggtctgtgaattttataatgtatttttaaagarccaggttttagcagggcatggtggctcatacctgtaatcccagcactttgagaggcaaaggtgggaggatcgcttgagcctgtaagggggaggctgtagt

SEQ ID NO: 554310 - DNA, 201 bp, Homo sapiens
acccagccatcccattactgggtatatacccaaatgactataaatcatgctgctataaagacacatgcacacgtatgtttattgcggcattattcacaatwgcaaagacttggaaccaacccaaatgtccaacaatgatagactggattaagaaaatgtggcacatatacaccatggaatactatgcagccataaaaaatg

SEQ ID NO: 554311 - DNA, 201 bp, Homo sapiens
ttaccatgttgtccatgctggtcgcaaactcctggcctcaggtaatcccttcgccttggcctcccaaagtgctgaggttataggcgtgagccaccatgccyggccttgcctttattttttaaagataatgtcactaggtaaagagttctagtttgacacactttccttctgagtactttttttttaatatttaaaaaattg

SEQ ID NO: 554312 - DNA, 201 bp, Homo sapiens
ttatagtaaaaccttccattgtaaacttctggcaatcactgatctgtgttcctctagcattgcttttttttcagaattttatacaaatggaatcgttcagkctgtagcctttgagtctggctactttcatgtactgtatcaacagttattcctttttattgccaaatagtaatccattgtataaatactacatggtttgct

SEQ ID NO: 554313 - DNA, 201 bp, Homo sapiens
tatagtaaaaccttccattgtaaacttctggcaatcactgatctgtgttcctctagcattgcttttttttcagaattttatacaaatggaatcgttcaggmtgtagcctttgagtctggctactttcatgtactgtatcaacagttattcctttttattgccaaatagtaatccattgtataaatactacatggtttgctt

SEQ ID NO: 554314 - DNA, 201 bp, Homo sapiens
tcactgatctgtgttcctctagcattgcttttttttcagaattttatacaaatggaatcgttcaggctgtagcctttgagtctggctactttcatgtactktatcaacagttattcctttttattgccaaatagtaatccattgtataaatactacatggtttgcttattggtttgtcattggaggaatatggactatttt

SEQ ID NO: 554315 - DNA, 201 bp, Homo sapiens
cactgatctgtgttcctctagcattgcttttttttcagaattttatacaaatggaatcgttcaggctgtagcctttgagtctggctactttcatgtactgyatcaacagttattcctttttattgccaaatagtaatccattgtataaatactacatggtttgcttattggtttgtcattggaggaatatggactattttc

SEQ ID NO: 554316 - DNA, 201 bp, Homo sapiens
taatactgtcttctggaatactagaaataagtgcaagtgattgtttttggcaggaggccacataaacatttctgcttctctgtgacttatgggtagcattsatataaattgttaaaaataatgatcgtagatagataatgtatcagagtttgggctcagccgctgtagctgctgttgacccagaggaaccactgggatcct

SEQ ID NO: 554317 - DNA, 201 bp, Homo sapiens
gtgtacgtttgactttatcagaacctgccaaattgtcttccaaagtgctgtgccacttctgtttctttaataaatacaggggtattcaagctgtctgtttsttcttgagttttggtagtctgtctttcaaggaattgatctatttcacctaatttgtagaatttagaagcatatagttgtttgttttgtttttgtagtatc

SEQ ID NO: 554318 - DNA, 201 bp, Homo sapiens
aatttagaagcatatagttgtttgttttgtttttgtagtatccattctagccttctagtgtctacaggatttgtaataatcctttcatttctggtattggyaatttgtgttttctcttcttcctttgtcagtctgctagaggcttcctcatttgattgctttccaccttccaccacccctgcaaagaaccaactttggatt

SEQ ID NO: 554319 - DNA, 201 bp, Homo sapiens
atagttgtttgttttgtttttgtagtatccattctagccttctagtgtctacaggatttgtaataatcctttcatttctggtattggtaatttgtgttttmtcttcttcctttgtcagtctgctagaggcttcctcatttgattgctttccaccttccaccacccctgcaaagaaccaactttggattttgttgaattttt

SEQ ID NO: 554320 - DNA, 201 bp, Homo sapiens
agagttttttttgtttggttggttggtttctctttttcttgtatgtttcatggaactttttggtgaaggcacttgggcctggaaatttctttatggcaagwtttttcattactgattcaatatatttaatctatgtaagatttttttctactttttgagtcaattttgattttttttttccaaaaattcatatctcaccaa

SEQ ID NO: 554321 - DNA, 201 bp, Homo sapiens
ctttttggtgaaggcacttgggcctggaaatttctttatggcaagttttttcattactgattcaatatatttaatctatgtaagatttttttctacttttkgagtcaattttgattttttttttccaaaaattcatatctcaccaagtatggtggcttatgcctgtaatcccagcactttgggaggctcaggtgggaggac

SEQ ID NO: 554322 - DNA, 201 bp, Homo sapiens
ccatccgcgctgggcgtgggtgcaagcgcctgcccctggcaccccgtgcctctctcaggcccccgctgcatttcagcctcattcattgctaagaaatcttygttgtttctaaagaagcagacagaaattaccacaagagagacaccaagagcactttcctgaggtgagaggcacatgtccccttggagggctgagaacgct

SEQ ID NO: 554323 - DNA, 201 bp, Homo sapiens
ttttttaaaaggtttaatatgagtttatatctctaaatatcagtttctaattttttttaaaagcctatgtttacaacaaatttgggagatacctatatgcwctactaactagtgttcttttgtggtgctttagaaattctggcttacttgtatttttgctggccttctaatgatttcactcatcaatcagaagatatttgt

SEQ ID NO: 554324 - DNA, 201 bp, Homo sapiens
ccaccactacttccaaatagcatatgttaactttgagttaattttacataaacctgggttaatttacaaaattttggcaccaacaacatggttaggcaagkcagcatggatgggtattggaatctgtcaatctgggttgctgtataccagctctgggactgggggcaagttgtagcagccctgagcctcctgcttcacctg

SEQ ID NO: 554325 - DNA, 201 bp, Homo sapiens
atactacaaagctgtagtaatgaagacagcatggtactgtcataaaaacagacacatagactaatggaacagaatagaccacacagaaagtaatgtattcrtctacagccaactgctttttaaaaattttttattttttgagacagtgtctcactccatctcccaggctggagtgcaatggcatgatcatggctcactgta

SEQ ID NO: 554326 - DNA, 201 bp, Homo sapiens
tttgttatacaacaatagcaaactaatatagagcttctgtgggtcctgatttgagaaatgctttagctgggtggttctgtcttggtcaatatgttgattargcctgcagtcatccgaaggcttgactgaggctagggcatccaatttcaagacggctcacttaacatggctagcaagtcaatgctgtctgttagcaggaga

SEQ ID NO: 554327 - DNA, 201 bp, Homo sapiens
ggatgttctagaaatgttctagattcctagtttaattctgtcgtcagagaaaataattcactgaattttaattgtttaacttcagggtttgttttatgacycagaatatgatctctcaccaccgccatccagataattcttcaggttttgacgtttcccaacctgtctgctggttacttttcagagtacttggatcattgc

SEQ ID NO: 554328 - DNA, 201 bp, Homo sapiens
gttttgacgtttcccaacctgtctgctggttacttttcagagtacttggatcattgctatttatattttgtccagagtttcaaattgtgatcagtggaaaygacaggccgtagcatacatacgccatcctggccagcatcacaggtggtcagtacatctttctgttgttgttttgagacagggtctcactctgttgcccag

SEQ ID NO: 554329 - DNA, 201 bp, Homo sapiens
ctgtctgctggttacttttcagagtacttggatcattgctatttatattttgtccagagtttcaaattgtgatcagtggaaatgacaggccgtagcatacrtacgccatcctggccagcatcacaggtggtcagtacatctttctgttgttgttttgagacagggtctcactctgttgcccaggctggagcacagtggcat

SEQ ID NO: 554330 - DNA, 201 bp, Homo sapiens
tggcagagttttttttgtttggttggttggtttctctttttcttgtatgtttcatggaactttttggtgaaggcacttgggcctggaaatttctttatggsaagttttttcattactgattcaatatatttaatctatgtaagatttttttctactttttgagtcaattttgattttttttttccaaaaattcatatctca

SEQ ID NO: 554331 - DNA, 201 bp, Homo sapiens
tgtatgtttcatggaactttttggtgaaggcacttgggcctggaaatttctttatggcaagttttttcattactgattcaatatatttaatctatgtaagwtttttttctactttttgagtcaattttgattttttttttccaaaaattcatatctcaccaagtatggtggcttatgcctgtaatcccagcactttgggag

SEQ ID NO: 554332 - DNA, 201 bp, Homo sapiens
tgaggcaggcagatcacgaggtcaagagatcaagaccatcctggccaacatggtgaaaccccgtctctactaaaaatacaaaaattcgctaggtgtggtgrcgggtacctgtaatcccacctacttgggaggctgaggcaggagaatccttgaacccgggaggcggagtttgcagtgagctgagatcgcaccactactgca

SEQ ID NO: 554333 - DNA, 201 bp, Homo sapiens
atgtatgttaaaaagtatctttttttttttttttttttgagacggaatctcactctgtcctccagattggagtgcagtggcgcgatctcagcccactgcargctctgcctcccgggttcacgccattctcctgcctcagcctcccaagtagctggaactataggcgcccaccaccacacccggctaacttcttgtattttt

SEQ ID NO: 554334 - DNA, 201 bp, Homo sapiens
agctgcctcttcaaactcatcacacatctgatcttagatgtattatgcttcaagcacattggtcttcttgtagtccctcaaacaagcttctttcaggactrtggctctgaacaagctttcctctctgccagggatgctattccctcctgctatggcaggtctgactcctaatgtccttcaatctttgcctaaatttcacct

SEQ ID NO: 554335 - DNA, 201 bp, Homo sapiens
ttttccattttccctggagttgctaccatacagctgcagaggaagcgctgtgcctgcaggccatgcaaagccacagtggtcttttggggttgcaggggggytgctgggaccctgcatgtgccaggctcatgccccctgctgtgtgtgccctggagggagaagctcatgcacaccaccctgggttttgttttctaggtggct

SEQ ID NO: 554336 - DNA, 201 bp, Homo sapiens
ttggagtgcagtggcatgatctcggctcactgcaacctccgcctcctgggttcaagtgattctcctgcctcagcctcctgagtagctgggattataggctyttgccaccactcccagctaatttttatatttttagtagagatgaagttttgctgtgttgctcaggctggtcttgaactcctgagcttaggcaatccaccc

SEQ ID NO: 554337 - DNA, 201 bp, Homo sapiens
atagttctaaaacttttgtataaaaagtagcatgtaagttgtgtctatgaatgtgtatctgtgggtgtgttgtatctgttttataaaacttgaatagagcrtctataaaaacagttctcaagagtgtttgtactgataacagataaatacagatagggatataaacatcatggttaaataaatagcaaaaaagatcagctt

SEQ ID NO: 554338 - DNA, 201 bp, Homo sapiens
gctccggatgctggggatacggcactgggaaaaaattcctccctcatgatgatgaaggcaaacaataaataagatacataagtaaaaataggtagtcagcmggcaatacatactgaggggcagcagcataggaaaaattgagggcctggggtagaggtggggaagtcttcaccaagaaggtagcttctgagtagatctgaa

SEQ ID NO: 554339 - DNA, 201 bp, Homo sapiens
cccctctcaccctattctttcttctgccctggtcagattttacctccactgagaagctctccttactaccctattgtctgtgccctaaattcctgtgatcrttgctgcccatgccacgcattccatttattccatcagcgtgtattattgagtgtctgccgtgtgtcagacactgctccggatgctggggatacggcactg

SEQ ID NO: 554340 - DNA, 201 bp, Homo sapiens
tctatccatggtgttgcacatggccgtggtttgtttattgttgtgtgcattcagttttactaatattgcacaatatgtttatctgttctgctggtggctgrcattcaggttcttccaagcttgggtccattatgagtaatgccattataaacttttttttttttgagatggagtctcactcttgtcgcccaagctggagtg

SEQ ID NO: 554341 - DNA, 201 bp, Homo sapiens
ccttctagttgctgctcttacctcctctcgaggcagggtcatctgcctgccttagcctcccagagtgctgggattacaggcatgagccaccgagcctggcytaaaatgaccatcttgtcttttgagacagagtcttgctctgtcaccccagctggagtgcagtggcatgatcatggctcactgcagcctcaatctccctgg

SEQ ID NO: 554342 - DNA, 201 bp, Homo sapiens
  misc_feature (1)...(201): n = A,T,C or G
tacaggtaaggagatcatgaacgtacaactcaaaattttcacctagttaacacctaagaaatggatatgaccagcaacccagaagcctctcttctgtttcnttctagttgctgctcttacctcctctcgaggcagggtcatctgcctgccttagcctcccagagtgctgggattacaggcatgagccaccgagcctggcct

SEQ ID NO: 554343 - DNA, 201 bp, Homo sapiens
caatatatttaatctatgtaagatttttttctactttttgagtcaattttgattttttttttccaaaaattcatatctcaccaagtatggtggcttatgcytgtaatcccagcactttgggaggctcaggtgggaggaccacttgactacagtagttcaagaccagcctgggcaatatagtgagactccatctctgcaaaa

SEQ ID NO: 554344 - DNA, 201 bp, Homo sapiens
tttatttcaagaacacatgtaaatgaaaccatacactgtctgatattttgagattgagtttttttattcagcataattatcttgtgatccgtcaaagttgytttgatatattttatcatttttctttttatatttcatgggacattacttctattgttttatacgtttcacgtttgtttagttttatccatatattcacct

SEQ ID NO: 554345 - DNA, 201 bp, Homo sapiens
ccttttgttactgagaggtctaaaataacattttacaagtgtagttgaatatagcatcagtaaattggttatgaggaagactccttcataattgcttttawggattaaacatgtatctaaggacaacaccaaggaactactagaaataaccctcgagtcagtcttttccgttctgtttccacacccttagttttctattac

SEQ ID NO: 554346 - DNA, 201 bp, Homo sapiens
aaaactaagcagaggcttgctcaagaactcctgaggtcttggtggggttcggagattgggggaagaggagatggacaaaggctcccaagaggaagtagtaytgggtctgcagaatgacccagcaaagaatgagggcaagggattccaggcagtgggaattacttgtacataggccctgagacctgagagcagcgtgggttt

SEQ ID NO: 554347 - DNA, 201 bp, Homo sapiens
tcttactgtcctttgaatatgccttgacgttttctgcatgtgtgttcagttgttttccctgtttggacagattttcccctctcaccctattctttcttctrccctggtcagattttacctccactgagaagctctccttactaccctattgtctgtgccctaaattcctgtgatcgttgctgcccatgccacgcattccat

SEQ ID NO: 554348 - DNA, 201 bp, Homo sapiens
tgtataatgttccactttatggacatagaataacttatttgtccagtctcttataaatgggtcatcttttgttttgttttgttgtaaactgctgaaaactrtagtaatgtcctatgtgtctttgtgtgtatctatttttatttttttaatttttattttaggtttgggggtacgtgtgaaggtttgtcacacagataaata

SEQ ID NO: 554349 - DNA, 201 bp, Homo sapiens
ctgggttcacgccattctcctgcctcagcctcctgagtagctgggactacaggtgcccgctaccacggccggctaatttttttgtatttttagtagagacrgggtttcaccatgttagccaggatggtctcgatctcgtgactttgtgattcgtccaccttggcctccgaaagtaaagtgctgggattacaggtgtgagcc

SEQ ID NO: 554350 - DNA, 201 bp, Homo sapiens
agatacagaacagttccatcagaaggatggatcccttgtgctacccatcttatagtcacaaacacgttcctcactccctgacccctggcaaccactaatckgtttttcatctctgtaactttatttcaagaacacatgtaaatgaaaccatacactgtctgatattttgagattgagtttttttattcagcataattatct

SEQ ID NO: 554351 - DNA, 201 bp, Homo sapiens
tacctaaccaccatcaccatcgtcaagatacagaacagttccatcagaaggatggatcccttgtgctacccatcttatagtcacaaacacgttcctcactycctgacccctggcaaccactaatctgtttttcatctctgtaactttatttcaagaacacatgtaaatgaaaccatacactgtctgatattttgagattga

SEQ ID NO: 554352 - DNA, 201 bp, Homo sapiens
atgtgcacttttagttttttttgtgtatttagttctatgaaattttatcgtgtacatagattagatacctaaccaccatcaccatcgtcaagatacagaasagttccatcagaaggatggatcccttgtgctacccatcttatagtcacaaacacgttcctcactccctgacccctggcaaccactaatctgtttttcatc

SEQ ID NO: 554353 - DNA, 201 bp, Homo sapiens
gtttctcttaaaagttctctgataagtcattgccaccactacttccaaatagcatatgttaactttgagttaattttacataaacctgggttaatttacamaattttggcaccaacaacatggttaggcaaggcagcatggatgggtattggaatctgtcaatctgggttgctgtataccagctctgggactgggggcaag

SEQ ID NO: 554354 - DNA, 201 bp, Homo sapiens
gttttatgtgcacttttagttttttttgtgtatttagttctatgaaattttatcgtgtacatagattagatacctaaccaccatcaccatcgtcaagatayagaacagttccatcagaaggatggatcccttgtgctacccatcttatagtcacaaacacgttcctcactccctgacccctggcaaccactaatctgtttt

SEQ ID NO: 554355 - DNA, 201 bp, Homo sapiens
actaccttgttcatatttcaccagttttatgtgcacttttagttttttttgtgtatttagttctatgaaattttatcgtgtacatagattagatacctaaycaccatcaccatcgtcaagatacagaacagttccatcagaaggatggatcccttgtgctacccatcttatagtcacaaacacgttcctcactccctgacc

SEQ ID NO: 554356 - DNA, 201 bp, Homo sapiens
gtcttcactcagtttctcccaatggtaacatcttgcgtaactaccttgttcatatttcaccagttttatgtgcacttttagttttttttgtgtatttagtkctatgaaattttatcgtgtacatagattagatacctaaccaccatcaccatcgtcaagatacagaacagttccatcagaaggatggatcccttgtgctac

SEQ ID NO: 554357 - DNA, 201 bp, Homo sapiens
ataatagaaatcccatatagtcttcactcagtttctcccaatggtaacatcttgcgtaactaccttgttcatatttcaccagttttatgtgcacttttagktttttttgtgtatttagttctatgaaattttatcgtgtacatagattagatacctaaccaccatcaccatcgtcaagatacagaacagttccatcagaag

SEQ ID NO: 554358 - DNA, 201 bp, Homo sapiens
accccgtctctactaaaaatacaaaaattcgctaggtgtggtggcgggtacctgtaatcccacctacttgggaggctgaggcaggagaatccttgaacccrggaggcggagtttgcagtgagctgagatcgcaccactactgcactccagtctggtgacagagcaagcctctgtctcaaaaaaaaaaaaaaaaaaaaaaaa

SEQ ID NO: 554359 - DNA, 201 bp, Homo sapiens
gacataattgcagattcacaggcggttttaagaaataatagaaatcccatatagtcttcactcagtttctcccaatggtaacatcttgcgtaactaccttkttcatatttcaccagttttatgtgcacttttagttttttttgtgtatttagttctatgaaattttatcgtgtacatagattagatacctaaccaccatca

SEQ ID NO: 554360 - DNA, 201 bp, Homo sapiens
tgtttatattcttttagtaactgtcatgctaatttaaatgtgcatatttaagttatgaaagtctaaaatttatcctcctcctgggtgataggataacttargaatactttcatcgcattaaactcctcttgagttatgctactacagtatattttcaactttttattttgacataattgcagattcacaggcggttttaag

SEQ ID NO: 554361 - DNA, 201 bp, Homo sapiens
aatatgacttaaaaatagcatggaatgagattttaacaatttatccatctttaactggattacttagtccatttgcatgtatttgtattctgacatacttrgattctgtatagatggtgagtggtgtgtatgtacatgcatatgtgtttgtgtcattttgtcactttctatttatcctacttatgtttctttttttccttt

SEQ ID NO: 554362 - DNA, 201 bp, Homo sapiens
acctgtatcaggggaggctgagacccaccttgcaggggtcttgtgaagattaaatgcagtgctgtgtgaatggtgcctaccttcgtgcccggcctgtcaasaccaggcagtttacacaaaaacacttgatattgactatgaaacaagatccggaagagaacaaatataaatacagatggatcagctaaatgaaggactgtc

SEQ ID NO: 554363 - DNA, 201 bp, Homo sapiens
atcaaggttatttttattttaaccttataaaatgaactggggagtcttctttttttattctctcagtttgtgttagtggcagagttttttttgtttggttrgttggtttctctttttcttgtatgtttcatggaactttttggtgaaggcacttgggcctggaaatttctttatggcaagttttttcattactgattcaat

SEQ ID NO: 554364 - DNA, 201 bp, Homo sapiens
cttaagggctctattaggttgggtgctgtggctcctgcctgtaatcccagcactttgggaggccgaggcaggaagatcacttgaggccatgagtttgaaaycagcgtgggcaataaggtgaaattttttaagaattaaaaaaaaattaaaggcttaattagactcaggttaacactttagcaagaatgcttcagagctagt

SEQ ID NO: 554365 - DNA, 201 bp, Homo sapiens
gcggaggccggggagcagccgaccatggagccccagagtaagggaggcccgggctggagctgggaccggggcgggcgaccgggctggggctccccgggaamgagtgtgggcgccccgcgcgcgactccgcaggtttcaacgctcggacacggaaatacggtttgcgtctcctcgcgcttttctctcctggagaggggagaa

SEQ ID NO: 554366 - DNA, 201 bp, Homo sapiens
gcactttgggaggctgaggcaggcagatcacgaggtcaagagatcaagaccatcctggccaacatggtgaaaccccgtctctactaaaaatacaaaaattmgctaggtgtggtggcgggtacctgtaatcccacctacttgggaggctgaggcaggagaatccttgaacccgggaggcggagtttgcagtgagctgagatc

SEQ ID NO: 554367 - DNA, 201 bp, Homo sapiens
accttttaaaatcattcaatatctttgtattttaaatatgacttaaaaatagcatggaatgagattttaacaatttatccatctttaactggattacttaktccatttgcatgtatttgtattctgacatacttggattctgtatagatggtgagtggtgtgtatgtacatgcatatgtgtttgtgtcattttgtcacttt

SEQ ID NO: 554368 - DNA, 201 bp, Homo sapiens
gttgggtgctgtggctcctgcctgtaatcccagcactttgggaggccgaggcaggaagatcacttgaggccatgagtttgaaaccagcgtgggcaataagstgaaattttttaagaattaaaaaaaaattaaaggcttaattagactcaggttaacactttagcaagaatgcttcagagctagtgttgtgacttcatgtta

SEQ ID NO: 554369 - DNA, 201 bp, Homo sapiens
acgtattttaataccttttaaaatcattcaatatctttgtattttaaatatgacttaaaaatagcatggaatgagattttaacaatttatccatctttaaytggattacttagtccatttgcatgtatttgtattctgacatacttggattctgtatagatggtgagtggtgtgtatgtacatgcatatgtgtttgtgtca

SEQ ID NO: 554370 - DNA, 201 bp, Homo sapiens
ggctatattgccaaggctggtcttgagctcttggtctcaggtgatcctctcacctctgcttcctgagtcactgggattacagacatgtgccgccaagcctrgctcctctgatacgtattttaataccttttaaaatcattcaatatctttgtattttaaatatgacttaaaaatagcatggaatgagattttaacaattta

SEQ ID NO: 554371 - DNA, 201 bp, Homo sapiens
ctacctcagtctttagagtgatgtgtgccaccaccgccaaataattgtttttatttctttagagatagagtttggctatattgccaaggctggtcttgagytcttggtctcaggtgatcctctcacctctgcttcctgagtcactgggattacagacatgtgccgccaagcctggctcctctgatacgtattttaatacct

SEQ ID NO: 554372 - DNA, 201 bp, Homo sapiens
cctgctgccttgaactcctgggctcaaatgatcctcctacctcagtctttagagtgatgtgtgccaccaccgccaaataattgtttttatttctttagagwtagagtttggctatattgccaaggctggtcttgagctcttggtctcaggtgatcctctcacctctgcttcctgagtcactgggattacagacatgtgccg

SEQ ID NO: 554373 - DNA, 201 bp, Homo sapiens
tttgcactgtgtatctttcacgtgtatgtgtgtatttttttcccactgtgctgcccaggctatagtgcaggggctgttcacaggtgttcacaggtggctcmctgctgccttgaactcctgggctcaaatgatcctcctacctcagtctttagagtgatgtgtgccaccaccgccaaataattgtttttatttctttagaga

SEQ ID NO: 554374 - DNA, 201 bp, Homo sapiens
gttttccttcatttatgtatgctttcaacattacgtatgatatagctatagtaactttggttagactttgcactgtgtatctttcacgtgtatgtgtgtarttttttcccactgtgctgcccaggctatagtgcaggggctgttcacaggtgttcacaggtggctccctgctgccttgaactcctgggctcaaatgatcct

SEQ ID NO: 554375 - DNA, 201 bp, Homo sapiens
ttgagttgatttttgtataaggtaagagataaggatccagcttcattctcccacatgtgcataaccaattagcccagcaccatttgttgaaaagggtgtcytttccccactttgtttggtttgttgaagatcagttggttataagtgtttgggcttatttttgggttctctattctgtttcattgtttctatgtacctgtt

SEQ ID NO: 554376 - DNA, 201 bp, Homo sapiens
cttaacactcgtctatatggttaatttttgaacttgtccacattttcttgaagggaagtctgtttctgtagttaaatctcatgttctatatgtttgcattkagtatttttttcatagttttaaatcttcatcctccctaattatttttatactttatttactgagagatatattaaatatcctactagaagcatggatttg

SEQ ID NO: 554377 - DNA, 201 bp, Homo sapiens
acttttagaaagtttctaaaattgttaccagaaattgtgatctgtccactttcttagaaatttgttacttaacactcgtctatatggttaatttttgaacktgtccacattttcttgaagggaagtctgtttctgtagttaaatctcatgttctatatgtttgcattgagtatttttttcatagttttaaatcttcatcct

SEQ ID NO: 554378 - DNA, 201 bp, Homo sapiens
cccagcactttgagaggcaaaggtgggaggatcgcttgagcctgtaagggggaggctgtagtaagctgtgattgagcgactacactccagcctgggcaacrgaatgagaccctatctgaaaaccaaaaaacccacaagttttagcttggctgattctattgtgtgtttcttttgtatttcatttgtttgttatgtttttcc

SEQ ID NO: 554379 - DNA, 201 bp, Homo sapiens
gtagcgacgccggccctggctgagaggcgttaggagtccgggggttcgcccgcggaggccggggagcagccgaccatggagccccagagtaagggaggccygggctggagctgggaccggggcgggcgaccgggctggggctccccgggaacgagtgtgggcgccccgcgcgcgactccgcaggtttcaacgctcggacac

SEQ ID NO: 554380 - DNA, 201 bp, Homo sapiens
ttccttatgttttagagacaggcacagaggcagaaggctgagtcagtgggcttccatagtagagccgggcccacgtgccatgtgtggtagtgacagccacrcactccttgattggtttatgatgaattctgggcaggttttgcacctagtgaaagtctgtggttgaaaaagaaggttgtactttgctgaaagaagtcaagc

SEQ ID NO: 554381 - DNA, 201 bp, Homo sapiens
tccttgattggtttatgatgaattctgggcaggttttgcacctagtgaaagtctgtggttgaaaaagaaggttgtactttgctgaaagaagtcaagcatckgggccgggcacagtggcttatgcctgtaatcccagcactttgggaggccaaggcgggtggatcacttgaggtcaggagtttgagaccaacctggccaaca

SEQ ID NO: 554382 - DNA, 201 bp, Homo sapiens
ttagcagggcatggtggctcatacctgtaatcccagcactttgagaggcaaaggtgggaggatcgcttgagcctgtaagggggaggctgtagtaagctgtrattgagcgactacactccagcctgggcaacagaatgagaccctatctgaaaaccaaaaaacccacaagttttagcttggctgattctattgtgtgtttct

SEQ ID NO: 554383 - DNA, 201 bp, Homo sapiens
agttttaatcataaagtgatgctggattttgtcgaatgcattttctgcatctattgagatcatgtcatttttttttaaattttgtttgtgtggtgtaccasatttattgacttgcatatgttaaaccatccctgcatccctggtatgaaatccatttgatcatggtggattatctttttgatatgttgttggatttggtta

SEQ ID NO: 554384 - DNA, 201 bp, Homo sapiens
ctttctatctgtagtacagtcctcctgtgcaagattgttttttgactgctttttcttgacaaatcttgctaaaggtctgtgaattttataatgtatttttwaagaaccaggttttagcagggcatggtggctcatacctgtaatcccagcactttgagaggcaaaggtgggaggatcgcttgagcctgtaagggggaggct

SEQ ID NO: 554385 - DNA, 201 bp, Homo sapiens
ctcagtttgtgttagtggcagagttttttttgtttggttggttggtttctctttttcttgtatgtttcatggaactttttggtgaaggcacttgggcctgsaaatttctttatggcaagttttttcattactgattcaatatatttaatctatgtaagatttttttctactttttgagtcaattttgattttttttttcca

SEQ ID NO: 554386 - DNA, 201 bp, Homo sapiens
tctcagtttgtgttagtggcagagttttttttgtttggttggttggtttctctttttcttgtatgtttcatggaactttttggtgaaggcacttgggcctrgaaatttctttatggcaagttttttcattactgattcaatatatttaatctatgtaagatttttttctactttttgagtcaattttgattttttttttcc

SEQ ID NO: 554387 - DNA, 201 bp, Homo sapiens
aatgaactggggagtcttctttttttattctctcagtttgtgttagtggcagagttttttttgtttggttggttggtttctctttttcttgtatgtttcayggaactttttggtgaaggcacttgggcctggaaatttctttatggcaagttttttcattactgattcaatatatttaatctatgtaagatttttttctac

SEQ ID NO: 554388 - DNA, 201 bp, Homo sapiens
tgggttttgatatcaaggttatttttattttaaccttataaaatgaactggggagtcttctttttttattctctcagtttgtgttagtggcagagtttttkttgtttggttggttggtttctctttttcttgtatgtttcatggaactttttggtgaaggcacttgggcctggaaatttctttatggcaagttttttcatt

SEQ ID NO: 554389 - DNA, 201 bp, Homo sapiens
gatggcctataaatattttttcttgcacttgccttgttgggttttgatatcaaggttatttttattttaaccttataaaatgaactggggagtcttctttytttattctctcagtttgtgttagtggcagagttttttttgtttggttggttggtttctctttttcttgtatgtttcatggaactttttggtgaaggcact

SEQ ID NO: 554390 - DNA, 201 bp, Homo sapiens
ctggccagtacatcttaaaaatgatttctgatccacgttgaataatgatggcctataaatattttttcttgcacttgccttgttgggttttgatatcaagrttatttttattttaaccttataaaatgaactggggagtcttctttttttattctctcagtttgtgttagtggcagagttttttttgtttggttggttggt

SEQ ID NO: 554391 - DNA, 201 bp, Homo sapiens
gatactattttgtatgtattctgggattgaacaattgagaaactatatcgatgcttttggaaaacaggattctcactgcggaagaaagaatatgtaaatayggaaggaagaaaacaatatagtcatgttggatttgaactggagtgaatagtatgaatttatgattaaaaaaaaaatcctgactgtccactgaaaagtcta

SEQ ID NO: 554392 - DNA, 201 bp, Homo sapiens
cccaggctggagcacagtggcatgatcagggatcactgcattctcaaccggctaggctcaagtgatcctcccacctcagcctcccgaatagctgggtctayaggtgtgctgccatgcccagctaatttttgtattttttataaagacaggattttgccttgttgcccaggctggtctcaaactcctgagctcaggccatcc

SEQ ID NO: 554393 - DNA, 201 bp, Homo sapiens
catcctggccagcatcacaggtggtcagtacatctttctgttgttgttttgagacagggtctcactctgttgcccaggctggagcacagtggcatgatcarggatcactgcattctcaaccggctaggctcaagtgatcctcccacctcagcctcccgaatagctgggtctataggtgtgctgccatgcccagctaatttt

SEQ ID NO: 554394 - DNA, 201 bp, Homo sapiens
tcaatgatccaagaaatgacttcccagggaaagggcaaattaaatacgttcacaaccttgggctgttgagagtggttttggctcttggcttgcacattgamgtctttaattattttcttgctaaaccaacttcagtgttggaaagatagctcatgtataaaataacatggaaaacgtacatcacttcccatttgttttggg

SEQ ID NO: 554395 - DNA, 201 bp, Homo sapiens
aaaacagaactggtgaaacaaagaacaagctgctttctgttctggttttagtgtggagagagggagtccattttccattttccctggagttgctaccatayagctgcagaggaagcgctgtgcctgcaggccatgcaaagccacagtggtcttttggggttgcaggggggctgctgggaccctgcatgtgccaggctcatg

SEQ ID NO: 554396 - DNA, 201 bp, Homo sapiens
caccaccgccatccagataattcttcaggttttgacgtttcccaacctgtctgctggttacttttcagagtacttggatcattgctatttatattttgtcyagagtttcaaattgtgatcagtggaaatgacaggccgtagcatacatacgccatcctggccagcatcacaggtggtcagtacatctttctgttgttgttt

SEQ ID NO: 554397 - DNA, 201 bp, Homo sapiens
accaaaaccctggattacattcgcctgtctgttttgtttatctagagtgtagtctccttattagaagaaaggaaaaaaaagcagaggccaaagaagtcttktgtctgctgatgagagcaccactcatctgcgaaacgcacgtaaaacaaagtgaaccgtgactgttaaactagggatgggaaattctgcatcttggggggc

SEQ ID NO: 554398 - DNA, 201 bp, Homo sapiens
gaatatggactattttcactttttggtaaattataagtggattggaattcacaaagtgctttttgtctgagcataggttttcatttcacttgtgcaaatgmctaagggtgtaggattgctgagtcacatggtccgtgtacgtttgactttatcagaacctgccaaattgtcttccaaagtgctgtgccacttctgtttctt

SEQ ID NO: 554399 - DNA, 201 bp, Homo sapiens
ccttttatgaaattaggtgaggcccttgattagaatttgttttttaaaaggtttaatatgagtttatatctctaaatatcagtttctaattttttttaaargcctatgtttacaacaaatttgggagatacctatatgcactactaactagtgttcttttgtggtgctttagaaattctggcttacttgtatttttgctgg

SEQ ID NO: 554400 - DNA, 201 bp, Homo sapiens
cacataaacatttctgcttctctgtgacttatgggtagcattgatataaattgttaaaaataatgatcgtagatagataatgtatcagagtttgggctcasccgctgtagctgctgttgacccagaggaaccactgggatcctcacatctcagggcagcacatcgtttgcagcaatggttggttctgtacaaccttttatg

SEQ ID NO: 554401 - DNA, 201 bp, Homo sapiens
ttgtttttggcaggaggccacataaacatttctgcttctctgtgacttatgggtagcattgatataaattgttaaaaataatgatcgtagatagataatgwatcagagtttgggctcagccgctgtagctgctgttgacccagaggaaccactgggatcctcacatctcagggcagcacatcgtttgcagcaatggttggt

SEQ ID NO: 554402 - DNA, 201 bp, Homo sapiens
tgtcttctggaatactagaaataagtgcaagtgattgtttttggcaggaggccacataaacatttctgcttctctgtgacttatgggtagcattgatatamattgttaaaaataatgatcgtagatagataatgtatcagagtttgggctcagccgctgtagctgctgttgacccagaggaaccactgggatcctcacatc

SEQ ID NO: 554403 - DNA, 201 bp, Homo sapiens
tcactagattggttaagcaggaaatttacagagatttttttctttgctgtaaatgtttttctaaattgaaaaacttctaatactgtcttctggaatactakaaataagtgcaagtgattgtttttggcaggaggccacataaacatttctgcttctctgtgacttatgggtagcattgatataaattgttaaaaataatga

SEQ ID NO: 554404 - DNA, 201 bp, Homo sapiens
ttagaagtgactttggattaagtctttcataaggtggctaaatgaatttatatggctcatcagaattcactagattggttaagcaggaaatttacagagakttttttctttgctgtaaatgtttttctaaattgaaaaacttctaatactgtcttctggaatactagaaataagtgcaagtgattgtttttggcaggaggc

SEQ ID NO: 554405 - DNA, 201 bp, Homo sapiens
atacattagctcttctagaagttagaagtgactttggattaagtctttcataaggtggctaaatgaatttatatggctcatcagaattcactagattggtwaagcaggaaatttacagagatttttttctttgctgtaaatgtttttctaaattgaaaaacttctaatactgtcttctggaatactagaaataagtgcaag

SEQ ID NO: 554406 - DNA, 201 bp, Homo sapiens
aatacattagctcttctagaagttagaagtgactttggattaagtctttcataaggtggctaaatgaatttatatggctcatcagaattcactagattggwtaagcaggaaatttacagagatttttttctttgctgtaaatgtttttctaaattgaaaaacttctaatactgtcttctggaatactagaaataagtgcaa

SEQ ID NO: 554407 - DNA, 201 bp, Homo sapiens
  misc_feature (1)...(201): n = A,T,C or G
agatatagaccaaaccttgacatttctggcctttgagtctttcacaactgtgattataatacattagctcttctagaagttagaagtgactttggattaantctttcataaggtggctaaatgaatttatatggctcatcagaattcactagattggttaagcaggaaatttacagagatttttttctttgctgtaaatgt

SEQ ID NO: 554408 - DNA, 201 bp, Homo sapiens
gaagaaggatgacataggccgaaaaaattggcaatcatttggcctgtacatgttgcttttattttttttctggacttaagatatagaccaaaccttgacakttctggcctttgagtctttcacaactgtgattataatacattagctcttctagaagttagaagtgactttggattaagtctttcataaggtggctaaatg

SEQ ID NO: 554409 - DNA, 201 bp, Homo sapiens
aaatgtaatttcaggctatagtgaagaaggatgacataggccgaaaaaattggcaatcatttggcctgtacatgttgcttttattttttttctggacttargatatagaccaaaccttgacatttctggcctttgagtctttcacaactgtgattataatacattagctcttctagaagttagaagtgactttggattaag

SEQ ID NO: 554410 - DNA, 201 bp, Homo sapiens
gggtgaatatggttggttctgcagccttccatggtgggcttcaggtggcctctagcatcctcttaatagcacaccaaagccagggcaggggcttctggccstcctagcctgagtttacatggggttggagtaccatttggagcaattttaggaagggctgtttattagtgtgttctcacactgctaataaagacatacctg

SEQ ID NO: 554411 - DNA, 201 bp, Homo sapiens
tgagaactgtcaaacatgaaatgtaatttcaggctatagtgaagaaggatgacataggccgaaaaaattggcaatcatttggcctgtacatgttgcttttkttttttttctggacttaagatatagaccaaaccttgacatttctggcctttgagtctttcacaactgtgattataatacattagctcttctagaagttag

SEQ ID NO: 554412 - DNA, 201 bp, Homo sapiens
tgtctccttgctgagaactgtcaaacatgaaatgtaatttcaggctatagtgaagaaggatgacataggccgaaaaaattggcaatcatttggcctgtacrtgttgcttttattttttttctggacttaagatatagaccaaaccttgacatttctggcctttgagtctttcacaactgtgattataatacattagctctt

SEQ ID NO: 554413 - DNA, 201 bp, Homo sapiens
ttgaacttggacttgggagatgactcctgtctctcgtactctctgtggctctgctttctgttattttactcataagcttgttttgtctccttgctgagaaytgtcaaacatgaaatgtaatttcaggctatagtgaagaaggatgacataggccgaaaaaattggcaatcatttggcctgtacatgttgcttttatttttt

SEQ ID NO: 554414 - DNA, 201 bp, Homo sapiens
tactcatgctacaatcaatattaattccttgcagttcaaagacactgaggccctgtctaataatacagaggttgaacttggacttgggagatgactcctgyctctcgtactctctgtggctctgctttctgttattttactcataagcttgttttgtctccttgctgagaactgtcaaacatgaaatgtaatttcaggcta

SEQ ID NO: 554415 - DNA, 201 bp, Homo sapiens
actgtgacttttcatgatgagtagaagataggttttactcatgctacaatcaatattaattccttgcagttcaaagacactgaggccctgtctaataatayagaggttgaacttggacttgggagatgactcctgtctctcgtactctctgtggctctgctttctgttattttactcataagcttgttttgtctccttgct

SEQ ID NO: 554416 - DNA, 201 bp, Homo sapiens
tttaaacaaaacgactgtgacttttcatgatgagtagaagataggttttactcatgctacaatcaatattaattccttgcagttcaaagacactgaggccytgtctaataatacagaggttgaacttggacttgggagatgactcctgtctctcgtactctctgtggctctgctttctgttattttactcataagcttgtt

SEQ ID NO: 554417 - DNA, 201 bp, Homo sapiens
ttcctgattcctcgtttcaccaaacagtaggtgtgtaaccttcttatttgtttctgcctatagtaattctggagtctttaaacaaaacgactgtgactttycatgatgagtagaagataggttttactcatgctacaatcaatattaattccttgcagttcaaagacactgaggccctgtctaataatacagaggttgaac

SEQ ID NO: 554418 - DNA, 201 bp, Homo sapiens
gaacttaagcattcctcccacttcggtctcccaaagtgctgggattacaggtgcgagccatcgttcttggcctgcaagttatgacttcctttcagagtctwtctatctgtagtacagtcctcctgtgcaagattgttttttgactgctttttcttgacaaatcttgctaaaggtctgtgaattttataatgtatttttaaa

SEQ ID NO: 554419 - DNA, 201 bp, Homo sapiens
tttgttttatgacccagaatatgatctctcaccaccgccatccagataattcttcaggttttgacgtttcccaacctgtctgctggttacttttcagagtwcttggatcattgctatttatattttgtccagagtttcaaattgtgatcagtggaaatgacaggccgtagcatacatacgccatcctggccagcatcacag

SEQ ID NO: 554420 - DNA, 201 bp, Homo sapiens
tggggatgttctagaaatgttctagattcctagtttaattctgtcgtcagagaaaataattcactgaattttaattgtttaacttcagggtttgttttatsacccagaatatgatctctcaccaccgccatccagataattcttcaggttttgacgtttcccaacctgtctgctggttacttttcagagtacttggatcat

SEQ ID NO: 554421 - DNA, 201 bp, Homo sapiens
atcaacaaacacacagcacgtgtgtggccctggcacctgattcagatccttcccactaaggtcaacaatacccaggctcttggaggcagccactcctcatygattatttgcacatgagataaacctgtttgttttaccatattgaaggactaacagaagcacaaactgtaactcaagtgcttttccagtgaagagtgaaat

SEQ ID NO: 554422 - DNA, 201 bp, Homo sapiens
taatgcattaacttctgtagggttgcttgaatgtccttgcagtatggtagctactttcacccagggtgagcaaggtggaagctgccatgtgttttataatstagcctaggaaatttgaactatctttttgataacacaggtcagccacatttaatatgagagagaactacacaaggcctggatagcggaagtgaaaatcac

SEQ ID NO: 554423 - DNA, 201 bp, Homo sapiens
gagaaatgctttagctgggtggttctgtcttggtcaatatgttgattaggcctgcagtcatccgaaggcttgactgaggctagggcatccaatttcaagayggctcacttaacatggctagcaagtcaatgctgtctgttagcaggagacctctgtaatgtaatgcattaacttctgtagggttgcttgaatgtccttgca

SEQ ID NO: 554424 - DNA, 201 bp, Homo sapiens
gcatcactgcctgcagccaggaagccttctcaacctcaggggggctgtactgggtggtgaggatcaggtgtcctcctcctcctagctggggcaggctcttsgctctgtgggctggctgcagctcccttatgctattgtgttatatatttataatatccaaagcagattctcctaaggaggcagatcatgctaaacaaagaa

SEQ ID NO: 554425 - DNA, 201 bp, Homo sapiens
attttacttttgtaattgtattctcttgggaatgctcattcctgattcctcgtttcaccaaacagtaggtgtgtaaccttcttatttgtttctgcctatartaattctggagtctttaaacaaaacgactgtgacttttcatgatgagtagaagataggttttactcatgctacaatcaatattaattccttgcagttcaa

SEQ ID NO: 554426 - DNA, 201 bp, Homo sapiens
agatgattttacttttgtaattgtattctcttgggaatgctcattcctgattcctcgtttcaccaaacagtaggtgtgtaaccttcttatttgtttctgcytatagtaattctggagtctttaaacaaaacgactgtgacttttcatgatgagtagaagataggttttactcatgctacaatcaatattaattccttgcag

SEQ ID NO: 554427 - DNA, 201 bp, Homo sapiens
tagatgattttacttttgtaattgtattctcttgggaatgctcattcctgattcctcgtttcaccaaacagtaggtgtgtaaccttcttatttgtttctgmctatagtaattctggagtctttaaacaaaacgactgtgacttttcatgatgagtagaagataggttttactcatgctacaatcaatattaattccttgca

SEQ ID NO: 554428 - DNA, 201 bp, Homo sapiens
aagcagcccaaaaactctagatgattttacttttgtaattgtattctcttgggaatgctcattcctgattcctcgtttcaccaaacagtaggtgtgtaacyttcttatttgtttctgcctatagtaattctggagtctttaaacaaaacgactgtgacttttcatgatgagtagaagataggttttactcatgctacaatc

SEQ ID NO: 554429 - DNA, 201 bp, Homo sapiens
ttctaagcagcccaaaaactctagatgattttacttttgtaattgtattctcttgggaatgctcattcctgattcctcgtttcaccaaacagtaggtgtgkaaccttcttatttgtttctgcctatagtaattctggagtctttaaacaaaacgactgtgacttttcatgatgagtagaagataggttttactcatgctac

SEQ ID NO: 554430 - DNA, 201 bp, Homo sapiens
tggcacttctttctgggctttctaagcagcccaaaaactctagatgattttacttttgtaattgtattctcttgggaatgctcattcctgattcctcgttwcaccaaacagtaggtgtgtaaccttcttatttgtttctgcctatagtaattctggagtctttaaacaaaacgactgtgacttttcatgatgagtagaaga

SEQ ID NO: 554431 - DNA, 201 bp, Homo sapiens
acagtcctgcagtgaacattcacatgcatgtgtgtttatggtagaatggtttatattcctctgggtatatacccagtaatgggattcctgggtcaaatagyagttctggttttagctctttgtggaattgccatactgctttccacaatcgttgaacaaatttatcccaccaacagtgtataaaggttccctttgtgacct

SEQ ID NO: 554432 - DNA, 201 bp, Homo sapiens
agctgaccatgataccctcaagtgagtttttccactgaatttgattattttctcatttggcacttctttctgggctttctaagcagcccaaaaactctagrtgattttacttttgtaattgtattctcttgggaatgctcattcctgattcctcgtttcaccaaacagtaggtgtgtaaccttcttatttgtttctgccta

SEQ ID NO: 554433 - DNA, 201 bp, Homo sapiens
tcaaaggggtggaaacgcagctgaccatgataccctcaagtgagtttttccactgaatttgattattttctcatttggcacttctttctgggctttctaakcagcccaaaaactctagatgattttacttttgtaattgtattctcttgggaatgctcattcctgattcctcgtttcaccaaacagtaggtgtgtaacctt

SEQ ID NO: 554434 - DNA, 201 bp, Homo sapiens
tgcatcaaaggggtggaaacgcagctgaccatgataccctcaagtgagtttttccactgaatttgattattttctcatttggcacttctttctgggctttytaagcagcccaaaaactctagatgattttacttttgtaattgtattctcttgggaatgctcattcctgattcctcgtttcaccaaacagtaggtgtgtaa

SEQ ID NO: 554435 - DNA, 201 bp, Homo sapiens
accacacccggctaacttcttgtatttttagtagagatggggtttcaccgtgttagccaggatggtcttgatagaagtatcttattttttaaagtgaaggwtactttcagcctttgaacagtgtatggcacatgggaggcaggaagtgtctgttgaatgaaggattcctttgattgcagcataccaaggtttcttttattt

SEQ ID NO: 554436 - DNA, 201 bp, Homo sapiens
gaagtgcatcaaaggggtggaaacgcagctgaccatgataccctcaagtgagtttttccactgaatttgattattttctcatttggcacttctttctgggytttctaagcagcccaaaaactctagatgattttacttttgtaattgtattctcttgggaatgctcattcctgattcctcgtttcaccaaacagtaggtgt

SEQ ID NO: 554437 - DNA, 201 bp, Homo sapiens
cctgcctcagcctcccaagtagctggaactataggcgcccaccaccacacccggctaacttcttgtatttttagtagagatggggtttcaccgtgttagcmaggatggtcttgatagaagtatcttattttttaaagtgaaggttactttcagcctttgaacagtgtatggcacatgggaggcaggaagtgtctgttgaat

SEQ ID NO: 554438 - DNA, 201 bp, Homo sapiens
tcctgcctcagcctcccaagtagctggaactataggcgcccaccaccacacccggctaacttcttgtatttttagtagagatggggtttcaccgtgttagmcaggatggtcttgatagaagtatcttattttttaaagtgaaggttactttcagcctttgaacagtgtatggcacatgggaggcaggaagtgtctgttgaa

SEQ ID NO: 554439 - DNA, 201 bp, Homo sapiens
caatacagcaatagattttaaataacaatatcttaaatatcacttataaatttaaaaagtatttttccaaataactcataggttgagactaagccatcaaytccaagtttgaaaagaaaaatagcaatctgaaaagggaaaagaaaaaaagtatgaggagagtaggaaaaatgaaagaattaaaagtagacattgattaaa

SEQ ID NO: 554440 - DNA, 201 bp, Homo sapiens
catttttactggactattgtgggttctgagtgatcaaggtgacttatctagctacacttaagtttgtttcctttaggcttgtgaaaatcctagtttctaayggcacagacgtgaatctgaagaatggaagtggcaaggacaggtaggaggtgggatatgactgaaattgtgctgatgttctcagaattgtgttgctaggct

SEQ ID NO: 554441 - DNA, 201 bp, Homo sapiens
tttatattttaattaaatgccatttgaaaaaaacagaaatgcatcttcattacatgctaccatttaagaatacattaaaaatggccattcaaaggacagcraattattttggtagcccgatttgtttcatgtgctttcatttgattttaatgaataactcgtgtcaaaggtaaaagcccacatttctggaataaagaggtg

SEQ ID NO: 554442 - DNA, 201 bp, Homo sapiens
tggaattcaattttttttttttaagatgtagagagagggatattctggaaaactttctgctaggttgctaagttataattttcacagatacactctcattrtctgttccacacagagataagtattaatacgaatacctcattttcatttatattttaattaaatgccatttgaaaaaaacagaaatgcatcttcattaca

SEQ ID NO: 554443 - DNA, 201 bp, Homo sapiens
acagtggtgcaaactcattaacaagtaaacaactcacaccagtgctctgtgctcacagggctgggggcgttcttgggtatttttcttaagggaggctggargaagggaggaggcattcctttctcctagaggcaaaggccagttccttttgctgtgccccagacctttcctggttgttagaaactcttccaggccttttct

SEQ ID NO: 554444 - DNA, 201 bp, Homo sapiens
cctcgagtcagtcttttccgttctgtttccacacccttagttttctattacttttaggaatgacctttgttaactaagtcattaaaatccaataaacataractcttcagaccccacagctggatcatactcttggcagcaagcagaggaaggcaggggctaccactgttttacagaataatagtaagtcaatgatccaag

SEQ ID NO: 554445 - DNA, 201 bp, Homo sapiens
gcgttaggagtccgggggttcgcccgcggaggccggggagcagccgaccatggagccccagagtaagggaggcccgggctggagctgggaccggggcgggygaccgggctggggctccccgggaacgagtgtgggcgccccgcgcgcgactccgcaggtttcaacgctcggacacggaaatacggtttgcgtctcctcgcg

SEQ ID NO: 554446 - DNA, 201 bp, Homo sapiens
gtattctgacatacttggattctgtatagatggtgagtggtgtgtatgtacatgcatatgtgtttgtgtcattttgtcactttctatttatcctacttatrtttctttttttcctttcttgccttcttttcaattggtgggatattttttcttctctagtcattttaagttctagtctttgtttatattcttttagtaact

SEQ ID NO: 554447 - DNA, 201 bp, Homo sapiens
ctttgtggaatacacaggatttgaagtgcatcaaaggggtggaaacgcagctgaccatgataccctcaagtgagtttttccactgaatttgattattttcycatttggcacttctttctgggctttctaagcagcccaaaaactctagatgattttacttttgtaattgtattctcttgggaatgctcattcctgattcct

SEQ ID NO: 554448 - DNA, 201 bp, Homo sapiens
gtgaaccctagcctttagaaaggagcaagtctttgtggaatacacaggatttgaagtgcatcaaaggggtggaaacgcagctgaccatgataccctcaagkgagtttttccactgaatttgattattttctcatttggcacttctttctgggctttctaagcagcccaaaaactctagatgattttacttttgtaattgta

SEQ ID NO: 554449 - DNA, 201 bp, Homo sapiens
catgatcttggctcactgcaaactccgcctcctgggttcacgccattctcctgcctcagcctcctgagtagctgggactacaggtgcccgctaccacggcyggctaatttttttgtatttttagtagagacagggtttcaccatgttagccaggatggtctcgatctcgtgactttgtgattcgtccaccttggcctccga

SEQ ID NO: 554450 - DNA, 201 bp, Homo sapiens
ttgaacgtgaaccctagcctttagaaaggagcaagtctttgtggaatacacaggatttgaagtgcatcaaaggggtggaaacgcagctgaccatgataccytcaagtgagtttttccactgaatttgattattttctcatttggcacttctttctgggctttctaagcagcccaaaaactctagatgattttacttttgta

SEQ ID NO: 554451 - DNA, 201 bp, Homo sapiens
gttgaacgtgaaccctagcctttagaaaggagcaagtctttgtggaatacacaggatttgaagtgcatcaaaggggtggaaacgcagctgaccatgatacyctcaagtgagtttttccactgaatttgattattttctcatttggcacttctttctgggctttctaagcagcccaaaaactctagatgattttacttttgt

SEQ ID NO: 554452 - DNA, 201 bp, Homo sapiens
attctgttgaacgtgaaccctagcctttagaaaggagcaagtctttgtggaatacacaggatttgaagtgcatcaaaggggtggaaacgcagctgaccatsataccctcaagtgagtttttccactgaatttgattattttctcatttggcacttctttctgggctttctaagcagcccaaaaactctagatgattttact

SEQ ID NO: 554453 - DNA, 201 bp, Homo sapiens
gaatgagggaaagactcatttctttgaataaggcagaatactaaagactagccagccctgaggctcatggtggttgctgttattctgttgaacgtgaaccmtagcctttagaaaggagcaagtctttgtggaatacacaggatttgaagtgcatcaaaggggtggaaacgcagctgaccatgataccctcaagtgagtttt

SEQ ID NO: 554454 - DNA, 201 bp, Homo sapiens
tttatgaatgagggaaagactcatttctttgaataaggcagaatactaaagactagccagccctgaggctcatggtggttgctgttattctgttgaacgtsaaccctagcctttagaaaggagcaagtctttgtggaatacacaggatttgaagtgcatcaaaggggtggaaacgcagctgaccatgataccctcaagtga

SEQ ID NO: 554455 - DNA, 201 bp, Homo sapiens
ttggggatttaactttttattttattcaaaggctctggtcaggataaggatgggaggaaaaagggccatggaggaaccgtttcttttctatctcccaaacygtaccatatgatggcttagaaattcaactattgtaatcataaagttacacaacatgcaggagagaatgtaaatcatgtgttgaggaagagaggtagccat

SEQ ID NO: 554456 - DNA, 201 bp, Homo sapiens
atggacctgggagatctttatgaatgagggaaagactcatttctttgaataaggcagaatactaaagactagccagccctgaggctcatggtggttgctgytattctgttgaacgtgaaccctagcctttagaaaggagcaagtctttgtggaatacacaggatttgaagtgcatcaaaggggtggaaacgcagctgacca

SEQ ID NO: 554457 - DNA, 201 bp, Homo sapiens
ccacaaagaaattggaattttcagtaaaatgagtcattttacccacctaagccctgtgagaaccaccggctttgactctgcagtagctgtactgagcatgyttatctcttttctctgcttttcccaagccgtgttaaggttgatgttcccaataagtttggctttaccgctctgatggttgctgcccagaaaggatacacc

SEQ ID NO: 554458 - DNA, 201 bp, Homo sapiens
tcctttttttgtaatggacctgggagatctttatgaatgagggaaagactcatttctttgaataaggcagaatactaaagactagccagccctgaggctcmtggtggttgctgttattctgttgaacgtgaaccctagcctttagaaaggagcaagtctttgtggaatacacaggatttgaagtgcatcaaaggggtggaa

SEQ ID NO: 554459 - DNA, 201 bp, Homo sapiens
ccgaaagggctgctctctacccagtaggtgagatgggaggcaaggataaagcttgagtctccaccaatacagactcatgttcggtagagctgagagtcagyagtgaagacactgtcctcagctatcttaaagagctgtgttcactggagagtgctttatccgatggcctcatggctttgagccgaagcatgtatattttaa

SEQ ID NO: 554460 - DNA, 201 bp, Homo sapiens
attttgttttcctaaaaattcccatggctttgaaactgcctccaaaatggatctcaggtgactggtgtgagttaataaaccacagttaataaagatgctcrtgaagccccatgtaaatgttatattttgtgattgtgtaatagaaattgtaaaaggaattacaaggctgggtgtcatattttcttcccagaaataatttct

SEQ ID NO: 554461 - DNA, 201 bp, Homo sapiens
ctgctgctcctttttttgtaatggacctgggagatctttatgaatgagggaaagactcatttctttgaataaggcagaatactaaagactagccagccctsaggctcatggtggttgctgttattctgttgaacgtgaaccctagcctttagaaaggagcaagtctttgtggaatacacaggatttgaagtgcatcaaagg

SEQ ID NO: 554462 - DNA, 201 bp, Homo sapiens
tttagaccagggattataaactcaaactcttgccgtttgcggatgaggggctgggcgtacagttggagtatgtaagaagtggtggggctgtatccactgaygatggtagctgctgtactgtcacccccaacaacaggttgtgtgctgggtacttacgatgtgtcaggtgctattcgaagtgcttcattggtgttatttcat

SEQ ID NO: 554463 - DNA, 201 bp, Homo sapiens
acttggcatgtacattacttaggtttgttgaatgaataaatgagacctttgaggtttttttagaccagggattataaactcaaactcttgccgtttgcggrtgaggggctgggcgtacagttggagtatgtaagaagtggtggggctgtatccactgacgatggtagctgctgtactgtcacccccaacaacaggttgtgt

SEQ ID NO: 554464 - DNA, 201 bp, Homo sapiens
tgccaggtgctgtgctttggcacatgggtgaaacactgagcaaaatgccaggccctggcttcaggggctgtggtcacaacacacacagaaccagggcttgrgcactgtagatgacatcgacagacagctgccaaacaccttctgggggaggccttgaagaaaaccccaactaacttctcaaatcagaaggcctatcttcta

SEQ ID NO: 554465 - DNA, 201 bp, Homo sapiens
tgtaagtgagcatgggaactaatggttagctcttttcatgctaaccccctagagcctagcacaggacttggcatgtacattacttaggtttgttgaatgartaaatgagacctttgaggtttttttagaccagggattataaactcaaactcttgccgtttgcggatgaggggctgggcgtacagttggagtatgtaagaa

SEQ ID NO: 554466 - DNA, 201 bp, Homo sapiens
catcccagagagattttctaccataaggagcaggaagagggaggccagctgatctttctgggccggaccataagagggagggtgggtgagccccaggaggyggcgtagggtgcagtgggggaggatggggtaagagggagggtgggtgagccccaggaggcagtgtagggtgcagtgggggaggatggggtaggagtggat

SEQ ID NO: 554467 - DNA, 201 bp, Homo sapiens
ccttattaatctagcccagggttctcaactttggtactactgatatttggggactggatggttccttgtggtgtcctgtgcacttatggattcttagcagsttccttggcctctatcctctagatgccagtgctccatccccttcgttgtggcaatcaaaaatgtcaccagacattgccaaatgtcctctggggtataaaa

SEQ ID NO: 554468 - DNA, 201 bp, Homo sapiens
ccaaatgacttgtttttatgtttgagtggcaggtgaagtttcagattaggaaaaagtggggcctgttaatgggataacagagacttttataaacataccasttttcttctcctggttagcaacagaaggggaaacagtctatgggtttagttcatccatctaaagtatagatgagacgcatcatgattttaagtccttatt

SEQ ID NO: 554469 - DNA, 201 bp, Homo sapiens
tgcagaggaagcgctgtgcctgcaggccatgcaaagccacagtggtcttttggggttgcaggggggctgctgggaccctgcatgtgccaggctcatgcccyctgctgtgtgtgccctggagggagaagctcatgcacaccaccctgggttttgttttctaggtggctgtgttaaataatcatgaagagttagttcagttac

SEQ ID NO: 554470 - DNA, 201 bp, Homo sapiens
  misc_feature (1)...(201): n = A,T,C or G
gttgacttagcagccttcacaaaactggttggaatttccactgggattaaattgataggtcatttttgggagacctttgcaatattgaactttccaatccntgaacttatctgcccatgtattatgtttgtttttggtagattacaaaattatatgatcactccaaaaattaccttgccctttatagtaaaaccttccatt

SEQ ID NO: 554471 - DNA, 201 bp, Homo sapiens
  misc_feature (1)...(201): n = A,T,C or G
atcttgtctattcttggccattttagagttgacttagcagccttcacaaaactggttggaatttccactgggattaaattgataggtcatttttgggaganctttgcaatattgaactttccaatccgtgaacttatctgcccatgtattatgtttgtttttggtagattacaaaattatatgatcactccaaaaattacc

SEQ ID NO: 554472 - DNA, 201 bp, Homo sapiens
cataaacatttctgcttctctgtgacttatgggtagcattgatataaattgttaaaaataatgatcgtagatagataatgtatcagagtttgggctcagcbgctgtagctgctgttgacccagaggaaccactgggatcctcacatctcagggcagcacatcgtttgcagcaatggttggttctgtacaaccttttatgaa

SEQ ID NO: 554473 - DNA, 201 bp, Homo sapiens
tgattataatacattagctcttctagaagttagaagtgactttggattaagtctttcataaggtggctaaatgaatttatatggctcatcagaattcactwgattggttaagcaggaaatttacagagatttttttctttgctgtaaatgtttttctaaattgaaaaacttctaatactgtcttctggaatactagaaata

SEQ ID NO: 554474 - DNA, 201 bp, Homo sapiens
gtaatttcaggctatagtgaagaaggatgacataggccgaaaaaattggcaatcatttggcctgtacatgttgcttttattttttttctggacttaagatrtagaccaaaccttgacatttctggcctttgagtctttcacaactgtgattataatacattagctcttctagaagttagaagtgactttggattaagtctt

SEQ ID NO: 554475 - DNA, 201 bp, Homo sapiens
tgctacaatcaatattaattccttgcagttcaaagacactgaggccctgtctaataatacagaggttgaacttggacttgggagatgactcctgtctctcrtactctctgtggctctgctttctgttattttactcataagcttgttttgtctccttgctgagaactgtcaaacatgaaatgtaatttcaggctatagtga

SEQ ID NO: 554476 - DNA, 201 bp, Homo sapiens
caaacagtaggtgtgtaaccttcttatttgtttctgcctatagtaattctggagtctttaaacaaaacgactgtgacttttcatgatgagtagaagatagrttttactcatgctacaatcaatattaattccttgcagttcaaagacactgaggccctgtctaataatacagaggttgaacttggacttgggagatgactc

SEQ ID NO: 554477 - DNA, 201 bp, Homo sapiens
gctgaaaggcgttctgcctagcaaggatgcaggtgatttacacacgatctactcttgaagcttaaaccagtacttctatgatacattttttggggggggggcggtggtgggggtaaagggaggaaacaaccaggatgaggattgaatatatttgaaaggagattcaaagtgatgtttattgagcacttcactttggaaaag

SEQ ID NO: 554478 - DNA, 201 bp, Homo sapiens
agatggctgggactggttcagtctacatataattgaaaggtaaatcactaggaaagggaaggagtctctgggtttcaagatgaaatagaagtcatgagaaytctataaatttaaattcaagttcactgaagagagctaggagtcagctactgtttgctacagataatattcagtaaggagctaactgctaatgcattggcc

SEQ ID NO: 554479 - DNA, 201 bp, Homo sapiens
aagtgctgggattacaggtgtgagccactgtgcctggccccatcttatttttaaatgaagttttaataagatctcagttgtatgcttcatctcaagtgattattcagctccaaaacaaatcaagttccttccaagtacaaaagaatctatgttctaaggcagtggaaggaagcagggttggggaggatatatcatgttcaa

SEQ ID NO: 554480 - DNA, 201 bp, Homo sapiens
aactaaagatggctgggactggttcagtctacatataattgaaaggtaaatcactaggaaagggaaggagtctctgggtttcaagatgaaatagaagtcaygagaattctataaatttaaattcaagttcactgaagagagctaggagtcagctactgtttgctacagataatattcagtaaggagctaactgctaatgca

SEQ ID NO: 554481 - DNA, 201 bp, Homo sapiens
tccctctgtctcccttaagacctttgctgctgtggtgcccagcaggaaatacatacacacacacacacacacacacacacacacacacacacacacacacactgttcttacgtgcctgatatggtggactcattaaaggctggggtggcagctctgggggagttaatttgctttatccccatagggagaaagctcagtgta

SEQ ID NO: 554482 - DNA, 201 bp, Homo sapiens
ggttcaagctttcagtgaattatgatcatgccactgtactccaacctgggcgacagagtgagaccctgtcagaaaaaagaaaaaaaaagggtagtttggtkgttgccagaggctggggtagagaggaatgagggcttattgcttactgggtacagagtttcacttcgggatgatgaaaatgttctggagatggatggtggt

SEQ ID NO: 554483 - DNA, 201 bp, Homo sapiens
ctccctctgtctcccttaagacctttgctgctgtggtgcccagcaggaaatacatacacacacacacacacacacacacacacacacacacacacacacacactgttcttacgtgcctgatatggtggactcattaaaggctggggtggcagctctgggggagttaatttgctttatccccatagggagaaagctcagtgt

SEQ ID NO: 554484 - DNA, 201 bp, Homo sapiens
ttttctcttgttaatctgtcttttggtacaagagccccagccaagaaattagaagggtggaggaaaaatatttttcctcccttacatatgattccacttayatgagatacctagatcagtaaaattcacagaaacaaagtagaatggtagtcaggctcagtggctcattcctgtaatcccaacatcttggaaggataaggc

SEQ ID NO: 554485 - DNA, 201 bp, Homo sapiens
tctccctctgtctcccttaagacctttgctgctgtggtgcccagcaggaaatacatacacacacacacacacacacacacacacacacacacacacacacacactgttcttacgtgcctgatatggtggactcattaaaggctggggtggcagctctgggggagttaatttgctttatccccatagggagaaagctcagtg

SEQ ID NO: 554486 - DNA, 201 bp, Homo sapiens
aaaacttatattaagtaaatgtgtatgcttttctcttgttaatctgtcttttggtacaagagccccagccaagaaattagaagggtggaggaaaaatattkttcctcccttacatatgattccacttatatgagatacctagatcagtaaaattcacagaaacaaagtagaatggtagtcaggctcagtggctcattcctg

SEQ ID NO: 554487 - DNA, 201 bp, Homo sapiens
gtctccctctgtctcccttaagacctttgctgctgtggtgcccagcaggaaatacatacacacacacacacacacacacacacacacacacacacacacacacactgttcttacgtgcctgatatggtggactcattaaaggctggggtggcagctctgggggagttaatttgctttatccccatagggagaaagctcagt

SEQ ID NO: 554488 - DNA, 201 bp, Homo sapiens
tctttatttccttacaaaggttcctagttagatcaagttacttccagaaaagtcaatttcttctgtgtcatataaaacttatattaagtaaatgtgtatgmttttctcttgttaatctgtcttttggtacaagagccccagccaagaaattagaagggtggaggaaaaatatttttcctcccttacatatgattccactta

SEQ ID NO: 554489 - DNA, 201 bp, Homo sapiens
tgtctccctctgtctcccttaagacctttgctgctgtggtgcccagcaggaaatacatacacacacacacacacacacacacacacacacacacacacacmcacactgttcttacgtgcctgatatggtggactcattaaaggctggggtggcagctctgggggagttaatttgctttatccccatagggagaaagctcag

SEQ ID NO: 554490 - DNA, 201 bp, Homo sapiens
tgaatcatgaataaaagccaattaaatctataaatttgttgtagtcctctgataatataaaacctaatttgtaatttagtcttttgacgaacctaatatamaaagacataggtttaactgtttcttcaggtctttatttccttacaaaggttcctagttagatcaagttacttccagaaaagtcaatttcttctgtgtcat

SEQ ID NO: 554491 - DNA, 201 bp, Homo sapiens
gctttatatgttgttataggtgatttatccaaatgacttgtttttatgtttgagtggcaggtgaagtttcagattaggaaaaagtggggcctgttaatggrataacagagacttttataaacataccacttttcttctcctggttagcaacagaaggggaaacagtctatgggtttagttcatccatctaaagtatagatg

SEQ ID NO: 554492 - DNA, 201 bp, Homo sapiens
ctctcctgtggaatggtaccttgttgttgttctgtgagttgtttgtctccctctgtctcccttaagacctttgctgctgtggtgcccagcaggaaatacayacacacacacacacacacacacacacacacacacacacacacacacactgttcttacgtgcctgatatggtggactcattaaaggctggggtggcagctc

SEQ ID NO: 554493 - DNA, 201 bp, Homo sapiens
ccagtgggagctctcattctgttttgtagagtggaaggtgcccagattcatgaatcatgaataaaagccaattaaatctataaatttgttgtagtcctctsataatataaaacctaatttgtaatttagtcttttgacgaacctaatatataaagacataggtttaactgtttcttcaggtctttatttccttacaaaggt

SEQ ID NO: 554494 - DNA, 201 bp, Homo sapiens
tgatgttaaccaatcaggtttttctattctgtttccttgttgctacctcataaaacctgtggttctgctattgcccagtgggagctctcattctgttttgyagagtggaaggtgcccagattcatgaatcatgaataaaagccaattaaatctataaatttgttgtagtcctctgataatataaaacctaatttgtaattt

SEQ ID NO: 554495 - DNA, 201 bp, Homo sapiens
gtggtagccagcacaggcccagtgatgctgctggaagcatcagcgtcacagtctcagtggcttatggcagcagtgattccctcctacacaccatgcccacygtgggtcggccagggctccatcctgcattgtcctcctgccacagcccaggccatgcggcagcctctgcgtgaacattgtcagtcactgtagcaggggaga

SEQ ID NO: 554496 - DNA, 201 bp, Homo sapiens
aacatgagcgatggcttcctcaagaccactctgccctgctctgcccttctcctcggtgcccctgctcacctggccctgactggtgagtccatccggctcasgtgagcatgggctaacatcctcaccatgggcagaatcagtttgataattgtaattgcaacactcagggtaaaacactagaaaaacccgcagagcaatggc

SEQ ID NO: 554497 - DNA, 201 bp, Homo sapiens
cgatgtctgagacagagtggcccaccctcctggtttgtatacctctgcttgcctctctcctgtggaatggtaccttgttgttgttctgtgagttgtttgtytccctctgtctcccttaagacctttgctgctgtggtgcccagcaggaaatacatacacacacacacacacacacacacacacacacacacacacacacac

SEQ ID NO: 554498 - DNA, 201 bp, Homo sapiens
tcccctctgctttaactattacaaaaaagtaaccgaagtagcttgatgttaaccaatcaggtttttctattctgtttccttgttgctacctcataaaacckgtggttctgctattgcccagtgggagctctcattctgttttgtagagtggaaggtgcccagattcatgaatcatgaataaaagccaattaaatctataaa

SEQ ID NO: 554499 - DNA, 201 bp, Homo sapiens
cttagagaacatgagcgatggcttcctcaagaccactctgccctgctctgcccttctcctcggtgcccctgctcacctggccctgactggtgagtccatcyggctcaggtgagcatgggctaacatcctcaccatgggcagaatcagtttgataattgtaattgcaacactcagggtaaaacactagaaaaacccgcagag

SEQ ID NO: 554500 - DNA, 201 bp, Homo sapiens
agggatttagaactagaaataccatttgacccagccatcccattactgggtatatacccaaatgactataaatcatgctgctataaagacacatgcacacrtatgtttattgcggcattattcacaattgcaaagacttggaaccaacccaaatgtccaacaatgatagactggattaagaaaatgtggcacatatacacc

SEQ ID NO: 554501 - DNA, 201 bp, Homo sapiens
aatatctgcaggtacatctgcaactaaatgaccctcttagagaacatgagcgatggcttcctcaagaccactctgccctgctctgcccttctcctcggtgyccctgctcacctggccctgactggtgagtccatccggctcaggtgagcatgggctaacatcctcaccatgggcagaatcagtttgataattgtaattgca

SEQ ID NO: 554502 - DNA, 201 bp, Homo sapiens
atgcttctgtgtggtggtaatttgcattcagtttgagagtgttttaatgagtcacagaggcatgcactttgtttgaataaagaatgaacagcctttttttyccccccaggtaaagtacacagattcttgcttaaatgaggcttacaattttaatcagttgggcccttataaagaaagaaaaacagctgctacttgttaatt

SEQ ID NO: 554503 - DNA, 201 bp, Homo sapiens
tggttaggcaaggcagcatggatgggtattggaatctgtcaatctgggttgctgtataccagctctgggactgggggcaagttgtagcagccctgagcctsctgcttcacctgtatcaggggaggctgagacccaccttgcaggggtcttgtgaagattaaatgcagtgctgtgtgaatggtgcctaccttcgtgcccggc

SEQ ID NO: 554504 - DNA, 201 bp, Homo sapiens
gttctcacactgctaataaagacatacctgaggctgggtaatttattataaaggaaagaagtttaatggactcacagttccacatggctggggaggcctcrcaaccatggtggaaggcaaagaaggagtaaaggcatgtcttccacggcggcaggcaagagagagcatgtgcaggggaatttccctttataaaaccatcag

SEQ ID NO: 554505 - DNA, 201 bp, Homo sapiens
gcagcccaaaaactctagatgattttacttttgtaattgtattctcttgggaatgctcattcctgattcctcgtttcaccaaacagtaggtgtgtaacctkcttatttgtttctgcctatagtaattctggagtctttaaacaaaacgactgtgacttttcatgatgagtagaagataggttttactcatgctacaatcaa

SEQ ID NO: 554506 - DNA, 201 bp, Homo sapiens
agcagatagatccccaaacagaccagtttttcctgaaaacatgagattccagtctacttgaatcagcggaagaaggaagtcccctctgctttaactattamaaaaaagtaaccgaagtagcttgatgttaaccaatcaggtttttctattctgtttccttgttgctacctcataaaacctgtggttctgctattgcccagt

SEQ ID NO: 554507 - DNA, 201 bp, Homo sapiens
gctaccatacagctgcagaggaagcgctgtgcctgcaggccatgcaaagccacagtggtcttttggggttgcaggggggctgctgggaccctgcatgtgcyaggctcatgccccctgctgtgtgtgccctggagggagaagctcatgcacaccaccctgggttttgttttctaggtggctgtgttaaataatcatgaagag

SEQ ID NO: 554508 - DNA, 201 bp, Homo sapiens
atccttctctctgaagataacgctgaatcgaatctgaatgatacgtcctgctgttcctcccagtttactacgcttagctcctacccctttttgtcctctcrcaattttctgcttctctccacttttcatcaaactgttaaaaattatgggaggccattcttttgggctgagctcctgcactagccctcaacagatcagacc

SEQ ID NO: 554509 - DNA, 201 bp, Homo sapiens
cgtgtcaaaggtaaaagcccacatttctggaataaagaggtggttttctggtttaatggtgcctggttttaaaaccagctggcttctgaaggtgcagaagmaactgttgaaagatacatcttggatgctgtgttactcatttttactggactattgtgggttctgagtgatcaaggtgacttatctagctacacttaagtt

SEQ ID NO: 554510 - DNA, 201 bp, Homo sapiens
gcaggtcacaaggcccttgggtgagaggtgccctctctgtccctggaggaaggaacatccttctctctgaagataacgctgaatcgaatctgaatgatacktcctgctgttcctcccagtttactacgcttagctcctacccctttttgtcctctcacaattttctgcttctctccacttttcatcaaactgttaaaaatt

SEQ ID NO: 554511 - DNA, 201 bp, Homo sapiens
gtagagacagggttttgccatgttgcccaggctggtctcaaactcctgaacttaagcattcctcccacttcggtctcccaaagtgctgggattacaggtgygagccatcgttcttggcctgcaagttatgacttcctttcagagtctttctatctgtagtacagtcctcctgtgcaagattgttttttgactgctttttct

SEQ ID NO: 554512 - DNA, 201 bp, Homo sapiens
gacaggaagaacactctgaccttcccaccctcttctctgacgcaggtcacaaggcccttgggtgagaggtgccctctctgtccctggaggaaggaacatcyttctctctgaagataacgctgaatcgaatctgaatgatacgtcctgctgttcctcccagtttactacgcttagctcctacccctttttgtcctctcacaa

SEQ ID NO: 554513 - DNA, 201 bp, Homo sapiens
aataaaccagtcaccaaagaacaagtattttatgtgatcagcttcttgataatctccaaaatagccaccttagcatattgaatgtttgaagctgaaggaawctcagaaatgacaggaagaacactctgaccttcccaccctcttctctgacgcaggtcacaaggcccttgggtgagaggtgccctctctgtccctggagga

SEQ ID NO: 554514 - DNA, 201 bp, Homo sapiens
gatcagggaccccatctgccttctctgtgggcgtaggataaattcttttgattatgtctatttgatataaaaaaatctgtagttaaaatataccatttgcrttatccataatagccaaagggtggaagcaagccaagtgtctatctgcaaatgaataaacaaaatatggtatatatatacactatatgcagtagaatacta

SEQ ID NO: 554515 - DNA, 201 bp, Homo sapiens
cataggtttatgaagaaggcattttaaaaagagaacccctgtaatcgatcagggaccccatctgccttctctgtgggcgtaggataaattcttttgattaygtctatttgatataaaaaaatctgtagttaaaatataccatttgcattatccataatagccaaagggtggaagcaagccaagtgtctatctgcaaatgaa

SEQ ID NO: 554516 - DNA, 201 bp, Homo sapiens
caaactgcaggttgctgtctatattaacttgacagtttgtaataactgcttgagattagcagtttgtctgtttcttcagtttagttaattgtcatatgtarctcctctgtgtaatatgagaaagtaatgagaattttttttttttcttttcagacggagtcttgctctgtcaccaggctggagtgcagtagtggtgcaatc

SEQ ID NO: 554517 - DNA, 201 bp, Homo sapiens
tgtgatctaaacaatgtgtagtgtttccactgaagcacagatgttttccctgtgatttgtagtgattggcattttcaaactgcaggttgctgtctatattmacttgacagtttgtaataactgcttgagattagcagtttgtctgtttcttcagtttagttaattgtcatatgtagctcctctgtgtaatatgagaaagta

SEQ ID NO: 554518 - DNA, 201 bp, Homo sapiens
aaggagtgtgatctaaacaatgtgtagtgtttccactgaagcacagatgttttccctgtgatttgtagtgattggcattttcaaactgcaggttgctgtcyatattaacttgacagtttgtaataactgcttgagattagcagtttgtctgtttcttcagtttagttaattgtcatatgtagctcctctgtgtaatatgag

SEQ ID NO: 554519 - DNA, 201 bp, Homo sapiens
gcatggtactggtaccaaaagagagatatagatcaatggaacagaacagagccctcagaaataacgccgcatatctacaactatctgatctttgacaaacstgagaaaaacaagcaatggggaaaggattccctatttaataaatggtgctgggaaaactggctagccatatgtagaaagctgaaactggatcccttcctt

SEQ ID NO: 554520 - DNA, 201 bp, Homo sapiens
aagggatgtgaaggacctcttcaaggagaactacaaaccactgctcaaggaaataaaagaggatacaaacaaatggaagaacattccacgctcatgggtargaagaatcaatatcgtgaaaatggccatactgcccaaggtaatttacagattcaatgccatccccatcaagctaccaatgactttcttcacagaattgga

SEQ ID NO: 554521 - DNA, 201 bp, Homo sapiens
aatccaacttacaagggatgtgaaggacctcttcaaggagaactacaaaccactgctcaaggaaataaaagaggatacaaacaaatggaagaacattccaygctcatgggtaagaagaatcaatatcgtgaaaatggccatactgcccaaggtaatttacagattcaatgccatccccatcaagctaccaatgactttctt

SEQ ID NO: 554522 - DNA, 201 bp, Homo sapiens
caatatcatactgaatgggcaaaaactggaagcattccctttgaaaactggcacaacacagggatgccctctctcaccactcctattcaacatagtgttgkaagttctggccagggcaattaggcaggagaaggaaataaagggtattcaattaggaaaagaggaagtcaaattgtccctgtttgcagacaacatgattgt

SEQ ID NO: 554523 - DNA, 201 bp, Homo sapiens
ctctttagctgcgttttcccctgcaggatgtaggctttatttctgtctagctcatttgtggatccccagctcctacacctgcccagtgtattttctgatgsaaggagttgactttattccttttttttttttctcatcattctatcttgctgggctaatttccattttaatctttcttttgtcacattgtctttggtgggt

SEQ ID NO: 554524 - DNA, 201 bp, Homo sapiens
tcttgttaaaaaaaatttaataagaacaaaacaactggggggaggagccaagatggccgaataggaacagctccggtctacagctcccagtgtgagcgacrcagaagacgggtgatttctgcatttccatctgaggtaccgggtttgtctcactagggagtgccagacagtgggcgcaggccagtgggtgcgcgcaccgtg

SEQ ID NO: 554525 - DNA, 201 bp, Homo sapiens
tcctccattgcttaaaggataaaggccaaattccttagactaacatttaatgtctttcacagtttccctacacctgcctttcttgttgcctcttatttctyagcacaaaccctccagtcagatttcttactgtcctttgaatatgccttgacgttttctgcatgtgtgttcagttgttttccctgtttggacagattttcc

SEQ ID NO: 554526 - DNA, 201 bp, Homo sapiens
ctaacatcatgctttaaggtagcagaacctagaagcattcttattaaagacagggtcaataaaataaataatttctactgtcattattattattattattwtttttttttttgagacagagtctcgctctgttgcccaggctggagtgaagtgtcatgatctcggctcactgcaacctccacctcttaatcttaatccatt

SEQ ID NO: 554527 - DNA, 201 bp, Homo sapiens
caaattccttagactaacatttaatgtctttcacagtttccctacacctgcctttcttgttgcctcttatttctcagcacaaaccctccagtcagatttcytactgtcctttgaatatgccttgacgttttctgcatgtgtgttcagttgttttccctgtttggacagattttcccctctcaccctattctttcttctgcc

SEQ ID NO: 554528 - DNA, 201 bp, Homo sapiens
gcttcagccaggagttcaaggctacagtgagctatggtggcaccactgcactctccagcctgggcaacagagcaggaccctttctttaaaaaaagaagatycttgatggatggatgggtaatgaattaaagaccagtggcagaattaagagtatgaaaagaaacactgattttctcaggttgcatttatgtttgttggaag

SEQ ID NO: 554529 - DNA, 201 bp, Homo sapiens
aggctgcctgcctgagcgtccttgggcaagcagctccattcagtgtcatatccattttagacaaccccagggtgtgcgtcttaactcgccacacaaacccrattcctggggtcacggtgagtgagggtgaacgaacagtgctgctgcatccacggagaatcctgtgagggagagccccacatggagacctctgagcccttc

SEQ ID NO: 554530 - DNA, 201 bp, Homo sapiens
cagaaaaatgcacatatcataagtttatggcttgctgaattttcacaaagtgaacccactggagcgagatgctgtctcaaaaaaaaaaaaaaaaaaaaaaattgccacaaccccagaagtacctcctcttcttcctttccggattcaatctccatgcttgccaaggaaaccacagccctgacttctaacaccatgggttag

SEQ ID NO: 554531 - DNA, 201 bp, Homo sapiens
ctctctagatcaatggagatgacaagcaatttagaaaaaatattctgcctctcgtttggccttaccagaagcagaaatgatacaatttttaaacactgcartaatatttgctagttgggccttgccataacttgtaatgtcagggaagtctaattatgctttcacaaactgggagagctatttttgtgccagaactgtcct

SEQ ID NO: 554532 - DNA, 201 bp, Homo sapiens
tgtgatcgttgctgcccatgccacgcattccatttattccatcagcgtgtattattgagtgtctgccgtgtgtcagacactgctccggatgctggggatayggcactgggaaaaaattcctccctcatgatgatgaaggcaaacaataaataagatacataagtaaaaataggtagtcagcaggcaatacatactgagggg

SEQ ID NO: 554533 - DNA, 201 bp, Homo sapiens
acagaaaaatgcacatatcataagtttatggcttgctgaattttcacaaagtgaacccactggagcgagatgctgtctcaaaaaaaaaaaaaaaaaaaaaaattgccacaaccccagaagtacctcctcttcttcctttccggattcaatctccatgcttgccaaggaaaccacagccctgacttctaacaccatgggtta

SEQ ID NO: 554534 - DNA, 201 bp, Homo sapiens
acacacacacacacacacaccctctcaaaaaccaaggctttgagtagaagaaaagaaaaatttagagataagatttgaaaagggatacatggagtttagtyggataagaagaaagaatgttggcagaaaagagaaatgggtaacatggaggttttgggtaatactgggaaatatatacagctctgtcaacttttggagacc

SEQ ID NO: 554535 - DNA, 201 bp, Homo sapiens
catgaggtatgtcccttgtgtaccatgtttgctgagagttttaatcataaagtgatgctggattttgtcgaatgcattttctgcatctattgagatcatgycatttttttttaaattttgtttgtgtggtgtaccacatttattgacttgcatatgttaaaccatccctgcatccctggtatgaaatccatttgatcatgg

SEQ ID NO: 554536 - DNA, 201 bp, Homo sapiens
ccagcctggtgacagagcgagactccatctcgaaaaaacaaaaaaaagaactttatttcttcagatttatgttactgttttcatgtgtaaactataatttsaagttcttcagtgctgtctttatccattcattcatttatagtgcctgttatgttgcagctctgttctagggattgaggattgaacaacggatcggacagt

SEQ ID NO: 554537 - DNA, 201 bp, Homo sapiens
tcagccgcaggcaaccgctcacctgctagttctgtcttgcagatgtgcctgttctggacatttcgtataaatggaatcagacaatatgtggcctttcatgkctggcatctttcagcacagtgtttcgaggttcatgcatgtttgtagcacttcatttctaatattccattgtatggatataccacattttgtacatcagtt

SEQ ID NO: 554538 - DNA, 201 bp, Homo sapiens
gcgagactccatctcgaaaaaacaaaaaaaagaactttatttcttcagatttatgttactgttttcatgtgtaaactataatttcaagttcttcagtgctktctttatccattcattcatttatagtgcctgttatgttgcagctctgttctagggattgaggattgaacaacggatcggacagtgttagttttggtcatc

SEQ ID NO: 554539 - DNA, 201 bp, Homo sapiens
tgttaaccacgcacatatcgttaagaatctgaaatgctgctccatggggtctggcagaagcagggcctttgattagctaaccttagaaatgctggagaaarttttctgacttagcaagaaagcccctgaaaccttagaatggacatgagagtgagctttccgattgtcatgggggtttatcttgtgtagggaaaagaaaca

SEQ ID NO: 554540 - DNA, 201 bp, Homo sapiens
aggaattcttatattatggaccaaagttatttggtcatattctacccagtattctctgaatgattatttgaataaagatgattaattttgctatagtgcartttatcagtattttcctttatggataacgtttttggttgcaggggagttttgaactttctctcttttccctgaaggttcgataatttgagtctctgtaat

SEQ ID NO: 554541 - DNA, 201 bp, Homo sapiens
agtctgaaggagtgtgatctaaacaatgtgtagtgtttccactgaagcacagatgttttccctgtgatttgtagtgattggcattttcaaactgcaggttsctgtctatattaacttgacagtttgtaataactgcttgagattagcagtttgtctgtttcttcagtttagttaattgtcatatgtagctcctctgtgtaa

SEQ ID NO: 554542 - DNA, 201 bp, Homo sapiens
atcctatctcaaaagtctgaaggagtgtgatctaaacaatgtgtagtgtttccactgaagcacagatgttttccctgtgatttgtagtgattggcattttyaaactgcaggttgctgtctatattaacttgacagtttgtaataactgcttgagattagcagtttgtctgtttcttcagtttagttaattgtcatatgtag

SEQ ID NO: 554543 - DNA, 201 bp, Homo sapiens
tgcattccagtctgggtgacggagggagatcctatctcaaaagtctgaaggagtgtgatctaaacaatgtgtagtgtttccactgaagcacagatgttttycctgtgatttgtagtgattggcattttcaaactgcaggttgctgtctatattaacttgacagtttgtaataactgcttgagattagcagtttgtctgttt

SEQ ID NO: 554544 - DNA, 201 bp, Homo sapiens
cataaaacaggtgaaaggctagactagaaaaccttaaaggggctgggtgcggtggctcacgcctgttatcccagcactttgggaggttgaggtagacatcwcttgaccccaggagttcaagaccagcctgagcaacatagaccctgtctctacaaaaaaagttccaaaaattagctgggcatgatggcatgagcctgtagt

SEQ ID NO: 554545 - DNA, 201 bp, Homo sapiens
tgttaactttgagttaattttacataaacctgggttaatttacaaaattttggcaccaacaacatggttaggcaaggcagcatggatgggtattggaatcygtcaatctgggttgctgtataccagctctgggactgggggcaagttgtagcagccctgagcctcctgcttcacctgtatcaggggaggctgagacccacc

SEQ ID NO: 554546 - DNA, 201 bp, Homo sapiens
tagcatatgttaactttgagttaattttacataaacctgggttaatttacaaaattttggcaccaacaacatggttaggcaaggcagcatggatgggtatwggaatctgtcaatctgggttgctgtataccagctctgggactgggggcaagttgtagcagccctgagcctcctgcttcacctgtatcaggggaggctgag

SEQ ID NO: 554547 - DNA, 201 bp, Homo sapiens
ctcaagtgatccgcccgtctcggcctcccaaagtgttgggattacaggcgtaagccatcgtgtccagcctattgcttagctttaatgtgaatcagtgttarcatatacattcagaattctttaaacttcaaagaaaccacaaaattatgtatcatggaaatacaaatcagaacaaaaatctattgactgtgagcccacaaa

SEQ ID NO: 554548 - DNA, 201 bp, Homo sapiens
ctcctgacctcaagtgatccgcccgtctcggcctcccaaagtgttgggattacaggcgtaagccatcgtgtccagcctattgcttagctttaatgtgaatyagtgttagcatatacattcagaattctttaaacttcaaagaaaccacaaaattatgtatcatggaaatacaaatcagaacaaaaatctattgactgtgag

SEQ ID NO: 554549 - DNA, 201 bp, Homo sapiens
gtttttgagattaaaactttagggaaagaaacagctctcttaaaaatgtcagcaacttcaattcattgctttttaaatatcctggttaataatttacaccyttggttaaaatattcaatcatctacttaatatatagtgcttacctttgtttttattttattttttgagacatagtcttgcttgctctgttgtccgggctg

SEQ ID NO: 554550 - DNA, 201 bp, Homo sapiens
gtgtgtgtgtgtttttgagattaaaactttagggaaagaaacagctctcttaaaaatgtcagcaacttcaattcattgctttttaaatatcctggttaatwatttacacccttggttaaaatattcaatcatctacttaatatatagtgcttacctttgtttttattttattttttgagacatagtcttgcttgctctgtt

SEQ ID NO: 554551 - DNA, 201 bp, Homo sapiens
tgtccaccttcctgcttcctctccggtgatcttgtctattcttggccattttagagttgacttagcagccttcacaaaactggttggaatttccactgggwttaaattgataggtcatttttgggagacctttgcaatattgaactttccaatccgtgaacttatctgcccatgtattatgtttgtttttggtagattaca

SEQ ID NO: 554552 - DNA, 201 bp, Homo sapiens
agccctgaggctcatggtggttgctgttattctgttgaacgtgaaccctagcctttagaaaggagcaagtctttgtggaatacacaggatttgaagtgcawcaaaggggtggaaacgcagctgaccatgataccctcaagtgagtttttccactgaatttgattattttctcatttggcacttctttctgggctttctaag

SEQ ID NO: 554553 - DNA, 201 bp, Homo sapiens
gccttgggagtaaggattgtgagatgggcagaggagcgtgtatcatccaggtgggcacgatggaatcaatcacaagcgtccttataagtgggaagaagaarcgtcagactcaggcaatacgaagatggaagtggtggttgcagtgatacacgatcatagagccaaggtgtgtggaaagccgtcagcagaaggaagaggcat

SEQ ID NO: 554554 - DNA, 201 bp, Homo sapiens
tctctactaaaaacacaaaaaattagccgggtgtggtggcatgtgcctgtagttccagttacttgggaggctgaggcaggagaattacttgaacccgggasgcagagtttgtagtgaaccgagattgcaccactgcactccagcctgggtgacacagtgagactccgtctttccaaaaaaaaaaaaagatgtccacattca

SEQ ID NO: 554555 - DNA, 201 bp, Homo sapiens
tggcagaagcagggcctttgattagctaaccttagaaatgctggagaaagttttctgacttagcaagaaagcccctgaaaccttagaatggacatgagagkgagctttccgattgtcatgggggtttatcttgtgtagggaaaagaaacaggtctgaatccagagctggacctgatgcttctactttctttcttttttttt

SEQ ID NO: 554556 - DNA, 201 bp, Homo sapiens
tagtactttgttttgttttcaaatacatgtgtttacgattatagatttcccccaccccagagttagtcacatcccacaagttttctacttttgtaaaattrtattgaagtataatatacctgagagaaagtgtgccatcttaaatgtacaggtggatgaattatcacaatgtaaatgaatctctgtaactagcaccaagat

SEQ ID NO: 554557 - DNA, 201 bp, Homo sapiens
tcctgcagaagttctatatttgcaacatatctaacaggattagatttcagactacataaagaatttctacaagtcaattaaaatacatccagtgaaaaaayaagcaacatatggacaatagacattttgcagaagaagcaatttggcaaataaaatcacgggaaggcattaaagctgtttggaaaacagggaaataagacc

SEQ ID NO: 554558 - DNA, 201 bp, Homo sapiens
ccatgcaaaagctcattagtttaattaagtcccaactatttatctttgtttttattgcatttgcttttgggttcttggtcatgaaatccttgctaagccartgtctagaagggttttccaatgttatcttctagaatttttacagtttcagatcttaggtttaagtcctcaatccatcttgagttgatttttgtataaggt

SEQ ID NO: 554559 - DNA, 201 bp, Homo sapiens
taggctatagtgcagtgatgaatcatagctcatagcagccttaaattactgagctcaagtgatccaatcctccctcctcagccttccaagtagctgggacracaggtgtgcgtcaccatgaccaattaactttttttttttttttttttttgctgtgacaggtctcactatgttgcctggggtggtattgaagttctggcc

SEQ ID NO: 554560 - DNA, 201 bp, Homo sapiens
agatgggggctggttcccagcatgtgccttttacattttattagggatggggtccacacacccttctgatgtgaaatgtcatgataatgatgaaggaaaamtaaataagaaatagcctctgtatataaagagtaatcagagttaatataggaagggaacttcctagataaaatgctaggagtaaatttcatgggcagtgtg

SEQ ID NO: 554561 - DNA, 201 bp, Homo sapiens
tatagtttgaaatcaggtagtgtgatgcctccagatttgttctttttgcttagtcttgctttggctctgcgggctcttttttggttccatatgaattttaraatttgttttttctaattctgtgaagaataatggtggtattttgatgggcattgtgttgaatttgtagattgcttttggcagtatcatcattttcacaat

SEQ ID NO: 554562 - DNA, 201 bp, Homo sapiens
tagctactttcacccagggtgagcaaggtggaagctgccatgtgttttataatgtagcctaggaaatttgaactatctttttgataacacaggtcagccayatttaatatgagagagaactacacaaggcctggatagcggaagtgaaaatcactgggggccatcttggaggctggctgccacagagattagcaactggaa

SEQ ID NO: 554563 - DNA, 201 bp, Homo sapiens
ttcaagaagaacgtgtaacttggaaaatctgaagtagtcagcaactttagggactgggaaggcagctttcccagggataactaagtgataaagcgaactgygtccagaatatattttaagtacttactaatgtgaaagcattgtggaatcttcacgtcttctaaaagtcacgtttttacgtgactgattgcaaatgcaaca

SEQ ID NO: 554564 - DNA, 201 bp, Homo sapiens
taacagtttgacttcctctttaccgatttggatgccctttcttttgtctgatttctctgggtaggacttacagtactatgttgaggagtggtgaaattggkcatccttgtcttgttccccttctcagagggagtgctttcaacttttccccatttagtattatgttggctgtgggtttgtcattgatggcttttattacat

SEQ ID NO: 554565 - DNA, 201 bp, Homo sapiens
tctttaaaaaatgacttttcatgatgaatagaacataagttttactaatgctataatcagtataaattccttgcagatcaaggacagtgaggccatgtctrataatccagaggcagaacttggatttgggagataactcccccctcttgcactctctgtgacaagtctagtttcgatatcaagtttatcttaatctcaaaa

SEQ ID NO: 554566 - DNA, 201 bp, Homo sapiens
agtttcactcttgtcgcccaggctggagtgcagtggcacaagctaggctcactgcaacctccacctcctgggtttaagctattctcctgcctcagcctccygcgtagctgggaccacagaatgtgatcccacagctgtgaccacacctggctaattttttatttttttgaactggagtctctctttgttccccaggctagt

SEQ ID NO: 554567 - DNA, 201 bp, Homo sapiens
atctcctggaaattccttgtttgtttttccattctgatgttttactaaagctatggatcatctttgagtaattcttctgtaacagattgtgtgtgtgtgtkcacgtgctcatgtgtgcttatgtgcacatggtatgcgtgtgtgcatacacacgagtgtgtgtgcgtgtctgagcacaaacacgtatctgtctttacttca

SEQ ID NO: 554568 - DNA, 201 bp, Homo sapiens
gtatgttccttctttgtcctgcaagacaacggtaaagtgcattataattaatttatgtgtaatccaagtaaacaagcctcattgtgttgtatgtgtcttaygattaagagctcaatacatttaatctagtctgacagtttgcctggtgtaagtcatgtgtgtcttgttaaaaaaaatttaataagaacaaaacaactgggg

SEQ ID NO: 554569 - DNA, 201 bp, Homo sapiens
gttcaaggtcgtgacttataatctcacccacagtgtaaggaagttcttttaatacattgcatgattgtatgagagatctcactgttccatctctttactgrcacttggtattttctgtccttttaattttagactttgtagtacctgtgaaagctgtttgtcattgtggttttaatttggatcgtagtttattacagacat

SEQ ID NO: 554570 - DNA, 201 bp, Homo sapiens
cactgccaatattgttgaaaggaccatactatccaaagcaatctacagattcaatgcaatcttttgagatggaatctcgctctgttgcccaggctggagtrcagtggtgcgatcttggctcactgcaagctccacctcccgggttcatgtcattcttctgcctcagcctccagagtagctgggactacaggcgcccaccac

SEQ ID NO: 554571 - DNA, 201 bp, Homo sapiens
cacatttttcagactccatatgtttattggtatatatattctaaagacacagaccgtaaaggcctactgaacattactcagtctcttggtagttttgataytattttgtatgtattctgggattgaacaattgagaaactatatcgatgcttttggaaaacaggattctcactgcggaagaaagaatatgtaaatatggaa

SEQ ID NO: 554572 - DNA, 201 bp, Homo sapiens
tggtgacagagcgagactccatctcgaaaaaacaaaaaaaagaactttatttcttcagatttatgttactgttttcatgtgtaaactataatttcaagttmttcagtgctgtctttatccattcattcatttatagtgcctgttatgttgcagctctgttctagggattgaggattgaacaacggatcggacagtgttagt

SEQ ID NO: 554573 - DNA, 201 bp, Homo sapiens
tgtgtgtgtgtgtgtgtgtttttgagattaaaactttagggaaagaaacagctctcttaaaaatgtcagcaacttcaattcattgctttttaaatatcctsgttaataatttacacccttggttaaaatattcaatcatctacttaatatatagtgcttacctttgtttttattttattttttgagacatagtcttgcttg

SEQ ID NO: 554574 - DNA, 201 bp, Homo sapiens
caccaaagtgtgtgtgtgtgtgtgtgtgtgtgtgtgtgtgtgtgtgtttttgagattaaaactttagggaaagaaacagctctcttaaaaatgtcagcaayttcaattcattgctttttaaatatcctggttaataatttacacccttggttaaaatattcaatcatctacttaatatatagtgcttacctttgtttttat

SEQ ID NO: 554575 - DNA, 201 bp, Homo sapiens
gcaggctagagacctgggaggctgtacagctctgcactgggctgcagatggaggccactgcagtgtgattgagtggatgataaaggatggctgtgaggtaygggacctgccttgttaaccacgcacatatcgttaagaatctgaaatgctgctccatggggtctggcagaagcagggcctttgattagctaaccttagaaa

SEQ ID NO: 554576 - DNA, 201 bp, Homo sapiens
tccattttatttttgtttcctttttattggcaccaccaaagtgtgtgtgtgtgtgtgtgtgtgtgtgtgtgtgtgtgtgtttttgagattaaaactttagrgaaagaaacagctctcttaaaaatgtcagcaacttcaattcattgctttttaaatatcctggttaataatttacacccttggttaaaatattcaatcatc

SEQ ID NO: 554577 - DNA, 201 bp, Homo sapiens
catcaagctaccaatgactttcttcacagaattggaaaaaaactactttaaagttcatatggaaccaaaaaagagcctgcatcgccaagtcaatcctaagycaaaagaacaaagctggaggcatcacactacctgacttcaaactatactacaaggctacagtaaccaaaacagcatggtactggtaccaaaagagagata

SEQ ID NO: 554578 - DNA, 201 bp, Homo sapiens
cccccctcctcctcttcctttagcttggggatcatcattacctccatttctccattttatttttgtttcctttttattggcaccaccaaagtgtgtgtgtrtgtgtgtgtgtgtgtgtgtgtgtgtgtgtttttgagattaaaactttagggaaagaaacagctctcttaaaaatgtcagcaacttcaattcattgctttt

SEQ ID NO: 554579 - DNA, 201 bp, Homo sapiens
tatctacccccctcctcctcttcctttagcttggggatcatcattacctccatttctccattttatttttgtttcctttttattggcaccaccaaagtgtrtgtgtgtgtgtgtgtgtgtgtgtgtgtgtgtgtgtttttgagattaaaactttagggaaagaaacagctctcttaaaaatgtcagcaacttcaattcatt

SEQ ID NO: 554580 - DNA, 201 bp, Homo sapiens
atatctacccccctcctcctcttcctttagcttggggatcatcattacctccatttctccattttatttttgtttcctttttattggcaccaccaaagtgygtgtgtgtgtgtgtgtgtgtgtgtgtgtgtgtgtgtttttgagattaaaactttagggaaagaaacagctctcttaaaaatgtcagcaacttcaattcat

SEQ ID NO: 554581 - DNA, 201 bp, Homo sapiens
tatatctacccccctcctcctcttcctttagcttggggatcatcattacctccatttctccattttatttttgtttcctttttattggcaccaccaaagtrtgtgtgtgtgtgtgtgtgtgtgtgtgtgtgtgtgtgtttttgagattaaaactttagggaaagaaacagctctcttaaaaatgtcagcaacttcaattca

SEQ ID NO: 554582 - DNA, 201 bp, Homo sapiens
acatatatctacccccctcctcctcttcctttagcttggggatcatcattacctccatttctccattttatttttgtttcctttttattggcaccaccaaygtgtgtgtgtgtgtgtgtgtgtgtgtgtgtgtgtgtgtgtttttgagattaaaactttagggaaagaaacagctctcttaaaaatgtcagcaacttcaat

SEQ ID NO: 554583 - DNA, 201 bp, Homo sapiens
taacatatatctacccccctcctcctcttcctttagcttggggatcatcattacctccatttctccattttatttttgtttcctttttattggcaccaccyaagtgtgtgtgtgtgtgtgtgtgtgtgtgtgtgtgtgtgtgtttttgagattaaaactttagggaaagaaacagctctcttaaaaatgtcagcaacttca

SEQ ID NO: 554584 - DNA, 201 bp, Homo sapiens
agtgaaataggaaagaatgaaaataacatatatctacccccctcctcctcttcctttagcttggggatcatcattacctccatttctccattttatttttrtttcctttttattggcaccaccaaagtgtgtgtgtgtgtgtgtgtgtgtgtgtgtgtgtgtgtgtttttgagattaaaactttagggaaagaaacagctc

SEQ ID NO: 554585 - DNA, 201 bp, Homo sapiens
agagtttcactcttgtcgcccaggctggagtgcagtggcacaagctaggctcactgcaacctccacctcctgggtttaagctattctcctgcctcagcctsctgcgtagctgggaccacagaatgtgatcccacagctgtgaccacacctggctaattttttatttttttgaactggagtctctctttgttccccaggcta

SEQ ID NO: 554586 - DNA, 201 bp, Homo sapiens
tcccacttggtgctacctgttctgtaagctcttgctatatatatgtattttaaaaatccagcaggcagcagttttctgctacacgtttctttctgtttttktttgtttgtttgtttgttgtttgttttttgttttttgagacggagtctcactctgttacccaggctgcagtgtggtggcactagcttggctcactgcaac

SEQ ID NO: 554587 - DNA, 201 bp, Homo sapiens
ttagtaagtataagtgtgtatatatattattactgtcttgttccagaaaggatgtaaagctgcttacaacaatacataaaagtaagaaaaatgaatgctargtgaggaaagttaggcaagagaaaataagaactccccaggggccaagtggaaagtagttcagttaacttttctagcccatcttttttccactttaaagga

SEQ ID NO: 554588 - DNA, 201 bp, Homo sapiens
gagtgttttgtatggagacttaaaatttatctaaaacctttatagaaggatgcagtttgactctcaaaccaagtcgtcttatcttgtacaatttcagaaaygaagaactcagaccaaatctattctctggggaaaatgttggcatttttaaaggtcattcgttttccaccaagaaagtttcaaatacttttccttttaact

SEQ ID NO: 554589 - DNA, 201 bp, Homo sapiens
gttccttttatatttattagttggcagtcttctgtgaaaaacagcttccccccaccaactggggatggactacattttatccttaaaaaaaaaaaaaaaaagaaaatatttaatttttaaataccaatttttagagtaagaaattggtttgatagttatctctaatagtgtcaaatgagtattttttttcctttttctctt

SEQ ID NO: 554590 - DNA, 201 bp, Homo sapiens
cctccctcatgatgatgaaggcaaacaataaataagatacataagtaaaaataggtagtcagcaggcaatacatactgaggggcagcagcataggaaaaaytgagggcctggggtagaggtggggaagtcttcaccaagaaggtagcttctgagtagatctgaagcaaggatacctggagccttgcaactatctgggggaa

SEQ ID NO: 554591 - DNA, 201 bp, Homo sapiens
acagttttcccattgcacttagaaaataatttctgggataattcattgccatgtgaatattccattccccattaacttttattttttatttatttttttttattttttgagacagagtcttgctctctctcccaggttggagtgcagtggcatgatctcggctcactgcaacctccgcctcctgggttcaagtgattctcc

SEQ ID NO: 554592 - DNA, 201 bp, Homo sapiens
acttttcagagtacttggatcattgctatttatattttgtccagagtttcaaattgtgatcagtggaaatgacaggccgtagcatacatacgccatcctgrccagcatcacaggtggtcagtacatctttctgttgttgttttgagacagggtctcactctgttgcccaggctggagcacagtggcatgatcagggatcac

SEQ ID NO: 554593 - DNA, 201 bp, Homo sapiens
ttactaatgctataatcagtataaattccttgcagatcaaggacagtgaggccatgtctaataatccagaggcagaacttggatttgggagataactcccscctcttgcactctctgtgacaagtctagtttcgatatcaagtttatcttaatctcaaaaaatgagcttggctctgttccctctattttctcttaaaagtt

SEQ ID NO: 554594 - DNA, 201 bp, Homo sapiens
aggcggaggttgcagtgagccaagattgtgccagtgcaatccagcctgggcgatagagtgagactctgtctcaaaaaaaacaaacaaaaagtcatgcagayaattagagttctatttgaatataatttaaaaaatgaagttttcttcccttagcaaaggtcattctaaagacctttgagtgcttgggaaagcagtatgaac

SEQ ID NO: 554595 - DNA, 201 bp, Homo sapiens
gagtacttggatcattgctatttatattttgtccagagtttcaaattgtgatcagtggaaatgacaggccgtagcatacatacgccatcctggccagcatyacaggtggtcagtacatctttctgttgttgttttgagacagggtctcactctgttgcccaggctggagcacagtggcatgatcagggatcactgcattct

SEQ ID NO: 554596 - DNA, 201 bp, Homo sapiens
ggagaatcactagaacccaggaggcggaggttgcagtgagccaagattgtgccagtgcaatccagcctgggcgatagagtgagactctgtctcaaaaaaaacaaacaaaaagtcatgcagataattagagttctatttgaatataatttaaaaaatgaagttttcttcccttagcaaaggtcattctaaagacctttgagt

SEQ ID NO: 554597 - DNA, 201 bp, Homo sapiens
agaagacaatttatagcagaatcaatataagcaattcatataaagatgtttagcattactagtaataacaatttttctatcaaattggtgattaaaaaatwcatgttggtaaagatgcagtgaaataacctgtactttcaaatatagttgatagaaatgtgaattggtatcatctttctggaaagcaatttggaaatgtgc

SEQ ID NO: 554598 - DNA, 201 bp, Homo sapiens
agtttagaagattcttagcagtctaagacaagaaaagatttaatggccacaaagaaattggaattttcagtaaaatgagtcattttacccacctaagcccygtgagaaccaccggctttgactctgcagtagctgtactgagcatgcttatctcttttctctgcttttcccaagccgtgttaaggttgatgttcccaataa

SEQ ID NO: 554599 - DNA, 201 bp, Homo sapiens
gtcgattaaaggtgaaaacctttatttgtgtagatgcaaaacaaaaattgggtgtaacttggcatgtatgttaaaaagtatctttttttttttttttttttgagacggaatctcactctgtcctccagattggagtgcagtggcgcgatctcagcccactgcaagctctgcctcccgggttcacgccattctcctgcctca

SEQ ID NO: 554600 - DNA, 201 bp, Homo sapiens
ttgtatgtttgtttgtgtgtaggtatttataaatctcttccatccctcctatgagggccataccagagggtaaggtattaggaaattttttaacgtaacaytttccatcagtcgattaaaggtgaaaacctttatttgtgtagatgcaaaacaaaaattgggtgtaacttggcatgtatgttaaaaagtatcttttttttt

SEQ ID NO: 554601 - DNA, 201 bp, Homo sapiens
gtttgaaagagaagaataactggttatagagaaaatgtaaacatgaaaagaagtttgtgtctataatagtagataatttcattgaaatggatactttttttctgagaaaatttaaaccgccaagtcaacccaagaagcagaaaattcgaaataaccaatatccatgcaagaaactagaaaattcatttaaaaattacctcc

SEQ ID NO: 554602 - DNA, 201 bp, Homo sapiens
ggggctggatattccagttatcactcagaggctttgcacgtttccctattgagaagatcttctgttttattttccaactctctattttgaaatatttacayatttagaaaaaatgaaagaatagtacaacaaacacctgtataccccccacctaggcttggcagttgacatttggccatatttgcctctcctttttttttt

SEQ ID NO: 554603 - DNA, 201 bp, Homo sapiens
ggtgtttgggtgtttgcccgaaatgtcaggtcagggtttagatgccaatcctgccggtttcttgccctgaaaaccactgagctgtatgatttaagtcagtkaatttatagtgtgcagatttcatctgaataaagctgtttaaaaaaaagttcagagaagatgttttttactgagctctgacccaaaccaggatcacccttg

SEQ ID NO: 554604 - DNA, 201 bp, Homo sapiens
agtgagccaagattgtgccagtgcaatccagcctgggcgatagagtgagactctgtctcaaaaaaaacaaacaaaaagtcatgcagataattagagttctrtttgaatataatttaaaaaatgaagttttcttcccttagcaaaggtcattctaaagacctttgagtgcttgggaaagcagtatgaacaccctaaacccag

SEQ ID NO: 554605 - DNA, 201 bp, Homo sapiens
cggtgtagagaggtggttggggctgtgcccttagaactttccttaacatctcaagcagttagcacgttttggaagatttttaggcatcccctttcttttttaacactttgcgggaggatcacatttacttatgatgttcatctgtattcaaaatttggtaagaatggaagcatatagtgaactggtcgatactgcagtgtt

SEQ ID NO: 554606 - DNA, 201 bp, Homo sapiens
agaccaggcagtttacacaaaaacacttgatattgactatgaaacaagatccggaagagaacaaatataaatacagatggatcagctaaatgaaggactgycgagtaaaaacacaaagaagatgtttgtgagtggagggggatggatctccttctccacccagcagtgaatatcatgggaatctctctctacctgaatcta

SEQ ID NO: 554607 - DNA, 201 bp, Homo sapiens
gcttggcccttggaggaccttggtggctttctgccagtgggaggtggtaagttcagggctgtgcctatccctgggaaggaagagcgcctggtctcaatgasctcattgctgggcaatccagagcctccggggctggagtctctggattgttaaaataatccaggattattaaacaatcctcctcaccacctagagcaaatt

SEQ ID NO: 554608 - DNA, 201 bp, Homo sapiens
tatcttgtaatgtgaaaggaataaatgcattgaaaggaatcattaagaaaaagattgagtgtattatatatttttaaaaacttaattacaatgttaaggayattccagggaaatatttacaaatgtattagagacaaattaccagcatctttaatgtacagaacacacacatgcccatacatatactccaaaaaagcctcc

SEQ ID NO: 554609 - DNA, 201 bp, Homo sapiens
aattccagatgaattaagaattaaatgtaaaaaacaaaaccataaaaaatgaccagaaaacacagaggcataattattttatcttgtaatgtgaaaggaayaaatgcattgaaaggaatcattaagaaaaagattgagtgtattatatatttttaaaaacttaattacaatgttaaggacattccagggaaatatttacaa

SEQ ID NO: 554610 - DNA, 201 bp, Homo sapiens
tcttcttttgagaaatgtctttagatcatttgcctatatttaagttgcatagtttgagaatacaaacaaatggaaagacatcccatgctcatggatcagargaattaatttttttgaattaagcagaaattttatttccaagctctttaaagattattgcaaacacaaagttgtcttctgaaagccccaaatcaaatcaaa

SEQ ID NO: 554611 - DNA, 201 bp, Homo sapiens
tcttctaaaatgtcagcaattaaacacgtccgaggctgggtcttgtatttattagagaccccgtcttactccccgccccccgccccacacccctagtctgygacttgaaggagagagagagaaaagaagagctttgtccaagtgtatttgattcattcttaggggttctacaagttaggacactcaaaaaatgtttgtaat

SEQ ID NO: 554612 - DNA, 201 bp, Homo sapiens
tactcatgattttagtttggtagtttggttcattaattgtaagtagcccatttttcttctaaaatgtcagcaattaaacacgtccgaggctgggtcttgtrtttattagagaccccgtcttactccccgccccccgccccacacccctagtctgcgacttgaaggagagagagagaaaagaagagctttgtccaagtgtat

SEQ ID NO: 554613 - DNA, 201 bp, Homo sapiens
ttccagtgaagagtgaaataggaaagaatgaaaataacatatatctacccccctcctcctcttcctttagcttggggatcatcattacctccatttctccrttttatttttgtttcctttttattggcaccaccaaagtgtgtgtgtgtgtgtgtgtgtgtgtgtgtgtgtgtgtgtttttgagattaaaactttagggaa

SEQ ID NO: 554614 - DNA, 201 bp, Homo sapiens
cacaaactgtaactcaagtgcttttccagtgaagagtgaaataggaaagaatgaaaataacatatatctacccccctcctcctcttcctttagcttggggktcatcattacctccatttctccattttatttttgtttcctttttattggcaccaccaaagtgtgtgtgtgtgtgtgtgtgtgtgtgtgtgtgtgtgtgtt

SEQ ID NO: 554615 - DNA, 201 bp, Homo sapiens
aggctgaggcaggcagatcacgaggtcaagagatcaagaccatcctggccaacatggtgaaaccccgtctctactaaaaatacaaaaattcgctaggtgtrgtggcgggtacctgtaatcccacctacttgggaggctgaggcaggagaatccttgaacccgggaggcggagtttgcagtgagctgagatcgcaccactac

SEQ ID NO: 554616 - DNA, 201 bp, Homo sapiens
aggctcttggaggcagccactcctcatcgattatttgcacatgagataaacctgtttgttttaccatattgaaggactaacagaagcacaaactgtaactmaagtgcttttccagtgaagagtgaaataggaaagaatgaaaataacatatatctacccccctcctcctcttcctttagcttggggatcatcattacctcc

SEQ ID NO: 554617 - DNA, 201 bp, Homo sapiens
ggaaggaacttagaccttctggcttctcctttggggatactcctccctctaggacaagtgttgggtctgttctttagccacacactttgtgccatgcctcrtcctttaggagaaagaatccagtgggggctgggagtgagtgggcaaggctgtttgatgattaggtgaggtgttagctcacccacctgatccagatctgac

SEQ ID NO: 554618 - DNA, 201 bp, Homo sapiens
tcagatccttcccactaaggtcaacaatacccaggctcttggaggcagccactcctcatcgattatttgcacatgagataaacctgtttgttttaccataytgaaggactaacagaagcacaaactgtaactcaagtgcttttccagtgaagagtgaaataggaaagaatgaaaataacatatatctacccccctcctcct

SEQ ID NO: 554619 - DNA, 201 bp, Homo sapiens
aaattaagtgtcatataagtgttgccgcattgcagttctcctcagtaacggcctgtgacctgccatttctgtcggctcttaccaaggctcggtgccgcccygggcctctgctccattgtcatagtaatgtttgcactctgctagtcacctgtaaatatacatatttaggatcctaaaaccaatatcctaaaatatgtatat

SEQ ID NO: 554620 - DNA, 201 bp, Homo sapiens
ctgttctgctagtaaaaagccctaatttctttggataacttactaattattgagtcttcctcatctgcacaacatggttagaagctccttcagagttacgyctgggtccttatttctgtttttttctccactgcatacctttgtgtccttcctgttaaccttatatagggcgggctccctgcacagaaggaggagatgata

SEQ ID NO: 554621 - DNA, 201 bp, Homo sapiens
tctgacattttgcatttgggcaagtatatctgcagaatgaatgtctagatgtggactaggtagttagttttgataattgttaaatcactctcctctagacrggttataccagtttatacttctagtagcaatatgagtgaatacctctttcgcacagcctcctcaactcaatgtgttaccaaacttagaatttttactgtt

SEQ ID NO: 554622 - DNA, 201 bp, Homo sapiens
ttttacaattataagcaaagctgcaagaaacaatgtgtatctgacattttgcatttgggcaagtatatctgcagaatgaatgtctagatgtggactaggtrgttagttttgataattgttaaatcactctcctctagacgggttataccagtttatacttctagtagcaatatgagtgaatacctctttcgcacagcctcc

SEQ ID NO: 554623 - DNA, 201 bp, Homo sapiens
tgctacatttgtggtaactaattatagcagcaataggaaacttagaagagctgtttttacaattataagcaaagctgcaagaaacaatgtgtatctgacaytttgcatttgggcaagtatatctgcagaatgaatgtctagatgtggactaggtagttagttttgataattgttaaatcactctcctctagacgggttata

SEQ ID NO: 554624 - DNA, 201 bp, Homo sapiens
gctgctacatttgtggtaactaattatagcagcaataggaaacttagaagagctgtttttacaattataagcaaagctgcaagaaacaatgtgtatctgasattttgcatttgggcaagtatatctgcagaatgaatgtctagatgtggactaggtagttagttttgataattgttaaatcactctcctctagacgggtta

SEQ ID NO: 554625 - DNA, 201 bp, Homo sapiens
cgaagatggaagtggtggttgcagtgatacacgatcatagagccaaggtgtgtggaaagccgtcagcagaaggaagaggcatggaaacggactctcccctrgagcctccagaaggaaccagcctttgattttagctccgcaagacgcgttttggacttctgacctctgggctcataataagataagtttctgttgttttaa

SEQ ID NO: 554626 - DNA, 201 bp, Homo sapiens
tcggtgtagagaggtggttggggctgtgcccttagaactttccttaacatctcaagcagttagcacgttttggaagatttttaggcatcccctttcttttttaacactttgcgggaggatcacatttacttatgatgttcatctgtattcaaaatttggtaagaatggaagcatatagtgaactggtcgatactgcagtgt

SEQ ID NO: 554627 - DNA, 201 bp, Homo sapiens
aaaatgcttctgtgtggtggtaatttgcattcagtttgagagtgttttaatgagtcacagaggcatgcactttgtttgaataaagaatgaacagccttttytttccccccaggtaaagtacacagattcttgcttaaatgaggcttacaattttaatcagttgggcccttataaagaaagaaaaacagctgctacttgtta

SEQ ID NO: 554628 - DNA, 201 bp, Homo sapiens
tttccagcagctcaggtgtcatctggatgaaaatgttcctcgatgtctgagacagagtggcccaccctcctggtttgtatacctctgcttgcctctctcckgtggaatggtaccttgttgttgttctgtgagttgtttgtctccctctgtctcccttaagacctttgctgctgtggtgcccagcaggaaatacatacacac

SEQ ID NO: 554629 - DNA, 201 bp, Homo sapiens
agattgtgccactgcaatccagcctgggcaacagagtaagactgtctcaaaaaaataaattaaaaaaaggggaaggaaaatgaattaaaggaggatttacktaactaaaagacagttttaaaagaacaactgccgacactcataacattagcagcaatcgctttagcattttgtgttgattgctttgctccaccaagaata

SEQ ID NO: 554630 - DNA, 201 bp, Homo sapiens
gagctatggagaatggtccaagggaggagaacaagaactggattaagtgttgaagcaggaaagaagaaagagctggaaatgacacacacacacacacacaccctctcaaaaaccaaggctttgagtagaagaaaagaaaaatttagagataagatttgaaaagggatacatggagtttagtcggataagaagaaagaatgt

SEQ ID NO: 554631 - DNA, 201 bp, Homo sapiens
cccgacagaccccagtgtgtgttggtcccccccatgtgaccatgtgttctcatcattcagctcataagtaagaacatgtagtgtttggttttctgttcctscattagtttgctgaggataatggcttccagctccatctatgtccctgcaaaggatatgatcttgttcctttttatggctgcatagttgtaacatcaaagt

SEQ ID NO: 554632 - DNA, 201 bp, Homo sapiens
ggagctatggagaatggtccaagggaggagaacaagaactggattaagtgttgaagcaggaaagaagaaagagctggaaatgacacacacacacacacacaccctctcaaaaaccaaggctttgagtagaagaaaagaaaaatttagagataagatttgaaaagggatacatggagtttagtcggataagaagaaagaatg

SEQ ID NO: 554633 - DNA, 201 bp, Homo sapiens
atctatgttctaaggcagtggaaggaagcagggttggggaggatatatcatgttcaaggaaaatgaaaagaacttaatgttttgaaagacttctagtcaamggaactatgactcattatcctggatgtgatgggaggtggggggcatttaagcccacattcccacttccattttaaagtcagaatcaggaggaaaatgggg

SEQ ID NO: 554634 - DNA, 201 bp, Homo sapiens
atgtcagggagggtgttggggatgtcaagggccagggaaagggtctgggttggagagacagactccagagtcatcagcatgaggctggattggaattctgsgggagggagtttagagaagaaagggaagtctggtaactgagtcttggggcttttcaatatttatttagcttcttatgtttcatatttgctcagctcttgc

SEQ ID NO: 554635 - DNA, 201 bp, Homo sapiens
agttaattttacataaacctgggttaatttacaaaattttggcaccaacaacatggttaggcaaggcagcatggatgggtattggaatctgtcaatctggkttgctgtataccagctctgggactgggggcaagttgtagcagccctgagcctcctgcttcacctgtatcaggggaggctgagacccaccttgcaggggtc

SEQ ID NO: 554636 - DNA, 201 bp, Homo sapiens
gagcctgggaggtcgaggctgcagtgagccatgattgtgccactgcactccagcctgggtgacagagtgagaccctgtctcaaaaaaaaaaaaaaaaaaaagttatgtttttcttcttagtcttcatatcatctctgacttatttcttccccttgatagatttaccacttgaaaaatgcaaaatgactattttgtgattca

SEQ ID NO: 554637 - DNA, 201 bp, Homo sapiens
tgagcacttcactttggaaaagcaaaaaatcaaaggctgtcttaaagattgtacagaaaatatgatttattggagatatcccttgcctccaagctctaatrttaagcctccaaatataatgcaagttatattggtatagaaaatgggaaggagcaggcagatttattatgtatgagcatgaataatttttatctttattgc

SEQ ID NO: 554638 - DNA, 201 bp, Homo sapiens
cacattcattgaaacaaggctgtgctgactgtagaaattgttttctgtttggaaggttttgttttctgttgggagtattctgattctcagtcttacttctyttctgttattaccaacattttgttggtgatcatgattcttaatgaaacagttctgcataccatttcaaccatcagagtttttagtctccattgttttata

SEQ ID NO: 554639 - DNA, 201 bp, Homo sapiens
atgttttcattagatgatgtattctttgcctgcaggctctgccagacttgcctctttatcccgagacctcacttaaggcacctcattcccagattagaatrtatgtaaactatatgcattttgaacacgtcttcctgtaggctccctctgcacctgcctcccccatgcacctggtttgtatttgtttggtgtccaatgttc

SEQ ID NO: 554640 - DNA, 201 bp, Homo sapiens
aagatctcctggaaattccttgtttgtttttccattctgatgttttactaaagctatggatcatctttgagtaattcttctgtaacagattgtgtgtgtgygtgcacgtgctcatgtgtgcttatgtgcacatggtatgcgtgtgtgcatacacacgagtgtgtgtgcgtgtctgagcacaaacacgtatctgtctttact

SEQ ID NO: 554641 - DNA, 201 bp, Homo sapiens
catgcaggcctcctgtagctcagaaccttgttttgtatgccacatagcatttagctctgttgggcttattttacttgtttacttgtttgcttagtttgtttaccttgttgtttacttgtttacttcttgttcctttcctgcctcctcacccagtattaaactcagtgagagacaaataagacttctgcctgcttaacgctc

SEQ ID NO: 554642 - DNA, 201 bp, Homo sapiens
aaatagtatatgtaaagagtttagaacactcatacaaagtcttgtgaaaacttagctattaaataacccaggtttgggcagggatgttggatggactcctrggtaaaatagagttggccctaattgtgctgataattgaagctgggtaacagatacaagaggatttgctatactattcgttctactttttatgttgaaatt

SEQ ID NO: 554643 - DNA, 201 bp, Homo sapiens
ttgttagatgatgttgaactttgaaaggccaccaaggacacttttaatatcaaatcttcctcatccccccaactccagaaaactagtttttgctcagataytggctcagtggaaaatgtgtggtctgaagctgtagtctcctagtttgtgagcttattttcgctgcctgaaggtttgagtcaccgtagaaggggaggaggg

SEQ ID NO: 554644 - DNA, 201 bp, Homo sapiens
gtaattcttctgtaacagattgtgtgtgtgtgtgcacgtgctcatgtgtgcttatgtgcacatggtatgcgtgtgtgcatacacacgagtgtgtgtgcgtktctgagcacaaacacgtatctgtctttacttcagcaccactcttcatggattggcgatgtcttcattggaattggaagcgacaatatttacattttctta

SEQ ID NO: 554645 - DNA, 201 bp, Homo sapiens
tcatgcaggcctcctgtagctcagaaccttgttttgtatgccacatagcatttagctctgttgggcttattttacttgtttacttgtttgcttagtttgtttaccttgttgtttacttgtttacttcttgttcctttcctgcctcctcacccagtattaaactcagtgagagacaaataagacttctgcctgcttaacgct

SEQ ID NO: 554646 - DNA, 201 bp, Homo sapiens
aatggttgctgtaaatatctgatcaagccatgataaactgctttgaggtgacagccaccactgttctcatatagcatccccctcagtgtgcagtcatcttyactgtggaccatatgccaccggaggctagactgcagatgccccttgccagtgaaatttgacttcggtaaattttcagatgagttttggaagagcagggaa

SEQ ID NO: 554647 - DNA, 201 bp, Homo sapiens
tggttgctgtaaatatctgatcaagccatgataaactgctttgaggtgacagccaccactgttctcatatagcatccccctcagtgtgcagtcatcttcaytgtggaccatatgccaccggaggctagactgcagatgccccttgccagtgaaatttgacttcggtaaattttcagatgagttttggaagagcagggaaac

SEQ ID NO: 554648 - DNA, 201 bp, Homo sapiens
aggaacattatcagtggggcgtacactaaccattggcatttctgagcaacgtgttgcgtagttgtgtgatttggcagcagctggtccattgctgacacgtrtgtgtgttcactgaggcttcactcacacctaaggcttccttggagagaccatgctgccattacatttggatcactacctgcccccaacacacacacacac

SEQ ID NO: 554649 - DNA, 201 bp, Homo sapiens
tctgatctctagtaggattctaggctggatgtctttggaattgaaatacttgttggcttctggttattttgggggtaatccataacagtctaccattcctkgtgtttggttttagtgggctgtgaaaaaaatcatttgttcaacactgatgtcatgatacaaggacgtgaagatgtgagtcattgtgacatcaccagccag

SEQ ID NO: 554650 - DNA, 201 bp, Homo sapiens
aagagaacaaatataaatacagatggatcagctaaatgaaggactgtcgagtaaaaacacaaagaagatgtttgtgagtggagggggatggatctccttcyccacccagcagtgaatatcatgggaatctctctctacctgaatctacctcttataattcttaaattaagaaccattagaactcttctaaactttctaagt

SEQ ID NO: 554651 - DNA, 201 bp, Homo sapiens
acctctgtaatgtaatgcattaacttctgtagggttgcttgaatgtccttgcagtatggtagctactttcacccagggtgagcaaggtggaagctgccatrtgttttataatgtagcctaggaaatttgaactatctttttgataacacaggtcagccacatttaatatgagagagaactacacaaggcctggatagcgga

SEQ ID NO: 554652 - DNA, 201 bp, Homo sapiens
acacttaagtttgtttcctttaggcttgtgaaaatcctagtttctaatggcacagacgtgaatctgaagaatggaagtggcaaggacaggtaggaggtggkatatgactgaaattgtgctgatgttctcagaattgtgttgctaggcttgtgcccagaggggttgtgatttcaccaaaacattgtcttgagtttgacagtc

SEQ ID NO: 554653 - DNA, 201 bp, Homo sapiens
aggtgggcacgatggaatcaatcacaagcgtccttataagtgggaagaagaaacgtcagactcaggcaatacgaagatggaagtggtggttgcagtgatayacgatcatagagccaaggtgtgtggaaagccgtcagcagaaggaagaggcatggaaacggactctcccctagagcctccagaaggaaccagcctttgatt

SEQ ID NO: 554654 - DNA, 201 bp, Homo sapiens
gattgtgagatgggcagaggagcgtgtatcatccaggtgggcacgatggaatcaatcacaagcgtccttataagtgggaagaagaaacgtcagactcaggyaatacgaagatggaagtggtggttgcagtgatacacgatcatagagccaaggtgtgtggaaagccgtcagcagaaggaagaggcatggaaacggactctc

SEQ ID NO: 554655 - DNA, 201 bp, Homo sapiens
atccctgaatctaggagtatattactttacatagccaaaggggccttgggagtaaggattgtgagatgggcagaggagcgtgtatcatccaggtgggcacratggaatcaatcacaagcgtccttataagtgggaagaagaaacgtcagactcaggcaatacgaagatggaagtggtggttgcagtgatacacgatcatag

SEQ ID NO: 554656 - DNA, 201 bp, Homo sapiens
gagattgcaccactgcactccagcctgggtgacacagtgagactccgtctttccaaaaaaaaaaaaagatgtccacattcaaatccctgaatctaggagtrtattactttacatagccaaaggggccttgggagtaaggattgtgagatgggcagaggagcgtgtatcatccaggtgggcacgatggaatcaatcacaagc

SEQ ID NO: 554657 - DNA, 201 bp, Homo sapiens
tttcacctgacattatattttggtgagttttctgtttagtacataatacattttctcgtattttaaacaactgtattctgttgtatgaatttatcataatktattgaatcagtccactgctgatggacatccagtttgtttccagacgtttgctattgtgataggctgaataaaagatgtccacaggctgggtgcggtggc

SEQ ID NO: 554658 - DNA, 201 bp, Homo sapiens
gtttaagccaggtagggtaaaaggtggagctgagtttggtgactgtgcttattgtcaaatgctgcttcttccatatgttgcagtctaatgctggcgtgctrtgcgggacacctagatgttgtgaaatatctccgaagacatggcgcttcttggcaggctagagacctgggaggctgtacagctctgcactgggctgcagat

SEQ ID NO: 554659 - DNA, 201 bp, Homo sapiens
gttagtgaaaagtctcattcttgcaatgccaccaccctcttcctgtcctacaggtaaccaccatgattaatttctggtatatcattccagagatagtttaraccttgtatatagaagcaaattatgtatactgcattcctgtgtctgttctgtactttgcttttttcacctgacattatattttggtgagttttctgttta

SEQ ID NO: 554660 - DNA, 201 bp, Homo sapiens
aactttttttacactttgttttctttttactctttctagaatttattattttactttttggataagtaatatagttacaagtttcaaagataaaaaattaygaaagaatgttagtgaaaagtctcattcttgcaatgccaccaccctcttcctgtcctacaggtaaccaccatgattaatttctggtatatcattccagag

SEQ ID NO: 554661 - DNA, 201 bp, Homo sapiens
tatacatacttctaatttttaaaaattgtacagctctagcataaagagtcctacaatgggtacttatcccccatctataactttttttacactttgttttstttttactctttctagaatttattattttactttttggataagtaatatagttacaagtttcaaagataaaaaattatgaaagaatgttagtgaaaagtc

SEQ ID NO: 554662 - DNA, 201 bp, Homo sapiens
gttcatagttttcagtcacttgatcatatatcctggcattcctggtaacatatacatacttctaatttttaaaaattgtacagctctagcataaagagtcytacaatgggtacttatcccccatctataactttttttacactttgttttctttttactctttctagaatttattattttactttttggataagtaatata

SEQ ID NO: 554663 - DNA, 201 bp, Homo sapiens
gtcctttaggagaaagaatccagtgggggctgggagtgagtgggcaaggctgtttgatgattaggtgaggtgttagctcacccacctgatccagatctgamgtcaggttttcaagtgtttattagtgatgctaactccagcactgtcatttcacccttgctcagttgtcccttcttcactgtccttgactgccccttttct

SEQ ID NO: 554664 - DNA, 201 bp, Homo sapiens
atgtctgataattctaatacctgaagcacttgtgggtttgtttcttttttctgttttttattttgttcatagttttcagtcacttgatcatatatcctggsattcctggtaacatatacatacttctaatttttaaaaattgtacagctctagcataaagagtcctacaatgggtacttatcccccatctataactttttt

SEQ ID NO: 554665 - DNA, 201 bp, Homo sapiens
catatttaggatcctaaaaccaatatcctaaaatatgtatattagcagatgatgacaaaaacaccagaatttttatcaaagagaaagtagaaagtatatgrgttaatattgtaaggattaggatacacctgtcaaattactctaggttggcttagaaacaaagcaaaacaaattgggtcccatccactattttttggcatt

SEQ ID NO: 554666 - DNA, 201 bp, Homo sapiens
ttcatgcaggcctcctgtagctcagaaccttgttttgtatgccacatagcatttagctctgttgggcttattttacttgtttacttgtttgcttagtttgtttaccttgttgtttacttgtttacttcttgttcctttcctgcctcctcacccagtattaaactcagtgagagacaaataagacttctgcctgcttaacgc

SEQ ID NO: 554667 - DNA, 201 bp, Homo sapiens
ttttggagaagcctttagtcagacttttcagacagagtttgtgtaatgaatctggttgttctgtattttacctgtaggtctcctgcctaaaattgataagyattagtaagtataagtgtgtatatatattattactgtcttgttccagaaaggatgtaaagctgcttacaacaatacataaaagtaagaaaaatgaatgct

SEQ ID NO: 554668 - DNA, 201 bp, Homo sapiens
tgatgctggggccaatgtgaatgtgaaggacagaaatggaaagacgccccttatggtaggtcctcctcccgaaaataggcagttttctacgtggaattaakgtcagagctttttctgtaattagacaattcttgtgagttcagccctgcaccagcccttgggtttgactgtgtgtgtgtgttccctgtcggcttgttcata

SEQ ID NO: 554669 - DNA, 201 bp, Homo sapiens
tttcatgcaggcctcctgtagctcagaaccttgttttgtatgccacatagcatttagctctgttgggcttattttacttgtttacttgtttgcttagtttgtttaccttgttgtttacttgtttacttcttgttcctttcctgcctcctcacccagtattaaactcagtgagagacaaataagacttctgcctgcttaacg

SEQ ID NO: 554670 - DNA, 201 bp, Homo sapiens
acctggtgtcggcccaaaggcacctgtaggaagtgactggagaccctggttgggaggtcccggccagtgaggaggaacgggattgggacccacttaaaaaagtggccacattttgggagagcagttgtgctgtgctaggggtccgcttcagcccctgatcgcctcggatactatgaggctcaaaggctggaacagctaagg

SEQ ID NO: 554671 - DNA, 201 bp, Homo sapiens
gacctggtgtcggcccaaaggcacctgtaggaagtgactggagaccctggttgggaggtcccggccagtgaggaggaacgggattgggacccacttaaaaaagtggccacattttgggagagcagttgtgctgtgctaggggtccgcttcagcccctgatcgcctcggatactatgaggctcaaaggctggaacagctaag

SEQ ID NO: 554672 - DNA, 201 bp, Homo sapiens
cggctaggctcaagtgatcctcccacctcagcctcccgaatagctgggtctataggtgtgctgccatgcccagctaatttttgtattttttataaagacakgattttgccttgttgcccaggctggtctcaaactcctgagctcaggccatcctctcactcgggcctcccaaagtactaggattataggcatgaccaccac

SEQ ID NO: 554673 - DNA, 201 bp, Homo sapiens
aggttctgttagatgttagaattatgatgttagagttgtctccagatttcacggaggcacctctttcctggacgtgccagactcttctgcgccctgactcrccgcagtgagagtacctagaccatgactttcccaggtgttgtgtgttctttcaaccctactgggaagtccctttctcagactgcctgggagacgtctgcc

SEQ ID NO: 554674 - DNA, 201 bp, Homo sapiens
ggacctggtgtcggcccaaaggcacctgtaggaagtgactggagaccctggttgggaggtcccggccagtgaggaggaacgggattgggacccacttaaaaaagtggccacattttgggagagcagttgtgctgtgctaggggtccgcttcagcccctgatcgcctcggatactatgaggctcaaaggctggaacagctaa

SEQ ID NO: 554675 - DNA, 201 bp, Homo sapiens
aagacaggattttgccttgttgcccaggctggtctcaaactcctgagctcaggccatcctctcactcgggcctcccaaagtactaggattataggcatgascaccacacctggccagtacatcttaaaaatgatttctgatccacgttgaataatgatggcctataaatattttttcttgcacttgccttgttgggttttg

SEQ ID NO: 554676 - DNA, 201 bp, Homo sapiens
tcaatgtgcttagtctttttcttggctctgctggtgctacacccgagaagtcatttagatttggtgtctgaagtaactttgtgatgcaaaaacaggatcaktgaacgttcagtgtttgattttaccttgaaatttcacattttaacaaaggacagaaacatcaagtgaagaaagtctttgtaaatgtttttcagttttcaa

SEQ ID NO: 554677 - DNA, 201 bp, Homo sapiens
tcttttctggatgttttcactgggctgatgctttatgtagggtctttatttgaagcttacttgttgtctctggtttcagaggggggtatgttaatgaggtrtttttggtattgaagctttggggtgtgatccagtaggtggcgcttaggtgaattggtcagttgctagactcttgtttggttgcgtggctcccctgtttcc

SEQ ID NO: 554678 - DNA, 201 bp, Homo sapiens
agctgtacagattctcttctaccacttcccatcctgttcaaggggagaggaactagactctaactctggcgggggaggaacatgttcctgcggggatggtrgagactgtggaggtcagcttgacttccagctcatttggcttcttttaggtgaagagaaatgtgtttctggcaaagatgatgtcagttaggagactgaatc

SEQ ID NO: 554679 - DNA, 201 bp, Homo sapiens
acttctgggcatcttaaggcccagacccagagctgtacagattctcttctaccacttcccatcctgttcaaggggagaggaactagactctaactctggcrggggaggaacatgttcctgcggggatggtggagactgtggaggtcagcttgacttccagctcatttggcttcttttaggtgaagagaaatgtgtttctgg

SEQ ID NO: 554680 - DNA, 201 bp, Homo sapiens
ctcccaaagtgctgggattactggagtgagctactgtgcccggtcataaaattatcatattgcattatttagctctgtcagacccgttaggttttttttttatgctggctattctatccttcagcttctatatcattttactgtgattgttcttttccttagatttggtttcaacatcctcctgaatctcagtgatctttg

SEQ ID NO: 554681 - DNA, 201 bp, Homo sapiens
ggacagcaggagactggctgggctttttcatctcctttgtggtctggatcttccactgactgtcttactaggtggcctctttctctaacagggaagttgarcttctcctccctgcttccaagggaggagaagcagaaacttctgggcatcttaaggcccagacccagagctgtacagattctcttctaccacttcccatcc

SEQ ID NO: 554682 - DNA, 201 bp, Homo sapiens
aaagctggtggcctgcccctccccctgggagctccttcttagggtggtgcaatgccgctactggtagctggctggaattccaagccagtgggtcttatctsgtgaggtgcagtggaagtgggggctgttgctgcttagctgcctggattcatcctctttcctaagtgtatgtacaggagtctaacctctcactttgccaga

SEQ ID NO: 554683 - DNA, 201 bp, Homo sapiens
caacatttgcttacctgaaaaggatcttgtttctccttcacttaggaagcttagtttggcaggatatgaaattattggttgaagattttttttttttttttaaagaatgttgaatataggcctctaatctcttctggcttgtagggtttcactgttagcctaaggggatccctttgtaagtgacctgccctttctctctag

SEQ ID NO: 554684 - DNA, 201 bp, Homo sapiens
tcttagggtggtgcaatgccgctactggtagctggctggaattccaagccagtgggtcttatctcgtgaggtgcagtggaagtgggggctgttgctgcttrgctgcctggattcatcctctttcctaagtgtatgtacaggagtctaacctctcactttgccagagctacggctacttttgctggaaagcctgagtagcta

SEQ ID NO: 554685 - DNA, 201 bp, Homo sapiens
tatgtacaggagtctaacctctcactttgccagagctacggctacttttgctggaaagcctgagtagctaaggctccagggtctccacgcgtgcctgagcrgctgctctgccaagactccacgctgctctgtcagaatgaagactgaaggcactggtagagaggggtttacgtggagagctcctgacctgaggtttgcaaa

SEQ ID NO: 554686 - DNA, 201 bp, Homo sapiens
gtttacgtggagagctcctgacctgaggtttgcaaagatctgtgggagaagcatggtttctgggtcgctcattcggtcattgcttctctgggcaggggagkatcccctggctccgtgctgacccccggggggccattgtcctgtcttgcttttctttgttctctgtgggtcaggttgtttccttgattagtcccagtgcga

SEQ ID NO: 554687 - DNA, 201 bp, Homo sapiens
aataatcatgaagagttagttcagttacttcttgacaaaggggcagatgcaagtgtaaaaaatgaggtaaatgagtccatctttatgtaaagattttcctyggagggggagaaaacatttataagcatgtaaaatttttgttgtttcctgtttcagttcggcaaaggtgtcctagaaatggccagagtttttgacagacag

SEQ ID NO: 554688 - DNA, 201 bp, Homo sapiens
tagcggaagtgaaaatcactgggggccatcttggaggctggctgccacagagattagcaactggaatactgttttcaaagaaacagctttggctttttatrttttctctattatgtctttgtttttttttcattgatttcacttttatccttattatttccatcattttaatttcattcggcttaatttgctgggattttt

SEQ ID NO: 554689 - DNA, 201 bp, Homo sapiens
ccgttctgtttccacacccttagttttctattacttttaggaatgacctttgttaactaagtcattaaaatccaataaacataaactcttcagaccccacwgctggatcatactcttggcagcaagcagaggaaggcaggggctaccactgttttacagaataatagtaagtcaatgatccaagaaatgacttcccaggga

SEQ ID NO: 554690 - DNA, 201 bp, Homo sapiens
ccgccagggagggcgcgaccgcctgaccgggcttcaggagcagtgtcctcagccggtgacctggccgctaccctcgctcagtgtccccggcgacgcgcggrtcctcacgcgctccctcacttcctgcggcttttggtccctcccgctcgccgtccctttagttctgcccacttcgcctccgggttgtcagggcaaccgtag

SEQ ID NO: 554691 - DNA, 201 bp, Homo sapiens
aactatctttttgataacacaggtcagccacatttaatatgagagagaactacacaaggcctggatagcggaagtgaaaatcactgggggccatcttggakgctggctgccacagagattagcaactggaatactgttttcaaagaaacagctttggctttttatattttctctattatgtctttgtttttttttcattga

SEQ ID NO: 554692 - DNA, 201 bp, Homo sapiens
gcctaggaaatttgaactatctttttgataacacaggtcagccacatttaatatgagagagaactacacaaggcctggatagcggaagtgaaaatcactgsgggccatcttggaggctggctgccacagagattagcaactggaatactgttttcaaagaaacagctttggctttttatattttctctattatgtctttgt

SEQ ID NO: 554693 - DNA, 201 bp, Homo sapiens
ttttataatgtagcctaggaaatttgaactatctttttgataacacaggtcagccacatttaatatgagagagaactacacaaggcctggatagcggaagygaaaatcactgggggccatcttggaggctggctgccacagagattagcaactggaatactgttttcaaagaaacagctttggctttttatattttctcta

SEQ ID NO: 554694 - DNA, 201 bp, Homo sapiens
atgtgttttataatgtagcctaggaaatttgaactatctttttgataacacaggtcagccacatttaatatgagagagaactacacaaggcctggatagcrgaagtgaaaatcactgggggccatcttggaggctggctgccacagagattagcaactggaatactgttttcaaagaaacagctttggctttttatatttt

SEQ ID NO: 554695 - DNA, 201 bp, Homo sapiens
ctgtctgcctcggcctcccaaagggctgggattacaggtgtgagccactgtgcctggccttttctcatatgtttatagcagcacaatctgcaactgaaaawatatggaatcagttcaaatgcccatcagtgaacgaatggataaagaaaatgtggtatatatgtaccatggaatactactcagccataaaaaggaacaaaa

SEQ ID NO: 554696 - DNA, 201 bp, Homo sapiens
ttccctcttgtttcccaggctggagtgcagtggtgcgctctcggctcactacaacctctgcctcctgggttcaagcaattctcctgcctcagcctcccagktagctgagattataggcatgcgccaccacacgcagctaattttgtatttttagtagagataaggtttctgcatgttggtcaggctggtctcgaactcctc

SEQ ID NO: 554697 - DNA, 201 bp, Homo sapiens
acagaaaatacgagagaataaatatgttttttctccctttttttttttttttttgagacaagagtttccctcttgtttcccaggctggagtgcagtggtgygctctcggctcactacaacctctgcctcctgggttcaagcaattctcctgcctcagcctcccaggtagctgagattataggcatgcgccaccacacgcag

SEQ ID NO: 554698 - DNA, 201 bp, Homo sapiens
cccacagaaaatacgagagaataaatatgttttttctccctttttttttttttttttgagacaagagtttccctcttgtttcccaggctggagtgcagtgrtgcgctctcggctcactacaacctctgcctcctgggttcaagcaattctcctgcctcagcctcccaggtagctgagattataggcatgcgccaccacacg

SEQ ID NO: 554699 - DNA, 201 bp, Homo sapiens
accttgcctgcaaccttgtgagagcctatgcagtgaacccagttgagctgtgccccaattcctgacccacagaaaatacgagagaataaatatgttttttytccctttttttttttttttttgagacaagagtttccctcttgtttcccaggctggagtgcagtggtgcgctctcggctcactacaacctctgcctcctgg

SEQ ID NO: 554700 - DNA, 201 bp, Homo sapiens
tcgtttgccacagctgtttctcttaaaagttctctgataagtcattgccaccactacttccaaatagcatatgttaactttgagttaattttacataaacytgggttaatttacaaaattttggcaccaacaacatggttaggcaaggcagcatggatgggtattggaatctgtcaatctgggttgctgtataccagctct

SEQ ID NO: 554701 - DNA, 201 bp, Homo sapiens
ggtgctttagaaattctggcttacttgtatttttgctggccttctaatgatttcactcatcaatcagaagatatttgtgtccaccttcctgcttcctctcyggtgatcttgtctattcttggccattttagagttgacttagcagccttcacaaaactggttggaatttccactgggattaaattgataggtcatttttgg

SEQ ID NO: 554702 - DNA, 201 bp, Homo sapiens
agcagaaacaggcatgtgtttgctcatgatctgtaatttggctagggtgttgatggcttgtttctgccccatgtggtcttggccgttgcagctctcttggkgctggaagaaccaaatggcttcacccatgtgtgatgcatcagctgggatggccaggacagcaggagactggctgggctttttcatctcctttgtggtctg

SEQ ID NO: 554703 - DNA, 201 bp, Homo sapiens
aaaagtttctgtaatgccattggcgttatttcttcattgtctttcctacagtttcttttttgttgatacatactatctcagttatctgctgcatgacaaascagccccagacttagtggttgacagcagaaacaggcatgtgtttgctcatgatctgtaatttggctagggtgttgatggcttgtttctgccccatgtggt

SEQ ID NO: 554704 - DNA, 201 bp, Homo sapiens
ccctggctccgtgctgacccccggggggccattgtcctgtcttgcttttctttgttctctgtgggtcaggttgtttccttgattagtcccagtgcgagtayctggctgtttcagttgaaggtgttgtattcactcgccccttctgttcctctccgtgagagtcaggtacaccagctgcttctagtcagccatcttggccac

SEQ ID NO: 554705 - DNA, 201 bp, Homo sapiens
gttgtttccttgattagtcccagtgcgagtatctggctgtttcagttgaaggtgttgtattcactcgccccttctgttcctctccgtgagagtcaggtacmccagctgcttctagtcagccatcttggccactcactcttgtgtgtatttatgctctgatttctgcagaagtttccaggggtgggatggtgagacagggat

SEQ ID NO: 554706 - DNA, 201 bp, Homo sapiens
tcatctatgttccacatacttggatcagatagagcatttgtctcttggctttgttagtcactgaaggattacagaagcaaactgagttccagcaggtcaartacaaccttattagtttgatatgttaagcagccctttggaagggtcagtgggggtggtatgatattgatgggcatggtacaatatatgcttgttgaagac

SEQ ID NO: 554707 - DNA, 201 bp, Homo sapiens
gtcactgaaggattacagaagcaaactgagttccagcaggtcaaatacaaccttattagtttgatatgttaagcagccctttggaagggtcagtgggggtrgtatgatattgatgggcatggtacaatatatgcttgttgaagactgtggtagctcacacatcagctgaattttgtatctctttagcttttcaggggttct

SEQ ID NO: 554708 - DNA, 201 bp, Homo sapiens
acaatatatgcttgttgaagactgtggtagctcacacatcagctgaattttgtatctctttagcttttcaggggttctttaagcaacagggaggtatgctyatatgtgtgccttatgctcagaaaaatagctcgatcaccaagcagctgtaatccactcgactggtctctcttccttatggaaactgggtcctgaagttcg

SEQ ID NO: 554709 - DNA, 201 bp, Homo sapiens
agcagctgtaatccactcgactggtctctcttccttatggaaactgggtcctgaagttcggtgtcattcttttttttagaaatcatgccaccctcaaagcytcatccacctgtcgtgggcaaagtgactcatcacagcattgaattatactgggatctggaaaagaaagccaaacgccaaggacctcaagagcagtggttc

SEQ ID NO: 554710 - DNA, 201 bp, Homo sapiens
gttgtgttcactgacgtggaatggccccgcatggtctaccctggctagcttctctgatctcatgtcataccattgtccccttgtcaactctcttataccaygctggctgcctctcagcctggacaggccaagctggttcccatcgcaggatcttgctcgttgctgtggtcttgaatacatttccttctgtttttatacagc

SEQ ID NO: 554711 - DNA, 201 bp, Homo sapiens
ataccattgtccccttgtcaactctcttataccatgctggctgcctctcagcctggacaggccaagctggttcccatcgcaggatcttgctcgttgctgtkgtcttgaatacatttccttctgtttttatacagctggttccttcacaccatgccaatctcagatgaaacatccccccgcccccagaaggccatctgaagt

SEQ ID NO: 554712 - DNA, 201 bp, Homo sapiens
tccccccgcccccagaaggccatctgaagtagccatcctttcatgcaggcctcctgtagctcagaaccttgttttgtatgccacatagcatttagctctgytgggcttattttacttgtttacttgtttgcttagtttgtttaccttgttgtttacttgtttacttcttgttcctttcctgcctcctcacccagtattaaa

SEQ ID NO: 554713 - DNA, 201 bp, Homo sapiens
tttcccaacctgtctgctggttacttttcagagtacttggatcattgctatttatattttgtccagagtttcaaattgtgatcagtggaaatgacaggccrtagcatacatacgccatcctggccagcatcacaggtggtcagtacatctttctgttgttgttttgagacagggtctcactctgttgcccaggctggagca

SEQ ID NO: 554714 - DNA, 201 bp, Homo sapiens
tcttcttccactgctacctggaagctggagtgacctttcaaaatatacatcaaatcagatcatgtcactctcctgccaaaagccctccaaagtccttacgktgatctagctgcctcttcaaactcatcacacatctgatcttagatgtattatgcttcaagcacattggtcttcttgtagtccctcaaacaagcttctttc

SEQ ID NO: 554715 - DNA, 201 bp, Homo sapiens
agctgacaccttgcctgcaaccttgtgagagcctatgcagtgaacccagttgagctgtgccccaattcctgacccacagaaaatacgagagaataaatatsttttttctccctttttttttttttttttgagacaagagtttccctcttgtttcccaggctggagtgcagtggtgcgctctcggctcactacaacctctgc

SEQ ID NO: 554716 - DNA, 201 bp, Homo sapiens
cgtttgccacagctgtttctcttaaaagttctctgataagtcattgccaccactacttccaaatagcatatgttaactttgagttaattttacataaaccygggttaatttacaaaattttggcaccaacaacatggttaggcaaggcagcatggatgggtattggaatctgtcaatctgggttgctgtataccagctctg

SEQ ID NO: 554717 - DNA, 201 bp, Homo sapiens
cagctgacaccttgcctgcaaccttgtgagagcctatgcagtgaacccagttgagctgtgccccaattcctgacccacagaaaatacgagagaataaataygttttttctccctttttttttttttttttgagacaagagtttccctcttgtttcccaggctggagtgcagtggtgcgctctcggctcactacaacctctg

SEQ ID NO: 554718 - DNA, 201 bp, Homo sapiens
aacccagctcagctgacaccttgcctgcaaccttgtgagagcctatgcagtgaacccagttgagctgtgccccaattcctgacccacagaaaatacgagasaataaatatgttttttctccctttttttttttttttttgagacaagagtttccctcttgtttcccaggctggagtgcagtggtgcgctctcggctcacta

SEQ ID NO: 554719 - DNA, 201 bp, Homo sapiens
gtggtgtctaggacctgagggtggcctccagccaatacccaataaaaaacatagctacataatcatacagacataaggaaatgaattttgtcaacaacctsaatgagcttgaacccagctcagctgacaccttgcctgcaaccttgtgagagcctatgcagtgaacccagttgagctgtgccccaattcctgacccacaga

SEQ ID NO: 554720 - DNA, 201 bp, Homo sapiens
ttgctgatttgaggaagtgtgtgaccatattgagaaagcccaacagcaggtggtgtctaggacctgagggtggcctccagccaatacccaataaaaaacakagctacataatcatacagacataaggaaatgaattttgtcaacaacctgaatgagcttgaacccagctcagctgacaccttgcctgcaaccttgtgagag

SEQ ID NO: 554721 - DNA, 201 bp, Homo sapiens
tgtgtgtatgtgtgtgtgtgtgtgtgcacagaagaaaggagagggaagaggagaggaggaggaggagagagacatacattaggatatgagatagacatatwgctagcatgcacgcaagattctccttgctgatttgaggaagtgtgtgaccatattgagaaagcccaacagcaggtggtgtctaggacctgagggtggcct

SEQ ID NO: 554722 - DNA, 201 bp, Homo sapiens
tgacgtaatattgcaaatgtgatgggttgttactcctgggatgtgtgtgtgtgtgtgtgtgtgtatgtgtgtgtgtgtgtgtgcacagaagaaaggagagrgaagaggagaggaggaggaggagagagacatacattaggatatgagatagacatattgctagcatgcacgcaagattctccttgctgatttgaggaagtg

SEQ ID NO: 554723 - DNA, 201 bp, Homo sapiens
tctgtgacttgtttctaactgacgtaatattgcaaatgtgatgggttgttactcctgggatgtgtgtgtgtgtgtgtgtgtgtatgtgtgtgtgtgtgtgygcacagaagaaaggagagggaagaggagaggaggaggaggagagagacatacattaggatatgagatagacatattgctagcatgcacgcaagattctcc

SEQ ID NO: 554724 - DNA, 201 bp, Homo sapiens
atgatctcttccttttttagtgtggatgggatcactgctcagccttttggatgaaatcgagtgaacgtgagtaggatctgtgacttgtttctaactgacgyaatattgcaaatgtgatgggttgttactcctgggatgtgtgtgtgtgtgtgtgtgtgtatgtgtgtgtgtgtgtgtgcacagaagaaaggagagggaaga

SEQ ID NO: 554725 - DNA, 201 bp, Homo sapiens
gttaactttgagttaattttacataaacctgggttaatttacaaaattttggcaccaacaacatggttaggcaaggcagcatggatgggtattggaatctrtcaatctgggttgctgtataccagctctgggactgggggcaagttgtagcagccctgagcctcctgcttcacctgtatcaggggaggctgagacccacct

SEQ ID NO: 554726 - DNA, 201 bp, Homo sapiens
atgatctcaatgtcctggtgttgtactctgtatgatctcttccttttttagtgtggatgggatcactgctcagccttttggatgaaatcgagtgaacgtgrgtaggatctgtgacttgtttctaactgacgtaatattgcaaatgtgatgggttgttactcctgggatgtgtgtgtgtgtgtgtgtgtgtatgtgtgtgtg

SEQ ID NO: 554727 - DNA, 201 bp, Homo sapiens
attgatataaattgttaaaaataatgatcgtagatagataatgtatcagagtttgggctcagccgctgtagctgctgttgacccagaggaaccactgggakcctcacatctcagggcagcacatcgtttgcagcaatggttggttctgtacaaccttttatgaaattaggtgaggcccttgattagaatttgttttttaaa

SEQ ID NO: 554728 - DNA, 201 bp, Homo sapiens
atttatatggctcatcagaattcactagattggttaagcaggaaatttacagagatttttttctttgctgtaaatgtttttctaaattgaaaaacttctawtactgtcttctggaatactagaaataagtgcaagtgattgtttttggcaggaggccacataaacatttctgcttctctgtgacttatgggtagcattgat

SEQ ID NO: 554729 - DNA, 201 bp, Homo sapiens
ttggcctgtacatgttgcttttattttttttctggacttaagatatagaccaaaccttgacatttctggcctttgagtctttcacaactgtgattataatrcattagctcttctagaagttagaagtgactttggattaagtctttcataaggtggctaaatgaatttatatggctcatcagaattcactagattggttaa

SEQ ID NO: 554730 - DNA, 201 bp, Homo sapiens
gcagggctgctgttgccgccgcctggaggaggcggcggcggcagcgcgggaagtggcggcggcggcggcggcggggtgggtgtccccgggctgctagtagkttcagccggcgttgggggcgaccctagcctaagcagcctgccggccggggccgccctttgcctcaagtacggcgaaagcgcgagccggggctcggtggcc

SEQ ID NO: 554731 - DNA, 201 bp, Homo sapiens
ttttttctttgcatttaaacatataaacttggaggaaatgtacttacctaatgcttaaccctttggcttccactcctgcaaacagatctgaaccgatttcsgatgcctccaggacaaagggagcttctttcttgatggagaacttggcattctttggaaggaaattgacactgggcattatgaactctcagattgagcagc

SEQ ID NO: 554732 - DNA, 201 bp, Homo sapiens
taagaacacaaagccatctttttccattactccccagatttcttgcgctgtcctttcctccacctcctatctgattagttcctacattttctcattcctgyagaagcatctccctactttttattaccttgttccattcacttggctacaatagcagttcatgtcttatcacccttgcacaatagctgccagggcctctaa

SEQ ID NO: 554733 - DNA, 201 bp, Homo sapiens
cccaggggacatttggcactgtgattgtccaggctgggggaagtgctgctggtatctagtgagtgggcggagaccagggctgctgctgaacgtcctacagygcacagcacagcccccacagtggagaatggtcccaccccaaatgtcaaggtgccaacattgagaaaccctagtttcagcaaacatactttttcatttaac

SEQ ID NO: 554734 - DNA, 201 bp, Homo sapiens
atagcttccaggcagcaggttaagcaagcttaaagagttcaaagttaatggagttagaggtagtacgatgtttctcctttgagaagtgaatgggttggacrtgatgcctttccaacaggtcctctggctctaatgttctatgcaaaggtttgtatttctgcccacatcttcctttagcctgctgggacagtctctgtgtgt

SEQ ID NO: 554735 - DNA, 201 bp, Homo sapiens
gagaatggtcccaccccaaatgtcaaggtgccaacattgagaaaccctagtttcagcaaacatactttttcatttaacaaagactgatgacctaagtgccrttcctttaactaggtgttggaaacagacgcaaccattcttgggactgtacagagaagcccacactattgtgggggtttgttatctgcaggtagcacgggg

SEQ ID NO: 554736 - DNA, 201 bp, Homo sapiens
cacagctgatttctagttcaccaggatatactcaaagacatgatgtcttgttaatcatgctcatgactcttcccattaaatcactgaatccttgtgaggcytttagaaagaggagctggccctggaagctctttgctctcatgctctgagatggatagatgcacagccttctggcaggtagggcagtaggaatgctagatc

SEQ ID NO: 554737 - DNA, 201 bp, Homo sapiens
tgagcatgcaaaagcagttggttaaaaacaccttccctgctattcctcaccagctgtgacaaaagttttccccaaacttcagtcattgaagagtcactctyacagtttttgctgcatttatttaatgactgcaccacgtttaacatggaattaaaattagtccatttggaacaaggaatgtatctgtgaaaccacaggtag

SEQ ID NO: 554738 - DNA, 201 bp, Homo sapiens
gttatactgaatcgcccaaggacacagggactgagcacatacaacacccgcctctgccctcactcgttgctactttttgcctgagcagatttcagcgtggkttgggaagtgtaggatcagattcccagattcccagtacaatcatcaacaacaataacaaccactaccacaatgtattgatcaactactatgtgttgggca

SEQ ID NO: 554739 - DNA, 201 bp, Homo sapiens
tgctctttccttcttctgactataagcacgatttctgagactctttcgcctgacttgttgggctctaaaatcacagaatattagagctggaggggatcttraacatccacttgaaaagtgactgacctgagaccacacagctgatttctagttcaccaggatatactcaaagacatgatgtcttgttaatcatgctcatga

SEQ ID NO: 554740 - DNA, 201 bp, Homo sapiens
gattctgtagctcacatttatcagtacaaagaacctgacagataaacctaggttgtggacctctgacaaatagaaatcagtgatggtgcatggtactctakggctttcagtgtagaacttaaaaacgatgagaatctaggattggaattttaaaagttgatttacatgattctcctgtaatgatgagagcaaaatctgtct

SEQ ID NO: 554741 - DNA, 201 bp, Homo sapiens
gcctggccctgaatttcacgtaatttctacatgtcacgaaatattgttgttttgattctttttttgaaccacataaaaacgtgaaaactgttcttaattcscaggccacaaaaccaggtggcacctgggccttggcccttggccatagcttggtgactgtcctctaagatagagccgctacagcttcccgccttcccacag

SEQ ID NO: 554742 - DNA, 201 bp, Homo sapiens
tcacatttttaatataagcacagaaataatgactgaaggataccgtctaaatgttaacacaggctgatacaaagggataaaattatgggcatttttggttttcttctttgtatttttatgtattcttccaaattctctataatgagaatacaatatttgtatgatattccaacgtctcaaaggtaataattcagtttaaaa

SEQ ID NO: 554743 - DNA, 201 bp, Homo sapiens
cacatttttaatataagcacagaaataatgactgaaggataccgtctaaatgttaacacaggctgatacaaagggataaaattatgggcatttttggttttcttctttgtatttttatgtattcttccaaattctctataatgagaatacaatatttgtatgatattccaacgtctcaaaggtaataattcagtttaaaaa

SEQ ID NO: 554744 - DNA, 201 bp, Homo sapiens
acatttttaatataagcacagaaataatgactgaaggataccgtctaaatgttaacacaggctgatacaaagggataaaattatgggcatttttggttttcttctttgtatttttatgtattcttccaaattctctataatgagaatacaatatttgtatgatattccaacgtctcaaaggtaataattcagtttaaaaaa

SEQ ID NO: 554745 - DNA, 201 bp, Homo sapiens
cggtttcatccgtggggcagctgaggcagatggggaaagaagagtgaactgtcatctccttgaactccagcaagagctgctgagcgatttacacacaaggytcccgaggtggttatatgacctctaaccttcccaggcattttgattagcagcacctcacttgatcttcacaactgtgaggtcaagttgatgagctaggag

SEQ ID NO: 554746 - DNA, 201 bp, Homo sapiens
acatgaagtcagccgagggggtggcccaacagctgttcaagaccactttaaacctggaaataaaacaaaatggcatcactttgaaacagagaatcttatgyctacaaacatctgatgattaaaaagtatgtcagctagtcttttttttctttgcatttaaacatataaacttggaggaaatgtacttacctaatgcttaac

SEQ ID NO: 554747 - DNA, 201 bp, Homo sapiens
atttgttctttgcctggaaccacagatggtgtcactgctgtaactccagcaggcttcacctcttcctcccaagctttcccaagccagagcaaagtagcccrataaatgcctggttccactgttcagccctgtctctagatagtgtacctaccccttgttgatcagctgccactgcaagggatacatgaagtcagccgaggg

SEQ ID NO: 554748 - DNA, 201 bp, Homo sapiens
ctgccacagctgcctaagctcaagtcacacccaacacatttctgtgtgtgaactgtgaggttttgcattgaaaatttgtatttatggtatattatttaaaytatatatatctacatagttacttttgtaaaaatgtggtcacatttttaatataagcacagaaataatgactgaaggataccgtctaaatgttaacacagg

SEQ ID NO: 554749 - DNA, 201 bp, Homo sapiens
tgaggacatgtctcttattattattatttttttttaagaaaataagctcattccagttctaagacttgatgttttgtttatgcctgaagctcagctctacrcagctgatggtgggcaatgatttttgacaatcctggtgtctccgtgttgccaactattgtaaaaccttcatgggatcatatctataattttatctggtta

SEQ ID NO: 554750 - DNA, 201 bp, Homo sapiens
caccgctctgaactacctgtgggctctcaggctaatccttcctccctctgggcttctggtcctcatctgtacaacagactaggttattctaggatcccttrcagctctcgccttctgagttcagcagggctgatagcttccaggcagcaggttaagcaagcttaaagagttcaaagttaatggagttagaggtagtacgat

SEQ ID NO: 554751 - DNA, 201 bp, Homo sapiens
cctgtcccagtcaggaacctcaatacattgggccaaatattttaagagctagatcttaaatataaatctctggagggggttgtagtgaaaactaatcttgwctaagagtcagacattggctgtcttattgtctgttgaccttgcctcagttttctcatctgtaaaatgggaaggttggtcttatatctttgcggaagattg

SEQ ID NO: 554752 - DNA, 201 bp, Homo sapiens
ctctataaaataatgattattatactgtctactttagagagggtttaatgacatttagataaattaatatttgtaaaacacctatctagaacaatgtttgrtatattgtaagagctgtataagtgtttgctaaataaaaatagaggtccaaaatagctccacttttgttatccaattatgtttatccttgacattaatttt

SEQ ID NO: 554753 - DNA, 201 bp, Homo sapiens
agagttcaggggctggtcagagggagacctcttgatctcgccccctctgcgccactcaggtgtgctttaaagtataattttcaatccttaaaagttttgcyggggccaaagttaagcttctcttaaaacactctctgccttttaacagcatagccccacgaaatcccagaagtgtctcttttccttacctgagaagctata

SEQ ID NO: 554754 - DNA, 201 bp, Homo sapiens
attatactgtctactttagagagggtttaatgacatttagataaattaatatttgtaaaacacctatctagaacaatgtttggtatattgtaagagctgtrtaagtgtttgctaaataaaaatagaggtccaaaatagctccacttttgttatccaattatgtttatccttgacattaatttttccttggcctgatgggtt

SEQ ID NO: 554755 - DNA, 201 bp, Homo sapiens
ctaagtgcttcctaaagattatttcatttaattctataacaaacctatggggtaagtgctattattatccctgctaacaaatgcagagatagaagcccagrgaggttggttaactaacttgcccaaagtcacacaactagtaaatgatggaacaaggcttcaaactagtggtctgttgagaaggcccattttcttaaccac

SEQ ID NO: 554756 - DNA, 201 bp, Homo sapiens
gtggtggcacgtgcctgtaatcccagctactcaggaggctgagtcaggagaattgcttgaagctgagatcacgtcattgcactccaacctgggcgacacgktctcaaaaaaataaatataaataaataaataaaacacaaaacctgaccacaatcctcccctgattaaaccatcaggtgctccattgcctttcagacagtt

SEQ ID NO: 554757 - DNA, 201 bp, Homo sapiens
ttgcttgaagctgagatcacgtcattgcactccaacctgggcgacacggtctcaaaaaaataaatataaataaataaataaaacacaaaacctgaccacartcctcccctgattaaaccatcaggtgctccattgcctttcagacagtttatactgggggtttacaaagtttcatctcacaacgctttctctccaaagcag

SEQ ID NO: 554758 - DNA, 201 bp, Homo sapiens
accactaccacaatgtattgatcaactactatgtgttgggcactgacgatggactctgtcaggattttgttagcgaacaaagcaaagatatctgccttcartgatctggcatattctagcaggggagacaaacagtaagtaagtaaatgatataatatgtaactatagaccataggacattatctagaaaagctataaaac

SEQ ID NO: 554759 - DNA, 201 bp, Homo sapiens
atggaaaacaagtgaaattcagggatattaaggcactgtgttatactgaatcgcccaaggacacagggactgagcacatacaacacccgcctctgccctcrctcgttgctactttttgcctgagcagatttcagcgtgggttgggaagtgtaggatcagattcccagattcccagtacaatcatcaacaacaataacaacc

SEQ ID NO: 554760 - DNA, 201 bp, Homo sapiens
gctccatttgggaaaagtctgattggtattggagggggtgcttaagtactttcctgcttggctacatcattacatttttataacaagttaagcacagaagygctgagcattgtaaaaggaaacttcaggaaacttttcgtcccaggaaaatggacttggcgaggacatacctgctttatttggagcacacgattttgcaga

SEQ ID NO: 554761 - DNA, 201 bp, Homo sapiens
taagtactttcctgcttggctacatcattacatttttataacaagttaagcacagaagtgctgagcattgtaaaaggaaacttcaggaaacttttcgtccyaggaaaatggacttggcgaggacatacctgctttatttggagcacacgattttgcagaggcttctgcaaagatggccaacaagacaaaggccttcgtcac

SEQ ID NO: 554762 - DNA, 201 bp, Homo sapiens
gcaggagagtttctcactgtcgcagatgaacgtctcacagtgtaaccacaccttggagagtttggggatgttctggaaccggaaagcattgaattggaagrttgccctgtgatctctcccattctcatgcacgaggacggtttcatccgtggggcagctgaggcagatggggaaagaagagtgaactgtcatctccttgaa

SEQ ID NO: 554763 - DNA, 201 bp, Homo sapiens
gactctgtcaggattttgttagcgaacaaagcaaagatatctgccttcaatgatctggcatattctagcaggggagacaaacagtaagtaagtaaatgatrtaatatgtaactatagaccataggacattatctagaaaagctataaaacatgcagagtgggataaggaagatcaggagtgtgaggaagggcaggttgcag

SEQ ID NO: 554764 - DNA, 201 bp, Homo sapiens
taaattatatatatctacatagttacttttgtaaaaatgtggtcacatttttaatataagcacagaaataatgactgaaggataccgtctaaatgttaacrcaggctgatacaaagggataaaattatgggcatttttggttttcttctttgtatttttatgtattcttccaaattctctataatgagaatacaatatttg

SEQ ID NO: 554765 - DNA, 201 bp, Homo sapiens
tatcaagtttgaaaatctacaagaattaaagagactgtgtcactggggtcccatcatagcccttggtgttatagcaatatgttctaccatggccatgattractctgtgttgtggtattggcccttacatacaactggaggaagtgtgaatttcatcatgttgataaattggactgtcatgattctttataattacttcaa

SEQ ID NO: 554766 - DNA, 201 bp, Homo sapiens
attctgcatatgcctttgaattcctgcccctctttaccacctcttcctccccctcaaaggaaaaacatttcatccaagtaagttaacggcattttctgtargattttcttatgcactgcacactctggacctcacctgcagatacagttccccccttgccaggagcatctgcatgtggtacttctcttttccctcagttga

SEQ ID NO: 554767 - DNA, 201 bp, Homo sapiens
taattgtttcttcaatattaaaaaagtatattaataaaggactggtaaagtcctgaatattaataaagtctgttattagaccggattaacgaaaagtgccwaaaagtgaaaacatggctgccaaatggctaccgtaagtcatttgcatgccacataaaaggtgaatataggaaacatttttgttcattctgtaactcccac

SEQ ID NO: 554768 - DNA, 201 bp, Homo sapiens
taatcttaaaggaaccaaggtcgcattattaaattttactatcatttaatttccagatgaaaataattctcagaaacaaaacttctattgagtcatggatygaagagaaggtaaattttaataattgtttcttcaatattaaaaaagtatattaataaaggactggtaaagtcctgaatattaataaagtctgttattaga

SEQ ID NO: 554769 - DNA, 201 bp, Homo sapiens
ttctgcatatgcctttgaattcctgcccctctttaccacctcttcctccccctcaaaggaaaaacatttcatccaagtaagttaacggcattttctgtagrattttcttatgcactgcacactctggacctcacctgcagatacagttccccccttgccaggagcatctgcatgtggtacttctcttttccctcagttgat

SEQ ID NO: 554770 - DNA, 201 bp, Homo sapiens
taatttccagatgaaaataattctcagaaacaaaacttctattgagtcatggattgaagagaaggtaaattttaataattgtttcttcaatattaaaaaartatattaataaaggactggtaaagtcctgaatattaataaagtctgttattagaccggattaacgaaaagtgccaaaaagtgaaaacatggctgccaaat

SEQ ID NO: 554771 - DNA, 201 bp, Homo sapiens
tgttgctgcgatagctctcctttgggtggaacacagtgaagatcgacatgagtgcagcccggagagatcctcttccaattgttccatttggattagctgcrtttgctaccaccttgtttgccttgggattagctttaggaacaaccatagctgttgggatgttgttttttatccaggtaagcatctcaattacctcaagtc

SEQ ID NO: 554772 - DNA, 201 bp, Homo sapiens
caagattaaatggtagttatcaacatttaagaggttccttttggaaatatgctttctgtgatttagttggggaaatagaactttgttttactggtatatgrgttcctttttagaaagcattaaaacttaaattttaagatgaggaaagagtatttgttctgaaaacttacatgctgtagttgaaggtgataaatattttag

SEQ ID NO: 554773 - DNA, 201 bp, Homo sapiens
gcgtgctttattttccgctccgactttaagataagtaagttcgcaaaggaaaagcgccccaattagtgcctccccccagaaaagcgtatgaaaatatgcargttctgagggatcattagaagcgttttttccccccttcgtgttctgggaatcggctccggatccacacgctacaaggcacaggagcttgcttccggaggg

SEQ ID NO: 554774 - DNA, 201 bp, Homo sapiens
tattatccatgtagctcagatcctcttccagatcttcagatccagtccaggcagagatgcccttccacaaatctctccggagctcgccgccctgccttccrtttccctcgctcctggaggcacttcctcttctttcttccctcgaatcttctaattcaggttcttctcatatactcttctggtcataatttcacacacacc

SEQ ID NO: 554775 - DNA, 201 bp, Homo sapiens
tagacggagtctcactctgtcacccaggctagagaacaatggcgtgaactcagctcactgcaacctccgccttccgggtttaagcagttctctgcctcagyctgccaagtagctgggattacaggtacctgccaccacacccggttaatttttgtgtttttagtggagacggggtttcaccatcttggccaggctggtctt

SEQ ID NO: 554776 - DNA, 201 bp, Homo sapiens
aactcaatttgtcagattcagtataacctcagattttgttacctgtcttttaaaaatgcagattttgtcaaatcaaataaagatcaatggatgttgggtawaatcagtttttacttaaagcatttttctttttgctgactaaaaaggttcatcttagttccttatggaaaaactgctctgctgccctgtggacaactggca

SEQ ID NO: 554777 - DNA, 201 bp, Homo sapiens
tccactaagatttggggtaagtagaaccaactagtgacactgaatttaggtggagcacaaggaagaaaaatttaaaaggacttctgggtaattgggaaagygatgctgctcttaccagaaaacttatttaaaaatattttagctcaaataagaggactggaaatgcaagttaagattctctccttcccctatcgcccataa

SEQ ID NO: 554778 - DNA, 201 bp, Homo sapiens
atgcactgaaaacagatggagctagggcttaaccccaagcagtctgactccagattctatgcaccaaacccctgtactatttgctgcccccactttgagcrtttctcttaagttgttataaaaaccagtagattgaaactttgtgtttttttttttcttaagttttataattgtttctttttaaagtaaagattagctcgg

SEQ ID NO: 554779 - DNA, 201 bp, Homo sapiens
ttgtagttaacaagtatggtatgcaataaaggttttgttttgttttgttttaactgaactttcccattttgttttctttaggttgggtttcagaccaagayactggattctcctagttaagataaagagctttgggtgcctgacagtgaaaatggtgtaatctgcgttaacagttcacagcttgaaggcatgacaattaaa

SEQ ID NO: 554780 - DNA, 201 bp, Homo sapiens
gcgtatgaaaatatgcaggttctgagggatcattagaagcgttttttccccccttcgtgttctgggaatcggctccggatccacacgctacaaggcacagsagcttgcttccggagggaggtttgaggcggcgaacctccggaagtgacagtaacagagactgcgcagggggcctgagcgggagagtcctggcgagggcgc

SEQ ID NO: 554781 - DNA, 201 bp, Homo sapiens
gccaaatggctaccgtaagtcatttgcatgccacataaaaggtgaatataggaaacatttttgttcattctgtaactcccacagaaaggtgcttctcatayaccctgagtggtcgcagaggcctaagccacacgtcaaaccatctgtttgttgtctcttagactagaggagaaagcagcccatttggaaaggagcttccac

SEQ ID NO: 554782 - DNA, 201 bp, Homo sapiens
ttatcagcaacttgaaatgctggaaaattggggttttgccatatcactctgacagttgatgaggaaaggcgatttttcaacattgagacaagagacttcatttttttctttttatttcttccaaacagatagaacagttgaaacaaaaagcagataagagagtcagaagtgtaagtacttcttttgcagtggtaatttttt

SEQ ID NO: 554783 - DNA, 201 bp, Homo sapiens
cttgtcactggatattttggatcttgctttaaaatttgaaattcagacttaaaactcagatatcatgggtgaatatttaaaggtttcttctgatcactgaygacaggttcgctataaagtaatagaagattatagtggtgcctgctgccctctgaataaaggaatcaaaaccttcttcacaagtccctgcaccgaagagcc

SEQ ID NO: 554784 - DNA, 201 bp, Homo sapiens
ggctctacagcttttgttagcttacagcttaacaactattttccttgagatgatcattctacttgggcacgctttatgtatacttctcattttgtcacacrgactgttaaaaataaaggacatctccttgagagttgagatttaatatttaaaaacaatttttactgcttcatcaaggacattcttacatggaattgctca

SEQ ID NO: 554785 - DNA, 201 bp, Homo sapiens
agctctcctttgggtggaacacagtgaagatcgacatgagtgcagcccggagagatcctcttccaattgttccatttggattagctgcatttgctaccacyttgtttgccttgggattagctttaggaacaaccatagctgttgggatgttgttttttatccaggtaagcatctcaattacctcaagtcaaaagtgtcaag

SEQ ID NO: 554786 - DNA, 201 bp, Homo sapiens
gctccggatccacacgctacaaggcacaggagcttgcttccggagggaggtttgaggcggcgaacctccggaagtgacagtaacagagactgcgcaggggrcctgagcgggagagtcctggcgagggcgctggccgagaggtgctcggcttgtagcaggtcccgcactccagcctctcgctgccagggtttgctctctgct

SEQ ID NO: 554787 - DNA, 201 bp, Homo sapiens
gactccagattctatgcaccaaacccctgtactatttgctgcccccactttgagcatttctcttaagttgttataaaaaccagtagattgaaactttgtgtttttttttttcttaagttttataattgtttctttttaaagtaaagattagctcgggatgttctttaaaaaatagttggggttaatcataaattaacctct

SEQ ID NO: 554788 - DNA, 201 bp, Homo sapiens
cagatccagtccaggcagagatgcccttccacaaatctctccggagctcgccgccctgccttccgtttccctcgctcctggaggcacttcctcttctttcytccctcgaatcttctaattcaggttcttctcatatactcttctggtcataatttcacacacaccacacacactctcgctctatctcctcccttcctttcc

SEQ ID NO: 554789 - DNA, 201 bp, Homo sapiens
gcaagcctgtataccaaagaattgcctggcagaccaagctgattgttgccacaggggaatattcacaatttccaaattacaaaatagggagaagaatagcwtcgttttatatctttacaaatctctttagtatctttgacttaagagaagatggttggattctcacttctgcattcagtctgttgagatatgttgcttcga

SEQ ID NO: 554790 - DNA, 201 bp, Homo sapiens
caaaggtgccctagtgccatgatttaaatatttttattaccattttgaaatggagaagccattctgcatatgcctttgaattcctgcccctctttaccacstcttcctccccctcaaaggaaaaacatttcatccaagtaagttaacggcattttctgtaggattttcttatgcactgcacactctggacctcacctgcag

SEQ ID NO: 554791 - DNA, 201 bp, Homo sapiens
cctgccctttcctgtgctgtttagaatttaaaaggagtcacttaattgtttaaaagctcataaagatttttctttctgttccatgaagtataattctctcrtagctcatggacatgctggattcctatttgcttgatcttttgaagaccaaagttatttaaagtagacaggattttctgcctcatgttttatgtaaatttt

SEQ ID NO: 554792 - DNA, 201 bp, Homo sapiens
catagactcatctgaatgtgacatttaatcacatactactctatggtagctcatgaagtctcatatttttatttaattctgctatcttatatctgtaactycataagattctaggacagagatcatgagttatctttatttctcctattatatctaatatagtgctatttaatagtagctatgtcaaattaagttatgatg

SEQ ID NO: 554793 - DNA, 201 bp, Homo sapiens
ctgccttggcccctgaatgaacattccttccataggccttcaatacactttgcccttgacctcagagaacacatcctcccaaagagcctttggaaggaaaycactaaaaggtaaaagggaggcatttgcccttgctgtcctatgtcaatgttgggttggggcctccccaggacctgtcctttcttggggaggcctcacccc

SEQ ID NO: 554794 - DNA, 201 bp, Homo sapiens
cacataggagcatgaacacccagtcatcctgctgaagaactacaaaaggacccctgcccactctttacctcctcccagtgcagcctctggaggggattgtratctgtctcagtcacttgctccctcttcccccaacagccacctcctccaggatcagacgacagggggtggcttcaaggaggcagagatctttttaaaaga

SEQ ID NO: 554795 - DNA, 201 bp, Homo sapiens; identical to SEQ ID NO: 402618

SEQ ID NO: 554796 - DNA, 201 bp, Homo sapiens
caaccgcgggaggaaaaggccccggctctgcagggcggccggggtgcttcctcgcctcctgcctagccgcgtttcccgtccccggcaatcgggacccgcayggattgcccaggggagacggcgcgggacgcggagggtggcgtgcgcggcgctagcccgctgtgcttcactctctcggttcccacttcctcgcggcgcctg

SEQ ID NO: 554797 - DNA, 201 bp, Homo sapiens
tgtcttgagtgaaggcataagcagaccttttggttccattaaaaatatctgtaggactgccagagaaatcagtcctccaatcccacacattcccaggggargatctaaagtcactgcctgtgacactcatcaccttgaaccccacctatgggtggacattttcttccccccaggacaattgtgagttctgtgcccacctaa

SEQ ID NO: 554798 - DNA, 201 bp, Homo sapiens
agaagtgactcgctgcaaccccaccaccagcagcaaaaacgctttcacccgggagctgcatggatgcgcggatggctgggggctgaggggacgcgtgaagyccaggcctcttgcttgggctgggcgattcccgccgtgggacgggtgggattgaccttagtggagtccagtccttcggagaatccgcgggcagtcgggacc

SEQ ID NO: 554799 - DNA, 201 bp, Homo sapiens
gattagacagctccttccctcctcaggcgatttctgttccccgcctggtctggtagacccaggaacccatggaactgccaccgcatccccttgccccacayacctgcatcttcagggatggtcccccaggtagcttctggggagtccgaggggcaaggaggccaaatcctttggaagcccggacaaggagtgggtacctgg

SEQ ID NO: 554800 - DNA, 201 bp, Homo sapiens
acctgactcccacccaatcagcagggaggggaggagcagcggccaggagcggggcctgaggaggaggagtcgagcgggggcgcgaggggcggggagcggckctcccggccagcgtaggctggctccgccgtagaggggttggcagtggcggtcagcatgggcgatgggggcgccgagcgcgaccggggccccgcgcgccgg

SEQ ID NO: 554801 - DNA, 201 bp, Homo sapiens
atgatagtatttccaaattttataccaaaactcttatattgatttatactcttagccatcttgtataaaagtgtcatttctctacgtcctcccaactcagratatacttaattttttagagtgaaatcttttcaagtgacagaataatctcattttattagtagtttaaattgctagtgaggttaagcatgtttttatgta

SEQ ID NO: 554802 - DNA, 201 bp, Homo sapiens
attttatcgacaattttcctattgataaacattcagcttttcccccttttctccctcttgcaaactatgctacaaacagtgggtctgtatttatcaactaygccaacgtttctgtgtgatagaaagctctataaaaatgctgggacaaaggaacagtgcattttaagtttagctaggcattattcctcttcaaaaaccata

SEQ ID NO: 554803 - DNA, 201 bp, Homo sapiens
agctctataaaaatgctgggacaaaggaacagtgcattttaagtttagctaggcattattcctcttcaaaaaccatatattatatcaatttatgttcttaytgagagagcttgagagaacctaattctactcagccttgccagtacaattttccaaatctgatagataaaatatggcatctcaaaaaacaaggatatctca

SEQ ID NO: 554804 - DNA, 201 bp, Homo sapiens
gagtcttggaaacctgactcccacccaatcagcagggaggggaggagcagcggccaggagcggggcctgaggaggaggagtcgagcgggggcgcgaggggyggggagcggcgctcccggccagcgtaggctggctccgccgtagaggggttggcagtggcggtcagcatgggcgatgggggcgccgagcgcgaccggggcc

SEQ ID NO: 554805 - DNA, 201 bp, Homo sapiens
gggaggagcagcggccaggagcggggcctgaggaggaggagtcgagcgggggcgcgaggggcggggagcggcgctcccggccagcgtaggctggctccgcsgtagaggggttggcagtggcggtcagcatgggcgatgggggcgccgagcgcgaccggggccccgcgcgccgggcggagtctggtggcggcggtgggcgct

SEQ ID NO: 554806 - DNA, 201 bp, Homo sapiens
gagcagggattctcaaggtaggtcccaccgtccctgtggatcacaaggagcctcctgccagacagcacatcccgaatacagctctttccattatgttctcyaggggaatgatgaacccatccagaagattccatcttttactcatgaccaggtcctcttcatttcaacctattaattgaattattaagaattatcaaccga

SEQ ID NO: 554807 - DNA, 201 bp, Homo sapiens
gctacaggaaagggaggagatggcagtggcatgcacccgcagtcagtcaaagccaccgggctcaagtcttcctcttttgcgcagcaccggtaaggagagarggtgtctatgcatcacgttggcctgggtgccatttccccaattaccccttggctgcaggctcccttcttgttggctacatttctttgatttctattttaa

SEQ ID NO: 554808 - DNA, 201 bp, Homo sapiens
ggagtccgaggggcaaggaggccaaatcctttggaagcccggacaaggagtgggtacctggggctacaggaaagggaggagatggcagtggcatgcacccrcagtcagtcaaagccaccgggctcaagtcttcctcttttgcgcagcaccggtaaggagagagggtgtctatgcatcacgttggcctgggtgccatttccc

SEQ ID NO: 554809 - DNA, 201 bp, Homo sapiens
gctcccttgaacaaatggttttttttaaatcttatttatgagacaatttggaacatgtaaaaccaggtgggatattttattatattaaggaataattgtcratttttattgtgataatagtattataggtgacttttttaagagtcccccctttttaagagatacatgttgaaatactcataagtgaaatgttatgacttc

SEQ ID NO: 554810 - DNA, 201 bp, Homo sapiens
gcaggcaggaagcaaccaaaggaacaacaggccgcctgagccgtggctcaaacagcacagggcagtggccgagcaccaggcttttcggtggagctgggatmccagcaggcagaagaggtggacaactctgaccgcagactccctacaaccccgcgatcgatgctccacctgcacgctcaaacgcacctgtttcccaaatta

SEQ ID NO: 554811 - DNA, 201 bp, Homo sapiens
agtttattggtccaaggtgagaagtgagttaggggcttaaagctccccaggttctcatgggcagccagggtcgagaggtgctgctgtagagacaatgccayggtccaggtcagagagaacaaagggagagaggagggtctgttctaggcagctgggagacaggctcctgcatgagtgagtggaggcagccatgatggaaga

SEQ ID NO: 554812 - DNA, 201 bp, Homo sapiens
ccctttttgggccagtgactcaagcctctgcgaatacagggtggagagccaaagaggccaaacgtggtgcgtctcctgcctcaaaatgaagactcctacaygtcacacatgggcacggaccagagctgctgagatgataggccgggcgcataacaggcaccccgcacatcgcaccgcggacgcagcgatcctcccatttgt

SEQ ID NO: 554813 - DNA, 201 bp, Homo sapiens
cagaaggaagggtgtagctctgaggtgacccacgaaccacttttgatgggtggggcagtggaccttcgttgtctgaggcctctcccaagtcacccctttcsccctccttctggctctgggcccggggcctgggctgtactggaggtgagcacctaggggttaagaagccactaatggtaaaggaaaattagcaccatcttg

SEQ ID NO: 554814 - DNA, 201 bp, Homo sapiens
tttattatctgtctccctccccagtacaaggtttacaggaacaaatgcttttctcttttgctcatttctgtatccccaggccctagaataatatttgacamataagggcttattaaatacatgttgaatggttgaatatattcagttgttttaatctacataaatgagattaaactacatgttattctgtaacttactttc

SEQ ID NO: 554815 - DNA, 201 bp, Homo sapiens
tcttttgctcatttctgtatccccaggccctagaataatatttgacaaataagggcttattaaatacatgttgaatggttgaatatattcagttgttttartctacataaatgagattaaactacatgttattctgtaacttactttcatacactaatgtctgttcacatagcttattgcctcattcttttcaattattac

SEQ ID NO: 554816 - DNA, 201 bp, Homo sapiens
taatcccagctacttgggaggctgaggcaggagaatcacttgaacccgggaggcggaggctgcagtgagcattgatattgcaccactgcactccagcctgrgcaacagagtgagactctatctcaaaaaataaaataaaataattggagcaaaagttatgtgcatctttaatcttgataaatgcagccttaaaagatggac

SEQ ID NO: 554817 - DNA, 201 bp, Homo sapiens
gcgctcccggccagcgtaggctggctccgccgtagaggggttggcagtggcggtcagcatgggcgatgggggcgccgagcgcgaccggggccccgcgcgcmgggcggagtctggtggcggcggtgggcgctgcggagaccgcagcggagcgggggacttgcgagctgatggcggtggccacagcccaacggaggtggccgg

SEQ ID NO: 554818 - DNA, 201 bp, Homo sapiens
gtactgtggtgtcaccacaaaggaacttcctcttactactcattgatggccaggtccttcctccatccccaaatcctggcaaccactgatctggtctccamctctataattttgttacctttatattaaataaatggaatcatatagtgtataacttttgggaactgttttttcccctcagtataatttcctgtgtaaatt

SEQ ID NO: 554819 - DNA, 201 bp, Homo sapiens
ctgtggtgtcaccacaaaggaacttcctcttactactcattgatggccaggtccttcctccatccccaaatcctggcaaccactgatctggtctccacctytataattttgttacctttatattaaataaatggaatcatatagtgtataacttttgggaactgttttttcccctcagtataatttcctgtgtaaattgtt

SEQ ID NO: 554820 - DNA, 201 bp, Homo sapiens
taaatgcccatttattctgggcatttattctgggttgtagggtaagtatatttttaactctttaagaaactgcctggctagtagtaccattttccattccyaccagcaatgtaagagagatccagcttccctgcatcctcaccagcttttccactctcagtattttttctttttgctgttctgataggtgtttcttattgc

SEQ ID NO: 554821 - DNA, 201 bp, Homo sapiens
cacaattggaaattatggaacctgagcaaaggagactgatccagtcacagtggggtcacacatattatcctatctttttgaaatgtgaacagaattggagytggggagcttgagttgtcctaagaggcctgtagtttctagaacacatccttttgataggctctgcccagcagcttagcaggacctggcctgggatgggga

SEQ ID NO: 554822 - DNA, 201 bp, Homo sapiens
catgacactagtgtactgcagcccaggcagaaaaccaacactttgtctctaaaaacaaaaataaagaaataaactcaatccaatgtccttcaaaacaccaactcacatctagtttaaatctcatcttctcctgaagccccacacctgcttccccactcagaacagccttgactcactgcttgccagcaaggtttgaggttt

SEQ ID NO: 554823 - DNA, 201 bp, Homo sapiens
ctgatccagtcacagtggggtcacacatattatcctatctttttgaaatgtgaacagaattggagctggggagcttgagttgtcctaagaggcctgtagtytctagaacacatccttttgataggctctgcccagcagcttagcaggacctggcctgggatggggagggaggccacctctgagcagtgacacatcctccac

SEQ ID NO: 554824 - DNA, 201 bp, Homo sapiens
cgccgtagaggggttggcagtggcggtcagcatgggcgatgggggcgccgagcgcgaccggggccccgcgcgccgggcggagtctggtggcggcggtgggsgctgcggagaccgcagcggagcgggggacttgcgagctgatggcggtggccacagcccaacggaggtggccgggacctcagcctccagtcccgcaggctc

SEQ ID NO: 554825 - DNA, 201 bp, Homo sapiens
cccctcttccaggaagccttctgcaggcaccttgccctcttcccaagagacccttccacatggcgtgacctggagagacagatagtgtgtgtgtgtgtgtkcacgtgtgtgcatgtgtacatgtgtgtggtgttggatgtccaccagtatttgcttccctaggacaagaatgtatttataggccatggctcctcgtcgtgc

SEQ ID NO: 554826 - DNA, 201 bp, Homo sapiens
ttgtaaatgcctggtcattcctcatctgtcacaccccattactgccactccctgagtacgaattgccctctgttttttgggaatgagttagtgccactccyccactagaccctcagcttcccaaggactggagtcatgacatctgtgtctcctctccctctagttcagaaacagagctagaaacagagaaagccagcgata

SEQ ID NO: 554827 - DNA, 201 bp, Homo sapiens
ggtgcgaggtaaggggacagcccgcggccctgctccactggaccctcaccctacccatactggggcccccgacctagctgcagctgacacctctcaattcrtatattcattcattcgtcatccagtcattcattcagcaaatattattttgagcgtctattgtgtgctggacattaagctgagtgcaagggacaaagcagc

SEQ ID NO: 554828 - DNA, 201 bp, Homo sapiens
ggccttctggatagatcaggcacttttggatggaatatggaaaaggttcagagaaactgggggagagcagccctcagggcacagggagtggcttgggggggtgttggcatgtaagaggagtgacaagaagggatggtgagggcttggctggttggaaataacgattctggggaagatgaaacattataaaattgggctggg

SEQ ID NO: 554829 - DNA, 201 bp, Homo sapiens; identical to SEQ ID NO: 402654

SEQ ID NO: 554830 - DNA, 201 bp, Homo sapiens
cctgagatggaaatgaaggtttcctggggcaggagggacacattcagagggctctgagcctgtctgttcttcagaaagacagagagacaacatttgcaggsccctgtgaacctacccgctagggcctgaagggcctgataggcttggtgggcctgatgggcttgatggtgggaagtagagagttgacccttcttactctca

SEQ ID NO: 554831 - DNA, 201 bp, Homo sapiens
gctagcctcctcctcatggaccccaggtcccaggtctgtggatgcatgacactccttcatgcatgcatgcatgcacagacacacacacacacacacacacacgcacagcttaggacctggctctgacctctccagtaagccttacctgattgatcacattcaattctaacccatcatcccctatgtacttgaggacccagc

SEQ ID NO: 554832 - DNA, 201 bp, Homo sapiens
agctagcctcctcctcatggaccccaggtcccaggtctgtggatgcatgacactccttcatgcatgcatgcatgcacagacacacacacacacacacacacacgcacagcttaggacctggctctgacctctccagtaagccttacctgattgatcacattcaattctaacccatcatcccctatgtacttgaggacccag

SEQ ID NO: 554833 - DNA, 201 bp, Homo sapiens
ctcctctcttttttctcttctcttccttctgccaaatagcatctctaccttcttccctggatactcagaggacccaggcatggtcccaattcaggcagagraaacacagagcttgctcagggcccatttccatggctagtctcttctttaatctagcatgcccaattcagctgagttgtctgcagatttaaatctgaaacc

SEQ ID NO: 554834 - DNA, 201 bp, Homo sapiens
ggtggcaagtctgaggttgcctttctcgtctgggtcatgcctccatgaccctgagggagacagctgcacttggctgctccctgaggtggcaatccccctttaggtcttgtataaagagggaaggatggtttgatctcatgtttagggactcaggctcagatgctacagggtgggcttgaggaggcttattaaggggagggt

SEQ ID NO: 554835 - DNA, 201 bp, Homo sapiens
tccgcgtgcacagtccctagaccagtgagggcggggacggggaaatccttttgttttatattggaaaccttacgccaaaggcaggcaggaagcaaccaaakgaacaacaggccgcctgagccgtggctcaaacagcacagggcagtggccgagcaccaggcttttcggtggagctgggatcccagcaggcagaagaggtgg

SEQ ID NO: 554836 - DNA, 201 bp, Homo sapiens
ctggggagtccgaggggcaaggaggccaaatcctttggaagcccggacaaggagtgggtacctggggctacaggaaagggaggagatggcagtggcatgcrcccgcagtcagtcaaagccaccgggctcaagtcttcctcttttgcgcagcaccggtaaggagagagggtgtctatgcatcacgttggcctgggtgccatt

SEQ ID NO: 554837 - DNA, 201 bp, Homo sapiens
aggtggaggttgcagtgagctaagattgcaccactgcactccagcctgggggatagagcgagactctatctccaaataaataaataaataaataaataaamcaaaaacaaatatttcatttccctagaataaatgcccatttattctgggcatttattctgggttgtagggtaagtatatttttaactctttaagaaactg

SEQ ID NO: 554838 - DNA, 201 bp, Homo sapiens
cgccgggcggagtctggtggcggcggtgggcgctgcggagaccgcagcggagcgggggacttgcgagctgatggcggtggccacagcccaacggaggtggscgggacctcagcctccagtcccgcaggctccagggagagtggagccgacagcgacgggcagcccgggcccggcgaggcagaccactgccgccgcatactg

SEQ ID NO: 554839 - DNA, 201 bp, Homo sapiens
ccccaacagccacctcctccaggatcagacgacagggggtggcttcaaggaggcagagatctttttaaaagactggacatcttctggtgtgaggaggggargcaccaaggcctcactttctgaaggcctttgctgaagggccagtcactcctagcaggtggtgatgtctggcatggcccaggtggcccagtctgtcttggc

SEQ ID NO: 554840 - DNA, 201 bp, Homo sapiens
acggccaaaacaggattgataaagtggagaggaagggaggaggggaatgcggaagcactggtctggagcagtgtgctggtttccttccttggagcgaggcrggaggctgtgctggagtgagggcttcccgtctgtgctgtgtggctgctgtcctcccctgtgtccctgcctcagtgaggtcagctctccctgtttccctca

SEQ ID NO: 554841 - DNA, 201 bp, Homo sapiens
taacaggcaccccgcacatcgcaccgcggacgcagcgatcctcccatttgtaccctaaggcctgagaaggccgctccacacctccgcgtgcacagtccctrgaccagtgagggcggggacggggaaatccttttgttttatattggaaaccttacgccaaaggcaggcaggaagcaaccaaaggaacaacaggccgcctga

SEQ ID NO: 554842 - DNA, 201 bp, Homo sapiens; identical to SEQ ID NO: 402664

SEQ ID NO: 554843 - DNA, 201 bp, Homo sapiens
attatcctatctttttgaaatgtgaacagaattggagctggggagcttgagttgtcctaagaggcctgtagtttctagaacacatccttttgataggctcygcccagcagcttagcaggacctggcctgggatggggagggaggccacctctgagcagtgacacatcctccaccctggctcaccttttccctgaggctgac

SEQ ID NO: 554844 - DNA, 201 bp, Homo sapiens
tttgaaatgtgaacagaattggagctggggagcttgagttgtcctaagaggcctgtagtttctagaacacatccttttgataggctctgcccagcagcttrgcaggacctggcctgggatggggagggaggccacctctgagcagtgacacatcctccaccctggctcaccttttccctgaggctgactatgaacaggacg

SEQ ID NO: 554845 - DNA, 201 bp, Homo sapiens
ctgggacagagtgagtcctttcttcccagaccacattggtagacctggcagttgtactgaggcctattcacatacatttagccacccattagatataataycctgcattgggtggttaaggaatctgggcccagagagggtgagcaacttgtcacaggtcatgcaaccagatccaggcctgaggagctctgcgatagatca

SEQ ID NO: 554846 - DNA, 201 bp, Homo sapiens
tgctacagggagacccaactttggaggagttcagacaagcatgagggaaagactttaagctacaggtaaaccagagtgaaagagcaaataaatatagcgcygaccacagacagtcaggaaatgccaatgggggccttctggatagatcaggcacttttggatggaatatggaaaaggttcagagaaactgggggagagcag

SEQ ID NO: 554847 - DNA, 201 bp, Homo sapiens
atagcgccgaccacagacagtcaggaaatgccaatgggggccttctggatagatcaggcacttttggatggaatatggaaaaggttcagagaaactggggragagcagccctcagggcacagggagtggcttgggggggtgttggcatgtaagaggagtgacaagaagggatggtgagggcttggctggttggaaataacg

SEQ ID NO: 554848 - DNA, 201 bp, Homo sapiens
tgctgagatgataggccgggcgcataacaggcaccccgcacatcgcaccgcggacgcagcgatcctcccatttgtaccctaaggcctgagaaggccgctcsacacctccgcgtgcacagtccctagaccagtgagggcggggacggggaaatccttttgttttatattggaaaccttacgccaaaggcaggcaggaagcaa

SEQ ID NO: 554849 - DNA, 201 bp, Homo sapiens
cccaaggtcagacaactaattagttccggagctgggctttggacaagcagtctctcatctttatgctgcctataaactgggcaaccttccttgagattgtmaaagaataactcagagacccttctttcagccagagctctagtagtttgctctcatatatgagggagatcaatcaatacatgcattgtaaacgacggccaa

SEQ ID NO: 554850 - DNA, 201 bp, Homo sapiens
tgggaggtggaggttgcagtgagctaagattgcaccactgcactccagcctgggggatagagcgagactctatctccaaataaataaataaataaataaataaaacaaaaacaaatatttcatttccctagaataaatgcccatttattctgggcatttattctgggttgtagggtaagtatatttttaactctttaagaa

SEQ ID NO: 554851 - DNA, 201 bp, Homo sapiens
accacaaaggaacttcctcttactactcattgatggccaggtccttcctccatccccaaatcctggcaaccactgatctggtctccacctctataattttsttacctttatattaaataaatggaatcatatagtgtataacttttgggaactgttttttcccctcagtataatttcctgtgtaaattgttgtgtgtttca

SEQ ID NO: 554852 - DNA, 201 bp, Homo sapiens
gtgtggacaggtaggaactactgacatgggtcctgaacagagcagtggtggaggagagaagcgtactaatgtgagaggcactctaatttagtgctggaacmtattaggacttgctcatggattatacgcccagggcaagggaaaggaagtggtttgggtagaacaactgggagaatggtgacaccatataatgagttgaga

SEQ ID NO: 554853 - DNA, 201 bp, Homo sapiens
gcttttgtcatccaagtttttagctttaatatagtcaaatacatcctttgtgtttcctttacagcctccagtttttttgctgtttgttttttgttttttttgagaccgagtcttgctctgtctcccaggctggagagcaatggcacaatctcagctcactgcaacttccccttccctgcctcagcctcccaagtagctgga

SEQ ID NO: 554854 - DNA, 201 bp, Homo sapiens
ccctagagattctgatttaatatgggtgaggcatgaggcccggacatcatcccagaaaattccagtgtgcggccaaggttgagaattcctgacctagcccrtatgtggccaagaaacaagcacccctggtcccagcccctgctccatctgcctctgacttctcctctcctagggtccaggctcaccttctcaggagacgcc

SEQ ID NO: 554855 - DNA, 201 bp, Homo sapiens
acaactcccaggtcactttcttaaaaaaaaaaacaaaacaaaacaaaaaacccacaaaaaaacagcaacaaaaaactttctttgtgggattttttttttttctaaactgaaatttaaactctaaccacatttaatggttgttcctttttgggcttctagattctagctcctagttagaaaaatcttcatccagcatttaaa

SEQ ID NO: 554856 - DNA, 201 bp, Homo sapiens
gccacttatatagtaaggaaatgagccctttttctgtgacatgtattgcaaacaactcccaggtcactttcttaaaaaaaaaaacaaaacaaaacaaaaaacccacaaaaaaacagcaacaaaaaactttctttgtgggattttttttttttctaaactgaaatttaaactctaaccacatttaatggttgttcctttttg

SEQ ID NO: 554857 - DNA, 201 bp, Homo sapiens
gtaagtgccacttatatagtaaggaaatgagccctttttctgtgacatgtattgcaaacaactcccaggtcactttcttaaaaaaaaaaacaaaacaaaamaaaaaacccacaaaaaaacagcaacaaaaaactttctttgtgggattttttttttttctaaactgaaatttaaactctaaccacatttaatggttgttcc

SEQ ID NO: 554858 - DNA, 201 bp, Homo sapiens; identical to SEQ ID NO: 402679

SEQ ID NO: 554859 - DNA, 201 bp, Homo sapiens
tgttttctcatcttcgtaagtgccacttatatagtaaggaaatgagccctttttctgtgacatgtattgcaaacaactcccaggtcactttcttaaaaaamaaaacaaaacaaaacaaaaaacccacaaaaaaacagcaacaaaaaactttctttgtgggattttttttttttctaaactgaaatttaaactctaaccaca

SEQ ID NO: 554860 - DNA, 201 bp, Homo sapiens; identical to SEQ ID NO: 402680

SEQ ID NO: 554861 - DNA, 201 bp, Homo sapiens
ttcggcaggaggcccacattcccatagcgtgcctattcctatgccgggccctctcatttgggtcttcttttgtttcccccccttccataacccttacccccacaaacacacactgaagcagaccagcaacccgaaaaatcatcttgtaggtgtgtcttgtgtgcccagttttcattttcagggaacggttcaggaagatta

SEQ ID NO: 554862 - DNA, 201 bp, Homo sapiens
accaaggcctcactttctgaaggcctttgctgaagggccagtcactcctagcaggtggtgatgtctggcatggcccaggtggcccagtctgtcttggctcygcctgtcttcttaacctgggcagccctctggctcaagccttctcctccacccatctcttggcaacttctcaaaaccacagcagttgctggactattaaat

SEQ ID NO: 554863 - DNA, 201 bp, Homo sapiens; identical to SEQ ID NO: 402693

SEQ ID NO: 554864 - DNA, 201 bp, Homo sapiens
gtgcccatctcctggtgcgcggccatggatcacagtgtggcccagaaagaaatcagggagggggcagtgccatgggtcacagtgtggcccagcaagagatygcggaggggggcggggcagccaccaagcactcactgagtcccagggagtcaagatggcagcctccaggaggccacacaggaccctgagaaaacagaggag

SEQ ID NO: 554865 - DNA, 201 bp, Homo sapiens
aaatattattttgagcgtctattgtgtgctggacattaagctgagtgcaagggacaaagcagcgaatgggaccgaagcggtccccgtttctccgcctctcrggccagtcccctagttctaggcccattcggaacggctactgtggcgggggcagaaatggagtgcgggatgctgagagcctggactccgtcccgtgaccct

SEQ ID NO: 554866 - DNA, 201 bp, Homo sapiens
ctggaagctggccctgggtcgttccagcgaggggattatgtttgatctgagctcggctaccctcaagctgactgggacaccctgggccagttgggcactayctctctgcggctgctgggtgtgggtggcactggggactggagggtagagcatgcatgcagcccagtgtgagggtgactgatgactgccttgaatacagag

SEQ ID NO: 554867 - DNA, 201 bp, Homo sapiens
ggtatttagaaaaggcctggagcggtggctcatgcctgtaatcccagcactttaggaggccgaggtgggcagatcacgaggtcaggagttcgagaccagcmtggccaacatggtgaaaccctgtctctagcaaaaatacaaaaattagttgggtgtgatggcacacgcctataatcccagctactcaggaggctgaggcag

SEQ ID NO: 554868 - DNA, 201 bp, Homo sapiens
ttgcactggatgtgagacagcctgtgtgcgtcttcagggggtgtacttttataaatgtatgtgcacacacagaggtgccaatgcatttgtaaaatataatmgaaatattagacataaagcatagaggatatatttacacacttgacagaaatgaaaggcaaatggggcttttataaatccctctgcccttccccatttaat

SEQ ID NO: 554869 - DNA, 201 bp, Homo sapiens
ggagctcccatgccgtttccagtgcccccattcccagcacttccacgtgttcgccaaccagaagttctcctggtctccttgttcaagactaaatccaggcyggcctggcacagtggctcacgcctgcaatcccagcactttgggaggccaaggagggaggatcgctcaggagtccaggagttcaagaccagccttggcagc

SEQ ID NO: 554870 - DNA, 201 bp, Homo sapiens
tttctgaaggcctttgctgaagggccagtcactcctagcaggtggtgatgtctggcatggcccaggtggcccagtctgtcttggctctgcctgtcttcttwacctgggcagccctctggctcaagccttctcctccacccatctcttggcaacttctcaaaaccacagcagttgctggactattaaatcttccaaaagctg

SEQ ID NO: 554871 - DNA, 201 bp, Homo sapiens
ccacggttctcaccctccctgccggtacacctgccccagctccaggcgaggagcagggttggcctctatgttcccagggaaacaagtctgggtgctcccayggtggcctccatgacatgggcctgtagatgctgtggcctgatgagtttctggagtggggcatgaatgccagtctctccttctagtgcctacaagtgattc

SEQ ID NO: 554872 - DNA, 201 bp, Homo sapiens
gtctgggtgctcccatggtggcctccatgacatgggcctgtagatgctgtggcctgatgagtttctggagtggggcatgaatgccagtctctccttctagygcctacaagtgattcttttgggccctcccccaacttgcatctgcagggcagcacacccttcctcccatgaggttttgtggcccccaggggactgagcctc

SEQ ID NO: 554873 - DNA, 201 bp, Homo sapiens; identical to SEQ ID NO: 402706

SEQ ID NO: 554874 - DNA, 201 bp, Homo sapiens
gggcatggtggtgggtgcctgtaatctcaactactcaggaggcggatgcaggagaatcgttcgaacccaggaggcagaggttgccgtgagccaagatcacrccactgcactctagcctgggtgacagagcgagactccgactcaaaataaataaataaataaataaataaataactttacatttattatctgtctccctcc

SEQ ID NO: 554875 - DNA, 201 bp, Homo sapiens
gttgctttacgttattttttccttttacttgttttcggcaggaggcccacattcccatagcgtgcctattcctatgccgggccctctcatttgggtcttcytttgtttcccccccttccataacccttacccccacaaacacacactgaagcagaccagcaacccgaaaaatcatcttgtaggtgtgtcttgtgtgcccag

SEQ ID NO: 554876 - DNA, 201 bp, Homo sapiens
cctccctggtgcaggtggcctggccagcccactggattggggacgggccaggctgggccaggtcgggggctcagtctgggaggtaataaaagcagaccgasacgcagatgttgctcgggaagcagatgtcgatgcagagataaatcagccgctgtctccggggccctgtggcgagggtgccgtgaatctccaagggctccg

SEQ ID NO: 554877 - DNA, 201 bp, Homo sapiens
ctgagcatcaagagcggcaaccccggggagtcctcccgcggctggatgtggggctgcgccttctcgggggactcccagtacatcgtcactggtgagccccrccctggcctcccccatccctggcccccggcgctggcctccagagccagcccacctcggctgcagcttcccctctgctggggccgcctgcttggcctgcac

SEQ ID NO: 554878 - DNA, 201 bp, Homo sapiens
acttgtctgaattcaagtcctgtaattttcagccaatcctagcccagcgtggcgcagtagtgggtcagggagggcaccggaacagcgcgacccgacagccygggaaacggacagccgtgtcagaagggcaggtgccagtgggcaggaggccggagagaaagccgcagcttccttccacctcgcgccgggcccgcggccgcg

SEQ ID NO: 554879 - DNA, 201 bp, Homo sapiens
cccggggcgggcagggcggcgctggggggatgcctcgtgtggggaccacagcctgtgtgaaggccagatggtggaggcctggggggccctggcctcagggytaccttcccgtcatcctccttaacagtcccagcaggtgaatgccttggaggtcacaccggaccgcagcatgattgctgctgcaggtatctgtgatccttg

SEQ ID NO: 554880 - DNA, 201 bp, Homo sapiens
ggtgaatgccttggaggtcacaccggaccgcagcatgattgctgctgcaggtatctgtgatccttgatctctaaactcctgagctctggtgggtcgacctsagcacagccaagcttcagttcagcctgtgtccctaggttaccagcacatccgcatgtatgatctcaactccaataaccctaaccccatcatcagctacga

SEQ ID NO: 554881 - DNA, 201 bp, Homo sapiens
tggacagcatgtgccccggcccggcccgcaggtcccggaacctgcagtgccagcggatcttccaggtgaacgcacccattaactgcgtgtgcctgcacccsaaccaggtgaggggtgctcatggggccaggcaccctgggactttggagggctgggcttgggccctgcctcaccacccctgcaccccaggcagagctcatc

SEQ ID NO: 554882 - DNA, 201 bp, Homo sapiens
ctgtctacttccgttggccatcggcatcctccaggaaggagaatttgagtccttggccaggcgtggcctcctgttcttggcttgccaggtgtggcccttgsttggggccaggcttcccaggtgccttctgcaggcaggaccagaggggcctgcctgcccctcacccggggtccccatgcacagttggcccccagtgttggc

SEQ ID NO: 554883 - DNA, 201 bp, Homo sapiens
ctcctggactgggctagcctgcactgcctgggaaagtcggccgagggcccaaagctgctgaggggtctgaggctggtgcccacccccaagctagtgtgttytctgcccctccctgcccgcgtttcagggcctcggtccatagagaacaccaccaccatggccaggtggaagggtttattagtccctgccagcagctgtcct

SEQ ID NO: 554884 - DNA, 201 bp, Homo sapiens
agccagcccacctcggctgcagcttcccctctgctggggccgcctgcttggcctgcacctgcgctcttagccctgcacaatctccccctccagcttcctcrgacaacctggcccggctctggtgtgtggagactggagagatcaagagagagtatggcggccaccagaaggctgttgtctgcctggccttcaatgacagtg

SEQ ID NO: 554885 - DNA, 201 bp, Homo sapiens
ctatccacatctgggacttgaaaacagaccacaacgagcagctgatccctgagcccgaggtctccatcacgtccgcccacatcgatcccgacgccagctayatggcagctgtcaatagcaccgtgagtcctggtggcaggtgctgggtgcgggcagcttggcactcagccctcagcctctgcaggtgggcttattcctgga

SEQ ID NO: 554886 - DNA, 201 bp, Homo sapiens
gccagcggatcttccaggtgaacgcacccattaactgcgtgtgcctgcaccccaaccaggtgaggggtgctcatggggccaggcaccctgggactttggarggctgggcttgggccctgcctcaccacccctgcaccccaggcagagctcatcgtgggtgaccagagcggggctatccacatctgggacttgaaaacagac

SEQ ID NO: 554887 - DNA, 201 bp, Homo sapiens
tgagcccgaggtctccatcacgtccgcccacatcgatcccgacgccagctacatggcagctgtcaatagcaccgtgagtcctggtggcaggtgctgggtgygggcagcttggcactcagccctcagcctctgcaggtgggcttattcctggatgtcccttagcggccccctcctgctttccccatcccgggcactaacacc

SEQ ID NO: 554888 - DNA, 201 bp, Homo sapiens
cacactcctggactgggctagcctgcactgcctgggaaagtcggccgagggcccaaagctgctgaggggtctgaggctggtgcccacccccaagctagtgygttctctgcccctccctgcccgcgtttcagggcctcggtccatagagaacaccaccaccatggccaggtggaagggtttattagtccctgccagcagctg

SEQ ID NO: 554889 - DNA, 201 bp, Homo sapiens
gcgctggcctccagagccagcccacctcggctgcagcttcccctctgctggggccgcctgcttggcctgcacctgcgctcttagccctgcacaatctcccyctccagcttcctcggacaacctggcccggctctggtgtgtggagactggagagatcaagagagagtatggcggccaccagaaggctgttgtctgcctggc

SEQ ID NO: 554890 - DNA, 201 bp, Homo sapiens; identical to SEQ ID NO: 131776

SEQ ID NO: 554891 - DNA, 201 bp, Homo sapiens; identical to SEQ ID NO: 131602

SEQ ID NO: 554892 - DNA, 201 bp, Homo sapiens; identical to SEQ ID NO: 131603

SEQ ID NO: 554893 - DNA, 201 bp, Homo sapiens; identical to SEQ ID NO: 131707

SEQ ID NO: 554894 - DNA, 201 bp, Homo sapiens; identical to SEQ ID NO: 131708

SEQ ID NO: 554895 - DNA, 201 bp, Homo sapiens
cgtgcaccaccacggcctggcaattttttgtatttttagtagagatttcaccatgttggccatgctggtctcgaactcctgacctcaagtaatctgcccasctcaggcttccaaagtgctgggattacaggcgtgagccaccacaccccgccagtttaacatttttacacattacaattaaaattgattcagtcttttatc

SEQ ID NO: 554896 - DNA, 201 bp, Homo sapiens
aaggaggaggaggaagagggcgaggcgacaagagaagaaggaggcaggcgcggcggcagcggcggcgccccgagccggcggaggcgaggggggggaagatrgcggacgtgcttagcgtcctgcgacagtacaacatccagaagaaggagattgtggtgaagggagacgaagtgatcttcggggagttctcctggcccaaga

SEQ ID NO: 554897 - DNA, 201 bp, Homo sapiens
tactctggagaagttcatttgtttttagttttgcttgctttctcagtgtttgaaaatttattactcagaggaaatatttggaaacaacttgaaaagaactratttcataaactatgatgatgagattcttcatctgtagggaagtatcattaagacctaaattatagcagtatattataattgataagtaaataagattca

SEQ ID NO: 554898 - DNA, 201 bp, Homo sapiens
catggtctcaataagaatctctagtttttcttgaggtaggaatagaactagacaaggtgattctaaagttcattggcaaaagtaagcatcctaaaaatttrtagaagagcattgagaaaaggctagtcattctggagaacttaaaaccctgataatttgaaacaactaaatgactagatacactaataaaaaaactttatc

SEQ ID NO: 554899 - DNA, 201 bp, Homo sapiens
aggcgacaagagaagaaggaggcaggcgcggcggcagcggcggcgccccgagccggcggaggcgaggggggggaagatggcggacgtgcttagcgtcctgygacagtacaacatccagaagaaggagattgtggtgaagggagacgaagtgatcttcggggagttctcctggcccaagaatgtgaagaccaactatgttgt

SEQ ID NO: 554900 - DNA, 201 bp, Homo sapiens
cttgggcccaggaggttgaggctgcagtaagccatgatcacaccaatgcatctatcctgggtgatagagcaaagactctgtctcagggaaaaaaaaaaaatgtgtgtgtgtgtgtgtgtgtgtgtgtgtgtgattatagcaattgagaaagtatcccgtcacttagtgggctttgtattaaaccataaggcttctgctttc

SEQ ID NO: 554901 - DNA, 201 bp, Homo sapiens
ttgggcccaggaggttgaggctgcagtaagccatgatcacaccaatgcatctatcctgggtgatagagcaaagactctgtctcagggaaaaaaaaaaaatgtgtgtgtgtgtgtgtgtgtgtgtgtgtgtgattatagcaattgagaaagtatcccgtcacttagtgggctttgtattaaaccataaggcttctgctttcc

SEQ ID NO: 554902 - DNA, 201 bp, Homo sapiens
tgggcccaggaggttgaggctgcagtaagccatgatcacaccaatgcatctatcctgggtgatagagcaaagactctgtctcagggaaaaaaaaaaaatgtgtgtgtgtgtgtgtgtgtgtgtgtgtgtgattatagcaattgagaaagtatcccgtcacttagtgggctttgtattaaaccataaggcttctgctttcct

SEQ ID NO: 554903 - DNA, 201 bp, Homo sapiens
gggcccaggaggttgaggctgcagtaagccatgatcacaccaatgcatctatcctgggtgatagagcaaagactctgtctcagggaaaaaaaaaaaatgtgtgtgtgtgtgtgtgtgtgtgtgtgtgtgattatagcaattgagaaagtatcccgtcacttagtgggctttgtattaaaccataaggcttctgctttcctg

SEQ ID NO: 554904 - DNA, 201 bp, Homo sapiens
agtaagccatgatcacaccaatgcatctatcctgggtgatagagcaaagactctgtctcagggaaaaaaaaaaaatgtgtgtgtgtgtgtgtgtgtgtgtstgtgtgattatagcaattgagaaagtatcccgtcacttagtgggctttgtattaaaccataaggcttctgctttcctgagtaagaaatatatatttatgt

SEQ ID NO: 554905 - DNA, 201 bp, Homo sapiens
tgggattacaggtgtgggccactgtgcctggtcattgctttatttctaatgattattttctgtatatcttcctggaatttcaaaaagaaatttatttattwatttatttatttatttatttatttatttatttatttatttagagacggaatctctctatgttgcccaggccggagtgcagtggtgcagtctcggctcact

SEQ ID NO: 554906 - DNA, 201 bp, Homo sapiens
tttatttctaatgattattttctgtatatcttcctggaatttcaaaaagaaatttatttatttatttatttatttatttatttatttatttatttatttatttagagacggaatctctctatgttgcccaggccggagtgcagtggtgcagtctcggctcactgaaacgcctgtctccgcctcctgggttccagtgattct

SEQ ID NO: 554907 - DNA, 201 bp, Homo sapiens
gaaatatccaacttgcaaatagcatagattctatttagttttatgtacaactgaggattctttagttttgtatatcccttcaataagtaaatgaaacaaaraaaaataataaaaccctttaacatgctaacaaacaaaattgagattgtattatggaagtattttaaaaaatacactttacatctataaacatgatcatga

SEQ ID NO: 554908 - DNA, 201 bp, Homo sapiens
agtttgatgacagattaggagagcaggacagtataaatagattagggaagaagagagaattagtgagccaaccttcctgcaggttatagagccttttatgygttcctaccttaaatatgctaagatccgagagatggatagttcatcccagttaacataaatgaagagttctctttcagttcttgtcatttttttgacaac

SEQ ID NO: 554909 - DNA, 201 bp, Homo sapiens
ttatttctaatgattattttctgtatatcttcctggaatttcaaaaagaaatttatttatttatttatttatttatttatttatttatttatttatttatttagagacggaatctctctatgttgcccaggccggagtgcagtggtgcagtctcggctcactgaaacgcctgtctccgcctcctgggttccagtgattctc

SEQ ID NO: 554910 - DNA, 201 bp, Homo sapiens
tatttctaatgattattttctgtatatcttcctggaatttcaaaaagaaatttatttatttatttatttatttatttatttatttatttatttatttatttagagacggaatctctctatgttgcccaggccggagtgcagtggtgcagtctcggctcactgaaacgcctgtctccgcctcctgggttccagtgattctcc

SEQ ID NO: 554911 - DNA, 201 bp, Homo sapiens
gtcatataattgatggtatcttagagttgctgtggctaggtggcagtcctgacatagtttttattactggcacatgcacaaaatagtgatggcaattcctrgtttcatcagttctgtgagatatgtgcatagatggtactatatatgttgaatttaaatgtagtgcaaaatatcttcaaaaaagatacggtgcaatttagc

SEQ ID NO: 554912 - DNA, 201 bp, Homo sapiens
aacctaaaaatggttatttctatatattctgaccaagccatatttaacattttaaatttttatttaatgatcggacttggtgatgtagaacaggaattctrttaacctcattttgcatatttatattctagaccattctaccttttatacttttatttatattctagattattatacttttaaaatactatgcatgtgtat

SEQ ID NO: 554913 - DNA, 201 bp, Homo sapiens
actttagttataatacggcttcagttggtggaataaagaaatttttttctttttttttattttgagtaaaaatgataacttctctccaccctctctatagktaaagccttccatctgaagtatgatgaagttcgtctggatccaaatgttcagaaatgggatgtaacagtattagaactcagctatcacaaacgtcatttg

SEQ ID NO: 554914 - DNA, 201 bp, Homo sapiens
taatattttaaaagatcactttagttataatacggcttcagttggtggaataaagaaatttttttctttttttttattttgagtaaaaatgataacttctstccaccctctctatagttaaagccttccatctgaagtatgatgaagttcgtctggatccaaatgttcagaaatgggatgtaacagtattagaactcagct

SEQ ID NO: 554915 - DNA, 201 bp, Homo sapiens
atttcttgaattaaaatttatgtggaaaacatatgcagatacattttattggcccctaacagaagacttgaaccattgatttatgcatgcttgttattgcrtgttaatacacagaatctccttatacagttttttaaatagattgttttgggaaaccttttttgttatataatgttatagttttaagaattaacttcttca

SEQ ID NO: 554916 - DNA, 201 bp, Homo sapiens
atttctaatgattattttctgtatatcttcctggaatttcaaaaagaaatttatttatttatttatttatttatttatttatttatttatttatttatttagagacggaatctctctatgttgcccaggccggagtgcagtggtgcagtctcggctcactgaaacgcctgtctccgcctcctgggttccagtgattctcct

SEQ ID NO: 554917 - DNA, 201 bp, Homo sapiens
ttatgtcataaaattcacagaaaaggtgataaaatcatgaaaaatgcttaatatcatttataataagagaattgcaaatttaaactatacggagataggatttttttttttttaacctgatagaaaaaaatctgtaagtttgataatatgctctggtgaagcaatgagaaaacagatattctactatattgttggttataa

SEQ ID NO: 554918 - DNA, 201 bp, Homo sapiens
accagaagtcagcaagctttttctggaaagtgccacatgttaaatatttttagctttgaaggtaatatggtctcttgaaactactgaacttttgtggtgtrgggaaagcagccatagacaatacatgaatggatgggcatagtttcttcactttttaaaaatgttttcatttttctggattccagctactcaaactctact

SEQ ID NO: 554919 - DNA, 201 bp, Homo sapiens
tcacttacattcttttcttttttttggattcttttctatctgtctgtttatattcttttttgaattatttttggatagtttctgttgtactgaactttaattttttttttttttttttggagacggagtttcactttttcacccaggctagagtgcagtggtgcgatcttggctcactgcaacctctgtcttctggtttca

SEQ ID NO: 554920 - DNA, 201 bp, Homo sapiens
cacagtggctcacacctgtaatcccagcactttgggaggccgaggcgggcggatcacgaggtcaggagatcgagaccattctggctaacatggtgaaaccycgtctctactaaaaatacaaaaaaattagccgggcgtggtggcatgtgcctgtagtcccagctactcgggaggctgaggcaggaaaatggcgtgaacccg

SEQ ID NO: 554921 - DNA, 201 bp, Homo sapiens
aattgcttgaacctgtgaggtggaggttgttgtgagctaagattgtgccattgcactctagcctgggtgacagagtgagactctgtctcaccaaaaaaaaaaaaaaaaaaaaaaaaaaaatttcatgagaggtataaatatgttattatttttgcaaggaccccaaataaagcaacttgattttataatgccgtttagaaa

SEQ ID NO: 554922 - DNA, 201 bp, Homo sapiens
aggcatgcactggatatgtgccatagaaagactacgtccattctttcattataatattcaatgtttttcttgaggaatgaattatataaagcagaggttgrtaaattacagcccccaaactaaatatcaccctccatgggccaaattgggttgcccccaattgatcacatatattgtttattctgcttttgcactaaaata

SEQ ID NO: 554923 - DNA, 201 bp, Homo sapiens
ccctcccaaaaaggtttttaattggtgattcagaatatttgtcatctaccaaattaaaaactgcaggtttgcaaacttggcactccaagaaagaaataggkgccataaaatgattaagtgttggcatgtgtacacctgctgtcaggaaataaacttcccgtatgttgcattttggcagacatgcatcttaaaaatgtgttg

SEQ ID NO: 554924 - DNA, 201 bp, Homo sapiens
aagactacgtccattctttcattataatattcaatgtttttcttgaggaatgaattatataaagcagaggttgataaattacagcccccaaactaaatatmaccctccatgggccaaattgggttgcccccaattgatcacatatattgtttattctgcttttgcactaaaatacagaattgggcagttgtgacagatttt

SEQ ID NO: 554925 - DNA, 201 bp, Homo sapiens
aagttgtccttggatccatttgccaaggatttgtttaggtggcatagcagacagaggacattgtcttacagagcattaaagaatcatcataggagcagcaracaattttattactgtaaaatttggtggtagtgggttttctatcccattttagtatttaatatacatcatctgccttctgggattaatgtctaaatgata

SEQ ID NO: 554926 - DNA, 201 bp, Homo sapiens
aaaccaaacccagaacgcctgtgctgaacatgtatagacttttgtgtgagttatttttttcttaaacaatacagcataacaactatttacatagcatttarattgtattaggtatcataagtaatctagagattacttaaagtatgcaggaggatgtgcatattttatatgcaaacagtatgccattttataaaagggact

SEQ ID NO: 554927 - DNA, 201 bp, Homo sapiens
catgagaagtatagcaatcattaatacattctaatggcaatatcatattgaaaaggtggtaagtactgtatttgcttcatggaaggattgataagactctwtcacatgaatgtttatgggactgttgcctaagggatttatagtagctaaagctcaagtttgaaataatctccgtctgtcccctacctccccccacccact

SEQ ID NO: 554928 - DNA, 201 bp, Homo sapiens
cacttttattgaatttaaatgtcctttaacaaaatattaagctgtttataatataaagtgcctataaatttagacacacaaattaccttatttctttaacygggagtaaaagttgagtatatatccgtgatacagagaacgcaacacatggcacattagatgaatttacctttgaagtacttgttagttttcaggcattaa

SEQ ID NO: 554929 - DNA, 201 bp, Homo sapiens
tttaatctgtggttatagaattggttaaactttgcttttaggtggaagtttcaagttttatctctttgaaagctcagtaataatgtagatttccagatggycatttttaccattccattcttgaatatggttgttagacatcagagatgctgatgaaaaagtaggaatcaaaatgcaagctccttcacagatcatttgcaa

SEQ ID NO: 554930 - DNA, 201 bp, Homo sapiens
ggtcttttgggtttgtttttggtgtttggtgtttgttttatttttacatttatttagcataatttcagtgctaggctataccacctgtccccccccccccytttttttttaaactcatcagtgctgttgaaagtgagtatgaagaaagaaaataaaggattggaaaggcacaggcaagaacttaactgaatcttctgcatg

SEQ ID NO: 554931 - DNA, 201 bp, Homo sapiens
aaggcagaagcaagcaagcaagcaagcaagcaagcaagcaagcaagcaagcaaatgagacacagagagaaatggggccaaacttactctttcgggaatccragcccacttttgcaataacaacattaatccattcgtaagggtggagccctatgacctacctaatcacctcctaaaggctccacctcctaatactattaga

SEQ ID NO: 554932 - DNA, 201 bp, Homo sapiens
atatctgtttataatttgtgaaataaatctctatatgtgtatgtacatatacacacatatagatttagtatattagttattagtatttattttactggtgrtttaacacacaaaacataagcacacatatgtatatatggagattgttacaatgaattgactcacacaggtatggagtctaagaagtctcaggatctgtgt

SEQ ID NO: 554933 - DNA, 201 bp, Homo sapiens
cgcctgcactcccagctactcaggaggctgaggcacaagaatcgcttgaactgggaggtggaggttgcagtgagctgagattgcgccactgcactccagcytgggcaacaaagtgagataccatctcaccaaaaaaaaaaaaaaaaaaaagtgtatgtgcaaagaatgaatgttgtttaattctcttaataatcctgtgtg

SEQ ID NO: 554934 - DNA, 201 bp, Homo sapiens
cctttcctagtgaccaggggatagagcttattgccaaaagggagtgattgggtcatcaaacaaggattattactagggaaacagaaaatacccattattgrtatttaaaaggatcaagttttgagcttattcaaaaatagacaaaaattcctaagggttacaatttatagtggaaaaggtttttttttccatattatttac

SEQ ID NO: 554935 - DNA, 201 bp, Homo sapiens
ttaatgaatttgattaaattcaaaatgaataatttatgtctgatgaagatacttttatttataaaagcaaataaattagaaataagtttatttttctgggyacaaattattcattttaaatgtttattaagaattgaatcttgattagttgttaacatcaaaagccaatatgctagcaagcaatatgaaacaagcaatcca

SEQ ID NO: 554936 - DNA, 201 bp, Homo sapiens
tgaatactactttgaaagtaagtttcttgaatgttattacatgtagcccctttaatgaatttgattaaattcaaaatgaataatttatgtctgatgaagakacttttatttataaaagcaaataaattagaaataagtttatttttctgggtacaaattattcattttaaatgtttattaagaattgaatcttgattagtt

SEQ ID NO: 554937 - DNA, 201 bp, Homo sapiens
ctcataaaagacaaaacaagaaagcaagtgttggaagtaagtaaatagaatttttttttcctaaagggcttttttgaagaaagaagggaacattgaacatrcttgattcatgtagccatcttcagtatgattggttatggcccgattagaaatagggacttcagtgtaaaggaactttgcgaagtgccggggtctgaccta

SEQ ID NO: 554938 - DNA, 201 bp, Homo sapiens
agcactgttgactcttcccgacagttgatgcattgaagctttttacatctgctattttcctggctggacaatgcagtgctgtgttctcgtctcagtatccrtatttctactaataacactgagctgcaatgtaaagcagccagagctaaaatgtagtgcttcagttgtattggaaaagaataggatttacctctcttcttt

SEQ ID NO: 554939 - DNA, 201 bp, Homo sapiens
tttgattttatgtatgtgtgtttgtgcaacccgtgaattaatttattgcatttatctccaaattgaaataccttttttgatacatagtagtcatatccacrcctgggactcgattttagttcccatgatgcttcattacacttggtattgtgttgtttttttgttttttgttttttttggcatttactgtatttttttaac

SEQ ID NO: 554940 - DNA, 201 bp, Homo sapiens
tattttcatatgattcaacaaaggaataaaacatacaaatgaaattgtttctattttctgcaatagaaaatagaagattctataaatagaaaatttataattttttttttttttttttttttttttgagacagtctcactctgttgcccaggctggagtcagtggcacgatcttggctcactgcaacctccgcctcctggg

SEQ ID NO: 554941 - DNA, 201 bp, Homo sapiens
tatgtggacagtatgttgcaacccagttcatgcccattagtgttttaatggtcaaattatagtacgtatctaagtattcctgttgaattatatcatgataytgtctgctttcttccagtattgcacgttgaaggtagccatttagcttaatacttaagcccaacaaaaatattcttgtgatttgaataccaggtgctagac

SEQ ID NO: 554942 - DNA, 201 bp, Homo sapiens
ccaacaaaaatattcttgtgatttgaataccaggtgctagactttcattgccccaagtttgccgaatagctcttctagcttctatttgtccaggctctgcrgctattagtagtattaaaaaaggacttttctcttggcatttttcaggctcattaataatatatttgaaatggtaagaatttggatgtccagtaccttttt

SEQ ID NO: 554943 - DNA, 201 bp, Homo sapiens
tgtaatatataataaatatagtatatataatagataatatatagtatatatgatatattatatatactatatattatatatcatatatactatatactatmtattatatatacatatatattatatatagtgtatatatatatatacacatatgaagacagagtctcactctgtcgctcaggctggagtgcagtggcatga

SEQ ID NO: 554944 - DNA, 201 bp, Homo sapiens
agtgcagtggcatgatctcagctcactgcagcctctgcctcccaggttcaagcaatcctcctgcctcagcctcctgagtagctgagactacaggcgtgcaccaccacggcctggcaattttttgtatttttagtagagatttcaccatgttggccatgctggtctcgaactcctgacctcaagtaatctgcccacctcagg

SEQ ID NO: 554945 - DNA, 201 bp, Homo sapiens
cctgcctcagcctcctgagtagctgagactacaggcgtgcaccaccacggcctggcaattttttgtatttttagtagagatttcaccatgttggccatgcyggtctcgaactcctgacctcaagtaatctgcccacctcaggcttccaaagtgctgggattacaggcgtgagccaccacaccccgccagtttaacattttt

SEQ ID NO: 554946 - DNA, 201 bp, Homo sapiens
gaccattcctttcatctgagttgggaatgttgcaatgagggcttagtctggtaatatttatattgtattcttttagcacagttgtagtgtcattgcattaratggtaaacagtgctttgccatctgattttattgtacattaaagagcatactacttttcttgtgtttttttgttgtttttttgagatggaatctcactct

SEQ ID NO: 554947 - DNA, 201 bp, Homo sapiens
aaatttgataaataccagattttagaagtctaatgagcatatgtaattttgggatatctttattctaatatgttatgaaaaaatctgatttttgttggtgrcaaagttgtaaccatttataataataatactgtggtttatctgcattcctgaagaaagtcttaatttcattaagagattaatgaaaataaaattgtaaat

SEQ ID NO: 554948 - DNA, 201 bp, Homo sapiens
gtctttttcattacataagggatttggacaaatggcttgtttttggttatttaatattagtataggtagtttcccctttttgaagagaagtcaaatgtttrttaaaagcttgtaattttcctctaaagtcagtggatgatttatgaaccagctttactttccttgaactcacaaagcaagaattagcctgattgcaaataa

SEQ ID NO: 554949 - DNA, 201 bp, Homo sapiens
ggttgatcagctgcctgaatcctgagttgtctcatagggtggcattatgttagtaatttgctgtagcccagagaaaggctgagaaactaagtaatgttagyataccatgagaaactgattcattttaattaagcttatgagagtagcatttgaaatcaaatgctgatttattaatttgcagtgataaatgtaattaacaag

SEQ ID NO: 554950 - DNA, 201 bp, Homo sapiens
actgtttttgagatggagtttcactgtctcacccaggctggagtgcggtagcgtgatctcagctcagtgcaacatccgtctcctgggttcaggtgattctyctgcctcagcctcccaagtagctgggattacaggcgtgcaccaccatgcctggctaattttttgtatttttagtagagactgtattggccaggctggttg

SEQ ID NO: 554951 - DNA, 201 bp, Homo sapiens
taatatgaaatccacggttcctcagctgctgcacaggcaggcagcagtttaaatgtgggcttgacagatgctctctctgacagagcagaatttaacgtcactgcttggctgaatcccacgtgattgtttgcattcattttgactaaaaacctaaggtagggagaagcttagagattttgcttttatgtgataaattatata

SEQ ID NO: 554952 - DNA, 201 bp, Homo sapiens
aattaaataaatgcctaaatatatccatagagatgtatttaaagttctataggctaggaagcaaaaattataacattcgtcatatttgaatttcagatgcmtttttacctttgggatgctaccttatggacaactgtattattatatattgataggccagaggtgatttgttcaaatttcttgtgcaagaggaggcataga

SEQ ID NO: 554953 - DNA, 201 bp, Homo sapiens
agatatgtgcatagatggtactatatatgttgaatttaaatgtagtgcaaaatatcttcaaaaaagatacggtgcaatttagcattgaaacagttattackgaggaacaaagagagaggactcacactacctgatttcaagacttactatcaagttgcaataatccacacaatgtactaacgatgtaaagatagatagatg

SEQ ID NO: 554954 - DNA, 201 bp, Homo sapiens
cccacccagctaatttttgtatttttagtagagatggggtttcgtcctgttcaagaccaggccggtcttgaacttctgacctcaggtgatctgcccacctyggccttccagaaaaccttctatatttttaaaactctgtttcaagttttaaaaggcacattgaaatgtattagagtactaatacagcctttgcaactactt

SEQ ID NO: 554955 - DNA, 201 bp, Homo sapiens
ttggaacataaagtatattttgttcagttttaacgtgcactgaattatctagaaatgtaactacagtgtacagtgagggaagcttgtactttgctttgttytaaacttggccaatggttcaccatatcaaaaaatgaaattgtgttcatggcatttgagtcaccaatataccagtctatgggcatttgtaattgttacatt

SEQ ID NO: 554956 - DNA, 201 bp, Homo sapiens
ataacgtaccaaccttatagtctttcttactgtccttcactagactatatgcattttatcttaccttattcctcattttagtgtccagtggctggcgtgtmtaaaccctgaatgtttttaaagataatattttaaaagatcactttagttataatacggcttcagttggtggaataaagaaatttttttctttttttttat

SEQ ID NO: 554957 - DNA, 201 bp, Homo sapiens
tatatttatttgttggttgacatttaaaatttttttttgttgatacataatatttgtacatatttatggtgtacatgtgatattttgttacatggatagawtgtgtaatgatcaagtcagtatttagggtatgtatcaccttgagtgtttattatttctgtgttttgggaacatttcaagtcatctcttctagctgtttag

SEQ ID NO: 554958 - DNA, 201 bp, Homo sapiens
actcctgacctcaagcgatctgcctgcgtcagcctcccaaagtgcttggattacaggcgtgagccaccgtgcccggcctcctttcactgctttttgattgyagtatggaattaattgtagttattgcataaatgtttttatattaaacatatataatattttgtaaacgttttatactgaataatacagatatactctttt

SEQ ID NO: 554959 - DNA, 201 bp, Homo sapiens
agctgctggagaggttgggccaggagggtcacttgagcccagaagtttgaggccctggcctacatagtgagaccctgtctcaaactgaacaaccaaccaamcaaacaaagtagcaagtgtaacgttttttaacattttttaaaaaaattattcttcaacataggacattccatgcttgcttccatcttggaatctttgtgt

SEQ ID NO: 554960 - DNA, 201 bp, Homo sapiens
tagaatttacatggaaatcctcatgtaattgaatagttataaagtaaaattcacatacataacgttaagtactttgaaaatattgattgaaagtgttagaygtaaatgaatgaaagtgctattatagtagcagccactaggaggagcaagtaggtgggaatttgaacaaatatctaaggtccaaccatataggcaccagcg

SEQ ID NO: 554961 - DNA, 201 bp, Homo sapiens
tttgagttttatatacccttttctaacttttcacagaatttattactgtctccagaatttataacgttccagaacatttcagctaactgtcttacttgtaktgtgtgtgtgtgtgtgtgtgtgtgtgtgtgtgtgtgtgtgtgttgtggggcagtgatgggtttcaggtagttaagtatacatacagatttgtttcagtgt

SEQ ID NO: 554962 - DNA, 201 bp, Homo sapiens
tagctttggtttatctcttcttttttgatatcttcacattattaatgtgtatttatagcttgtggatgaagttcatggggagaatgttactgtaaaatgcygttcagtacacactcagtttttatcatttggcttttaaaagtgttgatctctttagtctgttggtgatggtttaatagaaaaacttacacttttgttttg

SEQ ID NO: 554963 - DNA, 201 bp, Homo sapiens
tttggaaatgagagactgtctcacctattctctctttgagtgagatacctcaagggtggagttctgttttttgagcattcacaaatttttatttctcattkcatcaaatatttatttagtgctgttgtgccaggcaagtctctgggtaaatttaatgttttaaagtgtttacagttaaacactttaaacctataaagctct

SEQ ID NO: 554964 - DNA, 201 bp, Homo sapiens
gaaaaattcttccccctattcctagtaactaaaaagactgatttttatagatcatttagataccaaccctgtatttatttttggtcttttgggtttgtttytggtgtttggtgtttgttttatttttacatttatttagcataatttcagtgctaggctataccacctgtccccccccccccttttttttttaaactcatc

SEQ ID NO: 554965 - DNA, 201 bp, Homo sapiens
cacattggattccattttatttctacttaataacgtgcacctttctcatcctgtttatgtccgacgtgcagctgtaagtagaattcattttacttatctayctatttatcagttttatttttatttatttaagagacagggtctggccttgttgcccgggctagggtgcagtggtgtgatcatagctcattgcagcctcga

SEQ ID NO: 554966 - DNA, 201 bp, Homo sapiens
gtatttatttttggtcttttgggtttgtttttggtgtttggtgtttgttttatttttacatttatttagcataatttcagtgctaggctataccacctgtccccccccccccttttttttttaaactcatcagtgctgttgaaagtgagtatgaagaaagaaaataaaggattggaaaggcacaggcaagaacttaactga

SEQ ID NO: 554967 - DNA, 201 bp, Homo sapiens
tcttaacagaaaacagggttcgagagcagagaaccaatctgaccaaaatttaccaggctggaatttcccaatcatagtaagcttgagggtactgcaggagwccagggcgtatttcagtccttatctcaaccacataagacagacactcccagagcagccctttatagacctccccccagaaatgcattccttccccggggt

SEQ ID NO: 554968 - DNA, 201 bp, Homo sapiens
gtatccattctgatttattagtgcccaagccacactgattattaaatattttttaatatccactggcttaaaatattttttagatcaaaagttaaagttayaatttataatcttttaacttttagtagagaaagtaagtataatttctaataatatattttctacctgtaaattttgtctttataggatctcgaacaccca

SEQ ID NO: 554969 - DNA, 201 bp, Homo sapiens
aattttgtctttataggatctcgaacacccattatcataattcctgcagctaccacctctttaataaccatgcttaatgcaaaagaccttctacaggaccygaagtaagtaatttattaaactatcctgtacgtaggatattgagataccattggaaaatagtagttactgaatcagtattacttatttggaaaaaacaaa

SEQ ID NO: 554970 - DNA, 201 bp, Homo sapiens
attttagtgtccagtggctggcgtgtataaaccctgaatgtttttaaagataatattttaaaagatcactttagttataatacggcttcagttggtggaakaaagaaatttttttctttttttttattttgagtaaaaatgataacttctctccaccctctctatagttaaagccttccatctgaagtatgatgaagttcg

SEQ ID NO: 554971 - DNA, 201 bp, Homo sapiens
ctgtatcacatgtttgtgcttggtatccattctgatttattagtgcccaagccacactgattattaaatattttttaatatccactggcttaaaatatttkttagatcaaaagttaaagttacaatttataatcttttaacttttagtagagaaagtaagtataatttctaataatatattttctacctgtaaattttgtc

SEQ ID NO: 554972 - DNA, 201 bp, Homo sapiens
agaaatcttcatactgtttgccatagtggctctactaacttatatttccaccaacagtgtaggagttcccttttctctgcatccttgccagcatctgttaytctgtttttagtaataacccttctaattggggtaagatgatatttcatcgtggttttgatctgcacttccctgatggttagtgatgttgaacattttttc

SEQ ID NO: 554973 - DNA, 201 bp, Homo sapiens
ccgccagttggtggctgtgattgggagaatctgtcctcagggtgcttttaaatacgtgactgttggagttgtggggtcactgccagtggcttgcacttagrtatcatcattgtctgcaggtttgcaggggttggggggctgtcttcaggtgcttcccccaccccgacttagggtgtaaggactcttgggccccagggtagg

SEQ ID NO: 554974 - DNA, 201 bp, Homo sapiens
aactgtattttaaacaattttatttatattgttattgaaattgggattctttagtaacaaggattctttgattgcagtaacctgaggagctttttttctgraaaaatttttgtggtagaaagaacaattgattaataagtagctcaagctatagttttagctctctcacatgcaagctatgtgagggacaaatcattttat

SEQ ID NO: 554975 - DNA, 201 bp, Homo sapiens
gtaaaaccaagagagagtagcatctcagaggccaagtatctttgtctgttttgtgctgctgtggatatcacagactgggtaatttatgaagacaagaaatktatttctcatatttctgtaggctgggaaatccaagagcatagcagtggcatctggtgagggtcatttcatggcagaaggcagaagcaagcaagcaagcaa

SEQ ID NO: 554976 - DNA, 201 bp, Homo sapiens; identical to SEQ ID NO: 402866

SEQ ID NO: 554977 - DNA, 201 bp, Homo sapiens; identical to SEQ ID NO: 402867

SEQ ID NO: 554978 - DNA, 201 bp, Homo sapiens
tatgttgctaggtataattttattttatataaaaagtgtttctgtgattcttcagagcccaggagtcagtgctggtggttggagggacctgcccccactgrttcatttaaccctctgtctcggtgccctcagaacctcagccagaaaggcaaggaggaaatcagagcaggagcctcatactcttggtgatctattcattct

SEQ ID NO: 554979 - DNA, 201 bp, Homo sapiens
ggaaggatgtctcactcaccaggttaaccaggggacctccagagtttccaaactgtaggacaaggagaaaacatgaaagagatctggggattctaagtctrggggcataccaggatgtaggtactttctccaaattctcttctttctcagcccatgaataagtggccacatttttgcagcctaagctctatataggctcat

SEQ ID NO: 554980 - DNA, 201 bp, Homo sapiens; identical to SEQ ID NO: 402860

SEQ ID NO: 554981 - DNA, 201 bp, Homo sapiens; identical to SEQ ID NO: 402861

SEQ ID NO: 554982 - DNA, 201 bp, Homo sapiens
cccaatggccaaaatcacatcaccaggccgcagaccagccctatagagaaaaatggacagagagaaaggaaggagtacaaagcctagttcaaggacacatrcacaccttgcccatccccatatcacactgcagcctctccctcaccggtgtgcaggggagcccaggatgactttatggatgagtacaccatgctgaacatc

SEQ ID NO: 554983 - DNA, 201 bp, Homo sapiens
aggatgactttatggatgagtacaccatgctgaacatcgggaaagcttggttctcgaagctgtagttcagcaaggatgctgaaagtacacagatcaccctrttagccaaacccaggcattctccccatcctgagttccacctcaagtctctcatcaacacattgataaatatatggacaggacatgggctaggtactacaa

SEQ ID NO: 554984 - DNA, 201 bp, Homo sapiens
ccaggatgtaggtactttctccaaattctcttctttctcagcccatgaataagtggccacatttttgcagcctaagctctatataggctcatccaccatayatcagttggtgcttgtaccacacagcctctcccccctcccccatcatttgtcatttctctcctatcaggacgcacatcaatagctgcatcagtttgaatg

SEQ ID NO: 554985 - DNA, 201 bp, Homo sapiens
ataaacatcttcagcattttgtaccatctgctccccaatggccaaaatcacatcaccaggccgcagaccagccctatagagaaaaatggacagagagaaargaaggagtacaaagcctagttcaaggacacatgcacaccttgcccatccccatatcacactgcagcctctccctcaccggtgtgcaggggagcccaggat

SEQ ID NO: 554986 - DNA, 201 bp, Homo sapiens
tcctgagccgttcgagatagggacctcgcggcccaagaaagggtgcctgaaatggagggaaagcacagataagaggaggctctgacccctcctacccgccygccctccagcctgtggcttcagtgcctcccggtctacccccaccattaccggtccaggatctcgatatagaccacggcaggtgctgtcttctccaccaca

SEQ ID NO: 554987 - DNA, 201 bp, Homo sapiens
agaggcggcctttcccgccatttttcacttcactgccgttacgccctcgctggaacctgaggcgccgagagggcgggacctgcaggacagtagccaatgakgtgcggggagggggccgggctggccaatgggagctgctttcctgagggactcgaaattctccggcgggtggtcgggagctggggctctgaggggctctag

SEQ ID NO: 554988 - DNA, 201 bp, Homo sapiens
ggacgcgccgcataggccacccctaccaaaaccggacccctccgaagcggaagaagccgcgcacgtccttctcccgctcacaggtgctggagttggagcgscgcttcctgcgccagaagtacctggcctctgcggagagggcggcgctggccaaggccttgcgcatgaccgacgcacaggtcaaaacgtggttccagaacc

SEQ ID NO: 554989 - DNA, 201 bp, Homo sapiens
gcgtctatttgcgcttaagagccagcaaggaagctccaggggccccagctggccgtgctcccccgggatgcaagtccctgcgctgacgcccggcagcggcyggcacgggcgcggctgctccgggtgcacagggatgctgctgtttcggggaccccggcgccctgccttggccagccccgcgggcccctgaggccactctcc

SEQ ID NO: 554990 - DNA, 201 bp, Homo sapiens
ctggacagccgcgcggccttctcagtggcacctcgggccaccctgcaaatcctgccctggtctttcttcctcccggtagctgcgctctcgcccttctctgsgacgcgccgcataggccacccctaccaaaaccggacccctccgaagcggaagaagccgcgcacgtccttctcccgctcacaggtgctggagttggagcgg

SEQ ID NO: 554991 - DNA, 201 bp, Homo sapiens
ccggctcacttgccccgctgcccggcagctccggagtgggcccaggcggcgtgatccgcgtccctgcgcaccgcccgctgcctgtgccgccgcccgctggkggggcgcctgcagtgcctgggccctcgggtttgggcggcgccggaggcctagcgggactcaccttcccctggatggacagcggccgccgctttgccaagg

SEQ ID NO: 554992 - DNA, 201 bp, Homo sapiens; identical to SEQ ID NO: 402859

SEQ ID NO: 554993 - DNA, 201 bp, Homo sapiens
ggtgggtttagcacaggtatggggcgccagctgggtaggtggtcaagcttgtgggcccttgagtttttacaactttcttcggcccttagaccccatcatckccagttcatttcctttctgtccactttaagttctttctcctgaatcccttcattcttcaattatgtgcttgtagagtttgacagttgcctgttataaggc

SEQ ID NO: 554994 - DNA, 201 bp, Homo sapiens; identical to SEQ ID NO: 402875

SEQ ID NO: 554995 - DNA, 201 bp, Homo sapiens
cttaccacctgtagcaccgtgagtgagagcgaggccgagagcgccacggggcggttccctggggcccagctgaaggcccccctgtccccactcgcgttccscatggaggatactgagccttacccctaaccccgatcctctacccaacatgtcagttttttttttcattttcctcaatatttttcttcttgctttctcttc

SEQ ID NO: 554996 - DNA, 201 bp, Homo sapiens
tccctggggcccagctgaaggcccccctgtccccactcgcgttccccatggaggatactgagccttacccctaaccccgatcctctacccaacatgtcagttttttttttcattttcctcaatatttttcttcttgctttctcttctcctggttcccagcctctactcaatagtccccccagctttgtgtgctggtctcgg

SEQ ID NO: 554997 - DNA, 201 bp, Homo sapiens
ctgtaatggaagatttaaaaaaataagtaaataaaataccacaagagggcaatcaactgagaaatttctaagaaaaaattagataatcatgctaagtagcyctctagaacactgtttgatattattctcctgatttcttctcaccaaactttttcattaaataggttcttccagtttatggcagataagcagtttttgcgc

SEQ ID NO: 554998 - DNA, 201 bp, Homo sapiens
gcctgtgatcccactactttgggaggctgaggggggcggatcacctgaggtctggagttcaagaccagcctggccagcatggtgaaatcccgtttctactmaaaatacaaaaattagccaggcgtggtggcaggtgcctataatcccagctactcgggaggctgaggtacgcgaatcgcctgaacctgggaggcagaggct

SEQ ID NO: 554999 - DNA, 201 bp, Homo sapiens
cagatcagtactgtaaggtggatgcctaatgatttcccatcaaaactcttgcaaaattgcccttgtttgctgagagaaatgagcaggaacattgttatagyggagaatgactctggtgaagctttcccaggcatttttctgctaaaacttttgctagttttctcaaaacactctcataataagcagatgttattgttcttt

SEQ ID NO: 555000 - DNA, 201 bp, Homo sapiens
tctcagtgacaccctgtctcaaaaaattaatattaaagaataaaataggctgggcatggtggctcacacctgtaatcccagcactttgggaggccggggcggggggggggcacggatcacttgaggtcaggagttcgagaccagcctggtcaacatggtgaaaccctgtctgtactaaaaatatgaaaattagctgggcgt

SEQ ID NO: 555001 - DNA, 201 bp, Homo sapiens
ggatcgcttgagcccaggagtttgagaccagcctgggcaacacaagaagaccccatttctattttatataaataaaatcaaaattagggccaggtgcagtrtctcacacctgtaatcccagcattttgggaggccaaggcaggcagatcacctgagctcaggagttcgagatcagcctgggcaacatggtgaaaccttgtc

SEQ ID NO: 555002 - DNA, 201 bp, Homo sapiens
ccactgcctccctctcccagctcaagtctatgttttatgaaaaataagttacaggcagaagtggtggtgcacacctgtagtcccagctactcgcgaggctsaggaggaaggacagcctgagcccaggaggctgaggctccagtgagcagtgatggcatcactgcactcaggctgggtgaaagagtaagacacagtctcaaa

SEQ ID NO: 555003 - DNA, 201 bp, Homo sapiens
gagcccaggagtttgagaccagcctgggcaacacaagaagaccccatttctattttatataaataaaatcaaaattagggccaggtgcagtgtctcacacytgtaatcccagcattttgggaggccaaggcaggcagatcacctgagctcaggagttcgagatcagcctgggcaacatggtgaaaccttgtctctgctaaa

SEQ ID NO: 555004 - DNA, 201 bp, Homo sapiens
gcctgtaattccagcaccttgggaggccgaggcgggcggatcacctgaggccgcgagttcaagaccagcctgaccaacatggcgaaaccctctctctactraaaaaatacaaaattagccgggcgtgggggcgcatgcctgtaatcccagctactcgggagtctcagggaggagaatcgcttgaatccgggaggcagaggc

SEQ ID NO: 555005 - DNA, 201 bp, Homo sapiens
ggcttaaagaatccctttgaccggtttcctctcttctaaaatcctctttggagggccaggtgcagtggctcatgcctatatccccaacactttgggaggcygaggcaggcagatcacctgaggctgggagtgcaagaccaccctgaccaacatggagaaaccccgtctctactaaaaatacaaaattcgccgggcatggtg

SEQ ID NO: 555006 - DNA, 201 bp, Homo sapiens
ataaactcccttgcatgaggtcctactctctttttctaagttatttaactggtgttaatttttaactgaaccctgttaatgacaatggcagtcactgcctsggcctacctgctagtttggtattgaggatttgctcatactcctcccgaattttatcttcatagtcttttaagaggcgctcacatattatgccaacttgtc

SEQ ID NO: 555007 - DNA, 201 bp, Homo sapiens
cacattctatccattctttttcaaaagcatggcatcgaccagccatcttgtagggctgttcaccactctggattgtcaaccatcgatctatgttaaggccraaccttttctggatgtccaagaaaggcatggctgtaatggaagatttaaaaaaataagtaaataaaataccacaagagggcaatcaactgagaaatttct

SEQ ID NO: 555008 - DNA, 201 bp, Homo sapiens
acaggtttatcatgtatgtgcaagagcaatcagaaagggtgcagttccagagccaggaactctggattaaaaaataataatttgttgaggtaaaagtcacrtaacataaaagtaatcactttaaagcaaacaagtcagtggcatttagcataatcaaaatgttacactactaccaccacttctagttccagaacacttcca

SEQ ID NO: 555009 - DNA, 201 bp, Homo sapiens
ttatcatgtatgtgcaagagcaatcagaaagggtgcagttccagagccaggaactctggattaaaaaataataatttgttgaggtaaaagtcacgtaacakaaaagtaatcactttaaagcaaacaagtcagtggcatttagcataatcaaaatgttacactactaccaccacttctagttccagaacacttccatcacta

SEQ ID NO: 555010 - DNA, 201 bp, Homo sapiens
aataataatttgttgaggtaaaagtcacgtaacataaaagtaatcactttaaagcaaacaagtcagtggcatttagcataatcaaaatgttacactactaycaccacttctagttccagaacacttccatcactacaaaaactaaaaccccttacccatcaagcaatatctcctcattctcccctaaccctaattccgggc

SEQ ID NO: 555011 - DNA, 201 bp, Homo sapiens
gaaatatctcgtaactgcatgtacaatacaacagccatatgtggctaatgagtacctgaaatgtgactactgaacctgaggaacagaattttaaaaaaactttttttttttttgagacagagactcactctgtcacccaggctggagtacaatggtgtcatctcagctcactgcaacctcagcctcccgagtagctgggat

SEQ ID NO: 555012 - DNA, 201 bp, Homo sapiens
ctccccagtggcttcaaagacagtatgttcttattgccactatttcaacaatgcataaaagaatagctactttggcataaaccagacagagttccctttacttgttttcctgtggcaaagaacacaagatctgcagttagctggatggttaactagtacaatttacagtaaaagaaacctctgtttacctaacagggatta

SEQ ID NO: 555013 - DNA, 201 bp, Homo sapiens
cccggagacttgaaaatgcctttaacatggcttgcgagttcgccaagtgaagatcagtgggcagagtgttccagttgggcaacagcccggagttacagccrgaagtgctggctatgtttgggggacaatggagcgcagcgtgcatgacggtgaaaagaatgaaatgagctcaggaggccggcggggccgaaatcacgcaga

SEQ ID NO: 555014 - DNA, 201 bp, Homo sapiens
ccatttcaaaataaaataaattttaaaaagaaaaaaaaaagttaactagtgctaatatgccactgttataacgcctgtaatcccagcatgttgggaggccgaggtgttatcatgacatcaggagttcgagaccagcctgaccaacatggtgaaaccctgtttctactaaaaatacaaaaattagccaggtgtggcagcacg

SEQ ID NO: 555015 - DNA, 201 bp, Homo sapiens
gtctgggagaaggggacacacagcaagccaagaggaaatctgttaaagagacctcggaaggaaggtccttaagctaagctgccgcgcggacataagcagcmcctacctacccgatgctcgtgcccttgactcttctctggccgccgcttcagaacgactagctagcgacgcggacgcctgccgtaaaggatgacctcagcg

SEQ ID NO: 555016 - DNA, 201 bp, Homo sapiens
atgtttcatctcctattacaattcttcaaagaaatgcttcaggatcttcatcctgcttgtttaaaattcccattgaaagctctgcagctgatctgggcatsatggtttggcacctgccaagtggaatgtttgctcaactttagtttttcagtcagaattatgtaagccgaaccaagtgagatgcctatggtattgattatt

SEQ ID NO: 555017 - DNA, 201 bp, Homo sapiens
ggtttggcacctgccaagtggaatgtttgctcaactttagtttttcagtcagaattatgtaagccgaaccaagtgagatgcctatggtattgattattatytctgctgttgtcaatccacttcagttaggacacaaaatgtttttctcataaattgatgtggatggtctgccactgtgggtttcatcttcaacatcatttc

SEQ ID NO: 555018 - DNA, 201 bp, Homo sapiens
aagaagaccccatttctattttatataaataaaatcaaaattagggccaggtgcagtgtctcacacctgtaatcccagcattttgggaggccaaggcaggsagatcacctgagctcaggagttcgagatcagcctgggcaacatggtgaaaccttgtctctgctaaaatacaaaaaattagctgggcgtggtggtgcactc

SEQ ID NO: 555019 - DNA, 201 bp, Homo sapiens
cacacctgtaatcccagcattttgggaggccaaggcaggcagatcacctgagctcaggagttcgagatcagcctgggcaacatggtgaaaccttgtctctrctaaaatacaaaaaattagctgggcgtggtggtgcactcctgtagtcccagctacttgggaggctgaagtggaagaatcacctgaacccaagttgaatct

SEQ ID NO: 555020 - DNA, 201 bp, Homo sapiens
tgaacccaagttgaatctgcagtgagctgtgaacacgctaccgcactccagcctgggcgacgggagtgagacgctgtctcaaaacataaattaaaattaaycaaccaacaacaaatgagtggtggcagaaccagcatcagaacctgactctcctaactcccaatccaatgttctttccaccttactacaatgcctcctgtt

SEQ ID NO: 555021 - DNA, 201 bp, Homo sapiens
tgttggtcaggctggtctcgaactcctgaccttgtgatccgcctgcctcggcctcccaaagtgctgggattacaggagtgagctactgtgccgggccatcttttttttttttttcttgagacggagtctcgctctgtcgcccaggctggagtgcagtggtgtgttctcagctcactggaacctctgcctctcagtttcagg

SEQ ID NO: 555022 - DNA, 201 bp, Homo sapiens
actcctgaccttgtgatccgcctgcctcggcctcccaaagtgctgggattacaggagtgagctactgtgccgggccatcttttttttttttttcttgagayggagtctcgctctgtcgcccaggctggagtgcagtggtgtgttctcagctcactggaacctctgcctctcagtttcaggcgattctcttgcctcaccctc

SEQ ID NO: 555023 - DNA, 201 bp, Homo sapiens
gaggtacgcgaatcgcctgaacctgggaggcagaggctacagtgagacgaggtggcgccatcacacaccagcctaggggacaagagtgagacttcgtctcaaaaaaaaaaaaaaagagtcccaaaggaacaagaaagtaattcagcttccacctccatcatttccttaccgttttctgccgaagcaaacactctacgaaat

SEQ ID NO: 555024 - DNA, 201 bp, Homo sapiens
tcaggagcggtggctcacctaccacgtgagatggagtctccgtctgttacccaggctgcagcgcatggtgcaatcttggctcactgcaacctcctcctccrgggttcaagcgattctcctgcctcagcctcccaagtagctgggactacaggtgcgcaccaccacgcccagctaatttttgtatttttagtagagatgggg

SEQ ID NO: 555025 - DNA, 201 bp, Homo sapiens
ttctgtttattctcctcacagcacttattatcacctgtatttttacttgttatttttctgctcttcctcccactatagcataagctcactgactctgagattttttttttttgctgttttgcttactgtattcctagtgcctagactagtttctgacataatttttttaaccaatgactaacttttcacaaagatacgaaa

SEQ ID NO: 555026 - DNA, 201 bp, Homo sapiens
ctgtgtgctttttcccaaatgtttcttcatgctttagtgcaaaggccagcacacttttctgtaaaaggacacagagtaagtattttcagctctgtggcccrtgctttggtctttgtagcacctactctactcaagtctggagttagtgtgaaaactgccacagacaaatgaataggtgtagcagtgtttctacaaaacttt

SEQ ID NO: 555027 - DNA, 201 bp, Homo sapiens
gccttgctcccagggtaacaaagcggggctggaagtgctaatgcaaggccctgagtcccacccctctgaacaagcctcagctgctgcatgcacagggtgtytgcaaggttgtaggcagagccgtctacaggtttcctgggtctgcattcacgggatttctgtccttgacctgtaaggttccctcatgtttacacacctctt

SEQ ID NO: 555028 - DNA, 201 bp, Homo sapiens
tgtcgtctctattaaaaatacaaaaattagccaggtgtggtggcaggtgcctgtaatcccagctacttggggaagctgaggcaggagaatcacttgaaccygggaggcggaggttgcagtgagcagagatcatgccactgcactccagcctgggcgacaacagcaaaactccacctcaaaaaaaaaagcagttaaaaaaaa

SEQ ID NO: 555029 - DNA, 201 bp, Homo sapiens
ctcagccacaggcaacataaatccttcttagagatagataccctcattcttgtcctgttcactcctgcaaataataattttttttttttttgagatggagwtttgcttgttgcctaggctggagtgcaatggtatgcaatcttgaatcactgcaacctcctcctcctgggttcaagtgattctcctggctcagcctcccta

SEQ ID NO: 555030 - DNA, 201 bp, Homo sapiens
aggtcgaggtgggcggatcacctgaggttgggagttcgggaccagcctgaccaacatggagaaacccctgtctctacttaaaatacaaaaaattagctggrcgtggtgatgggcacctgtaattccagctacttgggaggctgagaaaggagaatcgcttgaacctgagaggcggagattgcagtgagccgagatcacaca

SEQ ID NO: 555031 - DNA, 201 bp, Homo sapiens
aggctgagacagaagaattgcttgaacctgggaggtgaaggttccagtgagctgagatgacgccactgcactccagcctgggcgacagagcaaatctcaaraaaaacccaaaaaaacaaaaaacaaaaaacaaaaacaaaaaaacaaaacaaaacaaaaaaacatgggcagcagccctgttctcaggtgttcctcaaagct

SEQ ID NO: 555032 - DNA, 201 bp, Homo sapiens
cagcactttgggaggctgaggcaggcagatcacaaggtcatgaaatcgagactatcttggctaacatggtgaaacaccgtctctactaaaaataaaaaaawttagccaggcgtggtggcacgtgcctgtagtcccagctactcaggaagctgaggcaggagaatctcttgaaccggggaggtggaggttgcactgagccga

SEQ ID NO: 555033 - DNA, 201 bp, Homo sapiens
gaggcaggagaatctcttgaaccggggaggtggaggttgcactgagccgagattgtgccactgcactccagcctgggaaacacaatcaagactctgcctcaaaaaaaaaatagaaaaacaaaacaaaaaaacaagagtgctatgggccaggcactgtggctcatgcctgtaatccagcactttggaaggccaaggtgggag

SEQ ID NO: 555034 - DNA, 201 bp, Homo sapiens
tggtccgggcgcagtggctcatgcctgtaatcccagcactttgggaggccaaggtgggcggatcatgagttcaggagatggagaccaccctggctaacacrgtgaaaccccgtctctactaaaaatatgaaaaattagccgggcgtggtggcatgtgcctgtaatcccagctactcaggaggctgaggcaggagaatcgct

SEQ ID NO: 555035 - DNA, 201 bp, Homo sapiens
ggaggccaaggtgggcggatcatgagttcaggagatggagaccaccctggctaacacggtgaaaccccgtctctactaaaaatatgaaaaattagccgggygtggtggcatgtgcctgtaatcccagctactcaggaggctgaggcaggagaatcgcttgaacccaggaggcttagaggttgcagtgagctgagatcacac

SEQ ID NO: 555036 - DNA, 201 bp, Homo sapiens
ggaaacacaatcaagactctgcctcaaaaaaaaaatagaaaaacaaaacaaaaaaacaagagtgctatgggccaggcactgtggctcatgcctgtaatccagcactttggaaggccaaggtgggaggatcacttgaggccagcctgggcaacataacgagacccagtattaaaaaaaagaaaaaaagcctgtacatggtgg

SEQ ID NO: 555037 - DNA, 201 bp, Homo sapiens
tcattcacccatttctaaatcctcagatcccattgcttactgcccccactcaaactcgtgttctcagccatccacaattgctttcacgctccaagctcgtwggagcagtttcttcgcctggaatgatcccacccacttgctgctaccttcccactgtctccctggcgaatgcctaatccattcagatccagtttatcacat

SEQ ID NO: 555038 - DNA, 201 bp, Homo sapiens
cggtgtatactgcttgggtgatgggtgcatcaaaatctcacaaatcaccactaaagaacttactcatgtaaccaaataccacctgtaccctaataacttawgaaaacagcaacacttccatggcccttgggttcttgggatgaagaaacaatcaaaatgttgtagccagtgatcttctgttacagaaagatgaatgaaaca

SEQ ID NO: 555039 - DNA, 201 bp, Homo sapiens
cagatcccattgcttactgcccccactcaaactcgtgttctcagccatccacaattgctttcacgctccaagctcgttggagcagtttcttcgcctggaaygatcccacccacttgctgctaccttcccactgtctccctggcgaatgcctaatccattcagatccagtttatcacatcattttctggtgaaaacttcctg

SEQ ID NO: 555040 - DNA, 201 bp, Homo sapiens
aaattgggtactagcgttataagacagaagggctagggccatttacagaacttgtcaggctttaaaaactcaaatatcattcctccagaaataaagaacamagaagacaccagtaatacttgctgaatgattaacactcaaagccaacataaacatgtcttttcctacttatgtttaactaacaagaaggcatgttgggta

SEQ ID NO: 555041 - DNA, 201 bp, Homo sapiens
atgatcccacccacttgctgctaccttcccactgtctccctggcgaatgcctaatccattcagatccagtttatcacatcattttctggtgaaaacttccygaattcctcaggcatttacaggcctttttgagatcccaccagccctgtaaatgtctattatagatattgttaaatgatgattccccagcctcctccactg

SEQ ID NO: 555042 - DNA, 201 bp, Homo sapiens
tcaggcatttacaggcctttttgagatcccaccagccctgtaaatgtctattatagatattgttaaatgatgattccccagcctcctccactgggccctgcatacagtcttgctgtatgcatgataggggtgcaaggatgtaggtgtcagtcttccttggctgcaaaggctgagaaactaaaaatcccagagtaccccctg

SEQ ID NO: 555043 - DNA, 201 bp, Homo sapiens
ctgaattcctcaggcatttacaggcctttttgagatcccaccagccctgtaaatgtctattatagatattgttaaatgatgattccccagcctcctccacygggccctgcatacagtcttgctgtatgcatgataggggtgcaaggatgtaggtgtcagtcttccttggctgcaaaggctgagaaactaaaaatcccagag

SEQ ID NO: 555044 - DNA, 201 bp, Homo sapiens
ctgacatatattttcatcataaattaacacactggagtttggttttttatttttttatttttatttatttattttttgagacggagtctcactctgtcgcycaggctggagtgcagtggtgtgatctcagctcactgcaacctctgcctctccaggtttaagcaattctctgcctcagcctctggagtagctgggattaca

SEQ ID NO: 555045 - DNA, 201 bp, Homo sapiens
gaggctgaggtacgcgaatcgcctgaacctgggaggcagaggctacagtgagacgaggtggcgccatcacacaccagcctaggggacaagagtgagacttygtctcaaaaaaaaaaaaaaagagtcccaaaggaacaagaaagtaattcagcttccacctccatcatttccttaccgttttctgccgaagcaaacactcta

SEQ ID NO: 555046 - DNA, 201 bp, Homo sapiens
aggatggagcaatcctttatttttacacactttgacaaggaggtttgtcgtaaacaacctttccagtggagaacagagaacaggaaaatcagcctccagayatcagcagctgctctgttcagggccgaggctcccccttgccaatgtggtgaggtggaggggtgtactttccttcctttatcagcttatcccgctgcttcc

SEQ ID NO: 555047 - DNA, 201 bp, Homo sapiens
tcttgaactcctgacctcgtgatcacccgtctcggcctcccaaagtgctgggattacaggcgtgagccaccgcgcctggccaggagtctggttttatagaycaatatagctttattagtgagtcagattcctgaacacagatgagggtaattacactacctggagggaacctgccagggcagctgaataaccttccccagg

SEQ ID NO: 555048 - DNA, 201 bp, Homo sapiens
ggacagttacattcttagttctgtagaacctccgtatgtcgtaggattctcaaattctagctaatgatctaccgatttcaagccatatatggtacgaggcwatagccatataataaaagaacgtggccagtcccttagaaattatcaggttgaaatcggattccgtgactcttgcggcggcctctgggttcctaaagactt

SEQ ID NO: 555049 - DNA, 201 bp, Homo sapiens
cctgataaggttgtaaaaataaaaactaaaggtaacaataatgtcataacaagtgacagtacagtccaggaactgacatgaattcaagtggttccacacayagtcaaagtccctaactttcagcctaaatactagaacaatgtaggagatgctttaagagtgttatgggccagctgggtatggtggcttatgcctgtaatc

SEQ ID NO: 555050 - DNA, 201 bp, Homo sapiens
aggcatgcaccaccacgcccggctaattttgtatttttagtagagaagaggtttctccatgttggtcaggctggtcttgaactcctgacctcaggtgatcygcccacctctacctcccaaagtgctgggattacaggcgtgagccaccgcacccggcccaagagccacgttcctcttaggtgaagctacagccatggttaa

SEQ ID NO: 555051 - DNA, 201 bp, Homo sapiens
caacctttccagtggagaacagagaacaggaaaatcagcctccagacatcagcagctgctctgttcagggccgaggctcccccttgccaatgtggtgaggkggaggggtgtactttccttcctttatcagcttatcccgctgcttcctgatggtacctgcacgtctcatctgtcaaaggaaaatggtaattaaactgaggg

SEQ ID NO: 555052 - DNA, 201 bp, Homo sapiens
aggtccaagttcattcttttgcatgtagctatttggttatcccagcaccacttgttgaccattcaatagtcttggcactcttgtcaaaaaacaactgaccrgtaaggtgcagtggctcacgcctgtaatcccagcactttgggaggctgaggtcaggagattgagaccaatctggctaacatggtgaaaccccatctctac

SEQ ID NO: 555053 - DNA, 201 bp, Homo sapiens
tgaattcctcaggcatttacaggcctttttgagatcccaccagccctgtaaatgtctattatagatattgttaaatgatgattccccagcctcctccactrggccctgcatacagtcttgctgtatgcatgataggggtgcaaggatgtaggtgtcagtcttccttggctgcaaaggctgagaaactaaaaatcccagagt

SEQ ID NO: 555054 - DNA, 201 bp, Homo sapiens
gcaaggttgtaggcagagccgtctacaggtttcctgggtctgcattcacgggatttctgtccttgacctgtaaggttccctcatgtttacacacctcttartcataacctgagaaaagctctcacagtacccttctacagataggccatctataatttagcacattgggaactttatttagatctgtatcctggtaccact

SEQ ID NO: 555055 - DNA, 201 bp, Homo sapiens
tttttttaaattcaattttaagtagagacggggtttcacgatattggccaggctggtctcgaactcctgacctcaggtgatccactcgccttggcctcccwaagtgctggaattactggcatgagccactgcacccagcccccggttcccaccttcttagtgtatgtgctgtcatcacgttccaccccaaccaaaccttgg

SEQ ID NO: 555056 - DNA, 201 bp, Homo sapiens
agtgagactccctctcaaaaaacaacaacaaaaaacaatttatctatttgtaaactgctgatttctttgaggcattgtccccataagcttttcgtaaagcwtcaatgatctcaccattcttccacccaagcttaaccataaacttgatatttgttcttgcttcaattttagcagaattcatgttactcttataggggctct

SEQ ID NO: 555057 - DNA, 201 bp, Homo sapiens
aaactccagggctcaagcaatcctcctgcttagcctcccaagtagctgggactacagacatgccactgtgcccagctaattctttttttttttttttttttgagacagagcttcactctgtcaccaggctgaaatgcagtggtgcaatcttggctcactgcaacctccacctcccaggttcaagcgattctcctgcctcag

SEQ ID NO: 555058 - DNA, 201 bp, Homo sapiens
gtctttggggggtggaccacagggtgcatgagatattatacattggaggtatgggaggaaaatactagaacatatatatatatatatatatatatatataattattacttttgagacagattctcactcccattgccccgctggagtgcagtggtgcaatcacagttcactgcagcctcaacctccctgggctctggtgat

SEQ ID NO: 555059 - DNA, 201 bp, Homo sapiens
atgtctttggggggtggaccacagggtgcatgagatattatacattggaggtatgggaggaaaatactagaacatatatatatatatatatatatatatataattattacttttgagacagattctcactcccattgccccgctggagtgcagtggtgcaatcacagttcactgcagcctcaacctccctgggctctggtg

SEQ ID NO: 555060 - DNA, 201 bp, Homo sapiens
gtatgtctttggggggtggaccacagggtgcatgagatattatacattggaggtatgggaggaaaatactagaacatatatatatatatatatatatatatataattattacttttgagacagattctcactcccattgccccgctggagtgcagtggtgcaatcacagttcactgcagcctcaacctccctgggctctgg

SEQ ID NO: 555061 - DNA, 201 bp, Homo sapiens
tacaaatatttcctgcggtcagcaacccccttcttccatgtctggaattcacctagcactcaataaagatttaagcaataaaaggcttagttttacaggasctttccacaaaaagtaccatacagattgagcatccctcatccaaaatgcttgagacagaagttttggattgtggaatagttgcattatacttaccaattg

SEQ ID NO: 555062 - DNA, 201 bp, Homo sapiens
gtagaaacagggttttcaccatgttggccaggatggtctcggtctcttgatccacccaccatggcctcccgaagtgctgggattacaggcataagccaccycgcccagcccaaaaatcacttacgaagcagctactgtaatgtgaactacaaccaaattagtctagaggatagtagtattgaataaaacatttacattaaa

SEQ ID NO: 555063 - DNA, 201 bp, Homo sapiens
ggggggaggccgaggcaggagaatcgcttgaatccgggaggcggaggttgcagtgaggtgagatcgcgccactggactccagcctggcgacagagctagaytcagtctcaaaaaaaaaaaaaaaaaaaaaaaaaaaaaaaaaaagtaggcccccaccaatttcgtgtgactctaggaaagtttcttaacttcattgtgcct

SEQ ID NO: 555064 - DNA, 201 bp, Homo sapiens
acgactagctagcgacgcggacgcctgccgtaaaggatgacctcagcgagacgtttgcagcgcgacgccggaagccgaccttccctcagccgtctccccasaaaaccatagaaaccgagcccgttggcctggtacggtggctgacgtctgcaatcccagcaccttggaaggctgagggaggaagatcacttcagcccagga

SEQ ID NO: 555065 - DNA, 201 bp, Homo sapiens
gcctcagcctcctgaatagctgggactacaggtgtgcgccaccactcccagctgatttttgtatttttttttagtagagacgaggtttcaccatattggcyaggatggtctagatctgttgacttcgtgatctgcccgcctcagcctcccaaagtgctgggattacaggcgtgaaccactgcgcccggccaagctaattct

SEQ ID NO: 555066 - DNA, 201 bp, Homo sapiens
gtctcagggaggagaatcgcttgaatccgggaggcagaggctgcagtgagccgagatcgcgccactctgcactccagcctgggcaacaagagcgaaactccatctcaacaaaaaggtgaatttaacttcttaagttccttcccatccctcagtcatcatttactgagtagttacgttccaggcactcagatgcgggggaaa

SEQ ID NO: 555067 - DNA, 201 bp, Homo sapiens
aagcttttcgtaaagcatcaatgatctcaccattcttccacccaagcttaaccataaacttgatatttgttcttgcttcaattttagcagaattcatgttrctcttataggggctcttttcaaactaatgtcttatccttcatagtgcctcaaagtagatcctgctcagacatgttataacaagttagtacaaatttattt

SEQ ID NO: 555068 - DNA, 201 bp, Homo sapiens
caggcatttacaggcctttttgagatcccaccagccctgtaaatgtctattatagatattgttaaatgatgattccccagcctcctccactgggccctgcatacagtcttgctgtatgcatgataggggtgcaaggatgtaggtgtcagtcttccttggctgcaaaggctgagaaactaaaaatcccagagtaccccctgc

SEQ ID NO: 555069 - DNA, 201 bp, Homo sapiens
aggcatttacaggcctttttgagatcccaccagccctgtaaatgtctattatagatattgttaaatgatgattccccagcctcctccactgggccctgcatacagtcttgctgtatgcatgataggggtgcaaggatgtaggtgtcagtcttccttggctgcaaaggctgagaaactaaaaatcccagagtaccccctgct

SEQ ID NO: 555070 - DNA, 201 bp, Homo sapiens
gaaaaggggtggaaaggatgattttacggtgagcctaaggttttgcttaagcttgaggaatagaaaaacacacaaagaaacgacttgcccaaatccattaytgagacgcccccctcatttccggaagtcctttaaaatcgcagaatattaatgctgaagcaccctcccctctactcctgcgctatgaggtgtctactgtaa

SEQ ID NO: 555071 - DNA, 201 bp, Homo sapiens
tggtaagtgtatgttaaacttcataaaaaacaggccaacagttttccaaattggctgtatcatgttatattcctactggcaatgtaagagagttccagacrctctacatcttcagcaacatttggcgatgccagtttttcaaaaattttggacattccagtggatgtaaggtggtatctcagcatggttgtaatttgcatt

SEQ ID NO: 555072 - DNA, 201 bp, Homo sapiens
gatcccaaaacccagccctggtggtttggtcttaccttgtggcctcagagggctaccttatcattatatgatagcctaacaacaatgtggtatagtggggsgggtggtgagcaggtgtcattttccttagagaaacctactctacttcccagccaggagccacttagttggaatggggactgacactttatagttaagtga

SEQ ID NO: 555073 - DNA, 201 bp, Homo sapiens
ggcatttacaggcctttttgagatcccaccagccctgtaaatgtctattatagatattgttaaatgatgattccccagcctcctccactgggccctgcatacagtcttgctgtatgcatgataggggtgcaaggatgtaggtgtcagtcttccttggctgcaaaggctgagaaactaaaaatcccagagtaccccctgcta

SEQ ID NO: 555074 - DNA, 201 bp, Homo sapiens
caggccaacagttttccaaattggctgtatcatgttatattcctactggcaatgtaagagagttccagacactctacatcttcagcaacatttggcgatgycagtttttcaaaaattttggacattccagtggatgtaaggtggtatctcagcatggttgtaatttgcattttccacattactaatgatattatcttttta

SEQ ID NO: 555075 - DNA, 201 bp, Homo sapiens
ctctgcctctccaggtttaagcaattctctgcctcagcctctggagtagctgggattacaggcgcgtgccaccacgccccgctaatttttttgtatttttrgtagagatgaggtttcaccattttggccaggctggtcttgaactcctgacctcgtgatcacccgtctcggcctcccaaagtgctgggattacaggcgtga

SEQ ID NO: 555076 - DNA, 201 bp, Homo sapiens
gcgtggtggcacatacctgtaatcccagctactcagcagctgaggcaggagaatcgcttcaacccgggaggcggaggttgcggtaagctgagatcatgccrtcgcactccagcctgggcaacaagagcaaaactccatcatattaaagaaaattgtattgtgagccttttaattacagatttgcagatacgagtaatatac

SEQ ID NO: 555077 - DNA, 201 bp, Homo sapiens
aaatcccgtttctactaaaaatacaaaaattagccaggcgtggtggcaggtgcctataatcccagctactcgggaggctgaggtacgcgaatcgcctgaayctgggaggcagaggctacagtgagacgaggtggcgccatcacacaccagcctaggggacaagagtgagacttcgtctcaaaaaaaaaaaaaaagagtccc

SEQ ID NO: 555078 - DNA, 201 bp, Homo sapiens
cagtgttttgctttgttttgttttttgagatacagtctcgctctgtcgccaggctggagtacagtggcgctatctctgctcaccgtgatctccgcctcccrggttcaagcgattctcctgccttagcctcctgagtagctggactacaggtgcccaccaccacgtctggctagtttttgtatttttagtagagacgggatt

SEQ ID NO: 555079 - DNA, 201 bp, Homo sapiens
tacaaaactttacaaaaataggccagtttttgtatgaccctgctatattaacatacaaaacatactgaatacagattcacagaaaggcattaccaaattcwtttgtcattcatcttttatttccttaatcaaacaaaggtacaaattctaataagaaaaagtgagatctttatgttaacaaggggctattcatattggaaa

SEQ ID NO: 555080 - DNA, 201 bp, Homo sapiens
cgggcgcggtggctcgtgcctgtaatcccagtactttgggaggccaaggtgggtggatcacttgaagtcaggagttccagaccagcttggctaatatggaraagccccgtctctgctaaaaatacaaaaaattagctgggtgtggtggcgggtgcctgtaatcccagctatttgggaggctgaggcagggagaatcgcttg

SEQ ID NO: 555081 - DNA, 201 bp, Homo sapiens
ttcaacaaaagatagcgcaagtatgaactccaatttgcagaagtgagacccaaaaagattatggactatctttaggtatctgcaggagctagggaagaacwaaacatcactgcaagtggccatctatggcgcctgtctttgagggttctttaaaatggacttttgcaaacattatctcatcctgtacataaggttatacaa

SEQ ID NO: 555082 - DNA, 201 bp, Homo sapiens
caccacgcccggctaattttgtatttttagtagagaagaggtttctccatgttggtcaggctggtcttgaactcctgacctcaggtgatccgcccacctcwacctcccaaagtgctgggattacaggcgtgagccaccgcacccggcccaagagccacgttcctcttaggtgaagctacagccatggttaatcatccttcc

SEQ ID NO: 555083 - DNA, 201 bp, Homo sapiens
ccactgctatgttcctcttttaggaacaagtgactaccctgaaaaaagaagagatgaaacaaatcacccttcaaatacaaagtaaaatcattctttaattwttaaaaaaaaatcactgttgggcttttttttttaaaggtccataaattttcaatgcaatgttgaactggggaaatggttatagcagctctcacataagtt

SEQ ID NO: 555084 - DNA, 201 bp, Homo sapiens
gtttaactaacaagaaggcatgttgggtagcaaggcaggttggcaggttaacagccttcatcaactaatgaaagccctgatgagacaagaaatataggtamtttcactcctagaaatggagcattagaaaatctggatccacttggccgggcgcggtggctcacgcctgtaatcctagcactttgggaggccgaggcaggc

SEQ ID NO: 555085 - DNA, 201 bp, Homo sapiens
gtgacttcatctcttaatattcccctagctccctccagtcagctcagggacctttgcacttgctgtttcctctgcatggaacattcttccctcataaccayatagctcactttctttaagtctctggtctgtcttcttttgctgagatcttctctgactatttaaagtagcatccacctagctcctgcccctagcactttc

SEQ ID NO: 555086 - DNA, 201 bp, Homo sapiens
tcaccacaactaattttaggacattttcgttagcccaaatggaaacccatgcccatcagcagtcattcttcatttctcccggaacctctcagtccctgccmgccactagtctactttctgtctctgttgatttgccttttctggacatttcatgattcatataaatggaatcacacaggacctgttgtgattggcttcttt

SEQ ID NO: 555087 - DNA, 201 bp, Homo sapiens
cctgcacactgagctccaagtgtgccccagccactgagccttgtgacttgagcagatgtccgaagccgtttcttcatcccatgagaccaataacactgtcygcctcagaacatagccgtgatcaagatgagcacggaggctcgtgtcccagcacctggcacacagtaagtgcctggtaaataaacaatggctatatttgct

SEQ ID NO: 555088 - DNA, 201 bp, Homo sapiens
aggaccccgttttcagtgagggctcagaaagtgtttgctgaatggctgtaaagagcgttacctgggtctcatttcggagcaagtaaacatggcctttgttttaatatttgttaagtccctgccgggcgcagggaggggtgaaagtttaggctcttgtgccccaaaacggcccagccacctggaagcctccaggacgccaca

SEQ ID NO: 555089 - DNA, 201 bp, Homo sapiens
ttccttgctgaccagctgcccctgcaggtgggccggtacccgggcaaggtggcgctacccctaaccctgcttcaccctgcagggttgcctgaggagatgcyaggctctttggcccgcctggtctccagaaccctgacccgtcattccatcttgtgtgagggccccatccttctgtctgccgaactgtgactgtgggcaggt

SEQ ID NO: 555090 - DNA, 201 bp, Homo sapiens
ccctgggccccctgcatctcttacagacctacacggctgtgtattatgtcttggcagacctggtgatgctgacgctgtacttttactacaagttcaggacrcgcccctctctgtgtgagtatggggaccgctctctgtcagatgctctaccagcagcagggggcagttgggggggggggcgcctggagtgtgggaggaagc

SEQ ID NO: 555091 - DNA, 201 bp, Homo sapiens
ggaggatgggccgccaggccacttcctctccatcgccgcctcgatccccatggtcgtctcctctgggcggtgtcccctataaggcggcatcccctgtaagrtggcctgagcatgcatcccttcctcttcctcttccacagccagttcatcaaagcctacaagacgggcaacatggaccaggcgctgtccctgtggttcctc

SEQ ID NO: 555092 - DNA, 201 bp, Homo sapiens
tttccaaacgtgtaaatggagagtctgagtctggaagtgtgaggggtcccgggcctgggtcacaggtcatgtctaatcaacgcttactgaaggcgcctgtstgcccggacgctggaggggctacaatgagaacaaataatagtcattttgggctgttggtgttgagtgccagtgccaggcacccttgtaatcgcttggcct

SEQ ID NO: 555093 - DNA, 201 bp, Homo sapiens
atcgtgggacgaggctccgggccgggactgggtggccctcgggaatccgcagccagtggccccccacctcaaaggcgaccagcgcggcctctcgagctggyctggccaggagttgccctgccccggccgaccggccccttggcatctgatggcttcgtttttcccgggccggccgggcgaggggccctcgcggcgctggcc

SEQ ID NO: 555094 - DNA, 201 bp, Homo sapiens
gctgtacttttactacaagttcaggacgcgcccctctctgtgtgagtatggggaccgctctctgtcagatgctctaccagcagcagggggcagttgggggkgggggcgcctggagtgtgggaggaagcgggtttcccatggctgggtgataacccaaacctcggaaagccttccccgggccttatctaagagcctgagcct

SEQ ID NO: 555095 - DNA, 201 bp, Homo sapiens
tgactgctctactcactgtccagggtgcccgggtagcgggagaggcctgccctgcccacccctgcgatcagccatattctggctttgtcattgtgacggtrgggaggtggctgtggactccctgctggtaggcatcccccccacactctgtgagctcctgggagaatacaggctgcatcgtcccaaacttgagtccttgtc

SEQ ID NO: 555096 - DNA, 201 bp, Homo sapiens
aggccacttcctctccatcgccgcctcgatccccatggtcgtctcctctgggcggtgtcccctataaggcggcatcccctgtaaggtggcctgagcatgcrtcccttcctcttcctcttccacagccagttcatcaaagcctacaagacgggcaacatggaccaggcgctgtccctgtggttcctcctgggctggattggc

SEQ ID NO: 555097 - DNA, 201 bp, Homo sapiens
gtggcgcgcggtcagctgacccggcgggccttgacccagaagctgggccctggcggcggatctggacgtggtgagccggaccgggggcaggtggcaaactycacggctgggggtcggggctcctgggcttccctgccacatccttccagccctctcctccggccgctggactgtcccggctcctgcgccctccttgtggcg

SEQ ID NO: 555098 - DNA, 201 bp, Homo sapiens
ggtagcgttcttcaggtgtgtggacaaggggagaggaggaggtggaaggtcctgtccagccagctctcatggggcatctttgaaagggcaatttagaagtgagtcttcttatctcatgaccaggcccttgaaggggagcaggacacttctaggggaagagatggcacgtgcagaagcctggagacctgaaatgactgaaga

SEQ ID NO: 555099 - DNA, 201 bp, Homo sapiens
cgaacttctggcctcaagtgatccaccctcctcaacctcccaaagtgttgggattgcaggtgtgagccaaccgtgtctggccaccatttagtttctttctrtctgtctgttttccttcatgcatgcaggtggttaaagagaaactggaacagtaaatggcagtatgtataatggttaagagcaagaccggaggctcaggta

SEQ ID NO: 555100 - DNA, 201 bp, Homo sapiens
cggagctcgtgtcggggaggcccagaggaggaaccgacatttcctgagacgggaaagatgactccgaggtctctgggcctgaggaggggtgagcgggacayctgagaccagagctgggaggaagagagccatcctggggcggcgagcctggggccttgcaaggatcccctcacagaatgggggcctttatccaagagcact

SEQ ID NO: 555101 - DNA, 201 bp, Homo sapiens
tttgtgtcctgcacactgagctccaagtgtgccccagccactgagccttgtgacttgagcagatgtccgaagccgtttcttcatcccatgagaccaataayactgtctgcctcagaacatagccgtgatcaagatgagcacggaggctcgtgtcccagcacctggcacacagtaagtgcctggtaaataaacaatggctat

SEQ ID NO: 555102 - DNA, 201 bp, Homo sapiens
gactttgtgtcctgcacactgagctccaagtgtgccccagccactgagccttgtgacttgagcagatgtccgaagccgtttcttcatcccatgagaccaayaacactgtctgcctcagaacatagccgtgatcaagatgagcacggaggctcgtgtcccagcacctggcacacagtaagtgcctggtaaataaacaatggc

SEQ ID NO: 555103 - DNA, 201 bp, Homo sapiens
agactttgtgtcctgcacactgagctccaagtgtgccccagccactgagccttgtgacttgagcagatgtccgaagccgtttcttcatcccatgagaccartaacactgtctgcctcagaacatagccgtgatcaagatgagcacggaggctcgtgtcccagcacctggcacacagtaagtgcctggtaaataaacaatgg

SEQ ID NO: 555104 - DNA, 201 bp, Homo sapiens
gcactttcaggcaggagctatggttccttcctcaggaggcctccaatctgatggggaagacatggcccctccccctggggagtgccctgtgtgatggaggygatacagcccctaccttcagagagcacctggcctgcagctcatccaaacctgagtctcctctcccttggaggcctcattccagcgccccaaggaggattc

SEQ ID NO: 555105 - DNA, 201 bp, Homo sapiens
cttggacatccatttgctcagagctgtttgaacaggatgtgggcccatgcctggcttctaggtgacaggaactacgcaggatggccctcagagccaggccyttctgttcagggatcaggtgtgtctcagagtgtcccgagctccacattgcacatgggtcctgtccaaggtcagggggacacccacccagtatcctggatc

SEQ ID NO: 555106 - DNA, 201 bp, Homo sapiens
gctgtttgaacaggatgtgggcccatgcctggcttctaggtgacaggaactacgcaggatggccctcagagccaggcccttctgttcagggatcaggtgtrtctcagagtgtcccgagctccacattgcacatgggtcctgtccaaggtcagggggacacccacccagtatcctggatccataaaccaaggtaccttcctc

SEQ ID NO: 555107 - DNA, 201 bp, Homo sapiens
agaattacttcattgcagtggcaccaagtgctgcagagaaaaacaacaagagcgtctagccagggaccgtcctggttagaggggcagcaaaggcccctatmagtctcattgaacctgtgacttgacagagtaggagaagtcaggcgaaggcaggagaggaatgttctaggctgtgcagacgagagctggagtgtggagaga

SEQ ID NO: 555108 - DNA, 201 bp, Homo sapiens
ggaagaggctttcagcctccctgcctgtgccaggccctggaggtagtccagtgagctgggctgacagtgacctggggcacccttacctttaggtccagggyctctgcccacagcgagtcacattagggctgagggtctacggcttcctgagaggaggtgctgactcacttcctttccctcccggtgctccctggtctctgt

SEQ ID NO: 555109 - DNA, 201 bp, Homo sapiens
tcttgggtttgactctgtagtttcctggctgggtggcgctggcacatcacttccgcactctggctcaggctccttgtggatatcagtggtccccacttcayagttgctgggaagatgcaacatgagtgcatgcaggatgcttggctcaccggtccgagctgtggtgatgatcactgatggagatggcccagccgagcctca

SEQ ID NO: 555110 - DNA, 201 bp, Homo sapiens
tacccctaaccctgcttcaccctgcagggttgcctgaggagatgccaggctctttggcccgcctggtctccagaaccctgacccgtcattccatcttgtgkgagggccccatccttctgtctgccgaactgtgactgtgggcaggtcactgctcttctctgggcctcagtttccccatctgcaatatgagcatgtctaaca

SEQ ID NO: 555111 - DNA, 201 bp, Homo sapiens
gtgcccagcatctcttgttctaagtgttacaaagatgtaactcttacatttaggtgtttgatccattttgtaaatgatgtgaagtaggagtccaacctcattttttttttttttcttgagacacagtcttgctctgttgttcaggctggagtgcagtggtgcgatctcagctcactgcaacctccacctcttgggctgaag

SEQ ID NO: 555112 - DNA, 201 bp, Homo sapiens
ccacttcatagttgctgggaagatgcaacatgagtgcatgcaggatgcttggctcaccggtccgagctgtggtgatgatcactgatggagatggcccagcygagcctcactttccctccctcctctaaggtgtcacgcaggcaatgactgctctactcactgtccagggtgcccgggtagcgggagaggcctgccctgccc

SEQ ID NO: 555113 - DNA, 201 bp, Homo sapiens
cccgggtagcgggagaggcctgccctgcccacccctgcgatcagccatattctggctttgtcattgtgacggtggggaggtggctgtggactccctgctgktaggcatcccccccacactctgtgagctcctgggagaatacaggctgcatcgtcccaaacttgagtccttgtcattcatgcaaccccggggatcccttgc

SEQ ID NO: 555114 - DNA, 201 bp, Homo sapiens
ccattgtgcccagcatctcttgttctaagtgttacaaagatgtaactcttacatttaggtgtttgatccattttgtaaatgatgtgaagtaggagtccaamctcattttttttttttttcttgagacacagtcttgctctgttgttcaggctggagtgcagtggtgcgatctcagctcactgcaacctccacctcttgggc

SEQ ID NO: 555115 - DNA, 201 bp, Homo sapiens
ctcagagaggagaagtgacttggtccgggtcacccagctgggatatgacagagggctgccggggcgtggtctcagatcctgggactgcgccaacccctggrccccctgcatctcttacagacctacacggctgtgtattatgtcttggcagacctggtgatgctgacgctgtacttttactacaagttcaggacgcgcccc

SEQ ID NO: 555116 - DNA, 201 bp, Homo sapiens
tcaggcacagaaaggctgagtctttgcccaaagtctagcatgaatgggtgatgaagcagggatttgaacacacccgtcccttctgcagatccagcacgctrcctgcatgtgtctgtagttggcgtgtgtttgctgtgatctgtgcacctgggagctgattgggtcctggtgggtgaagattatgtctttgcccttctctgg

SEQ ID NO: 555117 - DNA, 201 bp, Homo sapiens
ggcggagactcctgcaacctcatcggctccttccttgctgaccagctgcccctgcaggtgggccggtacccgggcaaggtggcgctacccctaaccctgcytcaccctgcagggttgcctgaggagatgccaggctctttggcccgcctggtctccagaaccctgacccgtcattccatcttgtgtgagggccccatcctt

SEQ ID NO: 555118 - DNA, 201 bp, Homo sapiens
ctggtgtacaggcgcagcaccgccgcctcggagcttgagcccctcctccccagctgaccagaaccaggctgagcgcaggaggacaggcaccaccggatgcyacaccaggcaggaggaggtgtggacagtgatggtacggcggccctgcatcagcctgcgggtggcctctggatcctccgtggaccgaaccgtccccccagg

SEQ ID NO: 555119 - DNA, 201 bp, Homo sapiens
taacccaaacctcggaaagccttccccgggccttatctaagagcctgagccttaactggccaagatagaggcttgagggcagtgagcgcgtcctggcccaraccacaggccggttcctctcgcccaggggctcattcagcagacacagctccagctcctcctctgtgtccggccctgggcttggagctggggaaacgaggg

SEQ ID NO: 555120 - DNA, 201 bp, Homo sapiens
gtgggaggaagcgggtttcccatggctgggtgataacccaaacctcggaaagccttccccgggccttatctaagagcctgagccttaactggccaagataraggcttgagggcagtgagcgcgtcctggcccagaccacaggccggttcctctcgcccaggggctcattcagcagacacagctccagctcctcctctgtgt

SEQ ID NO: 555121 - DNA, 201 bp, Homo sapiens
gagtgtgggaggaagcgggtttcccatggctgggtgataacccaaacctcggaaagccttccccgggccttatctaagagcctgagccttaactggccaaratagaggcttgagggcagtgagcgcgtcctggcccagaccacaggccggttcctctcgcccaggggctcattcagcagacacagctccagctcctcctct

SEQ ID NO: 555122 - DNA, 201 bp, Homo sapiens
gtagcgttcttcaggtgtgtggacaaggggagaggaggaggtggaaggtcctgtccagccagctctcatggggcatctttgaaagggcaatttagaagtgagtcttcttatctcatgaccaggcccttgaaggggagcaggacacttctaggggaagagatggcacgtgcagaagcctggagacctgaaatgactgaagac

SEQ ID NO: 555123 - DNA, 201 bp, Homo sapiens
cttcctgggctcaagcgattcttccacctcagcctcctgagtagctagctgggactacaagcgtgtgccaccacacctggctaatttttgaatttttcatrgagacagcgttgcccagcctgttctcgaactcctgggctcaagtaatctttcccacctcagcctcctagagtgctggcacagtgcccagcccttattttg

SEQ ID NO: 555124 - DNA, 201 bp, Homo sapiens
tcctgggctcaagtgatcctcccacctcagcctcctgagtagcttggaccagaggtgcacaccaccatgtttggctaatttttgtatttcttttcttttctttttctttctttctttctttctttttttttttagagggagtcttgctctgtcacctctttttttttttttttttttttttgagatggggtcttgttatgt

SEQ ID NO: 555125 - DNA, 201 bp, Homo sapiens
cctgggctcaagtgatcctcccacctcagcctcctgagtagcttggaccagaggtgcacaccaccatgtttggctaatttttgtatttcttttcttttctttttctttctttctttctttctttttttttttagagggagtcttgctctgtcacctctttttttttttttttttttttttgagatggggtcttgttatgtt

SEQ ID NO: 555126 - DNA, 201 bp, Homo sapiens
ctgggctcaagtgatcctcccacctcagcctcctgagtagcttggaccagaggtgcacaccaccatgtttggctaatttttgtatttcttttcttttctttttctttctttctttctttctttttttttttagagggagtcttgctctgtcacctctttttttttttttttttttttttgagatggggtcttgttatgttg

SEQ ID NO: 555127 - DNA, 201 bp, Homo sapiens
ctacgagacaccaagtgcccccttctgccccacagcccttcacccggcaggaagtcattggcttcgtcatcggctccatctccagcgtgttgtacctgctytcccggctgcctcagatccgcaccaacgtgagcctccagcaggggctgggtggggccgagtagaggagagctggcctggccacccgggccctctgggcta

SEQ ID NO: 555128 - DNA, 201 bp, Homo sapiens
ggctcaagtgatcctcccacctcagcctcctgagtagcttggaccagaggtgcacaccaccatgtttggctaatttttgtatttcttttcttttctttttctttctttctttctttctttttttttttagagggagtcttgctctgtcacctctttttttttttttttttttttttgagatggggtcttgttatgttgccc

SEQ ID NO: 555129 - DNA, 201 bp, Homo sapiens
gagagtctccgtctcttttctttttgagacaaggtctcactctggtcccccaggctggagtgcggtggtgcaatcttggctcactgcagcctctgcctggygtgctcaagagattcccctgcctcagcctcccgagtagctgggaatacaggcatgcgccaccatgcctggctaatttatgtatatatttttggtagagct

SEQ ID NO: 555130 - DNA, 201 bp, Homo sapiens
gagtctccgtctcttttctttttgagacaaggtctcactctggtcccccaggctggagtgcggtggtgcaatcttggctcactgcagcctctgcctggcgkgctcaagagattcccctgcctcagcctcccgagtagctgggaatacaggcatgcgccaccatgcctggctaatttatgtatatatttttggtagagctgg

SEQ ID NO: 555131 - DNA, 201 bp, Homo sapiens
gattataggtatgagccatggtgcccgaccttcaggtatgagtttttgtggggaaatatgtttttatttctcttgagtatatacctaggagtagaatttcygggtcctatgttaactctaagtttagccttttgaggatttgtcagactgtttttcaaagcagctgcatcattttactttcccaccaaaagcatatgaagg

SEQ ID NO: 555132 - DNA, 201 bp, Homo sapiens
agcgccctccctccggtgcagccctgcctggccgggggcccctcctccacagccatggtctggaagaaactgggctcccgcaacttctccagctgccccartggctccatccagtggatatgggatgtgttgggtgaatgtgcccaggacggctgggacgaggccagcgtgggcctgggcttgatctccattctctgcttt

SEQ ID NO: 555133 - DNA, 201 bp, Homo sapiens
atgaaggctccagtttctccaaatcctcctcaacactggtggcctgtctttttttttttttttttttttttgacagtctcgctctgtcgcccaggctggaragcggtggtgcgatctcggctcactgcaagctctgccttccgggttcacgccattctcctgcctcagcctcccgagtagctgggactacaggcacctgcc

SEQ ID NO: 555134 - DNA, 201 bp, Homo sapiens
tggcttcgtcatcggctccatctccagcgtgttgtacctgctttcccggctgcctcagatccgcaccaacgtgagcctccagcaggggctgggtggggccragtagaggagagctggcctggccacccgggccctctgggctaaggagtagcacagcataggagccttggttcagaaagtctggtctactcccgctgttgg

SEQ ID NO: 555135 - DNA, 201 bp, Homo sapiens
ccatctctaccaaaaaaaaaaaaaaaattaaaattaaaaacaaaaaagaagggagttggaggtgttggcctctaggctaaaagccaaggataggacagcaytgggggtgagagccaggggctgagtgtggaagagcagttcaggcagaggaagcagcagatgtacagagaaggggcagctgcgtttatatagtggacagag

SEQ ID NO: 555136 - DNA, 201 bp, Homo sapiens
gtggatggggattcaggacgagctgagcagaggggaccgcatctgcctgcagccctggcccagcctcctggggcctctggtttctttagcctgcttctccrggccctttcctgacaggccccacaccttactgtggggacatagcagggagagtgactccccacggggagcctgcccctcggtgttcaggaagaagcagaa

SEQ ID NO: 555137 - DNA, 201 bp, Homo sapiens
cactctggctcaggctccttgtggatatcagtggtccccacttcatagttgctgggaagatgcaacatgagtgcatgcaggatgcttggctcaccggtccragctgtggtgatgatcactgatggagatggcccagccgagcctcactttccctccctcctctaaggtgtcacgcaggcaatgactgctctactcactgtc

SEQ ID NO: 555138 - DNA, 201 bp, Homo sapiens
ctctctccctctctctctctcgagccacagaagtcttctgcttcgctggtgacagatggacctgaggcgggtggtgtggcaggtggctatgagcaggggtrtaggtctgagtcttgggtttgactctgtagtttcctggctgggtggcgctggcacatcacttccgcactctggctcaggctccttgtggatatcagtggt

SEQ ID NO: 555139 - DNA, 201 bp, Homo sapiens
gcagttgggggggggggcgcctggagtgtgggaggaagcgggtttcccatggctgggtgataacccaaacctcggaaagccttccccgggccttatctaaragcctgagccttaactggccaagatagaggcttgagggcagtgagcgcgtcctggcccagaccacaggccggttcctctcgcccaggggctcattcagca

SEQ ID NO: 555140 - DNA, 201 bp, Homo sapiens
tgacgctgtacttttactacaagttcaggacgcgcccctctctgtgtgagtatggggaccgctctctgtcagatgctctaccagcagcagggggcagttgkgggggggggcgcctggagtgtgggaggaagcgggtttcccatggctgggtgataacccaaacctcggaaagccttccccgggccttatctaagagcctga

SEQ ID NO: 555141 - DNA, 201 bp, Homo sapiens
acctcaggtggtctacctgcctcagcctccaaaagtgctgggattacaggcatgagccaccacacatgtggatatccacttgtcccagcgccaggtgttgraaagactgtccttccccattgatttctctgggcaccctatcagaggcttgatgtttttactgagttaccttgttccaggtgcctgttgggtgtggtgcaa

SEQ ID NO: 555142 - DNA, 201 bp, Homo sapiens
gggctcaggcacagaaaggctgagtctttgcccaaagtctagcatgaatgggtgatgaagcagggatttgaacacacccgtcccttctgcagatccagcaygctgcctgcatgtgtctgtagttggcgtgtgtttgctgtgatctgtgcacctgggagctgattgggtcctggtgggtgaagattatgtctttgcccttct

SEQ ID NO: 555143 - DNA, 201 bp, Homo sapiens
aacacagtgagacccccatctctaccaaaaaaaaaaaaaaaattaaaattaaaaacaaaaaagaagggagttggaggtgttggcctctaggctaaaagccraggataggacagcattgggggtgagagccaggggctgagtgtggaagagcagttcaggcagaggaagcagcagatgtacagagaaggggcagctgcgttt

SEQ ID NO: 555144 - DNA, 201 bp, Homo sapiens
tgggatgcgtcaaacacaacctctgtcctccagactttgacagtctcgtggtggagacagcagcagtgaacacaacattgtgtggccgctgccatgatcarggagtgaggacatgctgcacaggggtcaagagcatcttgacctgggcgtgtcacctcactgctctgagcctcagtttccttgcttgtgtcatggaaatat

SEQ ID NO: 555145 - DNA, 201 bp, Homo sapiens
gccagtggccccccacctcaaaggcgaccagcgcggcctctcgagctggcctggccaggagttgccctgccccggccgaccggccccttggcatctgatgkcttcgtttttcccgggccggccgggcgaggggccctcgcggcgctggccccagcagctgtcctatcattatccctccaaacaggcggcccgcgccgggct

SEQ ID NO: 555146 - DNA, 201 bp, Homo sapiens
ttgctgcatctaccttcccgtgagtagtgtcttggtggcaggaccagggcagggctgtggggttgaggcagtggctccagctactgctcagcgaggggttrtctggtgggccacgggcctctccagactagaggctggggtgtgttccctcgacagggacctgcactgattgctaccgcaggtcagacctagtgctgggca

SEQ ID NO: 555147 - DNA, 201 bp, Homo sapiens
caccgtgttagccaggatggtctcgatttcctgaccttgtgatccgcccgccttggcctcccaaagtgctgggattacaggcgtgagccaccgcacctggsctcacttctttttttttgagacgtagtcttgctctgttgcccaggctggagtgcagcagtgcaatcttggctcactgtaacctctgcctcccgggttcaa

SEQ ID NO: 555148 - DNA, 201 bp, Homo sapiens
acctcagcctcctagagtgctggcacagtgcccagcccttattttgttgttgttttgacacagggtcttgctctgtcatccaggctggagtgcattggtgwgatcatggctctctatagcctgtacctcctgggctcaagtgatcctcccacctcagcctcctgagtagcttggaccagaggtgcacaccaccatgtttgg

SEQ ID NO: 555149 - DNA, 201 bp, Homo sapiens
gtgcaatcttggctcactgtaacctctgcctcccgggttcaagcgattctcctgcctcagcctcctgaggagctgggactacaggcgcctcccaccacacycagctaatttttgtatttttagtagagacagggttacaccatgttggccaggctggtctcaaactcctgatctcaggtgatctgcctgcctcagcctccc

SEQ ID NO: 555150 - DNA, 201 bp, Homo sapiens
aacagtcgctgccatgtgttgtcaggcacagggctgagagctttatgtgcatttagtcagggcagctgccccaaggagtgagtgtcgttagccccattttwtggacaggctcaggcaggttaattcacttccagggctgctcagcctcacctgtcaaatgagcacagtatacccaaccttgctggggagtggtgaggatgg

SEQ ID NO: 555151 - DNA, 201 bp, Homo sapiens
tcccctcacagaatgggggcctttatccaagagcactggaaggctctggcagtttttggtgacactggggttttagttttttatttgttattaaagacaattttttttttttttgagacaaggtctcactgtgtcatccagtctgaagtgcagtggtgcattcataactcactgcagcctcaacctcttgggctcaagtga

SEQ ID NO: 555152 - DNA, 201 bp, Homo sapiens
aagaagtggcgggtacaggagcaaggtgggagagtggagaggagggcagagctgagctccgagtgcttcctggacccgcaaactcagtgttgtccagaccytgttttatttttaaaattttttagcccaggccggagtacagtggtgcgatcatagctcactgcagcctcgaactcctagcttccagggatcctcccactc

SEQ ID NO: 555153 - DNA, 201 bp, Homo sapiens
gacgctgtacttttactacaagttcaggacgcgcccctctctgtgtgagtatggggaccgctctctgtcagatgctctaccagcagcagggggcagttggkggggggggcgcctggagtgtgggaggaagcgggtttcccatggctgggtgataacccaaacctcggaaagccttccccgggccttatctaagagcctgag

SEQ ID NO: 555154 - DNA, 201 bp, Homo sapiens
ggatgaccatgaataggacctggacctcccagtgctgaaagcctcctcccttcctccctgtagaacccttgctggcctcagaacaccagcgccctccctcyggtgcagccctgcctggccgggggcccctcctccacagccatggtctggaagaaactgggctcccgcaacttctccagctgccccagtggctccatccag

SEQ ID NO: 555155 - DNA, 201 bp, Homo sapiens
cgctgtacttttactacaagttcaggacgcgcccctctctgtgtgagtatggggaccgctctctgtcagatgctctaccagcagcagggggcagttggggkggggggcgcctggagtgtgggaggaagcgggtttcccatggctgggtgataacccaaacctcggaaagccttccccgggccttatctaagagcctgagcc

SEQ ID NO: 555156 - DNA, 201 bp, Homo sapiens
gagagctggcctggccacccgggccctctgggctaaggagtagcacagcataggagccttggttcagaaagtctggtctactcccgctgttggcttgggcragttaatccaatctccgagcctccatttctgcttctggaaaatgggcgtggcgtggcctgccagccaggctacaagaggcccatgtgtgtcttgggggag

SEQ ID NO: 555157 - DNA, 201 bp, Homo sapiens
ttttactacaagttcaggacgcgcccctctctgtgtgagtatggggaccgctctctgtcagatgctctaccagcagcagggggcagttgggggggggggcscctggagtgtgggaggaagcgggtttcccatggctgggtgataacccaaacctcggaaagccttccccgggccttatctaagagcctgagccttaactgg

SEQ ID NO: 555158 - DNA, 201 bp, Homo sapiens
tgtggttcctcctgggctggattggcggagactcctgcaacctcatcggctccttccttgctgaccagctgcccctgcaggtgggccggtacccgggcaargtggcgctacccctaaccctgcttcaccctgcagggttgcctgaggagatgccaggctctttggcccgcctggtctccagaaccctgacccgtcattcca

SEQ ID NO: 555159 - DNA, 201 bp, Homo sapiens
acaggaccccgttttcagtgagggctcagaaagtgtttgctgaatggctgtaaagagcgttacctgggtctcatttcggagcaagtaaacatggcctttgttttaatatttgttaagtccctgccgggcgcagggaggggtgaaagtttaggctcttgtgccccaaaacggcccagccacctggaagcctccaggacgcca

SEQ ID NO: 555160 - DNA, 201 bp, Homo sapiens
caggaccccgttttcagtgagggctcagaaagtgtttgctgaatggctgtaaagagcgttacctgggtctcatttcggagcaagtaaacatggcctttgttttaatatttgttaagtccctgccgggcgcagggaggggtgaaagtttaggctcttgtgccccaaaacggcccagccacctggaagcctccaggacgccac

SEQ ID NO: 555161 - DNA, 201 bp, Homo sapiens
gggaactgggagttcttccttgccagataaggaaacagaagctcagagaggagaagtgacttggtccgggtcacccagctgggatatgacagagggctgcyggggcgtggtctcagatcctgggactgcgccaacccctgggccccctgcatctcttacagacctacacggctgtgtattatgtcttggcagacctggtga

SEQ ID NO: 555162 - DNA, 201 bp, Homo sapiens
cgtgttgtacctgctttcccggctgcctcagatccgcaccaacgtgagcctccagcaggggctgggtggggccgagtagaggagagctggcctggccaccygggccctctgggctaaggagtagcacagcataggagccttggttcagaaagtctggtctactcccgctgttggcttgggcaagttaatccaatctccgag

SEQ ID NO: 555163 - DNA, 201 bp, Homo sapiens
gacagtgatggtacggcggccctgcatcagcctgcgggtggcctctggatcctccgtggaccgaaccgtccccccaggaacacaccttcaggtagaccccraagcctcaaggccggggctggagcggagaccccagggcctctcaggagacagtgaggctgcccctcctaccacctacctcattctgcctactcaccccag

SEQ ID NO: 555164 - DNA, 201 bp, Homo sapiens
ggagaatctgagtaaggctgcggctttccctggagagatgcacagccgtagagtcctcggcttagaagggattccccaggggactcctccaaagggccgakaaggcttctgaggatcccgcccgtggggaggatgggccgccaggccacttcctctccatcgccgcctcgatccccatggtcgtctcctctgggcggtgtc

SEQ ID NO: 555165 - DNA, 201 bp, Homo sapiens
gagccttggttcagaaagtctggtctactcccgctgttggcttgggcaagttaatccaatctccgagcctccatttctgcttctggaaaatgggcgtggcrtggcctgccagccaggctacaagaggcccatgtgtgtcttgggggagtgggaggtcaggggaaggtgaggggctgagcttggaggcctgaggggagagga

SEQ ID NO: 555166 - DNA, 201 bp, Homo sapiens
atccctccaaacaggcggcccgcgccgggctgagtcaccaggagggagctgtggccgaggacgccgaggcctggagtgggtggtagccccgagctgggacrctcctccctccacaatctccccaggtctgcagggaccgagggcctacactgcctcctcccacgccgtgcttagggtaggtttccaaacgtgtaaatggag

SEQ ID NO: 555167 - DNA, 201 bp, Homo sapiens
aactgccttggcctcccaaagtgctgggattacaggtgtgaaccactgcgcccggccacacctggactatatgttaatttggagtggcctttcaggggccrgagatggagcatcaggtgaaggcttccaacatcatctgtgctgatggtcccccaggtgggccacgaagacacagggaagaggctttcagcctccctgcct

SEQ ID NO: 555168 - DNA, 201 bp, Homo sapiens
aagaggaagcccactttctggctgtgcagtcatgccagaccacagaggcttctctgtctctctctctccctccctctctccctctctctctctcgagccayagaagtcttctgcttcgctggtgacagatggacctgaggcgggtggtgtggcaggtggctatgagcaggggtgtaggtctgagtcttgggtttgactctg

SEQ ID NO: 555169 - DNA, 201 bp, Homo sapiens
gctgaacctctaggtgtgtttacacctggagaataagaaatgcacaacccagggtggggagagtacgtttcaaagacagtggtcgcagaggacggtggtarcgttcttcaggtgtgtggacaaggggagaggaggaggtggaaggtcctgtccagccagctctcatggggcatctttgaaagggcaatttagaagtgagtc

SEQ ID NO: 555170 - DNA, 201 bp, Homo sapiens
agctgattgggtcctggtgggtgaagattatgtctttgcccttctctggctcagggccaggagccccgtgaaaaggctgggatgagcttagtttgggatgrccatgaataggacctggacctcccagtgctgaaagcctcctcccttcctccctgtagaacccttgctggcctcagaacaccagcgccctccctccggtgc

SEQ ID NO: 555171 - DNA, 201 bp, Homo sapiens
aagggataaagacaagggtttgatcaggggcttgacattgttttaacagctttattgggagagaattcgcatttcatgcaattaacccattcagtgtacartcattggttttagtatagccagagttgtgtaactgtcaccacaactaattttaggacattttcgttagcccaaatggaaacccatgcccatcagcagtca

SEQ ID NO: 555172 - DNA, 201 bp, Homo sapiens
cacaccctgcctggaccccgagtaggtgtcagatgccatgctggtcactaggacactgcagggaaccaggccctggagctagtgataggtagggggtgccyagtgctgcagcaggtaaagcaaggaccaagggagataatggggggtgctccccaaagtcaactttgccctggttaagccttcaaagaggagtggggtagg

SEQ ID NO: 555173 - DNA, 201 bp, Homo sapiens
gaagaggggttattcctaaaggctctcattaggaggggaagcctgactgggatcctggggcccatctgctggctgaattcccatggctggtggtgggtctyaggcctggccgagcaggcaagggggccaatcctgggggcagggaaaggacaagcccacaacagaaggggcttctgggaatagtgcccagtgcaaggtaaa

SEQ ID NO: 555174 - DNA, 201 bp, Homo sapiens
ggaacgggctctcccttggttgctcacagtgtcgtgttttctgtgaacagagctggcagagctgagctcctccaggaagccttgcccacccatcttaccaygggcatacagggctggcttggggctaggagggcccaggaagacagaacactcacccactgtgtcagctcaggcacccaggacctgcttcctggagaccag

SEQ ID NO: 555175 - DNA, 201 bp, Homo sapiens
ttgcccggcagcggtccacagcccgccaccagcggccagtccagggaaccggagaggattggccggcaaaagtcagttgcgctcctgggcccgcttccagkagagtgccggcgccccgtccggccgcgcctgccccgccccggcccgccgcgagcgagagagcgaacgagcctccgcggccatggcccggcgctcgcccta

SEQ ID NO: 555176 - DNA, 201 bp, Homo sapiens
ctgctgccttgccttgtagagcactccttttcctctccaccagagctgttctgtgggcaacccctcaaagcaggggaacagagtccaagagctcatccatwagagtacttactgcatgcctattaggcgctgggtgattaaaatacattttgtctcataatgcccacagctcttctcttgaggtaggtcttcttagccctg

SEQ ID NO: 555177 - DNA, 201 bp, Homo sapiens
tgaaccaagtgtcgcagtgggtcatggctgagcactgatgcaggttgtgagcccctttcttgggcttcctgagacctgagtcttcctcttggagccctgcyctactcactaatctttgagctaatctttggttttattccttttaatgaagcatacctgaagccccacccctttctccccaccctgtactcagtttctctg

SEQ ID NO: 555178 - DNA, 201 bp, Homo sapiens
cagagcctcctggaggcctgggttctggaccccaccacccacttattttagctgccttcttcctgactcagatttagtttctctaacaggaagagttcagrtgcttgtgtcagaacgtgtgttgtgactttgtgattttggcatgttacatgcaggttaagaaagctggaccctgaggaggaagatgattcctttaataac

SEQ ID NO: 555179 - DNA, 201 bp, Homo sapiens
attagaatgctacacatgaagttgactcgttggcctgatggtttttagtgtctcctcggaactgccctgctggtatggtgaatggcagatttggacctgayttcccagggacccactgcctgggtgacctcctacagctgtcatttgcctcgtcccagcgcgacctgttcgaggatggttggctggagtttgtggtccgtg

SEQ ID NO: 555180 - DNA, 201 bp, Homo sapiens
gcctagggaataatggcccaagatcacaagctagcaagtggccaggctaccattcaaggtctgtctgaatccaaggcctgcactctcagccactatgtcgytggaaattcagaggtcacatctaagctctctgttccagcagtgatgtctgctgtggacatgtgatggggagggacagcaagagtgtcagactgtgtcctt

SEQ ID NO: 555181 - DNA, 201 bp, Homo sapiens
ttccctttctgaggcaacacaggggattgaaggatttctccctagagctgtcatgaggcagtaagaggtagtgggatgtgagcctacttgggaacccgaaygcccttggaggtaccagctctgcctaggacctcacctctggctcgtggtcaggctaacccatgctaccagagtgcctgttcccgctacctgttcagcttg

SEQ ID NO: 555182 - DNA, 201 bp, Homo sapiens
ccccacacacaacttttttcctatttggcaagtttgaccaagttgcatctgagagagctgcattgggattgaaatccaaaagcagagcttggtgcctgatyaccatgatgacaggctgcagctgacaagtgctcctggggaccaagaggaacagaccaaggactccctcacacatgggcctctgtgatgggtgtcctatac

SEQ ID NO: 555183 - DNA, 201 bp, Homo sapiens
aggtcacatctaagctctctgttccagcagtgatgtctgctgtggacatgtgatggggagggacagcaagagtgtcagactgtgtccttgctcctccttgyctctccaggaggtggactctcttgtccctcccttgctttcaccatcagagagcagggctgagacctcctggtggtgaagcattctgcccagcccttggtc

SEQ ID NO: 555184 - DNA, 201 bp, Homo sapiens
cgcggtgcttcgctagctataaataggtgctgtgcggggacaggaagatggttccagccctttacaagcaccggcccgttatgtgcgctgggctaggaccytgccccgcagcggagtgggaggagtgaggttaggggtaacggttgcatgggatggggggtgggcacatagagcctacagcagagttggcggcggggctct

SEQ ID NO: 555185 - DNA, 201 bp, Homo sapiens
caccagcccccaggaggctgcctcacagctggcagccagggtgggtttcccggcctggccttgaagggcagggcctggggatgccccatggaatgagatgsggaggaaatgggggtagtgcaggctggacaggggagccaagggagaggcccaggctgaagagtttaatgcgtggcccattgtgtcaggggctgggtagag

SEQ ID NO: 555186 - DNA, 201 bp, Homo sapiens
tcccagagaaacctgggcctgttggtggggtaagaggcctttccgaggaggcaaagtttagccaagatccgaggggtgtgtcggtgtttctcttgaggggytggggagagggagcagccagggtcagaagagtgggagccttggaggctggtatccaccaagggtggtgatgcctacctagtcccactgacagcatgcaca

SEQ ID NO: 555187 - DNA, 201 bp, Homo sapiens
gctcagttgcattaccaaagaggttctttgcagcctgaccccatagttctcccacgtcacctcctgcttttccctcccaggctccttttgttaagactgcsccaagtcccttgcagtttccaggcgtggtaccattgtgtggcatcctgtcttctcaacctggctcccactatgctctaaactctcatgccatcttcccac

SEQ ID NO: 555188 - DNA, 201 bp, Homo sapiens
ggcgtgatcacagctcactgtagcctcaaccttctacctcaactgccctgagtagctgggactacagatgtgtaccaccatgccctggctaatttttaaaktttttgtagagatggagtctctctgtgttgcccaggctggttttgaactcctggcctcaagcaatcctttcacctcggcttcccaaagtgctgggactaa

SEQ ID NO: 555189 - DNA, 201 bp, Homo sapiens
tttttttgtcatgcaaaaatttttaaatttttatgtagttaaatgtatcactcttttactgtttgtgaattttaaatcatatttggcccttctctactacktaatactaagtgttaatacaaaggttaaagaggaattcaccagtatctcctttagtagttgtatggtttcattttttatcatttagatttctaattcatt

SEQ ID NO: 555190 - DNA, 201 bp, Homo sapiens
gtagttaaatgtatcactcttttactgtttgtgaattttaaatcatatttggcccttctctactacgtaatactaagtgttaatacaaaggttaaagaggmattcaccagtatctcctttagtagttgtatggtttcattttttatcatttagatttctaattcatttgcaagtttattcttgtgagttatctttttccaa

SEQ ID NO: 555191 - DNA, 201 bp, Homo sapiens
tttggcccttctctactacgtaatactaagtgttaatacaaaggttaaagaggaattcaccagtatctcctttagtagttgtatggtttcattttttatcrtttagatttctaattcatttgcaagtttattcttgtgagttatctttttccaacagtgaatactgttccagcagtatttaatacaaagttcatcttgact

SEQ ID NO: 555192 - DNA, 201 bp, Homo sapiens
ggagccaggtccaacctcaactccctagattgttggtcactcctctttcccatgaggcctggcatctcttccatttcagccttcttctttccatccattcrtctccatacccttctcctatcctagtgtaataagagtttgctcctgcctttgttttccctgaaataaacatatgccttcccttccaccccgctgcatttt

SEQ ID NO: 555193 - DNA, 201 bp, Homo sapiens
cctctgctctcccatttcttggctggggaaccttgaaaacattatttcacctctctgcccctatttccccacctctaggtatctgcctcattgagtttttrtgagggttgagtaaatccagtgaagcatgtaaaatgattcctggtgtaagtgcttgttaaaggccagctatcgttattacttaatcttcacaaccactct

SEQ ID NO: 555194 - DNA, 201 bp, Homo sapiens
tgatcaaagcccatggccagagcagcctggagctgtggaatcgatgtctgcaggaactgctgctcatcgtggtttgccatgcagccaggaaggaggggacygcctgccttccctgtgggcgccctgagcagcccacacactcactttcaacctacttcttgtttccccagaacctccagtgggcccgcgacgtgttgctag

SEQ ID NO: 555195 - DNA, 201 bp, Homo sapiens
aagtcttttgcccattttttaattggtctttttttattgtgccaaaatttgtataacataaaatttaccattgtaaccattttaagtgaacaattcagtgrcataaagaacattcacaacattgtataactgtgccactatctatttccaaaaaatttttatcataccaaacagaaactttgtgtttattaggcagtaact

SEQ ID NO: 555196 - DNA, 201 bp, Homo sapiens
ttgctttttaaggtaaatataaaagtggctaaaatatctgtacagtggaaagaatcaagataaaataaagaccaatgtgttgaagaaaaataacactagcmttatgtttgaaacctcgtgtgccctcctgaatccttctgtgcttctgttcctcaggaggtaaactcttaccaagagcctgccagggaactggcagctgct

SEQ ID NO: 555197 - DNA, 201 bp, Homo sapiens
gtgaattcttcctttgctgctcagtgcacgtgtggctgtgagtgagttattcagtctcttggtatctctaggtctacaccaatatagtggtaataataaaraagagcatagttgtgaaagttaaatgagttggtatgcataatagtatcaaaaacaaagtctgaaactgagcattcaatatattaatacttacagtcataa

SEQ ID NO: 555198 - DNA, 201 bp, Homo sapiens
aatatttgtacttttgtatatggcctattttacttaacatagtgttttcaaggttcattcatgttatagagcatgtatcacaatttcattcctttttgtgsctgaatactatttcattgtatttgtataccacattttgtttatccatctattggtggacacttggtttgtttctaccttttggctattgtgaataatgct

SEQ ID NO: 555199 - DNA, 201 bp, Homo sapiens
ggggctcttctgcgagaggaacaagaccaatttcttcaacgtgagtactttgccttgttgatttccaaggctgtttgttgccactgcttttcactgaaggygcatgaattgaccccctaggtgggtgttcccagggcctcaagtttgcggcatcctcagagggcaggcagggtggtacagtcgagagtgagccagactccg

SEQ ID NO: 555200 - DNA, 201 bp, Homo sapiens
ggggcttagggtgcccctggagatagggtgggtgtggttagggccaagtgcaacttctgagaagcagaagggcattagaatgctacacatgaagttgactygttggcctgatggtttttagtgtctcctcggaactgccctgctggtatggtgaatggcagatttggacctgacttcccagggacccactgcctgggtgac

SEQ ID NO: 555201 - DNA, 201 bp, Homo sapiens
agggggagcctctcaagggctggtattgaactgggaccagggcatggggacagggatcttgcatgggtgtggggctgctgttgtgtttggctgcatctacytgtgggcctggaacctggtttttttgtgggtgtcgaagcaggaagtcactgaacctagtttgtgcctagaaagctccctgatggctgagtggaggataca

SEQ ID NO: 555202 - DNA, 201 bp, Homo sapiens
catctatttgttgctgggaggcagaggggtgctgtgccttgggtgcagatgccctgaaaaccccatggaagggagcttccctcctgctttcagggagtccktgtctacttgatttgctccaggctcagcaggattcccttgcattctgagaaggtagaggaggagcttgtgaagtattcctgggtttcactcattcttagt

SEQ ID NO: 555203 - DNA, 201 bp, Homo sapiens
gcttagtggcattgagtcctggtcccttatgcttcatcctactaatcacattgtgttttgtatctatggggtacttccctttcaatttggaaagagagtcyagtcttctcccaggctttttgcacagattgcacgaagcattttaatcattaacattgttgaactgggaaatagttaagaggtgcgactatgggaacaaat

SEQ ID NO: 555204 - DNA, 201 bp, Homo sapiens
gttagccaggatggtcttgatctcctgacctcgtaatctgcccgcctcaacctcccaaagtgctgggattataggcatgagccacggcgcccggccagtccttctgctttttgtccttgcctgctcacctccttcagaggctttaggatcctcaatttctgagccttcctggagtttatggtgccagtgggttggtttctt

SEQ ID NO: 555205 - DNA, 201 bp, Homo sapiens
ttagccaggatggtcttgatctcctgacctcgtaatctgcccgcctcaacctcccaaagtgctgggattataggcatgagccacggcgcccggccagtccttctgctttttgtccttgcctgctcacctccttcagaggctttaggatcctcaatttctgagccttcctggagtttatggtgccagtgggttggtttctta

SEQ ID NO: 555206 - DNA, 201 bp, Homo sapiens
tagccaggatggtcttgatctcctgacctcgtaatctgcccgcctcaacctcccaaagtgctgggattataggcatgagccacggcgcccggccagtccttctgctttttgtccttgcctgctcacctccttcagaggctttaggatcctcaatttctgagccttcctggagtttatggtgccagtgggttggtttcttaa

SEQ ID NO: 555207 - DNA, 201 bp, Homo sapiens
cagggtcttgctctgttgcctaggctggagtgcagtggtgcagtcacggctcactgcagcttcaacctcctgggctcgggtagtcctcccacctcagcctycaaagtagctggaaccacagccgtacaccaccacacccggttatagtcccagctactcaggaggctgaggcaggagaatggtgtgaacccgggaggcgga

SEQ ID NO: 555208 - DNA, 201 bp, Homo sapiens
tgagccgagatggcgccaccgcactccagcctaggcgacaaggcgagactcttgtctcaaaaaaaaaaaatttgttttgttttgtagagatgggggtctcsttttgttacgatgttaggatgtggtcttgccatgttgccatgttgcccagactggtctggaactcctgggctcaagtgatcctgatgccttggcatccca

SEQ ID NO: 555209 - DNA, 201 bp, Homo sapiens
tacacaagattgaaggaagtgggatctcagttttggtgtgactgttcaatgcagtgctttatgtattatgtagcttcagtaatttttctggtgatacggattttttttttttttttttttttttttggtaagacagcgtcttgctctgtcacccaggctggagtgcagtggcatgatcttggctcactgcaacctctgcct

SEQ ID NO: 555210 - DNA, 201 bp, Homo sapiens
gttgagttgagccctgaaggaagagcaggggcagaggaagacattggggaggtggagtggggccagggactgagcaagccttaagtcaggcaggagacctggggcatggggattggatatgggaagaggggccagattgcaaaaggcttttattttctgttttgtaaagctgttgctccattttgctccattgttttcatc

SEQ ID NO: 555211 - DNA, 201 bp, Homo sapiens
tcgtttttttccagcccttgttctgtctttgttatggagaggtgcagttgtatgactattccatccttaggaatatggttacagggctcagcttccttatstctaatatgaggatgcacgtttgttctgcacaggaagcactttgttttctgcttgacttgtggtacttctccctgtgtggagggtatgactgaataacag

SEQ ID NO: 555212 - DNA, 201 bp, Homo sapiens
aagtctgctggtctctggtcagaggagctccacgctagtcaagctattgtcgccattttatatacaaggacaccaagggttgtaaaggatcagggagtcargtatctgagacacaactcagccacactctaaaatcttcctattccaaatccagtgtcctttccatttttccttcttacaaccccaggtctaggtaggaca

SEQ ID NO: 555213 - DNA, 201 bp, Homo sapiens
ggttttaatgctatagtttctactttttttcatattgtatagtggtcccagtgtccattttggcatagcttatgataaagttgcagtttctggccaggcayggtggctcactgtaattccatgcctgtaatcccagcactttggaaggccgaggtgggtggatcacctgaggtcaggaattcgagaccagcctggccaaca

SEQ ID NO: 555214 - DNA, 201 bp, Homo sapiens
cctctttgcttcactgtcttccactgcagtgtattccattcttcaaggcttgatgcagtaacttactcctttgccttccttaatcgctttgaattgttctytgctgcctttagatgttgcctgtgtttcttttcgtatcattcaggttttgaaaaaaataataggcttgttacctctgctagcagtgatccctgggggcaa

SEQ ID NO: 555215 - DNA, 201 bp, Homo sapiens
gagttgactggagatgtcgactggaggtttgggaattggtcccaacctgaaattgatttaggaaggtgtatatttcattaggaggaaaggcgtttgttttsaagttttcatgtttgttttcgcccaaacatgcagatgatgtgcattaaggaagcagataagctccatgggtatttactggactgcacagtccttgagttg

SEQ ID NO: 555216 - DNA, 201 bp, Homo sapiens
gtattcctaattatatagcttgtcaagattctttggttactggttacagtgctttggaattagtggtatgggacttgtgacctcctcctctcctgttagtrggaagtgggtgaggacccagagagggaaaattagtttattccatgtttactgagctttggttatggaccagttggtgggcatgttggtcttccctctcag

SEQ ID NO: 555217 - DNA, 201 bp, Homo sapiens
tttaattgaggcaaaacatacatacaataaggtacataaatctgagacctgtcagtttgtatatgtgaaaacatgtcaagatacagaacatgtgcagcgcyccagaaggcaggttactttgggtcccttccactttttacaacctcctaaggcaaccttgatttctcctttttgtcaccaaagatgaactttgcctgttgt

SEQ ID NO: 555218 - DNA, 201 bp, Homo sapiens
atgtcccagttcaaaggtagtcaggcagaaaaattctcttatgcgggggaaggtcagcctttttgttctgttcaggccttcaactgattggatgaggcccycccacattagggagggcgatctgctttactcagtctactgatttaaatgttaatctcatgcaaagacaccctcacagacacacccaaaataatatttggc

SEQ ID NO: 555219 - DNA, 201 bp, Homo sapiens
gttttaggctctccaatatgccataacctcatttacattggacaaagtgcgtttctatggaggaatgcaattttccttcttcatttaccctgaatgtgttrctaatctgccttctgtctttttttcaaggtggatcttatatgggaggatgcactgttcatgtttgagtattttaagcccaagacccttcctgaatttgac

SEQ ID NO: 555220 - DNA, 201 bp, Homo sapiens
taatggggatttgttttaggctctccaatatgccataacctcatttacattggacaaagtgcgtttctatggaggaatgcaattttccttcttcatttacmctgaatgtgttactaatctgccttctgtctttttttcaaggtggatcttatatgggaggatgcactgttcatgtttgagtattttaagcccaagaccctt

SEQ ID NO: 555221 - DNA, 201 bp, Homo sapiens
agagtggtggtttctctggggccctgctgtgacagggaggcagtggctacaggccctcacctcaggccatctcttctgcccaccacaggtgcgagtactcsagaaggaactggctgcatccacctctgaagacacgcacccttacaaggaggagctggagacagccttggagcagtgcttctactgcctgtacagcttccc

SEQ ID NO: 555222 - DNA, 201 bp, Homo sapiens
aaaaactgccagcaagtaaatgcggatagaggaatagtcaaataccttaaactttgaaaagtacatcaaagaaagagagagagattggaaaggaaaaagamagaaaagaaagaaaaaagaaagattctggtggagtggcagtagatgtggctctgtctctgcatgtccctcagcaggagaactgatggaagatagcaagtt

SEQ ID NO: 555223 - DNA, 201 bp, Homo sapiens
tgtatctttttgtccacatttttttatacctaattatgtatctgtatgtcagtaaatagtatatagttacatgagttttaaaattttacatactaaatatcatatagtatgtaacctcttgcagcttgcttttattttagtatactgagatacagttacattgatacaagtacatctagtttattcattttaattgcttta

SEQ ID NO: 555224 - DNA, 201 bp, Homo sapiens
atctttttgtccacatttttttatacctaattatgtatctgtatgtcagtaaatagtatatagttacatgagttttaaaattttacatactaaatatcatatagtatgtaacctcttgcagcttgcttttattttagtatactgagatacagttacattgatacaagtacatctagtttattcattttaattgctttacag

SEQ ID NO: 555225 - DNA, 201 bp, Homo sapiens
tctttttgtccacatttttttatacctaattatgtatctgtatgtcagtaaatagtatatagttacatgagttttaaaattttacatactaaatatcatatagtatgtaacctcttgcagcttgcttttattttagtatactgagatacagttacattgatacaagtacatctagtttattcattttaattgctttacagg

SEQ ID NO: 555226 - DNA, 201 bp, Homo sapiens
tgggagctcactgacgaatctccccatgaggcttaagccataccatggtcagtgacaacttggtccctggtctttggacacccagtctagtgtagacaaattagggacaggctgttagacccagctggtcagccattagttatagtgtagttgagagatagggaggggagaggtgttggccaccagaagtagctatttctt

SEQ ID NO: 555227 - DNA, 201 bp, Homo sapiens
ggtcaggagatcgagaccatcctggctaacaaggtgaaaccccgtctctactaaaaatacaaaaaattagccgggcgcggtggcgggcgcctgtagtcccrgctactcgggaggctgaggcaggagaatggcgtgaacccgggaagcggagcttgcagtgagccgagattgcgccactgcagtccgcagtccggcctgggc

SEQ ID NO: 555228 - DNA, 201 bp, Homo sapiens
ggaatggttggctttaagtctaccaggtctagctatggggatattcatgtcctaggttgctggggtgagtttgcagtaggtatgtgcccgcagcttatggrtgtccccagcagcccactgagtctcccatcagcaggtagccacacactcctcttcctctggcctatagaacactactccaagggctcccagccaattccc

SEQ ID NO: 555229 - DNA, 201 bp, Homo sapiens
ccacccctggctaatttttggtatttctagtagaaacagggtttcaccatgttggtcaggcaggtctcgaactcctgaccttaggtgatctacccgcctcrgcctctcaaagcgttgggagtacaagcatgagtcaccgtgcccagcctgaagcactgttcttttattcctttctcaacacttcctggatgctggctctgt

SEQ ID NO: 555230 - DNA, 201 bp, Homo sapiens
ggctctggggccagtccccctcagtttgcaccccacctctctccagctagtggcatggcctcacaagaggtggaggtagtgtcctctgaagcagcagctcytgagtgggcttgggcatggggctttctggatcctggtttcctacccccacagaacaattaactttccagcagtgggagagggagccaggcgtcaggactt

SEQ ID NO: 555231 - DNA, 201 bp, Homo sapiens
tccctgcccttatagggctgatagagaagtaggggcagacagcagacccatctgcgagtcagtggaaaggctatttaaggtggccatggggctgtgggaayagtattccaggggagcatcagggggaaaggtgaggtggcaccaggtagagagacctccagggaccaaggtgggaacaagtgtggctggagggctgttcac

SEQ ID NO: 555232 - DNA, 201 bp, Homo sapiens
acagcacacaatataacacaccacaccataccacaacaaaacacacaacagtctcctgttgccatccagcaggctccagcccatttggtaatccactgagrtgctgctccccataggccctgcccatggtccaagttcttatagaccatgtccctgttggcagtcccccacaggctctccgcataaaacagattcgtggca

SEQ ID NO: 555233 - DNA, 201 bp, Homo sapiens
ataaaacagattcgtggcagcaggggagttccacaagtgttttaaagacttgaccttcctgaggaggagtttttgaagtgagtcaatggatttcatacatrcctacttgagtctgaaagtgcctcaggccaagatgcttatggggcttctgctgcagtgaggggcaggtggatgccaggtccctggtccagctttggctgc

SEQ ID NO: 555234 - DNA, 201 bp, Homo sapiens
cttggaggtttcagtgagctgagagcacaccactatactccaccctgggttacggagtgacactctgtctccaaaaaaaaaaaaaaaaaatacagtgtccyacatcaccttcttgagtccacctatggctgattagaccaggatggacacctgcctgggctgagcctctcagatctcctttgggaaatactttgaaccaag

SEQ ID NO: 555235 - DNA, 201 bp, Homo sapiens
agtcaagaaaggtgtgagagttaaggggtttcaaattaattttactcaggattctttgttgttgaagaagagatggaagattttttgaatgtcaaagagtktaatgctagtagatttataaaagagggagattgatgtgtctgtgtggtgcatttttttcatccctgccaccgtgtaagattttaatttgcattctttgtg

SEQ ID NO: 555236 - DNA, 201 bp, Homo sapiens
agacttccaggagcttctgatgaagttcttgccgtccaggtactgtgtattttttctgattgtcagaaacaaacccacaaagctccagcatacaccatcartaacatttctcattccattgccaccctcttctctggtctcctcctctgtgttcccataacatctgtgcagatgtctgaagcacaaatctcactggagtag

SEQ ID NO: 555237 - DNA, 201 bp, Homo sapiens
cagaggcgtggtctcccgtgggattggccccagtgccaggaaagcacttgatggcttgatcctgggctccaggccttggccactttcgttctggccttaamaggcaggtgctaggcgagacttggtgcttagtctgctcttctgtgctagcagtgcattaaggacgattggcatgtgtgagggtggcgtctgtccatttga

SEQ ID NO: 555238 - DNA, 201 bp, Homo sapiens
ggtccttgggaggagtgcctgccaggagaggcatccccagtcccgagactgggcccacccacagctttgtgaggagccacggaaggaccaagttcagatgrgcttgatgtatcccccaaactcccacctatctatccgctttccaccttagttgttgggctcccatgaggtcctagaacacaccaggtgctcttctggcct

SEQ ID NO: 555239 - DNA, 201 bp, Homo sapiens
cacctgcccgggcactgggcttggcatgagaaagtgtgacacagtggggaattctcagcatctcagacttccaagcatgataccaatctgtaaagctcttyagcataaccacagagctctggaaggcatttgctctgcctctacctcccccactcaagattgccttggcatcttgactctttgcttatgttttcctgagag

SEQ ID NO: 555240 - DNA, 201 bp, Homo sapiens
tgatgtgcttgttttttaaagaattggatgcctagccattaatagaaatacttttaacacatacgtttagtgtaaacactgatgtatgaaggaggaatctrattttttttgggctggaacatagtctaatttttattctcctcatccaagtctgataaaaacaaacactggccagatttggtggggcaggggctgaggggt

SEQ ID NO: 555241 - DNA, 201 bp, Homo sapiens
cccaccccgcactgtcaggtcattgactgcagcatggctgtgcaggaggaggccaaggagccccacgtctcttcagtgctaccctggatcattctacaccrgatcatctggcaggaggaagacaccttccattctctgtgccaccagcagcagctccaaaacccagcggaggaaggtgcacaggcagtgggtgcagtgggg

SEQ ID NO: 555242 - DNA, 201 bp, Homo sapiens
tgccctgaaggcttaccctgctgtgacacttctgctgtctcccaccccgcactgtcaggtcattgactgcagcatggctgtgcaggaggaggccaaggagscccacgtctcttcagtgctaccctggatcattctacaccggatcatctggcaggaggaagacaccttccattctctgtgccaccagcagcagctccaaaa

SEQ ID NO: 555243 - DNA, 201 bp, Homo sapiens
acttgtttactatgttgttcacatcctctctgatcctcatttatgttttgtctgagggagattctcttagccctaatgagatttatcatcttatgttatarttatttgtttatagtttaactttattctctccactggaatctgaacttctaaaaagcaaggactatacctattttaagaaagtattcagtaaatattcgt

SEQ ID NO: 555244 - DNA, 201 bp, Homo sapiens
accagggagacatggagcaggccctggagaactatgacatctgcacagaaatgctccagagttccaccgccatccaggtggaggcaggggctgaacgaagmgacattgtcatccggctgcccaacctccataatgactctgtggtttccctggaggaggtaagtgagaattttcgtttgtttgtttgtttcctgagatgga

SEQ ID NO: 555245 - DNA, 201 bp, Homo sapiens
cccatacctgccagagttggggggaaggagagaaagtctccaaagcccagggtactgtccttctcagcaagaatcagtcatgcccattgtactttaattckccaccagttggttgtgtaaccttggaggaaccccctccctgcacccagtgagcagatgtgaggtatatgttaggggtgggtacagtggacccaccttcca

SEQ ID NO: 555246 - DNA, 201 bp, Homo sapiens
gaaagatgagctggcattacttgtcagttataagatagtcatggcacttttgccatttccctgggaagttcaagtggctgtgccagtgccgtgctcctccygtccccggggtgcatattcaaggagagatctgactgtgtgtgtgtgtgtgtgtgtgtgtgtgtgtgtgtgtgtgtgtgtgtgtgtgtgtgtgtgtgtgtg

SEQ ID NO: 555247 - DNA, 201 bp, Homo sapiens
tctggcctcctccaggcaggctgtgcagggcgtgccgtgctcctgagtgcctaaggagccacagaccacaggaccccttgcctttatcccttgctccccasccctttccatctgtcccaccctcccgggccagatagctttcttcttctgtagccaaggagcctgcacctcagggtctagcccaaggtcatccaggccact

SEQ ID NO: 555248 - DNA, 201 bp, Homo sapiens
ccagtcagggagccatgtggcagagccctggccgtcctcttggggtgactgggaaccagtgtgatagagcagacctatctatgctcagtctggctgagtgyttactgcgccacagttcaggtttcctcgtctgttcccctacttccacatctgaaaagtgagggtgataaaacccacctgtctttgcatggcacctctcac

SEQ ID NO: 555249 - DNA, 201 bp, Homo sapiens
ccacgagtatttgggcagaaggtcctggtgctgcaattcagatggggctctgctgcgattctatgtaagtgcttccccttgggctgcagactgccagtgcrgggcagggctggggtgggaggtggaatgggaaggggacagattcatgttggcacgctgggcttgcttggccttccctcagtgggcccactgtgtgtcttt

SEQ ID NO: 555250 - DNA, 201 bp, Homo sapiens
cacccccccaccacacccacggggaagacgttttcgaggcctgtgggtgcctggctttgcctgggggctgggctataaacagaaatccaacctagtccttstttcagggagtccagagttcagtggggagacagatgtagaaactcactttctatgggtgcccactgaagggcacaaagagaacagcagcactgtggcggg

SEQ ID NO: 555251 - DNA, 201 bp, Homo sapiens
tctgagcagaagatgcagcatgaggcacagtgtggggcacagacagtgccacatgcacatcagggagggcctcgcagagttgcatgctatacgcagtggtkggtggccagctggccaccactggaccctgttttcctgggccaggtgcagtttggtctttctcacaaagaaagggggactgaattgaggagcgtcttccag

SEQ ID NO: 555252 - DNA, 201 bp, Homo sapiens
acctgagccctggctcctgtccaatcagtggcaggcatccttagattcttataggagcgtgaaccctattgtgaactgcacatgtgagggatctaggttgkgcgctcctcgtgagaatctaatgccagagaatagtttcatcctgaaactatcccctccagcccccacagtctgtggaaaattgtcttccatgaaactggc

SEQ ID NO: 555253 - DNA, 201 bp, Homo sapiens
atggctcactatagcctcaacctcctgagctcaaggatcctcctgcctcagcctcccgagtagctggaactacaggtgccaccacacctgcctaatttttwaatttttttgtagaaatgagatcttgctgtgttgccccaggctagtctcaaactcttggcctcaagcaatcctctcaccttagcctcccaaagtgctggg

SEQ ID NO: 555254 - DNA, 201 bp, Homo sapiens
taatcaaaacagtatggaatattagccttaaaaaggggggaaattcggtcacatcagacagcatgggaaacctagaggacataatgctaagtgaaatagcyagtcacaaaagacaaatactggatgattccactcagatgaggtatgaggagtagcagcctggcagcgctagcccaatcagaccccatttctttggcccgg

SEQ ID NO: 555255 - DNA, 201 bp, Homo sapiens
catcagcaccctaatccctatccctctcaacccactgtcctgggccatccacactgcccagcctttgtgttgctcagcctgtcatccttagagcttgggtsgggggcacgtgccttctgttattttttaatgataatttttgaaaattgtgagagttgtagtttaggaaaaattcaaaccccttttcctttgttctcacac

SEQ ID NO: 555256 - DNA, 201 bp, Homo sapiens
taaggaaggagaatcgcttgaacctgggaggcagaggttgcagtgagccaaggtcgtgccactgccctccagcctgggtaacacagcaagactctgtctcaaaaaaaaaaaaaaaaagctaaactaaaaaaacaaaaaactgtcgcaaggttgtggaagaagacaggctccatgtggcctgagtgtgtcagagacactact

SEQ ID NO: 555257 - DNA, 201 bp, Homo sapiens
agcctccctgaccttctcagactgggtaaaagggaggtcccctttgcagcctacctccatggtcagatgtgctcaactgtggtattagaagtgcaggtgayggaccaggcacggtggctcgcgcctgtaattccaacactttgggaggccaaggcgggcagatcacttgacgtcaggagttcgagaccagcctgggcaacg

SEQ ID NO: 555258 - DNA, 201 bp, Homo sapiens
ggaggcggaggttgtagtgagctgagattgcaccactgcgctccagcctgggcgacagagcaagactccgtgtcaaaaaaaaaaaaaaagtgtgcgtgtgygctttttagcgactttgctttttccatgacaccaagtcttggagaagtttccatgtgagaaggtcaggtcgttttgctctctgcagctgctgcccagtct

SEQ ID NO: 555259 - DNA, 201 bp, Homo sapiens
gatgttgtaggagtcaggcaaagccttggccctggccacaggatgctcaaggctgacagtagagcactgcctgcatgtctccatgcggggccttcataacrtgctacagggcatgtaggagggacagggagctgggctctcccatgcagggtggggtgctgctcagccagaaagggggcaggagaggaaggctaggattag

SEQ ID NO: 555260 - DNA, 201 bp, Homo sapiens
ggaggtacagtcatcatgagctgtctttgtttcttgaaaacatttatgccctgtgctgtcccagccctggagcctgagtgctcactgaaggccttgatgtsgtctggtagggaggaagggcctccccacccaatttctggtaccccatacctgccagagttggggggaaggagagaaagtctccaaagcccagggtactgt

SEQ ID NO: 555261 - DNA, 201 bp, Homo sapiens
ctgtgtgccaggccctgggccagctgtgtggtccaaaagggctcaggtccacaggccagcctgcaagcctggattagtagtcacctttcaaagaggtgctrggaagtaaagtgacttggccatggtcctatcactagtctgtgctggaggaggggtgtgtacttcactatgtatagtgtggaagcccatgcgttgtgactg

SEQ ID NO: 555262 - DNA, 201 bp, Homo sapiens
aaaagggctcaggtccacaggccagcctgcaagcctggattagtagtcacctttcaaagaggtgctaggaagtaaagtgacttggccatggtcctatcacyagtctgtgctggaggaggggtgtgtacttcactatgtatagtgtggaagcccatgcgttgtgactggtagcctcaagtcaggggccccctggttcctaca

SEQ ID NO: 555263 - DNA, 201 bp, Homo sapiens
catacaatggcttgttgaattctcataattcatgagatgtaggtagtgccattgtccctgcctcgcaaattaagaaaacgagacaggcacacagcaagttygcacctgagccaggatttaggtgttctgagccaggacccagactgcctgtggactgatgggatgaggggaagcggagtacaagagggccgaggaggtggg

SEQ ID NO: 555264 - DNA, 201 bp, Homo sapiens
ctttgggaggccgaggcgggtggatcatgaggtcaggagatcgagaccatcctggctaacaaggtgaaaccccgtctctactaaaaatacaaaaaattagycgggcgcggtggcgggcgcctgtagtcccagctactcgggaggctgaggcaggagaatggcgtgaacccgggaagcggagcttgcagtgagccgagattg

SEQ ID NO: 555265 - DNA, 201 bp, Homo sapiens
ttgtgcatctgctccgccccactttgtgcaccagtgggtttgaccgggccaaacacctggagtttatgacttccattcctgagaggccagcccagctgctkcttctgcaggtgtgtgctgccagtgtccctcacacccacttgcaccttctctccttgcttgtttgtgtttattctctggaggttctgcggtagttcttaa

SEQ ID NO: 555266 - DNA, 201 bp, Homo sapiens
ttctgagcagaagatgcagcatgaggcacagtgtggggcacagacagtgccacatgcacatcagggagggcctcgcagagttgcatgctatacgcagtggkgggtggccagctggccaccactggaccctgttttcctgggccaggtgcagtttggtctttctcacaaagaaagggggactgaattgaggagcgtcttcca

SEQ ID NO: 555267 - DNA, 201 bp, Homo sapiens
cctaaatgcatttttgtgtgtaaaatttcagcctcagttttagtttgtaacatgataatttctccctgtctcacatgcttttagtgacatgtcgattcacratgtttcggtgagtgcagctgagacacaggcgattgtagatgaggccttggggctgcgaaaaaagaggcaagcgctgattgtgcgggagaaggagccgga

SEQ ID NO: 555268 - DNA, 201 bp, Homo sapiens
aggaagaaaaatacacattaaaaggtattaacctaaatgcatttttgtgtgtaaaatttcagcctcagttttagtttgtaacatgataatttctccctgtytcacatgcttttagtgacatgtcgattcacgatgtttcggtgagtgcagctgagacacaggcgattgtagatgaggccttggggctgcgaaaaaagaggc

SEQ ID NO: 555269 - DNA, 201 bp, Homo sapiens
cttgaggtcggagccgaatgctgtggaagctcctgctttttgtgaattaaggtttcctgattattgctcagttttgtattgagagtgttttcttattgatytggagtgcttttttttgtatattaaagatagtaatctttttctcaacaaatcttgcaaatatttttttcccaattgtttgcttttaaattgcagagaggt

SEQ ID NO: 555270 - DNA, 201 bp, Homo sapiens
cagcaggtgagggtgctgcaataggcccaacaaagagggaagcaggagctgtaagctcttttgaaggatgtcatatttgtcaacagtcatcttggcagtcstgcttggagttgcatcagaaggaggagagaagacggtctgatgagtgtatcaaaggacaagggtttttcttgcaaaaacttattttcataaatgttgact

SEQ ID NO: 555271 - DNA, 201 bp, Homo sapiens
ctcactgagccttgtcttcctgctgcattccacaccccagcctcctccacttggtgcctcctggagctcaagggaacacaaggtgctctggccccttactyctgttggaggtgggacactgaatgctgaagcaggagcaccaggaacattcagggatgcctggtggtctttctgacttgagagcacaggaggtagaagagc

SEQ ID NO: 555272 - DNA, 201 bp, Homo sapiens
tgctcagagatcatcttagtcttggtgtctctgtggccattcctcctctcagacaggtttctgtgttctcactatcagtttctttcgggtggtctcagaawggtagggtctcagccatcatgtggtccctcacttttcattttactgctgagaactgagctggaaggggcaggatctgctcagggtcccagagagagaatg

SEQ ID NO: 555273 - DNA, 201 bp, Homo sapiens
ttctgtccagacagagtgccctcaggtcaacgaagctctgtctcattcgtactttattcttgtccacacatccatgctgggagctcactgacgaatctccscatgaggcttaagccataccatggtcagtgacaacttggtccctggtctttggacacccagtctagtgtagacaaattagggacaggctgttagacccag

SEQ ID NO: 555274 - DNA, 201 bp, Homo sapiens
gagaccagcctgggcaacgtggtgaaaccccatctctactaaaaatacaaaaattagccaggcatggtggcaggcacctgtagtcccagctactcaggagrctgaagcaggagaatcacttgaatcacttggaggtttcagtgagctgagagcacaccactatactccaccctgggttacggagtgacactctgtctccaa

SEQ ID NO: 555275 - DNA, 201 bp, Homo sapiens
atactttgaaccaagtgtcgcagtgggtcatggctgagcactgatgcaggttgtgagcccctttcttgggcttcctgagacctgagtcttcctcttggagccctgctctactcactaatctttgagctaatctttggttttattccttttaatgaagcatacctgaagccccacccctttctccccaccctgtactcagtt

SEQ ID NO: 555276 - DNA, 201 bp, Homo sapiens
ctccataatccctaagagtttgctatgtccctgtatgtccgaattttttcctattaacatataaacatatagtaacattttcttatgattttgcagcttgycttttcgctggacaaaatttaatggaaggtgtggtgagcttccctgcctgccctagtgccctgtagtttagcagggcgtttgtttatctgcacggaccct

SEQ ID NO: 555277 - DNA, 201 bp, Homo sapiens
tgaggcaggagaattgcttgaacccaggaggtggaggttgcagtgagccgagatggtgccattgcactccagccggggagacagagtgagactccctcttaaaaaaaaaaagagtgtgaccaatattgggcttttagtgaacttcagccctgatattgcgtgtcaggtggagacttactccttgagcagggcagggccaat

SEQ ID NO: 555278 - DNA, 201 bp, Homo sapiens
atggctatgtgtgggagggacagccagcataccaggaagggtgctgggtgggagaaaggggagagaggccagtggtctctgcctccataggatggcctcartgctcagatgtggtcttgctcttattgtcttctagaacagctggatgtggcaggataccccattgatgggggaggaactgctgcttgggcaggcgctgag

SEQ ID NO: 555279 - DNA, 201 bp, Homo sapiens
gggagcaaggtgtcctaagacagggtaggcaggagtcctggagtttattaagcagggaggaagcaaggcagcaacactcctgagtagggaagatggggttrgtgcaaggtccaggccagggctggggaggggggggcggggtccaagatatggcagggagtagggagttggggaggcccctcctgggaggaccccaagcta

SEQ ID NO: 555280 - DNA, 201 bp, Homo sapiens
cacagaggagtggcagggacaaggccacaggttacccaggcccctgccctgacaggaccacagcaaaagccaggccacctgcattcacagttagaattttwaaaaaaataattaaataaataaaatgtaagcagcctttagaccatcgttcctggtataaattattttctggctatccggagacagttttcatctccagat

SEQ ID NO: 555281 - DNA, 201 bp, Homo sapiens
agtccacaggggcccgtcctgaaccatgtggaattgaggaacagggcattttagcaaaaccaatgtcagaagagacagggtcatcggtggtagcaaactgcccccccccccgcccccatgcactgaggtacctacctgcaggcgtgtgactctcccacactcgagggggtggggatgggggtgctgtcagcctcatgtggg

SEQ ID NO: 555282 - DNA, 201 bp, Homo sapiens
gtgcatgtcattagggttgccctctgtggcaggagcctcagtaggtgtggctgggacttgtagacagcaggaggggctctgaagaccatagcacctggtckaagtccagcataatcctctgatcttccctgtttgcctgctcccagtgtggacactgccctgtcctcagaatttagtcctgctgtgacttcctggtcttgg

SEQ ID NO: 555283 - DNA, 201 bp, Homo sapiens
tccctgtttgcctgctcccagtgtggacactgccctgtcctcagaatttagtcctgctgtgacttcctggtcttggccccttttaccttagtttctccatytccaaaggtgggccagttggatgatatcagtggttttccagtcctttttccaaaagaagcctttctgtcatgcccaaatggaaaacagatgaaagggcag

SEQ ID NO: 555284 - DNA, 201 bp, Homo sapiens
gacactgccctgtcctcagaatttagtcctgctgtgacttcctggtcttggccccttttaccttagtttctccatttccaaaggtgggccagttggatgakatcagtggttttccagtcctttttccaaaagaagcctttctgtcatgcccaaatggaaaacagatgaaagggcagctgttccagcagaggcaggaagggc

SEQ ID NO: 555285 - DNA, 201 bp, Homo sapiens
attcattatcatcattattttgttgcttactgttccagcattggctatttagttaggatctccttcaggttagcttctgtggcctatcaactggccctcatttttttttttttccttcaagcacttactttatggcacaccacaaggtgttccaggctcatcttgtgttttctctgacccaactctggaatcagttctttt

SEQ ID NO: 555286 - DNA, 201 bp, Homo sapiens
tgagtgtactactgtgtgagtctcagggcgctgcaggtacaggaaagaggtggctgccagtcctcagcaagtgtgcttgggagctctcctggaggcctgcrctgaccttgcagttggccagattgtcagacagactcagtagaaggcattccaggagggaaaaccaagagaggcagtttgcagcgtgagggtccctcatgg

SEQ ID NO: 555287 - DNA, 201 bp, Homo sapiens
ttttccttcaagcacttactttatggcacaccacaaggtgttccaggctcatcttgtgttttctctgacccaactctggaatcagttctttttgtctttascctatccagtcaagataccattttctacagttacttaggttagttcctttcttcctcatgcctttcagagtggttatgttagttgtaatagttaggttca

SEQ ID NO: 555288 - DNA, 201 bp, Homo sapiens
tctgcccaatctgttccccagattccctgcaacccctctctctccacaaaggtcctcacccagatatggtacccactgccacacgcaccccctttgcatgyactgcctacccacctcttgccctcctcattctcctgtctgtcctaggcccctgccatcctcaccttcctccagtggcccatccttcctccactcagtcct

SEQ ID NO: 555289 - DNA, 201 bp, Homo sapiens
ggcaggtggatcatttgagattaggagtttgagaccagcctggctaacatggtgagaccccatctctactaaaaatataaaaattagctgggcgtggtggygtgtgcctgtaatcccagcaacttgggcggctgaggcaggagaattgcttgaacccacgagacagaggttgcagtgagccaagattgcaccactgcactc

SEQ ID NO: 555290 - DNA, 201 bp, Homo sapiens
cgcctgctgagttattattgaataaattttatcattgattttggggttttccaggtagtatatcatattatctacaattagtgatagcttttctttaccctttttttttttttttttttttttgagacggagtttcgcccttgttgcccaggctggagtgcaatggtgcaatcttagctcaccacaacctctgcttcctgg

SEQ ID NO: 555291 - DNA, 201 bp, Homo sapiens
taaggtcatgagctgtgcaaggtgtgagtgtcgctttggtcctcgtgtctgctacagccctgtggacagccgggaagagtggcccaactagctctggagcyagtcgggccttggggacaggtcccagccatagtggccttattgctgtgtgactgcaccagtgtccagtgtttctgaacctgtccctatgtgtgtctgtca

SEQ ID NO: 555292 - DNA, 201 bp, Homo sapiens
tgttagtaaattctagttttaagcattatgattggcaagtgttgtttttagtatctttacttgatggaaggtgttttctttgtgacatgagcagtttttgtgtgtgtgtgtgtgtgtgaatgtgctgtgagcactggagaagaatatatcatttctgttatcaaggtgtggagtttgatatacatctatatcatctcctct

SEQ ID NO: 555293 - DNA, 201 bp, Homo sapiens
gcggcggggctctcccatgcacttggttgtttgtcgtttctgcttttcccgggagggggaagggaggaacagcccggcagttctggggaccttagcgctcmacgtcttatttggcaggagaggctggaaacgagcgggcgccagctgcaggcaaattgcaggctttcccagcccttgtctgcagagagaatcattacctgt

SEQ ID NO: 555294 - DNA, 201 bp, Homo sapiens
gttagtaaattctagttttaagcattatgattggcaagtgttgtttttagtatctttacttgatggaaggtgttttctttgtgacatgagcagtttttgtgtgtgtgtgtgtgtgtgaatgtgctgtgagcactggagaagaatatatcatttctgttatcaaggtgtggagtttgatatacatctatatcatctcctctg

SEQ ID NO: 555295 - DNA, 201 bp, Homo sapiens
accctcagctcctcagggcatcaggaagatagggagctgctggtctggaaactcagtcctgcctctaaaggcttcgggactcctgagtagggaggctccakaaggggcaatctgggccagggctcggaggggtgctgcccagccggcctggctctgtctgtgatgctcatcttccttagggacaagccgggtagagtgcaa

SEQ ID NO: 555296 - DNA, 201 bp, Homo sapiens
ctcctcacatcccagatggggcggcggggcagaggcgctccccacatctcagacgatgggcggccgggcagagacgctccttacttcctagatgggatggygtccgggcagagacgctcctcactttccagactgggcagccaggcagaggggctcctcacatcccagacgatggcggccaggcagagacgctcctcactt

SEQ ID NO: 555297 - DNA, 201 bp, Homo sapiens
tggcagggggcaggagaaaagtcagtgtgggtgtgacatggggaatcccagctaagtctgctggtctctggtcagaggagctccacgctagtcaagctatygtcgccattttatatacaaggacaccaagggttgtaaaggatcagggagtcaagtatctgagacacaactcagccacactctaaaatcttcctattccaa

SEQ ID NO: 555298 - DNA, 201 bp, Homo sapiens
tgggccaggcatggtggctcacacctataatcccactgctttgggaggattgcttgagtccaggagtttgagatatagagctggggatctcagagactagygggcaacatgatgagacccccccatctctacaaaaaataaaagattaacaaggcctggtggcacgcacctgtagtctcagaaacttgggaggccgaggtg

SEQ ID NO: 555299 - DNA, 201 bp, Homo sapiens
tttttgaatatggatgttcagttgttccggaaccatttgttgcaaagaagattctttctccattgaattgcctttgcaccatagtcagtaataaattggcyattttcatttgggttcttatggactctgtattttgtttcattgatttatgtgtctgttcatttactaacactacgctgccttgattattacagctttatt

SEQ ID NO: 555300 - DNA, 201 bp, Homo sapiens
caaccattgtagctatgtaactttgagtcagctggtaaatatgtatatcttgtgttaaaaatgacatttctggccgggcgcggtggctcacgcctgtaatyccagcactttgggaggccgaggcgggtggatcatgaggtcaggagatcgagaccatcctggctaacaaggtgaaaccccgtctctactaaaaatacaaaa

SEQ ID NO: 555301 - DNA, 201 bp, Homo sapiens
aggtcctggtcaactttatgaaggaggctgcagaaggaccctttgccaggggcgaggagaagaacacacccaaagcttcagaaaagtgagtagcacccttyaggcgacccctagcagcttaccccatctgcatcccagatggctcgtttactgcaatgtgttgttcagagggttgctacacagtaaacagtaaactagaac

SEQ ID NO: 555302 - DNA, 201 bp, Homo sapiens
agaaagagagcaagagagagaacaacagagagagaagctttgtcctctgctgtgctgctggcagctctggctggttgtgctccccatctgcctaacttctsccttccgtcaatctcttggaatttgcccacagggctgaaatccctaatgttgaagcttcctgaccaggaaaacgaggtgacccgaggagcacattgtgac

SEQ ID NO: 555303 - DNA, 201 bp, Homo sapiens
caccttcatgtctgctcgccctgtgatttggagagtgtgtttgatgcgcttggcttctgctgatggcctatcctcccagttctggccagaggcagatgcgrtgggggcctcttctccactgcccccctgcctgcacctccagcaggtggcccagtcctatatttccattgctttgctctttcttgctttaaaataaacaac

SEQ ID NO: 555304 - DNA, 201 bp, Homo sapiens
cttggcttctgctgatggcctatcctcccagttctggccagaggcagatgcgatgggggcctcttctccactgcccccctgcctgcacctccagcaggtgkcccagtcctatatttccattgctttgctctttcttgctttaaaataaacaacaaaggcaacagactctaacataccaaattatctttacaaggacaaagg

SEQ ID NO: 555305 - DNA, 201 bp, Homo sapiens
ccacccaagtttacggttcttagaaacctgttgtttcctggtcggcaggacatttgtggtcttttctggggcactagtcagagctgttgcagtagcacaascatacatcttcttcctcaggctttcactgccccaggctgatggaacaaatggccgtgagctgtttctggtcttactgctggagcaaatggaggaaacaca

SEQ ID NO: 555306 - DNA, 201 bp, Homo sapiens
ggcaattcctttaggcccagagcccaaaagagcctgtgagccggtgagctcgtggggcagcttgccagtcggtgaaatcatcctagcaaggcttgcttccyggagcttgccgcaggatgtgctgctgagctgtgcagtgacttcagctagtctcaggctggctgaggagacccagccctagcttgtctttcagggagactt

SEQ ID NO: 555307 - DNA, 201 bp, Homo sapiens
tttgtttgcccatcgccaggcactgtgcccttctcagaggtgcttctgtgatcagccaagctgttatctttttctgggtctgtgtgtacaaaaacagatgygtcgtgcggctttttaaaaagtgcgtgtgtggctgggtgcagtggctcacgcctgtaatcccagcactttggtaggcagaggtgggtggaccacctgagg

SEQ ID NO: 555308 - DNA, 201 bp, Homo sapiens
acagactggtaccagtccgtggcctgttaggaactgggctgcacagcaggaggtgagcagcaggcaggcgagcactaccacctgagccctggctcctgtcyaatcagtggcaggcatccttagattcttataggagcgtgaaccctattgtgaactgcacatgtgagggatctaggttgtgcgctcctcgtgagaatctaa

SEQ ID NO: 555309 - DNA, 201 bp, Homo sapiens
tttagtcccttagcgagctctggaattcaatttctgtatttaaaattctgacattgaatctttaagtttagcatgacttagcagtagcattccatttctaytccccaccccctacctccacccctgtctgcctactctgagggagctctggcctggatcagactgacctgacctgggtccaatcctggcactcctaatgct

SEQ ID NO: 555310 - DNA, 201 bp, Homo sapiens
tgacctgacctgggtccaatcctggcactcctaatgctgtgaattggatgactctggggacattaggagccactccctagcaacggggagagcaacatctstctcatagggttgtcatgataatgacaaaacatgtagggctagcacagaggcagcacatagcacccactcaggaagggctggctctgatccgtattatta

SEQ ID NO: 555311 - DNA, 201 bp, Homo sapiens
caaagagcatgataggcttagttcagctgtagtcttggctccctgcaggctggctgccctggaacaagtctctcccccagcaaggtgtaagtgaaatcatrtgttaaaggagctgggcaggcagcctgtgaagacggttggccccaggagatgaagtttgccctacacgccccacgccatcccctccttttcctccaagct

SEQ ID NO: 555312 - DNA, 201 bp, Homo sapiens
ttagggccaagtgcaacttctgagaagcagaagggcattagaatgctacacatgaagttgactcgttggcctgatggtttttagtgtctcctcggaactgycctgctggtatggtgaatggcagatttggacctgacttcccagggacccactgcctgggtgacctcctacagctgtcatttgcctcgtcccagcgcgacc

SEQ ID NO: 555313 - DNA, 201 bp, Homo sapiens
tatgacaccctgaggcacccatggtgctggtggaagacactggccacctgccagccaccccgtccacaggcaggcattccagtggcagcctgcccctgcartgggcctttgcaagtcttaagaggcaccttttcaaaaccgaggtgaactggcatcactgcattctccatgcttccatttctacatctgtaaaacagggag

SEQ ID NO: 555314 - DNA, 201 bp, Homo sapiens
gcctttgcaagtcttaagaggcaccttttcaaaaccgaggtgaactggcatcactgcattctccatgcttccatttctacatctgtaaaacagggaggctrccaatttcttgttcctctgagtgttaagcaggggtgtaggaagagacttgaggtgggcgagtctggcccctgggtcctgtcccactttgcatcactaggc

SEQ ID NO: 555315 - DNA, 201 bp, Homo sapiens
actgttgcttatagcagtcttgtgaggcaggctgggcagccacgattgtcaattttgtaggcaggaaaaccaaggacattggtagagatccagatgtccaycatttggttcagcccaggacttgaagcttctgaaggccctgtgcacgttggctttgccctttctgaggctatgtgcccagtctctaccagtctcacgtgc

SEQ ID NO: 555316 - DNA, 201 bp, Homo sapiens
tccactctgtgacaagctcgtgccttgggtctgagtactgttctgactggcctgctcctcttgcttacccttctttcttgccttggaatttccaggggcayttgatttcctgaagagcctttgcctgtgccctagaagtggaggaagctctagaaggagtcatgactgaaaggtggggtccgccaaggtgacagatagagc

SEQ ID NO: 555317 - DNA, 201 bp, Homo sapiens
atgtaaccactccaatggacatttagagtgtttctaatgtttctgctcaactatgttgcagcacatatccttgtacatgtgtgagcatgcagtaaatgcaratgtgtttctgtctgcccatttgtcaggtcttaagtttgtcaggctgtcacacagaaggcatagactttgcatggagagatgcaagggtgcttctgaaga

SEQ ID NO: 555318 - DNA, 201 bp, Homo sapiens
tgagcccagaagtttgaggatgcagtgagctatgatcacaccactgcactcttgcctgggcagtagagtgagacccagtctcaaaaaagaaaaattttttwaaaaaattctaagttaaataacttggtccctgtaactttttatatgccattatcactctagatcttggaaacgtgcgactccaggaaagatgagctggca

SEQ ID NO: 555319 - DNA, 201 bp, Homo sapiens
gaaccctcagctcagggagcctcagaacagccttgggctgtgccactaaaaatggcccaagcagtgacccagcagccagcagtggggtttacaatgagaaycagaacagtgtttgaatttgtggcatcaggctgtcgagccccgggttggccctggctgagtgaaaggctgtgtctggcagaaaagagagcccctgcccct

SEQ ID NO: 555320 - DNA, 201 bp, Homo sapiens
gtatgcgtgtatgtatgtgtgtgtgtgtgtgtgcccgtgtgtaattacgccctaccactcaatgctgtgtgcttgctctgtgctgggctctgggcaggtgyctgcagggtagtagcatgtctccatcttcataactgccctgcaggctcggtcatgcccttgtttccccaagaggaacctgagctgagggcaggtaggcac

SEQ ID NO: 555321 - DNA, 201 bp, Homo sapiens
cagtcaaatagacacatacaattaatcataacagggactgaactgatacatacacctgtgagagccctgatagatttgacagtcatttaaaacaaaaaatkaaagcagcatgttaaattgactctcagtggcattttatgtatttgatatgagtagggagggatgctgctgggttaaggcctgcggactgcctcttgttct

SEQ ID NO: 555322 - DNA, 201 bp, Homo sapiens
acacaccccaggaagcctctccactgctctggcccagctgtgaggaccactggctgggagcctggaccagctcttcattctccttgggggcctctctgtcycagtgtctagaacctaaacaacacttcccacccccaggcaccctagggcagacacagcctgtccccactgatcctggttccacgttgagactctggacta

SEQ ID NO: 555323 - DNA, 201 bp, Homo sapiens
tcaacctggaaggaagtgagagcccgtcacagaaaccttatcacaaccagcgcggggagtctggaccgctgctcccaccgctgcgctgggcctctgggtayatcttagggcatttccttcaagacttctgtggctgtcatctaaagatggctgcagtgaccagagatccccttgtcattttgccttctttttttaaacatt

SEQ ID NO: 555324 - DNA, 201 bp, Homo sapiens
gagtctggggtgttggggggcacccgagccacagggcatgccccctacctaggctggtctgtgctacatacacagacagggctgggggaggctaaccacartggcctgcgccccctgacttccagcatctccctgttaaggtggatgaggaggctgcgctggagcaggctgtgaagttctgccaggtccatcttggggctg

SEQ ID NO: 555325 - DNA, 201 bp, Homo sapiens
accagccagaccccttggggactcctcctggcctgggcctcccacagaccacttgggatggcaggacctggcgccagcccctgggggccaggcatgggctytgtgtaaaccccattccttttaaagccatggggctgcagaggaatgtggagacgagccaggccagccgggtcctcccagctcgtgcagctccctagaggc

SEQ ID NO: 555326 - DNA, 201 bp, Homo sapiens
ggcctgcgccccctgacttccagcatctccctgttaaggtggatgaggaggctgcgctggagcaggctgtgaagttctgccaggtccatcttggggctgcygcccagagacaggtaagcccaatttagcctgtgccagcctcatcttgcggagcctgctccatatcaaggccctaggatgcaggctgagaagcagatccac

SEQ ID NO: 555327 - DNA, 201 bp, Homo sapiens
gcaaactgcccccccccccgcccccatgcactgaggtacctacctgcaggcgtgtgactctcccacactcgagggggtggggatgggggtgctgtcagccycatgtgggccagctcccacagtacagtcagcctggtgctggggagggttgaagggtggacccactcctctgctcagctgtgagaggctgcctcagggctg

SEQ ID NO: 555328 - DNA, 201 bp, Homo sapiens
ctgcctttgggaagtttacaaggctattaagagggacagacccagaggcagggtgatttccactgaagaggtgagggcatgtagaggggacatttagaaakaaccatctcttgctgtgccaaatcagtgtaagatttttagttttaaaaagatgttttatttgtatatcttaggaaaaattcttgcaggtactcgatattt

SEQ ID NO: 555329 - DNA, 201 bp, Homo sapiens
cctgtgggcctttctataaacagctgagtgtccccggatcatggtgactggttctccccagagccattgaccccaccgagagaacacagaggaagccatgrtgtcttttataacctaatctcagcagcaactgagatctctgtaggccacacacacctccctggggtgtgggaaggcctggtggatgccagggccaggggt

SEQ ID NO: 555330 - DNA, 201 bp, Homo sapiens
attcagagaaggtctggaatttgccctgtcagtgtacacccttaaccattaccccacgctacctctccgggtgggatggatggatggatggggaaaaacgytggtgataaactgcctccctgagggacccaggccttgtcccaggaagtctcagagcaagccctggatgggagctcacacataggtgtggcagtggggcca

SEQ ID NO: 555331 - DNA, 201 bp, Homo sapiens
ggcacagaatggaggacttactatgtggatttacttgtatctggtcctcatcaagagatgaggccaccaccccactctctaaccaggcagtcactatgcartcgccagccagtgttgacattctgtaactgacataaacacactgtaggaagtttggaatgggaaggaaaaaggtaacttacactcttaacactataatac

SEQ ID NO: 555332 - DNA, 201 bp, Homo sapiens
ctgaggcccgctcctgagcgagcacagggacactgcactcaccttcctccagcgtgtctgctcacgctgccagctaggctgctacaacaccactggtattsccgcaggcccgcagggcccgagagacaggtctgtcctcctgccccgcactcccacaggatgggctgcccacaggacaaggctaggccccagagcaccggc

SEQ ID NO: 555333 - DNA, 201 bp, Homo sapiens
ggctctagtgacctgtgaggcctgttcagcagtgggagtggatgctgtgtgtaaggcagctcgccccatctctccggggccccttaggccacccagacccytaggcaactgattgttgttgttgttgttgtttctgagacagggtcttgtccttgttacccatgctggaatgcagtgatgcaatcatggctcactatagcc

SEQ ID NO: 555334 - DNA, 201 bp, Homo sapiens
gctgaggggaacatagggagtgaatgctcagattctttcctcaacgagaatagtgatggtgggcaacctggccacacacctgatgtctgcagataggcttygacttagcatgcggagaactgggggccttggttgttgctgactcggccctgccccagcaggccccagctatctccaggctgctactacagtagggagagg

SEQ ID NO: 555335 - DNA, 201 bp, Homo sapiens
tgtttcatggagcgggagacctcggttggggcagagccagcactgggccctgtgcctcctgctgctgggtccagcatccactcagcaagggcattgatccmgccgtgctgatcacttcaccaaggcgcctccgttactggtggtagaccactgcatggacagggcctaaaaccagggtgactttctttcccttcttctcaa

SEQ ID NO: 555336 - DNA, 201 bp, Homo sapiens
aaaatacaaaaattatccaggcgtgatggtgcacacctgtaatcccagttaatcaggaggttgaggcaggagaatcgcttgaactggggaggcggaggttkcagtgagccgagatcacgtcatttcactccagcctgggcgaaagaccaaaactccctctaaaaaaaaacaaaaacaaaaaaccaaaatgctccaatgagc

SEQ ID NO: 555337 - DNA, 201 bp, Homo sapiens
aattatccaggcgtgatggtgcacacctgtaatcccagttaatcaggaggttgaggcaggagaatcgcttgaactggggaggcggaggttgcagtgagccragatcacgtcatttcactccagcctgggcgaaagaccaaaactccctctaaaaaaaaacaaaaacaaaaaaccaaaatgctccaatgagcatttcgttta

SEQ ID NO: 555338 - DNA, 201 bp, Homo sapiens
attccaaaggcagttccaggtatttctgaccccacacctgttggtctcacctcagagagtggcagctgcacatgtcaaggttgggaggagccgctgccagrcctgggctgtggcgaggttagagcccaatgggtcaccgggcagcaggtgcttcctgtaggtgtaacaagcgtcccaccagatctgtgaattcacagacag

SEQ ID NO: 555339 - DNA, 201 bp, Homo sapiens
agccttggagcctgccagccagcacaaactacacagcataaaggcccaggacctggggggagcgggtgggggcgagataaagtgctcactgtgtgatgcgrcaggcaggaagtgctcttggtacctttgtcttccagaggggaaactgaggcctgagccgagaagggatggggaggctcaggaggctgcgagtgagactca

SEQ ID NO: 555340 - DNA, 201 bp, Homo sapiens
cttcagtgtcagcatctcccatggctccttactcctctgccaggccctctgagggctccctgcctggggcatagtggccaagggctaggtctgtcctgagrgacctttgttgcctgcctgaggctgccctccctcccaaggttggcactgctgcacacaggctgcccctggaccccccaaggcagtccacctgttgccctg

SEQ ID NO: 555341 - DNA, 201 bp, Homo sapiens
agacccagccctagcttgtctttcagggagacttcaactgcggggcatggcctgctgtctttcagagactctgaggcctcacgagcattgtctaagccatyggtgttctcactgtcagggccagagtgaatgctgcagggctgtcacttgtgtgcagggcactagccacgcctttgtgggatcccatgtatgtgtcaggga

SEQ ID NO: 555342 - DNA, 201 bp, Homo sapiens
agagcccacgggcagggcccactgagcccatggacacgagtgaggccactgtttgccactcagacttggagcggacaccacccctgctgccaggtcgcccmgcaagggaccggggccccgagagccggcccactgagctgtccctggaggagctgagcatcagtgcccggcagcagcccaccccgctcaccccagcccagc

SEQ ID NO: 555343 - DNA, 201 bp, Homo sapiens
catcagctcaggctttggactcccacatcagcaccctgtaggcaccctcgcaccccagtggcctcctggtaaaggctgctggctttctctaatgaaacacrggccccattttcctggcaattaggatttataaattggggggggttttgatctgtgttcagataccacaccacattccaaaggcagttccaggtatttctg

SEQ ID NO: 555344 - DNA, 201 bp, Homo sapiens
gggctcatgtcacatgagggcccatgtgggagcacttggctcacatatagcagcggcaaccctggagagggagttggggcaggcagtgggctgagcactgmgcaggggagcaggtatgatacttcgtgaaccctggctgtgttttatgcgatgctggtggtggcaacacctgccctttgtgggctgcttccccatacccca

SEQ ID NO: 555345 - DNA, 201 bp, Homo sapiens
caccagcaggcaacgccggacggtacagtccctgttctccctactgccagcccagggcggcacatcaatcacgggggggtgctcggacgactcattttgtygcttcgttttggtgagggggggtgctgggtctggggtgacacgggcaatgttgcggctgctcattaacctcatggattcacagtgattcttgtgcttccg

SEQ ID NO: 555346 - DNA, 201 bp, Homo sapiens
aaccatcttcacagcctctgcttcatgggggttgggtgctgacagcctcctccagctctttttggaaagcggatgatgtagcgatccttaacagctgtgcyccaggcttaagtgcttccaggggcttcccagccagacctcttctgctggcgtttagatttggggaggtaatgtggcctgggcaggacgtaaataataggg

SEQ ID NO: 555347 - DNA, 201 bp, Homo sapiens
ttaccaccacaggtttgattcctgggcaggcatggctctggcccgggccagccgcattcaggacaagctgaactccaatgagctgaagagtgatgggcccrtttggaagcatgccacgcccgtcttgaactgcttccgtcgggccctggagattgacagctccaacttgtccctatggattgagtatggcaccatgtccta

SEQ ID NO: 555348 - DNA, 201 bp, Homo sapiens
tgaagtcaagaaaggtgtgagagttaaggggtttcaaattaattttactcaggattctttgttgttgaagaagagatggaagattttttgaatgtcaaagrgtttaatgctagtagatttataaaagagggagattgatgtgtctgtgtggtgcatttttttcatccctgccaccgtgtaagattttaatttgcattcttt

SEQ ID NO: 555349 - DNA, 201 bp, Homo sapiens
ccggcttccctggctgttggtgccacactggagcctggcttgctcactgctcagcctccacttggcagtggaccttacctctgtatcccaggccttctgcwcccaggtggacctgggtcttaataaaccccaaccagcatgtcctcactgctgaagccgtctttgggcctgaggggcaatggctgatatgaactctgttgg

SEQ ID NO: 555350 - DNA, 201 bp, Homo sapiens
acatgctgtcagggcactggagccttcacacctgtcccaggagggctggctgggggtgggagcaaaagtagccctgtgaaaagaaccccaaaagggcctcrtggcagagggaattgtgtggatgaagactcggaggcccctagggcccggctcacctggaaatcgaaggcccatggtgggagcagttgccaaggccaggct

SEQ ID NO: 555351 - DNA, 201 bp, Homo sapiens
ctgtcccaggagggctggctgggggtgggagcaaaagtagccctgtgaaaagaaccccaaaagggcctcatggcagagggaattgtgtggatgaagactcrgaggcccctagggcccggctcacctggaaatcgaaggcccatggtgggagcagttgccaaggccaggctgcagggagaggccaagctgggggcagcactg

SEQ ID NO: 555352 - DNA, 201 bp, Homo sapiens
agaccatcctggccaacatggtgaaaccccatctctactaaaaatacaaaaattagctgggtgtggtggtgggtacctgtaatcccacctactcgggaggytgaagcaggagaatcgcttgaacccaggaggcagaggttgcaatgagctgacatcacgccactgcactccagcctgggcgacagagctagactccatcta

SEQ ID NO: 555353 - DNA, 201 bp, Homo sapiens
tttggaatgctgcttggcgttaagcagagacttggtatgggttttttttttttttttaatttttattttttatttttagtggagacagggtttccccatgktggccaagctggtcttgaactcctgacctcaggtgatccgcctgcctcagcctcccaaagtgctgggattacaggaatgagccaccaagcctggcctgtt

SEQ ID NO: 555354 - DNA, 201 bp, Homo sapiens
tcaggtcctcactggttattggccagaggcctcagctcctcctgtgggcctttctataaacagctgagtgtccccggatcatggtgactggttctccccaragccattgaccccaccgagagaacacagaggaagccatggtgtcttttataacctaatctcagcagcaactgagatctctgtaggccacacacacctccc

SEQ ID NO: 555355 - DNA, 201 bp, Homo sapiens
tcagcaacgctcagacggctgacgaggagaggacagaaagcaaaggcacctgatacttcccctgccaccctgcacacctccaagtcagggcaccacaacaygccaccgggagagatgctgagaaaaacccaagaccgctcgggaaatgcaggaaggccgggttgtgaggggttgttgcaatgaaataaatacattccatgg

SEQ ID NO: 555356 - DNA, 201 bp, Homo sapiens
actgaaaacaaggagacctggggtgggtgtggttgggggtcttaaaactaataaaagctggggtcggggggcttttgcagctctggtgacattctctccayggggcacatttgctcagtcactaatccagcttgagtgtccgtgtgttctgcatgtgcaggggtcattctagtgcccggtgtgttggcatcatctttttgc

SEQ ID NO: 555357 - DNA, 201 bp, Homo sapiens
ccgcctctcactggtgcgatggaaggtggcctttctcccaagctggtggataatgaaaaataaagcatcccatctctcggcgttccagcatcctgtcaatytcccttttgctctagaggatgcatgtttatttgaggggatgtggcactgagcccacaggagtaaaagcccagtttgctaggaggtctgcttactgaaaac

SEQ ID NO: 555358 - DNA, 201 bp, Homo sapiens
ctaggtgatgtcagtgggagccatgaagaagggagtggggagggcagttgggcttggaggcggcagcggctgccaggctacggaggaagacccccttcccractgcggggcttgcgctccgggacaaggtggcaggcgctggaggctgccgcagcctgcgtgggtggaggggagctcagctcggttgtgggagcaggcgac

SEQ ID NO: 555359 - DNA, 201 bp, Homo sapiens
agcctgcgtgggtggaggggagctcagctcggttgtgggagcaggcgaccggcactggctggatggacctggaagcctcgctgctgcccactggtcccaaygccagcaacacctctgatggccccgataacctcacttcggcaggtgagttgactgggagccctccctcctctgggctgtgggtggaaaatgggaaggttt

SEQ ID NO: 555360 - DNA, 201 bp, Homo sapiens
cccgcacagccatcgccatctgtctggtcttctttgtgtgctgggcaccctactatgtgctacagctgacccagttgtccatcagccgcccgaccctcacytttgtctacttatacaatgcggccatcagcttgggctatgccaacagctgcctcaacccctttgtgtacatcgtgctctgtgagacgttccgcaaacgct

SEQ ID NO: 555361 - DNA, 201 bp, Homo sapiens
tgtgaggccaaagatttcagtatgaacagaatacattatatccatagaaagtggtaatgagtctaaatgaatcctttttttttttttttttttttttttttgagagacggagtctgtctctgttgcccaggccggagtgcactggcatgatctcagctcactgcaacctctgcttcccgagttcaaacaattctcctgcct

SEQ ID NO: 555362 - DNA, 201 bp, Homo sapiens
gccaccgtgcctggcctgttttgtttttttctgtactctactactcctttcaacactccacctctgatgacatcagatgtgtaggttttgtttttttttttccctcaccaacaaccaattctccaaccatctggtcaccaactggatattctacaatttaactcaattatgacattaattccctggagttagtgcagaccc

SEQ ID NO: 555363 - DNA, 201 bp, Homo sapiens
agctacttgggaagctgaggtgggaggatcgattgagcccaggaggtcgaggctgcaacaagctatgatcatgccattctactccaactggggcgacagarcaagattctgtctcaaaaaataaaactttcatcctcctcactgctggtggtctcttactggtcctttggaaccagccagatgtatatgtcttcctaatta

SEQ ID NO: 555364 - DNA, 201 bp, Homo sapiens
agagaaacagattttgcctcaaatggtaaaagtattaagaatatctgatgtccctgcttttgggctgaagcaggtgttcgagggacaaagatcattcttcyttgtaatactcaaagatacccagtgaaaatgattgtgtcttgtgttttattattataaattcttaatattttctttttttatagctttattttccttatt

SEQ ID NO: 555365 - DNA, 201 bp, Homo sapiens
ccaaggaatgactcaatcttctcaaccttttagggatgcttttcccttagttgctaacctttgaccagactgtcatgtagactcaaagttgaaatttacccgtttttcctaagtcagtttgaaaatttggttgccagaaggggccagtgagatgcttctgctttcccagagcagcatttagcccacactggctgctactca

SEQ ID NO: 555366 - DNA, 201 bp, Homo sapiens
ttgaggagagaggtctgggcaggtggtggcagctgggcaggcagcgacctccttgcctggtgagagcggctgcagggcaaagagtgcattctgccaggacrgggggggccagaacccacagggttggggagcaggcctggtttttgcataattctttttttagttgtggtgagataataaaatttgccattctaatcattt

SEQ ID NO: 555367 - DNA, 201 bp, Homo sapiens
ataagtaggatcagaatggtaatgttagataactaccctaagcaattaactacacttttctgatttttttttttttttttgcgacagagtcatgctttgtytcccagactggagtgcagtggcgcgatctctgcccactgcaacctctgccttcaagcgattctcttgcctcagcctcccgagtagcagggattacaggtg

SEQ ID NO: 555368 - DNA, 201 bp, Homo sapiens
cgctgcctcccgggcggcgctcgccggcgcggcggcaaagactgagacagctccgctgcccgctgaactccatcctcccggcggtcgggcggcggcggctkcggcccatttatttatttattgagacagggtcttgctctgttgcccaggctggagtttagtggggtgatcacagctcactgtagcctggaactcctgggc

SEQ ID NO: 555369 - DNA, 201 bp, Homo sapiens
ccagtttgcagagagaatattttttttcttcttttcttttcttttttttttttttgagatggaatctcactctgtcgcccaggctggagtgcagtggcgcratccctgctcactgcaagctccgcctcctgggttaataccattctcctgcttcagcctcccgagtagctgggactacaggtacccaccaccatgcccagg

SEQ ID NO: 555370 - DNA, 201 bp, Homo sapiens
cttctttcacactacatccttctgtttttagactttttttgcgtttgaaaatgtgttttttgaggtggaatacccaactgacccctcatctctcctctctytctgctgccctgcagtgctacagttgaaactccagcagcgccggacccgggaagaactggtgagccaagggatcatgccgcgtaagtgcctctctctctc

SEQ ID NO: 555371 - DNA, 201 bp, Homo sapiens
ctccatccaatattattctagatgtacccacctggccccagctgcacatgtctttcccttttttttttcttcccccgctttttttttttttttttttttgkgatggagtcttgctctgctgctcaggctggagtgcagtagtgtgatcatggctcactgcaacctcttatcttccaggttcaagcgattctcctgcctcag

SEQ ID NO: 555372 - DNA, 201 bp, Homo sapiens
ccactcttctctgcttggaatatgcttaccgttctgacagtcactcctcttgcccaggaggaaggagagctgctctggagttcccggggcagaaccacgtycactcatatatcttcctgcacccctttctctcccatgggcagagacctcggctgagccatccctccaggccaagcagctgaagctgaagagagccagact

SEQ ID NO: 555373 - DNA, 201 bp, Homo sapiens
tacaaaaaaaatcaaaaaattagctgggtgtggtaacacacacctgtaatcccagctgctcaggaggctgaggtgggaagatcgcttgcgtccaagagttyaaggccgtagtgagctatgattgtgccactgcactctagcctgggtgatagagtgagaccctgtctcaaaaacaaaaacgaggtgggagcagtaagcaca

SEQ ID NO: 555374 - DNA, 201 bp, Homo sapiens
cgagtgatccttctgcctcagcctccggagtagctaggactgcaggtgtgtgccaccacgcctggctaattaaaaaaaataatttttttttttttttttttgtagagactgaggtctcactgtgttgtccgggttggtcttgaactcctggcctcaagtaattctcctaccccggcctcccaaagtgttgggatttacagg

SEQ ID NO: 555375 - DNA, 201 bp, Homo sapiens
agaaagaagctgcagaaatctcagggggtgaccagcccagcccagagacctctcccaaacctcaaggggccaggcaccccctgcagggttgagggcccccsatcctgtattccttcctacctagtggctttcatgaaagctccctaaaagccagtgcctcccatcttccctcctagagtgtgagaggccctggccctatcc

SEQ ID NO: 555376 - DNA, 201 bp, Homo sapiens
ggccccggggcccccgtccgtggtggtgaagcaggaagccttgcagcctgagcccgagccggtccccgccccccagttgcttctggggcctcagggccccrgcctcatcaagggggttgcacctcccaccctcatcaccgactccacagggacccaccttgtcctcaccgtgaccaataagaatgcagacagccctggcct

SEQ ID NO: 555377 - DNA, 201 bp, Homo sapiens
tatatatatatatatatatgtatatatgtgtgtgtgtgtgtgtgtgtgtgtgtgtgtgtgtgtgtgtatattttatcagtcccgtccccagtgcctggcaytgaatgaaggaatgaatgaagacagccagttgtaaagtacagtgtgtgcatgtgtatatgagagagagagtctgacaaactgaaatagataccgctctat

SEQ ID NO: 555378 - DNA, 201 bp, Homo sapiens
aggcggctgctccttgccctcgggccccgcggggcccgtccgctcctccagccgctgcctcccgggcggcgctcgccggcgcggcggcaaagactgagacagctccgctgcccgctgaactccatcctcccggcggtcgggcggcggcggctgcggcccatttatttatttattgagacagggtcttgctctgttgcccag

SEQ ID NO: 555379 - DNA, 201 bp, Homo sapiens
caggcggctgctccttgccctcgggccccgcggggcccgtccgctcctccagccgctgcctcccgggcggcgctcgccggcgcggcggcaaagactgagacagctccgctgcccgctgaactccatcctcccggcggtcgggcggcggcggctgcggcccatttatttatttattgagacagggtcttgctctgttgccca

SEQ ID NO: 555380 - DNA, 201 bp, Homo sapiens
actttgggaggccaaggcaggcggctgctccttgccctcgggccccgcggggcccgtccgctcctccagccgctgcctcccgggcggcgctcgccggcgcsgcggcaaagactgagacagctccgctgcccgctgaactccatcctcccggcggtcgggcggcggcggctgcggcccatttatttatttattgagacaggg

SEQ ID NO: 555381 - DNA, 201 bp, Homo sapiens
attttgccatgttacccaggctggtctcgaactcctgggcttaagtgagccctggcgcccagctgggaagtttgtttgtttcttttttttttctttttgasatagggtctcactctgtcacccaggctggagtgcagtggtgcaatcactgctcactgcagcctcgaactctcaggctcaagtaattatcctgcctcagcc

SEQ ID NO: 555382 - DNA, 201 bp, Homo sapiens
ccgttaattcttacctcctgcatctcagaatacttctaaggtttctaagattgacactttttgtgagagatttggtactcctgaacacttttggcttagastactcagtttcaaaaattgttttcataagctcatcagatggctttaaacttggtgtggtggtagtgggatgaaagtgccacaaacagactcactccttgt

SEQ ID NO: 555383 - DNA, 201 bp, Homo sapiens
cgttgctagtttctatccagtttccaaagtgaaactagattgatcactttcactcagactttgctcttaggcgtttgtactagcctgactccattattgtrcttttcagaacccatgagtgggtgtgattgttataacattttttttaagtttatggaacattctattgcttttatttcttttttgcttttatgtacaaca

SEQ ID NO: 555384 - DNA, 201 bp, Homo sapiens
acggggatcaagccacttgcactctagcctgggtgacagaacgagactcgtcttaaaaaaaaaaatgatgaaccttaaaaacattttccaaatgaaaggasatagacataaaaggccacatattgtgtgattccatttaaatgaaatgtccagaacaggaaatggagagtgactgctgatggatacagggtttatttttgg

SEQ ID NO: 555385 - DNA, 201 bp, Homo sapiens
aatgttttaattatttttttgtgtagcttttatttttgagccagggtctcactctgctgcccagggtggagtgcagtggcataatcacagctcattgcagsctggacctccccaggctcaggtggtcctcccaccacagattcctgagtagctgggactgcaagtgcacatcactaggcccagctaaaaaaatttttttta

SEQ ID NO: 555386 - DNA, 201 bp, Homo sapiens
agaatgagaacctgtgtggctgagtttgagggacaaggttaacctggagggaatttcaaaggtataggcctggtactgtggctcatgcctataatcccagycatgtgagaggctgagacaggaggattgcttgagcccaggagtttgaggctgcaatgagctgtgatcacaccactgtgctccagcctggttaacagatga

SEQ ID NO: 555387 - DNA, 201 bp, Homo sapiens
tattttaattggagtgggggtggagaaatagttgagcttctgtagttaaatgttcaacttccttagcctgttatctataaataccacatataaaaaagccrttggaattctttttcagaaaatttatggagcttacattttgtatatatgtgtttatatgtgtttaatcttcttccccacctctcatcaatgggtcagtaa

SEQ ID NO: 555388 - DNA, 201 bp, Homo sapiens
cgccgcctcactgcagccagcgtggccctaggacaggaggagcttcgggcccagcttcaccctgcggtggggctgaggggtggccatctcctgccctgggsccactggcttcacattctgggctgactcataggggagtaggggtggagtcaccaaaaccagtgctgggacaaagatggggaaggtgtgtgaactttttaa

SEQ ID NO: 555389 - DNA, 201 bp, Homo sapiens
atattattctagatgtacccacctggccccagctgcacatgtctttcccttttttttttcttcccccgctttttttttttttttttttttgtgatggagtyttgctctgctgctcaggctggagtgcagtagtgtgatcatggctcactgcaacctcttatcttccaggttcaagcgattctcctgcctcagcctcttgaa

SEQ ID NO: 555390 - DNA, 201 bp, Homo sapiens
tagaaaatgttgaaaagaaggtactgaagttctgaagtaggggagaggggaggactcagagtaggaaagattacctttggaggaatgaaggaatgggaaaratttaattcctttatcagatatttataaatatttattgtgtgtttactatgtacctttcacatggaggctaatatgtggaggtagacactaaattaggtt

SEQ ID NO: 555391 - DNA, 201 bp, Homo sapiens
cattttggaaggtgtggagattggaattgcttttccatctagatccagttctcactgtgtgtactcactactgcactacccatttccttcctgcctctttyttctcccatttctgttggcagtgggtaagccagagccttaacaccgtacgacagctgtgccatggtagctgccactggtctgagggactctcaaaaagca

SEQ ID NO: 555392 - DNA, 201 bp, Homo sapiens
tctgttgcccagattggagtgcagtagcacgatcttggctcactgcaacctctgcctctggggttcaagcaattctcctgcctcagcttctcgagtagccrggactacaggcacccgccgccacgcccggccaattttttgtgtgttttttagtagagacggggtttcactgtgttgcccaggctggttttgaactcctga

SEQ ID NO: 555393 - DNA, 201 bp, Homo sapiens
agcgaaccactgctcagtgccacctctgcatcccccacccaggtgagtgtgtgcttccagatgcttccccagctccaaggtgctagggctgcgcagagtarggtctctctcctgggccacgggatgcctcctgctctggcacagggaagccagggggatgctaccctagttgcttaggtgctggctgcttgagctccccgg

SEQ ID NO: 555394 - DNA, 201 bp, Homo sapiens
tttttagtagagacgggctttcgtcatgttggccaggttggtcctgaactcctgacctcaggtgatctgcctgcctgagcctcccagagtgctgggattayaggcatgatccactgcacctggccctatcttgaattcttttcttggtcttcgtttctggttcttctgaccagctattgtgtctcagcttctccaacttgt

SEQ ID NO: 555395 - DNA, 201 bp, Homo sapiens
taaaattattcaaaccctaaaagaaatccttttcccattgtttgcccatgctcaattacccttgagaatattgagttcctaatactgagttcaaatttttwtttgaacttgtctcccttatatcttcttccagtctctttggagtagagagtccttagtatcttttttcttcataatattatctccctcatgttaattact

SEQ ID NO: 555396 - DNA, 201 bp, Homo sapiens
agcagcagcagctcttcctccagctgcagatcctcaaccagcagcagcagcagcaccacaactaccaggccatcctgcctgccccgccaaagtaggcaccygctcctcactgcctgcccctgccctccccgagccaccctgagccaggcaggtgccaggtctggtgggggtgaacctcacatctttaaggacccgctggtc

SEQ ID NO: 555397 - DNA, 201 bp, Homo sapiens
gagtgcagtggtgcaatcttggttcactgcaacctccgcctcccagtttcaagcgattgttgtgcctcagcctcccgagtagttggcattacaggtgcccrccaccacacccagctaattttcgtatttttagtagagacgggctttcgtcatgttggccaggttggtcctgaactcctgacctcaggtgatctgcctgcc

SEQ ID NO: 555398 - DNA, 201 bp, Homo sapiens
gaataatgagccatgactaaggagctgtttttatttaaattgtcaagattcgttgtatttccagaggttctgccttgatcaaagtctttaataaccacaastaagtgaaaatgcatttttaacacaaactctgtactgtattccatgaaggtaacttgaagagccattgcttttgtgtggtaactgatcttaccagagtag

SEQ ID NO: 555399 - DNA, 201 bp, Homo sapiens
tgtcgacacactgagcacagcactgagctcctcctttgctatatattggatgcctgtgtgaaagtgtgtgtgtgtgtgtgtgtgtgtatatatatatatayacatacatacatgtatatattttttccccccgagatggagtcttgctctgtcacccaggttggagtacagtgtcacggtctcggctcactgcaaccttcg

SEQ ID NO: 555400 - DNA, 201 bp, Homo sapiens
agatgagggtctggtttgagagtgatctgtcctccatccccactcctattttttttaacaatttttttttttaactaaaattgtaggtttcaagaaaatakcacttgtttgcttttaagtggagtgttacactatcaaagacattaagtctcagtggatacttcatcagtgagtgagtttgggtggggactaaggcaaggg

SEQ ID NO: 555401 - DNA, 201 bp, Homo sapiens
tatgtatgtatgtattaattatggagtcttgccctgtcacccaggctggactgcagtggtgcaatctcggcttacggcaaactccatctctcagtttcaartgcttcagcctcctgagtagctgagattacaggcagctgccatcgtgcccaactaatttttgtatttttagtagagacagggtttcatcatgttggccag

SEQ ID NO: 555402 - DNA, 201 bp, Homo sapiens
gaaccaacttaggaagaactgatatttttataatattatactgtaaatacatattttccacatttatttagatcttttgtaaggcctcccaatgggttttwaaaatttttctctgtgatgatcttacacatctttagttagatttgtttttagacactttgtgtgttttaatgagattgtaaatgttgccttttacaaaaa

SEQ ID NO: 555403 - DNA, 201 bp, Homo sapiens
tttagttattgcctaataattagtctttctgtctgttaggacacgtatctccttacctttttctttttcaaagttgtcttggctattacccttttaatttkccatgattttagaattgccttaccaagttctgccaacaaaaaaaccctttgggatttttacctccaacattttattatgaaaaaatttaaacgtaaagta

SEQ ID NO: 555404 - DNA, 201 bp, Homo sapiens
ctgtgctaaaactacaaaaattagctgggcttggtggcacacacttgtagacccagctactggggagtctgaggtgggaggatcgattgaactaggaggcrgaggttgcagtgaaccgagattgtgccacagctctccagcctggacgacagaatgagactctatctcaaataaacaaacaaacaaacaaataataaataa

SEQ ID NO: 555405 - DNA, 201 bp, Homo sapiens
caaagccttgggcagctctgcccctgtggcttttccacgctgaggttgcatgctgctggtggctctaccattcgggggtctggagagcagtgggtgctagyttactttacaaaaagctttaagaataatggtagtttgccagtgatgtaatttataatattagcatcggcatatactccagtggcatagtttgtccgtgtc

SEQ ID NO: 555406 - DNA, 201 bp, Homo sapiens
gtatggtcgttcccttctttgcatttaactaccccaattcaggatatcaacacattatactttgcctaatgaagtagctttgtaacctccccccacaacckcatatttcttttttccaatccagtctaactccactgccatattaatttgcttgtacttgaaccatgtgattggctaaactgtattgcccttttagaacat

SEQ ID NO: 555407 - DNA, 201 bp, Homo sapiens
tacgtttatggttcccacatcagtactgtgataggacttttttcaaagtaaattcttcctgagtttttcctttggtacctcccccctctgctttttggtaycttttatcttcaaacattttaaagatgaatgtgtccagtaaaataatgttgtgttatagctccttgttccattttgggtgcaggctttgtacaagaaggg

SEQ ID NO: 555408 - DNA, 201 bp, Homo sapiens
tttcagttgattgtttctggatagcagtttcccccctgaagtatgacagcctccagagttggaagccaaatatctgagtgggggaagagaaaagatttttkagaaggcttgtctgcattttggtctcctcaagcatatacacctcattaattttcaaatgcagcactgttttggctggcatataatttctagtccaggggc

SEQ ID NO: 555409 - DNA, 201 bp, Homo sapiens
tgaccagcatggagaaaccccgtctttactaaagatacaaaattagccaggcatggtggcacatgcttgtaatcccagctactagggaggctgaggcaggrgaactgcttgaacctgggaggcagaggttgcggtgagccgagatcgcgccactgcactccagcctgggcaacaagagcaaaattccgtctcaaaaaaaaa

SEQ ID NO: 555410 - DNA, 201 bp, Homo sapiens
agtgcttgtcaagagtacctttaacattcatatttttaccaacattctgtttataaaagtatatgtactctatacaacaacacagattttctctactttasttttcacttcctgtgagccaccacactcagcccttaaagcctttcagtggattgaatcaggcccatccagattatctaggacagcctcctttatttaaag

SEQ ID NO: 555411 - DNA, 201 bp, Homo sapiens
tttttttagatggagtttccctcttgttgcccaggctggagtgcagtggcacaatcttgactcaccgcaacctccagcctctgcctcccgggttcaagcarttgtcctgcctcagcctcccaagtagctgggattataggcgtgcactgccacacctggctattttttttttttttttaaagtagcgacggaatttctcca

SEQ ID NO: 555412 - DNA, 201 bp, Homo sapiens
cctctgcctcccgggttcaagcagttgtcctgcctcagcctcccaagtagctgggattataggcgtgcactgccacacctggctattttttttttttttttaaagtagcgacggaatttctccatgttggttaggctgaactcctgacctcaggtaattcgccctcctcagcttcccaaaatactggaattacaggtgtga

SEQ ID NO: 555413 - DNA, 201 bp, Homo sapiens
cttctttctcatgactttccaagtttagagctcaatcactaaatagttaagataactaattgatcaagttcagtgaaacaaactgtgtttaaagggtcaarcctggtttaaattaggtgtaaagggtgccactgaattttcctttactttggaattgcacctttaaaagagttttcactctgttatacttccctttatagg

SEQ ID NO: 555414 - DNA, 201 bp, Homo sapiens
tctgttgaggtggactgcttaaaaaccacaattccaaaaaatccccacagtttattcctttaactggaaattgttattttccctctgctttttttttttttgataagtcaaacctctaaattgattttcttttgtctttcttccttttcctttttcccctcttcattccatttttgttcctttcccttcacttcttttttt

SEQ ID NO: 555415 - DNA, 201 bp, Homo sapiens
taggcacccgctcctcactgcctgcccctgccctccccgagccaccctgagccaggcaggtgccaggtctggtgggggtgaacctcacatctttaaggacycgctggtctggatgctacagagtggtctgcaggcagggccaccctagcctttgctgggcccttgccccatgcccatctgtacccaatcctgctgcccagg

SEQ ID NO: 555416 - DNA, 201 bp, Homo sapiens
gggttcaagctattctcctgcctcaccctcccgagtagctgggattacaagtgcccgccaccatgcccggctattttttttttttttttttttttttttgkatttttagtagagacagggtttcaccatgttggccaggctggcctagacctcctgacctcacgtgatctgcctgccttggcctcccaaagtgctgggatt

SEQ ID NO: 555417 - DNA, 201 bp, Homo sapiens
ggccagccctggtggcagcaggcctggctccagctgaggtggtggtggccacggtggccagcagtggggtggtgaagtttggcagcacgggctccacgccscccgtgtctcccaccccctcggagcgctcactgctcagcacgggcgatgaaaactccacccccggggacacctttggtgagatggtgacatcacctctga

SEQ ID NO: 555418 - DNA, 201 bp, Homo sapiens
ataattttggacagcttatttttaataaagacctgatcagtgaaaaaaacagtgattgctcatggcaggaagctttttgaacaaatccttcagagctttastatgtaatctctgaattattccaggggaattaggccatattttctcagttgggagagtaaggtattttcctgaagattctgagggcgtttgccattatga

SEQ ID NO: 555419 - DNA, 201 bp, Homo sapiens
tctcaaactcctaacctcgtgacccacccacctcgacctcccaaattgctgggattacaggtatgagccaccgcgcccggctacactggagctttttaaasgcttacctaccatgttggtttgtctcattaatgatgatgttaaatctcatcattggttgagttcctgtctgccagatttatccattgtaaactgtctttt

SEQ ID NO: 555420 - DNA, 201 bp, Homo sapiens
ttgaacccaggaggcagaggttgcagtgagccgagatcacgccactgcactccagcctgggtgacagagcaaggctccatctcaaaaaaaaaaaataatartaataataactaatgcagtgtaatgctgtagttgttatactgtattgtttggggaataatggtaagaacagaaagtctgtaaatgttcagtatagatgca

SEQ ID NO: 555421 - DNA, 201 bp, Homo sapiens
atagcttgaacccaggaggcagaggttgcagtgagccgagatcacgccactgcactccagcctgggtgacagagcaaggctccatctcaaaaaaaaaaaawaataataataataactaatgcagtgtaatgctgtagttgttatactgtattgtttggggaataatggtaagaacagaaagtctgtaaatgttcagtatag

SEQ ID NO: 555422 - DNA, 201 bp, Homo sapiens
ccatttttgggacaatttgaagtttaagccagagtctgaacttggaaacataatttcgcttcctaaaggggtaatctaaggaattccagacttatgccacratttagaatcccttgcattatccctttaaaaggtgggaaaagtaaatttatggtgtaaattgaacaatttagggagatgctaggattatcagcattcact

SEQ ID NO: 555423 - DNA, 201 bp, Homo sapiens
ttgacctcttgacccatagacacatttcaaccttgaatatacactttcctctgagtgtgtgttgctgtgtttggatactcttacaaaattatgacaggttstttttttatggcaagatattttatttccagtattttaaaaatatttgctcaagaatttaggaaaatattcatggttcattttataaagtaggagcatatt

SEQ ID NO: 555424 - DNA, 201 bp, Homo sapiens
attgcaccctccaggctgctggaggattagggtagttgatgcatctgcagtggcccatggggcccagactgcccttctgcctggacccagtgccctgtgtycagctgcccctggcctccctgactcttgactgccttgcaggtggcagagctgaagcaggagctgaagttgcgatcactgcctgtctcgggcaccaaaact

SEQ ID NO: 555425 - DNA, 201 bp, Homo sapiens
ctatgaggaagccatgagccagcagcccaaacagcaggtgaggaaggcgggctaggcctggctagtgttggcagctgccctaggctgctgggctgaggctyctacagccccacccggaggaatagggggcaggcgaagcccagcttcagggtcagagaggccttggggagtgggttgttaggggacgggctccaggagtcc

SEQ ID NO: 555426 - DNA, 201 bp, Homo sapiens
gaaaacattatgctaagtgaaagaagcctgtcataaaggaccacatactgtatgatcccatttatgtgaaatgtccagaataggcaaatccgtagagacasaaagtagattagtagttgctgggggctggaagagaggggaatggagagtgaccacttaataggaatggggtttctttttaaggtaaagaagatgtattag

SEQ ID NO: 555427 - DNA, 201 bp, Homo sapiens
atagcgaaccaaagggctttatgttactgtttcttattgaaatgatttagaaagaagcaatccattactgcgttctttaaaaacacctgcaaagaaaaaaatatctgtagtttagctctagtgtttgtttcagtttttggccaataactattaagaagagcccgtttttaagaaggcttccaaaagtcacatccacttgaa

SEQ ID NO: 555428 - DNA, 201 bp, Homo sapiens
ctcctttagcagtcattgccttcttgaagtggtggaggtccaggtatttctgccagccattcctggtctggttctggttggggaagcgcctgtcaaaaggrgcagtcctgtagttcttgattttggtcttgatgtcttttgccatggtgcagttctcagctcaatggctactctctgctgtcttcttttttcagagacagg

SEQ ID NO: 555429 - DNA, 201 bp, Homo sapiens
tatgtatgtatgtatgtatgtatgtattaattatggagtcttgccctgtcacccaggctggactgcagtggtgcaatctcggcttacggcaaactccatctctcagtttcaagtgcttcagcctcctgagtagctgagattacaggcagctgccatcgtgcccaactaatttttgtatttttagtagagacagggtttcat

SEQ ID NO: 555430 - DNA, 201 bp, Homo sapiens
taggagagcaagaccttgattctaggaggctacaagtcctagccctgctgtgactgcagccttactttctctttatcctgaatcaccacgattcttctgtktgtaatattggcagatggtggatgtggtgatcccaagttcattcttggcaacttattttgaaaaatctgctgttttattcttcctgctatactcccatat

SEQ ID NO: 555431 - DNA, 201 bp, Homo sapiens
ttttctgtctattgaatgaattactgtacttttcctcttggccacttcctttttatggtttagtgagataaacttaatataatttttccttctttgttgamcaaatgttagttctttaaaaataactttgaggtataatttatatactacagaatttacctgtttgaagtgtacagtttatttttagtaattttgtggaga

SEQ ID NO: 555432 - DNA, 201 bp, Homo sapiens
aaactcctttgggaaacagctctctttgggcagggcgcagtggctcattcctgtcatctcagcagtttgggaggctgaggtgggaggattacttgaggctrggaattcgagaccagcctgggcaacacagtaagaccatgtctctacaaaaaatttaattaaaaaaaaaagctggatgtggtggtttgagtgcctttagtt

SEQ ID NO: 555433 - DNA, 201 bp, Homo sapiens
atgctctaaggtatccacttgttagttctagtatattgttggcatgaaggagtgtagactttgaattgctgatcttctgatttcttttcaaaaagaagccrgaagtctggaatttttaaattgtgaattttctttattttaaaatgttgatgaacaatttaaattttaaaaatgtgtatacttagggataaatctgataaa

SEQ ID NO: 555434 - DNA, 201 bp, Homo sapiens
tggcctcaagcagtctacctgccttggcttcccaaagtgttgggattacaggtttgagccaacacacccctcctatttttattttttttttagggacaggkgtctcactctgttgcctaggctgatcttgatctcctgggctcaagtgatcctcccatcttggcctcttaaaatgttgggattacaggcatgagccactga

SEQ ID NO: 555435 - DNA, 201 bp, Homo sapiens
catgcacttgtagtgcatgagcccgggagatcgaggctgcagtgagctgtgtttgtgccactgcactccagcctgggcaacagagtgagactgtctcagaracaaaaaaattaccaaataaaggcatactgtaatatccacatttttagaatttttttttttgtcagtgtttcagtatcttttaaattgtaaatggggtaa

SEQ ID NO: 555436 - DNA, 201 bp, Homo sapiens
actctttgtagtagtaatcaagatgttatagctcagaaaatattctgtgcggtattcattatatgtatctggttgccattcctgaggtggaaaactataayagtaacctcacatcttaagttgctcaattaatacttgccaaataagggccaggcattatggcttacacctgtaatcccagcactttgggaggacaaggtg

SEQ ID NO: 555437 - DNA, 201 bp, Homo sapiens
aaatctctgattttgtacaacagaaaaacgattctgttgacttaaaaactgcccaggtgtttttttgtttgtttcttttgttttgtttttaaagagacagrgtctcactctgtcatccagctaccacacccaggcctgtaccttttatttttttatttttattttttgagagacagagtctcgttctcttgcctagggtag

SEQ ID NO: 555438 - DNA, 201 bp, Homo sapiens
tcatcgtagagtcctggggacaaacctcctggaaaacctgaaaatcatgttgaagctaaacccatatgcaaagaccatgctctgcaacaccaggctttgccaggccagcaaccacaaactccaggtggataaggcagcggcggcggtggcagcagcagcagcagcaccagcaccagcaccagcagcaccagcagcaccagc

SEQ ID NO: 555439 - DNA, 201 bp, Homo sapiens
aaaaattgcagtaatatgtcagctgaggtagcagtcatctgaaggcttgactgaggctggtgaatcctttttcaaggtggctactcatattgctggcaggktggtgcaggctgttggtgggagatctcaattcctcttcatgtgggcctctccgcatgaatgccttcatggcatggcagccagcttgcctcagagcatgta

SEQ ID NO: 555440 - DNA, 201 bp, Homo sapiens
taacctggagggaatttcaaaggtataggcctggtactgtggctcatgcctataatcccagccatgtgagaggctgagacaggaggattgcttgagcccakgagtttgaggctgcaatgagctgtgatcacaccactgtgctccagcctggttaacagatgagacactgtctcaagtaaataaataaattagaaagttaat

SEQ ID NO: 555441 - DNA, 201 bp, Homo sapiens
tacacatgctggtaccattcacaaacagagacatcacccccttgatgtatgtatgtatgtatgtatgtatgtatgtatgtatgtatgtatgtatgtatgtattaattatggagtcttgccctgtcacccaggctggactgcagtggtgcaatctcggcttacggcaaactccatctctcagtttcaagtgcttcagcctcc

SEQ ID NO: 555442 - DNA, 201 bp, Homo sapiens
gtacacatgctggtaccattcacaaacagagacatcacccccttgatgtatgtatgtatgtatgtatgtatgtatgtatgtatgtatgtatgtatgtatgtattaattatggagtcttgccctgtcacccaggctggactgcagtggtgcaatctcggcttacggcaaactccatctctcagtttcaagtgcttcagcctc

SEQ ID NO: 555443 - DNA, 201 bp, Homo sapiens
tgtacacatgctggtaccattcacaaacagagacatcacccccttgatgtatgtatgtatgtatgtatgtatgtatgtatgtatgtatgtatgtatgtatgtattaattatggagtcttgccctgtcacccaggctggactgcagtggtgcaatctcggcttacggcaaactccatctctcagtttcaagtgcttcagcct

SEQ ID NO: 555444 - DNA, 201 bp, Homo sapiens
cacgttgctataaagaactgcctgagactgggtagtttataaaggaaagagatttaattgattcacagttccacagggctggggaggcctcaggaacttayaatcatggtggaaggagttgcaaacatgtccttcttcacatggtggcaggaaggagaagtgcagagcaaaagaggaaaagccccttataaaaccatcaga

SEQ ID NO: 555445 - DNA, 201 bp, Homo sapiens
ttgtacacatgctggtaccattcacaaacagagacatcacccccttgatgtatgtatgtatgtatgtatgtatgtatgtatgtatgtatgtatgtatgtatgtattaattatggagtcttgccctgtcacccaggctggactgcagtggtgcaatctcggcttacggcaaactccatctctcagtttcaagtgcttcagcc

SEQ ID NO: 555446 - DNA, 201 bp, Homo sapiens
acatagttttaaactcataagacgtctggaatgtccccgagttgcaagtttttgagatcttttcagggtcctttctacatcaagccgaagcctgtaacgttaagacttattgtcagtaagaagttagacctacatgttttacttcagaagacccccaaaactccaaatgtcacttacgcagttttactgttgaaaagcagt

SEQ ID NO: 555447 - DNA, 201 bp, Homo sapiens
ctcatatacatttccagccaggaggagggagaagtgcctaaagaataatgtacccaattcttttttttttttttttttttttttttttgagacagagtctygctctgtcgcctaggctggagtgcagtggcacgatcccagctcactgcaagctccacctcctgggttcatgccgttctcctgcctcagcctcccgagtag
